(19) United States
(12) Patent Application Publication
(10) Pub. No.: US 2008/0108056 A1
(43) Pub. Date: May 8, 2008

(54) Method of Detecting the Expression of Aspergillus Gene

(76) Inventor: Masayuki Machida, Ibaraki (JP)

Correspondence Address: FOLEY AND LARDNER LLP;SUITE 500, 3000 K STREET NW, WASHINGTON, DC, 20007, US

(21) Appl. No.: 10/473,247

(22) PCT Filed: Mar. 22, 2002
(86) PCT No.: PCT/IB02/00890

§ 371 Date: Apr. 16, 2004

(30) Foreign Application Priority Data
Mar. 30, 2001 (JP) 2001-98371

(51) Int. Cl. C12Q 1/68; C07H 21/04

(52) U.S. Cl. 435/6; 536/23.1; 536/24.32; 536/24.33

(57) ABSTRACT

The present invention provides a method of detecting the expression of a koji mold gene, and a DNA for specifically assaying the fermentation conditions for a koji mold. Specifically, the DNA for specifically assaying the fermentation conditions for a koji mold of the present invention may be characterized in that the DNA can be expressed in a koji mold when the koji mold is cultured under at least one culture condition selected from the group consisting of nutrient-rich culture, nutrient-deficient culture, solid culture, early germination culture, alkaline culture, high temperature culture and low temperature culture conditions.

### TECHNICAL FIELD

[0001] The present invention relates to a method of detecting the expression of a filamentous fungus gene and a DNA for specifically assaying fermentation conditions for filamentous fungi.

### BACKGROUND ART

[0002] In fermentation production using a koji mold, it is important to monitor in detail the growth states and the expression of various fermentation functions (or genes) and the like of a koji mold. Furthermore, the processes of fermentation production do not always rely exclusively on the function of a sole strain of microorganisms, but may employ a plurality of different strains of microorganisms that are evolutionarily related each other. In addition, the fermentation production processes are passively contaminated with these microorganisms from the natural environment without artificially inoculating these microorganisms. These microorganisms to be contaminated are essential in many cases for fermentation production, and their contamination is originally expected. Thus, there are many cases where contamination itself cannot be prevented. In the meantime, in the natural environment, a number of microorganisms unfavorable for fermentation production are present, of which are biological species that are a very closely related evolutionarily to a koji mold. Accordingly in fermentation production, it is necessary to precisely assay the above items only for a koji mold from among many other microbial species that are difficult to be discriminated from a koji mold.

[0003] In the past, there was no method for directly monitoring these items. Observation by engineers (technical experts) using visual inspection or olfactory inspection via odor, or the like, or observation based on componential analysis or the like of organic acids, esters and the like in products have been performed, and then growth states and the expression of the fermentation functions have been inferred based on past experiences. However, these observations are nonobjective and indirect, so that the results of these observations are difficult to quantify. Thus, it has often been difficult to apply automation and laborsaving measures to be applied to these cases.

### SUMMARY OF THE INVENTION

[0004] The purpose of the present invention is to provide a method of detecting the expression of a koji mold gene, and a DNA for specifically assaying the fermentation conditions for a koji mold.

[0005] As a result of intensive studies to solve the above problems, we have succeeded in detecting the growth state and the fermentation degree of a koji mold using many koji mold genes, and thus completed the present invention.

[0006] That is, the present invention relates to the following DNA (a) or (b):

(a) a DNA comprising a nucleotide sequence represented by any one of SEQ ID NOS: 1 to 6006; and
(b) a DNA hybridizing under stringent conditions to the DNA comprising the nucleotide sequence represented by any one of SEQ ID NOS: 1 to 6006, which can be expressed in filamentous fungi when the filamentous fungi are cultured under at least one culture condition selected from the group consisting of a nutrient-rich culture, nutrient-deficient culture, solid culture, early germination culture, alkaline culture, high temperature culture, low temperature culture and maltose culture conditions.

[0007] Furthermore, the present invention is a DNA that can be expressed in a koji mold when the koji mold is cultured under at least one culture condition selected from the group consisting of a nutrient-rich culture, nutrient-deficient culture, solid culture, early germination culture, alkaline culture, high temperature culture, low temperature culture and maltose culture conditions.

[0008] The above DNA can be expressed when a koji mold is cultured under at least one culture condition selected from the group consisting of the nutrient-rich culture, nutrient-deficient culture, solid culture, early germination culture, alkaline culture, high temperature culture, low temperature culture and maltose culture conditions.

[0009] Examples of such DNAs are as follows:

(a) a DNA that can be expressed in a koji mold when the koji mold is cultured under a nutrient-rich culture condition and comprises a nucleotide sequence represented by any one of the SEQ ID NOS. shown in the 1st row of Table 1;
(b) a DNA that can be expressed in a koji mold when the koji mold is cultured under a nutrient-deficient culture condition and comprises a nucleotide sequence represented by any one of the SEQ ID NOS. shown in the 2nd row of Table 1;
(c) a DNA that can be expressed in a koji mold when the koji mold is cultured under a solid culture condition and comprises a nucleotide sequence represented by any one of the SEQ ID NOS. shown in the 3rd row of Table 1;
(d) a DNA that can be expressed in a koji mold when the koji mold is cultured under an early germination culture condition and comprises a nucleotide sequence represented by any one of the SEQ ID NOS. shown in the 4th row of Table 1;
(e) a DNA that can be expressed in a koji mold when the koji mold is cultured under an alkaline culture condition and comprises a nucleotide sequence represented by any one of the SEQ ID NOS. shown in the 5th row of Table 1;
(f) a DNA that can be expressed in a koji mold when the koji mold is cultured under a high temperature culture condition and comprises a nucleotide sequence represented by any one of SEQ ID NOS. shown in the 6th row of Table 1;
(g) a DNA that can be expressed in a koji mold when the koji mold is cultured under a low temperature culture condition and comprises a nucleotide sequence represented by any one of the SEQ ID NOS. shown in the 7th row of Table 1; and
(h) a DNA that can be expressed in a koji mold when the koji mold is cultured under a maltose culture condition and comprises a nucleotide sequence represented by any one of the SEQ ID NOS. shown in the 8th row of Table 1.

[0010] Furthermore, the present invention is a primer set of at least two primers for amplifying a koji mold gene, wherein the two primers are selected from the group consisting of nucleotide sequences prepared from the whole or partial regions of a plurality of DNAs selected from the above DNAs.

[0011] Furthermore, the present invention is a probe for detecting a filamentous fungus gene, which comprises a nucleotide sequence prepared from the whole or partial regions of a plurality of DNAs selected from the above DNAs.

[0012] Furthermore, the present invention is a method of detecting filamentous fungi, comprising synthesizing cDNA from RNA extracted from filamentous fungi, amplifying the cDNA using the above primer set, and detecting a filamentous fungus gene from the obtained amplification product.

[0013] Furthermore, the present invention is a method of detecting filamentous fungi, comprising hybridizing the above probe to RNA extracted from filamentous fungi, and detecting a filamentous fungus gene from the obtained product.

[0014] Furthermore, the present invention is a method of estimating the growth states or the fermentation function of filamentous fungi using the results obtained by the above detection method as an indicator.

[0015] Examples of filamentous fungi include microorganisms belonging to the genus Aspergillus, the genus Penicillium, the genus Humicola, the genus Trichoderma, the genus Mucor or the genus Fusarium. In addition, an example of a microorganism belonging to the genus Aspergillus is a koji mold (for example, Aspergillus oryzae).

[0016] The present invention will be described in detail as follows.

[0017] 1. Introduction

[0018] The present invention is intended to solve the above problems using the nucleotide sequences of many koji mold genes. Specifically, by the use of a number of hybridization probes or PCR primers having the nucleotide sequences according to the present invention, the amount of a koji mold DNA and the expression amount of koji mold genes can be precisely measured. This makes it possible to directly and precisely measure the growth state or the expression of the fermentation function of a koji mold among many other microbial species present in the fermentation production processes. The present invention include almost all the nucleotide sequences of genes expressed under various representative fermentation production conditions, by which, for example, the expression of the fermentation function of a koji mold during the fermentation production processes can be monitored in detail. Even if microorganisms that are different from those being evolutionarily closely related to a koji mold is present in the fermentation production processes, more precise assay can be performed by analysis using the nucleotide sequences of a large number of genes than when assaying with a smaller number of genes. With this method, not only is it possible to realize automation and laborsaving that have been extremely difficult to achieve thus for, but also improvement of the reliability of fermentation production and standardization of fermentation production can be achieved. Thus, a large decrease in the production costs can be realized.

[0019] A koji mold is extensively used in the fermentation industry. In the present invention, culture conditions are determined in detail to improve the production efficiency. A koji mold-derived DNA is cloned, and then the nucleotide sequence thereof is used for designing and producing a probe for the hybridization or primers for PCR, in order to monitor in detail the fermentation state of a koji mold.

[0020] 2. Cloning of a Koji Mold-Derived DNA

[0021] A koji mold-derived mRNA can be prepared by techniques that are generally employed. For example, products resulting from fermentation by a koji mold is treated with guanidium thiocyanate, phenol reagent or the like to obtain total RNA. Then, poly (A+) RNA (mRNA) is obtained by the affinity column method or the batch method using poly U-sepharose or the like with oligo dT-cellulose or sepharose 2B as a carrier. After a single-stranded cDNA is synthesized using the thus obtained mRNA as a template, oligo dT primers and reverse transcriptase, a double-stranded cDNA is synthesized from the single-stranded cDNA. The thus obtained double-stranded cDNA is incorporated into appropriate cloning vectors to construct recombinant vectors. Escherichia coli or the like is transformed with the obtained recombinant vectors, and then transformants are selected for tetracycline resistance and ampicillin resistance as markers, so that cDNA libraries can be obtained.

[0022] Here, Escherichia coli can be transformed by, for example, a method wherein recombinant vectors are added to competent cells prepared by allowing co-existence with calcium chloride, magnesium chloride or rubidium chloride. When a plasmid is used as a vector, it is required to contain a drug resistance gene, such as a tetracycline resistance gene or an ampicillin resistance gene. In addition, cloning vectors other than plasmids, such as a λ phage, can also be used.

[0023] The nucleotide sequences of the obtained clones are determined. The nucleotide sequence can be determined by any known method, such as the Maxam-Gilbert's chemical modification method or the dideoxynucleotide-chain termination method using the M13 phage. In general, sequencing is performed using an autosequencer (for example, the Autosequencer (model ABI 377) manufactured by Applied Biosystem).

[0024] The all obtained nucleotide sequences are represented by SEQ ID NOS: 1 to 6006. In addition to those having the nucleotide sequences of SEQ ID NOS: 1 to 6006, the DNAs of the present invention also encompass DNAs that hybridize under stringent conditions to the DNAs having the nucleotide sequences of SEQ ID NOS: 1 to 6006, and are (a) DNAs which can be expressed in filamentous fungi when the filamentous fungi are cultured under at least one culture condition selected from the group consisting of a nutrient-rich culture, nutrient-deficient culture, solid culture, early germination culture, alkaline culture, high temperature culture, low temperature culture, and maltose culture conditions, or (b) DNAs which encode proteins having functions identical to those of the expression products of the DNAs. The term “stringent conditions” means conditions wherein specific hybrids are formed, but non-specific hybrids are not formed. Under an example of such conditions, DNA having high homology (of 60% or more and preferably 80% or more) hybridizes. A more specific example of the conditions consists of a sodium concentration of 150 to 900 mM, preferably 600 to 900 mM, and temperature of 60 to 68° C.

[0025] Moreover, the DNAs of the present invention differ in their expression modes depending on the culture conditions. To show the relationship between culture conditions and DNAs to be expressed, and specifically, which DNA is expressed under which culture condition, culture conditions and SEQ ID NOS. are summarized in Table 1.

TABLE 1
DNA expressed under each culture condition (SEQ ID NO:)

| | | | | | | | | | | 4th row | | | | 7th row | |
|---|---|---|---|---|---|---|---|---|---|---|---|---|---|---|---|
| 1st row | | 2nd row | | | | | | | | early | 5th row | 6th row | | low | 8th row |
| nutrient-rich | | nutrient-deficient | | | | | | | | germination | alkaline | high | | temperature | Maltose |
| culture | | culture | | 3rd row | | | | | | culture | culture | temperature | | culture | culture |
| SEQ ID | | SEQ ID | | solid culture | | | | | | SEQ ID | SEQ ID | culture | | SEQ ID | SEQ ID |
| NO: | | NO: | | SEQ ID NO: | | | | | | NO: | NO: | SEQ ID NO: | | NO: | NO: |
| 1 | 502 | 459 | 1270 | 459 | 2086 | 2604 | 3112 | 3626 | 4132 | 818 | 75 | 1791 | 5366 | 321 | 12 |
| 2 | 503 | 740 | 1271 | 741 | 2087 | 2605 | 3113 | 3627 | 4133 | 824 | 80 | 1820 | 5368 | 627 | 59 |
| 3 | 504 | 741 | 1272 | 742 | 2088 | 2606 | 3114 | 3628 | 4134 | 842 | 115 | 2055 | 5369 | 748 | 311 |
| 4 | 506 | 742 | 1273 | 745 | 2089 | 2607 | 3115 | 3629 | 4135 | 892 | 159 | 2292 | 5371 | 781 | 368 |
| 5 | 508 | 743 | 1274 | 773 | 2090 | 2609 | 3116 | 3630 | 4136 | 901 | 287 | 2317 | 5373 | 875 | 435 |
| 6 | 509 | 744 | 1275 | 781 | 2091 | 2610 | 3117 | 3631 | 4137 | 906 | 510 | 2514 | 5374 | 901 | 556 |
| 7 | 512 | 745 | 1277 | 782 | 2092 | 2611 | 3118 | 3632 | 4138 | 994 | 511 | 2536 | 5375 | 943 | 639 |
| 8 | 513 | 746 | 1278 | 788 | 2093 | 2612 | 3119 | 3633 | 4139 | 996 | 516 | 3112 | 5376 | 986 | 745 |
| 9 | 514 | 747 | 1279 | 796 | 2094 | 2613 | 3120 | 3634 | 4140 | 1004 | 523 | 4795 | 5378 | 1042 | 835 |
| 10 | 515 | 748 | 1280 | 800 | 2095 | 2615 | 3121 | 3635 | 4141 | 1025 | 669 | 4796 | 5379 | 1134 | 858 |
| 11 | 517 | 749 | 1281 | 802 | 2096 | 2616 | 3122 | 3636 | 4142 | 1032 | 670 | 4797 | 5380 | 1139 | 875 |
| 13 | 518 | 750 | 1282 | 806 | 2097 | 2617 | 3123 | 3637 | 4143 | 1042 | 671 | 4798 | 5381 | 1189 | 953 |
| 14 | 519 | 751 | 1283 | 818 | 2098 | 2618 | 3124 | 3638 | 4144 | 1048 | 672 | 4799 | 5382 | 1200 | 994 |
| 15 | 520 | 752 | 1284 | 840 | 2099 | 2619 | 3125 | 3639 | 4145 | 1066 | 673 | 4800 | 5383 | 1234 | 998 |
| 16 | 521 | 753 | 1285 | 841 | 2101 | 2620 | 3126 | 3640 | 4146 | 1078 | 674 | 4801 | 5384 | 1239 | 1012 |
| 17 | 522 | 754 | 1286 | 869 | 2103 | 2621 | 3127 | 3641 | 4147 | 1129 | 677 | 4802 | 5385 | 1261 | 1025 |
| 18 | 524 | 755 | 1287 | 874 | 2104 | 2623 | 3128 | 3642 | 4148 | 1139 | 678 | 4803 | 5387 | 1313 | 1065 |
| 19 | 525 | 756 | 1288 | 875 | 2105 | 2624 | 3129 | 3643 | 4149 | 1203 | 679 | 4804 | 5388 | 1373 | 1084 |
| 20 | 526 | 757 | 1289 | 877 | 2106 | 2625 | 3130 | 3644 | 4150 | 1304 | 683 | 4805 | 5389 | 1385 | 1119 |
| 21 | 527 | 758 | 1290 | 900 | 2108 | 2627 | 3131 | 3645 | 4151 | 1358 | 687 | 4806 | 5390 | 1389 | 1179 |
| 22 | 528 | 759 | 1292 | 901 | 2109 | 2628 | 3132 | 3646 | 4152 | 1483 | 688 | 4807 | 5391 | 1396 | 1275 |
| 23 | 529 | 760 | 1293 | 906 | 2110 | 2629 | 3133 | 3647 | 4153 | 1538 | 707 | 4808 | 5392 | 1398 | 1371 |
| 24 | 530 | 762 | 1294 | 907 | 2111 | 2630 | 3134 | 3648 | 4154 | 1559 | 718 | 4809 | 5393 | 1416 | 1377 |
| 25 | 531 | 763 | 1295 | 912 | 2112 | 2631 | 3135 | 3649 | 4155 | 1580 | 727 | 4810 | 5394 | 1423 | 1392 |
| 26 | 532 | 764 | 1296 | 921 | 2113 | 2633 | 3136 | 3651 | 4156 | 1645 | 828 | 4811 | 5397 | 1465 | 1393 |
| 27 | 533 | 765 | 1297 | 928 | 2114 | 2634 | 3137 | 3652 | 4157 | 1795 | 875 | 4812 | 5398 | 1466 | 1398 |
| 28 | 534 | 766 | 1298 | 929 | 2115 | 2635 | 3138 | 3653 | 4158 | 1796 | 883 | 4814 | 5399 | 1467 | 1401 |
| 29 | 535 | 767 | 1299 | 931 | 2116 | 2636 | 3139 | 3655 | 4159 | 1825 | 919 | 4815 | 5400 | 1468 | 1411 |
| 30 | 536 | 768 | 1300 | 935 | 2117 | 2637 | 3140 | 3656 | 4160 | 1887 | 1056 | 4816 | 5401 | 1469 | 1423 |
| 31 | 537 | 769 | 1302 | 947 | 2118 | 2638 | 3141 | 3657 | 4161 | 1933 | 1093 | 4817 | 5402 | 1470 | 1449 |
| 32 | 538 | 770 | 1303 | 951 | 2119 | 2639 | 3142 | 3658 | 4162 | 1939 | 1096 | 4818 | 5403 | 1471 | 1466 |
| 33 | 539 | 771 | 1304 | 967 | 2121 | 2640 | 3143 | 3659 | 4163 | 1947 | 1121 | 4819 | 5404 | 1472 | 1500 |
| 34 | 540 | 772 | 1305 | 980 | 2122 | 2641 | 3144 | 3660 | 4164 | 2054 | 1223 | 4820 | 5405 | 1473 | 1506 |
| 35 | 541 | 773 | 1306 | 981 | 2123 | 2642 | 3145 | 3661 | 4165 | 2065 | 1240 | 4821 | 5406 | 1474 | 1515 |
| 36 | 542 | 774 | 1307 | 982 | 2124 | 2644 | 3146 | 3662 | 4166 | 2102 | 1250 | 4822 | 5407 | 1475 | 1550 |
| 37 | 543 | 776 | 1308 | 986 | 2125 | 2646 | 3147 | 3663 | 4167 | 2136 | 1273 | 4823 | 5408 | 1476 | 1551 |
| 38 | 544 | 777 | 1310 | 994 | 2126 | 2647 | 3148 | 3664 | 4168 | 2153 | 1319 | 4824 | 5412 | 1477 | 1567 |
| 39 | 545 | 778 | 1311 | 995 | 2127 | 2648 | 3149 | 3665 | 4169 | 2182 | 1365 | 4825 | 5413 | 1478 | 1683 |
| 40 | 546 | 779 | 1312 | 1002 | 2128 | 2649 | 3150 | 3666 | 4170 | 2208 | 1406 | 4827 | 5414 | 1479 | 1694 |
| 41 | 547 | 780 | 1313 | 1006 | 2130 | 2650 | 3151 | 3667 | 4171 | 2268 | 1419 | 4828 | 5415 | 1480 | 1897 |
| 42 | 548 | 781 | 1314 | 1029 | 2131 | 2651 | 3152 | 3668 | 4173 | 2284 | 1423 | 4829 | 5416 | 1481 | 1926 |
| 43 | 549 | 782 | 1315 | 1032 | 2132 | 2653 | 3155 | 3669 | 4174 | 2403 | 1529 | 4830 | 5417 | 1482 | 2008 |
| 44 | 550 | 783 | 1316 | 1037 | 2133 | 2654 | 3156 | 3670 | 4175 | 2436 | 1629 | 4831 | 5418 | 1483 | 2033 |
| 45 | 551 | 784 | 1317 | 1039 | 2134 | 2655 | 3157 | 3671 | 4176 | 2507 | 1786 | 4832 | 5420 | 1485 | 2179 |
| 46 | 552 | 785 | 1318 | 1048 | 2135 | 2656 | 3158 | 3672 | 4177 | 2547 | 1825 | 4833 | 5421 | 1486 | 2226 |
| 47 | 553 | 787 | 1319 | 1053 | 2136 | 2657 | 3159 | 3673 | 4178 | 2548 | 1843 | 4834 | 5423 | 1487 | 2281 |
| 48 | 554 | 788 | 1320 | 1064 | 2137 | 2658 | 3160 | 3675 | 4179 | 2555 | 1863 | 4836 | 5425 | 1488 | 2291 |
| 49 | 555 | 789 | 1321 | 1069 | 2138 | 2659 | 3161 | 3676 | 4180 | 2583 | 1895 | 4837 | 5426 | 1489 | 2428 |
| 50 | 557 | 790 | 1322 | 1089 | 2140 | 2660 | 3162 | 3677 | 4181 | 2646 | 1904 | 4838 | 5427 | 1490 | 2489 |
| 51 | 558 | 791 | 1323 | 1093 | 2141 | 2661 | 3163 | 3678 | 4182 | 2722 | 1910 | 4839 | 5428 | 1491 | 2523 |
| 52 | 559 | 792 | 1324 | 1094 | 2142 | 2662 | 3164 | 3679 | 4183 | 2724 | 1925 | 4840 | 5429 | 1492 | 2586 |
| 53 | 560 | 793 | 1325 | 1097 | 2143 | 2663 | 3165 | 3680 | 4184 | 2729 | 1943 | 4841 | 5430 | 1493 | 2642 |
| 54 | 561 | 794 | 1326 | 1102 | 2144 | 2664 | 3166 | 3681 | 4185 | 2786 | 1947 | 4842 | 5432 | 1494 | 2740 |
| 55 | 562 | 795 | 1327 | 1112 | 2145 | 2665 | 3167 | 3682 | 4262 | 2811 | 2065 | 4843 | 5433 | 1495 | 2746 |
| 57 | 563 | 796 | 1328 | 1120 | 2146 | 2666 | 3168 | 3683 | 4294 | 2852 | 2115 | 4844 | 5434 | 1496 | 2783 |
| 58 | 564 | 797 | 1329 | 1124 | 2147 | 2667 | 3169 | 3684 | 4326 | 2906 | 2136 | 4845 | 5435 | 1498 | 2801 |
| 60 | 565 | 798 | 1331 | 1128 | 2148 | 2668 | 3170 | 3685 | 4798 | 2910 | 2148 | 4846 | 5436 | 1499 | 2817 |
| 61 | 566 | 799 | 1332 | 1139 | 2149 | 2669 | 3171 | 3686 | 4801 | 2912 | 2173 | 4848 | 5437 | 1500 | 2819 |
| 62 | 567 | 800 | 1334 | 1142 | 2150 | 2670 | 3173 | 3687 | 4802 | 2980 | 2250 | 4850 | 5438 | 1501 | 2849 |
| 63 | 568 | 801 | 1335 | 1171 | 2151 | 2671 | 3174 | 3688 | 4806 | 3002 | 2295 | 4851 | 5439 | 1502 | 2867 |
| 64 | 569 | 802 | 1336 | 1189 | 2152 | 2672 | 3175 | 3689 | 4808 | 3022 | 2407 | 4852 | 5440 | 1503 | 2873 |
| 65 | 570 | 803 | 1338 | 1194 | 2153 | 2673 | 3176 | 3690 | 4811 | 3104 | 2479 | 4853 | 5441 | 1504 | 2937 |
| 66 | 571 | 804 | 1339 | 1199 | 2154 | 2674 | 3177 | 3691 | 4821 | 3139 | 2574 | 4854 | 5442 | 1505 | 2941 |
| 67 | 572 | 806 | 1340 | 1201 | 2156 | 2675 | 3178 | 3692 | 4825 | 3232 | 2596 | 4855 | 5443 | 1506 | 2970 |
| 68 | 573 | 807 | 1341 | 1203 | 2157 | 2676 | 3179 | 3693 | 4834 | 3241 | 2602 | 4856 | 5444 | 1507 | 3001 |
| 69 | 574 | 808 | 1342 | 1212 | 2158 | 2677 | 3180 | 3694 | 4836 | 3375 | 2622 | 4857 | 5445 | 1508 | 3015 |
| 70 | 575 | 809 | 1343 | 1216 | 2159 | 2678 | 3181 | 3695 | 4843 | 3388 | 2676 | 4858 | 5446 | 1509 | 3022 |
| 71 | 576 | 810 | 1344 | 1219 | 2160 | 2679 | 3182 | 3696 | 4847 | 3427 | 2684 | 4861 | 5447 | 1510 | 3143 |
| 72 | 577 | 811 | 1346 | 1228 | 2161 | 2680 | 3183 | 3697 | 4848 | 3512 | 2739 | 4862 | 5448 | 1511 | 3310 |
| 73 | 578 | 812 | 1347 | 1234 | 2163 | 2681 | 3184 | 3698 | 4850 | 3669 | 2782 | 4863 | 5449 | 1512 | 3367 |
| 74 | 580 | 814 | 1348 | 1237 | 2164 | 2682 | 3185 | 3699 | 4864 | 3683 | 2788 | 4864 | 5450 | 1513 | 3376 |
| 76 | 581 | 815 | 1349 | 1238 | 2165 | 2683 | 3186 | 3700 | 4867 | 3695 | 2836 | 4866 | 5452 | 1514 | 3480 |
| 77 | 582 | 817 | 1350 | 1239 | 2167 | 2685 | 3187 | 3701 | 4878 | 3798 | 2932 | 4867 | 5453 | 1515 | 3512 |
| 78 | 583 | 818 | 1351 | 1244 | 2168 | 2686 | 3188 | 3702 | 4887 | 3807 | 2947 | 4868 | 5454 | 1516 | 3522 |
| 79 | 584 | 819 | 1352 | 1248 | 2169 | 2687 | 3189 | 3703 | 4889 | 3819 | 3073 | 4869 | 5455 | 1517 | 3531 |
| 81 | 585 | 821 | 1354 | 1261 | 2170 | 2688 | 3191 | 3704 | 4890 | 3847 | 3172 | 4870 | 5456 | 1518 | 3622 |
| 82 | 586 | 822 | 1355 | 1267 | 2171 | 2689 | 3192 | 3705 | 4894 | 3862 | 3183 | 4871 | 5458 | 1519 | 3665 |
| 83 | 587 | 823 | 1356 | 1281 | 2172 | 2690 | 3193 | 3706 | 4897 | 3982 | 3194 | 4872 | 5459 | 1520 | 3694 |
| 84 | 588 | 824 | 1358 | 1292 | 2174 | 2691 | 3196 | 3707 | 4905 | 4116 | 3220 | 4876 | 5460 | 1521 | 3697 |
| 85 | 589 | 825 | 1359 | 1298 | 2175 | 2692 | 3197 | 3708 | 4914 | 4158 | 3237 | 4877 | 5461 | 1522 | 3727 |
| 86 | 590 | 826 | 1360 | 1308 | 2176 | 2693 | 3198 | 3709 | 4919 | 4186 | 3307 | 4878 | 5462 | 1523 | 3769 |
| 87 | 591 | 827 | 1361 | 1317 | 2177 | 2694 | 3199 | 3710 | 4933 | 4187 | 3434 | 4879 | 5464 | 1524 | 3783 |
| 88 | 592 | 829 | 1362 | 1319 | 2178 | 2696 | 3200 | 3711 | 4937 | 4188 | 3437 | 4880 | 5465 | 1525 | 3793 |
| 89 | 593 | 830 | 1363 | 1334 | 2179 | 2697 | 3201 | 3712 | 4940 | 4189 | 3512 | 4881 | 5466 | 1526 | 3817 |
| 90 | 594 | 831 | 1364 | 1346 | 2180 | 2698 | 3202 | 3713 | 4947 | 4190 | 3590 | 4882 | 5468 | 1527 | 3839 |
| 91 | 595 | 832 | 1366 | 1352 | 2181 | 2699 | 3203 | 3714 | 4950 | 4191 | 3602 | 4883 | 5469 | 1528 | 3857 |
| 92 | 597 | 833 | 1367 | 1364 | 2182 | 2700 | 3204 | 3715 | 4953 | 4192 | 3610 | 4884 | 5470 | 1529 | 3862 |
| 93 | 598 | 834 | 1368 | 1367 | 2183 | 2701 | 3205 | 3716 | 4954 | 4193 | 3803 | 4885 | 5471 | 1530 | 3912 |
| 94 | 599 | 835 | 1369 | 1369 | 2184 | 2702 | 3206 | 3717 | 4968 | 4194 | 3996 | 4887 | 5472 | 1532 | 3914 |
| 95 | 600 | 836 | 1370 | 1384 | 2185 | 2703 | 3207 | 3718 | 4969 | 4195 | 4047 | 4888 | 5473 | 1533 | 3942 |
| 96 | 601 | 837 | 1371 | 1388 | 2186 | 2704 | 3208 | 3719 | 4973 | 4196 | 4100 | 4889 | 5475 | 1534 | 3950 |
| 97 | 602 | 838 | 1372 | 1390 | 2187 | 2705 | 3210 | 3720 | 4975 | 4197 | 4101 | 4890 | 5477 | 1535 | 3994 |
| 98 | 603 | 840 | 1373 | 1408 | 2188 | 2706 | 3211 | 3721 | 4987 | 4198 | 4646 | 4891 | 5478 | 1536 | 4028 |
| 99 | 604 | 841 | 1375 | 1410 | 2189 | 2707 | 3212 | 3722 | 4992 | 4199 | 4813 | 4892 | 5479 | 1537 | 4066 |
| 100 | 605 | 842 | 1376 | 1413 | 2190 | 2708 | 3213 | 3723 | 4993 | 4200 | 4847 | 4893 | 5480 | 1538 | 4303 |
| 101 | 606 | 844 | 1377 | 1415 | 2191 | 2709 | 3214 | 3724 | 4998 | 4201 | 4873 | 4894 | 5482 | 1539 | 4326 |
| 102 | 607 | 845 | 1378 | 1423 | 2192 | 2710 | 3215 | 3725 | 5003 | 4202 | 4875 | 4895 | 5483 | 1540 | 4329 |
| 103 | 608 | 846 | 1379 | 1467 | 2193 | 2711 | 3216 | 3726 | 5005 | 4203 | 4950 | 4896 | 5484 | 1541 | 4384 |
| 104 | 609 | 847 | 1380 | 1478 | 2194 | 2712 | 3218 | 3727 | 5009 | 4204 | 4996 | 4897 | 5485 | 1542 | 4503 |
| 105 | 610 | 848 | 1381 | 1483 | 2195 | 2713 | 3219 | 3728 | 5010 | 4205 | 5014 | 4898 | 5486 | 1543 | 4504 |
| 106 | 611 | 849 | 1382 | 1494 | 2196 | 2714 | 3220 | 3729 | 5014 | 4206 | 5035 | 4899 | 5487 | 1544 | 4505 |
| 107 | 612 | 852 | 1383 | 1500 | 2197 | 2715 | 3221 | 3730 | 5021 | 4207 | 5037 | 4900 | 5488 | 1545 | 4506 |
| 108 | 613 | 853 | 1384 | 1503 | 2199 | 2716 | 3222 | 3731 | 5026 | 4208 | 5087 | 4902 | 5489 | 1546 | 4507 |
| 109 | 614 | 854 | 1385 | 1508 | 2200 | 2717 | 3223 | 3732 | 5040 | 4209 | 5113 | 4904 | 5490 | 1547 | 4508 |
| 110 | 615 | 855 | 1386 | 1515 | 2202 | 2718 | 3225 | 3733 | 5043 | 4210 | 5138 | 4905 | 5492 | 1548 | 4509 |
| 111 | 616 | 856 | 1387 | 1527 | 2203 | 2719 | 3226 | 3734 | 5048 | 4211 | 5140 | 4906 | 5493 | 1549 | 4510 |
| 112 | 617 | 857 | 1388 | 1533 | 2204 | 2720 | 3227 | 3735 | 5056 | 4212 | 5141 | 4907 | 5494 | 1550 | 4511 |
| 113 | 618 | 858 | 1389 | 1535 | 2205 | 2721 | 3228 | 3736 | 5064 | 4213 | 5178 | 4908 | 5496 | 1551 | 4512 |
| 114 | 619 | 859 | 1390 | 1542 | 2206 | 2722 | 3229 | 3737 | 5066 | 4214 | 5181 | 4909 | 5497 | 1552 | 4513 |
| 116 | 620 | 860 | 1391 | 1550 | 2207 | 2723 | 3230 | 3738 | 5071 | 4215 | 5304 | 4910 | 5498 | 1553 | 4514 |
| 117 | 621 | 861 | 1392 | 1552 | 2208 | 2724 | 3231 | 3739 | 5073 | 4216 | 5323 | 4911 | 5499 | 1554 | 4515 |
| 118 | 622 | 862 | 1393 | 1559 | 2209 | 2725 | 3232 | 3740 | 5075 | 4217 | 5346 | 4913 | 5500 | 1555 | 4516 |
| 119 | 624 | 863 | 1394 | 1565 | 2210 | 2726 | 3233 | 3741 | 5077 | 4218 | 5349 | 4914 | 5501 | 1556 | 4517 |
| 120 | 625 | 864 | 1395 | 1576 | 2211 | 2727 | 3234 | 3742 | 5080 | 4219 | 5350 | 4915 | 5502 | 1557 | 4518 |
| 121 | 626 | 865 | 1396 | 1579 | 2212 | 2728 | 3235 | 3743 | 5083 | 4220 | 5354 | 4916 | 5503 | 1558 | 4519 |
| 122 | 628 | 866 | 1397 | 1580 | 2213 | 2729 | 3236 | 3744 | 5087 | 4221 | 5362 | 4917 | 5504 | 1559 | 4520 |
| 123 | 630 | 867 | 1398 | 1581 | 2214 | 2730 | 3237 | 3745 | 5088 | 4222 | 5587 | 4918 | 5505 | 1560 | 4521 |
| 124 | 631 | 868 | 1399 | 1589 | 2215 | 2731 | 3238 | 3746 | 5092 | 4223 | 5597 | 4919 | 5506 | 1561 | 4522 |
| 125 | 632 | 869 | 1400 | 1604 | 2216 | 2732 | 3239 | 3747 | 5093 | 4224 | 5645 | 4920 | 5507 | 1562 | 4523 |
| 126 | 633 | 870 | 1402 | 1615 | 2217 | 2733 | 3240 | 3748 | 5097 | 4225 | 5668 | 4921 | 5508 | 1563 | 4524 |
| 127 | 634 | 871 | 1403 | 1624 | 2218 | 2734 | 3241 | 3749 | 5099 | 4226 | 5716 | 4922 | 5509 | 1564 | 4525 |
| 128 | 635 | 872 | 1404 | 1629 | 2219 | 2735 | 3242 | 3750 | 5102 | 4227 | 5717 | 4923 | 5511 | 1565 | 4526 |
| 129 | 636 | 873 | 1405 | 1644 | 2220 | 2736 | 3243 | 3751 | 5103 | 4228 | 5718 | 4924 | 5512 | 1566 | 4527 |
| 130 | 637 | 874 | 1407 | 1645 | 2221 | 2737 | 3244 | 3752 | 5112 | 4229 | 5719 | 4925 | 5513 | 1567 | 4528 |
| 131 | 647 | 875 | 1408 | 1646 | 2222 | 2738 | 3245 | 3753 | 5113 | 4230 | 5720 | 4926 | 5514 | 1568 | 4529 |
| 132 | 648 | 876 | 1409 | 1651 | 2223 | 2739 | 3246 | 3754 | 5115 | 4231 | 5721 | 4927 | 5515 | 1569 | 4530 |
| 133 | 649 | 877 | 1410 | 1652 | 2224 | 2740 | 3248 | 3755 | 5119 | 4232 | 5722 | 4928 | 5517 | 1570 | 4531 |
| 134 | 650 | 878 | 1411 | 1665 | 2225 | 2741 | 3249 | 3756 | 5124 | 4233 | 5723 | 4929 | 5518 | 1571 | 4532 |
| 135 | 651 | 879 | 1412 | 1693 | 2226 | 2742 | 3250 | 3757 | 5127 | 4234 | 5724 | 4930 | 5519 | 1572 | 4533 |
| 136 | 652 | 880 | 1413 | 1696 | 2227 | 2743 | 3251 | 3758 | 5128 | 4235 | 5725 | 4931 | 5520 | 1574 | 4534 |
| 137 | 653 | 881 | 1414 | 1716 | 2228 | 2744 | 3252 | 3759 | 5129 | 4236 | 5726 | 4932 | 5521 | 1575 | 4535 |
| 138 | 654 | 882 | 1415 | 1717 | 2229 | 2745 | 3254 | 3760 | 5143 | 4237 | 5727 | 4933 | 5522 | 1576 | 4536 |
| 139 | 655 | 884 | 1416 | 1718 | 2230 | 2746 | 3255 | 3761 | 5148 | 4238 | 5728 | 4934 | 5523 | 1577 | 4537 |
| 140 | 656 | 886 | 1417 | 1719 | 2231 | 2747 | 3256 | 3762 | 5164 | 4239 | 5729 | 4935 | 5524 | 1578 | 4538 |
| 142 | 657 | 887 | 1418 | 1720 | 2232 | 2748 | 3257 | 3763 | 5165 | 4240 | 5730 | 4936 | 5525 | 1579 | 4539 |
| 143 | 658 | 888 | 1419 | 1721 | 2233 | 2749 | 3258 | 3764 | 5168 | 4241 | 5731 | 4937 | 5526 | 1580 | 4540 |
| 144 | 659 | 889 | 1420 | 1722 | 2234 | 2750 | 3259 | 3765 | 5179 | 4242 | 5732 | 4938 | 5527 | 1581 | 4541 |
| 145 | 660 | 890 | 1421 | 1723 | 2235 | 2751 | 3260 | 3766 | 5190 | 4243 | 5733 | 4939 | 5528 | 1582 | 4542 |
| 146 | 661 | 891 | 1422 | 1724 | 2236 | 2752 | 3261 | 3767 | 5192 | 4244 | 5734 | 4940 | 5529 | 1583 | 4543 |
| 147 | 662 | 892 | 1423 | 1725 | 2237 | 2753 | 3262 | 3768 | 5196 | 4245 | 5735 | 4943 | 5530 | 1584 | 4544 |
| 148 | 663 | 893 | 1424 | 1726 | 2239 | 2755 | 3263 | 3769 | 5197 | 4246 | 5736 | 4945 | 5531 | 1585 | 4545 |
| 149 | 664 | 894 | 1425 | 1727 | 2240 | 2756 | 3264 | 3770 | 5198 | 4247 | 5737 | 4946 | 5532 | 1586 | 4546 |
| 150 | 665 | 895 | 1426 | 1728 | 2241 | 2757 | 3265 | 3771 | 5203 | 4248 | 5738 | 4947 | 5533 | 1587 | 4547 |
| 151 | 666 | 896 | 1427 | 1729 | 2242 | 2758 | 3266 | 3772 | 5208 | 4249 | 5739 | 4950 | 5534 | 1588 | 4548 |
| 152 | 667 | 897 | 1428 | 1730 | 2243 | 2759 | 3267 | 3773 | 5214 | 4250 | 5740 | 4951 | 5535 | 1589 | 4549 |
| 153 | 668 | 898 | 1429 | 1731 | 2244 | 2760 | 3268 | 3774 | 5218 | 4251 | 5741 | 4953 | 5536 | 1590 | 4550 |
| 154 | 638 | 899 | 1430 | 1732 | 2245 | 2761 | 3269 | 3775 | 5224 | 4252 | 5742 | 4954 | 5537 | 1591 | 4551 |
| 155 | 640 | 900 | 1431 | 1733 | 2246 | 2762 | 3270 | 3776 | 5228 | 4253 | 5743 | 4955 | 5538 | 1592 | 4552 |
| 156 | 641 | 901 | 1432 | 1734 | 2247 | 2763 | 3271 | 3777 | 5231 | 4254 | 5744 | 4956 | 5539 | 1593 | 4553 |
| 157 | 642 | 903 | 1433 | 1735 | 2248 | 2764 | 3272 | 3778 | 5244 | 4255 | 5745 | 4957 | 5540 | 1594 | 4554 |
| 158 | 643 | 904 | 1434 | 1736 | 2249 | 2765 | 3273 | 3779 | 5246 | 4256 | 5746 | 4959 | 5541 | 1595 | 4555 |
| 160 | 644 | 905 | 1435 | 1737 | 2250 | 2766 | 3274 | 3780 | 5247 | 4257 | 5747 | 4960 | 5542 | 1596 | 4556 |
| 161 | 645 | 906 | 1436 | 1738 | 2251 | 2767 | 3275 | 3781 | 5251 | 4258 | 5748 | 4961 | 5543 | 1597 | 4557 |
| 162 | 646 | 907 | 1437 | 1739 | 2253 | 2768 | 3276 | 3782 | 5270 | 4259 | 5749 | 4963 | 5544 | 1598 | 4558 |
| 163 | 675 | 909 | 1438 | 1740 | 2254 | 2769 | 3277 | 3783 | 5272 | 4260 | 5750 | 4966 | 5545 | 1599 | 4559 |
| 164 | 676 | 910 | 1439 | 1742 | 2255 | 2770 | 3279 | 3784 | 5277 | 4261 | 5751 | 4967 | 5546 | 1600 | 4560 |
| 165 | 680 | 911 | 1440 | 1743 | 2256 | 2771 | 3280 | 3785 | 5281 | 4262 | 5752 | 4968 | 5547 | 1601 | 4561 |
| 166 | 681 | 912 | 1441 | 1744 | 2257 | 2772 | 3281 | 3786 | 5291 | 4263 | 5753 | 4969 | 5548 | 1602 | 4562 |
| 167 | 682 | 914 | 1442 | 1745 | 2258 | 2773 | 3282 | 3787 | 5293 | 4264 | 5754 | 4971 | 5549 | 1603 | 4563 |
| 168 | 684 | 915 | 1443 | 1746 | 2259 | 2774 | 3283 | 3788 | 5294 | 4265 | 5755 | 4972 | 5551 | 1604 | 4564 |
| 169 | 685 | 916 | 1444 | 1747 | 2260 | 2775 | 3285 | 3789 | 5310 | 4266 | 5756 | 4973 | 5552 | 1605 | 4565 |
| 170 | 686 | 917 | 1445 | 1748 | 2261 | 2776 | 3286 | 3790 | 5316 | 4267 | 5757 | 4974 | 5554 | 1606 | 4566 |
| 171 | 689 | 918 | 1446 | 1749 | 2262 | 2777 | 3287 | 3791 | 5318 | 4268 | 5758 | 4975 | 5555 | 1607 | 4567 |
| 172 | 690 | 919 | 1447 | 1750 | 2263 | 2778 | 3288 | 3792 | 5329 | 4269 | 5759 | 4976 | 5556 | 1608 | 4568 |
| 173 | 691 | 920 | 1448 | 1751 | 2264 | 2779 | 3289 | 3793 | 5335 | 4270 | 5760 | 4977 | 5557 | 1609 | 4569 |
| 174 | 692 | 921 | 1449 | 1752 | 2265 | 2780 | 3290 | 3794 | 5337 | 4271 | 5761 | 4978 | 5558 | 1610 | 4570 |
| 175 | 693 | 922 | 1450 | 1753 | 2266 | 2781 | 3291 | 3795 | 5341 | 4272 | 5762 | 4979 | 5560 | 1611 | 4571 |
| 176 | 694 | 926 | 1451 | 1754 | 2267 | 2783 | 3292 | 3796 | 5344 | 4273 | 5763 | 4981 | 5561 | 1612 | 4572 |
| 177 | 695 | 927 | 1452 | 1755 | 2268 | 2784 | 3293 | 3797 | 5346 | 4274 | 5764 | 4982 | 5562 | 1613 | 4573 |
| 178 | 696 | 928 | 1453 | 1757 | 2269 | 2785 | 3294 | 3798 | 5348 | 4275 | 5765 | 4985 | 5563 | 1614 | 4574 |
| 179 | 697 | 929 | 1454 | 1758 | 2270 | 2786 | 3295 | 3799 | 5350 | 4276 | 5766 | 4986 | 5564 | 1615 | 4575 |
| 180 | 698 | 930 | 1455 | 1759 | 2271 | 2787 | 3296 | 3800 | 5357 | 4277 | 5767 | 4987 | 5565 | 1616 | 4576 |
| 181 | 699 | 931 | 1456 | 1760 | 2273 | 2788 | 3297 | 3801 | 5366 | 4278 | 5768 | 4989 | 5566 | 1617 | 4577 |
| 182 | 700 | 932 | 1457 | 1761 | 2274 | 2789 | 3298 | 3802 | 5374 | 4279 | 5769 | 4992 | 5567 | 1618 | 4578 |
| 183 | 701 | 933 | 1458 | 1762 | 2275 | 2790 | 3299 | 3803 | 5382 | 4280 | 5770 | 4993 | 5568 | 1619 | 4579 |
| 184 | 702 | 934 | 1459 | 1763 | 2276 | 2791 | 3300 | 3804 | 5383 | 4281 | 5771 | 4994 | 5569 | 1620 | 4580 |
| 185 | 703 | 935 | 1460 | 1764 | 2277 | 2793 | 3301 | 3805 | 5390 | 4282 | 5772 | 4995 | 5570 | 1621 | 4581 |
| 186 | 704 | 936 | 1461 | 1765 | 2278 | 2794 | 3302 | 3806 | 5393 | 4283 | 5773 | 4998 | 5571 | 1622 | 4582 |
| 187 | 705 | 937 | 1462 | 1766 | 2279 | 2795 | 3303 | 3807 | 5403 | 4284 | 5774 | 4999 | 5572 | 1623 | 4583 |
| 188 | 706 | 938 | 1463 | 1767 | 2280 | 2796 | 3304 | 3809 | 5406 | 4285 | 5775 | 5000 | 5573 | 1624 | 4584 |
| 189 | 708 | 939 | 1464 | 1768 | 2281 | 2797 | 3305 | 3810 | 5408 | 4286 | 5776 | 5001 | 5574 | 1625 | 4585 |
| 190 | 709 | 940 | 1500 | 1769 | 2282 | 2798 | 3306 | 3811 | 5416 | 4287 | 5777 | 5002 | 5575 | 1626 | 4586 |
| 191 | 710 | 941 | 1535 | 1770 | 2283 | 2799 | 3308 | 3812 | 5417 | 4288 | 5778 | 5003 | 5576 | 1628 | 4587 |
| 192 | 711 | 942 | 1559 | 1771 | 2284 | 2800 | 3309 | 3813 | 5433 | 4289 | 5779 | 5004 | 5577 | 1629 | 4588 |
| 193 | 712 | 943 | 1565 | 1772 | 2285 | 2801 | 3310 | 3814 | 5435 | 4290 | 5780 | 5005 | 5578 | 1630 | 4589 |
| 194 | 713 | 944 | 1576 | 1773 | 2286 | 2802 | 3311 | 3815 | 5436 | 4291 | 5781 | 5007 | 5580 | 1632 | 4590 |
| 195 | 714 | 945 | 1622 | 1774 | 2287 | 2803 | 3312 | 3816 | 5438 | 4292 | 5782 | 5008 | 5581 | 1633 | 4591 |
| 196 | 715 | 946 | 1624 | 1775 | 2288 | 2804 | 3313 | 3819 | 5439 | 4293 | 5783 | 5009 | 5582 | 1634 | 4592 |
| 197 | 716 | 947 | 1645 | 1776 | 2290 | 2805 | 3314 | 3820 | 5440 | 4294 | 5784 | 5010 | 5583 | 1635 | 4593 |
| 198 | 717 | 948 | 1651 | 1777 | 2291 | 2806 | 3315 | 3821 | 5443 | 4295 | 5785 | 5011 | 5584 | 1636 | 4594 |
| 199 | 719 | 949 | 1709 | 1778 | 2292 | 2808 | 3316 | 3822 | 5444 | 4296 | 5787 | 5012 | 5588 | 1637 | 4595 |
| 200 | 720 | 950 | 1721 | 1779 | 2293 | 2809 | 3317 | 3823 | 5445 | 4297 | 5788 | 5015 | 5589 | 1639 | 4596 |
| 201 | 721 | 951 | 1764 | 1780 | 2294 | 2810 | 3318 | 3825 | 5449 | 4298 | 5789 | 5017 | 5590 | 1640 | 4597 |
| 202 | 722 | 952 | 1792 | 1781 | 2295 | 2811 | 3319 | 3826 | 5450 | 4299 | 5790 | 5018 | 5591 | 1641 | 4598 |
| 203 | 723 | 953 | 1795 | 1782 | 2296 | 2812 | 3320 | 3827 | 5453 | 4300 | 5791 | 5019 | 5592 | 1642 | 4599 |
| 204 | 724 | 954 | 1827 | 1783 | 2297 | 2813 | 3321 | 3828 | 5458 | 4301 | 5792 | 5020 | 5593 | 1643 | 4600 |
| 205 | 725 | 955 | 1875 | 1784 | 2298 | 2814 | 3322 | 3829 | 5464 | 4302 | 5793 | 5021 | 5594 | 1644 | 4601 |
| 206 | 726 | 956 | 1880 | 1785 | 2299 | 2815 | 3323 | 3831 | 5471 | 4303 | 5794 | 5022 | 5595 | 1645 | 4602 |
| 207 | 728 | 957 | 1925 | 1786 | 2300 | 2816 | 3324 | 3832 | 5472 | 4304 | 5795 | 5025 | 5596 | 1646 | 4603 |
| 208 | 729 | 958 | 1926 | 1787 | 2301 | 2817 | 3325 | 3833 | 5478 | 4305 | 5796 | 5026 | 5599 | 1647 | 4604 |
| 209 | 730 | 959 | 2039 | 1788 | 2302 | 2818 | 3326 | 3834 | 5479 | 4306 | 5797 | 5027 | 5600 | 1648 | 4605 |
| 210 | 731 | 960 | 2103 | 1789 | 2303 | 2819 | 3327 | 3835 | 5488 | 4307 | 5798 | 5028 | 5601 | 1649 | 4606 |
| 211 | 732 | 962 | 2115 | 1790 | 2304 | 2820 | 3329 | 3836 | 5489 | 4308 | 5799 | 5029 | 5602 | 1650 | 4607 |
| 212 | 733 | 963 | 2206 | 1791 | 2305 | 2821 | 3330 | 3837 | 5498 | 4309 | 5800 | 5030 | 5603 | 1651 | 4608 |
| 213 | 734 | 964 | 2221 | 1792 | 2306 | 2822 | 3331 | 3838 | 5499 | 4310 | 5801 | 5031 | 5604 | 1652 | 4609 |
| 214 | 735 | 965 | 2231 | 1793 | 2307 | 2823 | 3332 | 3839 | 5500 | 4311 | 5802 | 5032 | 5605 | 1653 | 4610 |
| 215 | 736 | 966 | 2233 | 1794 | 2308 | 2824 | 3333 | 3840 | 5504 | 4312 | 5803 | 5033 | 5606 | 1654 | 4611 |
| 216 | 737 | 967 | 2305 | 1795 | 2309 | 2825 | 3334 | 3841 | 5513 | 4313 | 5804 | 5034 | 5608 | 1655 | 4612 |
| 217 | 738 | 968 | 2307 | 1796 | 2310 | 2826 | 3335 | 3842 | 5514 | 4314 | 5805 | 5036 | 5610 | 1656 | 4613 |
| 218 | 739 | 969 | 2323 | 1797 | 2311 | 2828 | 3338 | 3843 | 5519 | 4315 | 5806 | 5038 | 5611 | 1657 | 4614 |
| 219 | 761 | 971 | 2329 | 1798 | 2312 | 2829 | 3339 | 3844 | 5525 | 4316 | 5807 | 5039 | 5612 | 1658 | 4615 |
| 220 | 775 | 972 | 2344 | 1799 | 2313 | 2830 | 3340 | 3845 | 5526 | 4317 | 5808 | 5040 | 5613 | 1659 | 4616 |
| 221 | 805 | 973 | 2365 | 1800 | 2314 | 2831 | 3341 | 3846 | 5529 | 4318 | 5809 | 5041 | 5614 | 1660 | 4617 |
| 222 | 813 | 974 | 2375 | 1801 | 2315 | 2832 | 3342 | 3847 | 5544 | 4319 | 5810 | 5042 | 5615 | 1661 | 4618 |
| 223 | 816 | 975 | 2422 | 1803 | 2316 | 2833 | 3343 | 3848 | 5549 | 4320 | 5811 | 5043 | 5617 | 1662 | 4619 |
| 224 | 820 | 977 | 2424 | 1804 | 2317 | 2834 | 3344 | 3849 | 5551 | 4321 | 5812 | 5044 | 5618 | 1663 | 4620 |
| 225 | 839 | 978 | 2443 | 1805 | 2318 | 2835 | 3345 | 3850 | 5562 | 4322 | 5813 | 5046 | 5619 | 1664 | 4621 |
| 226 | 843 | 979 | 2449 | 1806 | 2319 | 2837 | 3346 | 3851 | 5563 | 4323 | 5814 | 5047 | 5620 | 1665 | 4622 |
| 227 | 850 | 980 | 2453 | 1807 | 2320 | 2838 | 3347 | 3852 | 5564 | 4324 | 5815 | 5048 | 5624 | 1666 | 4623 |
| 229 | 851 | 981 | 2455 | 1808 | 2321 | 2839 | 3348 | 3853 | 5570 | 4325 | 5816 | 5049 | 5626 | 1667 | 4624 |
| 230 | 885 | 982 | 2456 | 1809 | 2322 | 2840 | 3349 | 3854 | 5573 | 4326 | 5817 | 5050 | 5627 | 1668 | 4625 |
| 231 | 902 | 983 | 2461 | 1810 | 2323 | 2841 | 3350 | 3855 | 5576 | 4327 | 5818 | 5051 | 5628 | 1669 | 4626 |
| 232 | 908 | 984 | 2492 | 1811 | 2324 | 2842 | 3351 | 3856 | 5582 | 4328 | 5819 | 5052 | 5629 | 1670 | 4627 |
| 233 | 913 | 985 | 2505 | 1812 | 2326 | 2843 | 3352 | 3857 | 5590 | 4329 | 5820 | 5054 | 5630 | 1671 | 4628 |
| 234 | 923 | 986 | 2512 | 1813 | 2327 | 2844 | 3353 | 3858 | 5602 | 4330 | 5821 | 5055 | 5631 | 1672 | 4629 |
| 235 | 924 | 987 | 2513 | 1814 | 2328 | 2845 | 3354 | 3859 | 5604 | 4331 | 5822 | 5056 | 5632 | 1673 | 4630 |
| 236 | 925 | 988 | 2535 | 1815 | 2329 | 2846 | 3355 | 3860 | 5608 | 4332 | 5823 | 5057 | 5633 | 1674 | 4631 |
| 237 | 961 | 990 | 2573 | 1816 | 2330 | 2847 | 3356 | 3861 | 5617 | 4333 | 5824 | 5058 | 5634 | 1675 | 4632 |
| 238 | 976 | 991 | 2583 | 1817 | 2331 | 2848 | 3357 | 3862 | 5619 | 4334 | 5825 | 5059 | 5635 | 1676 | 4633 |
| 239 | 989 | 992 | 2598 | 1818 | 2332 | 2849 | 3358 | 3863 | 5624 | 4335 | 5826 | 5060 | 5636 | 1677 | 4634 |
| 240 | 1014 | 993 | 2638 | 1819 | 2333 | 2850 | 3359 | 3864 | 5628 | 4336 | 5827 | 5063 | 5637 | 1678 | 4635 |
| 241 | 1036 | 994 | 2715 | 1820 | 2334 | 2851 | 3360 | 3865 | 5629 | 4337 | 5828 | 5064 | 5638 | 1679 | 4636 |
| 242 | 1050 | 995 | 2746 | 1821 | 2335 | 2852 | 3361 | 3866 | 5633 | 4338 | 5829 | 5065 | 5639 | 1680 | 4637 |
| 243 | 1058 | 996 | 2753 | 1822 | 2336 | 2853 | 3362 | 3867 | 5635 | 4339 | 5830 | 5066 | 5640 | 1681 | 4638 |
| 244 | 1062 | 997 | 2781 | 1823 | 2337 | 2854 | 3363 | 3868 | 5639 | 4340 | 5831 | 5068 | 5643 | 1682 | 4639 |
| 245 | 1077 | 998 | 2794 | 1824 | 2338 | 2855 | 3364 | 3869 | 5642 | 4341 | 5832 | 5069 | 5644 | 1683 | 4640 |
| 246 | 1086 | 999 | 2810 | 1825 | 2340 | 2856 | 3365 | 3870 | 5645 | 4342 | 5833 | 5071 | 5646 | 1684 | 4641 |
| 247 | 1091 | 1000 | 2812 | 1826 | 2341 | 2857 | 3366 | 3871 | 5668 | 4343 | 5834 | 5072 | 5647 | 1685 | 4642 |
| 248 | 1108 | 1001 | 2824 | 1827 | 2342 | 2858 | 3367 | 3872 | 5670 | 4344 | 5835 | 5073 | 5648 | 1686 | 4643 |
| 249 | 1146 | 1002 | 2837 | 1828 | 2343 | 2859 | 3368 | 3874 | 5671 | 4345 | 5836 | 5075 | 5649 | 1687 | 4644 |
| 250 | 1148 | 1003 | 2845 | 1829 | 2344 | 2860 | 3369 | 3875 | 5672 | 4346 | 5837 | 5076 | 5650 | 1688 | 4645 |
| 251 | 1174 | 1004 | 2906 | 1830 | 2345 | 2861 | 3370 | 3876 | 5685 | 4347 | 5838 | 5077 | 5651 | 1689 | 4647 |
| 252 | 1178 | 1005 | 2986 | 1831 | 2346 | 2862 | 3371 | 3877 | 5694 | 4348 | 5839 | 5078 | 5652 | 1690 | 4648 |
| 253 | 1197 | 1006 | 2999 | 1832 | 2347 | 2863 | 3372 | 3878 | 5697 | 4349 | 5840 | 5079 | 5653 | 1691 | 4649 |
| 254 | 1210 | 1007 | 3055 | 1833 | 2348 | 2864 | 3373 | 3879 | 5701 | 4350 | 5841 | 5080 | 5654 | 1692 | 4650 |
| 255 | 1211 | 1008 | 3109 | 1834 | 2349 | 2865 | 3374 | 3880 | 5703 | 4351 | 5842 | 5081 | 5655 | 1693 | 4651 |
| 256 | 1233 | 1009 | 3118 | 1835 | 2350 | 2866 | 3375 | 3881 | 5705 | 4352 | 5843 | 5083 | 5656 | 1694 | 4652 |
| 257 | 1257 | 1010 | 3158 | 1836 | 2351 | 2867 | 3376 | 3882 | 5707 | 4353 | 5844 | 5084 | 5657 | 1695 | 4653 |
| 258 | 1259 | 1011 | 3165 | 1837 | 2352 | 2868 | 3377 | 3883 | 5708 | 4354 | 5845 | 5088 | 5658 | 1696 | 4654 |
| 259 | 1263 | 1012 | 3210 | 1839 | 2353 | 2869 | 3378 | 3885 | 5709 | 4355 | 5846 | 5089 | 5659 | 1697 | 4655 |
| 260 | 1276 | 1013 | 3231 | 1841 | 2354 | 2871 | 3380 | 3886 | 5781 | 4356 | 5847 | 5091 | 5660 | 1698 | 4656 |
| 261 | 1291 | 1015 | 3239 | 1842 | 2356 | 2872 | 3382 | 3887 | 5838 | 4357 | 5848 | 5092 | 5661 | 1699 | 4657 |
| 262 | 1309 | 1016 | 3242 | 1844 | 2357 | 2873 | 3383 | 3888 | 5863 | 4358 | 5849 | 5093 | 5662 | 1700 | 4658 |
| 263 | 1330 | 1017 | 3342 | 1845 | 2358 | 2874 | 3384 | 3889 | | 4359 | 5850 | 5095 | 5663 | 1701 | 4659 |
| 264 | 1333 | 1018 | 3346 | 1846 | 2359 | 2875 | 3385 | 3890 | | 4360 | 5851 | 5097 | 5664 | 1702 | 4660 |
| 265 | 1337 | 1019 | 3359 | 1847 | 2360 | 2876 | 3386 | 3891 | | 4361 | 5852 | 5098 | 5665 | 1703 | 4661 |
| 266 | 1345 | 1020 | 3363 | 1848 | 2361 | 2877 | 3387 | 3892 | | 4362 | 5853 | 5099 | 5666 | 1704 | 4662 |
| 267 | 1353 | 1021 | 3371 | 1849 | 2362 | 2878 | 3388 | 3893 | | 4363 | 5854 | 5100 | 5667 | 1705 | 4663 |
| 268 | 1357 | 1022 | 3421 | 1850 | 2363 | 2879 | 3389 | 3894 | | 4364 | 5855 | 5101 | 5668 | 1707 | 4664 |
| 269 | 1374 | 1023 | 3427 | 1851 | 2364 | 2880 | 3390 | 3895 | | 4365 | 5856 | 5102 | 5669 | 1709 | 4665 |
| 270 | 1484 | 1024 | 3447 | 1852 | 2365 | 2881 | 3391 | 3897 | | 4366 | 5857 | 5103 | 5671 | 1710 | 4666 |
| 271 | 1497 | 1025 | 3458 | 1853 | 2366 | 2882 | 3392 | 3898 | | 4367 | 5858 | 5104 | 5672 | 1711 | 4667 |
| 272 | 1531 | 1026 | 3481 | 1854 | 2367 | 2883 | 3393 | 3899 | | 4368 | 5859 | 5105 | 5673 | 1712 | 4668 |
| 273 | 1573 | 1027 | 3498 | 1855 | 2368 | 2884 | 3394 | 3900 | | 4369 | 5860 | 5106 | 5674 | 1713 | 4669 |
| 274 | 1631 | 1028 | 3525 | 1856 | 2369 | 2885 | 3395 | 3901 | | 4370 | 5861 | 5107 | 5675 | 1714 | 4670 |
| 275 | 1638 | 1029 | 3617 | 1857 | 2370 | 2886 | 3396 | 3902 | | 4371 | 5862 | 5108 | 5676 | 1715 | 4671 |
| 276 | 1706 | 1030 | 3622 | 1858 | 2371 | 2887 | 3397 | 3903 | | 4372 | 5863 | 5110 | 5677 | 1843 | 4672 |
| 277 | 1708 | 1031 | 3658 | 1859 | 2373 | 2888 | 3398 | 3904 | | 4373 | 5864 | 5111 | 5678 | 1911 | 4673 |
| 278 | 1741 | 1032 | 3665 | 1860 | 2374 | 2889 | 3399 | 3905 | | 4374 | 5865 | 5112 | 5679 | 1917 | 4674 |
| 279 | 1756 | 1033 | 3745 | 1861 | 2375 | 2890 | 3401 | 3906 | | 4375 | 5866 | 5113 | 5680 | 2020 | 4675 |
| 280 | 1802 | 1034 | 3787 | 1862 | 2376 | 2891 | 3402 | 3907 | | 4376 | 5867 | 5114 | 5681 | 2102 | 4676 |
| 281 | 1838 | 1035 | 3790 | 1863 | 2377 | 2892 | 3403 | 3908 | | 4377 | 5868 | 5115 | 5682 | 2141 | 4677 |
| 282 | 1840 | 1037 | 3796 | 1864 | 2378 | 2894 | 3404 | 3909 | | 4378 | 5869 | 5117 | 5683 | 2257 | 4678 |
| 283 | 1867 | 1038 | 3810 | 1865 | 2379 | 2895 | 3405 | 3910 | | 4379 | 5870 | 5118 | 5684 | 2258 | 4679 |
| 284 | 1881 | 1039 | 3828 | 1866 | 2380 | 2896 | 3406 | 3911 | | 4380 | 5871 | 5119 | 5685 | 2281 | 4680 |
| 285 | 1909 | 1040 | 3835 | 1868 | 2381 | 2897 | 3407 | 3912 | | 4381 | 5872 | 5121 | 5686 | 2305 | 4681 |
| 286 | 1924 | 1041 | 3838 | 1869 | 2382 | 2898 | 3408 | 3913 | | 4382 | 5873 | 5122 | 5688 | 2538 | 4682 |
| 288 | 1944 | 1042 | 3846 | 1870 | 2383 | 2899 | 3409 | 3914 | | 4383 | 5874 | 5123 | 5689 | 2567 | 4683 |
| 290 | 1995 | 1043 | 3888 | 1871 | 2384 | 2900 | 3410 | 3915 | | 4384 | 5875 | 5124 | 5690 | 2638 | 4684 |
| 292 | 2038 | 1044 | 3908 | 1872 | 2385 | 2901 | 3411 | 3916 | | 4385 | 5876 | 5125 | 5691 | 2711 | 4685 |
| 293 | 2050 | 1045 | 3912 | 1873 | 2386 | 2902 | 3412 | 3917 | | 4386 | 5877 | 5126 | 5692 | 2794 | 4686 |
| 294 | 2100 | 1046 | 3929 | 1874 | 2387 | 2903 | 3413 | 3918 | | 4387 | 5878 | 5127 | 5694 | 2835 | 4687 |
| 295 | 2107 | 1047 | 3942 | 1875 | 2388 | 2904 | 3414 | 3919 | | 4388 | 5879 | 5128 | 5695 | 2850 | 4688 |
| 296 | 2120 | 1048 | 3946 | 1876 | 2389 | 2905 | 3415 | 3920 | | 4389 | 5880 | 5129 | 5696 | 2958 | 4689 |
| 297 | 2129 | 1049 | 3949 | 1877 | 2391 | 2906 | 3416 | 3922 | | 4390 | 5881 | 5131 | 5697 | 3063 | 4690 |
| 298 | 2139 | 1051 | 3977 | 1878 | 2392 | 2907 | 3417 | 3923 | | 4391 | 5882 | 5132 | 5698 | 3143 | 4691 |
| 299 | 2155 | 1052 | 3982 | 1879 | 2393 | 2908 | 3418 | 3924 | | 4392 | 5883 | 5133 | 5700 | 3231 | 4692 |
| 300 | 2162 | 1053 | 3987 | 1880 | 2394 | 2909 | 3419 | 3925 | | 4393 | 5884 | 5135 | 5701 | 3375 | 4693 |
| 301 | 2198 | 1054 | 3990 | 1882 | 2395 | 2910 | 3420 | 3926 | | 4394 | 5885 | 5136 | 5702 | 3510 | 4694 |
| 302 | 2238 | 1055 | 3991 | 1883 | 2396 | 2911 | 3421 | 3927 | | 4395 | 5886 | 5137 | 5703 | 3647 | 4695 |
| 303 | 2252 | 1057 | 4021 | 1884 | 2397 | 2912 | 3422 | 3929 | | 4396 | 5887 | 5139 | 5704 | 3685 | 4696 |
| 304 | 2272 | 1059 | 4027 | 1885 | 2398 | 2913 | 3423 | 3930 | | 4397 | 5888 | 5142 | 5705 | 3790 | 4697 |
| 305 | 2289 | 1060 | 4757 | 1886 | 2400 | 2914 | 3424 | 3931 | | 4398 | 5889 | 5143 | 5706 | 3862 | 4698 |
| 306 | 2325 | 1061 | 4821 | 1887 | 2401 | 2915 | 3425 | 3932 | | 4399 | 5890 | 5144 | 5707 | 3873 | 4699 |
| 307 | 2339 | 1063 | 4824 | 1888 | 2402 | 2916 | 3427 | 3933 | | 4400 | 5891 | 5145 | 5708 | 3876 | 4700 |
| 308 | 2390 | 1064 | 4825 | 1889 | 2403 | 2917 | 3428 | 3934 | | 4401 | 5892 | 5146 | 5709 | 3879 | 4701 |
| 309 | 2399 | 1065 | 4832 | 1890 | 2404 | 2918 | 3429 | 3935 | | 4402 | 5893 | 5147 | 5710 | 3935 | 4702 |
| 310 | 2412 | 1066 | 4847 | 1891 | 2405 | 2919 | 3430 | 3936 | | 4403 | 5894 | 5148 | 5711 | 3977 | 4703 |
| 312 | 2427 | 1067 | 4848 | 1892 | 2406 | 2920 | 3431 | 3937 | | 4404 | 5895 | 5150 | 5712 | 3996 | 4704 |
| 313 | 2442 | 1068 | 4864 | 1893 | 2408 | 2921 | 3432 | 3938 | | 4405 | 5896 | 5151 | 5713 | 4007 | 4705 |
| 314 | 2450 | 1069 | 4867 | 1894 | 2409 | 2922 | 3433 | 3939 | | 4406 | 5897 | 5152 | 5714 | 4021 | 4706 |
| 315 | 2483 | 1070 | 4889 | 1896 | 2410 | 2923 | 3434 | 3940 | | 4407 | 5898 | 5155 | | 4088 | 4707 |
| 316 | 2487 | 1071 | 4894 | 1897 | 2411 | 2924 | 3435 | 3941 | | 4408 | 5899 | 5156 | | 4807 | 4708 |
| 317 | 2497 | 1072 | 4923 | 1898 | 2413 | 2925 | 3436 | 3942 | | 4409 | 5900 | 5157 | | 4821 | 4709 |
| 318 | 2516 | 1073 | 4930 | 1899 | 2414 | 2926 | 3438 | 3943 | | 4410 | 5901 | 5158 | | 4870 | 4710 |
| 319 | 2522 | 1074 | 4940 | 1900 | 2415 | 2927 | 3439 | 3944 | | 4411 | 5902 | 5159 | | 4904 | 4711 |
| 320 | 2552 | 1075 | 4944 | 1901 | 2416 | 2928 | 3440 | 3945 | | 4412 | 5903 | 5160 | | 4940 | 4712 |
| 322 | 2568 | 1076 | 4947 | 1902 | 2417 | 2929 | 3441 | 3946 | | 4413 | 5904 | 5161 | | 4947 | 4713 |
| 323 | 2599 | 1078 | 4953 | 1903 | 2418 | 2930 | 3442 | 3948 | | 4414 | 5905 | 5164 | | 4998 | 4714 |
| 324 | 2608 | 1079 | 4968 | 1905 | 2419 | 2931 | 3443 | 3949 | | 4415 | 5906 | 5165 | | 5005 | 4715 |
| 325 | 2614 | 1081 | 4973 | 1906 | 2420 | 2933 | 3444 | 3950 | | 4416 | 5907 | 5167 | | 5010 | 4716 |
| 326 | 2626 | 1082 | 4977 | 1907 | 2421 | 2934 | 3445 | 3952 | | 4417 | 5908 | 5168 | | 5027 | 4717 |
| 327 | 2632 | 1083 | 4982 | 1908 | 2422 | 2935 | 3446 | 3953 | | 4418 | 5909 | 5169 | | 5092 | 4718 |
| 328 | 2643 | 1084 | 4992 | 1911 | 2423 | 2936 | 3447 | 3954 | | 4419 | 5910 | 5170 | | 5093 | 4719 |
| 329 | 2645 | 1085 | 4998 | 1912 | 2424 | 2937 | 3448 | 3955 | | 4420 | 5911 | 5171 | | 5112 | 4720 |
| 330 | 2695 | 1087 | 5003 | 1913 | 2425 | 2939 | 3449 | 3956 | | 4421 | 5912 | 5172 | | 5128 | 4721 |
| 331 | 2754 | 1088 | 5010 | 1914 | 2426 | 2940 | 3451 | 3957 | | 4422 | 5913 | 5173 | | 5131 | 4722 |
| 332 | 2792 | 1089 | 5017 | 1915 | 2428 | 2941 | 3452 | 3958 | | 4423 | 5914 | 5174 | | 5143 | 4723 |
| 333 | 2807 | 1090 | 5019 | 1916 | 2429 | 2942 | 3453 | 3959 | | 4424 | 5915 | 5175 | | 5160 | 4724 |
| 334 | 2870 | 1092 | 5021 | 1918 | 2430 | 2943 | 3455 | 3960 | | 4425 | 5916 | 5176 | | 5179 | 4725 |
| 335 | 2893 | 1093 | 5026 | 1919 | 2431 | 2944 | 3456 | 3961 | | 4426 | 5917 | 5177 | | 5181 | 4726 |
| 336 | 2938 | 1094 | 5035 | 1920 | 2432 | 2945 | 3457 | 3962 | | 4427 | 5918 | 5179 | | 5190 | 4727 |
| 337 | 2972 | 1095 | 5061 | 1921 | 2433 | 2946 | 3458 | 3964 | | 4428 | 5919 | 5180 | | 5196 | 4728 |
| 338 | 2975 | 1096 | 5064 | 1922 | 2434 | 2948 | 3459 | 3965 | | 4429 | 5920 | 5181 | | 5203 | 4729 |
| 339 | 2989 | 1097 | 5066 | 1923 | 2435 | 2949 | 3460 | 3966 | | 4430 | 5921 | 5182 | | 5234 | 4730 |
| 340 | 3009 | 1098 | 5093 | 1925 | 2436 | 2950 | 3461 | 3967 | | 4431 | 5922 | 5183 | | 5236 | 4732 |
| 341 | 3053 | 1099 | 5096 | 1926 | 2437 | 2951 | 3462 | 3968 | | 4432 | 5923 | 5184 | | 5259 | 4733 |
| 342 | 3057 | 1100 | 5108 | 1927 | 2438 | 2952 | 3463 | 3969 | | 4433 | 5924 | 5185 | | 5288 | 4734 |
| 343 | 3075 | 1101 | 5112 | 1928 | 2439 | 2953 | 3464 | 3970 | | 4434 | 5925 | 5186 | | 5294 | 4735 |
| 344 | 3153 | 1102 | 5113 | 1929 | 2440 | 2954 | 3465 | 3971 | | 4435 | 5926 | 5188 | | 5310 | 4736 |
| 345 | 3154 | 1103 | 5115 | 1930 | 2441 | 2955 | 3466 | 3972 | | 4436 | 5927 | 5189 | | 5332 | 4737 |
| 346 | 3190 | 1104 | 5124 | 1931 | 2443 | 2956 | 3467 | 3973 | | 4437 | 5928 | 5190 | | 5350 | 4738 |
| 347 | 3195 | 1105 | 5126 | 1932 | 2444 | 2957 | 3468 | 3974 | | 4438 | 5929 | 5191 | | 5375 | 4739 |
| 348 | 3209 | 1106 | 5128 | 1933 | 2445 | 2958 | 3469 | 3975 | | 4439 | 5930 | 5192 | | 5395 | 4740 |
| 349 | 3217 | 1107 | 5137 | 1934 | 2446 | 2959 | 3470 | 3976 | | 4440 | 5931 | 5194 | | 5397 | 4741 |
| 350 | 3224 | 1109 | 5141 | 1935 | 2447 | 2960 | 3471 | 3977 | | 4441 | 5932 | 5195 | | 5420 | 4743 |
| 351 | 3247 | 1110 | 5143 | 1936 | 2448 | 2961 | 3472 | 3978 | | 4442 | 5933 | 5196 | | 5437 | 4744 |
| 352 | 3253 | 1111 | 5144 | 1937 | 2449 | 2962 | 3473 | 3979 | | 4443 | 5934 | 5197 | | 5438 | 4745 |
| 353 | 3278 | 1112 | 5154 | 1938 | 2451 | 2963 | 3474 | 3980 | | 4444 | 5935 | 5198 | | 5448 | 4746 |
| 354 | 3284 | 1113 | 5160 | 1939 | 2452 | 2964 | 3475 | 3981 | | 4445 | 5936 | 5200 | | 5460 | 4747 |
| 355 | 3336 | 1114 | 5164 | 1940 | 2453 | 2965 | 3476 | 3982 | | 4446 | 5937 | 5201 | | 5465 | 4748 |
| 356 | 3337 | 1115 | 5168 | 1941 | 2454 | 2966 | 3477 | 3983 | | 4447 | 5938 | 5202 | | 5471 | 4749 |
| 357 | 3379 | 1116 | 5170 | 1942 | 2455 | 2967 | 3478 | 3984 | | 4448 | 5939 | 5203 | | 5475 | 4750 |
| 358 | 3381 | 1117 | 5179 | 1945 | 2456 | 2968 | 3479 | 3985 | | 4449 | 5940 | 5204 | | 5476 | 4751 |
| 359 | 3400 | 1118 | 5188 | 1946 | 2457 | 2969 | 3480 | 3986 | | 4450 | 5941 | 5207 | | 5489 | 4752 |
| 360 | 3426 | 1119 | 5203 | 1947 | 2458 | 2970 | 3481 | 3987 | | 4451 | 5942 | 5208 | | 5499 | 4753 |
| 361 | 3450 | 1120 | 5228 | 1948 | 2459 | 2971 | 3483 | 3988 | | 4452 | 5943 | 5209 | | 5504 | 4754 |
| 362 | 3454 | 1122 | 5229 | 1949 | 2460 | 2973 | 3484 | 3989 | | 4453 | 5944 | 5210 | | 5528 | 4755 |
| 363 | 3482 | 1123 | 5236 | 1950 | 2461 | 2974 | 3485 | 3990 | | 4454 | 5945 | 5211 | | 5573 | 4756 |
| 364 | 3520 | 1124 | 5251 | 1951 | 2462 | 2976 | 3486 | 3991 | | 4455 | 5946 | 5212 | | 5585 | 4757 |
| 365 | 3521 | 1125 | 5253 | 1952 | 2463 | 2977 | 3487 | 3992 | | 4456 | 5947 | 5213 | | 5617 | 4758 |
| 366 | 3562 | 1126 | 5268 | 1953 | 2464 | 2978 | 3488 | 3993 | | 4457 | 5948 | 5214 | | 5635 | 4759 |
| 367 | 3578 | 1127 | 5272 | 1954 | 2465 | 2979 | 3489 | 3994 | | 4458 | 5949 | 5215 | | 5674 | 4760 |
| 369 | 3583 | 1128 | 5275 | 1955 | 2466 | 2980 | 3490 | 3995 | | 4459 | 5950 | 5216 | | 5685 | 4761 |
| 370 | 3591 | 1129 | 5281 | 1956 | 2467 | 2981 | 3491 | 3996 | | 4460 | 5951 | 5217 | | 5687 | 4762 |
| 371 | 3595 | 1130 | 5291 | 1957 | 2468 | 2982 | 3492 | 3997 | | 4461 | 5952 | 5218 | | 5697 | 4763 |
| 372 | 3650 | 1131 | 5294 | 1958 | 2469 | 2983 | 3493 | 3998 | | 4462 | 5953 | 5219 | | 5708 | 4764 |
| 373 | 3654 | 1132 | 5310 | 1959 | 2470 | 2984 | 3494 | 3999 | | 4463 | 5954 | 5220 | | | 4765 |
| 374 | 3674 | 1133 | 5313 | 1960 | 2471 | 2985 | 3495 | 4000 | | 4464 | 5955 | 5221 | | | 4766 |
| 375 | 3808 | 1134 | 5316 | 1961 | 2472 | 2986 | 3496 | 4002 | | 4465 | 5956 | 5222 | | | 4767 |
| 376 | 3818 | 1135 | 5318 | 1962 | 2473 | 2987 | 3497 | 4003 | | 4466 | 5957 | 5224 | | | 4768 |
| 377 | 3824 | 1136 | 5319 | 1963 | 2474 | 2988 | 3498 | 4005 | | 4467 | 5958 | 5225 | | | 4769 |
| 378 | 3830 | 1137 | 5325 | 1964 | 2475 | 2990 | 3499 | 4006 | | 4468 | 5959 | 5228 | | | 4770 |
| 379 | 3884 | 1138 | 5329 | 1965 | 2476 | 2991 | 3500 | 4007 | | 4469 | 5960 | 5229 | | | 4771 |
| 380 | 3896 | 1139 | 5341 | 1966 | 2477 | 2992 | 3501 | 4008 | | 4470 | 5961 | 5230 | | | 4772 |
| 381 | 3921 | 1140 | 5346 | 1967 | 2478 | 2993 | 3502 | 4009 | | 4471 | 5962 | 5231 | | | 4773 |
| 382 | 3928 | 1141 | 5366 | 1968 | 2480 | 2994 | 3503 | 4010 | | 4472 | 5963 | 5232 | | | 4774 |
| 383 | 3947 | 1143 | 5381 | 1969 | 2481 | 2995 | 3504 | 4011 | | 4473 | 5964 | 5233 | | | 4775 |
| 384 | 3951 | 1144 | 5394 | 1970 | 2482 | 2996 | 3505 | 4013 | | 4474 | 5965 | 5234 | | | 4776 |
| 385 | 3963 | 1145 | 5397 | 1971 | 2484 | 2997 | 3506 | 4014 | | 4475 | 5966 | 5236 | | | 4777 |
| 386 | 4001 | 1147 | 5408 | 1972 | 2485 | 2998 | 3507 | 4015 | | 4476 | 5967 | 5237 | | | 4778 |
| 387 | 4004 | 1149 | 5416 | 1973 | 2486 | 2999 | 3508 | 4017 | | 4477 | 5968 | 5238 | | | 4779 |
| 388 | 4016 | 1150 | 5426 | 1974 | 2488 | 3000 | 3509 | 4018 | | 4478 | 5969 | 5239 | | | 4780 |
| 389 | 4030 | 1151 | 5436 | 1975 | 2489 | 3001 | 3510 | 4019 | | 4479 | 5970 | 5240 | | | 4781 |
| 390 | 4048 | 1152 | 5437 | 1976 | 2490 | 3002 | 3511 | 4020 | | 4480 | 5971 | 5242 | | | 4782 |
| 391 | 4093 | 1153 | 5438 | 1977 | 2491 | 3003 | 3512 | 4021 | | 4481 | 5972 | 5244 | | | 4783 |
| 392 | 4731 | 1154 | 5440 | 1978 | 2492 | 3004 | 3513 | 4022 | | 4482 | 5973 | 5245 | | | 4784 |
| 393 | 4742 | 1155 | 5443 | 1979 | 2493 | 3005 | 3514 | 4023 | | 4483 | 5974 | 5246 | | | 4785 |
| 394 | 4826 | 1156 | 5445 | 1980 | 2494 | 3006 | 3515 | 4024 | | 4484 | 5975 | 5247 | | | 4786 |
| 395 | 4835 | 1157 | 5447 | 1981 | 2495 | 3007 | 3516 | 4025 | | 4485 | 5976 | 5250 | | | 4787 |
| 396 | 4859 | 1158 | 5460 | 1982 | 2496 | 3008 | 3517 | 4026 | | 4486 | 5977 | 5251 | | | 4788 |
| 397 | 4874 | 1159 | 5464 | 1983 | 2498 | 3010 | 3518 | 4027 | | 4487 | 5978 | 5252 | | | 4789 |
| 398 | 4886 | 1160 | 5465 | 1984 | 2499 | 3011 | 3519 | 4028 | | 4488 | 5979 | 5253 | | | 4790 |
| 399 | 4901 | 1161 | 5472 | 1985 | 2500 | 3012 | 3522 | 4029 | | 4489 | 5980 | 5254 | | | 4791 |
| 400 | 4903 | 1162 | 5476 | 1986 | 2501 | 3013 | 3523 | 4031 | | 4490 | 5981 | 5255 | | | 4792 |
| 401 | 4912 | 1163 | 5489 | 1987 | 2502 | 3014 | 3524 | 4032 | | 4491 | 5982 | 5256 | | | 4793 |
| 402 | 4941 | 1164 | 5490 | 1988 | 2503 | 3015 | 3525 | 4033 | | 4492 | 5983 | 5258 | | | 4794 |
| 403 | 4948 | 1165 | 5495 | 1989 | 2504 | 3016 | 3526 | 4034 | | 4493 | 5984 | 5260 | | | 4798 |
| 404 | 4949 | 1166 | 5500 | 1990 | 2505 | 3017 | 3527 | 4035 | | 4494 | 5985 | 5261 | | | 4848 |
| 406 | 4952 | 1167 | 5504 | 1991 | 2506 | 3018 | 3528 | 4036 | | 4495 | 5986 | 5262 | | | 4850 |
| 407 | 4958 | 1168 | 5507 | 1992 | 2507 | 3019 | 3529 | 4037 | | 4496 | 5987 | 5263 | | | 4858 |
| 408 | 4962 | 1169 | 5514 | 1993 | 2508 | 3020 | 3530 | 4038 | | 4497 | 5988 | 5264 | | | 4867 |
| 409 | 4965 | 1170 | 5523 | 1994 | 2509 | 3021 | 3531 | 4039 | | 4498 | 5989 | 5265 | | | 4872 |
| 410 | 4970 | 1171 | 5525 | 1996 | 2510 | 3022 | 3532 | 4040 | | 4499 | 5990 | 5267 | | | 4875 |
| 411 | 4980 | 1172 | 5535 | 1997 | 2511 | 3023 | 3533 | 4041 | | 4500 | 5991 | 5268 | | | 4906 |
| 412 | 4984 | 1173 | 5539 | 1998 | 2512 | 3024 | 3534 | 4042 | | 4501 | 5992 | 5269 | | | 4907 |
| 413 | 4988 | 1175 | 5551 | 1999 | 2513 | 3025 | 3535 | 4043 | | 4502 | 5993 | 5270 | | | 4940 |
| 414 | 4990 | 1176 | 5563 | 2000 | 2514 | 3026 | 3536 | 4044 | | 4582 | 5994 | 5272 | | | 4942 |
| 415 | 4997 | 1177 | 5569 | 2001 | 2515 | 3027 | 3537 | 4045 | | 4806 | 5995 | 5273 | | | 4944 |
| 416 | 5006 | 1179 | 5573 | 2002 | 2517 | 3028 | 3538 | 4046 | | 4812 | 5996 | 5274 | | | 4947 |
| 417 | 5013 | 1180 | 5577 | 2003 | 2518 | 3029 | 3539 | 4049 | | 4821 | 5997 | 5275 | | | 4953 |
| 418 | 5016 | 1181 | 5580 | 2004 | 2519 | 3030 | 3540 | 4050 | | 4825 | 5998 | 5276 | | | 4972 |
| 419 | 5023 | 1182 | 5597 | 2005 | 2520 | 3031 | 3541 | 4051 | | 4843 | 5999 | 5277 | | | 4973 |
| 420 | 5045 | 1183 | 5600 | 2006 | 2521 | 3032 | 3542 | 4052 | | 4853 | 6000 | 5278 | | | 4986 |
| 421 | 5053 | 1184 | 5603 | 2007 | 2523 | 3033 | 3543 | 4053 | | 4875 | 6001 | 5280 | | | 4991 |
| 422 | 5062 | 1185 | 5613 | 2008 | 2524 | 3034 | 3544 | 4054 | | 4883 | 6002 | 5281 | | | 4998 |
| 424 | 5067 | 1186 | 5617 | 2009 | 2525 | 3035 | 3545 | 4055 | | 4887 | 6003 | 5282 | | | 5007 |
| 425 | 5070 | 1187 | 5628 | 2010 | 2526 | 3036 | 3546 | 4056 | | 4906 | 6004 | 5283 | | | 5010 |
| 426 | 5074 | 1188 | 5633 | 2011 | 2527 | 3037 | 3547 | 4057 | | 4907 | 6005 | 5284 | | | 5017 |
| 427 | 5082 | 1189 | 5634 | 2012 | 2528 | 3038 | 3548 | 4058 | | 4922 | 6006 | 5285 | | | 5035 |
| 428 | 5085 | 1190 | 5635 | 2013 | 2529 | 3039 | 3549 | 4059 | | 4937 | | 5286 | | | 5056 |
| 429 | 5086 | 1191 | 5637 | 2014 | 2530 | 3040 | 3550 | 4060 | | 4942 | | 5287 | | | 5058 |
| 430 | 5094 | 1192 | 5671 | 2015 | 2531 | 3041 | 3551 | 4061 | | 4953 | | 5288 | | | 5069 |
| 432 | 5109 | 1193 | 5685 | 2016 | 2532 | 3042 | 3552 | 4062 | | 4961 | | 5289 | | | 5071 |
| 433 | 5116 | 1194 | 5687 | 2017 | 2533 | 3043 | 3553 | 4063 | | 4968 | | 5291 | | | 5119 |
| 434 | 5120 | 1195 | 5701 | 2018 | 2534 | 3044 | 3554 | 4064 | | 4973 | | 5292 | | | 5129 |
| 436 | 5130 | 1196 | 5703 | 2019 | 2535 | 3045 | 3555 | 4065 | | 4977 | | 5293 | | | 5143 |
| 437 | 5134 | 1198 | 5706 | 2020 | 2536 | 3046 | 3556 | 4067 | | 4981 | | 5294 | | | 5162 |
| 438 | 5149 | 1199 | 5708 | 2021 | 2537 | 3047 | 3557 | 4068 | | 5003 | | 5295 | | | 5172 |
| 439 | 5153 | 1200 | 5709 | 2022 | 2539 | 3048 | 3558 | 4069 | | 5010 | | 5296 | | | 5186 |
| 440 | 5163 | 1201 | | 2023 | 2540 | 3049 | 3559 | 4070 | | 5019 | | 5297 | | | 5192 |
| 441 | 5166 | 1202 | | 2024 | 2541 | 3050 | 3560 | 4071 | | 5056 | | 5298 | | | 5196 |
| 442 | 5193 | 1203 | | 2025 | 2542 | 3051 | 3561 | 4072 | | 5073 | | 5299 | | | 5208 |
| 443 | 5205 | 1204 | | 2026 | 2543 | 3052 | 3563 | 4073 | | 5092 | | 5300 | | | 5209 |
| 444 | 5206 | 1205 | | 2027 | 2544 | 3054 | 3564 | 4074 | | 5101 | | 5301 | | | 5240 |
| 445 | 5223 | 1206 | | 2028 | 2545 | 3055 | 3565 | 4075 | | 5102 | | 5302 | | | 5253 |
| 446 | 5226 | 1207 | | 2029 | 2546 | 3056 | 3566 | 4076 | | 5113 | | 5303 | | | 5267 |
| 447 | 5227 | 1208 | | 2030 | 2547 | 3058 | 3567 | 4077 | | 5143 | | 5304 | | | 5269 |
| 448 | 5235 | 1209 | | 2031 | 2548 | 3059 | 3568 | 4078 | | 5173 | | 5306 | | | 5275 |
| 449 | 5241 | 1212 | | 2032 | 2549 | 3060 | 3569 | 4079 | | 5179 | | 5307 | | | 5298 |
| 450 | 5243 | 1213 | | 2033 | 2550 | 3061 | 3570 | 4080 | | 5187 | | 5308 | | | 5303 |
| 451 | 5248 | 1214 | | 2034 | 2551 | 3062 | 3571 | 4081 | | 5198 | | 5310 | | | 5304 |
| 452 | 5249 | 1215 | | 2035 | 2553 | 3063 | 3572 | 4082 | | 5208 | | 5312 | | | 5310 |
| 453 | 5257 | 1217 | | 2036 | 2554 | 3064 | 3573 | 4083 | | 5211 | | 5313 | | | 5316 |
| 454 | 5266 | 1218 | | 2037 | 2555 | 3065 | 3574 | 4084 | | 5229 | | 5314 | | | 5344 |
| 455 | 5271 | 1219 | | 2039 | 2556 | 3066 | 3575 | 4085 | | 5231 | | 5315 | | | 5346 |
| 456 | 5279 | 1220 | | 2040 | 2557 | 3067 | 3576 | 4086 | | 5236 | | 5316 | | | 5350 |
| 457 | 5305 | 1221 | | 2041 | 2558 | 3068 | 3577 | 4087 | | 5259 | | 5317 | | | 5381 |
| 458 | 5309 | 1222 | | 2042 | 2559 | 3069 | 3579 | 4088 | | 5288 | | 5318 | | | 5385 |
| 460 | 5311 | 1223 | | 2043 | 2560 | 3070 | 3580 | 4089 | | 5303 | | 5319 | | | 5401 |
| 461 | 5327 | 1224 | | 2044 | 2561 | 3071 | 3581 | 4090 | | 5322 | | 5320 | | | 5406 |
| 462 | 5343 | 1225 | | 2045 | 2562 | 3072 | 3582 | 4091 | | 5332 | | 5321 | | | 5407 |
| 463 | 5352 | 1226 | | 2046 | 2563 | 3073 | 3584 | 4092 | | 5350 | | 5322 | | | 5416 |
| 464 | 5364 | 1227 | | 2047 | 2564 | 3074 | 3585 | 4094 | | 5354 | | 5323 | | | 5418 |
| 465 | 5367 | 1228 | | 2048 | 2565 | 3076 | 3586 | 4095 | | 5366 | | 5324 | | | 5447 |
| 466 | 5370 | 1229 | | 2049 | 2566 | 3077 | 3587 | 4096 | | 5373 | | 5325 | | | 5449 |
| 467 | 5377 | 1230 | | 2051 | 2567 | 3078 | 3588 | 4097 | | 5375 | | 5326 | | | 5450 |
| 468 | 5396 | 1231 | | 2052 | 2569 | 3079 | 3589 | 4098 | | 5380 | | 5328 | | | 5460 |
| 469 | 5409 | 1232 | | 2053 | 2570 | 3080 | 3590 | 4099 | | 5386 | | 5329 | | | 5465 |
| 470 | 5410 | 1234 | | 2054 | 2571 | 3081 | 3592 | 4100 | | 5390 | | 5330 | | | 5466 |
| 471 | 5419 | 1235 | | 2055 | 2572 | 3082 | 3593 | 4102 | | 5393 | | 5331 | | | 5489 |
| 472 | 5422 | 1236 | | 2056 | 2573 | 3083 | 3594 | 4103 | | 5406 | | 5332 | | | 5491 |
| 473 | 5424 | 1237 | | 2057 | 2574 | 3084 | 3596 | 4104 | | 5417 | | 5333 | | | 5495 |
| 474 | 5431 | 1238 | | 2058 | 2575 | 3085 | 3597 | 4105 | | 5420 | | 5334 | | | 5507 |
| 475 | 5451 | 1239 | | 2059 | 2576 | 3086 | 3598 | 4106 | | 5436 | | 5335 | | | 5533 |
| 476 | 5457 | 1241 | | 2060 | 2577 | 3087 | 3599 | 4107 | | 5441 | | 5336 | | | 5563 |
| 477 | 5463 | 1242 | | 2061 | 2578 | 3088 | 3600 | 4108 | | 5447 | | 5337 | | | 5596 |
| 478 | 5467 | 1243 | | 2062 | 2579 | 3089 | 3601 | 4109 | | 5460 | | 5338 | | | 5600 |
| 479 | 5474 | 1244 | | 2063 | 2580 | 3090 | 3603 | 4110 | | 5476 | | 5339 | | | 5628 |
| 480 | 5481 | 1245 | | 2064 | 2581 | 3091 | 3604 | 4111 | | 5495 | | 5340 | | | 5635 |
| 481 | 5510 | 1246 | | 2066 | 2582 | 3092 | 3605 | 4112 | | 5499 | | 5341 | | | 5660 |
| 483 | 5516 | 1247 | | 2067 | 2583 | 3093 | 3606 | 4113 | | 5500 | | 5342 | | | 5671 |
| 484 | 5550 | 1248 | | 2068 | 2584 | 3094 | 3607 | 4114 | | 5502 | | 5344 | | | 5674 |
| 485 | 5553 | 1249 | | 2069 | 2585 | 3095 | 3608 | 4115 | | 5528 | | 5345 | | | 5677 |
| 486 | 5559 | 1251 | | 2070 | 2586 | 3096 | 3609 | 4116 | | 5563 | | 5346 | | | 5689 |
| 487 | 5579 | 1252 | | 2071 | 2587 | 3097 | 3611 | 4117 | | 5583 | | 5347 | | | 5706 |
| 488 | 5586 | 1253 | | 2072 | 2588 | 3098 | 3612 | 4118 | | 5596 | | 5348 | | | |
| 489 | 5607 | 1254 | | 2073 | 2589 | 3099 | 3613 | 4119 | | 5597 | | 5350 | | | |
| 490 | 5609 | 1255 | | 2074 | 2590 | 3100 | 3614 | 4120 | | 5628 | | 5351 | | | |
| 491 | 5616 | 1256 | | 2075 | 2591 | 3101 | 3615 | 4121 | | 5639 | | 5353 | | | |
| 492 | 5621 | 1258 | | 2076 | 2592 | 3102 | 3616 | 4122 | | 5655 | | 5354 | | | |
| 493 | 5622 | 1260 | | 2077 | 2593 | 3103 | 3617 | 4123 | | 5671 | | 5355 | | | |
| 494 | 5623 | 1261 | | 2078 | 2594 | 3104 | 3618 | 4124 | | 5677 | | 5356 | | | |
| 495 | 5641 | 1262 | | 2079 | 2595 | 3105 | 3619 | 4125 | | 5685 | | 5357 | | | |
| 496 | 5693 | 1264 | | 2080 | 2597 | 3106 | 3620 | 4126 | | 5687 | | 5358 | | | |
| 497 | 5699 | 1265 | | 2081 | 2598 | 3107 | 3621 | 4127 | | 5694 | | 5359 | | | |
| 498 | 5786 | 1266 | | 2082 | 2600 | 3108 | 3622 | 4128 | | 5710 | | 5360 | | | |
| 499 | | 1267 | | 2083 | 2601 | 3109 | 3623 | 4129 | | 5715 | | 5361 | | | |
| 500 | | 1268 | | 2084 | 2602 | 3110 | 3624 | 4130 | | | | 5363 | | | |
| 501 | | 1269 | | 2085 | 2603 | 3111 | 3625 | 4131 | | | | 5365 | | | |

[0026] 3. Culture Conditions for Filamentous Fungi

[0027] The nucleotide sequences of the above DNAs consist of the nucleotide sequences of genes whose expressions are regulated (promoted or suppressed) by one or a combination of the various culture conditions for filamentous fungi. The use of these genes as primers or probes makes it possible to precisely assay in detail the state of the combination of various conditions. In the present invention, examples of various culture conditions include nutrient-rich, nutrient-deficient, solid, early germination, alkaline, high temperature and low temperature culture conditions.

[0028] Examples of filamentous fungi to be cultured include microorganisms belonging to the genus Aspergillus (including the genus Emericella), the genus Penicillium, the genus Humicola, the genus Trichoderma, the genus Mucor and the genus Fusarium (see the following genera):

[0029] the genus Penicillium: all the known species classified into the genus Penicillium;

[0030] the genus Humicola: all the known species classified into the genus Humicola;

[0031] the genus Trichoderma: all the known species classified into the genus Trichoderma;

[0032] the genus Mucor: all the known species classified into the genus Mucor; and

[0033] the genus Fusarium: all the known species classified into the genus Fusarium.

[0034] Aspergillus: Aspergillus oryzae, Aspergillus fumigatus, Aspergillus flavus, Aspergillus sojae, Aspergillus paraciticus, Aspergillus niger, Aspergillus awamori, Aspergillus kawachii, Aspergillus nidulans and Emericella nidulans.

[0035] Further, in the present invention, Aspergillus oryzae is preferably used. Aspergillus oryzae strain RIB40 used for the determination of the nucleotide sequences of the present invention was deposited on Mar. 4, 2002, with the International Patent Organism Depositary, National Institute of Advanced Industrial Science and Technology (Chuo-6, 1-1-1 Higashi, Tsukuba, Ibaraki, Japan) under Accession Number: FERM BP-7935.

### (1) Nutrient-Rich Culture Condition

[0036] The nutrient-rich culture condition means a culture condition wherein a koji mold can actively grow in a complete medium containing polypeptone, yeast extract or the like, and 0.1% to 5% (preferably 2%) glucose, and having a pH from 5 to 7 (preferably pH 6.3) at a culture temperature ranging from 25° C. to 33° C., preferably at 30° C. Under a typical nutrient-rich culture condition, culturing is performed in the following YPD medium at 30° C. for 22 hours.

[0037] YPD medium

[0038] Yeast extract: 1%

[0039] Bacto-pepton: 2%

[0040] Adenine sulfate: 0.04%

[0041] Glucose: 2%

[0042] DNAs expressed by culturing under this condition are represented by SEQ ID NOS. shown in the 1st row of Table 1.

### (2) Nutrient-Deficient Culture Condition

[0043] The nutrient-deficient culture condition means a culture condition containing neither protein nor carbon sources such as carbohydrates, wherein a koji mold cannot grow. A koji mold is previously cultured under a culture condition wherein a koji mold can grow, preferably in the above YPD liquid medium. The cells are collected and washed, and then cultured in a medium containing no carbon sources such as glucose with a pH of 5 to 7 (preferably pH 5.5) at 25° C. to 33° C. (preferably 30° C.) for 4 to 10 hours (preferably 8 hours). Under a typical nutrient-deficient culture condition, cells are cultured in the following YPD liquid medium at 30° C. for 22 hours, collected by filtration, washed with sterilized water, and then cultured in the following CD (Czapek-Dox) liquid medium at 30° C. for 8 hours.

[0044] YPD liquid medium

[0045] Yeast extract: 1%

[0046] Bacto-pepton: 2%

[0047] Adenine sulfate: 0.04%

[0048] Glucose: 2%

[0049] Koji mold cells are cultured under this condition at 30° C. for 22 hours, collected, washed, and then transferred to the following nutrient-deficient medium.

[0050] CD liquid medium

[0051] NaNO₃: 0.3%

[0052] KCl: 0.2%

[0053] KH₂PO₄: 0.1%

[0054] MgSO₄.7H₂O: 0.05%

[0055] FeSO₄.7H₂O: 0.001%

[0056] pH 5.5

[0057] DNAs expressed by culturing under this condition are represented by SEQ ID NOS. shown in the 2nd row of Table 1.

[0058] (3) Solid Culture Condition

[0059] The solid culture condition means a culture state wherein a koji mold is grown using a medium, for example, grain comprising solid carbohydrates or protein such as steamed rice, wheat and soybeans. A similar culture condition is realized by placing a membrane filter in tight contact with an agar medium, upon which cells are then grown. Under a typical solid culture condition, conidia are adhered to wheat bran, and then cultured at 30° C. for 27 hours.

[0060] DNAs expressed by culturing under this condition are represented by SEQ ID NOS. shown in the 3rd row of Table 1.

[0061] (4) Early Germination Culture Condition

[0062] The early germination culture condition means a culture condition immediately after the germination of conidia by culturing at 25° C. to 33° C. (preferably 30° C.) for 8 to 15 hours (preferably 12 hours) following the inoculation of the conidia in a liquid or on an agar medium where a koji mold can grow. Under a typical early germination culture condition, culturing is performed in the following SP liquid medium at 30° C. for 12 hours.

[0063] SP liquid medium

[0064] Soluble starch: 3.5%

[0065] Polypeptone: 2%

[0066] KH₂PO₄: 0.5%

[0067] MgSO₄.7H₂O: 0.5%

[0068] DNAs expressed by culturing under this condition are represented by SEQ ID NOS. shown in the 4th row of Table 1.

[0069] (5) Alkaline Culture Condition

[0070] The alkaline culture condition means a culture condition wherein koji mold cells grow in an alkaline environment. Specifically, koji mold conidia are inoculated in liquid or on an agar media containing carbon sources and nitrogen sources necessary for the growth of a koji mold and adjusted to have a pH of 8 to 10 (preferably pH 10), and then cultured at 25° C. to 33° C. (preferably 30° C.) for 1 day to 1 week (preferably 3 days). Under a typical alkaline culture condition, a koji mold is cultured in the following CD liquid medium adjusted to have pH 10 at 30° C. for 3 days.

[0071] CD liquid medium (pH 10)

[0072] Glucose: 2%

[0073] NaNO₃: 0.3%

[0074] KCl: 0.2%

[0075] KH₂PO₄: 0.1%

[0076] MgSO₄.7H₂O: 0.05%

[0077] FeSO₄.7H₂O: 0.001%

[0078] pH 10

[0079] DNAs expressed by culturing under this condition are represented by SEQ ID NOS. shown in the 5th row of Table 1.

[0080] (6) High Temperature Culture Condition

[0081] The high temperature culture condition means a culture condition wherein a koji mold can grow in a complete medium containing polypeptone or yeast extract, 0.1% to 5% (preferably 2%) glucose, and having a pH of 5 to 7 (preferably pH 6.3) at a culture temperature ranging from 35° C. to 42° C. (preferably at 37° C.), where the koji mold is required to respond or adapt to high temperatures. Under a typical high temperature condition, a koji mold is cultured in the following YPD medium at 37° C. for 24 hours.

[0082] YPD medium

[0083] Yeast extract: 1%

[0084] Bacto-pepton: 2%

[0085] Adenine sulfate: 0.04%

[0086] Glucose: 2%

[0087] DNAs expressed by culturing under this condition are represented by SEQ ID NOS. shown in the 6th row of Table 1.

[0088] (7) Low Temperature Culture Condition

[0089] The low temperature culture condition means a growth condition wherein a koji mold is cultured using a medium, for example, grain comprising solid carbohydrates or protein such as steamed rice, wheat and soybeans, at a culture temperature ranging from 28° C. to 33° C. (preferably 30° C.), for 1 to 3 days (preferably 34 hours), and then the culture temperature is lowered to 20° C. to 25° C. (preferably 25° C.), followed by another 2 to 5 hours (preferably 3 hours) of culturing. Under a typical culture condition, defatted soybeans and roasted and crushed wheat are allowed to absorb water, followed by heat sterilization, and koji mold conidia are inoculated onto the sterilized product and cultured at 30° C. for 34 hours for hyphae to grow. Then the temperature is lowered to 25° C., followed by another 3 hours of culturing.

[0090] DNAs expressed by culturing under this condition are represented by SEQ ID NOS. shown in the 7th row of Table 1.

[0091] (8) Maltose Culture Condition

[0092] The maltose culture condition means a culture condition wherein a koji mold can grow in a complete medium containing polypeptone and the like, 0.1% to 5% (preferably 2%) maltose, and having a pH of 5 to 7 (preferably pH 6.3) at a culture temperature ranging from 25° C. to 33° C. (preferably 30° C.). Under a typical maltose culture condition, koji mold cells are cultured in the following ACM liquid medium at 30° C. for 24 hours, collected by filtration, washed with sterilized water, and then cultured in the following natural medium containing 2% maltose at 30° C. for 4 hours.

[0093] ACM liquid medium

[0094] Malt extract: 2%

[0095] Bacto-pepton: 0.1%

[0096] Glucose: 2%

[0097] Liquid medium containing 2% maltose

[0098] Bacto-pepton: 1%

[0099] KH₂PO₄: 0.5%

[0100] NANO₃: 0.1%

[0101] MgSO₄.7H₂O: 0.05%

[0102] Maltose: 2%

[0103] DNAs expressed by culturing under this condition are represented by SEQ ID NOS. shown in the 8th row of Table 1.

[0104] (9) Combination of Culture Conditions

[0105] The above culture conditions can be used independently, or can be appropriately combined according to the purpose of detecting Aspergillus, the purpose of monitoring various culture conditions, or the like. Examples of such combinations include a combination of the nutrient-rich and the low temperature culture conditions, a combination of the solid and the high temperature culture conditions, a combination of the solid, the high temperature and the maltose culture conditions, a combination of the nutrient-rich, the early germination, the high temperature and the alkaline culture conditions, and all the possible combinations of the above conditions (1) to (8) as long as they are consistent with each other.

[0106] 4. Designing of Probes or Primers

[0107] Primers for detecting a koji mold, specifically a PCR forward primer (also referred to as a sense primer) and a reverse primer (also referred to as an antisense primer) can be designed and synthesized from the sequences represented by SEQ ID NOS: 1 to 6006. The variety of DNA obtained by culturing under one condition or a combination of the above culture conditions varies depending on each culture condition (see Table 1). A plurality of koji mold DNAs is obtained in each culture condition. Thus, various variety of and a plurality of DNAs selected from such the DNAs are used as the basis for designing the primers of the present invention. For example, a plurality of DNAs is freely selected from koji mold DNAs (Table 1, SEQ ID NOS. shown in the 1st row) obtained by culturing a koji mold under the nutrient-rich culture condition, and then primers are designed from the partial regions of the selected DNAs. In addition, koji mold cells cultured under a combination of a plurality of conditions express DNAs as shown in the rows in Table 1 respectively corresponding to each of the culture conditions combined.

[0108] A plurality of DNAs is freely selected from these DNAs, and then primers are designed from the partial regions of the selected DNAs. The minimum and necessary number of primers is determined in consideration of the degree of relationship of closely related species of a koji mold and the degree of mixture. The number of primer sets is at least 1 primer set (2 primers) and preferably 2 to 4 primer sets. Primers can also be designed from characteristic koji mold regions or from regions other than such regions. The primer is 15 to 50 nucleotides in length, preferably 24 to 30 nucleotides in length. The position of DNA for designing the primer is appropriately selected such that 50 to 40,000 bp, and preferably 300 to 1,000 bp fragments are amplified.

[0109] The primers of the present invention can be obtained by any general chemical synthesis, for example a chemical synthesis using a DNA autosynthesizer manufactured by Applied Biosystems.

[0110] In the meantime, probes for detecting a koji mold can be designed from whole or the partial regions of the above DNAs in a manner similar to that used when the primers for detecting a koji mold are designed. Alternatively, by PCR amplification using the above primers and genomic DNA or cDNA as a template, probes can also be prepared. When a probe is designed from a partial region, the designed probe is 14 to 3000 nucleotides (preferably 20 to 1000 nucleotides) in length.

[0111] 5. Kit Containing Primer Set and/or Probe

[0112] The above primer set and/or probe are used as a kit for amplifying or detecting a koji mold-derived DNA. The primer set is used as a kit for amplifying a koji mold-derived DNA together with DNA polymerase (Taq DNA polymerase, Pfu DNA polymerase or the like).

[0113] 6. PCR, Hybridization and Detection

[0114] A koji mold DNA is amplified using the primer set prepared as described above and DNA polymerase. Template DNA can be prepared by any known method such as a method using cell wall lytic enzyme (e.g., Yatalase, Takara), or a method that involves preparing RNA using guanidium isothiocyanate, and then using a commercially available cDNA synthesis kit (e.g., GibcoBRL).

[0115] Amplification is performed by polymerase chain reaction (PCR). Examples of DNA polymerase include AmpliTaq DNA polymerase (Perkin-Elmer), LA Taq DNA polymerase (Takara) and Pfu DNA polymerase (Stratagene).

[0116] Each cycle of amplification conditions consists of 90° C. to 98° C. for 5 seconds to 1 minute (preferably 94° C. for 10 seconds to 1 minute) of a denaturation step, 37° C. to 68° C. for 5 seconds to 3 minutes (preferably 55° C. for 30 seconds to 1 minute) of an annealing step, and 65° C. to 75° C. for 2 seconds to 30 minutes (preferably 72° C. for 30 seconds to 1 minute) of an extension step. The amplification cycle is performed 14 to 40 cycles, preferably 30 cycles. To sufficiently denature template DNA and primers, another denaturation step of 94° C. for 1 to 3 minutes can be added before the above amplification cycles. To completely extend the amplified DNA, another extension step of 72° C. for 2 to 10 minutes may be added after the amplification cycles. Furthermore, when amplification products are not immediately subjected to detection, a step of storing the amplification products at 4° C. is preferably added to avoid nonspecific amplification. Moreover, by performing the annealing step and the extension step at the same temperature, reaction time can be simplified and shortened.

[0117] Subsequently, the amplification product is subjected to agarose gel electrophoresis, and then stained with ethidium bromide, SYBR Green solution or the like. The amplification product is then detected as a band, so that the presence of each koji mold can be determined. Instead of agarose gel electrophoresis, polyacrylamide gel electrophoresis or capillary electrophoresis may be performed. Moreover, PCR is performed using primers pre-labeled with a fluorescent dye or the like, so that amplification products can also be detected. Furthermore, other detection methods that do not require electrophoresis can be employed herein. Such methods involve causing the amplification products to bind with a solid phase such as a microplate, and then detecting the product using fluorescence, enzyme reaction, or the like.

[0118] When hybridization is performed, probes labeled with a radioactive isotope such as ³²P or ³⁵S or digoxigenin (DIG) are hybridized to sample DNA, and then detection can be performed using autoradiography, an image analyzer or the like.

[0119] There are various koji mold mutants (substitution, deletion and insertion) used according to the production purpose, but the details of the mutants have not usually been elucidated. Therefore, with a certain kind of probe, signals to be originally detected cannot often be detected due to the lack of a gene corresponding to the probe. Hence, detection is performed using a large number of probes (to increase redundancy), so as to remove exceptional detection results due to mutation and thus to enable precise detection. The number of probes used in this case is between 1 and 100, and is preferably between 2 and 5.

[0120] Therefore, the use of the detection results obtained by the detection method of the present invention as an indicator make it possible to estimate the growth or fermentation states of a koji mold. For example, when obtained detection results show that koji mold spores are at early germination, it can be estimated that the koji mold is in a growth state insufficient for fermentation production. When obtained detection results indicate a nutrient-deficient condition, it can be estimated that the growth state of the koji mold has already passed through the best state. Furthermore, when obtained detection results indicate a nutrient-rich condition, it can be estimated that the koji mold is in a good state for fermentation, and efficient fermentation production can be continued. Moreover, when obtained detection results show that a koji mold is in a solid culture condition, it can be estimated that fermentation of solids is insufficient and there is a need to proceed with fermentation by continuing the fermentation state for the koji mold.

[0121] Furthermore, in the case of assay for mutants, mutants wherein only a certain gene expression is abnormal are often found by detection using a large number of probes. Based on the results, a gene directly involved in mutation of the mutant can be identified. This enables the efficient improvement (breeding) of species based on the identified mutation. The number of probes to be used in this case is between 1 and 100, and is preferably between 5 and 20.

### BRIEF DESCRIPTION OF THE DRAWINGS

[0122] FIG. 1 shows photographs showing the monitored growth states of Aspergillus in the fermentation of steamed rice.

[0123] FIG. 2 shows a photograph showing the monitored nutrient states of Aspergillus in the solid fermentation of soybeans.

### BEST MODE OF CARRYING OUT THE INVENTION

[0124] The present invention will be hereafter described in detail by referring to examples. However, the technical scope of the present invention is not limited by these examples.

### Example 1

### Setting for Culture Condition

[0125] (1) Nutrient-Rich Library

[0126] The Aspergillus oryzae strain RIB40, a koji mold, was cultured in YPD media (1% yeast extract, 2% bacto-pepton, 0.04% adenine sulfate and 2% glucose) for 22 hours, and then mRNA was prepared from the obtained cells by a method using guanidium thiocyanate. cDNA was synthesized using primers for reverse transcription of a Marathon cDNA synthesis kit (Clontech). The adapter used herein was the EcoR I adaptor of the Directional Cloning Tool Box (Pharmacia). The vector used herein was pBluescript SKII+, and the above cDNA was inserted into the EcoR I-Not I site in the 5′ to 3′ direction. Escherichia coli XL1-Blue was transformed with the vector, plasmids were prepared by the alkaline method, and sequenced using a M13 universal primer.

(SEQ ID NO: 6007)

Primer for reverse transcription
5′-pTTCTAGAATTCAGCGGCCGCTTTTTTTTTTTTTTTTTTTTTTTTTT
TTTTVN-3′
(V = A, C or G, N = A, T, G or C)
EcoR I adaptor
5′-AATTCGGCACGAGG-3′
3′-GCCGTGCTCCp-5′

[0127] As a result, DNAs having the nucleotide sequences represented by SEQ ID NOS. shown in the 1st row of Table 1 were obtained.

[0128] (2) Solid Culture Library

[0129] Aspergillus suspended in water for conidia was added to wheat bran, cultured at 30° C. for 27 hours, and then the cells were collected. When the state and appearance of the cells at this time were visually observed, aerial hyphae were clearly recognized, but conidia formation had not begun. The cells were disrupted in liquid nitrogen, and then total RNA was separated by the Cathala method. mRNA was separated by the Oligotex method. cDNA was synthesized using a superscript cDNA plasmid system (GIBCO BRL). The vector used herein was pSPORT1 provided with the kit, and the cDNA was inserted into the Sal I-Not I site. Transformation, plasmid preparation, sequencing methods and the like are the same as those used for the nutrient-rich library.

(SEQ ID NO: 6008)

Primer for reverse transcription
5′-pGACTAGTTCTAGATCGCGAGCGGCCGCCCTTTTTTTTTTTTTTT-
3′
Sal I adaptor
5′-TCGACCCACGCGTCCG-3′
3′-GGGTGCGCAGGCp-5′

[0130] As a result, DNAs having the nucleotide sequences represented by the SEQ ID NOS. shown in the 3rd row of Table 1 were obtained.

[0131] (3) High Temperature Culture Library

[0132] Aspergillus was shake-cultured in YPD media at 37° C. for 24 hours, total RNA was extracted from the cells with ISOGEN (NIPPON GENE), and then mRNA was prepared using a mRNA purification kit (Pharmacia). cDNA was synthesized using a cDNA synthesis kit (Pharmacia) and a Not I/Oligo-dT₁₈ primer of a directional cloning toolbox. The obtained cDNA was incorporated into the EcoR I→Not I site of pBluescript SKII+. Transformation, plasmid preparation, sequencing methods and the like were the same as those used for the nutrient-rich library.

[0133] As a result, DNAs having the nucleotide sequences represented by the SEQ ID NOS. shown in the 6th row of Table 1 were obtained.

[0134] (4) Early Germination Library

[0135] Conidia were obtained by culturing Aspergillus on PD (potato dextrose agar) plates at 28° C. for 8 days. The germinated cells were obtained by culturing conidia in SP liquid media (3.5% soluble starch, 2% polypeptone, 0.5% KH₂PO₄, 0.5% MgSO₄.7H₂O) at 30° C. for 12 hours. The mixture of conidia and the germinated cells, were disrupted with sea sand in liquid nitrogen, and then mRNA was purified using a Quick Prep Micro mRNA Purification Kit (Amersham Pharmacia Biotech). Subsequently, cDNA was synthesized using a SuperScript™ Choice System for cDNA Synthesis Kit (GIBCO BRL). The vector used herein was pBluescript SKII+, and the cDNA was inserted into the EcoR I-Not I site. Transformation, plasmid preparation, sequencing methods and the like are the same as those used for the nutrient-rich library.

[0136] As a result, DNAs having the nucleotide sequences represented by the SEQ ID NOS. shown in the 4th row of Table 1 were obtained.

[0137] (5) Alkaline Culture Library

[0138] Sterilized cellophane was placed on a CD (Czapek-Dox) agar media adjusted to pH 10. Conidia of the A. oryzae strain RIB40 were inoculated thereon and cultured at 30° C. for 3 days. The cells that had grown on the cellophane were collected, total RNA was prepared using a Total RNA purification kit (SIEGEN), and then mRNA was extracted using a mRNA purification kit (Pharmacia). cDNA was synthesized using a kit (BRL), and then inserted into the Sal I-Not I site of the vector, pSPORT1. Transformation, plasmid preparation, sequencing methods and the like are the same as those used for the nutrient-rich library.

[0139] As a result, DNAs having the nucleotide sequences represented by the SEQ ID NOS. shown in the 5th row of Table 1 were obtained.

[0140] (6) Maltose Culture Library

[0141] Aspergillus was shake-cultured in ACM media (2% malt extract, 0.1% bacto-pepton and 2% glucose) at 37° C. for 24 hours. The cells were collected by filtration, and then washed with natural media (1% bacto-pepton, 0.5% KH₂PO₄, 0.1% NANO₃, 0.05% MgSO₄.7H₂O). The cells were further shake-cultured in natural media containing 2% maltose at 37° C. for 4 hours. RNA was prepared from the thus obtained cells based on the Okayama-Berg method. mRNA was then purified from total RNA using an oligotex dT30 (Super) (Nippon Roche K. K.), and then cDNA was synthesized according to the cDNA synthesis kit (Stratagene). The thus obtained cDNA was incorporated into the pBluescript KS(+) EcoR I→Xho I site. Transformation, plasmid preparation, sequencing methods and the like are the same as those used for the nutrient-rich library.

[0142] As a result, DNAs having the nucleotide sequences represented by the SEQ ID NOS. shown in the 8th row of Table 1 were obtained.

[0143] (7) Nutrient-Deficient Library

[0144] Cells were cultured in YPD media (1% yeast extract, 2% bacto-pepton, 0.04% adenine sulfate and 2% glucose) for 22 hours, collected by filtration, and then washed with distilled water. The cells were then transferred to and cultured for 8 hours in CD media (Czapek-Dox) containing no carbon source such as glucose, and then mRNA was prepared from the resulting cells. cDNA was synthesized in a manner similar to that used for the nutrient-rich library. The average length of cDNAs of the library was approximately slightly less than 1.5 kbp.

[0145] As a result, DNAs having the nucleotide sequences represented by the SEQ ID NOS. shown in the 2nd row of Table 1 were obtained.

[0146] (8) Low Temperature Culture Library

[0147] 15 ml of water was added to 10 g of defatted soybeans to absorb water, 10 g of roasted and crushed wheat was added to the soybeans, and then the mixture was agitated. The mixture was put into a 500 ml Erlenmeyer flask. The flask was sealed with a biosilico cap, autoclaved for 30 minutes, and then cooled. Aspergillus oryzae RIB40 was then inoculated at 1×10⁵ spores/g. After inoculation, koji making was performed at 30° C. (gas phase type) for 34 hours, followed by 3 hours at 25° C. Thus, cDNA was prepared from the RNA of koji at 37 hours after the start of koji making. In addition, at 18 hours and 34 hours after the start of koji making, the Erlenmeyer flask was shaken for agitation. cDNA was synthesized by LD PCR using a SMART cDNA Library Construction Kit (CLONTECH). The vector used herein was λTripEx2 and the cDNA was inserted into the Sfi I site. Transformation, plasmid preparation, sequencing methods and the like are the same as those used for the nutrient-rich library.

[0148] As a result, DNAs having the nucleotide sequences represented by the SEQ ID NOS. shown in the 7th row of Table 1 were obtained.

### Example 2

### Measuring Aspergillus Growth State

[0149] Aspergillus conidia were attached to steamed rice for hyphae to grow with water content of 25% at room temperature for 3 days. From the fermentation products at 15 hours and at 2 days after the start of the fermentation production process, RNA was extracted by a method utilizing a combination of a cell wall lytic enzyme and phenol extraction. 1.2% agarose gel electrophoresis containing formaldehyde was then performed. The electrophoresed RNA was transferred onto a nitrocellulose membrane using capillary action. After blocking with a buffer containing casein, the membrane was subjected to hybridization with DIG-labeled RNA probes respectively having an EST sequence, a 3990 (SEQ ID NO: 3990) sequence and a 3847 (SEQ ID NO: 3847) sequence detected under the solid and early germination culture conditions according to the present invention. The membrane was washed several times with a washing solution containing citrate. The membrane was finally washed with 0.2×SSC at 42° C. for 15 minutes, and then treated with a buffer containing anti-DIG antibody and alkaline phosphatase complex and allowed to emit light using CDP-Star, a chemoluminescence reagent. This was imaged with a CCD camera provided with a photosensitizer. When the 3990-derived probe was used, no signal was detected under the nutrient-rich liquid culture condition (control experiment). Signals were detected in both cases at hour 15 and day 2 under the condition using steamed rice. In contrast, when the 3847-derived probe was used, strong signals were detected at hour 15, but they had almost completely disappeared by day 2 (FIG. 1).

[0150] At 15 hours after the start of fermentation, conidia were actively germinating. At 2 days after the same, germination was completed, hyphae were actively growing, and the fermentation was proceeding in a solid state. According to the present invention, the precise growth state of Aspergillus could be determined at the genetic level.

### Example 3

### Measurement of Aspergillus Growth State

[0151] Aspergillus hyphae were made to adhere to steamed soybeans, and then fermentation was performed with water content of approximately 30% at room temperature. On days 1, 3 and 5 after the start of fermentation, a part of the fermentation mixture was collected, and then RNA was extracted from the filtration residue by a method using a combination of a cell wall lytic enzyme and phenol extraction. The RNA was subjected to formaldehyde-containing agarose gel electrophoresis, and then transferred onto a nitrocellulose membrane. This membrane was blocked according to a standard method, and then hybridized with a DIG-labeled probe containing the EST nucleotide sequence 988 (SEQ ID NO: 988) obtained under the nutrient-deficient culture condition according to the present invention.

[0152] As a result, at days 1, 3 and 5 after the start of culturing, signal intensity continuously increased. Particularly on day 5, signal intensity increased greatly (FIG. 2). In contrast, the signal intensity of a histone gene as a control almost remained unchanged. In this emission condition, it is empirically known that a carbon source derived from a carbohydrate decreases due to consumption from days 3 to 4, and along with this decrease, protease is actively produced. Therefore, by the use of the present invention, the expression state of protease that has been empirically found so far can be genetically found.

[0153] This specification includes the content as disclosed in the Japanese Patent Application No. 2001-98371, which is a basis for claiming a priority with respect to the present application. All publications, patents and patent applications cited herein are incorporated herein by reference in their entirety.

### INDUSTRIAL APPLICABILITY

[0154] The present invention provides a method of detecting the expression of a koji mold gene, and DNAs for specifically measuring the fermentation conditions for a koji mold. With conventional methods, measurement has been performed using secondary factors including the color, odor, pH, water content and the like of fermentation products. In contrast, the present invention is useful in that the actual growth states (fermentation states) of a koji mold can be directly and quantitatively measured according to the method of the present invention. Moreover, the present invention extensively includes almost all genes to be expressed in fermentation production by a koji mold, so that the presence of other genes having sequences similar to that of a target gene can be previously predicted. Furthermore, the present invention is also useful in that the expression amount of a target gene can be precisely measured using probes or primers having nucleotide sequences that are absent in genes other than the target, even when other genes having sequences analogous to that of the target gene are expressed in large quantity.

[0155] Sequence Listing Free Text
[0156] SEQ ID NO: 6007: Synthetic DNA
[0157] SEQ ID NO: 6008: Synthetic DNA

What is claimed is:

1. A DNA (a) or (b) as shown below:
(a) a DNA comprising a nucleotide sequence represented by any one of SEQ ID NOS: 1 to 6006; and
(b) a DNA hybridizing under stringent conditions to the DNA comprising the nucleotide sequence represented by any one of SEQ ID NOS: 1 to 6006, which can be expressed in filamentous fungi when the filamentous fungi are cultured under at least one culture condition selected from the group consisting of a nutrient-rich culture, nutrient-deficient culture, solid culture, early germination culture, alkaline culture, high temperature culture, low temperature culture and maltose culture conditions.

2. A DNA that can be expressed in filamentous fungi when filamentous fungi are cultured under at least one culture condition selected from the group consisting of a nutrient-rich culture, nutrient-deficient culture, solid culture, early germination culture, alkaline culture, high temperature culture, low temperature culture and maltose culture conditions.

3. The DNA of claim 2 comprising a nucleotide sequence represented by any one of the SEQ ID NOS. shown in the 1st row of Table 1, which can be expressed in filamentous fungi when the filamentous fungi are cultured under a nutrient-rich culture condition.

4. The DNA of claim 2 comprising a nucleotide sequence represented by any one of the SEQ ID NOS. shown in the 2nd row of Table 1, which can be expressed in filamentous fungi when the filamentous fungi are cultured under a nutrient-deficient culture condition.

5. The DNA of claim 2 comprising a nucleotide sequence represented by any one of the SEQ ID NOS. shown in the 3rd row of Table 1, which can be expressed in filamentous fungi when the filamentous fungi are cultured under a solid culture condition.

6. The DNA of claim 2 comprising a nucleotide sequence represented by any one of the SEQ ID NOS. shown in the 4th row of Table 1, which can be expressed in filamentous fungi when the filamentous fungi are cultured under an early germination culture condition.

7. The DNA of claim 2 comprising a nucleotide sequence represented by any one of the SEQ ID NOS. shown in the 5th row of Table 1, which can be expressed in filamentous fungi when the filamentous fungi are cultured under an alkaline culture condition.

8. The DNA of claim 2 comprising a nucleotide sequence represented by any one of the SEQ ID NOS. shown in the 6th row of Table 1, which can be expressed in filamentous fungi when the filamentous fungi are cultured under a high temperature culture condition.

9. The DNA of claim 2 comprising a nucleotide sequence represented by any one of the SEQ ID NOS. shown in the 7th row of Table 1, which can be expressed in filamentous fungi when the filamentous fungi are cultured under a low temperature culture condition.

10. The DNA of claim 2 comprising a nucleotide sequence represented by any one of the SEQ ID NOS. shown in the 8th row of Table 1, which can be expressed in filamentous fungi when the filamentous fungi are cultured under a maltose culture condition.

11. The DNA of any one of claims 1 to 10, wherein the filamentous fungi are microorganisms belonging to the genus Aspergillus, the genus Penicillium, the genus Humicola, the genus Trichoderma, the genus Mucor or the genus Fusarium.

12. The DNA of claim 11, wherein the microorganism belonging to the genus Aspergillus is a koji mold.

13. The DNA of claim 12, wherein the koji mold is Aspergillus oryzae.

14. A primer set of at least two primers for amplifying a filamentous fungus gene, wherein the two primers are selected from the group consisting of nucleotide sequences prepared from the whole or the partial regions of a plurality of DNAs selected from the DNAs of claims 1 to 10.

15. A probe for detecting a filamentous fungus gene, comprising a nucleotide sequence prepared from the whole or the partial regions of a plurality of DNAs selected from the DNAs of claims 1 to 10.

16. A method of detecting filamentous fungi, comprising synthesizing cDNA from RNA extracted from filamentous fungi, amplifying the cDNA using the primer set of claim 14, and detecting a filamentous fungus gene from the obtained amplification product.

17. A method of detecting filamentous fungi, comprising hybridizing the probe of claim 15 to RNA extracted from filamentous fungi and detecting a filamentous fungus gene from the obtained product.

18. A method of estimating the growth states or the fermentation function of filamentous fungi using the results obtained by the detection method of claim 16 or 17 as an indicator.

19. The method of any one of claims 16 to 18, wherein the filamentous fungi are microorganisms belonging to the genus Aspergillus, the genus Penicillium, the genus Humicola, the genus Trichoderma, the genus Mucor or the genus Fusarium.

20. The method of claim 19, wherein the microorganism belonging to the genus Aspergillus is a koji mold.

21. The method of claim 20, wherein the koji mold is Aspergillus oryzae.

The application's sequence listing, which the Patent Office published only in electronic form, follows.

SEQUENCE LISTING (6008 sequences)

SEQ ID NO: 1 - DNA, 426 bp, Aspergillus oryzae
aattcggcacgagggtcgatgccatacttcaaatgggttgcccccgttgtacccatcgttaatcgcagccggttcatgcggcactaccgcgacccaaagaacccaccgcccctactsctccttcaggttatacttctcgctgggtccagagtctgtacaaacccccagttgatggatgccaatggttcgacaaccccgccagccatgccattttacaagcgggaaaagactctacgacgtaattatcgaagatcgaccgtgtcacaattgttcaggcgttggtactcctgggctggtactgggagggcccggagacgttaccaaaaacgtcttctactggacgagagtggccatggttgtagcacaggggtcaggtatgcaccgaagcgtggaatcgtctcaactgagcaagccggataaaagact

SEQ ID NO: 2 - DNA, 691 bp, Aspergillus oryzae
cggtatcgtaggttgtatcgattcggcacgtgggttcaccacgcgcctcttcttgggtacacggttactcactctggtattggagccattagagttgaagttttaccgtttatacactcttgactagtcatggcgcccgamcggtgggmcgatgaggaggmcagtgtctcccctcctcctgtggctcctcgtcgcagattcgacgatgaagaagaagatgaggtcctcgactcctggggcgccgctgaagactccgaagtagagcgggaaaaggcagccaaagcggccgaagccaaggctaaggccgacgccgaagctgccgcaaagaagaagagcaagtcgcagcgtatacaggaacacaaggaggagcgcaaaaagaaggccgaagaggaggattccgacagcgaggaggaggacgatcgccgacaagagacgcccgtctgcgccgcgcccagaaggatcgccgatctcaagcacgctgaagatctgttcggtgatatcgacctcaaccggaaccgcggcgcccccaaggctatcgttattagtgactcgcgccgccccgacgcaggccgtcgatctttctgccatgcctttattcaagcctaccactaaggagcagttcgctcgtttgacttccacccttatcccgctcctgactccccattcgaagaagcctcactattccctgtgg

SEQ ID NO: 3 - DNA, 360 bp, Aspergillus oryzae
gcggatgdagttaatgattggagggghcatctaaggtggatcaggggaatgagacaccttgtattggttggatgtgggtatcttcgcactcggaagttacagaacacsctcascaggargawcgwtgggmcattaggtgtattggtgagaagcggggggacgaatcggwgtatkcgcggcaatggraggtactctatgagttcgatgatagatctgaagtccgaccaactctgacgggtgaaggaggcatcactgagcatcgatacgtattgrgtggtttmttatcwggtacaatcmtgrgtgctacgtagcscgktmtwtcccygacyttttggkatacggtgytgcacwggcgaacyt

SEQ ID NO: 4 - DNA, 812 bp, Aspergillus oryzae
acgaggcgaggaccagtatatacacggctactctgatgccgatgcgcttgcctcagaggtcattgagcggcatggaaattcgcgttatcagagtcatatcgagcacttttctctggcttgcccaggtccaaaccctgattcgactcttccctcgacacaaagagaaggtcatgattaaatgggccggtttcgccttgattgtgttggacagcgatattcagcattttggataaattcctggtccagagcaacactacaaggcctcgattatatgaagatgcaatacccgcactcagttatctttttgagcttgctcttaatttgctctatgcggcatgggttatcttctactcgctatccaaacatcgtttcgcgttcttccacccgaagatgaggaatatctgcctggtggccctcttatccttatgcgcggttctaataccagttgtgtttttcgttctggatatcgcaaagccggaggtcgctggctggggtacatacatcaggtgggttggatcggcggcagctagtgttgtggtttgggaatgggtagaacgcattgaagcattagaacgagatgaaaggaaggatggtatactcggcagggagattttcgatggcgatgaaatgcttgaagtgaccccttctgaagaagtcgattggcctcgccaaaacaataggaatgacagaggaggaggtacaggcacatcttcaggatggggaggaatgatggggttgactcaacgcccattgcgcactcgagttggtcatcctgggggccgtaaccggcagactcgtgctgacgcacaaaa

SEQ ID NO: 5 - DNA, 953 bp, Aspergillus oryzae
  modified_base (45)..(45): n is a, c, g, or t
  modified_base (125)..(125): n is a, c, g, or t
  modified_base (136)..(136): n is a, c, g, or t
  modified_base (822)..(822): n is a, c, g, or t
  modified_base (861)..(861): n is a, c, g, or t
  modified_base (876)..(876): n is a, c, g, or t
ggcatttatttatttatacattttgggtcgggaatcttcatgctnggactaatcgttctttctttcttttcacttacccatagacttgaccttttccctttacgatcgttatggcgctacggctngatcagcgaangaagatcctcaaggtcttgatgacatcttttgcttctgggatttggatatccttcaccttcattttaccggctatttccttccttattggacgttctaccggcaacgcagacccttcccccgctgtctctcttgaatcaaatatttcgctacctaaacgcttacaagaacgcttttgccaaaacaatcgactcccgctatgatatcgtccttctaggaggcgctctgggttcgctcttctctttcctccaggcccttgccgccccagtcatcgggcgtctctccgacaaatatggccgcagacagcgcttctatgctcaatggcgggcaatatccttagcgtcgcgctctgggttgctgccacagactttcgcacctttgttgctagtcgcattgttggaggccttagtgaaggcaatgtgcagctggctaatgctatagccactgatatcagcgatgccagtcagaggggctcgaccatggccttagtgggcgcttgctttagcattgcatttacttgcggcccagtgttgggggcagctctttccaacattacggtcgtggcggcgaatccgtttgcaacggctgcggggatgtcgcttcttctgatcgttgtcgagacgctctatctgtacctctgcctcccggagacgcaccctcgtctcactaagctcacccaagctacgnctcagtccaacggtaccaagtttgcgagcagtgaaacgngtcgttcaacaccgngcgtgcataccaaataatcctgccgtgctcaatctgattcatttcctctttcttcttcccttctcggcttggatttt

SEQ ID NO: 6 - DNA, 856 bp, Aspergillus oryzae
  modified_base (672)..(672): n is a, c, g, or t
  modified_base (760)..(760): n is a, c, g, or t
aattcggcacgaggctgaaacgcccgaaccaagatctcctcttgaggtttccccacgagagacaccatccgcctctgggtccgttgatgctccagtggagagtccttcttgtccattccctcccttccttgatacatctaatccggcccactccagggcacctagtatacgcctaccacctgtttctagccctaccgaggagctgcaggtgcatgacagcatctatgaaaatgggcgccctcgagcttcgagccagatgcagtggttgttttctttcacatccgttctattaccgtctgtcattcgaacactcttccctactctggccgggtggaagacgaagagtttctgggaaaggatgctaggagtgattgcggctcctagcgtgctgttgttgacgataactgtccctgttgttgagcctgcacagcaagaaaccagcgcagatcctgtaacggtcgtagtgacttcagcagatggaggagactctggagtacctgcagtgaggctgccggagatagcccgcttgttctagctgttgatcacagatccactgccgaacaagctagtacaggccgtaccggcaatagccaatcagggcaggggcgacaacgttgggactcagagttgcccgccgttcaatcacggccagatccttcggaggcaacgcrnagaatgctgtcagtggctagtttggttacaaatattcaccggccccttttttgttgctttgattgcctggacagccattgattctganctagacatccgcaatttcttactaccgtccctcttatctctgctcttgtcgctggtatgcatcactggtcttatcacaagctcacggcatagtaat

SEQ ID NO: 7 - DNA, 568 bp, Aspergillus oryzae
aattcggcacgaggaacgatacccctatgttggaaatgctaaagccttgtattgaagagggtttcgttattcaagatcgtgaagttgctttggacttcattgctaagcgtggctcttcccagtcaagcatgaatcatgagcgtcgtgtgagatacgcgcgtgaaattatgcagaaggagcttcttcctcatatttcacagagcgaaggtagtgagactcggaaggcattcttcttgggttatatggtgcacagacttctgcagtgtgctctgggccgccgggatgttgatgaccgtgatcacttcggaaaaaagcgtctcgatcttgcaggcccccttctggcgaaccttttccgtgttttgtttacccgagttactcgtgatctccagcgttacgtccagagatgtgttgagaccaacagagagatttacctcaatattggtatcaaggccagtacactgactggtggcttgaagtacgcccttgctactggtaattggggcgaacagaagaaggccgcaagtgctaaggctggcgtgtcgcaagtgctcagtcgttatacctacgc

SEQ ID NO: 8 - DNA, 816 bp, Aspergillus oryzae
gatcgaagcactcacggcagagattgagaaacttggatcccaggaatcggtagtggatgccttgacgcggaaagctgagctcacaaacaatactgcagaactaagaattttacgaaagtcaaaagctagcattcaacgggaagtccgccgcaaggacatgcagcggcaacagtacatgatccaagaaagtgataacagcttgtatggtcgttcaactgttcgaatcacgtctattgttgtaggaaaagaagaggacggtcgcgaatttgcaatgtacgtggttgaagtgcaaaggaatgctggagagcaaatgccagcggcgtcctgggttgttgctcgcagatatagtgagttccacgaacttcaccataaactacgcatgaggtatccgtcggtgcggcacttagaattcccacgacgacgtatggtgatgaagcttcaacgggagtttttgcaaaagcggcgcctggcgctggaggcgtatttgcagaagttgctgctcctgccagaggtttgccgaagccgtgacctacggtccttcctctcccagcgagccatcatcccacgcgacgaggcccctcgtgatggagagaccaaggatttggtaacccggatctataattcggttgctgatggtatggatgatttcctgggcaacttcggtgtactcgatcagctctcgacagccgggcagaatctcatctctgcagcgactagccagcaagccagcactataactgactcagggctagcgaccgaggacgccgtgactgcagccgaagccgaggcagagctgaatgcatttgaggaccgaga

SEQ ID NO: 9 - DNA, 848 bp, Aspergillus oryzae
aattcggcacgaggctaggcttcattttaacgcagccaactttcaagcgtacgtaaaggcaaaggaaggaacgaattttatccttctccatttttggttccacactttaatagtcctcctccatcaaccgacgttactgaactcgtttggaggttctatacaacatctttatccgaacagcagggagttatcgatgtcttcggccaaaactattgcagatatactttccttttctgaacttgttgatggtaagagcttcatcggcaatccattcactagtcagccgatgtacatcgccgcgtgcgcgtttctgatggagagtgcttattactcctcgccgtcgtcagccccaggctctccaccatgccagcctttgttgacaaaccaaaacagtggctttattatgcccaatttagaccacccgtcagatggagcagaacggaagccgactgctaaacatatcctactatcctctgctgcgaaggagaattaccagcgatgctacaaagccttgaaggcgctagagacttactgggagggaaccaagtatatactcactgttctcgaccaaaaggccaagggaattgtggatcctctattatataccgaggaggagatggaaggtacagctgagattccatcggttcagccatttgccacacctggttggcgtcagtcaagtgcgccactgggtgctgctggtagctccaacgagtcggccgtagctttggaagtacggtcaccacggattgatcctagccaagccattggatgggctcttactggagcaaccaaactcttcgcagccaaatctgagcgtactatatcaaatgcctgctgcgcaaacg

SEQ ID NO: 10 - DNA, 863 bp, Aspergillus oryzae
aattcggcacgagggcgagasttcagctcacagaactcgcagactcgcgaaagagttcattgaaagtcagatgcaactcgaagccgatgcacgcgaaatcctaccttattcattcgactcctgcacgaaagccttagggccactgcggcagactttatacgcttgtttaacctgcaatcctcctcccaagaccgccgatgagccgcacgccgcggcaggagtatgctattcctgttccatcgcctgccatggcgaacacacgctcgttgaactatttaacaaaagaaactttgtctgtgattgtggtacaactcgtgtgccatcgtccgctccatgcacgctacgcaatgaccccaagaccggtacgaagggcgtccattctgaagaaccgcatcccgagaacaagtacaaccaaaatttccagaacaagttttgcggctgtagtgaagactataacgcggaggaagagaagggaacaatgtttcagtgtcttggactgggaactgctgaatcgggcgggtgtggagaagattggtggcatccagagtgtctcatcgggctgccgcgggattggtataaggacttcaagaaagaggcgggtgggaatggtcaaattgaggatgatgaagagacgccacttcctccgggattccctggggaagacgatttcgagacgtttctctgttacaagtgcgttgactcgaatccttggttgaaacggtatgcgggcacggtgggtttccttcccctgtatacaaggaaggtggattgcccaagacgaccaaaactgcacctgagactacagctacagatgtcaaagaagaagaacccactaacccaagaaacggaaaatggaggatgag

SEQ ID NO: 11 - DNA, 819 bp, Aspergillus oryzae
  modified_base (410)..(410): n is a, c, g, or t
  modified_base (803)..(803): n is a, c, g, or t
aattcggcacgaggctttaccagcattatggcgtgccgcaacgagcgacttgatctcaatgaggcatggttcctatcccagctcatagataaaatcccagactgggctccgacattgctcatgttccctgacagggccgtcagaatatgaccatggaatttctacgccgaatattattcactggagaggctagcgacatcggcgatgactggcaatcacgccatacacaagcggccaaggagctggttcacgcgagtatcagcagattgagaaggacatacctctcaagccctgggagcaacgtcgaagcgaaagttgtagagacaattaaagcggtcgtcgaacactgcctagttacatattttgatgacagtgaacaagacgagggatttgtccgtcagcgcaagctncctgggagctattgaggaattagctgttgatatgcctgaagagctggcttccgaatctgatgtaccttctccagaggaatgggaagacaactcagcgatggcaagtgattcggaaatgggagttgcaggcactccatgaggccctgtacgcaatatactctgaaattctcccgttgtatcatgattaaagatgactcgatgaacgttgcttggggggaagagcagaggtaactccttttgcttttgctctttaccttcgttgtgtttgggactgcattgatcggcgttttgtttgcccatccacactagaaatgggttctctgtttctgaactctgtacagggaaagggttatgtctctttatgtttgttctctttctcgtgtttaatttctntggccatgtgttaaat

SEQ ID NO: 12 - DNA, 1015 bp, Aspergillus oryzae
  modified_base (835)..(835): n is a, c, g, or t
cggcacgagggtttggttggtgttacttgatcccttacctgtttatcaattctagaactgggactatggacaaggacagggatccgaagaatgctattgcccgaattgcgattgtggctttcggacccattgctatcaacgctggtgtcgctggtatgttctttggtatggcttgctgtatgggtccaatctttagcatgtgctgtaagaagttcggtgcggtgctagccgccatcgcgcacgctattgccgttatcatcttgctcgttatcttcgaggtcatgttcttcctcgagggttggtcttggcctaggtgtgtgttgggtatgatctcggcggctgcaatccagcgtttcgtctacaaacttatcatctcacttgccttgacccgtgagttcaagcatgatcaatccaacatcgcctggtggactggaaagtggtacagcatgggctggcactcattttcccagccgggtcgtgaattcctgtgcaagatcaccgagctcggctatttcgctgccgacttcgtccttggccatctgcttcttttcatcatgctgcctgctctctgtgttccctacattgacaagtttcactctgtcattcttttctggctgcgccaagtcgtcaaattcggcctccgatctactctttgaagcagtctaagctccgcaagagaagagtggtccgtttcgcaatcctctactttgcgatgttgctcctcttcctcattcttctgatcgcgccgctggtcgttcgcaaactgaacatcaatctgcccaacattccaatgaacctcttacaaccccttgacgagaaacacaacaacaccatntcacagtataccggcaatggacttccaggtggctcgagcgggatccggcgtcgttctagctccgtacgactagcgtacattgcttctgaatccacgtgctgcgttttctagttcggacgattcatgaaaatgagctgtataaagtatccagcgccttgagtagctgctgtgtcatacatt

SEQ ID NO: 13 - DNA, 909 bp, Aspergillus oryzae
  modified_base (634)..(634): n is a, c, g, or t
  modified_base (824)..(824): n is a, c, g, or t
tcggcacgaggctgaatctatatagtcaatcttccttccgttctctgttcttgtgccgctcatcctcgattttactttgatctcattaagtctaccaatcgcagacggacgaaactctattctactatcacatcatatatagttggcagttgctcgtttccctctgctattcttccctcacagcctttatctgccaaagatgcaccgatcaagcagtcacacctaccaaacaaccagctcaagaggctcgtcgagtcatgccagcagcagtgcctttagtccgaatgccaatcccaacgaagactggaccaaaatatcagatcttgccgagcggcggcgtattcagaaccgaattgcgcacgcaattatcgtaaaaagctcaagcgccgcctagaggaccttgagaagagggctgcttcagcttcagagtccccagaacggtccaacgagaggactgaagcgccgaagagttcgcatcccgccaagcctcgtgctaggaactctcgcgcttctaagtcgaacggggatgccactagacgggctacagcagagaggaccccggcctatgatggttatgcagcacaggatgacaggggcgcgatgttctcccatcaatgtacgcgccastctccgnatcacccccgcctgtgtattcttatccttcatattcccacttggaaccctacggcagtccccctatggacatccgcatccctatcattcaatcccgagtacctacagtgatatgtataatggagagtacggggggtcagtgccatctattctccccgtcacaatgactacgacaggcccagtcaagaggncgcatgtctacgcggacgaagatatagtgagcccgtttagcatgagttacgcatccatggctggcatcgatttgtgtcgagttcg

SEQ ID NO: 14 - DNA, 781 bp, Aspergillus oryzae
  modified_base (669)..(669): n is a, c, g, or t
  modified_base (741)..(741): n is a, c, g, or t
attcggcacgagggccttagccatgcctcactcagatactcccccaacctccaactccacgggtggtaaagctcctaatgttgctatcgtcggcggcggcctaatcggcgtgatgctgggtctcggcctctcacaccgcaacatccccttcacaatctatgagcgcgcctcggactggcatgagattggcgccggcgtggctctgaccagcgtcgcgcagagcagcatgcagcgacttcatccggaggtcctccctgcgctccaccgagtcgccaaagccaatcatttcggcttctgggacggcttcactccttcgaccaaggaggccgctcaggctctgaggctctgcatttcctgcttgatgtgcccgggactgactattggtgctgcatgagatcccagttcctccgcgagctggtcgctctactgcccaagggatcgacccgtttcaacaaggaactcgaaagttatgtagatgatccgagccgtgaacaggttctattgcgctttaccgatggaaccactgccgaagcagatacttgtgagacgtctcctctttacccctcttgtcaaattacggactaacaaacaaacagtactcggcgctgatggcattcattcacggactcgtcagctccttctgggagatgataacccggccgcacacgncagtttcactcatcaagtgggctatcgcaccgtgctccctatctccgaatcgatagaggtcttgggcgaggncaaagcggtagtgacttttgcatccatactggtcccaacg

SEQ ID NO: 15 - DNA, 827 bp, Aspergillus oryzae
aattcggcacgaggccgcatcaagaaggatcgcttgagtcgactgtgggaaggcattgttcgagaaaggcacgcacatacgctgggcaaagcaactcagccgaggaacaagctatttacttgctctgttcgcatcgggttgaggaggcctgcaatgtcttgatagccagtcaaaatcttcatctagctactcttatcgcgcaaatcggtcgagaccccaccagccgtgcagatatggcgaagaaattgagatgtggcggcagcataacgtttattcggaaatgactgagcctattcgagccatgtacgaacttcttgcaggcaacgcctccgcagtgaaggtaaatcaggcggcgcactggaggatcgtgcttctacttttactctcactgaacgttttgaactcgattggatccaagcatttggtcttcgtctgtggtacggagtcacggatgatgaacctattgaggccgcggtttcgaaattcctcaacgatcttagtaccggtaacgagccctctttcccacacccattccgtcaggagagtgcccaggaattatcgctagagtcccctttgtgggttctgcttaagctctactcaatgactcttggagcagcaaaggatattccggcaatggaattccctgctgctctgctccccgagtccgtgagcggagataaactgtcgaaccgactctccttccagctgtatcagctcctcgccactgctgtcggtcaacatgacggctttcagattgatactttccgagtggatcaaatggtatgcgactatgcctgggagctcagtcgtagtgaccagctcgaccg

SEQ ID NO: 16 - DNA, 680 bp, Aspergillus oryzae
  modified_base (53)..(53): n is a, c, g, or t
aattcggcacgaggataaaacagaaaagaggatactagcagcagcatccgcantaccaaaatttaagttgccagttcaggttcagattttccttctacccttttccacccctttgttgggatttggtcatgcattctccgccgcgagccagcccaacctattctcaactctctaccgctttaacgctctgatgatgtgtccgtttcgttcttttactttgcagtgggacttggtgatttcttgatgattcatttgggggcgttataatgggatgtcatagagaaagacgtggagcctccaaagggcatccttttcgtttcttgcccagttctgtctacctcttgaaacaatgtgggtgcaacactctcatccggtgatgaggagcaagggactctcgccctaaccatatcgccgatccggctaattctggtattggctacagctagagcaggataatttgatggtctggcttgaattgggttcggtgtctagatacctagggttaccgagtagataatgaatctatgggttttgaactactcggtccgttgtacctacttgtgggtgtgagtttaccttatttaaggccagagctgtacggctccaaagatccacccgtgtggtagatcgtgtgtgcgccgattggtaaataatagaatatgggatgtctaaaacagaaa

SEQ ID NO: 17 - DNA, 798 bp, Aspergillus oryzae
  modified_base (559)..(559): n is a, c, g, or t
aacgttgctgagctcgagcgaattttccgcgatgctgggtataatgagacaggtgacattttaaaatcgatttcggaatcacctgatcaatttttctctcttcaccgagtcctttctaggaagcttagacggcaacgaagcgacactacgttttcgagtcgccgtacatggttcgccgactatagatcgccagatggaaggagcctgtctcataagcaagtcgaagctctcgtttctgtgacaaagggctgggagctcccagaggacgacatccggattttacgcatatgtctgacattgtggactggggtgccgagcgtcttttgcgatggacaggccccagatcagaatgtcattatacgtttttataatgatctgcaaaggatggaaaaagatgaccctgttaggcggttagtgttgctcatgaacttatctgctgatgtcaaacgacagcaagataagttgggcaaggaagggcagaaaaggcagaggtctcgtaaggcaccgtctaagatctcagatgattgcaaccgtgaccctgtttttttaacttcttctntgcgttgcttaactcgaagcttatggccgggggttggaggacgatgagctggcagaaggcggaaatcgctatcaacaagctccctttttgggtggaagtggttgcaactagactaccctgagattactctttctcttcggcatgccgctgcaatgaagtacgaaaaagcgcaaatggaagcgcattgagcttcacgcaatcaacgcgtacgtggaatcattaccgcagttccgtatacg

SEQ ID NO: 18 - DNA, 897 bp, Aspergillus oryzae
  modified_base (457)..(457): n is a, c, g, or t
aattcggcacgagggttcctggtggtggcacgtttcaactagtcaggtgtttcatagatagacaacaggtcaacatggccagcgtaatttttgacctcccctctgcataccccacacctactgatggatggttcggcagcatgggataccccgctacagcctgaaggagaaatccgaagaggctcgtcaacaagagcttcgcaaaatagaaaaataccaggagttggatcatttagtccgtgcgaaggtatatctactttgttcctcagaatacacacggcgttctgataggtagtccagattgcagaacagcagtatacgcctgaaacccttcagaaaatctccgaattgttgaccaagaatccggagtactacacggtgtggaattatcgacgccaggttctgcgacacgaattcacacaagctgcatcaagtgactcggctgaagctgcagcgnataggataactactttaatcaagaatgacctgctgttcctgatgccgctactgcgcastttcccaagtgctactggatatggaactatcgtttatggcttctagatgaagctaaacgtctgctgccgctctccatctcccggagaatctgggaagaagagctagcgcttgtgggcaaaatgcttcgcctagacagcagaaacttccatggctggggctaccgacgagttgttgtggacacgttagagacactaacgtccgaagaacagggggaaagtatggcgcaasagagttcgagtatgcgaaaaagatgatcgggaccaatctctctaacttttccgcgtggcattatcggacgaagcttatccagcgattgctaaatgagaaatcagccactgatgcggaacgaagaaagatgctcaatgacgaactggagcttat

SEQ ID NO: 19 - DNA, 774 bp, Aspergillus oryzae
  modified_base (279)..(279): n is a, c, g, or t
  modified_base (281)..(281): n is a, c, g, or t
aattcggcacgaggggtcaatatgcttcgggggttgtttgtggcgtctcttgcagccagcgtggtgcatgcgcagtcctattcgggatgccacacacatggcagcgtggagtactgttatggcaccgatggcgaagagactcccatcaccacacatgcacaggcaacggccacttctgtatctgctactacgacttcgtsgcacagtcatctgcagtgacgggctgtcataaccatggtgacgatgtctactgtatcaatggcgaaggaaacgaagtsnanggtgtcgttgacagcaaccccaactggggagctaccagcacagtacaccggttgccactcccatggtggctctcagtactgcatggacgcagatggaaacgacgttcaaatcctaaaagagggagaaagcggagacgaaagcgacagtaccagcgaatccagcagttcctccagcggtgaacaaaactgtcacttccatgccggtgtcgagcattgcgtcggcgccggcgagtcggaaggctcgagcgagcaatcttgcggtgtccagagtcgcgactatgatatgccactgcggattggaacattattcgtgatccttgttaccagtgcccttggtgtcttccttccgatgttgctggtcaaacttccctttcccacgatcaatactatggcgtcgactgttatcaagcaatttggtaccggtgtgattctgtccactgcgttcgttcatctatacactcatgccaacctcatgttcacgaacgaatgtctt

SEQ ID NO: 20 - DNA, 811 bp, Aspergillus oryzae
aattcggcacgaggcaagagccttggtcgggaacttgaaggactgtatcagcgctttgacgaagagcgacgcagctgggatgcggcttccgcggccaagcaagaccaagttttgcggttggtctctgacactctttctaacaacgtcgaaaagaatctcgcacgcatcgtttcgaacagcatccagttggaagtggtacctgctttggcaaacctaacatcagcagctgtcggtaaacaattggacaatgttgtcggtcaacagatgggggttaccttcctcgtgaactgcgccaggctctacctgacactgtttcccgtgctgtccagcaacctgaaatggtgaaggccctgtcggaagccgtaagtcagaagcttttgcctgatcttgaggccgaaatatcaaaggccgttcaacgcacggtcacgccagctttcaagaccctttctacacgtattgcagagaagactgggtccgacatggagaagcaactacaggcacatctcaagcaatacgaggttcaacgccagaatgatgccgctaagattgaccagctcactagtcttgtccgtggtctatcggacacggtggcttcattggccgcggcgcagactggtttccagaatgaggttttgaggcttaatcgtgccgtgggtcagcaagaaggagacagacaaacttcgcaacagccgacaagcgccatggccgctacacctagcgaggcacagtctgccgaggacgcggaactagcggagattgctcagttgatgagccaaggcagatttgaagagggttcagtcaagtggcttca

SEQ ID NO: 21 - DNA, 700 bp, Aspergillus oryzae
  modified_base (590)..(590): n is a, c, g, or t
cccctccccctgtcctccagtgtacactctttcaaggcctattccgagcgyttggrgttcgmttgcaagcgaatcgtccccccttgacttctccattgcaaacaacaaccggctycttstkatccctaaggcgacgmagcccmcagcatcccttggtcagggcccctttcagcgcttsccaaggytagagatgtctactactacagctgagatggcccctgccsaccgtaagctcsagaagaagcccgwcaagtttagcaatmtsstgcttsgtgcaggwtttawtatgttcrmsgtcaccacttttggacagccgcctkgawgtgatcaagacgaccatggycrccaatcgaggcgacagctttcaccagcgctactggagtcggatatggrgtcgtggcgggatcctcggttattatcaaggtmtacattacgwgggactggattawggactccaccaawgccgctgtccttctttwcktcrcktccgaggcagaattccgtaccaagatgmtcggcgcgccacactttctcgctgrtatctcaggaggtatgacgggtgktattgcccaggcatatgccactatagngcttctgtcacctgatatgaagacgtatcgagattaccaagcactaagatggctgtccagtgtgtaaagtctccaagcaccttctagacattcatgaacatctatcgcaa

SEQ ID NO: 22 - DNA, 484 bp, Aspergillus oryzae
cacgaggatggcttagactcttatcgatcggagttcttcttgaaacaattgtcctacgcatagatatttatctctaccatatgagtcttgcccacgatgtctagatcccgacaaatagcaccgagtgggacatcccaggttgaatcggtgcctcaacagcctaataatacatcaactgttcgagttccaggcacactcagactaagagcagaaaacgaaccaactgttgagtctaacactgagggcagaggcttgcaccggcatatacgatggagtgaggatgtgatagataatgaaggaatggggaaaaggagctctaaagtatgctgcatctaccacaaagctcgacctgtcggtgaaagtagttcagagtctgaatcatctgattctgaatcatcggacgccgatagcgataatgagatagataatcccaggaacaccctgggccgttcgtcggtgcatcatattaccgacaatcattccc

SEQ ID NO: 23 - DNA, 612 bp, Aspergillus oryzae
  modified_base (19)..(19): n is a, c, g, or t
  modified_base (163)..(163): n is a, c, g, or t
ggccccaacccggacacangtaccggctgggtacaatgttatccccctaatcccagtcggactcgccatgatggcctcctacattgtcccagaaacgccccgctacctagtctccaaacaaaaacatgagcgaaggccgcgcagtactcgcccgcctccgcgncaaagacatcaacgacccggaacttgaagccgaattcgtcctaatcgactcacaagtacgcgccaaagctagcgatcttgccaccgtcaccccctggacagccttcaaagaaacgcaaaccaaccccaactaccgccagcgcttctggctcctcatcacaatgcacacaatcgcccaatggacgggcggcaacggcatcacctactacatctcgacgatcttcgagtacgccggtgtaacaggcaactcgacctcgctgatcagctccggcgcctacggcattgtcaagctggtcttcacgatggccttcacatggggacttatcgacctgttcggccgccgccgttgcgccttggcgggtctcagtctccagctagcggcccacatttacatgggcgcctatatgggtctgcaacccggctcatccgacaacaaatccgcgtccgacg

SEQ ID NO: 24 - DNA, 823 bp, Aspergillus oryzae
attcggcacgaggcgcctatctaatcgcacaccctaaacgcaagccatccagattacgacttctctcatgtgttgcgcccgtcggacttccatcgcgagaggaacatcaaacgggtgatgaatacgattgattccacactgttcaaccttcggccacgtgaagccatcgacctcgctcccccatcaccagtgacaatctcggggtcatacaatgccggggcctctgctacgtggggaccgaggatgtggcaaataatcgatgagcagctatcgctcaatgagtgctccatctactcctactctccggaagaagatccttccgatgcggacgacggagcgatctggagcctgcactacttcttttttaaccgtactcggaagcgtgtctgttatctctacctcagagccatcccgatccttagtcacacgcctagcgatggagttgctacgccgaccgcaaagaggacgtacgacgacggctatctcacaccggaccttgggtcaagcaagcgggcccgctactggctcggcgacgtggtgcacttggaagacgagagcgagtccgacgaagagcacgccagcaagccagcccgacccgttgtggacgaatacgacaactacgtgctcagcgacgaggaattccgatctagatctggcagcaagggcacggtccgtgcatgagtgaagaaattgccgactcgatggaggtttaaattacgattcaacccgttatgttacgacttgatattgcttcgctgtcttaccttttaatcttccgctgatgctccctcttcttcgattcgatttcaatatggatattctt

SEQ ID NO: 25 - DNA, 578 bp, Aspergillus oryzae
  modified_base (16)..(16): n is a, c, g, or t
  modified_base (83)..(83): n is a, c, g, or t
  modified_base (87)..(87): n is a, c, g, or t
  modified_base (271)..(271): n is a, c, g, or t
atatcgattcggacgngggaaatctcacctggaacctgtcccacccaagagggcgatggcgtgaggtcttatcttgacgtakngganggaggatcctgccattcaatcctcgttggatgcgcttgctgcttggtggtctagccatctgttacaacgagcccttttgagatacttcgaggccagtgctggcggccaagacaggaggaagagccgcgatgctttaaaatccaaactaagaacagttctcaatgtagcgcctcagccgtcgggncgaatacggtgctctggttatgaaagctgttttcttcgaacaagatcgcgttgcgaatattaacatggttcttgcagctctgcccaaggacaaaggaaacaccaagaaagcacaggcttcaaacttcttggactcttctctccccgtatctgttcgtgatgagatcaatattgccgtgcgttgtgcaatgattgcagccatcttcacagcacggaccaccggggatacctctctcccggcgtccttcacgatgcagaaagccgtttcctggtttaaccagctacctttggaccccgttgagctgacg

SEQ ID NO: 26 - DNA, 630 bp, Aspergillus oryzae
  modified_base (36)..(36): n is a, c, g, or t
  modified_base (89)..(89): n is a, c, g, or t
  modified_base (157)..(157): n is a, c, g, or t
  modified_base (346)..(346): n is a, c, g, or t
  modified_base (465)..(465): n is a, c, g, or t
  modified_base (520)..(520): n is a, c, g, or t
ggcgcggtatcgtaagttggtatcgattcggcacgngggaaatcatagacaacatgggttgtatgggctcaaagccgttgacacaacgnttaaggttgcgttacaagcgcaatsctcggctagccaaggtcctgaagaatgacaaaaaagtgatggntaggcctatcaagattctccttctcggtgctggcgaatcaggaaaatcaacaatcataaaacaaatgcgcatcatccattctgggggatttcctgacgatgaacgccgtcaaacgcgtgcagtaatctattccaatgttgtcattgcattcaaggttttgctggatattatgcgcacggaaagcatcgngtttgagcaagagaagacaaagccacttgcggattatatggatactctggagtctgacgtgggctcagatgaagcattttccgacctcaaggttcgcgatgccatgagagacatgtggnatgatgcaggggtgcaaaaggctgtcgctagagggcatgaatttgctctacacgntaatctgcattactctctttgattcacttgaccggatattcgcgcctggctggcttccagacaatcaggacatgctccaagcgcgtttgcgaaccacaggaattacagag

SEQ ID NO: 27 - DNA, 600 bp, Aspergillus oryzae
  modified_base (42)..(42): n is a, c, g, or t
  modified_base (108)..(108): n is a, c, g, or t
  modified_base (126)..(126): n is a, c, g, or t
  modified_base (132)..(132): n is a, c, g, or t
  modified_base (161)..(161): n is a, c, g, or t
  modified_base (481)..(481): n is a, c, g, or t
  modified_base (586)..(586): n is a, c, g, or t
aattcggcacgaggccccaactcacacctgacaatgtcattntctatacttatacagcatgtgctcgctccagtctgccatctacggacgctactryrgccgttaccncmtaaagrktaaggacsnggattntgagacacgctcccmkttgmsgaagcttntacatgaccatagcctgttggaccattgtascwggcaagtkggacstgttcaagktckctctcctagtcctgcgcmagccaggtcatgctcgctgccactgacgcagtgcgtgtatatttcatggacactgaccaagtactgctgaagagcagatcgctgtcacwycattggtsytggttccytcggtctgagcacctccgtaygtctttgycaagtatcttccgcacctaatgattgctatcgtcgagaycactgyctcttctgatcgagcaggttctggattgggtagcacaactcttttctgcgtatgaysattccnccacctgcgcatgttcttactgaacgagctcgtatttccttacgaagwggacgtawaccscaactacgttcwcgttatgaaygtctgcctgttatacctactcantaatctcgawggtt

SEQ ID NO: 28 - DNA, 682 bp, Aspergillus oryzae
aattcggcacgaggcaagattggaggggaaggttctgccccttctggatttaaacctcccgggaccccagtggctgagcgacgtgcggatgcggcaacaaatggcgatgcgactatgaccagggttcagcacaagttccttctcaaagggatccaaagcctgaagcgtatgcacgactcgcgcttttatcgggagccagttgatccagagaagatgaatatccctcattatccgcagattatcaggcagcccatggatctcgggaccattgagagacgtctgaaaaataatgagtacaagtcagtcaaggctgtcgttgatgattttaatctcatggttcagaactcgttgacgttcaatggtcccgatcatattgttgcgcaggaagggcagaagctcaagtctactttcgaaaagcagatgattaactgccctaggcctgatgatatcgaagagaggaaaccgaaaaagtcttctcctaagacctcagcggcacgacgggaacgcgaacaagtataggtcaggctccaccacgtccaactggtggttcccctcaggctacaaccttcgctttgggacctgaaggtctgcctgttattcgtcgcgattctaccaatgctgatggacgtccgaagcggtccatccatcccccgaagcgcgacctcccctactcaacgaagcc

SEQ ID NO: 29 - DNA, 642 bp, Aspergillus oryzae
  modified_base (178)..(178): n is a, c, g, or t
  modified_base (206)..(206): n is a, c, g, or t
  modified_base (208)..(208): n is a, c, g, or t
aattcggcacgaggctcgcccagtttcggaagtagagaatcgcgcccggtcacgcctccatcctaacccttaactgccaccttcatttccatcaaccgtgaaccttcactactacactccttccgacatccaccacaactccttccaccatgttgctgcgtttcctgtccctgacagncgcgctctgtctgagcagctgtgctgantngtcactgcccgagcataaggtcgaactatcggggctggatcccgagtttcgaagccgaatcatctccaatgcccgtccaacaaacgtgccgaccgctctttgttcattctcagattccgaatgttcgaaagatatcgatcttcattcccagctggtacgtttggtctcgtaaactagaaacatgatgaggacaccctccctaacccagacagacactggacttctctacggaaaatggcaccctactcgccaaccatgaccctatcttcccacccactttcccaatgcgattccatgctgtccggcattttcaatcaggccgagagacggtcgacctggcctatgaactcgatgtgcgacccatgccgtcacgccctgacgaagcactggggggcgtattccttttgaaactcagactgtttgacctccaaggg

SEQ ID NO: 30 - DNA, 439 bp, Aspergillus oryzae
attcggcacgaggcatattacgtcgcgcacatacacaaaacaacaaaagccatggatatagcatacgaccacatccaagaggagatcctctcctccaacgacaccaagaaggagggaacctcgcaagacgagaacaaaacaccgcagcagtcaaacgtcgacctgaacgccgagctgcaggaaaccttccgcgccttctccgcgagcccatggggcatgcgcattggcggcctgtgggacaacgttcgcaaacagggagagacttactacgaaggtgcgaagggagtatgccgcggccagcgaggaagccgccaagggcttctcggacttgaagcagagtctcgtggggcgcacgcggggtctgtctctgagcacggcgtttaatgccggtgccacggataaggcggctgagggagagacagctgctacgccggagtcg

SEQ ID NO: 31 - DNA, 506 bp, Aspergillus oryzae
  modified_base (24)..(24): n is a, c, g, or t
  modified_base (30)..(30): n is a, c, g, or t
  modified_base (61)..(61): n is a, c, g, or t
  modified_base (347)..(347): n is a, c, g, or t
ggtcggcggtatcgataagcttgntatcgnattcggcacgaggctcttttcttctcatcgntgcggatccccgaccctctcttccctgttctttgcctcgtcctgcccccccttaaaaataaaataaaataaaataatcccgccaaataaatcaacccgtgccgcgttctcgcaagcttaccgacaaaaaagcaaatcacagtccatccgcagttttcctgtcgtttcatcttcatccgtggcctccgcgcaatttagccaaagcagccttctacggccgcgacccttcgagttccaacgttttctatcagaccaaagtcgtatcctgaaaatgagctccgaagganaaaggccaggacctccggcgaggtctctcgtccggagcctactctgcctactgttaacccggccgttgagagggcagagcctcccaagcctgccttccaccccgcggtttatgtgaccgtgtggattattttgagttccagtgtcattttgttcaacaa

SEQ ID NO: 32 - DNA, 400 bp, Aspergillus oryzae
  modified_base (22)..(22): n is a, c, g, or t
  modified_base (25)..(25): n is a, c, g, or t
  modified_base (38)..(38): n is a, c, g, or t
  modified_base (49)..(49): n is a, c, g, or t
  modified_base (128)..(128): n is a, c, g, or t
  modified_base (131)..(131): n is a, c, g, or t
  modified_base (149)..(149): n is a, c, g, or t
  modified_base (157)..(157): n is a, c, g, or t
  modified_base (168)..(168): n is a, c, g, or t
  modified_base (263)..(263): n is a, c, g, or t
  modified_base (296)..(296): n is a, c, g, or t
  modified_base (303)..(303): n is a, c, g, or t
  modified_base (306)..(306): n is a, c, g, or t
  modified_base (317)..(317): n is a, c, g, or t
  modified_base (348)..(349): n is a, c, g, or t
  modified_base (351)..(351): n is a, c, g, or t
  modified_base (357)..(357): n is a, c, g, or t
  modified_base (375)..(376): n is a, c, g, or t
gataagattgtatatggaattnggnagaggattttatntgttgaccttntgtgacacacttatwgtggattatttatgwwtaaatatagtcaattattctagaccagktttattcataatggtatggntanatatataaagttggaaanaatggatncttatgtaagngattggtagagggtttgaagatgaggacttaagggagaaagtktgtttttgggataggttttgtgatagaattgttagatgattaaataagtaantttggaggttggtataaaatggttggaggattntatttgnggnaagaggttaknaaattgaaaagtttgaaaaagwattatggtnntnataatngaattgaatggtgatttnngtgaaaatttatgggawaatgagt

SEQ ID NO: 33 - DNA, 400 bp, Aspergillus oryzae
  modified_base (53)..(53): n is a, c, g, or t
  modified_base (87)..(87): n is a, c, g, or t
  modified_base (91)..(91): n is a, c, g, or t
  modified_base (101)..(101): n is a, c, g, or t
  modified_base (121)..(121): n is a, c, g, or t
  modified_base (130)..(130): n is a, c, g, or t
  modified_base (135)..(135): n is a, c, g, or t
  modified_base (201)..(201): n is a, c, g, or t
  modified_base (206)..(206): n is a, c, g, or t
  modified_base (219)..(219): n is a, c, g, or t
  modified_base (235)..(235): n is a, c, g, or t
  modified_base (268)..(268): n is a, c, g, or t
  modified_base (280)..(280): n is a, c, g, or t
  modified_base (285)..(285): n is a, c, g, or t
  modified_base (302)..(302): n is a, c, g, or t
  modified_base (306)..(306): n is a, c, g, or t
  modified_base (313)..(313): n is a, c, g, or t
  modified_base (327)..(327): n is a, c, g, or t
  modified_base (330)..(330): n is a, c, g, or t
  modified_base (333)..(333): n is a, c, g, or t
  modified_base (336)..(336): n is a, c, g, or t
  modified_base (345)..(345): n is a, c, g, or t
  modified_base (363)..(363): n is a, c, g, or t
  modified_base (378)..(378): n is a, c, g, or t
  modified_base (381)..(381): n is a, c, g, or t
  modified_base (385)..(385): n is a, c, g, or t
  modified_base (390)..(390): n is a, c, g, or t
ggcgcgtatcgtaagtkgtatcgattcggacgtggcctcccccaccttggtkngtatgacatcgccataatgtctctctccaacaangttncgcatcaccngtggcggccttaagggcaangtgtgcttnatccnktkcggcttcaactgtcctctcggtgcgcggcaaggaggtcaccaacaatcaggtgatcgkcggkngtctncgctaccatcaangacggcattagggatnggggtaagggcckttkcctcattkcccacctcnggcckccccgtnggaanggcaatcccaagkacangctnraggctnttggtactgrggtnggngangtngttaagaankttttcatcttcggccgngactggtgcgggaanggngctnraggngtttttgaca

SEQ ID NO: 34 - DNA, 771 bp, Aspergillus oryzae
  modified_base (36)..(36): n is a, c, g, or t
  modified_base (86)..(86): n is a, c, g, or t
  modified_base (101)..(101): n is a, c, g, or t
  modified_base (104)..(104): n is a, c, g, or t
  modified_base (138)..(138): n is a, c, g, or t
  modified_base (151)..(151): n is a, c, g, or t
  modified_base (170)..(170): n is a, c, g, or t
  modified_base (194)..(194): n is a, c, g, or t
  modified_base (204)..(204): n is a, c, g, or t
  modified_base (219)..(219): n is a, c, g, or t
  modified_base (221)..(221): n is a, c, g, or t
  modified_base (248)..(248): n is a, c, g, or t
  modified_base (501)..(502): n is a, c, g, or t
  modified_base (516)..(516): n is a, c, g, or t
  modified_base (567)..(567): n is a, c, g, or t
  modified_base (627)..(627): n is a, c, g, or t
  modified_base (676)..(676): n is a, c, g, or t
  modified_base (740)..(740): n is a, c, g, or t
attccttaattaaaggcggaccctccttttgkactngttctcctacccgtctctaactagggcaaaacaaaacatggaccggccanktcgcttccgctccngcngccaggcacatgacacctccggttcatcatccangttcctcaggatngtttccaccggtccctatngatggcggctctcctccccctccngacatcccangcaggtctcaggacngnctgggctatgggaacaacccatatcangcccgtccggcgaaggcggtagtgggcctacgccctggtttgggggttcatcaacgtcccacggggaaatgggatttcaggtcgggagccgtatgatggccgggcaagatatatggacagatctaaaccgtacgttccattcccgcttgaaacactatttcaatgtgccaactcctatgattgataaactcgcctggtgctctttccttggagacacaaaccatggtctcgccagcagagccgtgtcacgcgnncatccacaggcccnaatggtcagatctcccatcagcaatattcgaccatgttcctgccccctcgngatgacctgaactcccccgatatgtatattccggtcatggctctcgtcacatatatcctnctatcggcaatgctggcagggttcagaggcaacttccaccccgagcttnttggttcgatcacgacaacagctattgcagtcatcgtattcgagatactttgtctaaagctggntacctatattctcagcatcaacaatgagtcg

SEQ ID NO: 35 - DNA, 534 bp, Aspergillus oryzae
  modified_base (390)..(390): n is a, c, g, or t
  modified_base (396)..(396): n is a, c, g, or t
cgaggcacctccgccgtattccgcgtcgatccgtcactcgaaatgccattgcatcggccgaagtaaatcgggtcatactccgtctccgagggggggatgtctcatttggtgatactgcatcaagcgatagtccagctccgttgtgctcgcctcctctccgtttacgcccgccaacttcacctccgccgccgcttacttcgttgaacgcccggtccctaccgttgacaatgaaaggccgatcctcgagcaccacctaaccatctatccgcggagtcagtccaaggatttccctcgtcgccctcgttgctggggttcacgaactgagcacatcatccagcaggactgggacatgttcttgcgatatctgtttcctccacatctcggcctcgnctcctnttccgatcagttacctcgtcaggttagggcacagatccaacgagatcgcaaagatcgcccacaagagacagacgagcagcgccggaagcgaatatcggccgttatcacagaatggaaccaatatttcttcgaaccccg

SEQ ID NO: 36 - DNA, 841 bp, Aspergillus oryzae
  modified_base (676)..(676): n is a, c, g, or t
  modified_base (700)..(700): n is a, c, g, or t
  modified_base (715)..(715): n is a, c, g, or t
  modified_base (724)..(724): n is a, c, g, or t
  modified_base (726)..(726): n is a, c, g, or t
tcggcacgaggagacttcaaaggaccaacttactttcactcttctgtcattttcctgtctcaaaccttatacgaggtgcgtataaaggcaaaagagagagagaaaaaaatccatatcacttaaacttcagaatcactcagtttacatacgtcggctagccgtcttcaccgcaacatctggttatcgcaagttacttcgctactacgtaatcagcatacccgtgcccctcctggccttcctgccttgagttgttcggtatttccagcacttctatcgcaacaaacaggcccagggagtcaagacattaataggtatctaagatggccgatgtggagatgaaagaagcgtctgctggtgcttcagccaagggaaagggagcatctaaggcctccgaagtgcgagtgatggcaaaaagaagttcgaagtcaagaaatggaatgcggtggccctatgggcgtgggatatcgttgtcgacaattgcgcaatttgccgtaatcatatcatggacctgtgtatcgagtgtcaagcaaaccaaggttcatctacgaccgaagagtgtacagttgcttgggggatttgcaatcacgcgttccattttccactgcatatcccgttggctgaaaactcgccaggtttgtcccctagataaccgagactgggaatttcagaagtacgnccggtaaagcagttctatagaggnacctttgattgctgnagcttccancntacatgatgccataaatttttatatgcaagaggcgggcaggaattggtctgaatgccgttcgggtttgttttcacactttgcggtagttactatgatgataatgcgcttcttggt

SEQ ID NO: 37 - DNA, 460 bp, Aspergillus oryzae
  modified_base (26)..(26): n is a, c, g, or t
  modified_base (31)..(31): n is a, c, g, or t
  modified_base (40)..(40): n is a, c, g, or t
  modified_base (46)..(46): n is a, c, g, or t
  modified_base (71)..(71): n is a, c, g, or t
  modified_base (83)..(83): n is a, c, g, or t
  modified_base (89)..(89): n is a, c, g, or t
  modified_base (128)..(128): n is a, c, g, or t
  modified_base (136)..(136): n is a, c, g, or t
  modified_base (142)..(142): n is a, c, g, or t
  modified_base (163)..(163): n is a, c, g, or t
  modified_base (168)..(168): n is a, c, g, or t
  modified_base (173)..(173): n is a, c, g, or t
  modified_base (190)..(190): n is a, c, g, or t
  modified_base (195)..(195): n is a, c, g, or t
  modified_base (215)..(215): n is a, c, g, or t
  modified_base (222)..(222): n is a, c, g, or t
  modified_base (232)..(232): n is a, c, g, or t
  modified_base (258)..(258): n is a, c, g, or t
  modified_base (269)..(269): n is a, c, g, or t
  modified_base (276)..(276): n is a, c, g, or t
  modified_base (279)..(279): n is a, c, g, or t
  modified_base (294)..(294): n is a, c, g, or t
  modified_base (301)..(301): n is a, c, g, or t
  modified_base (306)..(306): n is a, c, g, or t
  modified_base (316)..(316): n is a, c, g, or t
  modified_base (318)..(318): n is a, c, g, or t
  modified_base (322)..(322): n is a, c, g, or t
  modified_base (337)..(337): n is a, c, g, or t
  modified_base (383)..(383): n is a, c, g, or t
  modified_base (395)..(395): n is a, c, g, or t
  modified_base (402)..(402): n is a, c, g, or t
  modified_base (418)..(418): n is a, c, g, or t
  modified_base (422)..(422): n is a, c, g, or t
  modified_base (425)..(425): n is a, c, g, or t
  modified_base (443)..(443): n is a, c, g, or t
  modified_base (455)..(455): n is a, c, g, or t
atatctgattcggacgaggctcaaangcttnggcctccantcattnrcstttccattaccaaatccaaaangaaaaaggatcnstccangggrcscgaggccttccacggtgtcctatcattcacttngctgsccnrattcngtkcatttttcggggracacngtttnggrankatktcactatctccanstttnccggkarattagggtatcankaaaatnraaaatacsnggacgcattcctaaatartgkgkcangggccttaaansacaaangknkataaaagkctacangctcaanscatngttctttggngnrcanrtacatcsacggatnggtatatggatcaataccatacattatcccatttgctacctataangtggkcattttnggsaatnggtatcgcacctccankctnrtnggttctcttttgtatcanstaactacattngaata

SEQ ID NO: 38 - DNA, 710 bp, Aspergillus oryzae
  modified_base (438)..(438): n is a, c, g, or t
  modified_base (603)..(603): n is a, c, g, or t
aattcggcacgaggttcgaagccaaccggtggtcccattggctccgtgggccctatcggctctcgcccagttcagccagcaggtcaagctcaggctgccaacccggcactgaacaaacgctccacgacacccctgccatctcctcttggtttcggcttcacacctggtgacgcaggcgcaaccaatgatcgttcggcctcgtcggcctcaaacccctccacttccgcttccgcagaactcccggtatgaaagagtctactggtggtgtggcgctcggatggggtaatggcggtggcgtttggggatcgaagaacggactgggcgtccaagcctccgtctggggttgatttacgaaccaaacgattcggctccgattgacgcttacttcatcattcaatatgcgttcgcttctatgtcgtggcgttataagagagggtnhtatttatgattcaaatcttgggaagagcatggtacatatatgggagaagtggtgcagaatacgttctgtttagcgctccgtcatatatggacagttaattggtacaggttggtttactgactatggaaacttggttgggctgttggttactggagtcggtattnccccttggtgtgcttttggcatttttgatttcattcatcctttatctcatgtttggtaactttgtctatgtgactgtttacttgcatttgttccatgtttttcgctt

SEQ ID NO: 39 - DNA, 963 bp, Aspergillus oryzae
  modified_base (661)..(661): n is a, c, g, or t
atcgaattgggcacgagggttcgtctctacactcgttggattgtaaaaatttttcccccttctcgtatttaatttaagtaccacccctttgcattcgttcgttggattcgtttctattccttctcttataccatcctgacgtctgagagcgctgataaactttatcgtccccattcgccgaaagtaatcggcatttatctggcccccccttagggccccaatctcaattcaattgcttccccacggaggtattgcgctgggagaaatacttatagcccttcgctttacgatttggtgcaacggcaccgtcacaattcaccatggctgagtcaactcataaaaccaagcgcattatatccgtggttgcgggcacactagtagccctggcctgtgggaccaattatgcgtactcagcatgggcgccacaatttgcggaacgaatgaagatctcggcaacccagagcaactttattggcgtggctggaaatttgggaatdtacgcatcgggggttccgttgggattgttaactgatgctcgaggtccacgactcacaacttttattggtgctgtggccctcggtgtaggctactatcctatatatatagcctatgagcacggaagggctcgctcagtgttggcgtgttatcctttttctcattncttactggcctcggaagttgctccgcttctcggcttcaatcaagacaggcgcgacgaacttcccgatcatcggggacagcgacagcttccccctggctgcttttggactgagcgttttttctggtctaacgtctcatctttcatattcaaggatgatactggtcggttccttcttttgctggcactggggactttttcttcaacttcgtctccattccctccttcggcttatgcccggctaaagcgtacacggcaatatcacgggatcgatcgccagagtagagtccatcgactgcataggc

SEQ ID NO: 40 - DNA, 639 bp, Aspergillus oryzae
  modified_base (52)..(52): n is a, c, g, or t
gcacgaggcaatgagataatcacccgaatgctcaaggagggagcgctastantacctacagtgcatgaacttcatatcaaagcatcggagggttcattcgcaacgaaacggatgcctcgtgaaagggccctttcagactctatgctgactttgaccaactacagcagagcatcaaccgataccagggaatcaactgaccttgagaaacggctttggacactgtggagttctgcactgggcctgtctcccaacattgtcaaccgtaaaggcagtttcttcaagctgggcggtgatagtataactgctatgaagatggttggcgccgctagagaggaaggcctctcgttgagtgtagcagatgtcttcggcaatccagtgttcgaggatatgctggccatagttgtcgctaaggatacccccaaattgtttgagactcatacagagatcactcagctcagtgagaaagtcccagagacaccggtcgtcatcactagggcagtttcacccgacgaaatatccgtgctgcggcctatgccgattgacgattcgtctctacagtccagcatctgctccaaaattggtgtcttcagaggtggcattgccgacgttctccccgttaccgacttccaggctatgtca

SEQ ID NO: 41 - DNA, 677 bp, Aspergillus oryzae
  modified_base (37)..(37): n is a, c, g, or t
  modified_base (526)..(526): n is a, c, g, or t
  modified_base (566)..(566): n is a, c, g, or t
  modified_base (573)..(573): n is a, c, g, or t
  modified_base (580)..(580): n is a, c, g, or t
gaggcgcggtatcgtaagttdtatcgattcggcacgngggcgcaactgctcaatcaagtaccccagccagatcggcaaccacctcaatgcccagtgttcctggtcggtcgtctaccccggctacatctaggacacaatcagcatctgtmactgtcggtcactcgagctctcttatcagctctatgtyttcgctcacatccgggatgctgacaagatcgagctcagcagttgcctcagggacaccatctgcctcggccattctgacagagacaatttcgccaataccttccggatcttctgggaacaccatctcttctggggagcttacatcgccgggcactttaactccttccaccccgccagccacttctggggcgccaaatctgtcaagctcagcaacagcatccgaaaaccactcgtctactaagccgcgtgtgtcgacaacatccaacccaactggtaccccggcatcctccactgtgcctgcaccatctactgcttctacttcagactcgtcgagcacctncactaccaatccaaaccaaacaggtcaatccagccctatnctgtcgnacacttntcatagtgctactgcctcctcgtcggcccaagcagctaacccgaccacatcaacgggcgcggagcggacagcggagacggaacagttactagtacgg

SEQ ID NO: 42 - DNA, 688 bp, Aspergillus oryzae
  modified_base (20)..(20): n is a, c, g, or t
  modified_base (24)..(24): n is a, c, g, or t
  modified_base (37)..(37): n is a, c, g, or t
  modified_base (119)..(119): n is a, c, g, or t
  modified_base (133)..(133): n is a, c, g, or t
  modified_base (142)..(142): n is a, c, g, or t
  modified_base (150)..(150): n is a, c, g, or t
  modified_base (165)..(165): n is a, c, g, or t
tcggagagcgtgggcattanaganagatcaatttccntctgcgattagtaactgggtttgtttctactccattaagttagcgaagcagcgaagtgcgatacaagtagtgcggtacaaanccaacataaaacanatgcgatanccctaatncccttggcgcatctnccccgttcccgggcgagtccttcctccaatgcctagtacagttgtacctaggattaaccccttgactggtcttggatgaaatcgaagaagagcgaacattcgaacggatctttcatcagctcactaccgcatatagtgccgctctacaggcattgcctcagacgcgccgtcaatttgtccgatgtcttgaattagcagaacaaacccgagaatccgaagtatccagatgctctggcacaacctcattcggcgatgtcgcgtgtgcctggaagtatctgaggcacttggactccgtcttaccaatatgaagataaaggaacccggtggcggcatgcgcaaccagcgcgagttctggcagttatgcaaggcattcatgcaatcattcgttgatcttgtgacagacatgcgtgaagtcaagagcatgcatcttcttccttctgagatcgtcatgttccttcgtccggtacagagggccagtcgagaagccggtcgctgatcgagggttctccttggtcatacctcg

SEQ ID NO: 43 - DNA, 748 bp, Aspergillus oryzae
  modified_base (504)..(504): n is a, c, g, or t
  modified_base (557)..(557): n is a, c, g, or t
  modified_base (588)..(588): n is a, c, g, or t
  modified_base (604)..(604): n is a, c, g, or t
  modified_base (684)..(684): n is a, c, g, or t
tgctataatcccaaggcctcgttgggaggaaggggacggcaagttctgtcaagatgttcaaccttgamcagttggytagcgagagaccctcagcttgcacaggamctcaagsgcgcgagagttgccctcgttgamctgctgrgtgrgcatgatgaagccatggtggggaagttyttcgcctgtgaagrggcccatttggcagtccccccgawtgccattytggggagtytgsgcagatgcctcctagaggggcagggaaggaaaatcattcccattttcgctggtgctagctttcgaaacattggtgtccagccttttttcgacgttgtgacgattytactccctagccctcctgagactcctgacccaggggtcagcattggtggagttaagggtggcctccgacgcctgctttytggcgatctaytagttgaacaaggcgagaaggcagcttctgytaagggtaagcacaagaagaagtcggccattcaagcagagtcccgnaacgccattgaaaagctccaaggctgcgccctagccttcaaggtcgtcaacgnccccaagcgtggtgtcctagtgtacgtccgngtctattccggttcgntcgaccgaaacagcatcctatacaacaccaacctaaatgtatcagagcgggcccccgtctgctaaagatgtatgcgaatnatgccgtcgaggtcgactccattcccgaagccacatcggggtcgtagctggtctcaaacacacc

SEQ ID NO: 44 - DNA, 858 bp, Aspergillus oryzae
  modified_base (21)..(21): n is a, c, g, or t
  modified_base (30)..(30): n is a, c, g, or t
tcgttaagcttgttatcgadntcggcacgnggtgactatctmatgtgttgacgctatcgccggggatttactagatcagamcatacttctatcccttggcttagccaaaccattgaacaccgaagtccgttggcctcttaacattatcaccawggytgcatcctggtgcgcccttcgtggmactcgccagcttgctcttcggactcgtttggcgctctgytccttcccccattgmactccgaaaagttactccatcctttcccttccgggcmaccmatggggccctgaamamagctamamagmagccgtcgsggsgaccggtctamamaagytcagtagctgaccatggsgaccctmacccccgggacctytttmaacccctcgamaccttccccagasgtmatatcggtccttsgccagatgccgsgaaggaaatgttggccacttttgaccccccagtggggtctctcgasgaattcgtaaagaaggtgcttcccgaagamattctgtccaagaaggacttgaaggttactgatcctaacgttaaaacgaatctgtaccgggataatgtgggcggtggtcttggagagaccgatatgctgaagctcttggatgtctaccggaagcaaattgatgtttctggacaaaacctacatcggaactggttattacggtacaattgtgcctcctgtgatcctccgaaatgtgctggagaaccccgaatggtacacaagctacaccccctaccagcccgagatcagccagggtcgtctggaataactcctgaacttccaaacattgactgccgacttgacgggcttgccattcgccaatgcctccgttctggacgaagctacc

SEQ ID NO: 45 - DNA, 820 bp, Aspergillus oryzae
aattcggcacgaggggagtggaatggcatccgaaactcttccgtcgggttcagggaggccctggtggcgccgacgaaggcgaggaggatcttgactggatcatcaacgcacagattgacgggcacaaccccgaattggccaccaagcagattttatccattgccccgatcttagaaggtcagaccgagtcctctcaataccaaatcccacctmacaaagaggggcgtgaggcggctccacctgaccacaacggcgctgccccgagcgmastagccccgcctcctccggagtgaaaagctcgaagaggtgcagcgmaaagacacgsgaacatcggacgttgacaccttcgtggacgccaaaccttgatcgtattcccatggggatacgtgtgactmacatctcggtggtttagtatctaacgaccgcatctcggaccaaatacaggtctcggagggtcaatgagatgaattaaaaaaagagaagatcgagaagcaaaaaagaaagggtagcgcaacccggagttacaaacaaggtactgtcggaccctacgactccaggcccttgtcgttcaaaaccaggtttcgaccgatatgccctaccgaacctctactggatacccgattgaatattctgtctttataattagtatatcacatggcaaaaaatacagggtcggttggtcggcatacatataggagtataagaaggacggatgggagcatataatctgtcgagtttctatcgtcatgtggtgtggttatcctaacatgcagttcaagagttgtgctcttccacaatataatcgaatacgtttagttct

SEQ ID NO: 46 - DNA, 520 bp, Aspergillus oryzae
  modified_base (82)..(82): n is a, c, g, or t
  modified_base (100)..(100): n is a, c, g, or t
tcgtaaggttgatatcgwgtcggacggggcgktattttcctttgrctgracccatatcctaaatttcttctcttgttccctngtttctctctctcccccngctcaagscatttatttcccctcttaaccactttattctcttccctctccctataatttaatcagggscgktggacctgsaccatggscggaatccggcggaaggttgtmatcggggggggtggggsctcsggkaaggctttkyttttgrttttcttctccaaggggaccttccctgrgggctattgccccacttkyttcggggactatgktgccggttkcggggktartggsaaggkggkcgggstcggtctttggggtacggstggkcaggraggttatggccgkctccggcctctctcctaccccggctctmacggcatcttgrtctgsttcggggktgrctcgsccggttcccttarmaacggtcaggggragggggtttccgraggggttcacttctgccaggggcttcctatta

SEQ ID NO: 47 - DNA, 868 bp, Aspergillus oryzae
  modified_base (142)..(143): n is a, c, g, or t
  modified_base (634)..(634): n is a, c, g, or t
cgtaagcttgtatcggctcggacgggggacaacgacgccgttccatttaagggggctccaactccgatggcccgatttcctcggcatctatggaatcaccgsggttccttctttttmttcttggtcgttttctacctgctcnnhagctcccagtctcathhhcctttaatttctcaggatcgggaacgtaagcgggaaatcgsgagggaaaaggatgcgcttcgtctgctgaatgrgtccaagtatggggmcttcaacccaccgactgatcgatggttgcctttcccgggrgtgaggaagaacgmcagttatgcttgggagcttctttcggaagttcaggatagggcgcgctatcagctacggtcggctatttmaaatgctgggttagaggttcccaagggtctcgacgacccggccgaatcgmaggcgctcaacctgacggaattgcttctccccgtctaccgtaatgcgactggwaaactgcgcggagactgggtgcggcgcaagctggaaaaagctcatcgcccattaatacaactgccatcgaactcgagaatgagtactttacgcacgagtttagccacaatgtcactggcaatacggggtccttctatctagacttgcgtgaggaagntggcgaagagcttcggctgcgcaatggccacgttcgtgaaattcgagcgactttagctgtggaaaatggcgacttttggggaaatacatggtaccttcctttattcggtatccatttccctgaaacgggcggtattatcctgactacaacgagcgagaagttcggtggcatttttaccttgccacatttggcacttacatcagatgcatacgactttcgcaccagcttctcatg

SEQ ID NO: 48 - DNA, 645 bp, Aspergillus oryzae
tcgccggggaaagtggaaatggaaagggmagccagctctgtgatctagttgaactactttttgccgrgatcactaagtgtccgggcctytasgttcgggcctgcgccatcatcaaaaataatgaaacagatcactccatgttcgaaacacttagamaggaagccacgaagtytaagmaaaggytccaatacctgaaagaccaactggaatcggtagttccagtytcgttagamagtgaggcgytgrgagamaaaccagaccttattggactaattcccgtttcagtagctcagaaaagcaggacgtttgytggtcatggagctcagtcagytytcgaacttttggaccaggttatcgtaattacggagtccgatcatcaccggytgttmacagattcaacaatgactacgttaccggtgtgggatgtgctaccagccccagccaattgtgtgacaatggacaaggaagagactcttgcgaatcgacttccagcatggccggatcaactggcgctgtccatgggtatgcttgccgtgaaggacaattgacatgtatgaatgtccccaagccaatggatcattctgatacacgataaatctcaaggctgtgacgttgccctgggaatgtaagtcgcgatccagttgt

SEQ ID NO: 49 - DNA, 560 bp, Aspergillus oryzae
ttcggacacgaggccgtcaatgactcatccactgtggattttgcatacctaccgtccatggrcgagattgatgcccctactcgccccgccgatactcgmattccgatcctttccgatgtctamaccaactamaactcgggccagccctcgaaccctcccatgaagccccaggwamamactgtgtccgggggcggggcgcgatatcgaagtmagccccatggccgaagttgttgamaamacctsggkggawatcgacccattytcgttaaccgaggsggttggaaaatcccgtttcggsgaagaggtytggaagtcccagaacggttccaaggaacccggtgttgtaaaggagctgtggaccggwtttttggaagamattttaggtcccaagmagmagagttaccagaagmagcactgwtttgaytcgsgttgtttgtytttttytactttagcgataattggtttccactgaaaggtcctttgtatttccttatacttattctatcatmatgatgctcaatgatgctatccattmacaatttgatgacatttattgattc

SEQ ID NO: 50 - DNA, 758 bp, Aspergillus oryzae
aagtatatasgtcgtccgccctcccacagggttcatatacatacacacaagcgccttacaagggytgtggatatatggtacatacaatcgtaaacatggmgcgcgccacaagcccacctggacaggtctgrgacagcggwagcgcggcgagcgtgccttgggmgcgccacacttgcgtgcgagcgagctacaaggcgtgtctctggttgcctgacaaagttttcgttttytaccccatytaytgggtcgtttamaytmagttytgcgrgtaacttcgtmaytmaggccgwtmagatggrgggccatggtgttcccaacgayttgatgmagaacttsgaccctatytccattatcgttttmatcccggttytggaactaacggtytacccyttgttccgtsgttgtaatatccagttccgtcctattacccgwatcgttctaggtttmatcgtsgcctytttggttatgatgtacgccgccattgtccagmatctaatttaytctgccggaccctgtwasgagcaccctggttgtgatgcctccatcgtaaacggaaagaccattggaaaccgggtgmacattgccattaagacccctgcctasgtgttacatcggtctctcggagattttggaatcggtgtccggtcttgagtacgtttacaccaaggcgcccccaaccatgaagtcgttcgtgcagtccatgtacctcctaaccaacgccttcggtgccgccatcgttgaggctcttactcctgccg

SEQ ID NO: 51 - DNA, 557 bp, Aspergillus oryzae
  modified_base (31)..(31): n is a, c, g, or t
  modified_base (420)..(420): n is a, c, g, or t
  modified_base (426)..(426): n is a, c, g, or t
atcgttaggtttgttacagatttcggcacgnggsgcaagtacacgtccgsgaaatcccctccmaccaagargtyaacctttcccgaacaaccctaacatcccaaatmaccgaaatcaaccaacgggtmacagaccccgggamatcctytytcgataytytcataaacacacaaytccaatcccagccactcaagccggcsgaaaargmagccctgtaccatgtccasgacctttgsgatggggccgwtargttggggatcgtgasggggccgamasgggttattttgrggaaattcccggttggggttgtggggwatcggggtgttgtgagggttgtttytcctaaggtttyttttagggytggggytagggttgggtytggggttgggattgggggtscgtttcccggttcgaktcytnaggggnatttaaytattactttamcgttgtggwatttggtggtgaggttggtggagcagmagacggatttggtggtgtttgtwaatgtgccgagggaggaktttaagagggtttgggatttgagggggttggaggcg

SEQ ID NO: 52 - DNA, 400 bp, Aspergillus oryzae
  modified_base (1)..(1): n is a, c, g, or t
  modified_base (125)..(125): n is a, c, g, or t
  modified_base (137)..(137): n is a, c, g, or t
  modified_base (217)..(217): n is a, c, g, or t
  modified_base (221)..(221): n is a, c, g, or t
  modified_base (258)..(258): n is a, c, g, or t
  modified_base (265)..(265): n is a, c, g, or t
  modified_base (277)..(277): n is a, c, g, or t
  modified_base (368)..(368): n is a, c, g, or t
  modified_base (390)..(390): n is a, c, g, or t
ntgaggtgaggaatraataagtttaatarcgaattggaagaggttataaacaagtataactcttataataaccataaaataggttckggcgcgtatagtkhtttcccctccatggggmatccagngcgggawtmrgnatcgaakaattaacgggttttctctamaatrggggaaarggtggaaarggttytggaaarggtggggtccaggttmacsnaarnatcttggtkaamaacatccrggtwataaytagtccsnttatccnksttyttcytsntggggkwgtkttmarggttatcttttccataatctagaggggaaccgcgggtkttcctaaraaccttccttggggggttaatcsggagagnttttacacctamattggccagncmarggcaar

SEQ ID NO: 53 - DNA, 680 bp, Aspergillus oryzae
  modified_base (669)..(669): n is a, c, g, or t
asggaaagccatcagttcttgaattgwcacgtcttccaaagtccccsggaaagttgttaaaacacgctttacgtttttwactccgaattttgattcatacaagagccaytgadgahccagcgmagytggtttctttythttccagttgagggaaactccactatataacagrgtcgatcgrgamcttgtttatgcaattcgccctgtgtcagrgatttagaccaccacactgcacgttaatagtatgaaaacagtttgtgccccaggtcgaarccttttatgaatcacattctaatgtcctgatggytgaaagctttgggctcccatattsgytgtgccaatcktyccgttragasgattttaacmgcmacmwttcctccaaawtraggacctaaatasgaattttttttacttccaaggaatcyttagtccggatatgccytcctgwtagcgttattgcagacacacttargtacaacaargttttataatttttatcacaccatgatwaccgtaaccattggaagggttgttaccratcmttactatcgtaacaagattggggcgcytgmagtmcaagttcgggggaaaggrtaacggaatcaagaccgttgttttcaacstaaatatgcggtcgtwtagtcctttamacgtccttcggaatatggngatcaagtact

SEQ ID NO: 54 - DNA, 612 bp, Aspergillus oryzae
acgcggttttttttgaatggaggatatttgaaagttttgggtgtatattggawtctatgtttatargawtccattctaaacatctttttctctctcttggggccacaaagttcttrgacaaacaaatgaaacacattctatgacagcgawtgtttktaaactctgaaacattcgcgaaaccgcgagcgtacargagcgttaaacaccccatataccagcgcacagaaaaawtaaaaacgcgttarggargaggtaaacaaccaccaggcgcacatggwagcgattaawtgttatacaargaaaattagacaggggtgcggccgcgggattcccctgwtgtrgwttytcctggccccwtacaggkgacaaagtttcccacccccgtgcgattawtgwtgtatagggtccagcgagcgcgcgtgrgwttaacccagcccaagggttatccggwtgtttttggtwtcgawtcgaggaaatcggggagttatttgggtsgtgtytccgttaaamagtgaccttccaagaaagsgagtaccccawtaatttaatcttttatcgttgtawtcgttttaattgaataatccttaattaatgtamacaaaagggggttta

SEQ ID NO: 55 - DNA, 720 bp, Aspergillus oryzae
  modified_base (692)..(692): n is a, c, g, or t
ggctcataccggatcaccgactttctatcccttacttcctttgatcaaaactctctcttccacccggacggagagagttccctcgttctggtctccttggatccacttgattatctttgatcacccttatctctttccccttgactcccgctgccctcatgcttgctccatctcctccgttgagcatgtaccctccaatgctccccacccctccgccctctccgcctatcacccgctgttatgcgccagaagaccgtttgggactgctcttggccaaccggctggagctgattggaatcctgggagtaggtgcttacggtgtcgtctacacagccattgacatccataccaatgtgatgtatgcggtcaaggccctcaacaaagctggactagatccccgccagctcaagtttcagcagcgcgagattaagttgcaccacatggccagtcaacaccccaatgtggtttccttggtccgcataatggattccgtcgactgcacctatgtagtcattgagttctgccccgaagtgacctgttctccagtatcacggagaaaggcaactttgtgcacaatgaccccttggtcagacgggtgttcctccaaattctggatgctgttcaatattgccataacattggaatctaccaccgggatctcaagccggaaaacatcctggtcaccgaccagngtttgaccgtcaagcttgctgacttcgg

SEQ ID NO: 56 - DNA, 249 bp, Aspergillus oryzae
gcacgagggctaggctaggttttgtccttgtgtcaatacattatcttctaacttaaacataatatcgccggtgtatacaaagagatatccgatctttcctacacaatgtctcgtcctggcaccacgctctatgtcaccggtttcgggcacggaactcgagctcgcgaccttgcctacgaattcgaacgttacgggcgccttgtccggtgtgacataccagcaccacgtactccttccagcagactgttt

SEQ ID NO: 57 - DNA, 771 bp, Aspergillus oryzae
aattcggcacgagggatttacaaacatcatgtcttgatcagcgaaggagtgattgaatgacatgtctgttggatagaccatctggtcgggatggtcctctgttggatttagagccctagttccatcaacaatgaactacgataagatagagtgggcatcagctaccagtcaacaggccctcctagtcgcggacgaacgcgccgcatatcatctggccattcgtctccagcgtcatcgtccgtcgggttgagaagtcgtctcagagacatcttcgtcgcttgctcaatcgaagcttctgtggtgatgcaacttaagtctcatgaatctcttggttgaattcactagcacctgcgttgtaagacgcggaaagacaagcagaactgtatgtctctgaagagcacagatcttacttctgaagacgaggctgaactagggctgagtcgtgaggcttagataagcccaactgcccctccagggtgctaaaagtgcagtgcatcagcctcatctgatcacatttacaaagagtacatgcgaggctgacatattctaggccccaaggttgaagtacactggccttatgaagagatgacacgtggttgcccagacgaggctgagcgtggagctcttcaacccttcagcgagctaaaattgcagtgacagcattggctgagtcaccacacgtaaatacagagtcagaactcaggaagtttctaagcatttgcagtcaaccctgaatggagctaagattgcagtgctgccttatgcacagaa

SEQ ID NO: 58 - DNA, 834 bp, Aspergillus oryzae
  modified_base (59)..(59): n is a, c, g, or t
  modified_base (84)..(84): n is a, c, g, or t
  modified_base (324)..(324): n is a, c, g, or t
acataggsgttgggacgggcccmvgaggcgcgaatcgtaagttgtdtcgattcggacgnggtcagtataccccagcgttgaggngatagctcttgtggttacacattcttttgattatttttcttttcctctgtggagtcattagacgtacacggttacacgactgaaacgacgcgccctcaaacaaccctcgttatcccagtaaataatatatggattgaccatctaccggaaaccgagagcacgttaccgcagtcgacatggaacaagacttccctatccaccaagcatttcccttccgcatgcagaggaaccgcttagcgnaactcctcacggcagatgtgatagctgctgcaggctcagcatcactgatcactccagccgtcatgattcttgaccggtatgtttgccctatatcattgatagacgcgattgcggagacaataccaaagaatattactgacggcaccctagacttgtcgtggagaagtcatcgcacaaccagccccttttgccagcgttccgccgacacctgtggctctccatcactcaaccggcgactttccttacatcccgcccgagtcttctagtttggggcctctacaccgcaacattcgcagcagcaaatgccacagaaactgtcttggaccgggtttaccctgatgtcgaccacgccatttcgggaatggccacgtttctctccacattcgtcgtcaactcgtccgtgggcatctggaaagatgttaaattcgcccagcttttcggccaccccccagctgcaaagccaaccaaccccatccccaatcccacagccgtctccaagagcggcttcct

SEQ ID NO: 59 - DNA, 797 bp, Aspergillus oryzae
ttcggcacgaggggcggtgcagcatcgactctggttattgtgaaaagctgaccgaagccaaagctttggctatccaccaaaaccttagtcgagtgagcgagtctgaacgatataagggatacgactggtttgaacgtacaaaatcagcttctggagagactcgcaacactcaaccagcaatggggttgagagaaacacagtgcgcggatgtttttataaccaagaagtggcttcagaatcgcgtatgggttctatgctccacccatggcctactgaagccttcatccgaccaccatgagctctgtttcaactattgtgtttccgtcgcaaaggatacgctcaaaatctgccagtcattgagactgagctccatggaagcacatgggataggccttgtcgaaaaattgtacgacatcgctgtcagtgccatcagtgtatcgtctaatgtccagctctctctagggaatggttttactctgataccacccgtaaccgaatcgataccgaaatcaagcgtctcgccaccaagttttccaggatccatgcactcaggcgccactaccacgcttcctcagtccctagcagaggatttcttacttttgctcaatagccttcgaggtgggaatcacccttacctggaaagatacaaggccttcttgagcgcctcgaacatcaggagcaacacctatagtaactggtcctcacaagttcaaacaacgcatactcctagcggtgcttaaatgttgcttatgcattatctttggtttgcttttctcctttctgggcttcggcgtatt

SEQ ID NO: 60 - DNA, 812 bp, Aspergillus oryzae
gggcgcaatgaatttcgctccttatcaggatgaatcgcccgaagttgaacgggcaatgtcgcctgccctcggcgatgccaatsgctgaaatcgcccattatcagatctcctgtcggctctcctccggttccaggtctcgcatccaacgcgcttccgtcaccgagtcacttcgccggcagtggtcaaccaggagcaactgggtttggaaacagtggctatggcggagatgtcgaaagtgggagatggaatatgggagctttcgatacgagcctacccatccgtatggattttgaagctatgctggcatatctgcttctgcctcctgcgggtggtgtcttccttctgctagttgaacacaaaagcgattatgtacggtgagtgtcaaaatcaatccgagtatgtacttcttggcagatttactaatgtaatgcagctttcatgcatggcagtcaagcatgctttttaccgtcatgtttgtacgtcaggccacgtgttcgacctcggatgaaatgcgcgcttacagttctctagatccttcatctcatatttgcttggtcaagcttcttctcatggactctgtttctatgcgatttggccatgatcggtttcttgagcatgcgtgcttatcgcgacggtaagtcaaaaacataggctgggaaacgccctgcagggactaaccaagtctcagttgacacgcttgatcactatgaagttccgatctttggccgtctggcaaactccttttgttgatgacgaataaacctaattcctctttcaatgggcgatgcatccgttttcatataccccctatg

SEQ ID NO: 61 - DNA, 793 bp, Aspergillus oryzae
  modified_base (720)..(720): n is a, c, g, or t
gggccaaccccagtcttccctgactaccttgaggacacaaagcccactcaccattgagagcattacgtccttcgatcggctggaaacatgacggaacaaaataaacccattctccccgaatccgggaagcgcaatttcctcgtcactagcgctctgccatacgtgaacaatgttcctcatctgggcaatttgataggttcgactctgtggctgatgtctttgccagatatggtcgtggccgtggtgccaacaccctctatgtctgcggtaagtcctctatactatcccgcgaacactatcaaacctttcctctgccactgccatgctaactgtcccggtccctcaggtaccgatgagtacggcacgacgtccgaagcgagagccatccaagaaaacatgaccaccaaggaactttgcgacaaatattatgccctccatgctgaagtttacaaatggttcaacatcagctttgatatcttcggccgcacaaccaccgagcttcagactaagatcacccaggatatcttccttaagcttcacgataatggcttcttgtcggagcacgtaacaacacaattatactgtgaggagcacaagtcgttcttggcagaccgctttatccagggtgaatgcccacactgcaagtatatcgatgcctatggtgatcaatgcgacctgtgcggtcagcttctggacccattggatcttatcaagcctcgntgcagtcgacggtgccacccccgtgaagagggatacgaaacatatcttcctgaagttggacaagttacaaccg

SEQ ID NO: 62 - DNA, 360 bp, Aspergillus oryzae
  modified_base (7)..(7): n is a, c, g, or t
  modified_base (12)..(12): n is a, c, g, or t
  modified_base (14)..(14): n is a, c, g, or t
  modified_base (16)..(16): n is a, c, g, or t
  modified_base (39)..(39): n is a, c, g, or t
  modified_base (47)..(47): n is a, c, g, or t
  modified_base (56)..(56): n is a, c, g, or t
  modified_base (65)..(65): n is a, c, g, or t
  modified_base (68)..(68): n is a, c, g, or t
  modified_base (74)..(74): n is a, c, g, or t
  modified_base (85)..(85): n is a, c, g, or t
  modified_base (94)..(94): n is a, c, g, or t
  modified_base (99)..(99): n is a, c, g, or t
  modified_base (116)..(116): n is a, c, g, or t
  modified_base (121)..(121): n is a, c, g, or t
  modified_base (132)..(132): n is a, c, g, or t
  modified_base (135)..(135): n is a, c, g, or t
  modified_base (143)..(143): n is a, c, g, or t
  modified_base (157)..(157): n is a, c, g, or t
  modified_base (160)..(160): n is a, c, g, or t
  modified_base (163)..(163): n is a, c, g, or t
  modified_base (166)..(166): n is a, c, g, or t
  modified_base (172)..(172): n is a, c, g, or t
  modified_base (180)..(180): n is a, c, g, or t
  modified_base (193)..(193): n is a, c, g, or t
  modified_base (197)..(197): n is a, c, g, or t
  modified_base (199)..(199): n is a, c, g, or t
  modified_base (205)..(205): n is a, c, g, or t
  modified_base (211)..(211): n is a, c, g, or t
  modified_base (215)..(215): n is a, c, g, or t
  modified_base (225)..(225): n is a, c, g, or t
  modified_base (229)..(229): n is a, c, g, or t
  modified_base (235)..(235): n is a, c, g, or t
  modified_base (238)..(238): n is a, c, g, or t
  modified_base (241)..(241): n is a, c, g, or t
  modified_base (244)..(244): n is a, c, g, or t
  modified_base (248)..(248): n is a, c, g, or t
  modified_base (256)..(256): n is a, c, g, or t
  modified_base (260)..(260): n is a, c, g, or t
  modified_base (262)..(262): n is a, c, g, or t
  modified_base (268)..(268): n is a, c, g, or t
  modified_base (274)..(274): n is a, c, g, or t
  modified_base (281)..(281): n is a, c, g, or t
  modified_base (292)..(292): n is a, c, g, or t
  modified_base (295)..(295): n is a, c, g, or t
  modified_base (304)..(304): n is a, c, g, or t
  modified_base (308)..(308): n is a, c, g, or t
  modified_base (313)..(313): n is a, c, g, or t
  modified_base (316)..(316): n is a, c, g, or t
  modified_base (320)..(320): n is a, c, g, or t
  modified_base (327)..(327): n is a, c, g, or t
  modified_base (333)..(333): n is a, c, g, or t
  modified_base (337)..(337): n is a, c, g, or t
  modified_base (346)..(346): n is a, c, g, or t
  modified_base (349)..(349): n is a, c, g, or t
  modified_base (352)..(352): n is a, c, g, or t
  modified_base (355)..(355): n is a, c, g, or t
  modified_base (360)..(360): n is a, c, g, or t
ccaaatngagtntntngctgtatttatattggcctcctnggccgtangttgccgtngcgttccgnaangacmancctgggggaangcgcgttanaattntttaaagcgtttcccanggatnccccgaaattncgnccktcgtncccggcgtggggtnaanatnaanktaaanccgaattncmaggatyggcgnkttntnrcccmntataangggngcggktattntatntatttntanaanaancctnttaggaancytnrnattatncmtttncgaaaangatttttaatnaangagggtatnccynrgganggncgtngtgkaancgtaancmtnccckttaanggngmngtncggan

SEQ ID NO: 63 - DNA, 743 bp, Aspergillus oryzae
  modified_base (16)..(16): n is a, c, g, or t
  modified_base (32)..(32): n is a, c, g, or t
  modified_base (45)..(45): n is a, c, g, or t
  modified_base (54)..(54): n is a, c, g, or t
  modified_base (60)..(60): n is a, c, g, or t
  modified_base (66)..(66): n is a, c, g, or t
  modified_base (109)..(109): n is a, c, g, or t
  modified_base (623)..(623): n is a, c, g, or t
  modified_base (719)..(719): n is a, c, g, or t
  modified_base (727)..(727): n is a, c, g, or t
cgcgtatcgtaagttnatatcgattcgcacgnggcaaaaacgcgnggggcartngccctngaacangcaagatctttttgtaccaggatctgatgggacgctagtccangtggcggctcaatgctcccaagtgcatccaagaagttggcagaactagatgacgagacgcttaaagcaatatccctacccagaggtcttggaatatgcgggctgtatcgagtcgtacgaaaaggcgaccgttctctacttgcacaaggtcgcagcagcggaccgccctgatcgtgttccccaaagagcccttttagacatgcttgcatcgcgaattttaaacctcattgagaaacttgccaaagatgttggccagctagcagttctatggcctctgtttaccgcaggcgcgagactcgtaatgagcgcgagcagaaattcgtgcgggaaaccatgattaacctacaacggtttggattcaagaacgtcgaaaagggcctcgaagaactggagaaggcatggttcaagcaacgcgcattccctgaagggtggatagacaggatggaggacgttcggtcttcgattctccttccgtgatctcgcataaagcactcgatacgactacccaggctttnacccatctggggcagtctgagcactagctacagaagacgattgtatcgtctactacccatacaacctccctctcatgattgagggtacatcttcgnaatctttngttttcattagcgacg

SEQ ID NO: 64 - DNA, 729 bp, Aspergillus oryzae
  modified_base (469)..(469): n is a, c, g, or t
  modified_base (595)..(595): n is a, c, g, or t
ctgacgattacattccctaagtcccctttcactctcgtttctttcattttctttttgtctgatgatctgtttctattcgttcgtccattctctgtgtagggtacgtgggcagttgtacgagggaagccatggtgttaagtccctctgatgttccaaataaaggtcccttatttgtcaaggtcaccgctgttttgacggtgattgctttcatattagtggcctaccgaatagtatggaaggtttacatgaaaagcaaaatcgctacagatgatgcgatcatctctttctccatggctatacaaattgtgaatacagtcatgggcgacttggcatgtcactacgccttcggtcgccaccgcgccgacgtggctcgaacaggaggcaaccgagtcctcgcattgaagttcttctggctcttccagatcctctacaaactcgtcctgtgcctgaacaagttatccttcctcgntttctacctccgcctcttcccaacccgcaaattccgtctcgtgtgctggatcaccatcgccctcgtgctatcaggtaccttcgggttcgtcatcgctacaatcttccaatgcatccccgtccacgnaagctggcacaaggacatccctaaaaaatgtgtcaaaaacgccgaattccgctggtcctgggcgggctacaacaccgccatggacatctgggtgtgcttaatgccacttcccgtcctggcaaggctacagctcg

SEQ ID NO: 65 - DNA, 799 bp, Aspergillus oryzae
  modified_base (357)..(357): n is a, c, g, or t
  modified_base (362)..(362): n is a, c, g, or t
attcggcacgaggatagacggcagctgtggccgaggccgcttgcttaaccggagaagctcctacagtcatgaagtcgaaaaggccaagcatattagggccaactctggtcgccgagcaagaccacttttaagacgatgctgtagtgtacagtcgcctgaacaatcgtcagacaccgatcggcaagatgaggcagatgatgatcgagctgaagctcgtgagagttattttcccgaccttaacgatgacctatctctcacggactccggcactgacgaagagacgcgacccttggctttggaacgactcgggcttgcagagggtcgagcagtccatcatcaaccacctcgctggtccgntccgnatggtgctctcccgtcgctgcggtcattaccaactacatctattcactcaaggagatcatctgtaggcacacaacatcagccttcaacccatgtcacagatccctctttgatttctgcacgccagttatccaccaacttgatatcgtcccctcaaaaccgcacgctccgcatgacacccacgagtcatccagacctctcacctcccgcctacaactaacaaagttgtgtcgggaatctgcttgcttaagtgaggtggtattgcacgataaccgaagctcatagcgagatggtatgccgtgttgtatgcggtctgctggctttgtgtccccgatatgtcggtcgacacactatcttgcttggaaaggctaaatcttccaccacactataaggaggttgcaggttcgaatccgacgtcccatgatgggattcagtgagg

SEQ ID NO: 66 - DNA, 796 bp, Aspergillus oryzae
  modified_base (665)..(665): n is a, c, g, or t
attcggcacgaggctctgggagtgaactttatgtatgcctgacttcaagatctccgcttctttggagggccacggcgatgatgttcgtgctgtggccttccctaatccgaatgccgtgttttcggcttctcgcgatgcgactgtccgactctggaagcttgtatctaccccgcccccgacatacgactacaccatcacatcctccggctccggttttatcaactccatagcctattatccaccaacccccgaatttcctgagggactagtattttccggaggccaggacactataatcgaggcaagacaacctggtaaggcgtcggatgacaatgcagatgctatgcttctaggacatgcccacaatatctgcgctctggatgtgtcacccgagggcggctgggttgtcagtggaagctgggactctaccgctaagctatggaaatttgggaaatgggagtgcgatgtcaccttcgagggccaccaggggagtgtctgggcggtgctggcgtatgataaggatacaattattactggctgtgcagataaagctatcaggatcttcaattcttccggaacccttctgaagaccatccaagattctcgggatgttgtcagggccctttgcaaggttcctgcgtcgaatcccactggtgcacaatttncttcggccggcaatgacggcgtaatccgtctgtacaccatacagggccaggtggtcgcagaaacttcaaggccacgaaaagtttttatttactctttagatgcgttaccgtcagcgagttggtgagctccg

SEQ ID NO: 67 - DNA, 646 bp, Aspergillus oryzae
attcggcacgaggggatcaacgataccctgacggacatggccaccaaattaaccgattacgaaaattatcgcacccaggaccagtatgacattgcacagaccacaaaaaccttcgtcatgaacttcatcacctctttcctccccacgatcctcacggcatttgtctatgtcccatttggcgcccgactgctgccgtatctcgatgtgatccgcgttggaaagctggcaacggcgttcgacacccgccgagtccatattgatccctcgcggttgcaacaagaggtcatttacctctyggtgatgggacaggtcatgagctttggggaggagattgtgctgccctacgtgaaacgagtggtcatgcagaagtggcgcgactatcgacaaaagaatgtgcctgctggacaaggccgtcgttattcctaccgaaccgaccagcttttgaacgattccccggctgaggcatcctttctgtcgagagtccggaacgagactgaagccgacgagtacaacgtccacgacgatacactagagatgtgcgttcagtacgggtatctagcactcttcggcgcgtcatggccgctggtaccgctcggttttctactcaataactggctggagctgcggggagacttcttcaagttga

SEQ ID NO: 68 - DNA, 727 bp, Aspergillus oryzae
tggctgcttgctctccttctcgagtttctccaatgtggccgcgctttgggtrcggctgggtattctctggtggccaagacgcagtgtgcgtgtctgggaacgaggaaggattgaccctaaggccacgctcgatggacatacagatgctgtatggggcctttgtgtccttcctggaactactgggtctgtgtttggagactcttgtggtcattacgggggccctgaccggatcctgttggcctcgggggctgcggacggtcaaatactgatatgggcagttagtgccccccctcaactctcctcgccgcaagcagggaatagacgagctggaggaagccggagggcaaactcgatttcgtccggctcaaacttcccatcctcaccgcaacctagtatggctacttcaacgccgttccactacaccctaattcacaagatcacacgaaaggattccccctcaccgacctgtattagtccgttgtcacttgccggtgtaaactttgtggtgtccttttcggacgcttcgattattgtctatgatacgaggactggggaggaaattgtcggaatggcgagcctggagacgtacgatggcactccttccacaggtgtcaactctgttgtagccaccacagttggattcgacgggtctgctggccttgatcccagccgcatctcgggtgaagaagaggtggttcacggcgccactggctcgagtggtgtcgag

SEQ ID NO: 69 - DNA, 677 bp, Aspergillus oryzae
  modified_base (607)..(607): n is a, c, g, or t
aattcggcacgaggggaagaggaagtccccgaccctccaacatcagtgcccgaggaccggtcagctcctcccagaaacccatgggcagaccacaacccttgggatcatgataatatgaacacagatacccctgactggggctcgggcaatggattccgtcaccacacgtacagatcgccggatggccggtttactttttccagcactacatacacacgacgtggttcgtctggtcagcaaatgccggtggatcctcttatgcctatggtccgcgggttggacactatctttcatggattggccgacacctaccggcaaacggagtaccggcaaccgaatgagcgagattcatcaccgggattgtggaggactgacagacagaaccaagggttcggcccgaatggttcgaggatatacagcacgtcgtttgatattgacatgaacacgcggagaatgggggcgtggggtccgagtttcatacgacaggggggctacatcctcgtgatgcagatggtccacagcctatgggtactcctctacgaactctgggcgatattcttgaactattccgagccgattttggaaacaatggtccaccaggaggtgnccccggagtccgtgtcatgaccgggccgaatcccattgcgattttatcgactttactcaaccttgaccgg

SEQ ID NO: 70 - DNA, 692 bp, Aspergillus oryzae
  modified_base (636)..(636): n is a, c, g, or t
  modified_base (679)..(679): n is a, c, g, or t
gaattcggcacgaggggcagtttgaaggaaaaccgggcatatagcattttggaattyccctcgttgaatgccacggttgacgaatatttctcttcgatcgagactcagaagctagagtctcggcttacagaacgcgaggaggcagcgaagagaaagcttgaggcagtgagacaagaacacgagatgaaaataggtgccctcaaagaacaacaagagctgcatattcgcaaagcaagtgcgatcgaggataatgtttatcgtgtccaagaagccatggatgcggttaatggcttgatcgctcagggcatggattgggtagaaatcgcacgtcttatcgaaatggagcagagccgaggcaatcctgtggcgagaattatcaaactacccttgaaactccatgaaaacacgatcacgttgctccttggagaagccgccgacgaacaagatgaaggagacgagctattctcgagcgacgagtctgaggaatccgaggccgagcaggacaatggcgaaagcaacaacccccgtcggtactgactattgacatcgatctgggtatctctcacatgggcgaatgcgaagagtcactatgagcagaagaaacaggctgccgttaaggaacaaaggacggcccantcatctaccaaagcgctcaaaagccacgaaaagaaagtaacgnaagaccttaaacg

SEQ ID NO: 71 - DNA, 456 bp, Aspergillus oryzae
  modified_base (363)..(363): n is a, c, g, or t
gcggaactcagtcgacaacaatgcctacccaagatccggaaagaaggccgccccgtctkcccatacccccagggcaacggctggttctatagagagtgcccccaagaaccctatcatcgggaagcgctcccgaaacttcggcattggccaggacatcacagccacaagcgcaacctcggccgtttcgttaagtggcccgagtatgtccgtwttaagcgccagaagaagatcttgaaccgtcsgtgctcaaggtcccccctgccattgcccagtttcagagcaccctggaccgtaactgcgttgcccgagaccttcaaggtccttaacaagtaccgccgctggagaccaaggccgtgaagaagngagcgtttccacggtgaggttaccrccgttgccgagggaagaagtaaggcggatgtctccaaggaggcctaccacgttaagtacggtcttaac

SEQ ID NO: 72 - DNA, 600 bp, Aspergillus oryzae
  modified_base (235)..(235): n is a, c, g, or t
  modified_base (479)..(479): n is a, c, g, or t
  modified_base (483)..(483): n is a, c, g, or t
  modified_base (503)..(503): n is a, c, g, or t
  modified_base (553)..(553): n is a, c, g, or t
ggccaccaaattaaccgcttacgaaaattatcgcaacccaggtccagtatgtacatttcacasaccacaaaaacctycgctcatgaacttcatccacgctctttcctcccaacgatcctcasggcatttgtctatgtyccatttggygcccgaatgctgmcgtatctmgatgtgatccgagwtggaaagctggmaacggcgtwcgacacccgscgagtccatatwackccctcrnggttaaaacaagrgggaaktwamctattggcgatgggacaggtmatcmgctttccgggagcgagattgtgctgccctcacgtgaaagtggtggtcatagaagaagtggcgagactatcgacaaaagaatttgcctgytggccaaggccgtcgttattcctaccgaaccgaccattttttgaacgattccccctttgatggccatcctttcatgtcgcgagtccaaarcgggcactgtaagccgngcgngtacaacgtgcagcgcacgntatcactatgagatgtgcgtatcagtacgggtatcatagcactgttcggngggtcatagacggttgwaccgatgcggttttatactcaataactggc

SEQ ID NO: 73 - DNA, 551 bp, Aspergillus oryzae
  modified_base (467)..(467): n is a, c, g, or t
aattcggcacgagggtcaagtttaccggatgctcaccgtagccctccttctggggagcaaatttttggacgataacaccttccagaacaaatcgtgggcggaggtcagcaacatccctgtgagcgagctgaatacgatggagctcgaatggttattcgcttttgagtggaagattcacgaccgcatctatgacgatcaggacggattcgcatcctggcgctctcactgggacacgtggcgtgcgaagaccgcccgggcccatgattcgcgtcacaacctggccccgatcgacactaacgtgtccaggagttctagaatctccaagccgctcatgtcccctgaaggtcccatccctccccagtaccagcgtastctcactttgagacttcctggctcaacccggcggcgtctgagtattcgcccccgthggccccccacagtggtcctaacaccccagactattacgntgttgggccgtgggctatacgaacccgccaccgccatattcccggacctggatccctccccagccacagtacatgccacggtcg

SEQ ID NO: 74 - DNA, 480 bp, Aspergillus oryzae
  modified_base (126)..(126): n is a, c, g, or t
  modified_base (356)..(356): n is a, c, g, or t
  modified_base (369)..(369): n is a, c, g, or t
  modified_base (394)..(394): n is a, c, g, or t
  modified_base (431)..(431): n is a, c, g, or t
  modified_base (467)..(467): n is a, c, g, or t
  modified_base (479)..(479): n is a, c, g, or t
atatcgaattcgrcacgagggtggatggaaggtcatagaggcagctgctgtttcgatgagctttttgataccattcgctatatacggtgtcaatttgtttgccggtcaaatggttacgtgcaagantgacaacgtgacaggtagtttggatgagtgtatcaatgagtattctagctcaccgtacaattgggaagtactcgcacctcgggccgcatcgaacccgttctatgactttgacaatttcttcgactctctctttatcctcttccaaattgtgtctcaagaaggatggacggatttgcaggcaaaagcaatgagtatcactggggtcggcatgcagccgcagagttcgactnctccggagaacgngcttttcttcgttgtgttcaacttncttggtgcagtttttgttttgacgcttttcgtatctntcttcatgcggaactacacagagcagactggtgttncgtatcttactnc

SEQ ID NO: 75 - DNA, 598 bp, Aspergillus oryzae
  modified_base (560)..(560): n is a, c, g, or t
ggcagaggccagaagaaccctgagtacgcaagctctcgccgttgtctccgtccccgagcgtgtcatccagttccgtgtcgtctgggaggatgacaaccaccaggttcaggtgaaccgtggtttccgtgttcagttcaactccgctmwcggtccctacaagggtggtcttcgtttccacccctccgtcaacctttctatcctcaagttcttgggtttcgagcagatcttcaagaatgctctcaccggtctgaacatgggtggtggtaagggtggttctgacttcgaccccaagggcaagtccgacaacgaaatccgccgcttctgtgttgctttcatgaccgagctctgcaagcacatcggtgccgacactgatgttcctgctggtgatatcggtgtcaccggccgtgaggtcgtttccttttcggccagtaccgcaagatccgcaaccagtgggagggtgtcctcaccggtaagggtggcagctggggtggttctctgatccgtcccgaggccactggctacggtgttgtctactacgtggagcacatgatcaagcacgntaccgacggcaaggagtccttcgccggcaagcgcgtcg

SEQ ID NO: 76 - DNA, 550 bp, Aspergillus oryzae
  modified_base (95)..(95): n is a, c, g, or t
  modified_base (247)..(247): n is a, c, g, or t
  modified_base (503)..(503): n is a, c, g, or t
attcggcacgagggagaaaatgatccgatggcgacagtcgacgatggcgaactcgtcttttacccggcattctgcttccgagcgtctccgacgantttcgcctgggtaaagatgggggcagtagatgtgcatctacttaaaaggagggctgggtttgaagaccaatccacattcttctacatgaaccaccccatccgcttcgtctctctagtcggcatcatcgtcgcccggtcagaataccccacgntaaccatcctcacggtggacgacagcagtggcgcgataattgacgtcattgtgctcaaagctccgattacagatgacaatggcgaccagcccgttcgaagcgacagaggaggggatctgcagtctgcatatgccactaagcatgttgcagctaccaataagacaaccgtggatacaaatcccttggtcccgggcgtcgtggtgcaagtcaaggggacgttatcgacattccggggtacaatgcaagttcaattggngcgagttgccgtggtccaggacacaaacgccgaaatgcgatttctgg

SEQ ID NO: 77 - DNA, 527 bp, Aspergillus oryzae
  modified_base (12)..(12): n is a, c, g, or t
  modified_base (202)..(202): n is a, c, g, or t
  modified_base (208)..(208): n is a, c, g, or t
  modified_base (271)..(271): n is a, c, g, or t
  modified_base (274)..(274): n is a, c, g, or t
  modified_base (300)..(300): n is a, c, g, or t
  modified_base (304)..(304): n is a, c, g, or t
  modified_base (481)..(481): n is a, c, g, or t
  modified_base (527)..(527): n is a, c, g, or t
ggcctcgtgccngaaaatcggcatcgtgaaccccgaattgatagcaacactcatagttggattctattttacacagaccctgcaatgacctcccaaccaccaccacaagatcaacagcaacaaccgaccgtcatgcccgcctcccccgcccggaccgccactcttctctccaacctaggatcggtgacgtcgcgcgtcaccnagccgnaaccaaagccgccaaggaatcaagacccatccggcttatcgccgtttccaaactcaagcccgncgncgacgtccttgcccttcaccagccgnccgnctcccacctgcacttcggggaaaactatctgcaagagctgcaagagaagtccaagctgctcccgcctaccatcaaatggcatttcatcggggggctgcagtcaaataagtgcgtgacgctggcgcgggacgtacggggtctctgggccgtcgagagtgtcgattccgaaaagaaggnttccctcctggacaaaggatggggggagcgatcggaggagctgcgn

SEQ ID NO: 78 - DNA, 434 bp, Aspergillus oryzae
attcggcacgaggcacatgtgaggccttgctcaagcttcttgagcttcctcccctcccagcgagcaaggacgacatcatcgttgaacatgatgttgaagacatggcattcggtgtggggttcacggctctgaacaccgtgcgaccacagaccaaggacccatggccggagaccggggctgaccttaaggcttgggttggccaatacctgaaggaagccgacaagaagtataacggacgggtctctgggtttgcacaggagcgtctgagcaacgatgccaagacagtcctcggcagctacatcgcctgaggaagagcaacaagtctcaagcagtgtctgagaagttattgttatcctgccctagggtagtcgtaccggtggtatcataaaccgggacaactagccttgatatctcgagtaaaagagagaattttt

SEQ ID NO: 79 - DNA, 367 bp, Aspergillus oryzae
  modified_base (90)..(90): n is a, c, g, or t
  modified_base (174)..(174): n is a, c, g, or t
  modified_base (257)..(257): n is a, c, g, or t
  modified_base (280)..(280): n is a, c, g, or t
ggagctcggctgtacaccctggttatcatgaggggaaacttgtgcctccgagctttccctcaatcaagtcgcgtctggaacaattcaggncttgaaacggagttccagtggtgatgattcagacgtgtatgacctccttattatcggtgcaggcgccactgggtcaggaatcgntttagacgcagcgacacgaggtttaaaggtagcggttgtcgaaagagacgacttcagctctgggacaagcagtaagagcacgnaactggtacacggtggcgtccgntacttggaaaaggccgtgtgggagctagattacaaccagtacaaacttgtcaaggaagccttgagggagcgcaaatactttttgaac

SEQ ID NO: 80 - DNA, 527 bp, Aspergillus oryzae
  modified_base (419)..(419): n is a, c, g, or t
  modified_base (434)..(434): n is a, c, g, or t
  modified_base (437)..(437): n is a, c, g, or t
  modified_base (470)..(470): n is a, c, g, or t
  modified_base (500)..(500): n is a, c, g, or t
gtcttcccttcactcccccctttcatttatatcatcttgtgtttttcacaacagttctatattcggtaacatacggcgtgttgcattggtagttgttgtcattgccaactcatcgcgtcttaccttctctccccatccctgatcttccttattagccagaagtcccttggcttggacatctttggttgtctattgaggaacatcccacttggtttgacttgtattgagtcctttcacgacgacttccgctcccaagaaaagggacaagaaattttcttggcaatgtcggaaccccaagacaccacttccccttcgactgcggctgctcctattgccgcgtcgacttcgcatgagcaaccccaaacccagtcgccgcctcaagtgtctgctaccacgacatcctcggtgacggcaaccgnagccgcagcgaccgnagntgtggaatctccccctsattaatggtgctgcgngcccgaccgaagagttgtcttgtctttggnaaggatgttctgagaagtgtcccaccc

SEQ ID NO: 81 - DNA, 760 bp, Aspergillus oryzae
  modified_base (79)..(79): n is a, c, g, or t
  modified_base (173)..(173): n is a, c, g, or t
  modified_base (182)..(182): n is a, c, g, or t
  modified_base (316)..(316): n is a, c, g, or t
  modified_base (327)..(327): n is a, c, g, or t
  modified_base (344)..(344): n is a, c, g, or t
  modified_base (383)..(383): n is a, c, g, or t
  modified_base (471)..(471): n is a, c, g, or t
  modified_base (500)..(500): n is a, c, g, or t
  modified_base (548)..(548): n is a, c, g, or t
  modified_base (746)..(746): n is a, c, g, or t
tcttctgtttgtgcattasktgaaccattgrtaccsagcgtgctgctatagatcgcatgcccagcactggaggcaascnccctggtgkcgcgcaagcacccgtggtgckaagcagaggagctggcagagaacracgcgaaggctgtctgcctaatagcgtcgacaagaacgtntgtcagcgngataagagcagtgtagtcagacttacattaaattgacatctagcaagttgccgtgtaagcaggtccacccggtwatctatgatataataacagctctgacgctcatgtactgatctcctartacgtggcgttkngctgcgacatnatcacttctttgtgggncgcagtgcgcaacacatagtkttctcgcagaacatgcrngcggtgttcatatacaatgcgagttccactatggtcgtatataggcgccgagtgtctagctcactttggtacagatcttgatgccagnctcagsaagatatatgtgccgatagatgncatgcgttcgaatagtttaccaakttttttaygccgacttcctcattntgtcaaatacacgttttattctccatgggaccaacagtccatctaaacarccgtgactttgagaccgccagacmccaaggatgcgtatcaggggataaacattggtgtttcgggttttttacatgcgttacgggcatgctttcttttttctcccagtttggccaaaattttttacaaggccttaattgaggctgtggntaggtataacacaa

SEQ ID NO: 82 - DNA, 634 bp, Aspergillus oryzae
  modified_base (578)..(578): n is a, c, g, or t
tatcataagttgatakcgattcggacgaggctgcttgcaggcaaagaacagcatggagatcattcacaaccgttgtattttcgccgacaagcaggtcatcaaattgcaagaaacaccggatagcgtgcccgacggtcaaactcctcactctgtttccctttgcgtctacgatgagttggtggatgtttgtaaggctggtgatcgagttgaagtgactggcatcttccggtgcaacctgtgcgcgtgaatccccgccaacggacgcagaaggcacttttcaagacttacattgatgtcctgcatgtccaaaagatcgatcggaagaagctgggcattgacgtcacaaccatcgaacaagagttgtctgagcaggctgctggagattcagagcaggttcggaagattacagctgaagaagaggaaaagatcaggcgcactgccacccggccgdatgtgtatgaactcctttctcggtctctcgcacctagcgtctatgagatggatgatgtcaagaagggtatcctactccagatgtttggaggcaccaacaagtctttccagaagggtggtaaccacgntaccgcggtgacattaatgtacttctttgcggtgatccgtcaacttcaaaatccca

SEQ ID NO: 83 - DNA, 400 bp, Aspergillus oryzae
atatcgatakctcggaacgaggttcggacgttctataaagatcccaagagaggccaaattaaagattgtgcgatcgatttaagggttcggccatgaaagactggaagtatacgcctctgttcgattacttctatgaagaatttaaagaccacggtttccgcgtgttgaacgccgaatatgttacggccgacgatggataccggtgttgttcaccaggcccctgcctttggtgaggacgattacagggttggwatggaaagtggcgttattagcgaaacgcgcttgccacctaaccctgtcgacgagacgggatgctatacagctgagattcgcgactttgtgggtmaacatgtaaaagttgccgaacaagcctatcatcaagcatcttaagggaattggc

SEQ ID NO: 84 - DNA, 480 bp, Aspergillus oryzae
  modified_base (21)..(22): n is a, c, g, or t
  modified_base (28)..(28): n is a, c, g, or t
  modified_base (36)..(36): n is a, c, g, or t
  modified_base (38)..(38): n is a, c, g, or t
  modified_base (56)..(56): n is a, c, g, or t
  modified_base (65)..(65): n is a, c, g, or t
  modified_base (73)..(73): n is a, c, g, or t
  modified_base (78)..(78): n is a, c, g, or t
  modified_base (93)..(93): n is a, c, g, or t
  modified_base (97)..(97): n is a, c, g, or t
  modified_base (104)..(104): n is a, c, g, or t
  modified_base (107)..(107): n is a, c, g, or t
  modified_base (114)..(114): n is a, c, g, or t
  modified_base (116)..(116): n is a, c, g, or t
  modified_base (123)..(123): n is a, c, g, or t
  modified_base (144)..(144): n is a, c, g, or t
  modified_base (168)..(168): n is a, c, g, or t
  modified_base (170)..(170): n is a, c, g, or t
  modified_base (174)..(174): n is a, c, g, or t
  modified_base (182)..(182): n is a, c, g, or t
  modified_base (189)..(189): n is a, c, g, or t
  modified_base (195)..(195): n is a, c, g, or t
  modified_base (198)..(198): n is a, c, g, or t
  modified_base (201)..(201): n is a, c, g, or t
  modified_base (205)..(205): n is a, c, g, or t
  modified_base (210)..(210): n is a, c, g, or t
  modified_base (219)..(219): n is a, c, g, or t
  modified_base (222)..(222): n is a, c, g, or t
  modified_base (229)..(229): n is a, c, g, or t
  modified_base (241)..(241): n is a, c, g, or t
  modified_base (246)..(246): n is a, c, g, or t
  modified_base (250)..(250): n is a, c, g, or t
  modified_base (257)..(257): n is a, c, g, or t
  modified_base (263)..(263): n is a, c, g, or t
  modified_base (267)..(267): n is a, c, g, or t
  modified_base (271)..(271): n is a, c, g, or t
  modified_base (275)..(275): n is a, c, g, or t
  modified_base (282)..(282): n is a, c, g, or t
  modified_base (287)..(287): n is a, c, g, or t
  modified_base (290)..(290): n is a, c, g, or t
  modified_base (300)..(300): n is a, c, g, or t
  modified_base (302)..(302): n is a, c, g, or t
  modified_base (308)..(308): n is a, c, g, or t
  modified_base (339)..(339): n is a, c, g, or t
  modified_base (343)..(343): n is a, c, g, or t
  modified_base (345)..(345): n is a, c, g, or t
  modified_base (354)..(354): n is a, c, g, or t
  modified_base (357)..(357): n is a, c, g, or t
  modified_base (360)..(360): n is a, c, g, or t
  modified_base (363)..(363): n is a, c, g, or t
  modified_base (370)..(370): n is a, c, g, or t
  modified_base (374)..(374): n is a, c, g, or t
  modified_base (382)..(382): n is a, c, g, or t
  modified_base (387)..(387): n is a, c, g, or t
  modified_base (389)..(389): n is a, c, g, or t
  modified_base (396)..(396): n is a, c, g, or t
  modified_base (401)..(401): n is a, c, g, or t
  modified_base (409)..(409): n is a, c, g, or t
  modified_base (420)..(420): n is a, c, g, or t
  modified_base (423)..(423): n is a, c, g, or t
  modified_base (432)..(432): n is a, c, g, or t
  modified_base (438)..(438): n is a, c, g, or t
  modified_base (444)..(444): n is a, c, g, or t
  modified_base (450)..(450): n is a, c, g, or t
  modified_base (453)..(453): n is a, c, g, or t
  modified_base (458)..(458): n is a, c, g, or t
  modified_base (461)..(461): n is a, c, g, or t
  modified_base (467)..(467): n is a, c, g, or t
  modified_base (470)..(470): n is a, c, g, or t
  modified_base (474)..(474): n is a, c, g, or t
  modified_base (477)..(477): n is a, c, g, or t
atacggycacatagggcgttnnggacgngccctctngnggcgcgtatcgtaagttnatatcgatncggcacgnggctnggattggcgctcatngatnkctaacngcngcgaccngngctccanrattcacaccaattttccctnsaacttgsccctatctcacatcangngggnggactcanggatatnstcctnrangcngatngggtnsctcctccngsngggtcansaactactttanscggnsctngkaccanggatcngsankcansaangaccttnrccansangttaccggangngccaanggctactattcccaatataccaacttctccngkcngnggttccctnrcngangtnsccacansttnrcccccanrtatngngggggcngtaanggsaaacnggscacatccngknggacatccngtgstnsccctntctttnstngkttnggngggatnktnracngtnscc

SEQ ID NO: 85 - DNA, 695 bp, Aspergillus oryzae
  modified_base (3)..(3): n is a, c, g, or t
aantcggcacgaggggcaaagatattcaggccgacgaggtggtgcagaacattgatatgggatgggatgccaaaagagatcgatggaacggatacgatgccagcgaatatcgccaagtggtagaagagtacgaagagctagaaaagctcaaacgagtaaccggacaaaaaaagattacagatggtgaagatgaggaaggaggtgcggaagaagaggcacggtatgcggaagaatctgatatgggaagacagcaaagcacggctactcgcaatctacgtattcgagaagacactgcgaaatatttgctaaacctcgatcttgactcggccaagtatgatcccaagacacgacggatggtggatatgggcgctcaagaagatcaagctgcagcacttgttgctgaggaaaatttcgttcgcgcttctggcgatgcggccgagtttgagaaagctcaaaaatatgcttgggaagctcaggaaagcggacagaagattcatttgcaagcaaatccaacgtctggagaaatcttacggaagaaagaacaggcagatactgaagctaaacgtcaggcccagcgtaaagcgcttctggagaaatatggcggtgaggagcatctgactccgacaccgctacgagataccatggtcgttgaaaacgaaagattcgttgagtatgacgagaccggggcgattaag

SEQ ID NO: 86 - DNA, 833 bp, Aspergillus oryzae
  modified_base (145)..(145): n is a, c, g, or t
  modified_base (480)..(480): n is a, c, g, or t
  modified_base (614)..(614): n is a, c, g, or t
cattcggcacgaggaacttcagcacatccgtggaaactccagtcccaagatcttccctatgcatgggataatctaattggcgtagcgccgatgtggcgccgatgtctgcctttgatacgatcattgagccaccgcccgccaacgntcatcgacgaccgaattctcaagatattctcgattctcccggctacttgccacagtggtctccatcttctgcagaccttctcccgtgggaagcgtacgagaattggacatctccgaggcactcattcgccgcgcccaaccagtttgaggacgcgcccgtgctaccgccactcaagcaagatctagtacagaacacatcgaaactttcttctaaaacccgcacatcgcctccgcaatctcattgctctgcctcgagctcaaccatcgcctctttatcgccgccgccatcttccccatctggttcgcccagttccacgcctcacgaaggttcagcgnatccctcatcccggcgctcagcacataacagaattgaaaaacgctaccgggagaacctcagtaagaactttgctgcacttgagtcgtctctgcaaggctattacacgcgaggggttggaagtggcaggccccgnttctactgtcagagaaagcatgcttctaagaagatggcagttctgaccgatgccgtcaattatatcggggagttggaggcagagacagtcatgttgaaaaagaagctggagacattacggcaagcgctgctaccgaatggaatatggagatacaccttaacccgatgactaaaaatttcgccgagcgtttcaggttccgcagggaatcattcactattt

SEQ ID NO: 87 - DNA, 849 bp, Aspergillus oryzae
  modified_base (658)..(658): n is a, c, g, or t
  modified_base (688)..(688): n is a, c, g, or t
aattcggcacgaggggcattgcaagagaccacactgttcccgctccgattagccctcctaggtcgccaggaacatcgtcgtcagcagcgagccccaagcagcaagatgataagctaagaagggagtcacgagtctgtgagaacttttctcggccgtatyccagagtcggtgcaactacgccgcccgggttggcggcatctccagaaatatctgagccagctcctcgtgccattgacgagatactgggtctgtcgtccccatcaacgtatccagaacatgtctactcaaacgacgatgacgaagcccaagagcgccgtttactccacatgaacgttgaaagcatcttctcaccgaccattggacaggccatcattcccaacgctcaaaaagacacgattggtctcagaacttcgtctatgtcatccactaacatgtcctcagatcttgatgtccttccagaggaagaggaggctacccatttaagggaaacttttggcgtctagtatagaggaaacggactcgcgttcccagtctcagctaagctcacctgaaactgagctgcagagcacctctgtagtcaggcctaagtctgatctatccgtatacgtgactgaagaattgtcgaagaaggtttccgaggctctcggctctcctacgntccctcaacatcatcagcccgaggcaccgnagcacggccaaagactaggcggaacggtgaagagaacagcgtccgttcgtcgaagagcaacatatgagaccatctatgaatcttgggatgccgacattgactactgttacgagcatgcagcagagtcaaattgtaacttcgactgggctcgtaattcattt

SEQ ID NO: 88 - DNA, 360 bp, Aspergillus oryzae
  modified_base (7)..(7): n is a, c, g, or t
  modified_base (65)..(65): n is a, c, g, or t
  modified_base (89)..(89): n is a, c, g, or t
  modified_base (102)..(102): n is a, c, g, or t
  modified_base (105)..(105): n is a, c, g, or t
  modified_base (119)..(119): n is a, c, g, or t
  modified_base (138)..(138): n is a, c, g, or t
  modified_base (142)..(142): n is a, c, g, or t
  modified_base (145)..(145): n is a, c, g, or t
  modified_base (152)..(152): n is a, c, g, or t
  modified_base (172)..(172): n is a, c, g, or t
  modified_base (176)..(176): n is a, c, g, or t
  modified_base (180)..(180): n is a, c, g, or t
  modified_base (184)..(184): n is a, c, g, or t
  modified_base (197)..(197): n is a, c, g, or t
  modified_base (218)..(218): n is a, c, g, or t
  modified_base (223)..(223): n is a, c, g, or t
  modified_base (228)..(228): n is a, c, g, or t
  modified_base (231)..(231): n is a, c, g, or t
  modified_base (237)..(237): n is a, c, g, or t
  modified_base (246)..(246): n is a, c, g, or t
  modified_base (250)..(250): n is a, c, g, or t
  modified_base (263)..(263): n is a, c, g, or t
  modified_base (270)..(270): n is a, c, g, or t
  modified_base (276)..(276): n is a, c, g, or t
  modified_base (280)..(280): n is a, c, g, or t
  modified_base (285)..(285): n is a, c, g, or t
  modified_base (288)..(288): n is a, c, g, or t
  modified_base (294)..(294): n is a, c, g, or t
  modified_base (300)..(300): n is a, c, g, or t
  modified_base (305)..(305): n is a, c, g, or t
  modified_base (310)..(310): n is a, c, g, or t
  modified_base (315)..(315): n is a, c, g, or t
  modified_base (333)..(333): n is a, c, g, or t
  modified_base (345)..(345): n is a, c, g, or t
  modified_base (352)..(352): n is a, c, g, or t
  modified_base (356)..(356): n is a, c, g, or t
wggctanwwgcgatggmgggccccggggtgcggatgawagttawykattggcagaggcatattgnacaatttmcacgayattgygcccnttatcatagaccntanaggtttttgttgmnaatcgyacatgcttttaantgcnttntgatatntgcaagayccttttgcgatnatcntccntccnttgggtgttttcnttgagcggggatgccggtgcntgayntcctnatnaatatntgtttgccnatcntgggttggayccntggtatnatyaangctntgtanatnatattnaagtantagmnagctntttgnatttttgyagcaatsccngttttggttaanattgccnggyngaaa

SEQ ID NO: 89 - DNA, 951 bp, Aspergillus oryzae
  modified_base (23)..(23): n is a, c, g, or t
  modified_base (763)..(763): n is a, c, g, or t
  modified_base (849)..(849): n is a, c, g, or t
  modified_base (859)..(859): n is a, c, g, or t
  modified_base (896)..(896): n is a, c, g, or t
  modified_base (930)..(930): n is a, c, g, or t
gattcggcacgaggctcctcctngccttccaaaacaggaaagatgttctgttcgaatttgaagattccggccctgcaaatcgtagcggaagtagcacggttaccaaagaagtctatattctattcatcgactactctcaaactataatcaccgtgaacttcgatgctcggaatccttccgatgcgactctggagcaacgccatgaagctccccctctccaacctcgccaggaccaactcgaaaatgcacatctccaaatcggaacccgcatcgccactgctgtgaacggcatccaaaatacaactgttgcagatggcactccattcggtctagttcagcacctgctcagtcccatcacagatgccctacaccctgtcggcacacgtgcctacggtgctttagtttattccaatctggccaacgcgtccgtacagcaaaatgacgaaatccgtgccggtgatatcgttagcttccgtaacacacgcttccaaggccaccgtggtaccatgcatcagaaatacagtgccgaagtcggcaagcctgaccatgtcggcattgttgttgactgggatggcaccaagaagaagatccgcgcatgggaacagggtagggaaagcaagaaagtcaaggtggaaagcttcaaactcaatgatttgcgcagtggagagtgcaaggtctggcgggtaatgcctcgcaactgggttggctggggcaatgaggttgagcagtagtagactgaaaatgtggctagcttcagcaaggnctagctgatgaataatgcgcggaatagtatgggtggcattatgtttgttcatcattttccttttccctttgcaattcctccagggnaccatatggnaccgcagatgtttgaacagaagctgagtgatgatttnattctggtatatgctaatttcacatggtacatgngctgcagtcaaatctactagg

SEQ ID NO: 90 - DNA, 776 bp, Aspergillus oryzae
  modified_base (56)..(56): n is a, c, g, or t
  modified_base (460)..(460): n is a, c, g, or t
  modified_base (548)..(548): n is a, c, g, or t
  modified_base (587)..(587): n is a, c, g, or t
gcgccacttctcattctaccaatattcctcttggctttctctctctctatcccgtngacccttcattcttttttcaaggtgtctaaatcaaataccgccgatctggctaccttggctgaccccaacgagttgttcttgcctggggagaggcaagacaatctcgccatgtcaacacccgcggttcccctcctcaaaccgcccgtgccgggtaatcgcaacaacagcaatggtccccgacctccaaagctcaccttggggatccccccgtctcccaacgctcgtcccgttaccggtaatggtataccggctcctgcgcccgttccagcccccgctttagcccccgaagtgccacagctccagcgcccgtccacccgcccggcgcccccgcaactacgactggcgaccccaatgggcagcagtaagaatatccaacaagtcaacggtbgcccagctcccccgnctcttgctaccagtggggttgaacgaaccgaacggacactcacggtcaggtagcttcaactatttggatggaaaggccagtkgcccgnatcggcttcatcgtcaaattactcggctttgtcgttygncatgggtctttgtcaaccacagggtagcactccggatccgtcgtcagctattagctcggtttactccgatcgggaaggaggtgtgcagatggagcgggacaacagcgtaaacggattgattccagatctcgacaagttgagtttagaaaagggcaggccactagacgtcgacgatttggatgatgaagg

SEQ ID NO: 91 - DNA, 569 bp, Aspergillus oryzae
  modified_base (106)..(106): n is a, c, g, or t
  modified_base (389)..(389): n is a, c, g, or t
aattcggcacgagggtctgtccaggctgcctgggaggcctgctcgaaaacagacactctcttcattttagtatgtagtgttttctgttggctgattatcccggcgntcggtctcgcctactcgggctattcgacgcgttacaacagcctggcctcattctacccaggcctcctagcagtagccgtctgttctattcaatggtggatgctcggatactcactagcctacggtgagggcaacagtgtattcggcggtttcagtaaaatcttccatattggcgtccttgctgaaccggtcggatcgatccccgagatcctcttctccgaattccaactaatcttctgcgccacggtctgcgcaatcgccatcggaggagcgtgcgagcgcgncagactgcttccactaatcccgttcatcttcctgtggtgcaccttcatctatgccccattagcccacatggtctggtcagagaatggcttcctggccaatctcggcgccctcgactttgccggcggcacaccagtgcacatctgtagcggcgcaacagcaacagccatgagcctctacct

SEQ ID NO: 92 - DNA, 562 bp, Aspergillus oryzae
  modified_base (8)..(8): n is a, c, g, or t
  modified_base (240)..(240): n is a, c, g, or t
  modified_base (286)..(286): n is a, c, g, or t
gcggatgnaagttgaataaattggcacgaggctgggggcaagaatccgtagtgaacagctaggcagctcggatatagtatggacaacattctccaagatggccgccgaagcgccaagtttgagagttcggaattgccattatttgttcctcctcaggtccctctcactacctctacctcgtcgatctcccctcaacgtcgatccatcggccaagaaggtgctgtctccccattcgcacgncccacccaacgcccatacagctatcaacaaccattaccctcaccgnaaagctatggacataacgatcaaatatacgggtacaactctatgcggaataatatctatgccactccagtggctccggaacatggacaccgcctacgtgagcgtaccacgacccagtcttcagggcagtttagcaacccagcaggcaatggtgccggatctggcattctcccaaccccagaccctactattgccagctgcatatctgacgaggatgttgcaatgcaattaatccgcttaggcgatgcctccaatttctcccatggtcgcacatccg

SEQ ID NO: 93 - DNA, 376 bp, Aspergillus oryzae
aattcggcacgaggcaaccacgctgctacagcgactaaaagcaaatcaagcccccatacagcaccccaaacccagaaatccaaataaaacaccgccaatatgtctgagagaaaggtcctttcgaagtactacccaccagacttcgatccgagcgcaatcacccgtacgaaaaacaaacagacaggccccaaggtgatcacggttcgacttatggccccgttttcgatgaaatgcactcaatgtggagaattcatttataagggtagaaaattcaacgcgcgcaaagaaacgacagaagagaaatatttctctatccccatttatcgcttctatattcggtgcacgagatgtagtggcgagattacattcaagacgg

SEQ ID NO: 94 - DNA, 571 bp, Aspergillus oryzae
  modified_base (506)..(506): n is a, c, g, or t
  modified_base (527)..(527): n is a, c, g, or t
attcggcacgagggtggcctgagatcattcatccaggacaagcagtcgaggcttccctgaagggcgactatcggtttccctttggacttgactggaattggcatgaggctgaaaactctttgctgtttacgaacagtttgaagatgaaaatgagtattttgctgggctggtctcacatgacatatgctctttgcttgcagtatgtcaacgcgcgccatttcaagtctaaggttgatattatcggcaacttcctcccgggaatgatcttcttccagtctatttttgggtaccttgtccttactgtcatctataagtggtcagtggactggccagccaggggccagtcacccccaggtttattgaacatgctcatcttcatgttcctctcccctggtagtgttgaggaggaactgtaccccggtcaaggctctgttcaggtcatcctattgcttcttgccgtcgcgcaagtacccgtcatgctcctcttcaagccgttgtaccttcgntgggagcataaccgtgctcgngctcatggatacagaggtcttggagaacagtcaagagttagcgc

SEQ ID NO: 95 - DNA, 580 bp, Aspergillus oryzae
  modified_base (189)..(189): n is a, c, g, or t
  modified_base (255)..(255): n is a, c, g, or t
  modified_base (257)..(257): n is a, c, g, or t
  modified_base (407)..(407): n is a, c, g, or t
gattcggcacgaggctggttgcgtgactagtacgagagacttggcgcgtggttgggacctgccgcgatacataccaccggacgataaaccgcttggcgcaacgatatacggaaattcacttggacttctcgcaagacagcttcaatcatatccatgcgattgccaacaacaaggtcatgcgacasaggntccatcgcctagtcgtgatgacgccggagccttatctcggccgagacttgcaatggcagcgaagcnangcaggccacatacacaatccgctacagataccggccattcaacgctttcgagatgacctcgtcgaaaggcttacgaattgtcgttcttttgtcatatctcccgtcagaaccaagttcgtacccgaagaagaggacgtcaacgatagtganacacttcaatcccgacgatgccgctggtatcttgttggaaataattgccgatgcgtcgctacccatgaagctattctggtatggcactggagttaattatacatcaaatatcatggatatccgtcgattaccaaagaatctctttacaaatcccactttcaagtccgggtggg

SEQ ID NO: 96 - DNA, 554 bp, Aspergillus oryzae
  modified_base (155)..(155): n is a, c, g, or t
  modified_base (400)..(400): n is a, c, g, or t
  modified_base (477)..(477): n is a, c, g, or t
  modified_base (480)..(480): n is a, c, g, or t
  modified_base (510)..(510): n is a, c, g, or t
  modified_base (517)..(517): n is a, c, g, or t
agattcggcagggtcgaacgtcagacttgcgccgtcgagccttccactctttttgaatcttcatacacgttcattacgccgttgaccggccagccactctttttctttctgtgttgccagcctttttcattttaacgacgattcccaatatccgnttttttctccccttcttattccttttattctcaaaccgtcatcatgtccctctacccaaccgacccgtctttttcttctaacgtcctgtccggtcgatccatcttcaaacgatgtgtctcatgcgattcaactgccccgacgtgcccgtcatgctcttcgggcgaaatatgtaccatgatcagtcagtcgtgtgaccagtgcgccaccacaaaatgcattaagacgtccagcggttcgagctcgnagggtagctcgtcaggaggaagtaacgtaggggccatcgccggtggtgtggttggtggtgttgctgctgtggccctnatnaccttcctggtatggtggttcttcgtccgnaagaagngtcaggaattagcccaacaacaaggaaccagcgacgg

SEQ ID NO: 97 - DNA, 543 bp, Aspergillus oryzae
  modified_base (319)..(319): n is a, c, g, or t
cgcaggaaccttcacaatctgaccaatgctgatggctacattgatatctgccaagtgcatgaagtgcgtgatgtgcaccgtgacagttgccctgccgaccgaaatatccgggaagggccagatgttgagttcaatcctgaagcaagagacactcggcgagatgacggcgcaacccagaagttcgacgacgataaaacatttgagatgcttcttgataatgaccttgttgtccggtttcaggcgtacgatgagcggactaagaatgagtggatgaagaggcttgatgcccttgtgaaatactggaaagcacggtgtgcgnctgatgcggcggastcaagatcttgcggcaacgcaacctggaaatactggacatcgacgaagagatggagtctgtggtggggcaattcgcccaaaagtgggaggtcaggagggcagaagcatcacctttgttacacaatatgtgtgctttgactggatgtcgcgcgatcaatatgtctggccaactcttccgaaaaccacggcggcactcaacattcaagcgat

SEQ ID NO: 98 - DNA, 720 bp, Aspergillus oryzae
  modified_base (28)..(28): n is a, c, g, or t
  modified_base (210)..(210): n is a, c, g, or t
  modified_base (219)..(219): n is a, c, g, or t
  modified_base (225)..(225): n is a, c, g, or t
  modified_base (245)..(245): n is a, c, g, or t
  modified_base (249)..(249): n is a, c, g, or t
  modified_base (286)..(286): n is a, c, g, or t
  modified_base (292)..(292): n is a, c, g, or t
  modified_base (307)..(307): n is a, c, g, or t
  modified_base (372)..(372): n is a, c, g, or t
  modified_base (402)..(402): n is a, c, g, or t
  modified_base (409)..(409): n is a, c, g, or t
  modified_base (433)..(433): n is a, c, g, or t
  modified_base (459)..(459): n is a, c, g, or t
  modified_base (476)..(476): n is a, c, g, or t
  modified_base (500)..(500): n is a, c, g, or t
  modified_base (519)..(519): n is a, c, g, or t
  modified_base (554)..(554): n is a, c, g, or t
  modified_base (699)..(699): n is a, c, g, or t
  modified_base (701)..(701): n is a, c, g, or t
  modified_base (719)..(719): n is a, c, g, or t
atcgataagcttgamtcgattcggacgngggttggggacgactgctggtattcatgttgctgcttcactggggtgggttgttatcaatgaaagtctgcaaacttcgattcccgagatttaacgctaatcggagagtgtgcaagctgggaaaaccagacgtttggaatwattgaacctggaattraaatggaagatgtgcwagcgttacantttgaccantcccgnwaaggaaccaaggagcttanagangaccgaattaaagacacwaagctgaagctcttggagngtgagntgtcgcacagttttngtagacttttttgcgagatcgcgatggccacaagttcttgacaggccgtcgcccatcagtcraanmcattccgcggwaaaagacacgacgaaaanrgggwcnacagtagagggctcwcacgtacanaggtccttttggtggtgtatataaanatatctatwcatatggncgaacaaatacctacttagggggntggtgctcggtgatacaanaggactatatacaaactggaccaaatggtagaagnaccaaaaagggctcgagttcctccaagccagatcattctaggggctcaaaatggtggggaagaaaacggtgacggmctagccgacrgtaccaagtttgctcgtatacacaacattaccaaagatagacatcgtcagaagtatcangngtagcacawacaaatcant

SEQ ID NO: 99 - DNA, 740 bp, Aspergillus oryzae
cgaggtcgacggtatcgataagcttgatatcgaattcggcacgaggctggagagacaactcgcaactacgcgaagactttgcgtctgacgagcgatcagcttaaggctttgaacttgaagccaggcgccaatgatatgtcattcagcgtcaatagagccacttgtacggcaaccatgtatctgtggaacggcaacacaccgattgtcatatcagatattgacggtacaattacgaaatccgacgctttgggtcatgtgttgaatatgattggccgcgactggacacacgctggtgtagccaagctatacacagatatcgtcaacaacggctacaatatcatgtaccttactagcagatctgttggacaggcagataccactcgcgcatacatctacggtgttaacaggacggatacagactgcccaaaggtcccgttatcacaagccccgaccggatgattgcagccctcaggcgagagatttacctgaggaaaccagaagtgttcaagatggcatgtcttcgggacattctgaacctctttaatggaaaagagaaccccttctatgctggattcggcaatcgattgaccgacgctttgagttaccgatctgtcaacataccgtctaccaggatcttcacgatcaactcgaacgccgaggtctctctagatcttctcagtctgaacaagtataagagcagctacgttactatgcaggagctcttggaccatttcttcccg

SEQ ID NO: 100 - DNA, 744 bp, Aspergillus oryzae
aattcggcacgaggttttagagtacgatcgtattatgaatgcattattaagcacgtctctattcaagcatttcataaattatctgcgtctccagcgtcagtgtatttccatttgttagacactacctctttacgacttctctttgtttttctattgtagaaaaaaaaaagctaaaagataaacaaacgataccaaaagaccccagataagaaaaacaagatacacatctctttccacagcgcascatgcatagctccctgtccatcccagacgtcgtgaggaacctccaactgcccaacccaaattaactttcttgcaatgtaacccaaagctcgtgtcaagtcgtttagctttcttctcgaaggtcaactttgtgtccaccttttggggctcgtcccctggttcggagctcccttgctccacagcgatacccaaccggtggagtcggtggccgttatccttattcgggtggtgtttagctgtttcagctttggtggctttatttctcgatactctgtggcttgtctgctcatgttcttacttgggtgaatgtttttctgtttgttatgcgggggtgtgcttgtgttcttgtttatcgtgtagtagtgtgttgatatgcctgatgggaacactgcactgtatatcatacccactacctcatcggaaatccatgcaagaactggtttcgtacatagatactagggcaagcattcagttgccatctagagaaaggcttttagccat

SEQ ID NO: 101 - DNA, 442 bp, Aspergillus oryzae
ctccggagaccaggatcttaaagatggctaccgcacaaggtgtcaacgtccttcgctactcggctctcgtagccggtctcttctacggtgcctaccaccaatcctcaatcaccgccagcgcgaagtgccgaagccgaccgtgaatacgcccgccaggaacgcctgattcagcaggccaaggccgaatggaagaagaagacaacggatcccgaggacagccggttcgaccttgaggcctacctgaagatgaaggccggggagaactagagaaattgggaggtacaaagcggaaggatgagtgacagctgttctggtacaacggtcgtgccccctagggtacaataaaggttgttcgggtaacccccgattatgtattattgtttggtctaatttcccagagtcgtgtcattgcgagcgaaaggaatgatttttcttttacgtt

SEQ ID NO: 102 - DNA, 706 bp, Aspergillus oryzae
ctgtgcaagatcaccgagctcggctatttcgctgccgacttcgtccttggccatctgcttcttttcatcatgctgcctgctctctgtgttccctacattgacaagtttcactctgtcattcttttctggctgcgccaagtcgtcaaattcggcctccgatctactctttgaagcagtctaagctccgcaagagaagagtggtccgtttcctcattcttctgatcgcgccgctggtcgttcgcaaactgaacatcaatctgcccaacattccaatgaacctcttacaaccccttgacgagaaacacaacaacaccatttcacagtataccggcaatggacttccaggtggctcgagcgggatcccggcgtcggttctagcttccgctacgtactagcggtacaattgctttctgaaattccacgttgctgcgttttttctagtttcggaacggattcatgaaaatgagctgtataaagtatccagcgccttgaagtagctgctgtgtcatacatttgcttttccctcgatctttcttttttttaaagcttcgggcgtgcagttctgtcgccgcctaagtttaatgcattatacttgtctattgtttttgtattctcaaaggtgttgtgtgtttcatgtgcggatcattagacttgcgaattcctgtattgttccctttgtggcctaccaaacatttattcttcattc

SEQ ID NO: 103 - DNA, 737 bp, Aspergillus oryzae
aattcggcacgaggttcgaccattgaggaatccatccatcattatgggtgtctctaatctgatggcccggctcaagcctcaggccgaccatgaacaccaggagcactccgatactcctaccccagtcagagccgactcaaacttggagaaggataatgccatgattgacgacagccccgtcaagtatctgacatggcggtccttcatcctgggtttgtgtgtctcgatgggtggttttatcttcggttactccaccggtcaaattgctggctttacgaaacatgcggatggaacatatgctttcagcaacgtgcgcaatggtttgattgtcggtctgttgtccattggtactatgattggcgcccttgtcgccgctcctatcgccgaccgcattggtcgcaaatactctatctccttctggtcggtgattcacatggttggtatcatcatccagatcgccaccgatgacaactgggtccaagttgctatgggtcgttgggtggccggtttgggtgtcggcgctctgtccagcatcgttcctatgtaccagagtgaatctgctcctcgtcaggtccgtggtgccatggtcagcgccttccagctgttcgttgccttcggtattttcatctcttatctcgtcaacttcggtaccgaatccatcaacggtaccgcttcctggcgtatcactatgggcattggcttcgctggcccttgatcttgggtgttggcactctgtt

SEQ ID NO: 104 - DNA, 873 bp, Aspergillus oryzae
cggcacgaggggtatatcttcgttcatggtcgcgaggcaccaacaagctcacctgagaatgccgcgaaacgccatctaccatttcaggtcccaatgggggacagcctagagactagaatgatacccttgaacatctctgagcccattctggagtatgctgagctggacaccacgatgccatcttcctcttcaactcagggagaacctcgcacggcctcgcctgtgctatccaacacttttccccgaatgacccgccgacgaccgtcgtcccctctccgccagcagcccttcttccgcacactcgtctcccataattctcaactcaagattcaatgagtcctttcccggttattcgacatcttccgcttcatcaatgccctcgacaccaacaagccttcgctcacggagtccgagtatttcatctttagagactatccctgacattcctgatgccgaagccgcggctattgaagctgatcggatcgctgccttgaaagctgcagctgatagagcagatgaagcggacgttgcaacgaatggaaatcgtcgacgaggggcatcagacgcgtcaggtccttcaagttccctgatgaacatgcgaaccgtatcagggggctacggtctcaggactgataaacggaaacggtggagcgtctgtggggccgaacgtcgtcaagatctcgacttggagacgatctgggaagattgatatgttaactacgaccacttcctctgcaaattctaagaattatcaagcaacctacgctaaacgaagcaattttgtgggctatgcttcggcttttaaccaatggtgtatggtctcactttgtttcagtcacaactggtgtgccaatgtacttatagctcgacttt

SEQ ID NO: 105 - DNA, 248 bp, Aspergillus oryzae
tcgttctctccgttgagcccttccctccccaagtaatattggaaagtcgttctctctctcataatttaatttcctcccaccatttggtcggtccgccttctctccccttactcggctcgacgcgcgaaccttacttgaccaccttctcttcctacttaccggtccaacccacacaaactcccccccttcccttcccgtgtgtgcgcatatagttaattcgcacctcaaatcgttccgatccccaaaaa

SEQ ID NO: 106 - DNA, 613 bp, Aspergillus oryzae
  modified_base (12)..(12): n is a, c, g, or t
aattcggcacgnggcaccgttcgcaggaagtgcagcaaggtcacctccaactctcaaaatggcccgccgtcccgctcgttgctaccgctactgcaagaacaagccctaccccaagtcccggttcaaccgtggtgttcccgaccccaagatccgtatcttcgatctgggacgtaagaaggccaacgtcgatgacttccctctctgtgtgcacatggtctccaacgaatatgagcagctttcctctgaggctctcgaagccgcccgtatctgtgccaacaagtacatgcgtgtccgtgtgcaccccttccacgtcatccgtatcaacaagatgttgtcgtgcgctggtgccgatcgtcttcagaccggtatgcgtggtgccttcggtaagccccagggtaccgttgcccgtgtgaacatcggccagatcwtcctgtccgtccgcacccgtgactccaaccgtgccgccgccatcgaggctctccgccgttccatgtacaagttccctggtcgccaaaagatcgtcgtctccaagaactggggtttcaccccgtccgccgtgagactacatccagctccgcaacgagggcaagctcaagcaggacggtgcctacgt

SEQ ID NO: 107 - DNA, 754 bp, Aspergillus oryzae
  modified_base (403)..(403): n is a, c, g, or t
  modified_base (407)..(407): n is a, c, g, or t
ttcggcacgaggaatacagttctcatcacctcagctgtattgtctcagctcaattcttacttaaattaataaaagccataccccctttatactatggagtatcatttcgttcccccagaggagcgcgcaaaagatgacaagggcaatctgctgccctggggctatgtctacaaagatgaatctcggaaccctcgacgaccacctgaagagagtggcccttttggaaagaggagaaacgctcgctacgaccatgctcgatcgggtacccgtacggaacacctgcgaagaaggaaaacccgaacgttgcggaattcggacggctttttgctatgcagcaagaagaggagaagactcgcagcaataccttaccgaaatcgacatcttcctcaaatttcgacaacgnacgnaagcaaacggacaaggtcgccacagaatgcatactgtacggctacaagagtaaagactctgagtggaaggtaatcgacaagtacgagcgggtgtccagaggcgtgatctgtgaagattacccgcgcagatccgaactctacgagtgggtattcacagcttctaagcggcggtgatgtggtaatccattcgaatttgtctgcggatgcgaaccgcaaatcgaaacgttatgcgggcggtttccactggatcaaggtcacgttcgactcgacgatcgccgcggaccggcttgcttctactctccccaggagatcgatggacactttgttttctgtgaactgtatcatgg

SEQ ID NO: 108 - DNA, 849 bp, Aspergillus oryzae
  modified_base (529)..(529): n is a, c, g, or t
  modified_base (545)..(545): n is a, c, g, or t
  modified_base (626)..(626): n is a, c, g, or t
  modified_base (697)..(697): n is a, c, g, or t
gaggtcgacggtatcgataagcttgatatcgatatatcggcacgaggcagaatcccgacaatcatgtcctggcgaccaggtcagcacgtcttcattcgattcttcagcccgcagctaggcttgcactgcctaacagcgcacccgtttaccatctgctccttatcgcatgahccagacaaggtcggcaaagcatctgagattgtcttctatgthaagcyccgccacggcatcacggcacgtytggcaaagatagccgctaagakccccgtattctcccagaccgtgcttttagaaggtccttatggtgggatatccgatactgcttctyccgctgaatttgatactgttcttgtcatcgctggtggttccggcggtgggttttctctcgctatcgtcgaagaagctctaagagtatatggtaatatgccagacctccaacaacgcaatatgcaagtcgttttcgccacgggawtagcaaagtagccgagttgtacagggaggaaattggagatagggtctccatgtacgncgtaccagacaaaagnatatccgtttccattcatgatacctcgttagagcaggctgaaaagcagtgtctgcacctggagacaaagaccatctaacgngatcaccgatgagattgagcctgccttatcggagaaagggcatgatgttgcagcaacaaacaagcacatgngcacagtttgtacatggtcctcgacctgatcttcctcgtcttatcaatacagctacgtcaactggtagccacagaatggctatctttgcgtgcggtcctgcgtccatgttacatgacgttcggaatgcggctgctgaggcgcaaaaagcggg

SEQ ID NO: 109 - DNA, 622 bp, Aspergillus oryzae
  modified_base (535)..(535): n is a, c, g, or t
aattcggcacgaggctgtcacccccgtcttgtttttccggcacagaaacgtgccagccagtgacagctttcgtctgacatcatggataacgagatccctctgcccccgccgcggcgcatccggcatcgctccccgaccaaaaaccccgtcgcgtccggctcgtcgctgcgcaagacgtatcagctctcgcgctttgatgaccggtccagccagccgtcgagtgaccccgcgctcttttcgagtgatgatatccccgcctctggtctcgagaactatcatgcgcctgtyccctccgggagcaggaaacgacgataccgtggcacttggtggggcgagatggtgaaggatcccaagcggaagagggcggatttcaaggagaagcgacatgtggatagtggtgtgtggatggggagcgatgagtccggggcggattccctgttgccatcggaagatccatcaatgtggggagaggagttgctgaaggataccggcaattccgcagtaacagggagccggactgatgttgctatgcatnatagcgagcggtggacggcacagggtcagccttggacgcagcggagtgcctgaaaaaggtcgaggaaccgaaagagcatcaggccgc

SEQ ID NO: 110 - DNA, 381 bp, Aspergillus oryzae
  modified_base (7)..(7): n is a, c, g, or t
  modified_base (22)..(22): n is a, c, g, or t
  modified_base (40)..(40): n is a, c, g, or t
ttggtgnagggatgataggttntaagaattggaagagggngatcttaaccatttttaccagggcatttaacctattttatcctatcttatcttttatgtcagtmagcttgaacagtgcttagtttttattactctggaccggccgaacacaaggagcatcattccttacttgatctagcaattgacctttaggtaataccatcttaaagagggaagtcaggcgagagtgtatctagtatgtccctaccacgagtctcctatctggagtcatgggaacataatccaacctcgatccgccgccaaggcaatcgtcagtacccccattcagaagatggtgcggcatatgaagaactcccggaagagtcgctatcgtcatcattt

SEQ ID NO: 111 - DNA, 544 bp, Aspergillus oryzae
  modified_base (370)..(370): n is a, c, g, or t
  modified_base (418)..(418): n is a, c, g, or t
ggcttgtggaagtgcttcaatttcatttctggcaggatgtccgcaaacgatgtttaccagacccctctcaactcgcgttatgcggcgatgagatgaaataccttttctctccgagaaaccgtttctccacctggagaaagctctggctgtggcttgctgagtccgagaaagagctcggcttgtctatctccgatgatgccattgagcagatgaaggcccaccttaccattcaggacgaagagttcaaggttgctgctgaggaggaaaagcgccgcagacgatgtcatggctcacgtccatgcttacggtcaggtcgcgcccgccgccgctggcatcattcactggggtgccacttcgtgctactgcaggnacaatgcggatctgatcttctccgtgacggtctcgatatctcattccnaagcttgctgttgtcatcgacaagctgtccgcgttcgttcagcagtataaggacttgccttgccttggtttcacttacggccagcccgttcagcttgtcactgtcggaaagagagcctgtctctgg

SEQ ID NO: 112 - DNA, 609 bp, Aspergillus oryzae
  modified_base (488)..(488): n is a, c, g, or t
  modified_base (502)..(502): n is a, c, g, or t
ttcggcacgaggcttgtgcactgttcgtaacaactcgccggatagtgtgtggttcctccagtttctttctttcaaatccttcatgattccgacggcccacggctcctcaacatgccagggtttttgggatggaagtcgtcatcgcgagtgggaaggtttgtattactcgttactggaacggtactagcccttgctttgattcagggagtagccttaatatctcaaccgatcactgtccatgttaatacgccgtctataaatcatgagagcctacagagttctcccagcacgactccgattgacaccacctcgccaattgtcacggaacctgcagaagtctctcaaaagccaaattacgcctttgcaacaataatcactggagaaggggacactgagacggaggtcaaagatgcctatttcaccgcaacacgactactcacctatcaacttttatacagccctcaaacgaagtcgcgatcagggcatanttccctttcttgtnctagttacgaagaagtacccaagagcaacgggacattctcacaaggagggtgctacggtcattccagctgaacccttgaaagggaatggatccaccaaatggagtcg

SEQ ID NO: 113 - DNA, 203 bp, Aspergillus oryzae
  modified_base (5)..(5): n is a, c, g, or t
  modified_base (30)..(30): n is a, c, g, or t
ggctncactatagggcgaattgggtacggngcccccbhhhgaggtcgacggtatcgataagcttgatatcgarytcggcacgaggctttttttttgtgtgttctctctcattttgacgttgttgtactatttcatctctttgtttcaatccactcgttcatcttggggttcacttggtggcccgtctttcgttatctgattgt

SEQ ID NO: 114 - DNA, 390 bp, Aspergillus oryzae
  modified_base (30)..(30): n is a, c, g, or t
aggtcgcggtatcgtaagttgatatcgatncggcacgaggcagccatcgacctaccccccggcagcggcggcggctgcgtcaccagcggtccattcaaggactacaagctgaacctgggcccggccgccctgtccctgcccggcggaaacatgaccgcagcagccaaccccctcacctacaacccccgttgcatgaagcgctccctcaccaccgagatcctgcagcgatacaacaccttccccaagatcgtcgagctcatcctcgacagcgacgacatctgggacttccagatgaccatgcagggcgtccccggcagcggctccatcggcgtccacggcggcggcactactccatgggcggcgaccccggtcggatgtctacgtgagccc

SEQ ID NO: 115 - DNA, 440 bp, Aspergillus oryzae
  modified_base (49)..(49): n is a, c, g, or t
  modified_base (54)..(54): n is a, c, g, or t
  modified_base (67)..(67): n is a, c, g, or t
  modified_base (239)..(239): n is a, c, g, or t
tttctgggtattcgcgcggaaattgctgtcatcttcgtacgccgggctngcatnggtgctcctattngcccccatcaccggcatcgtcgtcgtccagtcaagctcttccagcttcctctaataccctcttaggcgcggcacagcatgtccgtcagcgccgttactcctcatcttcttcttcaaagcccagcgacggttccagaaaagtcgacgcttcttctcagacccccgcaaagggncgtgaatgcaagcgaaaagcgtgagggtaaggcttcagacgaaggggaaagatagcagtggcgcacgctcagtgaaccagcatacggtcttctcgagactgctagcgttcctcaccaacaccttcaacccatgatgttcatgtagcttcattcttttctatcattcgccctatctccgtttcgcccactgttcctcctctt

SEQ ID NO: 116 - DNA, 326 bp, Aspergillus oryzae
attcagggcgctggcgggcaatgcgttgagtcgaaactctccaaggacgacgagacgtccccggagatctcgtccggcagcgataagaccttctccatcagcaagcttcacctggtgaccgccgaggaggctgatatcaagatcatctatgacatgcccgatggttcttcctgcaagcatgtcgctccctgctctccgaaggaactgttgtcaccaacgaccagtgcggtggtgccagctccgtccggtttgaactcgcagagaggccgccgtggatgccgtagtcttcggtatccagaatgtcgagtttgagtgctcccctggcc

SEQ ID NO: 117 - DNA, 750 bp, Aspergillus oryzae
  modified_base (509)..(509): n is a, c, g, or t
  modified_base (563)..(563): n is a, c, g, or t
  modified_base (628)..(628): n is a, c, g, or t
aattcggcacgaggctcaccacggtcatcttcatttccttaggggtacaagagtgcttaaccagctctcgaacctctcatctcgcaggccaagataaaccgttgccatagtcgctcctgctcagtttcacctctcgacgactagatggccgactttggacctcgtgccccccatgggcccgatatgtcggggactcacaatcccctcgaggacatggatcatcacgagaagggtgctttcgatgcgctgattcgccccgatgacagctatactccggaaggtacctactgggccgatctgcccctcctcaagaaagtcaagttcgtgagctcctatgatgcgaaggaagccaagcgcgaactaggcggcatctgggaaatgatgaagcaagatcccttgtcgcccgtttcttattacttcaagaacatggtgcttcccggtgctggtctcggtctagagggttacgtgctcttctccatcggaaacgttaagcctctcttccaggccgncttcaagtcgtgttggaaggatcataaaatctgcaatgcacaatggctcaacgncatcgattacctcgaattatcggtatcattgtgggtcagatcttagttggtattgtcggtgattngcttgtcgtcgttgggttgattcaggatgctgctatcatgttatcggtctgatcatgctaccgctgcttgggtgtgaccagaatgctggtgatctctacgttggtcactgtctctacggatt

SEQ ID NO: 118 - DNA, 572 bp, Aspergillus oryzae
  modified_base (129)..(129): n is a, c, g, or t
  modified_base (525)..(525): n is a, c, g, or t
gatggttgtgctgcagacatcatgcagctccaaacgcggtggcacccgcgccgcccggtaccccgggtggcaatggacgttcatccccggagaaaaacgtcggcacagcgtgttcagcctgcaagtctnhaagctcaagtgcaccgggaccgcgccttgtgcgaactgcgtcaagagtcgcctcgaatgtaccctcgatcaaactctcgataaacgtcgccgcggagcttaaaacgcaagatcgaccaactcgaggagaaagaggatcttctttttcgcctggtcaacgtcctacgagaaagcggcaaccggagcaccattcccttactcaatctgatccgaagcaatgcctcgctaccggagatccaatactatctcaaccatcaggtgcccgagtcggaactagcccttatgcctgaactcctcgaggtcagtcatgagttccagcgattgcaggatgcggactcgcgatcagtgcgtcggattctggatgcgaagattgtcggatcaccgttgtttcaggtncctgcgaagcctggactagcgtcgtctcggacaacgatttgttcgca

SEQ ID NO: 119 - DNA, 645 bp, Aspergillus oryzae
  modified_base (189)..(189): n is a, c, g, or t
  modified_base (505)..(505): n is a, c, g, or t
gaggtcgacggtatcgataagcttgatatcgataycggcacgaggctggcgatgacttttcagcctcgatcaaggccttcaatccatccttcttggatgggggtcttactggcatcttcgtcggaagctatctccagtccgtcacccccagcctggctcttggattcgaggctatctggcagcgccagnctatgaacactcgcccagaaactgcgatatcctacagcgcccggtacaaggccaatgactggatcgccagtgcccagctccaggctcaaggcgtcttcacagcatcttactggaagaaactctctgagcgtgttgaggccggtgttgatatgaacttacagttcgcgcccaatgcagccgcagccctgatgggcggtcccagcagagatggtactactgccatcggtgctaagtacgacttccgagcatccactttccgagctcaggtcgacagcgccggaaaggtcagctgcctgcttgagaagcggatagcgantgcccatctctcttacattcgccggtgaaatcgatcaggctaagcaatcggctaagctcggtcttgctgtgtcccttgagatcgctggcgaggaactgatggagcagcaagagaagattgaagcccagggcatggttcct

SEQ ID NO: 120 - DNA, 685 bp, Aspergillus oryzae
tgatatcgatagggacgaggattgggagtttcgagatgatgcagcagtgcggatcggcgtggacgtcggtggaacaaacaccgacgcggtgttaatcgacctgggccaacgagaaacaccgtctcgcggaatcctctcatctcacaaggctccaacgtccccmgacgtcaccacgggaatccaggaagctatcaacacggtcctccgggactctcaagtggctccggacaatgtggcgtctgttacgattggaacaactgccttcctgaactccgtgctggaacaagaccmccgtcgtctaagaaaggttgcgatatatccgattrtcagaagtagttmctgcgcgatgtcaagcccttttatgaatggccagatggactggacagatmtaatataatggaatatgtcgggtacatcgatggcaggtctcacatattgacgartctcagagagamgacgatggtcgaaatagcagaatmgttcgagagatgtgagaacataaaaagagatgggcttaacgacgaatcgtagtgagaccaaatgttataaatcgaactattgatgagatgttacaacaagaggaaacggtgcgagagattattacccgcgagattacaaaaatggatatcgtgtgttcaaaaaagatcaacaatatcaaaaatactgaaaacgggaaatgccgctt

SEQ ID NO: 121 - DNA, 465 bp, Aspergillus oryzae
  modified_base (84)..(84): n is a, c, g, or t
  modified_base (99)..(99): n is a, c, g, or t
  modified_base (131)..(131): n is a, c, g, or t
  modified_base (155)..(155): n is a, c, g, or t
  modified_base (179)..(179): n is a, c, g, or t
  modified_base (430)..(430): n is a, c, g, or t
gggtgcctctcttcacctccttacgatcctatcatgtctgcttcgtgtttggcgttgagacggctgacccaccggtctccccgnactttccagtcccgnatctcctccgtytccagaatctcatctgccgnatcctccttctcctccctcaacgntcttcgcgcagttaactcgaccgntcctcgagtctctcgtttctcaaccatggcacctcttcagtctggctctaaggatggcgccctccagaagccctacgatcccgaaattcaggacatggccaactatattcacaactacgaggttaactccgacttggtttatgacactgcccgtmttgtgttcctcgataccctaggctgtggattggaagccttgaaattcaaagagtgcaccaagcttttgggtcccgttgtggaaggaaccgttgttnccaacggaacccgtgtgcccggtacaccgtaccag

SEQ ID NO: 122 - DNA, 393 bp, Aspergillus oryzae
  modified_base (299)..(299): n is a, c, g, or t
  modified_base (301)..(301): n is a, c, g, or t
attcggcacgaggcggcactccctctctgggttgcgaggcggacgtggacggagacgtggtgcagcacagggcttgttcgtgcaccaggcgaaaaggatcaattagaatttggatattgctttgatgtctctaaccgggcattctttcctctctaccttcacctgtatgtwgctcagttccttctcctgcmgcttcttacgcgcagtccgagcaatctcctctctacgttccttgggaacacgctctacctttatgccttggcctactacacatacattaccttcttggggtacaacgncnttcgtcttgcatatactgagtactttgtcccatctcgcttcggtttgtgctgtgagttgatttgggatgggtattgtagcgaggagcagcgt

SEQ ID NO: 123 - DNA, 424 bp, Aspergillus oryzae
  modified_base (2)..(2): n is a, c, g, or t
  modified_base (77)..(77): n is a, c, g, or t
  modified_base (310)..(310): n is a, c, g, or t
  modified_base (320)..(320): n is a, c, g, or t
tnsgggcgcggatgtaagttatatctcttcggasagggtcytgaggttggaaagcctttggattaccgctacgtggntccmtgcggaagaaatgcgcaaagatgggtgaaccggttgcggagatcactcgaggataccgccaggtgaaggccaatgacaaagctgcatacaatgagggtgttgaactactcgccgcagaaaaggcagaggatgactcttcgcgccgcaaatacggaactgacaggtgggccagagagccctccgaagcagcagcgtcgaagctgtacactactgctcgagagatagacgnctactttttnctccgctcagagtagcgataatctggtagagcagaagctgagagactcgagcagtctccgggtttgaccgtactaccggatttgagatgtacgtcctagcagcg

SEQ ID NO: 124 - DNA, 371 bp, Aspergillus oryzae
ttcggcacgagggtcgaaaggcagcattcaaagtcgatacggcgcagcagttctatagcgaccaatggtaacgaagaccagcaaaatggcaccaatgctgaggaacaggatgaaaatccggaaaccacccccagcgaaaacaaagaggagcaagctggagactctatcgagaagccagaacaaacaatggcctctgaggtcgtgaaatctggcaaggaagaacccgacccgtcgcattcatcatacacacagttccgcaacaagcgtctctgcgagaggtggctcgataatctcttcatggttctctatgaggatcttcgcatttacacatctggcgcacagagatggctcagtaccgcagcagggttatt

SEQ ID NO: 125 - DNA, 542 bp, Aspergillus oryzae
  modified_base (4)..(4): n is a, c, g, or t
  modified_base (14)..(14): n is a, c, g, or t
  modified_base (32)..(32): n is a, c, g, or t
acgnttcggcacgnggcagggctgattagcgntggtgccaaggtggttgtgmccacaagccgttattcsgcgtgaagtcagcggagtactatcaagccatgtatgcccgatacgggcccgtggytcacagtttttggtggtccctttcaaccaaggtagcaaacaagatgtagaggcccttgtcaactacatatatgttacggagaagggcctgggytgggacctagaytwtgttttcccgttcgttgccatcccagaaaatggycgggagattgattcgatcgattccaagtcggagcttgctcaccgcatcatgttgaccaacctcctgsggttcctaggctgtatcaagtytcaaargcagggcaatggcttcgaaacacgcccggcccaggtaatccttcccctatcaccaaaccacggtacattgcgggaatgttggtttgtactccgagtccaagytagctctggagacgttcttcacaccgttggtactcagagagttggggtaactaccttaccatctccggtgctgttattgg

SEQ ID NO: 126 - DNA, 213 bp, Aspergillus oryzae
gaattcggaacgagggtgggcctcgtttgtcgcttgtgtatgwatgcaatcattcctcctctgcctcttaagcgggatctgtccagcctcgrgacatctcgactgccttgytccatcgtttatacaacttagagctctgcgcgggsggagawatggggttggaatgttgtgcgattggsgcggttmatgttcttgagctcgttaaagtccttc

SEQ ID NO: 127 - DNA, 471 bp, Aspergillus oryzae
  modified_base (8)..(8): n is a, c, g, or t
  modified_base (11)..(11): n is a, c, g, or t
  modified_base (99)..(99): n is a, c, g, or t
  modified_base (390)..(390): n is a, c, g, or t
gaggtcgncgntatcgataagcttgaatatcgaattcggacacgaggcatcttgawattcagtatccaatagcttcctgggtggtttggttgggcamwnctttcagctcagggcagaggccgaaccaggatggcccatcatggmaataggaacactcggwatagcagattgatgargggacctaatagatcamcagctgttcgccgatgtwacggggcgtacgaacgacgggcagtcctcaatccatggcaaagttgtgaatgccccgattgmcaggatgaagcggcaagcgcaggccgggtcgcagccccaaacggccgggcgcaatatcccaggaagaccaggtttcagtgcaagtcacgatagctgctaccgttaatcctcagacgncacctgatgctacagcagtaacggcctcaccaacaactgggcctacagcaccagatgtcaccactgctcaaagctcaccgg

SEQ ID NO: 128 - DNA, 537 bp, Aspergillus oryzae
  modified_base (341)..(341): n is a, c, g, or t
  modified_base (380)..(380): n is a, c, g, or t
  modified_base (438)..(439): n is a, c, g, or t
  modified_base (441)..(441): n is a, c, g, or t
  modified_base (493)..(493): n is a, c, g, or t
gcgaggtcgacggaatcgataagtttgattatcgaattcggcacgaggcaattgctcacctttgcmatcataaatctttmaaaatgtccgasgacgcagaccttmattgccatcaagcccgacggtgtccagcgcggactcgttggccccatmatctctcgttttgrgaaccgtggcttmaagcttgctgccctgaagctctgttccccctccaaggrgcacctcgagcagcactatgytgacctcagytccaagccttttttccccggcctggtttcctaaatgttgagcggcccaatggtcgccatggtytgggagggccgtgaggtcgtaaagaccgnccgaaccatcctcggtgccaccaacccttttgcctccgnccctggaacccatccgtggtgacttcgccattgatgttggccgaaacgtttgccacgnntnccgacagcgtgagaacgccaagaaggagattgcctctggttcaagcctgagnagctcagaagtacaagcacagccagtttgactggatctacgaga

SEQ ID NO: 129 - DNA, 336 bp, Aspergillus oryzae
  modified_base (12)..(12): n is a, c, g, or t
  modified_base (47)..(47): n is a, c, g, or t
  modified_base (83)..(83): n is a, c, g, or t
  modified_base (227)..(227): n is a, c, g, or t
  modified_base (267)..(267): n is a, c, g, or t
agaggttccggntattatcatctgttagccatcatggagaggcgagnatttgccacatccacattggccaggytggwacgaancttggataacagcgtttgggagttataccttytggggcatggcctcaaggytgatggccgtwtcgcccccgagscgtccgaggaactcaactcgggcgtttcgttcgagacctttttaagcgagaccagaaacggaaaatacgncccccgttcgatcttgttgacctcgaccgatcgcctattnatgagatccgtaccgtgactaccgccagctttccaccctgagctgttaattagcggaaggaagacgggg

SEQ ID NO: 130 - DNA, 503 bp, Aspergillus oryzae
  modified_base (278)..(278): n is a, c, g, or t
  modified_base (427)..(427): n is a, c, g, or t
  modified_base (437)..(437): n is a, c, g, or t
  modified_base (476)..(476): n is a, c, g, or t
tgaggtcgacggaatcgataagcttgatatcgartctgcggacacgaggctgatgcggggggagagaaggagaccgtgaccaccacacccttagtgcaatatatcaaagagaagaagggcgaacaaagcgaaggatagttccaataaatcctcgagagcacgccaaagccgataaggggcaccaaggcggaaaaggtccaagcaaagaaactactacaacggcccgataaggaaacggcacaggccccagagaaaattgaaaagaaagccaaggcggnataaagccaccaaggaagctgtgagggtagcgaacaaaacaggctgccaatgtcgccaaacaagccgcgaaggcctccgcggcacagagttcgcccaaggaccccggtcagtctaccccagccacggagcgcagacgggaacgaggaangcatttgcgnctgcagccaaagatctcagcggactggctgacactgcantctgcaagggcagagcgttgcgagacg

SEQ ID NO: 131 - DNA, 219 bp, Aspergillus oryzae
  modified_base (3)..(3): n is a, c, g, or t
  modified_base (19)..(19): n is a, c, g, or t
  modified_base (191)..(191): n is a, c, g, or t
  modified_base (210)..(210): n is a, c, g, or t
ggngcggataaagttaatnttgaagggtccatagctttaatgacgcccttaattmaccggaamaatgcccagcaaaagttaaccgccgcccaagggccaaatctcgaggccgaaaytcaaaaccccgggaaattccaaaataamcaactggggcgcmgttttcgtccaamtgggagcaaggttgccgtggnacaacgctgcctttcgggntggcccctt

SEQ ID NO: 132 - DNA, 414 bp, Aspergillus oryzae
ttcggcacgaggtttgattctcttctcgtccgttttctmattccctttccaaacctwacaacaattgggacgaactgccagttagtggccgttttttatttcgtgcggacccgaatttcagattggttctcaagggatcatggttatcgccctcgaagtctgggccaccttcatcggtgaccgtttatacgccgttcttctccccgtctcgctttcgtcctcagtttcgttccctggctttaataatgcggccaataacacactgtccttcttcgggcgcatcccagcccttcatctatgaaccggccacgcaccctgatttatctggaaccctcgaagtacgcgtaccatgagtgcttggcctaggacaacttatgcattctggtttctgatgttgtatgaagacccttgtag

SEQ ID NO: 133 - DNA, 303 bp, Aspergillus oryzae
gactatcacaccatcatacatccacaatggactacaagagtacaaatcccagacaacagcaacaaccasgccaatamcaacatgggcacaacgaaacargcgttcctaaccacctaacctaagcctaamaacccgttcagcctggaatccaagaaaccaatcccaayttccggagccagcatacasgagcgatcagcatcgcaccacccccacagggagcccaccgaataytcccaacagcggttgtcccaattgccagaagccagcggtcaaacagccgaatgcccctggaaagctatccgc

SEQ ID NO: 134 - DNA, 273 bp, Aspergillus oryzae
aggggtccaaacttcctgcttgaagataccaactttttgacttcggtmaaccattyttttaccaaaccaaytacccasgtttttttttagccaaccgttataacaatcaccaaatatawtcaaccttgcgcggttatattattctcgggaaaagaaacacatcctacagtcaaaatsgcgtttttttgccaccaccattgttcttttggccggctcttgtctgccgccatccccaacggggaggtccaacaccgtttaccagaccgcggctgt

SEQ ID NO: 135 - DNA, 323 bp, Aspergillus oryzae
  modified_base (7)..(7): n is a, c, g, or t
  modified_base (29)..(29): n is a, c, g, or t
  modified_base (167)..(167): n is a, c, g, or t
accttanttaggsgttgggacggcccccnacggggcgsggatcgtaggttgttatcgattcgragcgaggragccctacaacgggkctccgttacactcttgtaattgatcgcctctgaataccaggctctatctgcggctcttagcgcacaagctctaaggcgcgnaaagtgcgcggcgcggtgatgtgcgcaagcgccccgaatctaaggatttaaagargattccacatcttctagcgcgccccttttgaaggaaatgagcgagcgcaaactttacattggatctaataagggggaaaagggttgtttaccgaaagaatc

SEQ ID NO: 136 - DNA, 856 bp, Aspergillus oryzae
tagagcagccccatctcgaaaatgcctatctgaagatcttaaatcagctcttcggggagcgtttgcacattgccaaccagttggattcgaagcatgccggtgtttcttccaccattgcagccagccctgaatatggatttggttccttgattgcaaggatggaacaccgtcgccgttttgtgcgggaggttgaagaagcatcaaaggctggtacctttgccactgatgctccgaagacgtccctttcaaactgggctctcagtgcaggcgatgcagccaaggccaacagattggctccagatgttattgatcacctttcgaaggatgattccccgttggccaagcagctcctagaatccaagaagcttttctttgatgagtctcggtggctcgttggctccgatgcctgggcctatgatcttggaaactcgggtgtccaccatgtccttgcctccggcgccaatgttaacatgctcgttattgattcccagccttactcggaacgcactgcagctgatcccacacgcagaaagaaggatattggcctttatgccatgaactacggcaatgcctacgttgcctctgttgccgtgtacgstcctacactcaggttctccaggctatggctgaggccgaacagttcaagggcccctccgtagttgttgcatacttgccgtacaaccaggaggacgattctgccttgactgttctccaggaaaccaagaaggccatcgaccttggatactggcctttgtaccgctggaaccccggaaacgaggagaacaatgaacccaagttctccctggaattcggagcgtatcaagcgtgaacttgaagagttccttcgtagggacaa

SEQ ID NO: 137 - DNA, 921 bp, Aspergillus oryzae
  modified_base (570)..(570): n is a, c, g, or t
  modified_base (623)..(623): n is a, c, g, or t
  modified_base (627)..(627): n is a, c, g, or t
ggcagtgatacaagcattgagacgaccacatcgaacatggagcctttcatgggtgaaaacttgacgcttattttcctcctccgcttactcgactctgtggtgactttgtgaccgatgagtctatcacactgagaaacaacgacacaaacgcggtgttgtattcaaatgccaaacacagttgtggccctctccagcaaacggacccgaacacagcactgcacaagatcacctggtacgaagatgtctttctgccaaagattgacgagtactataaggggtcccttgtatggaagcggagtgaggtgtcaaaacaagcagacagcagctcccggtactgggtcatcaaggatgaaagcatttatgatttgacagactacttctataccctcaagcagatgaacaacatagacagttacaatttcctaccaagcagcatcacggaacttttcaaaaactatccaggcactgacgtgacagacaaatggccaaacagtgaaaatgccaccaaagcgcaaacatgtctcgattacgtgttctataaaggcaaagtcgatttccgtgatagtgcgngatgccaggtcaataattacattctgttagcattcacgtgtctcatttgtgcngtcnttctcgtcaagttcctcgctgctctccagctaggatccaaacgtcgacctgccccgcagaacaagttcgtcatctgcttggtgccagcgtacactgagggcgaggattcattgcgaaaagggcttgattcattgacagctcttcagtatgataacaagaggaaactcatttatgtcatctgcgacggtatgattgtcggtggcggtaatgaccgcccaacgcctaagattgttctggacattctgggagtggatcccaaaattgaccctcctgcattaccgttcaagtcaatcg

SEQ ID NO: 138 - DNA, 920 bp, Aspergillus oryzae
  modified_base (818)..(818): n is a, c, g, or t
aaggtcaacgcttgaacgtctcctggcaagaatggcttctcgattgatgccatccggtggccctggcaggcgctgggcattcctgcgcgtgccgagcactcctcaacgacgtgcgttcgcctccactaggttctacttccaagatattttccagtcgcaattggaggatccctcatcagctgcggtctactcctcccttcaggcgtcgagagctgttccgcagacactcacagagaagatcgttcagaaatactccgttggtttggccaaggataagttcgtcaaatccggcgattatgtcactatctcgcctcaccggtgtatgactcacgacaattcgtggcctgttgcattgaaattcatgtctattggtgcaacgaaactacatgatccgaagcagattgtgatgacgctcgaccacgatgtacagaacaagtcggagaagaatctccagaagtatcgtcagatcgaagactttgccaagcaccagggggttgagttttatccggccggaagaggtattgggcatcaagtcatggtcgaagaaggctatgcttggcccggtactcttgtggtcgcttccgatagccatagtaacatgtacggtggcgtcggctgcttgggtacgccaatagtgagaacggacggtgctagcatctgggccactgggaagacatggtggcagatcccgccggttgcaaaggtcactttaaccggtgtattaccaccgggtgtgaccggcaaggatgtgatcgtcgctctttgcggattgttcgataaggacgatgttttgaaccatgcaatcgaattttactggnccccgaggagactatgcgcagtctatcggtagatgcccggttaacgatcgccaacatgacgacagaaatggggtgccttgtctggactgttcccaatttgac

SEQ ID NO: 139 - DNA, 484 bp, Aspergillus oryzae
tgtcggaaggccacgtttgcattctcagtctggtcggtgtcggttacagagctactgtcgaatcaacggcaaccaccgtcgaacctgaataccccggccagcagtttgtctccctcaaggttggatactcccacccgattgagttgggtgttccacagggtgtcaaagcaagcactccgcagccgacgcgtattttgctggagggtgtcaacaagaacgtcgtgacgaaatttgcggccgaaatcagagaatggcgcaagctgaaccatacaagggcaagggtattttcatcaacggggagacaatcaaattgaaggccaagaaaatccggtagatttggtgtctctggttctgggaagaggaacagtggttatgttttactgtacatgtatatccaagcatatttggtttctgttcgcgattggtatctatcttatgtacttctagacgcatctagcgtgagcaatttgacaaagttcgttgc

SEQ ID NO: 140 - DNA, 714 bp, Aspergillus oryzae
ccacgaggcttgctcgtcgctgctaacgccactttcgccgcactccaactggtcctcttcctgctcctcctcgcgacctacagcatccacttcatcgttctctccgtcctctccgcctcactatggtggtcgatcaactggtttgctcaggaattggcagcggtgcaggcacaagawgctgagaaggagaagacagagtcgaaggaactgctcacagaggaagacgacgatgacaagaggaaatcggaagctagtcggaaaacaccgggagctctggacagcacagaaagtgacaccgagaccgagagtctgatggagcgtaaaatctctgcggtgtccgctgccgctccgccgtccaccactgccgccgccactacgacggctactcttcaaccgccggagcagcaaggagggattcggaaacggctgagcatgagcggagagagctccggctatgtgagcacagatagtgaatgggagaaggtggatgacaaaaccacatcttaggcatcggttctgcttggataaaaattgggaggcctctcttgccgtactagagtgccgctcacaggcctggcatatctaaggatacttccgtatcagatataaatatttgttcgacgtgcattttggtttgcgtgtaccgacagataccccatagatgacgactctgctttgcacctttggtaaatgagattcaccatagttcgctcg

SEQ ID NO: 141 - DNA, 910 bp, Aspergillus oryzae
  modified_base (176)..(176): n is a, c, g, or t
attcgacacgaggatacctacctcgtgttgttccctctttctcctcactcccttctatccttcaacttattcttttgtcaactctctctctaaacactctaacccccccactatcctacttccgtttcctcccgcttcccacaatgtcatccgccttgttggacgaagctgcgcgnattgcccgccagttcgacttccccgccgagggggtccaacgcggggtgaaagagtacatccgagagattgatgaaggactgagtaaggagggcacaactctgagccaaatcccaacgttcgttacctcggtaccaaatgggacagagaagggactgtacctagccgtagatcttggcggtaccaactttcgtgtgtgttcagtagatctacacggtgataacaccttttctctcacccagtctaaaatcatgatccctcgtgaattgatggcttccggcacctccaaggatctcttcactttcttggctcgccagatcgaagctttcctgcgtatccaccacaacgaacacttcgaagctcacctcaaacgccgacgtgaaggaaatagcgaagaggatttgtttgatttgggctttactttcagtttccccgtgcgccaggtcggcattaacaagggtaccctcattcgctggacgaagggcttcaacattcccgatgccgtcggccatgatgtctgcgcgctattgcaaaatgcgcttgatgctctggagctccccgtgcgcgtggccgctcttgtcaatgacacagttggaaccctgatggcccgttcatacacctcccctggtgaaacgggaactttcctcggtgccatcttcggcacgggtaccaacggtgcctacgtcgagaagctcgacaagatcaccaagatggctactatcgaacattccgacta

SEQ ID NO: 142 - DNA, 804 bp, Aspergillus oryzae
agcattagcgagtatgaacaatggcagaacggtgacctagaacatggaaggctgttctttggccctcgccgtggccgatccctcgtgggcagaagaagaaatagcattgattcggccagtgaacaggacagtctgctgggacggacccaaagagccagttcacacgatagtcctctaggtcatcataaacgacgtttgtttggccgtggcgagtggacccttggtcgtgtcgtgttctttgtctttttttatttcctcgtgggacctttgatgctattggtatctctcctctgctggttgctggtcttctggattccaatgggacgcgtgaccattatattatttgatcatcttcgtcgtcatcccctcgctctctcataccattctgatacctcatatacacggctaagcccaaactcctcttcatctattcttttatgcacctatcgcgccgccgggttaaggtactggaaatacacggttggcggcaccaacatcttcttgatcaatcttctcggtgttgtactgtttgtgatttttgactacttctttttggaaaaaactctaggtgttcaaaactccttgactcacccgggcttaattttcaccctggcccttgtttccatcatccccctggcttatttcattggacaggccgtcgcttcgatctccgcacaatcctccccccsyatgggtgctgcaggttaaggctttcyttttcaaacgggtggttcgaggttttacctgttactgttgtttgcttttaaacggaggggtaaaaggccaaccttttttgaaagggta

SEQ ID NO: 143 - DNA, 563 bp, Aspergillus oryzae
agaatttactctcttaagccttattccaggttctatgcttgcagaactttagaagaaggacttttagggaatgtatgatatagctctattacgttcttgttttctttcctttttcttactctactttggcatctcctttgtgttgtttggaccgtgtggcatttaaaaaacggggtttgggtttttgccatcagcgtggttctagattaatccgttgctcttttgtcttttcattattattctttccccgttcgtctgtatgcatcttttttccctttccttgcctcttttattttgttttgttttgttttattttttttttcytttttggttccyacattatgagcatgatatatttgggttacaccgctgtccgcaatggcccaagattattcagggtggcatggactgggcgtttcaaaaattagcgttgagaattgttttttcacggtttccgatgtatcgtccctatgaaaacacgaggctccgttgggcggtcggcaggcgacagaacccttgatagaagagaagcggggtagagactacaaatgataatacttagt

SEQ ID NO: 144 - DNA, 836 bp, Aspergillus oryzae
cgtttcgcacccagctgtcaacttctgacatggaagtcatcggtctcgtccgagaggtggaaacacttccctattccagtgtcaagtgggaaatgcttctaagtgcgctgaaggaaccactagacggattgaaaacatggctccaggagtggcaccgaaatcaccctatcatcggccttccagaacagccatcaatcccccgccgacacatcatcatccccgtagatattcccgagattcaggtggtgcatactgccgagctgcggctctgcaatctcgccgaccaacccccacacgccgcggtcgggcagatgatcgcagccgagctcagcctacgtcatacgcgcagatggtgttcgcccgaaaatcgcgagaatgcgggaggcccgctcgaattctcgtacgaaatccacgcgaacccagagctctggctcgtcggcggtcgtcgacgaggtaacttcaccgcggacgaaggggagaccaagacctttgctgtgatgcttcttccgcagaaggcgggacatctccttctcccaggactcgaaatcaagactttcgtgcccgtatcgtcgaccccaccgccgaagccacctgcgcctgccactggccccgcagagcagcgccggtcctgcagagacgacagattgcatgtgaggtcgactaccgcaatcacggggagaccgtcttggtattgccggatctacgaagcacgacggtcagtctcagcctgtcgggaggaaacatggcgcggcgtggttgatcgattcggaacgaagggttcttgcatgatatttaaacccaatacatagatgagtaaatatgacacttaatcatag

SEQ ID NO: 145 - DNA, 922 bp, Aspergillus oryzae
  modified_base (10)..(10): n is a, c, g, or t
gaattcggcngaggctcgttcatggaagccgtcatagagcagaaatccctcaagtcaaacattgtcagcttcagtctctctcgcgctgccgacggagggaaggatggtgctgtgacgtttggtggcgtcgacaagactaaatttaccgggaacatttcgtacaccgacgctctcagcggtaacaatcgatggaccatccctctggacgatgccagcgtggatggcaatgcctgcaacttcgtcaacaaaacggccatcatcgacaccggcacatcctacgctctgatcccaccgaagatgcagccgcattgcataagttgattccaggctccagtgcctcgggggacgaaaacttcgttattccctgcaattccactgccaaagttgaacttactttttcgggcaagagttatacaatttctcccaaggattatgtcggttcgaagtacgggtcgggttgtgtttcgacgatcatcggccaccagatgttcggtgacaacgaatggcttgtgggcgatgtcttcctcaagaacgtgtatacggtgtttgacttcgaccaagaccgcgtcgggtttgcggtgcgtgggaactccagcgcaaaggcatctacgacaactaccactgctactggaaccgacaaggctgactccgctactgctgccgccgcgagctcaagtgcgacagaagctacctctgctggcgtgaagaccggcgtgcattatctgcctgccttgatggtcgttctgtgcacactttggctcgcctagtgtgatcacgtgagtstcaataggttcgctactatttcttgcatatataatactactatccgacccagtacccgttagaacatggcgaccatggcatcagccgctgcagttgcgatcgttctgaaggctttctgtatattctcctgtcagtacct

SEQ ID NO: 146 - DNA, 962 bp, Aspergillus oryzae
  modified_base (940)..(940): n is a, c, g, or t
gcgaccggataacctgattcatcatggcagatagagaagatgacgaagcccctccagcactggtagatctctctcagataccagatgcggaacagcaagacgcgacaaacatctcatccgcggatgcgccgccggagagtcgggtgcctattacgcttgtaaccggatatcttggcgcaggaaaaactacactgttaaattacattctcaatgaaaaacatggcaagaagattgccgtgataatgaatgagttcggtgactccacggacatcgagaagccattgacagttaaccaggatggccaagaattcaccgagtggatggaagtcgggaatggttgcatctgctgctcagtcaaagactctggcgtaatggccatcgagtcccttatggagcgccgaggaaccttcgactacattttgctggaaacaaccggccttgccgacccaggcaatatcgctcctgtattctgggtcgacgataacctcggcagttccatctacttagacggaatcgtcactcttgttgacgcgaagaatatcctacatcttctagatgagcccactcctgaggaaacagtgtccagtcacgaaaaagaagaagaccatgaccatacccattcgggacccgtactatccatggcccacatgcaaatttcgcatgcggacgtgatcatcctgaataaggctgatctcgtcactccggaggaactcaataaagtccgagaacgagtgcaagccatcaacagtgtcgctaagatccatgtaaccgatcacagtaagacacctcagattgaaggcgttgtgttggatctgcatgcctacgatcatttggctagtctggattttggcgaaaaagggcatagccatattgatccggctatctctacgatcgcaataacaacccctcccatcccatctgaaagattccgctcgtaatncctggctcccctccgtctttgg

SEQ ID NO: 147 - DNA, 938 bp, Aspergillus oryzae
  modified_base (221)..(221): n is a, c, g, or t
attcggcvgaggctgggctggatatagacataaatcataaagcctccgaattcgtgacctgtgggtttttggtctgacttatacttacgcaaattaagttgttgatggtaccagcggagtaacaacggagaccccagtatacgtcacacttccaaaatgtctcaatcattgcgtccatatcttcaatgcgctccgagcctctctcacctccgcgcttgcgntttcgaacttcgcatcccagacgtccgagagacataatgtaccagaaattgaggcccaaagctctcctgaactccttcttaacccgcttaccgtctctcgaaacgaaaatgagaaagtcctcatcgaacctagtgtgaacagtgtccgtgtcagcatcaggattaagcaagcggacgagattgaacatatcttggtccacaagttcacccggtttttgacgcagcgagccgaatctttcttcatcttacgacggaagccagtaaagggttacgatatctcgtttctaataacgaaccgaaacgtagaggagatgctcaagcacaagctagttgacttcattatccagtttatggaggaagtcgataaagaaatttccgagatgaagcttttcttgaatgcccgtgcgcgattcgtcgctgagtctttcttgacaccttttgactgaattcttgctcataatgttcattttatggttcatgatatatccatgacctccactttttatccaatagcgagtattgtacaggcgatctaggctggtgatgggggctactctgcttcgctcaatgatccgttcccttccctagatcttgaagtcatttggagtttaaatgtatgatgagctttctcacaacttacacttgacagtagatcttggtataagcgaaatataaccatactagtaacaagcattcagaaccattatgtttatagca

SEQ ID NO: 148 - DNA, 932 bp, Aspergillus oryzae
ttcggctgaggagctgtcactcttttccagctccattcactcttttagtcaaagtacaaaatccagaaaagtaacggattacatatatactaccatttcgcgcacttctgtsgcattcctccgcacacgcgattcaagataaagccagacacaacgactcgagtccattattccattgcagtcgcaaaatgcagttcagcaaggctcttctcatcgtcaccgccgtgcttgcgcctttcgcgcttgcagaggatgcgccaaccaagaccctcaccatccaggtcgtccctgtgacgacctcaactccggcaccgacttctacggcgtctcccagctcttctgctttctcaatccacactccttctagctccgctagggcgtcttccactccgctcttgtcaaagacgccttccgcgactccttctgtgacaccctcgtcgtataccgtcccccaggctactggtggtgctcctgccattaggctctctaatgcgatagtgcgggcgttgtcgctgctgctggcttcatagtgctctaaacgcctttgcgagcagtccagagcaatgcgcatagacgacgatggtcatgtctcagtcatcgagccgatacgactgcagtagcaccatctgaattgcttctgagaacttgctggttgacgtgggctgagcacagagaggagacaatgccaataaggagtcaacaaacccaatcaaaaatcaactacttctttacggcagattgcattttgtatacctacctcattactcatgcgattatcttgagcagtttcagccaagactatagcggttttacatgatggtgttcatttgttgggacggttcgccatttattattttactgtgctgtgattcgaattctgattgtcaacctcgttgatagcttactttcctgccacccattattacgattcc

SEQ ID NO: 149 - DNA, 760 bp, Aspergillus oryzae
  modified_base (8)..(8): n is a, c, g, or t
attcggcncaggcttcggcacatggaggaaatggagcaagagcgcaaggctcgcgaaaaggaagagaaggaacaagctgagcggtcagagcgcgttaacactctgttccaggatgctaaaacagaatcggaaatcgataacgcttttgttcgcgacgatatggaaactaaaggaaaggagcagaaagcctcggaagactcgaagaagccggaagccgaaagtgttgaagaaatgaaggcagataaatcctcaaaagccccagaacaagaagaacagaaagctccagagcctctgaagaacaaaaacctgaaagatgctgaagaagtatctgcagtaaagccggctaaggaataggccggtgctgcaccagataagcaatcaaagcagagagagtaatgatgctcttattacgttcttcatgtatccggtagcgaaaggcgtcggttcaaaatccgtaaaaacggagaacatcattgcctattgcgcctcaccagtctctgtgctggtcacagtgtggctttctcattctccttaaaatatgccgtcaattactggcagctttttgtatatgggttggcggagtcttttgatttggggctcgacttatgcatctgatctttggttgatttataggtctgatattgggaagcacttggtttatttttctctatcttcacgatgtatcggtatgaacggtttgcctgaatgggtaaaacgaatgacttaaatatcagtaacttacatacctaagcaaattatt

SEQ ID NO: 150 - DNA, 380 bp, Aspergillus oryzae
cgaggtacctgtcgaacatactgctgcagatgaactaccttcgcacgctactgagcgagacgaactacgtgagagtgccgctgatcaaggattgcctgttcctccagcaatcggaaagcgagcaagcaacggtactactggtcgtgaatcgcggttctctgaagacctttgatgtaattgtatcgcttttaaggtttctgtacatcttttgtcgtgcttctggaacttaatttgacccttttattcttgttctgcggtgttgattgtgtgcttttgggagtcgggaatactataggaggatggataggtaaggcgtttcacaggacctctagtacatatgaagggacatacctggactactaatactgtaactttttccc

SEQ ID NO: 151 - DNA, 909 bp, Aspergillus oryzae
  modified_base (843)..(843): n is a, c, g, or t
aggcaggaatcttataagtactaaaattttctttaatatccacgaccaattctcggtctgttcgattgtttaccagatatctctgattgatacactacgcctgtacacttggtacaagccatcactgccaaaatgtcgcaaaaagtttatgtcacctataaccaggtgcacaagctgtgccagtcttcggctgataatatcctgacaacctttcatcctaaccttatgattgctattggcggtggcggatatgtccctgctcgtattcttcgatccttcctcaagcgcgctggtgaacccaacattcccattcaggccatcggctatctctctacgaagatctgggccgtggtgacgccgaggaggttcctgggaccaaggtgactcggacacaatggttggatcttagttctttggagatggcaaaccttattggcaagaacatactcattgtggatgaggttgacgacactcggaccactttggaatatgcggttcgcgagcttcagaaggatgttgagcaggcacaaaagcagcttggacgggaaggcgaaaagacgaatttctttgtcttcgtgcttcataacaagaacaagtccaagaagggggtacttcctgcggatatgatggaatccggtcgctatcatgctgctgtcacaactgacgatgtttggatctgctatccatgggaagccaaggatattgatgagcacgatgcgttggccaaggagaaccctctcttttaaagccgtcgttcaatttcttatgaacatttcctccgtgcctatgcattttggctttcattcgcttgcgtatattctattatcatgacaaagatgagtnggcatgtcacgatataaacggtgcttgacgacaattgatagaaataaaataagaaaaatccagaat

SEQ ID NO: 152 - DNA, 490 bp, Aspergillus oryzae
aattcggcacgaggcagtttgaatggccggcgctgatcagtgtcattgctgttggccttgctgggatgctttatacgctctttgttcgcatgcagcgtggtcatttgatccatgtcccgaagtggattgctactccaggaatgctacaacaaacgagggagaggtgcattgaccggatttcttcggcgtcggacctttagtcatgctatatcaaggatatttgccagtgatggatttggcaagcatctgcgtatctgctgtttatcttgtgagatacagctcaacttcaagaacgccagagtgcagtccgaagaggaagggtgttaagaacattgcgaatgattgattagttcgtaaactggaggagtgggcaataggtacaagaatgacaaaggacatgaggggcaaacggtgagccagaaaaagaatacscagagtagtacagagggttagcaatagcaaagtagagaatctatgagacctatcgacc

SEQ ID NO: 153 - DNA, 742 bp, Aspergillus oryzae
gaggaaaaaaaggtaaaataacagagaaacatactctacacacctccccgccacgatgaaggacagcaaagggtgggacggaaaactgagagttggtccccaagcgaccatcacgaatccggaggcaatcgaggacccggattactcggacgaggatgcgccgccggtagaggagatcgaggcagacgaagacttgctagaggatgaggataaggatacagaggagatcgacctcgtccattgtcgtattgggtccatcccggctttacatctagagcgattccctaaagtacagagaatatgtctgcggcagaaccaaataacgcggatcgcgtttcctcctgaagtcgccgggtcgctggtcgaactcgatctctacgataaccttatttcgcatgtcaagggtctggatgagttcaaggatctgactagtttggatctgagcytcaataagataaagcatataaagaatatctcgcatctggtcaagttgacggacttgtattttgtgcagaacaagatctcgaagattgaagggttggaggggttgaaggtattgaggaatctggagctgggcgctaatcggatcagggaaatcsagaaccttgagtcgttgacgtctctggaggagctgtggcttggaaagaataagatcmctgaattcaagaatctggatgctttgcagaatctcaaaatccycyctattcagtcgaaccgacttactagtctgaacggactctcc

SEQ ID NO: 154 - DNA, 510 bp, Aspergillus oryzae
gagggttctctgtcgccgagttcacccgaagacaagaactcagtgctaaaatcgagacgcgaaccgcacaaggccgatggggcgttacagaacgtgaccttctctcatccaggcgcactcgtggacaccaaaactcggtttcttcgatgtccacgccgaacgttgggaactccgcggacgatataggtacaccgtcgtccctcatgggtcaggacctttcagcagacgaccacatgcttgcgtccctacgtgttcgactccgagatctgtctgccgagtttcggtcacggttgaatacgctcctgggcgacctagcataccaaccagatgtagacatgcggttcctcgctgtagtaatgaacttcaacgacttctacgaaccggtacgaaagcgaaggacagcgacgagctctcgagacaaggaaagactccgccgcaaagcagcagaggggaatgcacaaaaggaaatgaagaaagagagaagagatccaaccgggccagaaagcgcca

SEQ ID NO: 155 - DNA, 820 bp, Aspergillus oryzae
gagggacgaaaatcatcaaccttggtcattcgcgatttaacagagctacgactttatccaccctcttctgactcgtccacttcttttcacaatttcttcgtcaccattggccgccgtcgcagacccgacatcaacccgctaggcccaaatccggccgtttgcctcacattatgggcaatgaaccgtcgaccttggtggatgaagacacccctccttccgcgctagaagctcggacccttgaggcggtcgctaaatatatcaaagcaaaggatgattgccaaatcgtggtaatggtgggcgctgggattagtacctcggcgggcattcccgattttcgttccccagaaacgggaatctatgctaatttggcccatcttgacctgacggatcctgaagatgtgtttgacattggctttttcagggagaatccgcggccattctacgcattggcgcgggagctggcccccggccgatatcgacccactattgcgcattcctttgtcaagttgctctatgacaagggtcttttgatgaagcatttcacacaaaacatcgactgtctcgagcggctggcaggtgtgcctggggatatgatcgttgaggcacatggaagctttgcaaaccagcactgcatcgactgcaaggctgaatatcccgagcaactgatgaagcagtctatcaatgaaggcgaggtacctcggtgctcccaatgcaatgggcttgtgaagcccsatatcgttttcttcggcgaagatttaccggaggaattcttccytaaccggacgcytccagagcaggcggacctttgcattgttatggg

SEQ ID NO: 156 - DNA, 815 bp, Aspergillus oryzae
gaggcgggtttttgatagatgttacattccggcgtcctacgatgctagagaccctcgaatttcgcctttatatgcccaacctgaccgctttcccgaccgcatcctattggtgacggcagcttgtgatagcctcgcaggtgaagctgaggcgcttgccgctaaaattggaaaagaaccggagcgggagattagtgttcaccagatgcagggctgcaatcatgcctttgacaaaaatgcccctgaggggagcacttcagcaaacgcgaaagacaagtcctacgctatggccgtcgcgatgttgtcccgctcttaagatttgagacatcagattgccagcttatatacctcataaaaaatttatatgagtttcgcttcttttgtttaggctcgggtaactggcggtgaatcaataagttatgggctaactgcatatcatttggcccaccacaatggcgccagctggtactccatagaagttcatacgattgacggtgaggtgtcaaattaggccaccgcatcatcgaatcacgaggtaaagaataagtaaccaggatgatgggacagtgacgattctggaactggagaaaaacagtgggccagtagagaaaattctcattaaccgttgaaacatgaagcagcggtgcctgacttggaggcgatggtgatgcagtggctgaaaccacaccatggatggttgtctcttgggggccggracgaccggcaattgccctatgccctaaattacccgaagcagtwgtacccctggaggggcagttgcgtttcacccgcggtcacarawtcccttgggtggagaa

SEQ ID NO: 157 - DNA, 481 bp, Aspergillus oryzae
gaggtttcaatctaaactataaacccacacaacgattgcctcccttcgcttctcccccttccatatgatattatgataatatgatatgtyaccttcgtctgcatattgacatgagttgttgtcgtggctgtcccgcaccacgagaaatggcggtctttaggcaacagtccgccttactatgcgttcctcaaggctgaacgaaggtagcatagccttggatccagattggatatcagatcagatcgtcatggggggattgcgtatcggctgatcagcgaacaaaacccaaaacagcccaagtggagtggaccagaaaagcaatggccagaactccgccaactcaacacttgttctttccatcccgtttgatatatacatgtttcgtccttccccttctcatttatccatacactttttttttctttgttctaacttttagtttttcgactttgtctccttcccaggggtacaccgcatagca

SEQ ID NO: 158 - DNA, 825 bp, Aspergillus oryzae
aggtttgtcgtgacattcgttatcccacaattccttttcctgacgtttctgcattatcaagcaacgggggcccacgggttggaacccgtttggagagttctaattgctgatcatcttggattgagaaagtacctaaaatcctttactactcagatctggaaaagtcgattttcccgtttcttctgggacatcctgcaccggttgaagaacggtagccttttagaagcggtctagctcgagaaaccgtcgcatcccctgcttcgggccttttaacttggctagtaattagcaaaagcatgaggcttgggtacttttgatcaaggtctttgtatagtgtatggggagagggtgctttttctttcgtcccacgcctcaagaatcagcccactgtttcccattcaaatatcggtcgagtcctttgtcactctttcggcgaagtgtcatctatccgcgttgacaccaccacgtctcgtttagacgtacttccctctttcttttttaaacgtgatcagttagcctgccagggcttttatgctctagcagcgctgatgtatgtctgcgacgctggcggaatatcgagactatgccattgattatgctcaacatgccagctgcaagcccgaggaacatacaagtacgcttgtttaccacacgcatcagccacaactgcaacatccgaagccgccagatactcctttccagcaaggaagctcgcgcasacggcatttgagcaccatcatgcaaacgcgaccgttctccccaccgcgaatccccatggactccaccaacaggtcgttctcacaccggcccagatgctttcacggc

SEQ ID NO: 159 - DNA, 858 bp, Aspergillus oryzae
caggcttaaaccgcattccgacaagatatctagcctttaaactaagaaattttccaactcctagccttcgacatgaccaaaaggagtgtccttgatctccgtgattctgccatggcttatcgcctgtcggcccagcttcctgagccctccccagccaccattgcaaccccagtggcgaggagtggccccttcgccccggaagattacacgaaaccatactgcgaattcatgacagcaaaccccacgatctttcacgccgttgatggtttcaccaggcagctcgaaagccagggatacaagcgccttcccgagcgcgagacgtggaactccaagttagagaagggtgggaagtactacgtcactcggaatggtagtgctttcatctcattctcaattggaagagattataaaagtggcaatggaatggccattgttgcaggtcatatcgatgcactcaccgccaaattgaagcccgtgtccaagctgcccaacaaggctggcttttcccagctcggagttgcgccctacgcaggcgctctgagtgacacatggtgggaccgcgatctctcaataggtggccgtgttctggtccaagactccaacaccgggaaagtcgagtccaaattagtcaaattggactggcccattgctcggatcccaaccctggcacctcatttcggggctccctcgcaaggccccttcaacaaagagactcagatggtgcctataattggcgttgataactccgatcttttccagcagcaagccccatccaagatagatcaagacaacgggatcaaacctggtacatttgcagccacgcaaccggaaagcttgtaagtatatcaaggagcttgg

SEQ ID NO: 160 - DNA, 850 bp, Aspergillus oryzae
  modified_base (197)..(197): n is a, c, g, or t
aggcgctggtatccagcgtaaccctcagggcgatcgctataagccaacggatttctatcctgaagagaccgcccttctaaaagtcaaggagattcgtgagtggctcaaatctatcgaggccaagaatttcgagagagttcctctagatgctgaacagctcgattccgatattgtcaagttgatcgagcaggatgcgnatcaattaattcaaaaccagcccgcgatgcaagcaaagaaagtagggggtgttccacgaagkcccttctcaggccatctgatgtagagcagagactcgggaaccaaacgttcagacttggtgaccgcgttgtctatgcccaggactccggaaaagtgcccatagccactcgcggaacggtcgttggtctcacccggacgtcgcgggcccttctcctggatgttgttttcgacgtttcgttcatgagcggaacgaccctgggtgaccgatgctctccattccggggacaaacagtcctgtcatcttctgtccttaatgtttcataccgacagttactcgccacaacccgagcagccagcagccagcaaagtcaacaatcgcctttgactgttgcgggctatggcgctccttctgggcccggtggacaggggcagctgaaagaagcttcagcccctccacctctcagtggctcctaccgaggtgctgtagcaggtatgggcaacggtcgcggcaatggtttctctcaaagaggccggggtggtcgtggcgggcggggcgcctctaacggtgttgggccgcagacaaccctacccttccgaccacattttaacggtggagaacagcaaactgatggggccacatcgcggaggtaga

SEQ ID NO: 161 - DNA, 468 bp, Aspergillus oryzae
gagggcccttcagaccgcacgaccgactcaatgatcatgccatgccgatcggagacgtgttacaggagctgcagacccaacttgcagaatatagggccctcaaagagcaaatttctgtcagtgctgctggcatcactggcagcagtcctagttacacagcgtctctcgaagacagcaacagttctgtatcgtcttcatttctacgcatgagcatcccatgatgacgtgaacaattaatggccgacgcactcgcactcacacctcttatctacagtatctaatcttacattttctctttgtctccattttatctactgctcagcggcgcctcatgggttggttggatgttcagcgttcagaagcatggacaggagctaaggtggatattacttttcctgtactttgttccactttcaatcttagtcgatatgtcagcacagacatgaagaatgaactggtttcacatcc

SEQ ID NO: 162 - DNA, 824 bp, Aspergillus oryzae
  modified_base (429)..(429): n is a, c, g, or t
cttattagtaggccggaatggaagtcaccttctgtcacttcgaaccttgaagcatttatctggatactaggccccggagttggagatcatccccgactacgtgagtttgtcgccagtatgccccagtgcaagcacactgtgtctagctcggattattgtccaaactacttggctatgggcagcattgccgggtcatctgttcgtatggcgcagttgaggcgcgacaactacccagtgccagtccatgacaatgtgagccttccgcagccaggaacacgcactcatggttcggaggttacggtgagaaatgtgcagaattcgccatttgaagcaattgagcctggccttatcattgacatggaacctaattttgacatcaatcgttctgaggttgtcccacggtttaatgcaattgaggcagtgcaacgnatgcctgtggcagtccagaaacgcatgaatacgatcgataggcgagtcaaaaaggaagaatttgaggaaaagctgcgacagttccgtaaagaccttccaggagccgatgcggaaatcatcaccttgggtacaggttcctcatctccttccaaataccgcaatgtttccagcaccctcgttcatgttcctggttatggttactatctgcttgactgcggtgagaacacgcttggtcagctgaagcgcgttttcgagccagaaaagttgcgggaggttctacagaacttgcgaatgatctggattagccatttacacgcagaccaccatctcggtactgcttctgtcatcaaggcgtggttccaggaaaactatccgaatggagattcgcaaacaag

SEQ ID NO: 163 - DNA, 911 bp, Aspergillus oryzae
aattcggchgaggcagctgtagcccaccctttttttaactccagctcagcattagaagagtgcgtttcggcatgccgccccgtctcaaccttttcaacgcgaggaccgctgtcccggtctttcgccaaacctcaatcaacgtttctcgacccagtatcgctactactatcaacagcaaccgatccacccgccatggcttgaagactggcttgtcgtcctcgacgccaatgcagaagagatacaactcctcagcgtcggggggagacaactcggagcggcccaaggctcccacagaggacccgttacctcacgttagcgaggaggccgcggagataagcaagatcatggacaagaaatgcgatggcactcccgcgagtccggagttggagcaaggaacgcctatctcagagatcctccaacgggacaaagaagcccagaaacatatgcccaaggtcatgcaagaccagatcaaatcatcgactggtactcgctcgttctcgacatccactcgccggagccaggcagaattacatggccaaggaaagagcttcgatgagcaaacggccgcagtgatggccagcatgatctctcaggtcaaccagcaggctgaggaatttcatgatgggatcaagtttgacccagtcgagacccttcccaagacagagaacttccgcacgagatatgactcgctgctcgaacaatttaccaaactcttaatgacggatggcaagctgagtagggcgcagaaggatatggcgttcattctggaccacctccggactgctcctccgcctcagcccaaccccaagcggcctctgcttcctggaccccccgccccacagcttccactgaaccctgtcctatatctcaccttgatgtcgactccgttgctcctctgatcaagattcgcc

SEQ ID NO: 164 - DNA, 834 bp, Aspergillus oryzae
attcggcwcgagggcctggagcgaaggtagcgctggctatggttatcccgacggttatttgcattattctcagtcaggcctggcagatccgccaaggcgggttgatgccgcattatctcaagatctactgcacgatgggtcttattcttttgatcttgcttccgttgcctggcctccgtctccggattcaccattacatccttgcaattcttctcatgcctggcactgcaattcctacgcggccttcgctggtttaccaaggactgcttcttggccttttcatgaacggcattgctcggtggggtttcgcatcgatcattgagacacccgccgcactgggcgagctacctggtggcgctcacggatggtgggggagtaccttccccaacgttaccgatacaactgtgaacatcaccctccctggcccgggttctaacgaactataccatgggaatggcaacattacattcacgctatgggagaaggaacgcatggccgatctgggtgtggacggtgtttcggtcctagtcaacgatgtggagcgctggcgtggataccttgatgaggatacgctcggagaattcacctggcatcgccacggacataatggcctggagctcctgcaccgtccgacgatcgagagcgaccaggccgatatcgattcgacggacatggcggatgaggacgacaatagacctgaagatctgtttttccgttttgcgttcttgaagggagctgaagcaggcaagtacggtggtgccggtgtgtggctggaggacggggggtggatttcacccccgccgccgaaaaggtagatttggtttcttgtttttt

SEQ ID NO: 165 - DNA, 839 bp, Aspergillus oryzae
aattcggcacgaggccggtctcctcttctctccccctacataccctttcgtgaaccttttccgctcccagaattaggcgagaattgtcattgctcggccaagttattcactatctaaacaaatgtcgggccccatgtccgttgtgaacggctctgcggtagtttccgcagagtcagactccaaatcacgataagaatccagaagagcttcctgagaaagatgcccccgccgttgtggatgccattcgctccctagccgactcggatgatgacagtcgcgtggcaactgaagatgaagtctgcgatcttctccatgttgtggacaagatccctgtccgactgtgggtggcatgcatcgcgggtatcttggaacgctttgtatggtatggggcgacggcccctctgcagaactacctgcaaaatgcccccggcggcgaggtacccggcgctttgggcctcggccaggcagctgcatccaatattgtgaacgcactgatcattgggtcctatattatgccagttccagcggctgtgctcgctgatagtttcttgggccgatacaagaccatgctctactctgccatgtaccgtgctattctatttttatcccttcaccccacgtcctttatggtgctagttctgtgtagaggctaacaggttaacagcattgaggccatcggggcaacaattttatttgcgacgtcattgcccgtcgctattcatgggggagctgctcttgcaggcgtgattgctgcctgtgtgttactggctgttggatcaggggcattcaaaaccacggtggtcccgtttatcgccgaccaatatgatgcaaccgagttt

SEQ ID NO: 166 - DNA, 952 bp, Aspergillus oryzae
aattcggcacgaggggcactattctcgccgttcagccctctgcggctgtctgggcctgacctccatatcaccatgtgttcttgtttctctagggaccagatttggtttgttttagacggccccaagggcggggtctcgatttagtccaacttgcgatcgcgacggcagcgctggcttgggccgcgactgtccactatatcaaacaaaatccactatccagctgtgatatctaaactacctaccttttgcgctttcatagtgagcgagcaagctcaaaacatataacaaccatgtcattcgatcatctagccacggagctattgctccatgtatttcgttcctgtgaaacaatatccgacattttaaacctcgcatcaacctgtcgacggctccgtactgtctttaacagatccaataagctccaaattttcaccgatattgccgagcgcgaatatggaccactaaacgagatcatccaaatcgtaacacaaaacgcaagccaaccagctcacttaatacgcaagccccccatgaccaatcccctcttcaaacaaatagtccaagtcggacgcgtastcagaaatgggagacgatctatcccgtcaagaaatggaaggtggattatgaaaaccgacgatcattaacaaatgacgagcgattccgcctccgccgagccatctatcggttatggctttaccatcgcgcattccatacgcgcacgcatgatcgcttcagccgtaagctcccacacgtcgttaccgagcgcgcgcagtccctgcataactggtccacgcaggagctggctgatatcgaggacgtgcgcctcatcattggcgatgtcgtccagaatcatatctgtccaagtaacgggacgattcagcgaaagtttcgcaaacggtttccggaaagtcaccaccagttggcattaacatcatctgattaccagcaccgg

SEQ ID NO: 167 - DNA, 909 bp, Aspergillus oryzae
  modified_base (133)..(133): n is a, c, g, or t
attcggcacgagggagacctcatccgaatcgactttctgaccgctcttccaccggagatctcgttcaaaattctgtgctacctcgacaccacctcgctgtgcaaagccgcccaggtgtccagccgctggcggngcactggcagatgatgatgtggtttggcatcggatgtgcgaacaacacatccaccgcaaatgcaagaaatgtggctgggggcttcctcttctggagcggaaacgtctgcgggagtccaagcgcgaaattgaattgcgtgccaccacctgggacgtcagcggacccgcgcagaacgcaggaggtgccgagtgcagtgcaccacatgcggacgatgtgattacccagaaacggaaggcggattcgagcgacgatgagacggcaatcgtgaagcggcattgttcctcgctggatgctcgaccggagccagatgaggattactatacgactcggtatcggccgtggaaggaggtctacaaggaccgattcaaggtcggcacgaattggaaatacggccggtgttccaccaaggtgttcaaaggccacaccaacggagtgaatgtgcttgcaattcgaggacaacattttggcgactggttcatacgacgcgaccatcaagatttgggatactgaaaccggagaagagctgcgtaccctacgcggacaccaatccggtattcgctgtctccagttcgacgacacaaaattgatcagcggcagtatggaccgcagcttgaaggtgtggaattggcgtacgggcgagtgcatttccacctacacgggtcacgtggtgggagtgatcggactgcactttgatgcaacgatcttgcctcacctcccgttgataagacgtcagattgaactcgagataatcgacattctctgcgcgacacaccgat

SEQ ID NO: 168 - DNA, 906 bp, Aspergillus oryzae
  modified_base (604)..(604): n is a, c, g, or t
attcggcdcgaggcacagcatgacgaagattatacaatgcaaacagtacaaacatggtcttttttggtagttccccgcagcagcgtggatatgactgttttcagctgctgataaacttctctactacacaattactttcctttgactggggcttttaccccattgaattgaatttcgcacattttattcacttctagccactgcagctagcactcctacacaggtctcggaaacaagtcataatggaccaagaaggttcccctccaattccggagggcatttgctctcttcttgataccgatttgtacaagttgacgatgcaatgtgccgtcctgaagtacttccctgatacccacgtgacttatgggttcacgaaccgtactccacacatgaagttaacgcgtggggcccacaagtggcttctgaagcaaatggacagacttgcgaacattcgaatcacggaagaagagattaaattcttgaagacccggtgtccatacttcaacgatgcttacctggacttcctgaccactttcaaactcaagccttccgaacagattgaaatcaagtttacgcccgtgaatgataccggcagcgacagcgncacgggtgatgtcgagtatctggtcaagggtctctgggttgacacaattctgtacgagatcccgctgttagcgttgacgagcgaggcatactttatgttcagcgataaggactgggactacagttgccaagaagagaaggcatatcggaaaggatgtacgctgcttgagaatggttgcatcttctctgagttcggatcaagacgacgccgtgattaccatacccatgaacctggtggatgggtttggtctgatgaaggctgctgaagagggaaaacgacaagggtggaagggtcgattccca

SEQ ID NO: 169 - DNA, 1000 bp, Aspergillus oryzae
  modified_base (861)..(861): n is a, c, g, or t
attcggcacgaggggaggttccattgccgcccggacgttctccacgaacccttccaggcagcagtacgctgcctttggagtcatcaagcagacaaaggatcgtgctctgtatgaatgggctcctacgttgaccttcaacaaagtctgtcggtcatcataacaggaatcaacgatgttggaattgtcatccgttgttgcgatacagtagtctgtgcggctatctgcatcgttgggggagtaagtggcactctggtatggcttagggtgcgccagaaacggcaccgggtatcctccaggaagcaattccttggtatgcagaccttcccggcagagacactgacagacctgtctcgagaggaaggatccatgctgcggcaatacggacaacttccatatgggcgaccaaccgagtggggtgtgctggaatcacacgaaagcttagctgatgactcggatacccaatctcagcggactgagaagggccattcgttgtgccgttccctgtcgggctgtcgtcgacaatcgaagctgctgaggccacaccggataagctctttgacaccattgaccgagagtatcgacgggccacctgtctctcgcaggggctcctcgccaaggaacgacgtttcgatctctgcagttgatggggctcttgaattaccagcagaaacttcacccaggcatacaccagagagggaacaggggaatcatgacgctgatcaaagtatacgaccaatttcagggccaggaccatcaatataccagagagagcatttgagtggcctcttcccagtcatggaggacagacatcaatcgttcgacctatctggcgcgcggccacgaacgacaagcattatcggncaaacgccgggtgctgctccagacaaaaccagtaccgccgccgccctgtgcttacccgcccgaatcggtttcgactctccaagaatgactccttgcggtattcttcgctgagtcttgagacgctgatagctctattatg

SEQ ID NO: 170 - DNA, 984 bp, Aspergillus oryzae
  modified_base (854)..(854): n is a, c, g, or t
  modified_base (872)..(872): n is a, c, g, or t
gaggggcgagcaagaagatgactgaccttacctatgaagtgggcagtcatgtgccccaacacgctattggagacccaaaccgcctttgccagattctcttcaacctggtcggaaacgcagtcaaattcaccaacaatgggagaattgaactttccgtaaagactgcccagcagcaggcgtgtgccaaaaaccaatgcgtccttgagttctctgttgcggataccggggtcgggattccaccaaataagctggagctcattttcgacagatttcaacaggcagatgattctgtaatgaaacaatttggtggcacagggcttggtctggctatatccagaaagctcgtcagtctgatgggtggtgacatctgggttcggtctactgtaggcaaaggcagcattttttcatttacctgcccgttgaagcttgaaagcccgtgtgctaccaccactgaacagaagaaatctcacagagatcttgttatcttctacatcacagccaatggtcagaagagcgacccgatatgcaaaatcataaccgggttggggatccaagtgcgtgtattcaaccagcatgatatccaaatccaggagctacgggaccaaaatcatcttccggatgcccttatagtggagtctcttgaaatggcctgcgctctacgggctcatggacacttcggctcgacaccccttgtattgttcgatcccacaccatccgattccttgaagatctccataaggtcagcctttgacctgggtatcgtatcatacatcacctccccttgttcttccgaaagtgttctgagctccctacttagcgctctgcaggatcgtctagacatcttgaactagccnaattatgctttgtccgtnctcatagcagaagacaacgatatctgccgactagtggcagcgaaagcacttgagaagtgcaccaatgatatcacagttgttacaaacggtcttcaaagcgctcaagcatacc

SEQ ID NO: 171 - DNA, 872 bp, Aspergillus oryzae
gaattcggcacgagggctatctagctctccgaccctctataatttcaagtctcctccttcattggtggggatcttcatcaatcaggaaatcaccgttggaaaatacggtcctgtcggactcccgaatccagcacgatgttcggaaggaaagatcaagaccttgaaaaaggtcctcaggtggcgaagacggcattggacaccagcagcgatggcgcggtacccggagagacctttgtatacggcgattcgctgtatgctaagcttcaacggctcgcaggaaagatcaatatcgagcagcgtggaattgaacgggtaccaccagacgagcagacggatacgtcgtacttcaatattggcagcatgtggttggcggccaacatggtagtcagttcctttgccattggtgtcctcggaaaatccctcttcgctcttggctttgtggatgccatcctggtaaatctcttcttcaacttgttgggtatcatgactgtgggattcttttcgtgctttggtcctcctttcggtctgcgacaaatggtactctccagattctggttcggatattgggggacaaagttcattgcctgcctcaacgttttggcctgtattggttggtctgcggccaatgcaattgttggtgctcagctcctccatgcggtcaataccgacgtcccaggatttgcaggtgtgctaattatcgccttctgcacgtttattattacttttgccggatataaggtcgtccacatgtacgagtactggagttgggtgccgacatttatcgtcttcatgatcgtctttggcatgttcgcccactccggagattttgtgaacatcccatggcgtcgggaatcgaactcggcagctgctat

SEQ ID NO: 172 - DNA, 949 bp, Aspergillus oryzae
tcggcacgaggctttcgacctcactgtttcgtgactgtgtcgcgccccttttccttgattgcgtgcgcccgccactaggtttcgagttaagctgtcgaatcattctttggtctcaccgtcgcgctttctctcctctgttcacacccaacagcagccgtcaagatgctgtcagctccggtgaagtcggccaagcggatatcgtcgcttttttcgttggggtccagcaaagaggcatcgattccgtcgtcgcctgggtctcccggagccccgaagcttctcccgatcaacagactcaagatggacgttatcgaagcagctcgcgatcggctcgtttagcatctaatccaattagtgtcgactactcggaatcccgaacgcctatatcgccaatcccgaatgataattttgacttggatgcccctcttccgccgcccccctcacttctcgccgtgaaccaggatttagccggaagcgcgcccggctcgccagactcaagaccccaaagcagaggccgcatagtgagtggaagcaggccttctagctccgcgggcctgtttgtgcccggaactggtcctgattcacggcccggaactccttcgaagagaaggagctggattcccggacgggcccgggcaagctcagtagacactagaacggcgcctacgagtccttcattacctagcgcttggattgctgggttagatcaaaaaatcctatatgacctggagccactatccagaggggaacagattcctgaattgtggaacgaaaatggcgacacatacgtctatcttttcccccagaatacaggcagacccgcttccttcagagtcgattcaaccgtctttgctgagtcgccatccctgaatttccttgcccgggggacgacccccggaccccaggatccatcgaacagcaaactcgcaatctatcactggcatccctgtca

SEQ ID NO: 173 - DNA, 1002 bp, Aspergillus oryzae
ttchggcacgagggttcatgcgaacccgctacccatcgctccgtacgaatcccgtccaagaacggccacgctcctttccataccactcgacggcgggctcaagaaacataccatcgacgatacgggcctgctgcagaggcgaacttgccgcctccatcacgacctaaagatgaattgagtcagacgcaagtgccacagccagcgccgaaagataccaacactccactgaacaccgcccctcccgaaaaatcgcccccccaggataccaaaagtaacatcccggaagcgtcttcccaagcaaaggatcaagagacatcagagtctagtgataaaaagcaaacggacgagcccactccgcacgaggaatctataagcgaaagccacgacgtcgagccgttctccgcctctccgaccgagaatgttggagaagagcgacacgaagagcgacatgagcctcctaatagaccagaccctctcgatggtgtccttcatatgccttctccctcctcctatttgatgccgtccggtgcggccactcctgatggtaaaccacatttggcaccgcccccctatatccatcatttcgatacctactccctagtccgtgatctctccaaaggtggttttacggaagaccagtctgtcacaatcatgaaagcagttcggaatatcttgcataacaatctcgatatggcgaggcagaacttgacttctaagtccgacgttgagaacgaatcatatctattcaaggcggcttgctcggagctccaatcatccttgcagaccgctcggaactccgaaatgcagcgacastwgcgtcgcgtacacagcttcaacacgaagccgatattctctcccagcgaacgaaccaagagcttgccggtttgaaagacgatattaaggcgatgttcaacgaccataagatgacaacgcgagascaacagcgaagataagatacctcggtccaggaacttaactataagatcacggtctcgctgaaca

SEQ ID NO: 174 - DNA, 982 bp, Aspergillus oryzae
aattcggcacgaggcccccctcttctctcacaagtatatattcatatatcaatgaaaacagattgggtggttcttcatcgacattgatccggatactttcttggagtgtattaaaaaattaccttgcttctgttaaatttttacatctattttatttttattatacatttttttctccgttgcctgcttgacatttttcttgttccccattttaactcaagctaaattaccctgtcattcgctgctgacgcctctcagcccctctcagctgattgatcgagtgcacatccatatccactgttgccccccatcatccaccaccactaattccactaggcagtggttctcgcatttagcgccctcggatcctgtcttttctatcccatcccatcccgttttctccttttgggtggtcactattttcagcacgcctcatcttctctatccaggcgactacatctctccccagctgagtactgagaatcaaatcgtgtctcagctctctccctctcaactattcatcaagcattgtcgtggttggagatcttgtgaatdagttccaggtctctccatcaattattttraccccggagattttccaggtcctctcgcgtctcactttctctggttgtcagcaaaatgtcgacttctgttttgaacactgcgagtagttgttgagcgctcctcttcaaaatccgcctgacgtgatcgtgtctcgttgggcgaggcattgtccgtaatggagaagctgaacaatgaagatggacagcttttcataaagaatctcgccagtttttgtacgaacccatgagaaggcactcgccaacgcgcttcagttgaaacgtcagcctagcaaaaatgcgtccactcagtcgagctcgtctacgagtsgccctcatcggctttggcagcagccttgtcattcggtgccttgaaattcacctctcaaactatcaaacccgctaaacttaccctgacccct

SEQ ID NO: 175 - DNA, 994 bp, Aspergillus oryzae
attcggcacgaggctcaaggatctcgttaccggacacccgtataccacggagaccgtgtccaaccggactctgatgaatttatcatattggcctgcgacgggctgtgggatgtctgcactgaccaggaagctgtggatcttgttcgaaatgttccagacgcccaggaggcatctaagatcctggtcgattatgctcttgctcgctttagcactgataacctttcgtgcatggttatccggcttgatacgaatcgtgtcaaggaggtcatcaacaagacagctgagccaattggtgtggctggcgatccatctatggatgtcgagcatggcgtgagcgaacagacaagatcattgagggggcaagaaagagcatggccaatgcagacattgccgacgatggcgaaacggctgagaagggcaagaacgatattctgcataaaatggtcgatggcgagcccggcccagagatgtcattggacgattctaatgatgcaccgaccgtcagccacctaaacaagactaatgcaaataacgggattccctaaacgtcaggtagcaacacctgtgagactgacgttgtgtcagaaagggaggatagaaagctttgagctacatccatatctcggtacagacaatgaatttgcatctttgtttctttgttacctwctcttcccgtccctgtttatatcaacaacctactggcgtcgatcgcagtcaagggacttgggacctctggtagcccacggtcaccgttcttatcttctttttttgcccctttagacccaaacatgtgggttttactgattctccttttgttctggttctgcactcttctgttttctcatctacatatagaggcactcgacctctgcttttatgccattagtcgaagaaagcggaactgacccggtcgaatgtgttctacctcctcagacaatgactcctgctcctgtattggtacataacgctgtaaatctgaaccccaaatttgaaa

SEQ ID NO: 176 - DNA, 1015 bp, Aspergillus oryzae
cacgaggcttcatccatcttcctcatggagtagggttattactgggaccattgcgcgattatttacggactgcgaactcagtctcgcttcctcaagcaaaatgacctcagtggagaaagctggtggctcttctccagctactgctatcgaaaatgagaagtctattagcaattctgcttccggttcaacgatagctccgccagcgggcaaggaacagggtacccgtccttcatcctcccacaagagtgatagagtcggcgacaataatgatgatgacgatgctctttattcccacctaccagaacatgagaagcagatattgaagaaacagctcgatgcggacgaaaggaaagtgccattcgttgcgcttttccgctatgcatctcgaatggatatactcatcatgtttataagcgcgatttgtgctatagctgccggtgcagcactaccgctattcacaatccttttcggttccttggcctcagccatgtcaaatagggtcgcagatcttatttcatatgatgaattttatcaccaactgacaaagaatgtcttgtacttcgtatatcttggcatcgctgaatttgtcacggtatatatcagcactgttggattcatttatactggggagcacatcagccaaaagatccgcgaacattacctcgagtccatcctgcggcaaaacatggcctattttgataaattgggtgctggtgaagtaaccacgcgcatcaccgccgacacaaaccttatccaggacggtatctctgagaaagttggacttacacttacggccatctccacatttgtcaccgcttttattgttgcgtatgtcaaatattggaagttggcgctgatttgcagctcgacgattgtcgcccttgtgttggtcatgggaggtgggtctcgctttattgtgaagtacagcaagagatctctggatagttatggtgctggtggcaccgttgcagaggaggtgatcagctccattcggaatgccactgcattcggcact

SEQ ID NO: 177 - DNA, 786 bp, Aspergillus oryzae
ttcggcacgaggcttaccacgattgcctgcgtcttctttattttccatcctcaccatttttctttcgatttggttttcttttcttccccaccaaaaataattcttcttcatttcctctcctctttcaattagaatattacttacttttattctatttgttttgcactcttcagtccttttctttactgccattctatcttttttgacgcatctggccggaaaccgcgcagtttattttccagccacccgttcaacttggccctttcgatccgcacacctgcgaaccgttgctttcttccacctttgccctctcccgatcatctattcgagacgtcttgctcgtgtcccttacggccttctcgggtgggccttggtcgcctagcgataattattactacggagatcttattactcggtggatcgtggcagttggatctgaacactagccaagattgtcatcatctaacagtggtcggcatcgatgcataacggacagatttctgcgcagaattgatattgcctatttccgctctctgggtgttaatcgcctttgttctagcatacgtattattttggccaaaccctccggttgaccccgctacgaacacctttcacacaccgatccaacacactgagcgctggttaactggagtgccctcggattaagcagtgagtccatgaacatatccggtagtgtcaattggtgcttatattccacaaggtatttacagctgtcgaagaattgtacgatcaacacatggttcttttcgagaacgtctccgactg

SEQ ID NO: 178 - DNA, 868 bp, Aspergillus oryzae
  modified_base (552)..(552): n is a, c, g, or t
ggcacgagggtctccttcaaattctgtctctcaaggtggatataggtccgtcccttcacagcccaacaagtcgtccaccgccgttgcttccgtctttgcatggtccgataaaggttcctgggagagcctcctgcctgatgaatgtaatattcatgttagtcctggactagtcgaagcatatgacgtgaaatcggcctctgcctcggacgacgatcacacaccgtccaaacgggaacgaccactgattgctctcgaactaacaccccttgtacccatccgacgtggtacagcgattgacatcagtatccgctctcctcctgctgaacggtcgaaagtatcatggagcaacaatattatgttccgttcccggaatgcagatgaatgcgagatcttgtacggcctcataaaccaggcgcgcaccaccaaccctacctacatagctttgcaaaacgcccgaggccctttcgcgcaacagcccactcctctagagcgccctcctaagagtggggggttattcggttggccacgtcgcaggaagagctaccgtgcgtnaagctcccctcgctcacttgccgacaattccgagagtagcgttgggactatgagtagtgcattctcagctttgaaacgatttggtgcagggggtaagatgtttagcattgctcgatcctcggttacttctcggagtgatcaaaaagaagatagcttatactcaagctctgctggttcgggaacaaaccacacatccacttcgggaattggccgaatagcagccgctattaagaatgtcgacggtattggcctttcgaacgcaaaaattaggctttacatgcgcgagactcagtccaaatggcgtgatatgggtgct

SEQ ID NO: 179 - DNA, 881 bp, Aspergillus oryzae
  modified_base (403)..(403): n is a, c, g, or t
gaattcrgcacgaggatatattatcccctcttcaagatgcgtcctgaaatcgaacaggagctggctcacaccttgctggtagaactactggcgtaccagtttgcatctccagtgagatggattgagacgcaagatgttattctggcggagaaacgaacggaaaggattgttgagataggtcccgcagatacgctagggggaatggcgcgacgaacgctcgcatcaaagtatgaggcatatgahgctgctacatccgttcaacgccaaatactctgctataacaaggatgcaaaagagatttactatgatgtagatcctgtggaggaagagcccgaggcttcccccacaagcagcacacctgccccagctgctccagtggcagcgactgcggctcctgccgrcnagcccctccccccagcgctggtcccgccgcagccgttgaggatgttccagtaacagcagtggatgtgctcaggacactcgtcgcacagaagctgaagaagggtttgtctgatgtgcctctgagtaaagccatcaaggacttggttggtggtaaatccactctgcaaaatgaaattctcggagatttgggtaaggaattcggttccacaccagagaagccagaggacacccctcttgatgagctcggtgcttccatgcaggcaacattcaatggacaactgggcaagcaatcctcctcactcattgctcgcttggtctcatccaagatgcccggaggtttcaacattacagccgttcgaaagtacctcgaaacacgatggggcctgggatccggcagacaagacggtgttctccttctcgcccttacaatggaacccgcatctcgtattggatcggaggcggacgctaaggcatacctt

SEQ ID NO: 180 - DNA, 916 bp, Aspergillus oryzae
aattcggcacgagggtgtggaaagccttcgcgcggattgcttcccatgcatcacggtccgcaaagcgcattctggaatgtccgaagaccaagtcttcgatgatcaagatggagaaagctttctgcagaagattattcgcaaggtctacgccaccttcctcctcaatcgtaaggtcaaggctgtcgtcgtcattgtattccttgggcttttcaccgctggcttggccctcattccagaggtgaggcttggcttggatcagcgtatcgcgctacccagtgactcttacctcatccaatattttgacgacttgaacaattactttttaagcggcccgccggtgtatttcgtgacgcgtaatgtgaacgtcacggcgcgtascatcagcagcagctttgcggtcggttcacgacttgtgaagagttctcattgccattcgtattggaacaggagtctaaacggccagaggtgtcttatatctcagggtcgaccgctagctggattgacgatttcttctactggcttaacccccagcaggactgctgcaaggaacatggccagctttgcttcgaagacaggaatccagcgtggaacatttccctctacggtatgcctgaaggcgaggagtttgtccactacgcgaagaaatggattgaagcgcctacagacgcatcctgtccgctgggagggaaagctccatacagcactgctcttgtcctcgactcaaagcgaatcatgaccaacgccagccattttagaacgacacatacacctctccggacgcaggatgattttattaactcttacaaatcggcccgtcgcattgcgcagggtatctccgcagagcatggtatcgatgtgttcccctactcgaagacgtacattttctttgaccagtacatttccatcgttcagctta

SEQ ID NO: 181 - DNA, 836 bp, Aspergillus oryzae
ttmggcacgaggctttgctcataatcatcccattgagaacaaatcggtagtacaatgtcctcaccgagtcctctcgaaggcgtcgcgccacacatccgcaacctcctcaccaccctccacaaacaatccacgacccaggaatccgccatcacagatgccgactttgaaagccaaaccttcgacgacgtaatgcgtgacaagttcatcgccctcgatgaagacaaatctcaatacctctatcagctctgtcgcatcatcaacgccaaaactgttgtcgaagctggcacttccttcggcgtgagtaccatctacctagccctcgctgtgtcggccaatgtagccgcaacgggtggtacaggtcgtgtcatagcgactgaaaatgagccaaccaaggcctcgaaggcccgcgagcattgggcgcaatgtggggacgctgttaccaatgttattgacctgcgggagggagacctccgtgagactttgaaaagggatatagaggcggtggatttgcttcttcttgatatttggactcccatggctttgccacgttgaagctaattctgccgcatatgagatacggggccgttgttgtggcggacaataccattgccgctgcggacaagtataaggagcttttggactttatgcgcgatcccagtagtggatttgttaacatgacgctgccgtttaataatggcctggaggttagtacttatttgccccggcagtagagcatcattctactgaagacaaagtttgagtcactattgggtatgtaaggaggacttatgaaccttcctgaagatcgataatccacttcaaattactgcttcggc

SEQ ID NO: 182 - DNA, 895 bp, Aspergillus oryzae
gcacgaggcaaggatctatacgttcaatgggagacagtcccgtttcaaccagtggtaccggtgcgccaatctccagccgaactcggcgtgcgctgcagctctcaagtcaccctgttcaccgctatgaaacgccggaagaggaggatgagctcctcgatgaagcattacattcggcaagcaaagctgcgaggcgactagcacagactgagacatcgtccgacgggtcatcgaactttagtcaccagaccatgggaaacgacaactcgcgagcattgcctagcccttatcctactccctctccatcagcaaaatgtgacggtgtttcctttggccactctgacaccactccgattcggcgattggggcttcccgatggcaagacagatgcaacaagtaatcgccaatggcctaccccaccttacgaagatggggactggaaccattcaggcactacaaacttcatgacagggtccacctatcggtagttcgccctctaagcgttctaccataggtagatgtcgtgttttgatatttaatttccagtcttgtttggatttatcaaagagagaaaacgggggaacgcacggtaattggcgatataaccgagcatggcgtacaggatctggtgtcttgtgttctttcgtcttttctgtggttggtgtttatctttttttacccttttgtttcttgtgaaaacatcttctctccctatttttgcatggggcaaggattagcccgggttccttttcatttgtctttattgttgtcttcataccccaaaggcctttatagatatagtcggcctcgcaacctggtttcggcatgcggtttccatatcttgtctttcatttgcggtgttcttgtttgcccattgttttgataccaaatgcgcgag

SEQ ID NO: 183 - DNA, 920 bp, Aspergillus oryzae
aattcggcacgaggcttgtccatgccccagtgatcgcgttactggcgggtcgtcagcagtgattgcctatttcttgattgatttgggtctttggtgccgtgttccttacacgccatcacaatgtcttccgctgtctcatcgtcggccgtcaactcccggcagtcggtgcgccagacacggacaaatccatcaagaacctctaagacccttggacggtcctcctttgcctatggtcatggctcattgactgacacgcctcctactccgcctgttgcccatggtttctaccccgctctcacacatttcactgacgccatcaccgccctcccacgagagtttcgccgtcacaattccctgttgaaagaggtcgatgctaaagcgtgggctcttgaggataacctccagcagctacttaaggcctcatcagagctacaagcagatccccctttggcccaagcgcctgacaatgctggtgtgttgcaagaagatctggctacgggtgcttcgcaagcggtcgagcctcaggagaactccaaccggcgttatctgctcggtcgagtacggcagaccctccaagacctgatgatgaccgcggacgagaagaaccacgtcatttccaacgccaacgatgagctagatcgtcagctccttcgcctcgataccatttttccgttcatcgcaggcgagatcagtgatgaggcacgcttgggtagtctcacacattgggcatattcaaacaggaatgctgttaagaccaccaccaacgagcgccctcgccgggaagctgcatccaataaggatctagcccacgctcttcacgaagcagaagttgcttcgaggagtgaagcragacgtgaagctgttctggcacgtaagcagcgtcggacgcacgccgattctgatttcgacgatgcgcgcgc

SEQ ID NO: 184 - DNA, 966 bp, Aspergillus oryzae
ttcggcacgagggcgctttccttccatccacgcagcaaaagcggcgttggacgctttgcaaggtgctcacatagatggacactcaattaatttggagatcagtgatcactctccgatcaccgcgctagacacatcacaggtccgcgaagtaaactctaatcagccgccagcgccatctgaacttcagtcttcctctgttgcgccaactagagcgaggcaggcgtccgaaccacaaactagtggagaacggggctcatccagcgagcagagatcggcgcccttaaccgtggccgacctctgctcgagcgatacccgccacttgtctaggctgtcttctagcgataccagtttagttagctcctcacttttagactcggaacgactcaatactctatatccctcgctcttgcctgaagggtcttctcaacagcctgtggtgggcaacaacacatctacgcaacttccagatctcagccgcgagccagaagaacgccgtttcccaccagtgtcacaattagatgcgcactttctggccgaacgacgcggcggggcagaatcgtctagtgatacttccacttccagaactagatcgactttccagagggatatcgcaagcgacagccatgacagtttgtatgggccgacaccacggagccctcccggtgcatttcctcaagacgcccaggatagttttcaaccacgcccctcatctctagaaaccgatgctacacagcagcaaggcggcaacgatcgtgtgcctacctcattttattgtcgtcacccagggactgtgagatcttttcatccgtcgcgaagacactcgggtccatggaataccctacgggctgaggagactcatgataatgccaggccgctgaggcgacgggctactgaacgtcattccctccgggatggccgggagatgagctcgacgaatacccttcaaccggcgatcatacccgcagt

SEQ ID NO: 185 - DNA, 927 bp, Aspergillus oryzae
cgaggctgtcagctacaactttcctgagcgttgagactacactattttccagactagactttggcatccagtctgtttatgagagatggccgaatttctttcgcaactcacctcggtgtcgtcaggtagcttcgacgaagactatgacaggcgaatccgtgacctcatcacataccttcaacagccgagcaaggcttctgagctttcagcggctagtggatatttgctagataacctcgatccttctctacacactctgtcttatttatcagtcttcctttttaagatacagtccctccagggcagcaacaagagccggctaccagagcaaatttatcccgggcgagaactatggctcaaggctattcggattctgagaagctttgatccttttcagatacggtatgctggtcatgaatggcaccggctagtacaacttgtggttcaggctgcgcaggctgtctctaagccacttctagcagttctagctgtcagggatgccatagttcgactcgacccctcgtcagagttctcacatcagttcacactacgtttattaaactcactttggtgtctaggtcgtatagcctggctgtgcagttttggagagacaggtttgtcattttcctactgttactggacaggcttatcagaactatcatcagcctttgctttgtgcggaacacgagtctagcacagcgttcataaccgatgcttctgggttttctaagcagttggcatacagagaccatttgcaattttttctctatggcgcaatgatatacatggcgctaaaaaagtgggatagggcacttcactatctgagcatagtaatatcctgtcctgtcacaaacgccgtcagcaagatcatggtagaagggtacaaaaagtggctcttggtcagcctgttgagaatgaagcagctgc

SEQ ID NO: 186 - DNA, 752 bp, Aspergillus oryzae
gaattcggcwcgaggatttgatcgatgctggacccgaggcgcaggaacagtttatgcgccatttcggaaaaccgaactatcagcctgtttctggaacagtgcgcggccaccccggcttccatatcattcatcgcgacggcaacaaagaagagatctcgcgtttcctgtcgcagcgcacgacaaccactctgtgcatcaggatgtgagctacgaaatccagccaccaagctacgtcatgttgggtcttctggaaggcccagaagtaggaggcgataccgtcttcgcggcgaccgatatggcctacaagcgtctctctcctactttctgctcctggctcgataccctccgggccgttcactcctccgccaaaatgatcaaccacgcccgtctaaccaacagtctcgtccgcaaagatcccgtggataccgtccacccactggtccgggtccaccccgtaacgggcgagaaatgcctcttcatcaacggcgaattcatcaccaagatccaaggtctcaaggagcccgaacaacgctggctcaccgaattcctcatgaaccacatcatcacgggccacgacttccaagccagagtaagatggcaaccaaagaccatcgttatcttcgataaccgctgtactcttcactcggcaatcgtcgactacctagacgatgactacggcgcaaagctccgccacatcttccgtctgaccgcactaggcgagaagcccatccctgtctacgatcagttcgagt

SEQ ID NO: 187 - DNA, 966 bp, Aspergillus oryzae
ttcggsacgagggtgatccagacaagatggaaagccgcggattgaccctccgcagcaagtcccgccgtgcccggccccagatcagtgcgccaaaaccgatatccgggcctctccctcctggtagtaaggccgtcgacccgagaaccgctacgtcaagttccacttcacgcgaacgtgctcctcaaaaagatgcgacctccgatttggtgaagaggagatattccacccggtttaatcaagctcccgatcttgactccgcaaatgcgcccccggtgcccggggtgcctaaagttccgactcagtatacggcgctaagtccccctcagtcgaccagcagacggccctcgacagagcctcagggccaccacaagtggatctcaatgctttgcgggaccctagtctaccggtagatagatatgtcgccaacctccttgccaatgcaaccgaggaagagatcgaagagtaccagagaagcttgaaaaaagtcaagaataggacatccaccgacctccagcagaatgtctatcagaatcgcacgcaattcatcaagatcagtaaagaagcggagaaactcaagggagagatgcgcactctccgcactctcatggcagagctcacaacagctttgggacaaacagcgaccgttggcaacactcaaaaccccatgtccccgacgttagacgagcgcataaccaagcgaaacaatcgcagttccgttgccaatctggagagcatgtggaacgttcagctgcaaacactatggaagactgtcgaaggttcgcagaagttcctaccggtggtgccaggtcggcacatcgtgttggagacgggaaactgggtcgagctggactctgcgacttggaagcctcggcggccggttcacatcgtgcttctcaacgaccacctgcttgtggcggctaaaaagcgaaackcgtttgatcagagcaaccctaatcaccaggccca

SEQ ID NO: 188 - DNA, 979 bp, Aspergillus oryzae
attcgghacgaggcgccctgacagtgactttcagagttcactcaagtccatcaggtccgccgaagctgacggtggtaaaatatgaacagaatccccagaagcaggaacattgtgcacaatattttctcccaagggtaccccagtcgtccgttacctagatcaccacttttaaaaagcttagcaagccagccaacagctacaattagctcggcaggacacatctcacgtcctctaacccctcaattgagaacccgtctaccacccacaagcgcaaacatgagcagtcgtgtccccatcgaaccccaacgagtcgacgcaccgttgacacaatccgcaacattccttgtcgtgtccgtcaaagacagttcggacgccattaagaccgtccgctcgactctcgccagcgtcgatgacctctcaaagaacgtttctattcgcgacctcgccgcccaattcgcatgtaccgtcggaatcggcagcaacatctgggatcggcttactggtctccctcgcccggcggastacacccattccgcgagataaagggcgaaaaacatactgcagtgtccactcccggtgacctacttttccacatccgctcagatcgtcgtgacctatgctttgagttcgaacgccaattaatggatctccttggcgactccgtcacggtcatcgaccagacagtcggattccgttactttgacgtgcgcgacttgcttgggttcgtcgacggcacggcaaacccagtcggcccatcggtttccgatacaatcctcgtcgcagaagaagacacctccggtaccggaggaagctacatcgtagtgcagaaatacgtccacgacctccaagcatggaagtcgctctcctctgaaaagcaagaagcaattatcggccgcaccaagtgggagaatatcgagttggacgatgcagatgaaggtcagcaacaatcacacaaatcgctggcgacgatcgaggagaa

SEQ ID NO: 189 - DNA, 638 bp, Aspergillus oryzae
aattcggyacgaggctgggatggtgatggtatactctcagtgcggaatggctatgctcatttgcgagacgtctcgggcaaggacatgggccgggctatacaagcctcttatcttgaacctggaactatgctctcgatcggaggcaaggaagttgagatcgactccgaaatgtcgaagaacgagtatctgtccgggaagcagtttcttgaagcaaagcctagcccaactccgccggtagcgccaccgaagaaaggttttgtgtctgtgtcgggaaacaagcctagcacgtcggctgccaaggagaacccaggggagaaaggtcaaatgcagattattccgaatcctgcatcgaggaaacagagctctatatctagcgcatacaaaagacccctgttagaaaatactattatcccacagaaatctgaggaggagcccgttcctcgtcatgaccccaagcagcccggtgcactggtgatgaaacggccagcatccgctcctaaggggaaaagaattgtcgacgttgtggttgatcctattcttgccaaacacttgcggccgccaccgcggtggagctccagcttttgttccctttagtgagggttaattgcgcgcttggcgtaatcatggtcatagctgtt

SEQ ID NO: 190 - DNA, 1000 bp, Aspergillus oryzae
attcggcacgaggatccctccccttccctccacatccaccttaattcttgtcacaatggcctcccggcgcctagcatttaatttcaaccaggctctccggagccgggctgctctgaagtccatccagcccgtcaagcgaggcttctcttccccggttaccctcccatccaccacccagtcgaccaccctctccaacggcttcacgatcgccactgagtactccccatgggcccagacctcgactgttggcgtgtggatcgatgccggcagcagggcagagactgacaagaccaacggaaccgcgcacttccttgagcaccttgctttcaagggcaccaacaagcgcascagcaccaattggagcttgagatcgagaacatgggcgctcacttgaacgcctacacatcgagagaaaacaccgtttactacgccaagtccttcaacaacgatgttcccaaggccgttgatatcctcgccgacatccttcagaactccaagctcgagcctggtgctattgagcgtgagagggacgtgatcctccgtgagcaggaggaggttgacaagcagttcgaggaggttgtcttcgaccaccttcacgccaccgcttaccagaaccagccccttggtcgcaccatcctcggccccaaggagaacatccagacmatctcccgcgacaacctggttgactacatcaagaccaactacactgctgaccgcatggtccttgttggtgccggtggtattcctcacgagcagcttgtccgcctcgccgaggagcacttcggcagcctccccagcaagccccctacctctgctgctctcgccctcaccgctgagcagaagcgcacccccgagttcattggatccgaagtgagactccgtgatgacaccatccccactgctcacattgccctcgccgttgagggtgtcagctggaaggacgatgactacttcactgccctcgtcgcccaggccattgttggcaactgggaccgtgcca

SEQ ID NO: 191 - DNA, 624 bp, Aspergillus oryzae
  modified_base (430)..(430): n is a, c, g, or t
  modified_base (432)..(432): n is a, c, g, or t
  modified_base (477)..(477): n is a, c, g, or t
tgccaatgacaagcatagatcgcttgatttcggcttggacctggagccaacgggtggaggaaatgcgatgcgacagactgaaaagtccaatggaagttataatcacaacaagggaatctcattggatataggcccgagtccttacctactacccccaggtctacacggctcccgggattcgctgcattccttgtccagatctataggcggcgatgataaataccggcacgcaacttcatttttaggtgacaatgcatctgtcagatcacagtcaagaggggctcaagatgatgcaccaagctttacaggatcagctagaaaggccgctctgggcgatgatatgaagcaaggtttattgggaaacgctcaaaggatgtcacgatccagtccaccactatatatatctcccggcgaagatggcgcccacgtncnagttgatcctattgcacaaccggatcatggcttccaattcgagtngcccagaagccctagccctgtactcatcccgggagctcctagtactaaagagtcgatcacgccgacgaacaacgttgacaaagacgccggtgattttggcaatagcgatgaccgcccgggaggacgtctaaaccttgctttacaaga

SEQ ID NO: 192 - DNA, 979 bp, Aspergillus oryzae
gctcgttcgtcaaggaggtcgtggagaagttccctaacctgcgcgcttccatcgtcgatcgcctggtgtcgactttgagtgaggtccgtgccggaaaggtttaccgcggtgtcttgtgggttgtcggtgaatactccttggaggaaaaggacatccgtgaagcctggaagaagatcagagctagcttgggtgagatccctatcttggcctcggaacagcggctgctcgacgaaaccccagaagacagtgctctcaaggaacaggtcaatggtcatgccaagccttcggcaccaacagggtctagaaaggtgctggcagacggcacatatgctactgagagtgctctgactagccagtccgcggctgcagccaggcttgaagccgtcaaagctgctcagaagcctcctctccgtcaattgatcttggatggtgattactacctagcaaccgttctttcttccacgttgacgaaattggtgatgcgccattctgaggtttctgaggatgctgctcggaccaacgcactgcgggcggaagcaatgctgatcatgatctcgattatccgggtcggccagtcccatttcgtcaaagcccctattgatgaggattcagtagatcgtatcatgtgctgtgtacgttcgcttgctgagttctccgagaggaaggaactggaaaccactttcctggaggacacccggaaggcattccgggccatggtccaggtagaggacaagaagagagctgctaaggaggcagtcgagaaagccaagagtgctgtgcagatcgatgatgctatccctatccggcaattctccaagaagaacgctcttgaaggtgcggaggagatcgagcttgatttggccaaggccaccggcggggactccacagtggaaactgtctcttccaaactcagccgtgtggtacaactcactggtttctcggatcccgtctatgccgaggcctacgtcacggtccacca

SEQ ID NO: 193 - DNA, 1020 bp, Aspergillus oryzae
aggtggtgcttgtgcaaggctgtggagtctgttgacatcgggtacgagactattgtcgaaggaaaggcccgcgtctgttttgttggtggctttgatgacttccaggaagagggctcatatgagttcgccaacatgaaggctactagtaatgccgaggacgagttcgcccacgggcgtacaccgcagagatgtcgcgtcccaccacgactacacgtgctggcttcatggaatcgcaaggttgcggtatgcagctcattatgagcgctcagctcgcactggacatgggggtgccaatctatggtattattgctttgacaactacggctaccgacaagatcggtcgctcggttcctgcaccagggcagggtgtccttactactgcgcgcgagaaccctggtaaattcccatcgcccttgttggacattaagtaccgccgccgccagttagatttgcgcaagaagcagattaaggagtggcaggaatctgagttattatatcttcaggaggaggttgaggccatggaagctcaaaactctgagtcgctcaatgtgtccgaatacatgcacgaacgagcccaacacattgagcgcgaggccgtccgccaggagaaggacgcacagttcagtctgggcaacaatttctggaagcaggactctcgcattgctcctttgcgtggcgctcttgccacttggggcctcactgttgatgacatcggcgtcgcttccttccatggtacctccactgtcgcaaacgataagaatgaatcggatgtcatttgccagcagatgaagcatttgggccgtaagaagggaaatgcagtcctgggtatcttccagaaatacttgactggccaccccaagggtgcggccggtgcttggatgttcaacggctgcctgcaggttttggatagtggcctagttcccggcaacaggaacgccgataatgtagacaaggtcctcgaaaagttcgactatattgtctaccccagccgtagtattcaaacggatggtgtaaaggcat

SEQ ID NO: 194 - DNA, 917 bp, Aspergillus oryzae
  modified_base (549)..(549): n is a, c, g, or t
aatgcccaaaacgagtgtccttctaccaccctccaagttggtgtatatacctacgagaatgcttcccacccctcgccatcggacgaatcccgaaagaggaggatcatgtcatactcggaggagcctatgtcgggaaagaggactactgggccgccaatccagggcaaggagcagccgccagcctactcttattcaccttatttgcaatcattgcctgcgatgaatggcttcgttgctccatatcacccaacctcgtcaccccgagttgctccagcgcagtactcgactgttaatgcaacgccacagtccaacatccgagcaccctcacccctcgccccttcatggagtccctcatacgtgactgtccacggagattccagagctcctggattcgcctatggccacggcctccgccagcaaaaaccaacctcccccgcgcgtctctctaacccaacgcttattcgcacctctaccctgcagcagttaagcagcctcggtcaccacactcagtcattcaacccctatgccatgtatccctcgaaggctgtnttgaagctcaatggcagcttggactcgatgacagaaagctggactaaagaggagcgtgaggctaagcgtcgcttggttcaattcactcgtatgcaaagtgggagcaccatccatgcggattttaacccagttgctcccgaagaccgtgctcccaacagtatctgcattagttgcatctactgggatggtaaagatgaatgcttcataacgagcgtcgatacgatctacctccttgagtcgctggttggtgttagattcaccgtggaagagaagaatcgtattcgcaggaacctggaaggcttcaggccacttactgtttcaaaagcaaaagccgatagcgaagacttcttcaaggtgatcatgggctt

SEQ ID NO: 195 - DNA, 1036 bp, Aspergillus oryzae
aggatttctctacgataaacaaatccatcgctcacagtcgttgcaactgcctttataattacctccgctcagcgttccgataaactcattgatcccacgccatggaccagccacaaccacctaccggtcatcctgaacaacccccaccgccgactctcacaaacccacgttttactctcgagctcgagttcgtctcctcgctggccaacccatactatctctcgcacctcgcagtcacatacccccatctgctgggaatctccaacgctggcgatgaaggcgacgcgaccaaggacactgcggatcctgacgcgcaggccttcgccgcgtaccttgcatacctctactcctactggaaaactcccgagtacgctcaattcctaacccatcctggtgccaccctccgcgcgctacgactcctccaagaagacacattccgccgcgatatcattcgcccccaagttatcgaagggctggcggggaccggcattagcaacgaagaaggcggcgcaaccaccgaacaggagggggaacaagataaggaagaacaagagaaacaggaagaagcggggaatagtaataaatcaaagacctgagctcggttttaagacacgattgtgaagaagagccgcgggcatcttctctcgatactctacgataggtctgctcggctacaacctaaaaaggaaatcgttgcgggcggcggagaagtctcaggggatctacatcggagggtaaaaagaattgggttttctcaaaccctttttgcttcttccccgcgaagttgcttcgatcgaggtccggacgcactgatgccgctggcttcgtgatggcgcggcgcgtcatgtgtgaccgaggtacgcccgcttttccttgaatagttcgtcaatgtcggctatttgtgccctgcgaggtggcattgcgttctttttgggttctcgccatgcctaagctgcatggctcggaatgtagcttgattctcggtcggtatcttccctaggtgcggggagcatcttcgaatattcgacgggtgatt

SEQ ID NO: 196 - DNA, 910 bp, Aspergillus oryzae
tcggggggaggcaccgggctcccattatggccaaatacattcgtcatcaggatcgtgcttttaacgtggatcactatccacatcttacctacccggatatgtacattctggacgggggctatagcagtttcttttctgaccaccggacattgtgcttcccccagaactacgtcgaaatgtctgccaaggagcacgaatttgcgtgcgagcgtggcctcgggaaggtcaagcagaggtctaagttgagccgcgctcaaacctttgctttcggtcaatctccccaaatggaagacagccctactgggaggtgtcgtaacggccttggagaccgtaaccgattattaggttcaccatttgccgcgagccctgtctccggtcgcatgtccggccgccgcatgctttcttactgacggcccccacgaatcgtccgattccaattctaaaagccaaccctcgatattatgatgctatcgatcgttgtgctaagttctgacttcattccgttgcaccgcaatatttcacatatatccagagaccctggttttggttcgctgtcttacccactcgctggtctttcgagaatattgagttgcgccatgggacatggagagtttggccgctgtcgagctagcgccttaccactccagtttcctttccgttcgtttgaatattttcggtttctttctctgggcccggtttatagagcttcagcattttgcattgatgacaaggcaacttttgactctaccattttattgcgccgtgcacctctcaccagcccggcactttgttttcatttagcggatccgattctttccttcatctccgaccactggccctacacttatttcctatgtcttgaacgatttttttacgttaatcgccctttttctgatgtagaaaagcacat

SEQ ID NO: 197 - DNA, 812 bp, Aspergillus oryzae
cccgactttaggattggtcgatattgagaaggttgctgccattgcgcatcgccatggaatccttgtggtggttgacaacacattcatgagcccctatgtccagaaccctctggaccacggtgccgacatcgtcgtgcactccgttactaagtacattaacggccattcggatgttctgatgggcgtcgcgcgttcagctccgatagcttgaaagagcgccttggattcctccagaacgccattggtgccgttccttctcccttcgactgctggctcgctcaccgtggccttaagactctccacttgcgtgcccgcgaggccaccactaacgccacggctatcgccaaggcccttgaggcttccccccatgttatctccgtcaactaccccggcatcgattctcaccctcagcgtgcgattgctgtcaagcagcaccgccaggcatgggcggtggtatgctcagtttccgcatccagggtggcgagaaggctgcctcaccttttctgcaagtataccaaggtcttcaccttggccgagagtttgggtggtgtggagagtctttgcgaggttcccgctagcatgactcacgccggtattcccaaggaccagcgtgaggctgctggtgtcttcgacgacctcgtccgcatgagctgtggtattgaggatgtagaggatctcctggccgacgttctccaggctcttaagaaggctgtcgcctccagcgaacaaaacggctccgcttaattaagttaatatattagagaattagaacctttcatagatcaagttaatgatgacacggattactcttc

SEQ ID NO: 198 - DNA, 760 bp, Aspergillus oryzae
gaggagtcaatcttcttagttctttccctccactcactctcttttcctttccctccttccccccggtccttcgtatccaacttgtccctttctagttcacactccgctagtcggatgccgccctggagcgcctccatctcgtccactgtgcgtcgagtgctgtggacgggcctgttggctttttttgtaaacacacgtcggtgaaatacctattgttgtcttgtcttgtttgttctttaagatacccagtctttgactcatctgcgccgtatgttttctgcggatcaaattcctccaatcgcatgatgcagtccagcaaatccgtcgggttcgacgagaacagataccgcaacgaggttytccttgtctcctccgaggaagatgaaagatcgcaagaacaaacgctagtagaagaagcgcgccagttgggattaaaagttccggaggttgaaattgtggcatcgctggccgcgtcgattgcctcaggcatggtcgatctttcctctccgatcctgtcatcggcgggctcttygaccaatcgcaattycgtytgcgaagtcaccccgtctaacgaaatacctccccttkatcagatcgcatcgtcattttycgagtttaacctgtccgaccatgccaagtgcggcagtactcgctcgctcgcttygcttttaacgcgcccaacctcttatagttcgagcgaggggaaactcgcacatggcacagatrgggatcgcattkcgaaaacccggccatcgaagtt

SEQ ID NO: 199 - DNA, 950 bp, Aspergillus oryzae
ttcggcsgaggctgaattagcgccccacactgcgaacaagaaagatattggctatttcaagggactacagggttgaacaaccgggtgttataccacaatgctgtttataatcctggcagcatgcattgctgtgttgctctacctttaccatgttaatcgtgctataatggccgttcccgaggaagctcgtcgtctgtgccctcaccgctggacagtcgatgagatcaaggctgctttcgaaaaggttcaggactctcccaccgatgtagccaaaagccttcccccaaagcaatctagacgctatatcgttgttggtggatccggactcgttggaaactggattgtatcgcaccttatcatgcgtggcgaagacccatccgctatccggattttggatctccagactccccgacctgaagttctcgatcagggtgtcaccttcatcaagacgaacatcaccgatgagcaggccgtcctgagcgccttctcacaaccatgggcctcatcagtcgctgacctgccattgaccgtattccacaacgccgcagtgatccgacccgcagaacgcctcagggctttcctgcctctgtgccgcaacgtaaacgtcggcggtacagtgaacgtgctcaacgccgccaagaaatccggagcaacctgcatgatcgcaacgtcgtctggctccgtctgtctccgccgattctcgttctgggtcgctccctggacaaagacgcccgagtacctcgtacaagtcgtcaacgactcaagcgaagtacccaagcagcacgaccatttcttcggaaactacgccgtcgcaaaagccgaagcagagaacatcgtccgttccgcagacgaccccaaatccaacttccgaaccggctgcatccgccccgtaaatggaatctacggtgtctcggactccgccggcagcgtcacaggaaactatcttcgta

SEQ ID NO: 200 - DNA, 830 bp, Aspergillus oryzae
  modified_base (32)..(32): n is a, c, g, or t
gacggtacgataagcttgatacgavttcggcngaggggggccaagtggcttttaccaggacttcgtcagcggtgcagccaattcagaagcaatcgaacagtttccggcataatcgtccttttctacaacccgacttccgccgtgttattgtcgtcaaaagttaagagtaatctccggccgagaaacgaacaactatggatttcctcaaatccgccgtcgcatctgcaatcgcgaagggaagctccttcccctattcgctcggcgacagagtcgatatttctgattcgatatggacgcttcataatgctacgaaacgggatgacggctcggcatgcagtgttttcacattcgatattgcttctaataagtctcgtctacccctggcgaagaacgcrgtgcgcaagthacgaacgttacgacatcctggtgtgattaawgttttggatactatcgagacagaagccagtctttatattatcacggagcgagthgtccccctgtcgtggcatgtgaagcggaggagtttgagtgaggagacctctaaatggggactgcatacagtggcgtccacacttaagtttataaatgaagatgcttcgtctgttcacggagtcgtgagggcctcgtcggtattcgctagcgaaagtggcgagtggaagctaggaggtttcgatgtgttaagttccatgaatgatgaacatgcagttatatacacatatgccagccttgtaccagacgcggctcggtatacaccgccagaggttgtcaaaggcggctgggataccattaagcgccaccctttaacggccgtcgatgcctatgggcttgga

SEQ ID NO: 201 - DNA, 751 bp, Aspergillus oryzae
acatcttgaaggagagctacgcgaagactggacctgggtccactatatggtacattctgccagaactatccgaaatgtacccgtaatgtccttcctagggatgcacgtaggtttcgttggcacgtaccgcgtaggcaaacacgtcgtctagaacaaaacgagatccattgtgattatcggacattccattagttttgtatgaataatgttcgtacagcgatcattaatgacggcgtttgccgtcccaacgatgaccaactcgaggttcgacgcggtaacaccggtcagcagatccccaatcgtcgacctgtctaagtgggtctcatcatcgaattgcaagtttgttacgtagtgagttagcgtcaagtggtcctttgaattaagatccaagatgaccttcaacctatccttggcctcaaaggggttcgactgataccccaagttattcatgaagacctgggtagggatcgcagaaactgttccgaaaagcaccaccacgaccacggcaggacacattcccgtcattgtaccaccaaccattcggttaatgtcatttgcacggttgtagatccgttcaaattagagactcaagtcagttgtcgcattctgcgtagactagactaactccttactcttcggcgagtagcccaaaagacaaccctctgtactctaacgggtccttcggttgattcctaacgcgaccacgagacccattctatggataatcattcacttgtctagttccgttctt

SEQ ID NO: 202 - DNA, 1001 bp, Aspergillus oryzae
cttaagctgtaattatcgtgggcctacgaggtgattgatgtttacatcttycggagatcaccgtcccactacttcgtacggatccggaggcagtacaagaggacccagacggccaggcgagcttacgaactcgccgggcctactaaaacaaacagaaggacgtggatagcgttctaccatgaggaccgtatgtgtggtacctccttggatagcgccttgctcgtctacttcaccgtgggaacgaaagtgaaagtagatcatcggctacagcaactcatcacaccaggagcagttgaccgggtacaattgtcaaagagggtcagtaagttcataagaacatgattcttcttggtggtcaaggtgagtaaaggaggtgttactaccttcgttcggggaacctatagaggatggacttcacagcaatactaccaggtgacgaccgtagattattgggtccggtcggccagtttgcaagcaacccggctcgcgaaactgttcgtgtctatcttctaagggttcgggcctaaacgcgagggaagagttcaccccctctttatcctctagaagtaactcacgatcgtaggaacccctttcggggtgtaagccaaccgcgtagggttcgaccaggagactgcgttttggaaatctttaccttctgtctccttacagagcacatcagttcccagattcgggatcctagtaccgtccagttggcgggtagacgagttcctcgaaatcgcggtcgtccaaaggtcagcgactatctcgactttttttcttccaatcataagacacgtcaaactacccctgttacaccggttgatcccgtttacggtcatctgaaatgtaacccatctacggtttgtaacacttgttgtcgtgaccgctctagcgatcagtttgtgggctaacaaactcctactcgtagtccttagcgttgatgtccgacccacaaacggagtcgttggtaaagctcccaagattggagctgtcgtgcaact

SEQ ID NO: 203 - DNA, 870 bp, Aspergillus oryzae
cggathacatctttgcccgaccaaagccagaacaataccaagaagggaggaaagggagggaccacacctcgaaaccctgaccccgtgatcgaaaatctcgtactgtttagacctgttaatctactcctttattgaatagacgagcacctactcggaaatggaagcccaacttcaactcgtctcggaggtgaccttggatagcagatttatgagtaacacaatcaaggacataaggtcctttgtcagttaaaagaaactgtcctcgtaaaagatgcttgttcacatctttctagttgtgttgatgataacttttgtcaagttgccagtccggatctcggttatcaacatagttgagacccgttagaccgttcgaagtgagataagtgtccggagtgcctabctaatcatctaagagagtgaatccgtaggagggtgaattagcacattgatcattacagggaactactgcataacggttgccttaacagacataagaacctaggaaccctccatggaagagttcatagtgataaaaatgaagagtgtatttgcgacattgagcacctttcagtccctccgagttgtggataaatttaacccaatggtaacgatgattgtagttgttgttgaggttggagggttatggtactgcatacccttaccgtttacgaatgtgctgttaacggtcgttattctcctctcctacctaacgtgtatctaccagcttataatcttacgcatgatcaggacagcctcaaacctcgagatggtactcgtgaccctaatagcaaaaatccttaagcttgtacacgtaatggcgcaggaggtaatgataatcccctaaaggaactacttagtaatccgcatgaa

SEQ ID NO: 204 - DNA, 780 bp, Aspergillus oryzae
gggttagacaggaatagactcttgttctgccgttgtgtttctttattgtacgttttgttacccagatatttgctagtatgcccagagatccattgattgggttggttggaaagccatccagcgggaaatcgacaacgctgaatagtttgacagatgctacttcaaaagttgggaacttccctttcactacgatcgatcctcagcgcgccattggctacctccaaatagaatgtgcatgccagcgatacggtgtgtcggataagtgcagaccgaattatggaggctgtatagaaggaagacgctctgttcccatcgagctcttagacgttgcaggtctcgttccaggcgcgcatcaaggtcgagggctgggcaacaagttcttggatgatttgcgtcatgcagatgccttgatccacgtggttgatgttagtggaaccacagacgcagaagggaaagcaactcgaggttacgatccttcacaagatattgaatggctacattccgagattgtgcgctgggtgttaggaaatttgatgcaaagatggggatccatcaagaggagacatatggccataaaggcgacggctgtggacaccttacaggggcagttctccggttatggaagtacgtcgacgattgttgcacgctgcttagatcggataggcttgaaggagccgcttgagaactggtctgatgagactgttgagaaggttgtcaaagcttttatcgatgaaaaattccccacggtctatgctttaaataagatcgatcatcccgacg

SEQ ID NO: 205 - DNA, 478 bp, Aspergillus oryzae
aattcgwcacgarggcttagacgacaaccatccccgccatartcgatcaaattctcgtccagcgaacacaccttccccctggttttcatcgacacccgaaccacccacagaaaccatatcgaccccgtcagagacacaggcgacagaktccattgctgcctcatccaacacatcccccctgccgatgtccatgtccacgcaagatatgcccacgagtccatttgttgctcagcagttctcaaatccaaccaaccttcccgatcttatgcccatcatgtttccctctgacgatccttttgcctaccctacccagccgatgtccaccttggagaatgaccatttccgtcagacagcggggccatgaaattcgggagggatctcaagacgcagcggtcggagccaacttctaaagatacaaaaaaaccataggggtataaaaaaaggaactgagatggaatgggaaatttaaacttatttt

SEQ ID NO: 206 - DNA, 964 bp, Aspergillus oryzae
ttcggtacgagggtctttgcatttgcaggcggcgatgcagcagttcatatggtcgawgaaatgaccaacgcaacagtagccgtcccctggtctctaatgctcacagtgctcatcaacggaaccctaggcttcagtatgctaatagcgctatacttctgcctcggcgatatcgaaacttcccttaaatccccaacaggcgtccccttcctatccatcttctaccaagccaccgaatcaaccgccggaaccgcagcagccggctccgtaatccaagccatgtgctgttgcacaacagtaggcatgctcgcatcggcctcgcgccaattctggtccttctcgcgagacagaggtatacccggctggcgcgtatggagcaaagtaaccccccgcaccgcaatcccaacctacactgtyctcctaaccagcacaatyggctgcctcctgaacttaatcaacatyggctccgacgtcgcctttaacagcctcgtytcaatgtctcacctyaggcctgtacctctyctacatgatcgcygcgagtctatctcctctaccgccgctgcacaggtgaaatcagtcaacccaagagaaactccgaacaaacgatggtcaacacggcaggcgccaagctcgtctggggcccgtttcatatccccggtatatggggtatcggaattaatatcttttcgttggtttatatgttcatagctactttctttagcttttggcccccgataaatgaggttaatagcgagtctatgaattatagtgtggttgggactggggggacggtgttccttagtctggggtattatttggttagggcgaggggggtttatgaagggcctgttattgagatttagattgcttggtgtggggtgggtgatttgtttcaggtacagatcgttattcgtcatgaagcatagtggtttgactctccatttgagtttcagaccaatatgagcgt

SEQ ID NO: 207 - DNA, 1010 bp, Aspergillus oryzae
gaggatcgagtcgagctccgggcacgcgaccacttcagacctcatcctgacctatctatcagctatttacgtttgcytacctaccgcgcgggccaggctacgaaattccccgactttattgttgctttgtcctcaattcagaacgctgcaaacgctctcgctcctgacatccacctactaatccttgtgatctcattcccgaatcaccgctctatccgtgtatccgacgaatcgattgcgtagaccgaagaacttgtccagctcacacattcaaaatggatctttccaatatcttccgacttgtcaacatcgccgtgggcgtgattatggtcctgggcggtatctcccagttcttccctccgtccatgagctccatcatcgtcggtggatatgtgattatctttggtctccttgtcgctgggctggaattcctgcccaacgtcccggactatgtctaccgctatgcttctttcctgttttccttccttggccgcggtatcttctacatcttcgttggttcgatcctgctgcacgaccacgtgttgcgctacattgctggctctatcgtcggattcatcggcgtgggctacttggccctggagtttattccctctatcgagcccccctcgaacatgcgcgagaggacccagggctggggtgccgagcaggtttaaaagcggccgataaacgtttggtccggtgatggggcatagcatagcgtacaatttagattggcttacaccgattgatattcgccgtgtagccccacggatgcataaagcaaactgcgccgcggatagacatggagtggtgaaggcatggggagagaggtgaaaaagttctcttcttcctaggtgatgtgcgacgatcgacaagtgcgatgaatatctatgcaacgactcaatggattcgcgatctgcagaaatagcgagagatacttatgcaggcgagttcgccatgtggattatggctatttgtctgtctgggagtggatcatggataattttttt

SEQ ID NO: 208 - DNA, 695 bp, Aspergillus oryzae
  modified_base (137)..(137): n is a, c, g, or t
  modified_base (251)..(251): n is a, c, g, or t
  modified_base (263)..(263): n is a, c, g, or t
  modified_base (453)..(453): n is a, c, g, or t
aattcggcacgcsggaatcgaagccaacggatgacgcccaagagaagcccgaagaccacacaacaaacacaagatgaacctgaacaactacctaccgaacaacccacctccccatctccctcgaccgaaccccagcncgccgtgaaagcggatacgccgtcgcgccatggccgccagccttcgctgtcgatccagtcgaagatgaggtcgtcttcgttccggaaggggtccgtttcgcagggtagtgcgtngccttcgccgtnggsatgttgaagtcaccttctttgccgccgttgacggctgacggggagtctgtgcatgaggtgtatcggaagcaggcggggcggattgaggaggtggagaaggagaaccggcggcwggagaaggagcawgaggaggcgacaggccggwggaagaagacggaggagcagwaggaggagtatcgcgaasagntaatagatgtagcggagttgaagagagaagtaggctaaggctgaggagaaggtgggggaggttgaggagtagaaagcggagawtgcctcgctccagagacagaactcgcatctgcagaagacgcatcggagtactgcgtcaccggcctcgtcagagthccctcccgcagatcttgtgcagcagcytgagtygaagtctgccacgattgaggctatggagcttgagaattcgaatctgcgcgc

SEQ ID NO: 209 - DNA, 942 bp, Aspergillus oryzae
  modified_base (9)..(9): n is a, c, g, or t
  modified_base (14)..(14): n is a, c, g, or t
  modified_base (366)..(366): n is a, c, g, or t
  modified_base (369)..(369): n is a, c, g, or t
  modified_base (384)..(384): n is a, c, g, or t
tcggtacgnggttngawtcatggcccaggwacaccatttggwtgcccttgtcgtaggtgccggctttggtggaatttatacgctctattcccttgtcaaggagggcttgadtgtcaaagccattgatacggccggtgatgttggtggtacttggtattggaaccgctatcccggtgcgttgagcgacacatggagtcatctttatcgattcctctttgaccaggagttcctgccaacctacccctggaaaagatggtatctcacccagcccgagataatgcaatacctccgggacgtggtggaaagataccacctccgccaacacatgccgttcaacacccagatgccacgggcggaatggaacgncgngacttagatctgggnggtccagtgcgagacaggcgacgtcttccacgtgcgatacctcttcacggcgcttggactcctggtcaaagccaactaccccgatatcccggggatggacacattcaagggagagatgaaccacacctcggcgtggaacccagatgtggaactcgagaataaacgtgtcggtgtgattggcgttggatcatcgggtgtccaggtcgtgacggccatcgctgacaaggttaaatctctccatgtattcgtccgacgtccgcagtacactgtccccagtggaaaccgggacgttacgccgaagraacgcgccctggtcaacaaaaactatccagcgcttatcgcagacgcccgtacctccgtctttgctatgggtacaccggagcctaagagaacattcatgtcactgtcgccagaagaccgcgaggaactactcgagcagcaatggaacatcggaaacggcttccagttcatgtttggcgggttctctgatattgccacgaatgaagttgcgaatgaggaagtatgccggtttctgcgcaagaagattgcgagtattgt

SEQ ID NO: 210 - DNA, 980 bp, Aspergillus oryzae
  modified_base (340)..(340): n is a, c, g, or t
aattcggaacgaggcgtgatatgattgctgggaacgcatccgaatcgtcgagggagtccctcaccgcggagattcgttgcagtcgagacctcttgcggggtttgcaacggcggttggctgcgctgttggagcttcagatgaacactcagctggtgcagaagagaagtcctctggatgggtctatcccgaagcagttcgtgcacaccattgcgcatcgatcgttgcgaggtatggactcggcgttasactccttgaccagctcctcgtgctgcttgctgctagcaaagtccggatgctcggttccgatgaaaataatcccgctcagagtccctggaacagntcacgtatcaaccagctccggaagggacaatatccgtgaccgacgagggcactggcacgaacgaggtgaaatccctcgattggcttgatcagcttgcattgtccatggggactcttgcgctcaagacatgacgaacttcagctcgtcatttggaccaggtcgccggctctgtgcatggttatgtcgaccaggatccgacttcttattttctcaccgagtgaatcgggcttgtcagccggactctcctttgttttcgttcaactaaaaatgactgcacacgatgccacgttgtccccgtaacctggaatgcgggacaaatctagaatgtggaatcgatgccccggagtggtattccgagtctcggtcgcttcaaaccaggcataaatattcctctaccgaattgcgttcatcctaaccgagcgtgaccaccaaagtttacaccgtagkagcaattggtctggatggaaatcagctatgcscatagggtcatatgtggaatagctcakcgcacaatcggacatccttgcatacggggcgttgaatggtttggacgcacacccgcaacattgccttggcaatttcagtccagasaaaaatacatgaacctctgsaactttgtttyaaattatatgatgtgtac

SEQ ID NO: 211 - DNA, 381 bp, Aspergillus oryzae
  modified_base (39)..(39): n is a, c, g, or t
  modified_base (315)..(315): n is a, c, g, or t
gtgtatgtttatggataatattgatatgtgtattmggdnagagggtgattacgtatcttcactgcwgactttcccgcccctactatgattcgcaccgattatttcccgwtctttwaccacatctatccactcaccttgcwtttcccgacgtccgttcggtgacagattggtaggaggcatataaacagagccgggacatctcggttcttttagagagtcgccaacgatcatttgcgcgtgtttagtccggttgatcggcctcattctgctgttccaatgagcaacctccggcgcggtgatacaccatgaagctgngatgatacctcattcttctgcyggcgtccaatcgtggggtcatcccctgcgcgccgtctactacgg

SEQ ID NO: 212 - DNA, 511 bp, Aspergillus oryzae
atacatctttcatttccacgcatgcaagtagaagaactaccagacaatcaacatccagcagaaaaacccggtctataccaccctagcatgaataataatagcacgggagaaggaaggagaaagaaagaagagaaagagaagaaagatcccctctaagcctgagtctgcgactcattcttctccaccaaatcgcccacacccaatccacgtccaacccgcaccttcaccatcttctccttctccttctccgtccccaattcacccacctcctcgccctcatcggcatctttgccttctttctccgcccgtagacgatccttccgctcgatctccgcccaatccatccacatatccgtcagacccatgcgcatcgcatacgcatcctccccgtcggcatagtacttgctcycgacagtctcgaccttgaatccgagggtaycgcggtagaaccgcagtccagcgctgttgcgcagacgcacattaagcgagatgtactgggcgcggtgtgatt

SEQ ID NO: 213 - DNA, 773 bp, Aspergillus oryzae
  modified_base (492)..(492): n is a, c, g, or t
attcggaacgaggctccgattcatgctataacgatctgccccgtaagactggtcttcgtcacgatgtccaccaaccgtccattcctggccaactttttggcggcgtttcgcgcccagtcaacgtataaggcctcggccgctggttcccagtcggccaccacctcctcgtctctctcgccgactcagatatcacagagtgcccgtgctatagcaaccaaggcaagcaactcaggggcgtcttctgaggccgcctctacgactcattatcatcatcatcaccatcatcatcatcactcatcttcagccggcgcttcccactcccgaccccactcacacacccgatccccactgaatcaatcatctcctgccggggactccccggtgccctcgtcctcggccactccaccagctccctcatccccgccaaccccggcttcatccaatcctattccgattgcyaatggaccggaccgtcaacgacgcgggagcgancagctcaaaatgagatcggcgcggggttccgagaacgctctgggggccgggagaaaatgggtacatcsggcggggagggacgcccggccggagagagagcgttytctatccgattagmgsgatgggtgaccgaaggggcgggcggcccgatttaggcggggagcgggtccgagtggsgaargtatccgaaccagtttgaagctttgtsgattggattttattttcgggtttagccctttttggcgttataacaaagtttttttgggcaacggacgtctcac

SEQ ID NO: 214 - DNA, 420 bp, Aspergillus oryzae
aattcggcacgaggtgcaaaatggctgcgcatgtacccagcctttatagacaacggtgggtctttgattgcagccatcatctaaggtaatgaaggggtagtccgtgtgaatcaactaattgaatagtagatgaaggttatattcctgcgaagagtgagtatagaccagccgagtcatgacaggtaacaatgtcagtgaaaaggatatcacattcaccaggcctgacaaagagatccccatcaggtgactgcctattttgatactccttaactgccctaacggcatacaagaaatgtccaccattagaaaatattgtgacttgcgaataacagaaggrtgctgtatctttgtttttcatcatgtgttacgcgcttgagtgatcttgcgttaagtttgcaataaaagagttttatctggcac

SEQ ID NO: 215 - DNA, 740 bp, Aspergillus oryzae
aattcggcacgaggccagttcaacgtatttcgaaataaccacacctttcaaaccccaagtcaaccactcaaccacccaaaaccgagaacagaaagadagadagadacaaacagaatgtcccgcggcagcctcgtccccctcatcgtcctcgtggtcatcgtcaccatcctcgccgtaatcggctacatcacttattcgatcgtgcaagaagtaacccggaacacgaagtccaagatggagaagaagaatgtcctatggacaaaggacggcatgaaggtcggggtgaaggagataaataatgaggattatcaggatcggactcagagtgttctcgtgaatatgtggaatcatacttcgtttccggcttataagagtcggttgtggaatatgacgcagccggcggctgaggtgcagcaggctgagaagaggaaggggtatgtattctttttttttctttctttttctattctttttttggggggttgctaacgggtatggatgggtactcgaagtaaagtgattgatttccttacctcttttctgtggtggttgggtttcgcatactttctggtgtttgttggcttaattatacatctcttgttattttatctcgttcatgctttctgttgtgatacctgtccttcggtgaaaatcgcctcagaatgattttactcttttatgatcttcgctcttgctagtttccagggkatttctattctatcahttcttggggatgatga

SEQ ID NO: 216 - DNA, 739 bp, Aspergillus oryzae
aattcggcacgaggcatcacagcagcgatggtcttcctagcagcacaagccaaatggcaatcgcaaggactcaccccttacatgaaactacagcagctcttcaatgaatatggccactacgaaaccctcaataattacttccggtccccgaatccggagacaacaatggccttgttcagagctatccggaatggaccctatagagccgagaagacactgggaccattcaagattctgcgttggcgagacatgaccgagggctatgattccggaacgaccgacaacaaacctacgctgcctgttgataagtcgagccagatgttgactctctggttggaccaggatgtgcggttcacgttccgggcttcggggacggagcctaaagttaagttgtatgttgaaagctgtggagcgtctcgcgaacaggccgtggatgctgtttgcaatgccttccttgctgttctgaaggaatgggtggttccctttgcgccgtctatgacgtatagcagacagatgcctacatcgtcgggccacgtgtttcagatctctgaatagagcgaaaacccttgagtctgcttaaaaattaggtgtagttggaaactagtactccatagcaatgtcctgatgaaaggacaggcccactgccgtgctggcagaaattcagctagaaactatctcttcttaatgttgcccagtccgggccatcacatgaaaaacgatcaagttaccacaagaaaaa

SEQ ID NO: 217 - DNA, 830 bp, Aspergillus oryzae
aattcggcacgaggctggaaaatagtgaccaatacattcgggtataccaaccatacagtgttgccagawgcgctggagaaatggtctgtccctcttgtacagaagctactcccacgacacatgcagatcatttttgatatcaacttgtttttcctacagacggtagagaagaaatttcccaacgacagagacttactgtcgcgggtgtcaatcattgaagaatcacatcccaagatggtccggatggctcatattgcaattgtcggatcccacaaagttaatggtgtcgccgaactccactccgacttgttacagacaacgctcttcaaagactttgtccaggtttatggacctgataagttcactaacgtcactaacgggattactccgcgccgctggctgcaccaggccaacccgcggttgtcggacctgatcgccactaagcttggtggataccattttttgacagatctagcgcttttagataagctcgawgctttcgtcgatgacgaaagcttccgacaggagtgggcagaaatcaagaccgcgaacaaaatccgtcttgctaagcatatcaaagacactaccggatatagtgtcaatccaaccgccttgtttgacatccaggtaaagcgtatccatgagtataagcgccaacagctcaatatcttcggggtgattcatcgctatttgactatcaagtctatgtctcccgaggaaaggaagaaagtcttgccacgagtatccattattggtggcaaggcagccccagggtactggatggctaaaacagtcatcccccctgttaacagtgtcgcatcagttgtaaa

SEQ ID NO: 218 - DNA, 830 bp, Aspergillus oryzae
  modified_base (474)..(474): n is a, c, g, or t
aattcggcacgaggcttcaccatcatctacaacgcagtcatgatccgtcgcaactcagatatcgaggttcagctccctggtgctgcaggtactgggattctgtaaacgaggcagacatagaaatgctgtcaggggagcaagcaccaccgctgagcctacccacccgcctcgccactcgtttctctcgaaagccgagtgtggctcgacgctcctctgctgcctcctctcgtcgaagttcgatctcatcgctacactcacaccactcgagtgcttcatctcatggcgcgtctcccaccgataatatcgcgcaacatctccggcggacttccattcttgagagccggaaagcgaggctcgcagaccgtgctctgcatgcggagaaggtgaggcttcgcgccgcccttagtaaagccgcctccaggaacttgcaaagggaagagagagccctggctgctcagcaagcgcgggagcganctgctggcggagataaccgccaagtgtgaagaggaagttcgtcgcgcgaagaagaaggctgaagataaccgggagaggaaagcggcagagcatgccagacttcgcttagaaattgcagagaagtttgcggaggtcgaaaagcggcgtgtaatctatcagcaaagtcatcgacgctaccgcacaagcagcttacctactagcgaagagaaaaagatggccaaggtggtcagcagctcactcacgcaggatgcagccgcgaggactatccagcgaatatggaggacctaccataccaggagggttatgcaagagtttcgaacgctagatttgamagccaaccgcattcgacatatgga

SEQ ID NO: 219 - DNA, 750 bp, Aspergillus oryzae
tattcggcacgyggagcccttgccaaaagtatacaattcgcgctcttccgagwtcccwwgaccttctcgcwwgaccttgattggacggatcattgcattcttcagcatattttacctaaagcttcttcgatatgagccagatgtgttccgaaagctgcgaaatgagatctgggagatctcggaggagcaatatagagcctgcttcttgagtggaaaagacaaggcgcttcctctactcccgatgggagatctgggcttttctggatccacattcttcagcacatccaactccgcattcctcgtcaagagcctcccccgccatttcgaacattccttcttccgcaatgacctctttcaaccttactatgaatacataactagtcaccccgactccatccttgtttggattacggattacatctatgcagcgtacacatcactgggaaccctcgtgaaaacaaccccagcgcaccacattatcatggagaacatgctatgcgcggaaggagaaggatccagccgctgagaagtgggagacctacgacctgaaaccaattgactatttctttcccgagcgggatctagtccccgatccactcgtcagccaagaaactttgagtcgactggcagacgagtttccagataagattcggctgactcaatcggactatgacgatatgaagcggatgatagaggccgacacggcatttcttgcgttggcgaatgcggtggattactccttgtttctgg

SEQ ID NO: 220 - DNA, 700 bp, Aspergillus oryzae
aattcggcacgagggtcattgcacgcttaacatctctggaggaatccggggatcaaaaaattgatttatccatcctgcagcttcccaaaggcgctgtgcatgagattgaccctcttatgggctgcgccaccacactctttccgctgatagatcgagttgcccagttgatccaacgggtgcggaagactaattccaactcgatatctctcgtttcggaggccattgagctgaaaaggcatgttgagcagtgggaacctcctgactggttcgaaccccctgaagatccaacttcagaagtgcagcacagtatacagatcgcacatgcttatcgctgggcaacgattctatatctccatcaagctgttccagagatgccttgtgagccggcgtcagaactcgccaagcgagtattactgctgctggccaccgttccaccgagctcccggacaacaatcattcaaatgtttcctctcttagccgctggatgtgaagctgatcaggaggaagaccggcaatgggtgctaggtcgatggagatccattcagactcgtctcatgctgggttccatcgatcgctgcatagacgtggtccatgaagtttggactcgtcgagaccagtttgaggccgaaaagcagcggcggcagttccgaggggcgggtcgttccaattcccttgacgatcgggaacggtgggaagagat

SEQ ID NO: 221 - DNA, 647 bp, Aspergillus oryzae
  modified_base (396)..(396): n is a, c, g, or t
aattggggagaggsttcttcccccttctctcggcgtaggaaaccgccagtgccagasatacacatcagccttaatgaagttgttgggtatccagcattgcctatatgaaaatgctgcgcgttgtattctcttcggctccacttcagacctattcgatgtctatcgttcttcgatgggttaactttgctgcaccttcgctgtcgtccccagctgttcgcgggcgcgcgacagatatttgcctagatgattatgcaaagtatgatcaaagcgttaccaagagagcattgctttgagttttgaaaatgcattccgacgaggctccacggttcagctatttctcttcgcagactcaacaggtcgtttcctcttcgcaactgggaggagatcttctccgancagtttatcacgcacttgcaggagagcgagaggactgaagggaatgtttggtggctggacatttgcsatgccaccsagcaggatgtcgacattgtatctcaggcactgtctatccaccctctgacggcggaagatatcaccatgcgtgasccaagagagaaggtcgaggtctttcgaaactactatctaatctcgtttcagactttggtgacctttgcagatgaaagtgaagagaagggaagagccaggtc

SEQ ID NO: 222 - DNA, 438 bp, Aspergillus oryzae
aattcggcasaggcttagctggcttcccagcaacaaccgtcgacaagatgactgcccagacctttcgtcagatctcaaatcacaatctccagacattccgccacaattatgtgtcggagatttcgggttcgctcggcgatctcggaacctttctccccatcgccatagcgctggccatcaacggtactgtctcgctgtccagcaccctcatcttctcagggctcttcaatatcttgacgggtctattcttcgggattccacttcctgtacagcccatgaaagcaattgctgcggtagcaatcgccagatccttcaacaatggcaccattgccgctgccggaatcttcgtgggcgcgatcattttcatattcagcatcactggcctactgcactggttcgcagacgtaattcctatccctgttatcaagggtatccagg

SEQ ID NO: 223 - DNA, 920 bp, Aspergillus oryzae
  modified_base (424)..(424): n is a, c, g, or t
aattcggcacgaggaaagtacctgggaacaagacttctgtaaccttggagccttaccaacccttacagttggatattggttcacctgagatcaataacattgtcgatgctctcaaggggctgacaaaaccggagagtattcaaggagatttcaactcctcgcgcggcccgaatgtcacagcaacgaaacagatcttcattgagaatctaccacccgttcttattcttcacctcaaacgcttccagtacgatagcgttaccagagggacccaaaaaatctggaagaaagttggatatcctcttgacttggagatccctcgcgaagtattacctcctaacaggcgcaatatcatgatggcccagggtggactgcccaagtaccgactcattggcgtcatctaccaccacggcaagawcgcaagtgntggccattatactgtcgatgtccgtcgccaagatggtcgtgaatggattcgccttgatgacactgtcattcgccgtgtcagaagcgaggatgttgcggaagccggtggcgaagaagaccccaaggtgcttgcggcagcccttgaacagcataagcgcgacaccaacacgaatatctatgagcaaattgatgatttggaccagtctgataatgagagaggttggagtcaggtcaatggaacaggctccggtaatcacacaagcaaaaaatccacttcagcagttaccaatggagctccagcgacgtctaaagcaccttccgggactaggactccaattggacgatacgggtccaaggacaataaggttgcatacctgctgttctacgagcgcattgcatgatttatgaggagcgcataggaggaaatctcgacaatctcttactaaaagataaaagcaaaaggccactttcaaggaattctcgacctaaatacactg

SEQ ID NO: 224 - DNA, 765 bp, Aspergillus oryzae
  modified_base (469)..(469): n is a, c, g, or t
atggtatcgataagcttgatatcgtgcgtttattgttttcgtgtaccttttcaactccggcgggcctgggcttcagtactcctcttccaaatcagcttcggccacgctgtcgtccagcaacttccggcgtcaggcttggctgactagcatccagcgggttggagtaccccggcatacgtttttccacgagtggtatgttgtgacgtcgagatgttttgaatacgtcttgcgttgtctactaggatggaagctctactcatgggccataggaattaccgaagaggatgaaaaaggtcgagtgaagacatgggacatcgcgatcgatgctcaactagctggaggtgacgcagaggttagcaaaagtcgtctcgttttgaccattttcgctgctggtacccttcctcgaagcccaatgcgaatgatgcttaaagctttgcatgttcgcattttgctttggcgcgtgggcganccaggttcttggacctttaacgtctccaacgacattgcgcgtasctggcccggtaccaatgggaccttgctcggaaaatgaattcgtccctgccagaggaccacccagatgtcctcccaagtcatctgtctgccttactcgagcttgatagtgaggaggtcatgattgacagtgtcatccagagagccgcaaatctcacctggaaccgtcccacccaagaagggacggatggcgatgaggccttacttgacgtatggaaggaggatcctgccattcaatcctcgttggatgcgctt

SEQ ID NO: 225 - DNA, 923 bp, Aspergillus oryzae
gaggctgctacacggttgggtcgctgagccgtctacagaagcggatggggcgttgacacgtgtggcacaattttatgaagacatccaacttcttccctttcgcaaacaagaacttgaggatcgggtatttcgaggcgggtcactcaccccagaggaagagcaaagcatgaaagatattcaaatcattcagcattttacggagatcgagaatgccacccagctcagcacattcgggattcaacacttgacagaaaagctgccgccagggtcactatcgattctattccgtaatgaccacttctccaccctctataaacactctcagaaccatcagcttttcacactagtcactgacgctggatactcccatcgggcggaaatcgtatgggaatctctcgttgatgtcaatggatctcagtccggcttctttgcgggtgatttccgccctgtcagccatacctcgaccggagcctccgatccatccggtccaaggacgtccagcaatactagacattctggagtctcctcggcagtctcacatgagcagcagggcagagcattgtctccacaggagcaggctgatgcagattatgcttacgccttgtcccttcaactacaggaggaagagcagcaagccagtggcaggactccccgtgaccgtaatcagcgagcttccgttccgtactatcctcaagggtcctccgagggaccagctcctgctcgccaccgctctacaggccatcgtccttcacatcaacctagacgacactcgccgtctcgggacgctgatgacgttccgccaccttcttatgagcaggtagccaataatgcggcctatcagtcacctccacgaagttccaacaacagagctgcgccttatgtggctccttatcagatagcccagttcggaagacgaccgccag

SEQ ID NO: 226 - DNA, 790 bp, Aspergillus oryzae
aggcgaacatcaactcagttcccctcgtcgctgtcaagccgccgaccctcacggccgtcgagccaggcggcgtcgctagtctccgaccgctgtctgatgcaccccgcgggccggagggacctgagtggatcgcgggcaccagtgagagcccagcacgacggagcagccgcgacgaaggtgcgttctaccaggccgaagccgcaatgctcgcgagggagaatcaaattttgcgacacgcatccgggatttagaacgccaggtgagttagttgagcacttcgcccactcgaggtggtgtgcggtcgggcgagatcgccgcaactcctgccacagaaggcggcgcaactgccgatccccatgcgactgttggagttagatcgaccaatgaacccgcggataagacctgattggacaaatgcaatacctgcatcgggggacggagtatttcacggtgtgcttctccagatttcaggacgatcaatacggagtacatatctcttacagcgggcaaccgcagttcaaggttatatgcattgtctctttatgagctggctcccgctctggtcgtatgcgtcccacctaaagttgtctatacgaaccagcgatccgagcgcgagcctacagccatcccgccggatatgaacaatcatcacacctaatcacaataagtctcgggtacgttttgtggctgtagggctaggagacccctaccttgaggcgtcacatttggtggcttaaaccgagacactattgtattgtgcatattgggcgcccaatatagccagagcctt

SEQ ID NO: 227 - DNA, 760 bp, Aspergillus oryzae
ttcggycgaggcaaggtttcatcgtcccagaaccccttcaaacctgactagagcccttacggattcgctttgctctgcttagctcgccactagtcatgaatgctccaatgccgcccacttacggacgtgggttcccgcagccgcccaacggtctcctgccacgcctcgtcgcggaccccaaggaccagcaatgcctgtgcccatgccacagcatcccgttcccgctcagtatatccccgcccagcgcaacatgccacaccccaacgatgctgctcttcgccggagccgcaagcccaccgacaagaacatccccgacggcatcgaagatgtagtgatcggggaaggcgtacagcagtacaagaacctgcgcgatttagagaagagattggacgccgccatcgtccggaagagactggacattcaggactcgatcagcaagaccgtcaagaagtaccggacgatgcgcatttggattacaaacacagtcgagaatcaaccgtggcagggcgcgactggccagaacgggtcagcgactaaccccggctcgggacgttataaggtgcgcatagagggacgactgctggatgatgacaccgatcctacggcccctgaggacagcgacaacgagggcaacgagacgcaggcgaatggagatgccatggatcatgacgggaaggatgctaagaagaacgccccgaagcggtcgaagcagcgcttttcacactttttcaaaacgatcacggtcgacttcgacaagtct

SEQ ID NO: 228 - DNA, 860 bp, Aspergillus oryzae
gaggatatcctggtcgcgagagacccactttgaaagtgaccaattccgaaatgggcagcgcttttcaggataatattgcacgaggatttgacgacattgtcgacagcactctgaggagtggtggccgtgcgactttgttaacttggatgaatgcgctagaccgacaccttgagcgtctactcacgactacagaaagaggccccacgctgaagttcgtaccaaatgtgggtagcaagcagaagccagagagccaagcgattgtggagggggtgaaatctttggccgtgtctaccccagcgagtacgcaagacacgaaacccaagtcattacctgtgccggaggtccctctcggatatataccgcggaggagaaatcgcaggctgagaagaggagagctgttgagactaagcaaattgaagctcgtcttggaagactgcctttgttccagaaatcaaaagatgggctttcatttgtcattcctatccagcctcccaaacccgaccggctaccgatttcgatccgttctgtgaaaacagtcaagctattggtgccccttctgtatccactggaacagagctctgttgagcttcaaggcgttgatcgtgcagaagcgcggcctgttgaagtgggatttgcgcagtgggttgaaggaaattcaaaattgaacctgatgtcgcaaatcaattacctgacggccaatatgcataacttcgctaaaacaccacttgaaactccccaggagcccgtttttgatgcatcacctgagccttttacaggctctaaagctcctgaaaatacatcgacgacgacaagaggcccgacgctagaagacagacctcacgtccatgtcgttccacgac

SEQ ID NO: 229 - DNA, 950 bp, Aspergillus oryzae
  modified_base (39)..(39): n is a, c, g, or t
gaggtcgacggtatcgataagcttgatatcgaattcggnacgagggcgcgatatctccaagattattctgtcccagagactgtttccaattctacggcgtgttgccaagtctggagaggcgatcaatgtgttgcctttattccaagccgtggggatggacttcacgtcgtcttacttgttcggcacgaagaatagcactacatacatcttccatcttcccgagtggcaacaatggttggaggaatatgagaagttcaaatacatgagtgtacaggatcggtatatgggcttcatcgaaagctggtgtctttcactttgccgcaaagtcgagaataacgaccagccgaatgatgtacctatcgccacgaatgcagtggtctataaccagcttcgtcaatcgcttgagaaggacccggacagccgacccctcgagttagctattgcatcggaagtactcgatcatcttgtggcaggtcatgaaactagcggaatcacctttacctatatgatgtgggagctctctcaacacccagagctgcaagccgagttgcgccgagagctcctcacgctgacaccgaatctgagatccctacccatctcagacaatgcagtggacctgccatctctcccttccccatcagcgattgatgctcttcccctgctagatgcagtcctgcgagaaactcttcggttacattcccccgctccagcgccattacctcgcgtaacacccgcctccccgaccggcgtatcaattgagggctaccacaatcttcctgctggcgtacgcgtgagctcctcttcgtattccctgcatcgtatcgaagaggtttaccctcaatcgtcggattggctccccgagcgttggctcaagcccgaacccggcaagattcacgatatgcgccgactgttctggccgtttggaagtggtgggcgcatgtgcttgggta

SEQ ID NO: 230 - DNA, 1057 bp, Aspergillus oryzae
ggatttggtcattcttcctccccctcaaaagcatcattcctctttgggcatctgtcttcacttcccccagataatccccattacctgcttcttcacattactctatctttttcttttctcccttcccccgtcgttctacccttgttccagccatggccgacatcactgccgtcggtgaggagaacccttctcctacccaggatgacctgcagcaggccgccggtaacgcccgctgacaaccgcggcaccaagcgttctcgcatgagcgccgacgacgacgatgacgatgatgataagcccggtcgcgagcgcagaaagattgaaatcaagttcatccaggataagtcgcgtcgccacatcactttctccaagcggaaggcgggtatcatgaagaaggcatacgagctgtcggtcctcacgggcacccaagtgctattgctggtcgtgtctgagactggtctcgtctatactttcaccacccccaagcttcaaccattggtgacgaaggccgagggcaagaacctcatccaggcctgtctcaatgcccccgatcccaccaccaatgagaacggtgtcgaggccggtgatgtgccaacagaggcgccagaggatgtcgccgccgcccacaacaatgtcaatgcccagcagcagaacattcctcgccctgcgggcatgcacccaggctacatgaccaacgaacagcagcagcagatggcctactaccaaaatcttcagcagcaacagcaagctggtgggcagtaccccggaatgcctgtgggcaaccggatgccgccccagcatcaacccactgcataaacggtggtccttgcttctgcgtaatatgtcttcagaagccgcggaatccagatgtttgttgtttcgcgtcttcgttaacttcaacatgtgcacctccgcaccatcggccttcctttgatacccagcgaaatctgaattctcttgccccgcaattgacgctctaaatgcggtttccgtcgtatacaascacataacatgaacaccaaargtgccttaacttgtaacctgtgtatatcatgag

SEQ ID NO: 231 - DNA, 1003 bp, Aspergillus oryzae
gagggcggtgtggttgtcgactccggtgatggtgtcacgcacattattccggtatacgaatccaccgtccttaaccaccacatccgtcgattggatgtcgcgggtcgtgatgtcacccgtaacatgatcgccctcctccttcgccgcggttatgccctaaaccgtacggccgacttcgagactgtgcgccagattaaggagaagctttgctacgtttcctatgatttggagttggacaagaagctttcggaggacacaactgttcttgtcgaatcctacactctccctgacggtcgggtcatccgtgtcggaagtgagcgtttcgaggcccccgagtgtctcttccagccgcacctggtggacgtggatcagcccggtatcgccgagatgctcttcaacaccatccagggcgccgatgtggatgttcgctctagtttgtacaaggccatcgtgctcagtggaggaagcagcatgtaccctggtctgccatcacgactggagaaggagctgaagcagttatggctcacacgtgtactgcatggagacccggagaggctgaacgtatgtctaatagcatcctttacaggagatatacgctaactctcgtccagaaattcaaggtgcggattgaggacccgccaagacggagacacatggtcttcctaggcggcgctgtccttgctaatttggtaagtacttgaaccctatccatacttctactcaacttaggctcaggtcgtctaactatctctcagatcgccgacaaggaggatatgtgggtcaccaagcaagaatggcaagaacagggtgctcgtgccctggacaagcttgggcccagataaacgtaaaaccgttgttcacgtctttccccttttttcctaatctatttaaacaccttccttactgcccatgtacagcatcctcttatctctgggagatcgcccttggatgttcatgtcatatagggatctaaggacagcgtgcactgcgccctacaaaaaaa

SEQ ID NO: 232 - DNA, 575 bp, Aspergillus oryzae
  modified_base (483)..(483): n is a, c, g, or t
  modified_base (503)..(503): n is a, c, g, or t
  modified_base (506)..(506): n is a, c, g, or t
  modified_base (518)..(518): n is a, c, g, or t
  modified_base (534)..(534): n is a, c, g, or t
aattcggcabaggatccggactttcctgaagtcgcaactgcaccagctgacctacactctcattcacattttctttggtattgtcgttcgcctcgtccagagctatcatgccgtcgtagatagggtgttwgccatcgtctattatcaccaccgcacccccgaattgatcagaaaggatgtgaagaatttggatcgtttgccggagcacttgagtgttatattgtcactgcggcaagaggaggattctttaaccgcattttaatggatgaagtggcagaaccttgctgccgtggagcgtcagtgcctgggatccctgtgttaagcgtttatgagaagagtggggtccctaaaatcatgcattcccacactgcacccgcatcgttacaaacaagctctctgcgtattacggctctcccttcccaacaacccaacgttgcgtctttttgcccctccacccaccctgtgtcatccaacccaccaggnaccagcccactccaacctgnagnaaaaacccaatnactgcattcctcctgnactggtgccttcctcattgtccggcctaaccgtatgtgccc

SEQ ID NO: 233 - DNA, 981 bp, Aspergillus oryzae
  modified_base (9)..(9): n is a, c, g, or t
aattcggcngagggccttatctgactttcgctgttcttcaaccttcaaaaaactatctgctgatctttcacttgtattttccccgcaagtctttgtgatctcttgtgtgggctgtccatcctcgacccaagctagactccgcatcaagtccccgtccaacccgcgaatacccttagcgttcctccgcttacggaggctatccgtcagagaacatgtcgacaacaacaggagcgttcatcgcaggaggaatcgcagcatgtggagctgtcacagtgacccatagttttgaaacagtcaaaatccgactacaattgcagggagaactacaagcaaagtccgaggcggtcaaaaaatacaagggtgttttccacggcgtcaaggtcatcttacagaatgagggcccccgtgggctgttccgaggcatcggttccgcttacatctatcaagtgctgctcaatggctgccgtctaggattctacgaacccctgcgcaagactctcacaacaacgatctatcaagacccccaggtccagtcgttgggtatcaatgtctttgctggtgctgcctcgggtatcatcggcgctgctgcaggttctccattcttccttgtcaaaactcgtctgcagtctttctcgccgttccttccagttggtacgcaacacaactatcataattcgttcgatggactacgaaagatctacacttctgagggagtaggcgggttataccgtggggttaatgcagccatggtccggacaggtttcggtagctctgttcagctgcctacctacttctttgctaagcgtcgcctggtcaagcatttgggaatggaagatggtcccgctcttcaccttgccagtagtacggcttctgggtttgttgtatgctgcgtcatgcatcctcctgacactatcatgtcaagaatgtataaccagaccggtaacctctacaagggcgcattggrctgtctataccagaccg

SEQ ID NO: 234 - DNA, 898 bp, Aspergillus oryzae
  modified_base (373)..(373): n is a, c, g, or t
  modified_base (375)..(375): n is a, c, g, or t
agaggctttcagcagcttggccagctcgtacgctggagctggggttacacgttcttcttgccccccgagagcgctatctagaggagggagaaagagagcaaagtacaacgagtatcgaacaaggccgggagcgatacagtgataacccagaacaagcggatcctgatgagcctttgatcagaaatgcatcttctgagggctcctcgactgactcaaatgacgagtctgaggtatttcactccggtgagcagacaccagtattagtacgcgcctactcgtacacaaagctgtctccgcaagataccgaccaccctgccctacttagtgctcctccacaaggaccattcctaccccggcaaagcaccgaagtatnanttttatgtttccctagcgttgaagcatcaggtggcgattccggaaaggccgggctcggcttccgcttcagaacctccgtagttcgccttggtggtcgtgtaaccaatacctgggaaagacagtygggagccttkttccaacgcctgccgacatttcttcagaaagtactatcgggaactgtgaacggggtccgcagattcttccgcggcctctggcaattcatgaaccctccactttgggcaatgcttgtgtctatcatcgtggcgtccgtgccctcgctccagcgtgtattcttcgatgagggcaccttcgttcaaaattccgtgactcgagcaatcgaacaaaatggtcaggttgctgtgccgttgattcttgtggtccttggcgccaacctggagcgcagtactttacctgaagacgcgcasagggatatggracatcccaaggaggagaagaagctgatcattgcgtctctggtggsgcgtatgcttcttccaaccctgatcatggcccaatgcttggc

SEQ ID NO: 235 - DNA, 838 bp, Aspergillus oryzae
  modified_base (10)..(10): n is a, c, g, or t
  modified_base (14)..(14): n is a, c, g, or t
  modified_base (36)..(36): n is a, c, g, or t
  modified_base (469)..(469): n is a, c, g, or t
gacggatcgntaangcttgatatcgattcggcacrngggacgactgctacgacgtcgcccgaaagaacggtatcacagtcgacgacttcctggcatggaaccccgacgtgcgcgtgggcgaacacgactgcagggtcctacccgtggactacgaagcttgcgtccgcatacgacccaaaccacccatccccggatgcgcaccaattagcacaaataccacaacctcgtccaacataacactatacccgccaacgaggacctcctggcacaagaccctaaccaccacaacgctcgttactaaatgcgaggacccctcctcatccacctgcgccacggcaacagtaaccacaacgagagttgtgactctatctccacccccaacaaccgtgccgactaatcccacgttcatgactaccacaacagccccgactcagggtgggaactcgtcttcatcaggctcgggagagtnaactctacctcctcctcctttcaccaacagctccacgccaattaccccgtccacgaaaggcccagtagaaagtagttctcggccaactggcggccacgggaccataacggggcctccaccacctgaggtttcctcgacaataacggtgactacgactattatgacacaatgttccactacatctacagtgaatacgagtgaaccagatgatactacagtggtaactgctacgatgacgacttggtgttcgacttcgggtagtacctcgcagagtcagacggcaagtgagccttcgatgactattatgcgtgtatgattttagtcaggtagtagtttgtattcggttgtmatgggatctgcggagattgt

SEQ ID NO: 236 - DNA, 863 bp, Aspergillus oryzae
  modified_base (33)..(33): n is a, c, g, or t
  modified_base (35)..(35): n is a, c, g, or t
actwsgtggacggtatcgataagttgatatcgndntcggdggagtgtttctccccaaaacgccttggggtttctccgggtctcactaacagtatgcttggtctgtacgagtaaaattatttccacaagtgtttgccttgtttctctttcggtgtttgtctccttcatactggtgttggtttatgtgttatctatcgattaacagtagcgccagataattgcgcgcaatctgcaagaaccgaccgactagactagtttagggccatatcgcagtatatcacaacatatttcgaccgatctcgggcccagtatacttatctaacacaatcatgtctttcgaccctactgaaaatggctctggaaagcctcgattgcatacggctcgctcgtttcccaggatggatacttcggagacgagccctttcattcgctcgaggtctaagacctttcagtcagtggcaacaccggagcatgtcgagtctgatgcacatcccttaccgttgtcgccagccgaagaggaccaggaaacgggccctgacctttttgaaaaaacaggtacctcagagctaggcatcgatgatgatggacaaggcgaggaggcttcaatgctatcgcggggtacggaggaacaatcagaggagttgccaatagagttgatcagcctaactgaccgatttgtcaactctttaagtgccaaagtgcacagctcaccaccaacgattgagaaaatttcccttctttaccaagatttttatgtccgagcagaatcacatatagccacacacatatctgccctcgcttcccgaataaaccgtgatccttcgccacatcctcagccgaaatcaaagaataaacgcgtcgaaa

SEQ ID NO: 237 - DNA, 700 bp, Aspergillus oryzae
gccgacggcatcgccccgcccgccatcgcctccggcacgcggctccmacccccmagaacagyccaccagctacatccccaaccgccgccagacatatccttctttcgtctcctctctcactgtcactatggccgaacgtatctwgawgaacgaatacaagaccctcgccaaggagccttgggtcaaaatcgaacttgataacgaggacattttcaggyggactawcggattaawcgtcctcaaccccgactccwtgtactacggcggttatttcaaggcgtccaagaaatatcccaaaaactaccctttttcgcccccagagttcgcttcwcgacgcccgctgtaccaccccaatatcaaacccgacgggaaactcagcawctcgattctccacgcaccaggcgaagatgaaatgtcgggcgagctggcctcggaacgatggtcgcctgctcaacgcgtcgaatctgtcttgatctccatcctctcgttacsagacgacgcggaagtgtcgtcccccgccaacgtcgacgctggcgtgacgctgcggaaggaacccgaggaatacaagtcgcgcgtccggaaggastytgasatttcgaagcaagacatccccgaaggctttcgtcatgccgamccaccaaccagcaacagtgaagcccgtggasaaggacgattcggatttctgggcggaaagcgatgc

SEQ ID NO: 238 - DNA, 421 bp, Aspergillus oryzae
aattcggcacgaggccgatttaccatcaacaggygaattggctggcatttacctcggtgtgctcgaatgtgtatacgacactgccacaattcgtcggcacatttmtcagctggatagtgttcagcgttattgagccaggcagcacaaagcgagatgcctcggagacgcaatggataaacctcgataagggttcgcctaatgccatctcgatctgtctgtttattggcgcactaagtacgcttgtgcgccatctgacacgcaacccgacgatatcacgtcacgttcgcatagtgatcgtgacttttctctcttctacattatatctattctatcacgatgaaagmgggagtctagttgacggctttctgcactattatactatctgatacccagattcattcagcgmtgtattatattgtga

SEQ ID NO: 239 - DNA, 816 bp, Aspergillus oryzae
ggcacgaggwtcgcggccccctcctgtatccattttsggcagctggtcaggaactttgcagcsatggcgtccgaattcgttgaccccaggatgacttccgtcaagcctcgtattcgctacaatactatcgcaggtattaacggaccgctggtcatcctggataatgttaaattcccccgatacaacgagattgtatccttgactcttcctgatggtaccgaacggtctggtcaggtccttgaggctagaggaagtagagccgtcgttcaggtgttcgaaggtactcccggtattgatgtcaaaaagaccaaggtcgagttcagcggccacagcttaaagctgggtgtctcggaggacatgctgggtcgtgtattcgatggttcgggtcgcgccattgataagggtcccaaggtgttggcggaggattatttggatatcaacggtcaacctattaacccttactcgagagtgtaccccgaagaaatgatctccaccggtatctctgccatcgatactatgaactccattgctcgtggtcagaagattcccattttctccgcttccggtcttccacacaacgaaattgctgcccagatttgtcgccaggctggcttggtcggcaagccgactaaggacgtccacgacggacacgaagagaacttctcgatcgtcttcscagctatgggtgtcaacatggagactagccgtttcttcacccgtgatttcgaggagaacggcagtatggagcgtgtcacgctgkttcctgaacttggctaatsaccctaccatttgaacgtatcattacccctcgtcttg

SEQ ID NO: 240 - DNA, 740 bp, Aspergillus oryzae
aattcggcascaggcaacttcaagctcccctcacctcaggttttctatcttctatctcgatatcwtwtctaaatcwtcwcaccatttcctctcccaccccgcccctcttttctttcaatctwttctatatttwgagggaatcttctttttwcccggcawcttcwcgggccccattggtgccgcgtgcacatttwttcaacctcctggatggctctgattcattcactctgcgwgtgaacttagagctcgcgcctgttcgtcattgtctctggatcatcgttgagcttgctattgtttactatgaatgctttcgtgctgattttcttatcccgttttcgtcaactaggccggtgttacggggttagataatatttaggtctttgctctagagactgcctccccctacaccttagcgacagccacatctcgccatcatgttggaaggggtggtggccaacttactcaatcgcttcttgggtatctacgttaaaaacttcgatgccaaacagctcaacattggtatatggtccggtgatgtaaagcttcgtaacctagaacttcggcgcgaagtcgaaccaactacacctccccctcaatgtcgtcgaaggccacctcggtgaactcaccttgtccatcccctggtcgaatttgaggggaaagcctgttaaggtcgatatcgaagatgtgtttctcctggcggccccgaaggaagawgccgactatgatcccaaagaagaggc

SEQ ID NO: 241 - DNA, 633 bp, Aspergillus oryzae
  modified_base (13)..(13): n is a, c, g, or t
  modified_base (88)..(88): n is a, c, g, or t
  modified_base (91)..(91): n is a, c, g, or t
caaagaagcaggncatccacctcacagtgaccgcccaggccgttaatttcgcccaggaaacgaaagttccgatgccgaagcagcgcgnccnccagaaatacaaggaatacaagaagcggaccgggaaagtggaaccggatagcaacacggatgaaaaaaaggcgcccgaggtttcgtttgaggatgcccccgaggaagcccagttcctcaagcgggtacgtaatgaagctgagatggaagactatgacgtgaccgatgatctccgggagatgtgcatccaatttggatacctggcactgttttctccggtctggccattggtaccggtctcgttcttgatcaacaattkggttgaactgcggtccgacttttttaaaatctgtatggaatgcaaacggccatcacctcaacgtgcagataccattkgcccttggctggacagtctagggttcttgtcctgggttggaagtattacaagcgcggctcttgtctacatgttcagcaacggccacgaaggaccgaacggacaaccaacatccatcaagggatgggcactkttgctcacgawaatttttctgcgagcacatttwmctgctagtacgctacgccgtggragccactatcgccaagatk

SEQ ID NO: 242 - DNA, 603 bp, Aspergillus oryzae
ccggacccacaggctataccgggtggatcaatacagatcgcgatcagcagctcggcacgaaacgggtttgtaggatttggggtggcgatcgagaaacagccacctcaatatcgaaaattgaaactgaagaccttctccgtaacattgggcgcaagatcagagcagaatccgttctccgcagagctagcggctatagcacatacgttgaacaggctggtgggactgaaaggcttcaggttcaggttgctcacaagcaacaaagcgacggccctcacgatacagaaccctcgacaacagtcaggccaggagttcgtctgccagatgtacaagctcataaacagactgcggagaaaaggaaaccatatcaagattctttgggtccctgccagcgaagacaacaaactgctgggcctggctaaagagcaggccagggccgcgacccacgaggacgctatcccacaggcacaggtctccagaatgaaatcaacaacgttgaatctcgcacgatccaagcagccactacgaaagccttgccagaggacgtaggaagacacatcaaacgagtagatgcggcactcccaggaaaacacacccgacagctgt

SEQ ID NO: 243 - DNA, 522 bp, Aspergillus oryzae
  modified_base (16)..(16): n is a, c, g, or t
  modified_base (230)..(230): n is a, c, g, or t
  modified_base (237)..(237): n is a, c, g, or t
  modified_base (248)..(248): n is a, c, g, or t
  modified_base (255)..(255): n is a, c, g, or t
  modified_base (267)..(267): n is a, c, g, or t
gagacaaatggccatncaaagtgcgcagtcagtatcaactcgcagcttcggaggtcaactaacccgtaatgatactcaaactgtgcacgctcccccgcgtacaccagcctctcgaacacccccagttgcgtccacccctgtgccggaactgcagaatctcagtctcggtcatgattccggatctgctacgcctgaggaacaggccgccgtctgcgtcatgcagccgtgancgaacgngccgccaatcntcttggnaatgaccagaanaaactgaatgaattccgctccaaagtatccacctaccgcacctctgccctaacagccaccgagctgattgacgcctttttctccctctttgacacctccaccaacgagctaggcaaactcgtcaaggagcttgcagagatctacgaaaacgactccaaacgcaccgcactactcaaggcctggwatgactggcgggccatcaatgaagattacccagcccttccaggccccgggtggcgtcctaccaggcatgtc

SEQ ID NO: 244 - DNA, 899 bp, Aspergillus oryzae
gcacgagggatgtgcttgggcttattattctcagaagaattgttagttgattcgcgtatctttgacgaaggcttggtggtctccaaatttgtcaaatggtcgtacgtctcccgagcacgatctggaaatctttcggtgcaggacctgcagtccgtcgcatattttcagctacaccccgctttcacataacaacaatgacacaagagaatgaagctgctgcggctcccaatgagagtgggagtgaagaacagaagttgccccctctttctctgaaagactttggcgtctataatcgtatggcggcacagatggatggatttgtatgttcttcatgcctgtttatggcaactaagcacaaccattttcgcctgtcttggaaggatctccagaacgcatgcgaaaccaatggaaagcggtccagcggattaaagcccaaacaactgatactcactggactgcgtttctgctctcagcttgacttccaccacagtattgaagaagagcatatatttcctgtgctagctcgaaagatgccagagttccgacagaagaagactctattggcacaacataagaaaatacatcgtggactggacgaacttgaacagtacttagagaaatgccgctccggcgaggaagaccttgaactgacagagatgaaacgactaatggacgcgtttggggaagtattgtggacgcatctggatgaagaggttcggactcttggtgcggagaatatgcgaaagtactggacgttggaggagatgcgcacacttcctatgtgatcagttggtgtgtaagaggacaatcatggacgtyacgagatgartgtgccggtttaactcgcgctcctttgcacatcctcactgttggagcacgtgctcctgccttcatacaat

SEQ ID NO: 245 - DNA, 515 bp, Aspergillus oryzae
  modified_base (88)..(88): n is a, c, g, or t
  modified_base (416)..(416): n is a, c, g, or t
  modified_base (433)..(433): n is a, c, g, or t
tctccagcagtaggatcattcggtgacggcggtcgatgtgcmtcwcgttgtgaatctgtgtaggacatcatacacgaagggaggcgancttcgtaagatattcaagggtactttggtgcagagcaaacccgagaatgctttgacatttgtttcgaaccatgacacagtacccggacaaatgcttgaaaacccagttgcacaatacttcaaaccgctagcatatgccttggtgctcctccgtaaagatggacatccatgtgtgttctacggagacctctatgggactctaggagacaagccattgaagcgagcctgcaagggcaaacttccgatcctcacgcgggctcgaaagctgtatgcttacggggaacagcaggattattttgaccaagccaactgtataggatttgtacgtnacggaaacgcgcgccanccatccggaatggcctgcattatgagcaacggcgcggcacaaaaaagcgcatgtacgtcggaccgaagcacgccaacgacca

SEQ ID NO: 246 - DNA, 876 bp, Aspergillus oryzae
  modified_base (854)..(854): n is a, c, g, or t
ctgaaatcggtggccagggctttctgawagtcgcacagggacagaaatgcattrwcagaggcctgaaagaagatggtagccttctccctgttgctttcatggacgtacagtgccatgttagcgtggtaaaagarctaaagggcacaggaatgtgcatcatcgctgatgctgtgaaagggctctggtttgcagggctactcggaagagccttataaaatgagcctttttgcaaaggatctggattatctcgaggtcttagcagcagattttcttccagatggcaacaagttattcattctcgttgctgacagtgactgcaaccttcatgtgctccaatatgaccctgaagatccaaaatcagtccaacggcgacagactgctgagtcgtagcaaattccatacaggcaacttcatctcgacgttgacgctcttgccgcgtacttcagtctcttccgagcaaatgatctccgacgttgatgcgatggacgttgacatcaaaataccacgtcatcagatgctcattacgtcccagaacggatctgttggcctcgtcacatgcgtttccgaagagtcctatcgtcgattatccgctttgcagtctcagctgacaaataccattgagcatccatgtggtctcaaccctcgagcttttcgggcagtggaaagtgacggcactgcaggcagaggaatgctcgatggaaagcttctcttccagtggctggacatgagcaaacaacgcaaggtggaaatagccagtcgtgttggagcaaatgaatgggagaycaavgcagattttgaggctattagcggtgaagggcttgggtatttgtamcggtaggcagcctaagtytgtnagagcttcggaatacctaccat

SEQ ID NO: 247 - DNA, 678 bp, Aspergillus oryzae
gcacgaagatcatcttgccccccatcttctactacccccgcagaactcttaagatcgaggagagctttattaataatatcttattttctcttcctcatttccttttattataaatctatcttaattccgatagaccgccgccaagatgtcgctcgaagcaaccatgatcatcgtggataatagcgaaagcagtaggaatggggactatacctcgacaagatggcaagcacagatcgacgccgtcagtgtcattcacaccgccaagatgcgcgtacatccccagtcagccgtcggacttatgagcatgggtggaaagggtcctgaggttttatcgactttcacctccgactttggtgctatcctggccggtctgcaccgcactaagattcacggcactgcccaccttagctccagtatacaagtggccggtctcgctttgaaacatcgctccgagaagtcccaacgccaacgcatcatcgtgttctcgtgctctccgatcgaagaagatgagaagtcattggttaagctggctaagaagatgaagaagatcaatgtatctatcgacgttatcgccttcggagacctcgaatccgaccaaactaagaagcttgaggcgttcgtcgaraacgtcaaaggtggcgacggctcgcacctagccattatccctcctggtccgaa

SEQ ID NO: 248 - DNA, 284 bp, Aspergillus oryzae
  modified_base (97)..(97): n is a, c, g, or t
  modified_base (99)..(99): n is a, c, g, or t
  modified_base (111)..(111): n is a, c, g, or t
  modified_base (144)..(144): n is a, c, g, or t
dgggctgttttcggtcatccttaactcccagtgcgcctataatctgtagcatcagcgggacattcgagttttgaccacgctctcggtgtcgtgtgcncnacgttcattgtnctccaatactcggcttgtgttatagcgagagtnctggggtccaacaaatgacgagcatcgggcaaagtcttccttccttccagctgcatatctgaacattcctgctgacctatcatggtcgccctcgccacgccctcgcgcaacccagcgacgggaatcagacagcctagccg

SEQ ID NO: 249 - DNA, 521 bp, Aspergillus oryzae
ggcacgyaggcccgggtataccagtgcagacacacttcaacgaatcccacggagaagtcaatttcaccagagacctgttcccgcaattcaagaacgagacggaactctacgataactatggtctcctcactaaccggactatcctggctcacgccatctacccacaacccgaggaattcccccgtctcaaagaactagactgtggtgtcgcgcactgtcccatccccaatacaaccatggacgagttcatgatcgcccctgtgcgggagtatctctcgcgcgggatcaaggtcggcctgggcacggattgcgggggcggatactcgtcgtctatgcttgatgtgatgcgggcggcgtttatggtgtctgttgcgaasagacggagacagaggggaaagatgcgccgttgagtgttgccgagagtttttatctagcgacgctgggtggggcgagggttgctgggttggaggacarggtgggacggtttgcacccgggttggagtttgatgcctgtctggtta

SEQ ID NO: 250 - DNA, 269 bp, Aspergillus oryzae
  modified_base (29)..(29): n is a, c, g, or t
  modified_base (53)..(53): n is a, c, g, or t
  modified_base (145)..(145): n is a, c, g, or t
cttgaattgtacaaacacctatcatgggntccgttgcacactctgtggcagancttgatgcctctgtggtcaagatcactcggtcgacaaawctccgcccggttcctgaaccgggctcgcccgaggaattgagccattcgtactntactgaccatatggtcactgcccgatggaccgtggccaatggctgggagacccccgaagtgaagccctttgagaatcttagcatccctcccacggcttcttgcttgcactatgccactgaatgc

SEQ ID NO: 251 - DNA, 521 bp, Aspergillus oryzae
cgaattcggcacgrggggcattccagagcscctcgtcaccatgtacttactcaagatggaggccttcacggccgtcgccgtgtgggcaatgacatcggcctgccgcagtgttgcccgcgattgggcaaatggcctgtgcccgcgggacgacgccgatcttcaggaactaggagccaagctttccagcacggctaaggtgtacttccctggctcatctgagtttgaggatgcatctgcacggtggtctacactggccgaacccaatgtaaccgtcgtggtggttcccggcaccgagagcgatgtcgtggagacggtgaaattcgccaacaagaaaagacctacccttcctcgcatacaatggcgcccatggagcccttaccaccctgggccaaatgactcacggcattaagatctccctgagtcaactgagtagcgtggaagtcgccgatgatggcaagacggctaaattcggtggcggaaccatctccaagactgttaccgatgagctgtggaaagttgac

SEQ ID NO: 252 - DNA, 776 bp, Aspergillus oryzae
ttcggcacgaggcttctcagccactcagttctgccacatctttgacttcagcgcaaggaacttgacatgaacgacgactcaggtgtgcagtttgtagctgcacggccgagaaaggtccgccacatatctttccgttgccttcaagaggcggggcatccattgtgccaacactagagagattggggattgctgacgattatcatgaaactacagcgcaaccaccaacaaatgtcccgaacgtctcattcacccaatcgccgtttcttttcacaaaatggagagccctcgtcctccagagctccgaccaaccagttgccacccatgaggtacgctggggacggtctcgacatgaggagacctgtcgtctcggcttcccctcagacagatgaagtgatcgatttgacaaatgaaccggactcgcctccacaacagcgagataggagcgcccgagcaacatcgcggcgccctagacagccccgctttggaagggatatcatggcagacgtcgtggatctagaagatgaaccggataacacaattgatctcgactctcctagcagtccagaagtccaattcgtgggcgccacgttcgaccccagctacctcgaccatcgccaccacggcccagaggctttgatttcggctccgggcttgtacggttcctacggttagatgatccccgggttcaacatttatctggtagagggctattttctagggatcctggatggagaaccagggggccccgtcgcccgccacaagatgtggagacattt

SEQ ID NO: 253 - DNA, 592 bp, Aspergillus oryzae
ttcggcacgaggcacggatggtgtatccttgctattcttcctcttcgcttgtattggcaacttaacctacgtcctttctatactcgcctactccccagtttgcaagggggtgtacccccaaggaagggttagccaatgtcgacctggcgaastgctgccttgtatggtcggtacatacttgtgaacttatcttggttaatcgggagcttaggaacactgttccttgatatggtcatatttgtgcaattcttcttgtatcaagataatgggtacggcgagaccgaagaactagcgaggaaactttgaggggatgatatcgttcactcccacaagtacccgttatacatcgggtcttcttttcttcttctctcatccttgcttttgtatgtcctaatctgccttcggctgaaaatcaagggtggcgttacggacaggggtcagggtaaaaaaaggcaactactctcctttcttagtcttgcgcatcgggctatggtttctctcgttgcgggcggcgtttggggttttctttttaacttcgtgtatacagatactttacctcctcaaaacatagaatgaaagagaatatccaacc

SEQ ID NO: 254 - DNA, 387 bp, Aspergillus oryzae
  modified_base (13)..(13): n is a, c, g, or t
  modified_base (26)..(26): n is a, c, g, or t
attcggcacgacnggtctcaggaganaaatgctcttctccagtatacaatcagactaaattcgacatcaattccatgcagggwccaaatcatccgccagttcatcaatcacctacgtcacgagtttcaaacacgtccaccaaagctctcgacaccaagaaaatggaagacgatctgcggaggattctgaagcttgatgtgaatccaggcctgccgtccaacagtattcagagttcatttgcttaatgccacttcccttcttttgattttttcgttcacgctttctggcattctgcataacatttgtgcataacaatcgatgctccattttccaagtttcattcccatgccgaatgatatcttgtcttgaatcttggggtttccttcg

SEQ ID NO: 255 - DNA, 259 bp, Aspergillus oryzae
ttccaacttctcgcaaaatagttctgttgtgctctttctccccttcccaccttgcgcatctacgtggaatcatttcctcttgttccacgtagcttgatctatcctgcaatccaggctcaggttgccccttgttggaggaatcatctgtgaagagaacatataacccttaaccttctgtacccggagtttctactcttataccgagtcccagatcagatagcgtaggtcggccaccacaggtattaaactcttatcacac

SEQ ID NO: 256 - DNA, 657 bp, Aspergillus oryzae
tcggcacgaggtgaacgtgtcatggcttaagaagaacgaactggaaatcaagcgacacttgcggagattcgggacaatatccggaacaactggacaaccacgggtcaggagctgggccgagaattacggcagctctggcagaatagccggcctggcagcccggcaccgagcgcgaggaacagtgtagacatgggcagtacacgaggaaacgttgtcagccctaccactggtgccatgaaaacccatctgtcacgggtggaatcagtgggtcggtctgaaagccccattggaaacgggcggaatgaagactttgcaaccgggtacagcttgggattgattggaggtgtaagagcctggatgcgcaccgtcggtcactcttggaaagccgcgccccttccccgacaagcgaggaggagcatgagtctgagcaggaacgcagcaacggccacattgaaccattcaaatcgcccgccaatgctgcgacaaattagggcagagggtcatgcatggttcagccctatcaagtcgtgatcctcctcttctgtctgtctttctttcaggcgaccgcttatcatgtctcaccgtggacatgcaagtkaggtcaaagaaagcgagaacaaaatgatgatgatgatgatgatgaggaaggagaagaag

SEQ ID NO: 257 - DNA, 860 bp, Aspergillus oryzae
  modified_base (252)..(252): n is a, c, g, or t
cacgaggccagcaaagcgtggcaatgcgttcctaatcttccgcattgccacccatgccggctttgctgactatcaagcgcacccgatgatgcgtcgcattaccaaccttgttccacaccggccttccaccgcccggtcggctaaggaaggctggtgggacctcctgacgggcaattctgccccaacgccacggacctgccttcttacgaagagctgtacccgcagcaggatgaacagggtggcgaagatgtnacccgtatgaaaaaatcgagcatgttacaagcggctacagatgcagtattggatcaacattttgaggcacaggccagtkcgcaaccagcacatctcgcacagtcactgccaagcaggagaacgaggatcttaaggatatccgtattggaaaaagggtgatctctcgcgagcagcaaaagcatctccgtgaacagcaagcacagaggatgaagggtcttggtagtkatcgcaatctgtactttatttggattcctcttctggttctggttatctgtgcatgggctcgaagctatgttcccggcatttggcaaggattctcgagcggtgttgagtttgtkaagacccgctatgcgcasgcgcttttggatcttggggcttagaaactcattttccctctytttttacctttatttccccctatttcccccatacttccctcccttccccttaattttcctttttgcggtctgttatttcaagctcgggcgttatgtyctctaggcgggtgacamcatcggtttttcttatattgttgtttggttcgctgtytcgacataatgatgggatacgattaggtgttttgcactgtgagcmttgttcatttgaaa

SEQ ID NO: 258 - DNA, 366 bp, Aspergillus oryzae
  modified_base (21)..(22): n is a, c, g, or t
  modified_base (32)..(32): n is a, c, g, or t
  modified_base (53)..(53): n is a, c, g, or t
  modified_base (59)..(59): n is a, c, g, or t
  modified_base (63)..(63): n is a, c, g, or t
  modified_base (71)..(72): n is a, c, g, or t
  modified_base (80)..(80): n is a, c, g, or t
  modified_base (213)..(213): n is a, c, g, or t
  modified_base (265)..(265): n is a, c, g, or t
  modified_base (296)..(296): n is a, c, g, or t
  modified_base (334)..(334): n is a, c, g, or t
  modified_base (352)..(353): n is a, c, g, or t
ccggtcccctcgcttgtctcnnttcggccgtnggcggtggatttgtcccaganattagngtgnacttgcgnnctttgacngttcaagaatctagtcgagattccgatttccctgtcgagtagcacccgcaattgccccagaaaataacatcttcctgcggctgtccgacgaggcttacatcgtgtctcagtccgtctgtsatttctgaaccgncctgtggagattgcagtgagcatcacgccccggagtccggcaggaaggtcgngaaattttagaagcccagtcctctgctaggngtgatactgtccttcgattgtttatttttcgggattgnaactatatcagagcccgnngttacccctgcct

SEQ ID NO: 259 - DNA, 215 bp, Aspergillus oryzae
  modified_base (7)..(7): n is a, c, g, or t
  modified_base (56)..(56): n is a, c, g, or t
  modified_base (103)..(103): n is a, c, g, or t
  modified_base (178)..(178): n is a, c, g, or t
  modified_base (190)..(190): n is a, c, g, or t
  modified_base (194)..(194): n is a, c, g, or t
gtgwttngaaataaggggggggacgggccgrccccckggggttgatagctgtacgnttcggcgkgcgagccgtcgatgtgattacgaggcttgtgagcgcggncgtggcatcggaagctttcactagatatgtgaaaatatggcgccccatatcccgatggtagtctttcctcctggnaccacgatgggnaganatccggaagaccaaaccggtg

SEQ ID NO: 260 - DNA, 215 bp, Aspergillus oryzae
  modified_base (6)..(6): n is a, c, g, or t
  modified_base (83)..(83): n is a, c, g, or t
  modified_base (156)..(156): n is a, c, g, or t
  modified_base (212)..(212): n is a, c, g, or t
acgganctagccagagaggcggttgggacgggccgdcaccccttcgccggtatcgataagcttgatatcgaattcggcacvrngggttgtccttctagtactagacgcaatggctgagtatcaactttcagttcgattgggttattcctctaaggnatccgctgctctctacgaagcagaacactggtccgtattgggcacaaagtccgggncaa

SEQ ID NO: 261 - DNA, 495 bp, Aspergillus oryzae
  modified_base (195)..(195): n is a, c, g, or t
  modified_base (208)..(208): n is a, c, g, or t
  modified_base (234)..(234): n is a, c, g, or t
  modified_base (243)..(243): n is a, c, g, or t
  modified_base (294)..(294): n is a, c, g, or t
  modified_base (358)..(358): n is a, c, g, or t
  modified_base (390)..(390): n is a, c, g, or t
  modified_base (393)..(393): n is a, c, g, or t
ggtgggaaaccagaagagggactcgagagacaagagtcttacaatctactacttattatcattagaatcaccatcaacaacccaatatccctatactaaccaactcattttctcctcacgcaacaactccacacgaccttttacccctcacaaaacgctccgctaaaccaccaacacaaacctccacacacacanaaataaccccccncaaatacatttaaaaatggccaccgncgcgcgcgnctctgcaatccgtgaagcaaagctttacgtccgcgaaatcgttcgcaacgnctggactttccatccctctaccgacgcgggcgcaccagcttccgcaacccccacgccgcctgancaggaagtcacagcatggcgactgcgcacatncgncagctccgcgtcggagctggagccgctttcttcgcctacggatcgccagtccgcctagcgggtatgactctgcgcagattgagagtccgattttgttcgccg

SEQ ID NO: 262 - DNA, 681 bp, Aspergillus oryzae
  modified_base (68)..(68): n is a, c, g, or t
  modified_base (73)..(73): n is a, c, g, or t
  modified_base (77)..(77): n is a, c, g, or t
  modified_base (82)..(82): n is a, c, g, or t
  modified_base (94)..(94): n is a, c, g, or t
  modified_base (214)..(214): n is a, c, g, or t
  modified_base (357)..(357): n is a, c, g, or t
  modified_base (366)..(366): n is a, c, g, or t
gtgctttaaccttcttcttcccaattctttctttctttattttttaccctttcttcgtccaatatatngatcngctnggcangggttatctccngtaccctttttacgtccgtgctacttccatcctatacctcaccgactatcatataacacccccatccgctccccatctactgttcaagtaccacgcaagggtcttatatatctattgtangtgtatgtatatgtatggctcattagaggtaaacgtccattatggccctgcgtacttccgccgataacgcagaggacgtggccgctggcttccgtgaatttcgtgagcatctccccgggcatgaagcggaaatcacgggcctnattgcgganctttttgccatcagtcagctttgaagaggttggataacctgaccaacgatcgtcgtcatcagcataacctggccatcgtgcaaccggacctagaattagtgcgtactagtttgaagatcacactcgaggatatcgtcgatttctttggcgatctcgaggtgcgcagaggctctgctcgagatgtctatcgtcgaacctggattgaactatgtgagtbcttccgggacgaggggwaggactcacccccacgcgattagccaggtacaagahgtatttgaatgaattggaggatcatatgaccgacaagktccctga

SEQ ID NO: 263 - DNA, 873 bp, Aspergillus oryzae
  modified_base (553)..(553): n is a, c, g, or t
agaggcttatgawacggcatatgcggccgttgcgcaaaaggattgagaaactagtgagagagcaaagactggatgcgacaggagttaatcctatcgaggattattccgtaaacaatgtcggtttctgtccgcgaagatgacgggactgttgacaacaagtcgagttccgagcagtacagcacagcgcacagtcagagataagacggcttcatgtgccagcgatagatccgtccttcaggaagctgccgatagagtcgacgccatgacctagcgtgcgaatcggggaagcacagctggccgaacggactgagaaacggtgggcggagttgatatcacgtgagtatctgtcgggatttcttttgcggtcttgatcattggttctctccaactcgacgctcaattcattctgctcgaggttctcgcaggcttacttcacaatggccacctcgctgtcaaaggggcccgtctttacggctgtccgctccaataacgcccttttccaactctactcatgccaatgccggttcttttcgcagtcgtcccaacgcagtcncatgcggggaatacccgaaaacattgccatcaaacaaccagctcaaccaagtatggcgacgagggggatgggtctatcaaggtctgaattgcctcaggatattgggttactgccaggcacatacgttcgcccgctctggagggatatgccttcgatctttcaacaaccgcagaagcgtctgcaattagagtggctttggttgaagtcgggattccagaatttcttgggtcttgttgcctactgcaaatggttcaattcaggtttaccactccgcctgaaggagcgtcggcaggctgctcgtgagctccatcagcgcatgt

SEQ ID NO: 264 - DNA, 1005 bp, Aspergillus oryzae
ggggcacttcccctaccgtttgaataacacccaatagaaatttgttcaagaaccctgtyatttctcgacaatgcctttggtcgcgcaaaaccccttgccaagggccctccttggtcttatgacgtttggccccgatgagtctaagggcgctcggatcacgtctctcgaagaattcaacaagtgcctggactatttccaacagcagggattcaatgaaatcgacacggctaggatttacgtcggaggggcgcaggaggcctttacagctcaggcgaaatggaaagagcgtgggttaactctggcaacgaaatggtatcctcataacccgggcgaacacaaacccagtgttctccgtgagaagcttgagctttccctgaaggagctgggaacgaaccaggtcgatatattctatcttcatgctcctgatcggtcagttccttttgctgagactcttgaggaagttaacaagctacataaagagggaaagtttgttcaactgggtctgagtwattacacggcatttgaggtcgcagaaatcgttactctttgtgctgagagaggctgggtgcgaccgacaatatatcaagcgatgtataacgccattacacgttcgattgagaccgagctagttcccgcctgcaaacgttatggcatttatatcgtagtctataacccccttgccggcggtatcttatctggtaagtataagacaaaagacatccctgacgagggaaggtacagcgacaaatcgatcagtggcgccctgtaccgcaaacgctattttagggatgcaacattcgatgcgctgcgagttattkagcctgttgtygagaagcatgggctgacacttcccgagaccgcgattygctggattyaccatcactcggctctcaatatgacagaaaatggccgcsacggaattatcattggcgttaccgcttcgcgcactgggaaagtaacctcaaagacgttcaaaaggccccctgccttaagaagttgttgaag

SEQ ID NO: 265 - DNA, 735 bp, Aspergillus oryzae
  modified_base (511)..(511): n is a, c, g, or t
gggaagagtatggtgggcaatggctttccagaatagtcatttctccttagcttacgaccgaccgtccatcactatggtaagccagccggaaattccctatgacaggaaatcaatgcccggccatcgctcctacttcgaaagcctctgccgtattatttctgtggtgctggagatgctgcggggacttatgttgtcgcaccattctcatctgcggtaccatgaaatccgcgagtataaacagcgaatagagcgcattcttgcagatactacccctcatttgcgttatcgggaacgctgcgtcacattggctgaacatattgagcggacggagttgcggctacactcatcttactatatctcagttatgtgtcgagtatccttggacccagacgcaccgctggatgaccagcgacgggcggtggtccgagaggactgtataaccaatctcatgaacacgattgaagctttcattgagctgcattcacttcattcccattgctcgcgtastggngtcagtctccagcggaccatcgcatccgcgttcctgctggttgccaacaacaacgaccatattcacccacggacgtgggagttgactgagaaattagaggccgtcatcgccgagcatgtgactggagatggaaatgtaaaccacaacacccggacagattcggccaggcatttggcatcctctctccgcgctctccgggaagtgagttctgcgttctattctag

SEQ ID NO: 266 - DNA, 588 bp, Aspergillus oryzae
  modified_base (35)..(35): n is a, c, g, or t
  modified_base (42)..(42): n is a, c, g, or t
  modified_base (44)..(44): n is a, c, g, or t
  modified_base (361)..(361): n is a, c, g, or t
gctctcttctctatcttcttttgattctatacccngattcananaccttatttatcattagacgaaccagaagcaaaaataataaggaataaaacccaccgcccaaaatgtcgtctatgcgaaatgccgtccaaagacggaatcacaaggagcgaggccaggtcgggggccgtgagaaatggggtcttctcgagaagcacaaggactactccctccgagcaaaagactacaaccagaagaaagccaagctcaagcgtctggaagaaaaagcccgcgaccgcaaccccgatgaattcgccttcgggatgatgtcttcgcacacgcagaaggcaggcaagcacggcacggcggcgcgccagtnggcggcgggactcagtcacgatgcgatcaagttgctgaagacgcaggatgctgggttacttgcggacgactggggagcgaattcggcggcagcatggataagctggagcaggagattcagttgcaggatggcatggtgcagartttggtggggaagaggccgaagaagaagaaggctgctgtgagggatgaggatgacgatgggtttgactttgatttcgatgaaga

SEQ ID NO: 267 - DNA, 221 bp, Aspergillus oryzae
  modified_base (65)..(65): n is a, c, g, or t
gccgagggtcaccwgaataaccccttgtcgatcagtacatagaccctaattcgggcgcctgtgtnaatatgtcatcattcttacctgtgaataatatttcgtcgccgcaagaccgtgtgatggaggaggcgacgccacccaccacacctcgaccccatctaactaacgtaccggaggcgcaagacgccgcgaaaatggtggatatggaaaaggacggcagt

SEQ ID NO: 268 - DNA, 482 bp, Aspergillus oryzae
tcggcacgaggggagtacataaccgctatcgccggatatttgggtttatttttatctttgatccatatacacacttccgcctcattctatacttatacccgcggtcgacgacttcttcctttggcatccctttctcataccagcgctgttggtgctaataccccgagtgattttcctcctcggctgcagcttgacatatataatttaatgccgcatagtggtactacaggtcattagtactcccaaaattgttcatttgcacgtgcttaccgacaaaacactcgatccaaagaaagaataaaaaaccttgcaaagatactggaaaccaaaaaaaaaagaaacaaaaaaattcctaaaaaaagagattccgagaaaaaagtcccaggaaagcttatdgctgattatacggaccgaagaattttggagaatatttgtttaawtyctgaatgggctggttgcaatattaatcgctcagatcttgt

SEQ ID NO: 269 - DNA, 798 bp, Aspergillus oryzae
attcggcacgagggtctcaggttccctatcatcatagattatagtgttcaaactagactctgagggacatgtgggtacaagacatcattctttctgaggttacctttaacttccattagccctagttcaagtcacggttctagtggggatatctcccaccaatcaccgcgcgataccagcattctgggaattaccgaggctttgcctcaacttggttagccttggcggtgaaactatactgtcgccatataccgcctacatatcttcagggctgagacctaagcaccgcctaccgggtaaggattactgccggatttccttgttccggcagggctggatacatcatgcgtctgtttcacctcaatcctatctgtttagagccttttctcggtctataaatcattgagccaccaagtccaactactgcctgtccttatcccaggtttattcactcgttatccctcacaatcgacccaattgaccccataaccacttcctcccgccgcgcatcaccctcctaccaagcccaacgtgacgacgaccacccatgcgaacccacgacgaattcctcgccgaccaagatgagcccgaccagcccaccaaaagaaacaaggttacccatcccgcgaaccgcatctgctatgactggatggtcgtatctggaaactgtcactatgctagggaccgcgccgtattcacgacctaccgctccgtcgacctgcgcctgaaaaacaacatcttcaatcccaccgacgagctacacgtcgcgggctttggcaacgttcatctcaccgtgtg

SEQ ID NO: 270 - DNA, 883 bp, Aspergillus oryzae
cacgmggattagctttagatcgcgatatcgcctcgagtcacacgatccacttgggattctgtgcggccccatcgacgtggtggtgggttcttgatcgttcctgtccctagtccgccgaatccaattacagcacgggagtgtcatacgaccggagaaagcacacgacccagatcttataaagggagatctttgtatatctagaaatggcctccagcttcactgtgcgccaaattccggccgtgctcgccagacggcaaccacgcgtactcggtactacaagacgcctggcatcttcttctgccgttcagacccagaaccccgcctacccgctgtacccatccgttatccagctccttcacgagaagggcattccagattcggaagtttcaaagatcccagcgtctggtcccaagggccgtcttctcaagggcgacgtcctcgcctacctcggctccatcccggctgattatcccgccacccagcaagcccggtttgataagcttgcccacctcgacctgagcaacatcaagatcgccgcaccgcccaagcccgctgagccacagccagtggccgaggagccagtcgctagacctccaccaactacctccgtagccgtctcgatctccctggctactgtcctgtccgtccagaagaagatccaagagactttgggtgttaacgtacctcttgcgacattcctcgcccgtgctaccgacctggccaacgacgaccttccccgttcgtctcgcgagaagcagtccgccgacgagctgttcgatgaggttctcggcgcaagcccatccagacatcccggggcgattacgttcctgaattgsacgtagttgagggcgcctccgccgttcagccggccaagcctgttaag

SEQ ID NO: 271 - DNA, 394 bp, Aspergillus oryzae
  modified_base (30)..(30): n is a, c, g, or t
  modified_base (52)..(52): n is a, c, g, or t
  modified_base (82)..(82): n is a, c, g, or t
  modified_base (137)..(137): n is a, c, g, or t
  modified_base (260)..(260): n is a, c, g, or t
ggcttcggcgggtcaactcggcgacattgntgccgctatggaggctagccgnattcaacaccttgcacatgtcaaccgtcgncttttcactgcaaccccacctgtggccccagagttagaagagcagagaaggcgangtgtgctgcaagcagctgccgtgtcaatggcgcgggacatgtacagcctcacagaagctaccgagccagagcaactttatccatccatccctggtacccaggcaaaccatgggcgtgtgcgtnccaaacgatcagttagtcgaccagaagcaggggccattcaacgggcaagtgaatcttcaggagaccgctcagaagcttgctgcagagaaactggccagcatgcaggatgacactgcagtatatcgggaatatta

SEQ ID NO: 272 - DNA, 795 bp, Aspergillus oryzae
ggttgagttcgggcaagtcacctacgcagagtcaaaaaacggggatcacttccatcgctggctcgcagacgggatccgcctatgaatacagtgctcctacttctgcgggcagcatcgcctcccccaacggctatggtacatttccgcagaacttctcctttcagtacgcagccaccgccaaatgcgccaacatatccggttgcgtatgacgcccgaccctacggtactacatggaagtcgggtgtgcccgaaactgcgcgtgttgaggaaatgaggaatggacttgcgggtcgtgctattgcgggacagatcccgggtgattctgtcaaacggcatttggacgtgtatgatgtggagacatcgctcaatgagattgccgagatgagcacacgcacattggacttttcacggcactatgccacaagagcgcaccagacccagcgttctgggcccgttatagggtccctgccctctttacaggaagtggaggagatgcttagtgtccagcgccggaaccaggatgccttactacgtatacgagccgcggttgtgagccaagagcacgcattggcggasaaatggcccaaagaaaagctttcaaggccggtggggtccgtgaggatgaccacatggcaatgtaccaagacgaatacaagggcagtggcggctttgcsggaccagattcgaagaagcgacgaggcaaagcagcccctcctggtcgttgccacagttgtaaccgagctgagacacccgaatggcgccgcggtccagamggtgctcggactctatgcaccs

SEQ ID NO: 273 - DNA, 874 bp, Aspergillus oryzae
  modified_base (572)..(572): n is a, c, g, or t
tcggcacgrgggaagatgcgtgacaacstgcttgtgctgatcaggaatatgccaacattcttgatgatgccgaccctggtctgtcatggaacccaactttcgaccccaaggataaggctctccctatgctcaccagcctgacctcgatgtctcctttcagcaacaagcctcgcgtastattttgcgtgasagggtgtgaacagccaggctgagatggctttcgctttcaacatggctggcttctccgccgtcgatgtccacatgaccgacatcatctctggacgtgtgtctctcgccagctttgttggcatggctgcctgcggtggtttctcttacggtgacgtgcttggtgccggtcaaggttgggccaagtctgtcctgctgcacgagaacactcgttccgaattccagagcttcttcgagcgccctgacaccttcgctttgggtgtctgcaacggttgtcaattcctgtctcgtctgaaggagttgatccccggcgcccaaaactggcccagcttcgagcgcaacgccagcgagcagtatgaaggccgtgtctgcatggttcgtgtgtnggaccctgatccctccagacccagcgtcttcttccacggcatggacggcacctcgctgcctatcgccgtcgcccacggsaggggtcgtgcctccttctccccctcttccaatgtcaccgcccaatccttcgttcaggaaggtctcgctcccgtccagtacgttgacaacgccggtctcaagccaaccatgaaatacccattcaacccgaacggcagttccgagggtatcgccggtatccgcaacgccaacggccgtktcctggccatcatgcctcaccccggaggcgtaccgtcatgggcgg

SEQ ID NO: 274 - DNA, 780 bp, Aspergillus oryzae
  modified_base (548)..(548): n is a, c, g, or t
tcggcacgaggcagagaagctgcatctcacgttccgtgaatggagagacgtcgccaaccgggtgaggaagcgttttccccaagcatccaaccaccttcgccgattagataggctcttcgaacagtacgataaggatcattccggcactctcgagtttggcgaactctctgagcttctgcaccaaatcgacaataaacttacatcgctgcctgccactgcccagcgtgccaaccagcaaggcgagtatttaggtcgcaaacttaccaagattgccgccgcgcttcccggcatgagagccaacgaaatcgatcacggggacctcgatgaagccgtctataaggcgttcaagtacaagcaccttggcagcctggcctacatcagtaacgccgccgtcttcgatttcggaggaatgaactttagtggtggcgttctggccatgtatttgtggcgtagtgtgtactttgctgagagtgtcagcctgcgcacccgttgtatgcttgctatggactgggctaagagagccctgtttggaagagacctcatgagtntctgattctttagctacagcaaactgccctagcggcggtacctactataaactacatggtggctttttttgtttcttaaaatttgtttaggatatacctgttctctgttatctctttacgtwtccaatagataccatttgtgatggtcactggtattggctgaatcctctttgtatgctttgttctatacttcaagttcttatatatagcactattaagatatatagcctcg

SEQ ID NO: 275 - DNA, 922 bp, Aspergillus oryzae
  modified_base (38)..(38): n is a, c, g, or t
  modified_base (813)..(813): n is a, c, g, or t
aggcatagttcatgtccaactcttatttgtgcacagtnatcattttagtgtgaagctctattggatatccaaggccatcgcagatagatgatttgcatgaaacactgcagaaccaacaggggctgaggtttagccgccagcactaatgggcgggctttctatttttttctggttggcaaaaccagggttatgtcggcggtaacatttttcagagagcgctcaggcggcgtacagaacacgcattattggctttcggttgccgtcgatatctggtcttacgcgctggctgattttgggtacctatacttaacccattagccaattatagcaccgtcgttctatcagtggctttgcatagttgcccccctttggcaccgtaccttacgccagatgaamcaggggcatagaatatattgatataaaaaagcctgccactcctctgcgagcaactttggttaaagattcacaaatctcctcttttatcctattgcaattaacttcagccaatcctcgcatatcaacccattaccaccatgtctagagctttctctactgctcggcagasccttgcaagatggttagggtacaacaaggaattactgcccccagttttcaaggaggctgctgagcgttatgcagagaacggtgctgtagcgaaggtcggcaaaattgactctatcgagatttacatcgtaacgatggcagcagccgggtcaccagttcacttcaaccgccaacgataaagcgctgattatgagcgcccggaatcgccccggctgacggtactcggcctcgaacccaccacatatatgncgatggtacggtacatcaagaagggcgaaaagcgcgaatactcggacatctccgggatgaggcttaagcacgcccttacaccagccgcaatcaggcgggggtgaattta

SEQ ID NO: 276 - DNA, 790 bp, Aspergillus oryzae
  modified_base (524)..(524): n is a, c, g, or t
aattcggcacgcaggggcgtatggtgatggcccctatggtggaagtccacctgtgattcgagacgttcaggcgcggcgcaatactcgcatcgagaatcctgctgtcttcccaagacaaggaaatgctggaatcgcccaaaacttctgagaaaagccctgaatacgccctaattttactgtacatttgttggcgttttcaaaaccggtagatttgatcaggagaagcagtgtctcctgtaaatttaacggtggccgttgagatgtagaggaatcgcaagtgtctgcaacctgtgcatcacttcatgatgacccgcatgcctactcttgatgaagtctcggctatactggaagacttctagtaagatcttatttcttatcttatcatatctattacttcgtctatgtttcgcatgccaatggcggtcgtctatcgttttctcccactttgttttccttttgtggctcttgtgatatctttgggtttggtggctcctctgtttcattcgaactgttcttgtgccgtnagtttcccattgttaccagccatatcccgagtcttcagggcgggctttcttttctctttgcctctctttgctatgttgtgtttctattcttgtatctgtatatttatgacgctcggaagtgccagtcatgtgtgtcaaaccgtgcctgctatctctttacgtggctggcatgggtcaaggtcacgtactacctttcttttctctgtgatatcttctaccacttatccttctgctccactatccactgattgatccgaagtttatct

SEQ ID NO: 277 - DNA, 545 bp, Aspergillus oryzae
sagggtttatctataaacttggactttcattgctaatcatttgattgatttgatgtttttgccattggcttcggcggcttacgtgtcagggaactcgatggagatggccattatgatccgggttgattgatgtgctatgactaccaggcaaaccaagagtgatttagccatgtactctgcatagacaagcttaagttctggtgactttatcccacgatgccccctggtacaatcactcagagaaagttcgaacgatatgcacgcttcgagaatcgaggtttaaggaagtccattttctccattcgcaggacaagaatcactaaaccagcggcacgctctcactttcccaacttccccggtcatccaactcgtcgtatawcgttttcttattgagatccagcgacggggtctgtatggwartggagggctacgaaccgatggaaargatcamtttwgtcaacaatccgagcgtgcgaaccgatttgacacaaacgcatccactgggttcaccctcttctatatattttgtatttcgtgacggctgc

SEQ ID NO: 278 - DNA, 621 bp, Aspergillus oryzae
attcggcacgaggcttgggtaacgatgaccaaggcttttgggggattgccgccatgacagctgccgagatcggcttccccgacgtsgacgacggatactcctggctgtccctcgcacagggggttttcaacacacaagtggctcggtgggatagcagcaattgtggtggtggcctgcgttggcagatcttcccgtaccaagctggctacgccatgaagaattcaatttcgaacggtttattgttccagctggcagcgcgtctcgctcggtataccaacaaccagacctataccgagtgggcggaaaaggtttgggattggagtgcgtgctcgccactgctaaataatcagacgtggaatgttgccgactccaccgatatagaaggtgggtgtaaatcccaggggaacaaccaatggtcgtacaattatggcacatacttaattggtgcggcgtacatgtataacatgaccgagaaggagacttggaagacagctgttgacggccttctgggggttacactgaacacatttttcccgcaagactttaattacatcatgtccgaggktctctgtgagccaaacgaggtttgcaatgacaatgaaatcctgttcaagggtcttg

SEQ ID NO: 279 - DNA, 519 bp, Aspergillus oryzae
  modified_base (21)..(21): n is a, c, g, or t
  modified_base (32)..(33): n is a, c, g, or t
  modified_base (343)..(343): n is a, c, g, or t
  modified_base (347)..(347): n is a, c, g, or t
  modified_base (391)..(391): n is a, c, g, or t
  modified_base (393)..(393): n is a, c, g, or t
  modified_base (483)..(483): n is a, c, g, or t
tatcgataagcttgatatcgnattcggcacgnngcttaaaaagtgaggggcgacatggccactacagaacccaaccggcgacgtatattcgcgtccgtcttcccacccgttcagctcgacggtccgaagcctaaaaccaagtcccgagacccggagcaagcgacgtgggatcgggcatggctggcagcgacgaagttcttatcgattccggaccaggggtttcgcggtattgagaattatgtgcccaaggcgccggggagggaggtgaatgatgcgttggcgtatttggcggccgataagggggttatggatcgagaggagtggagtatatttgagtggtatngganttagatgcggaggcacttttataggaattttaaggttgcgcttntnaagcttctggaccagccgaatgggtttacggaaaatcgtttatttgcttgcagtttgatacggaagatttactttgcgcctttgatggantatctcctcccgtttgctgggcgctgtggagcagga

SEQ ID NO: 280 - DNA, 571 bp, Aspergillus oryzae
  modified_base (135)..(135): n is a, c, g, or t
  modified_base (422)..(422): n is a, c, g, or t
  modified_base (467)..(467): n is a, c, g, or t
  modified_base (473)..(473): n is a, c, g, or t
  modified_base (483)..(483): n is a, c, g, or t
  modified_base (563)..(563): n is a, c, g, or t
caaataccggtctcgctggttcatacaatcaagggactatctcctttgtttacagtcttagcataccgcgtgttctttcgcatccgatatgccagtgctacatacctatctcttgtccccttgactttaggtgtnatgcttgcttgttccactgggttttccaccaacttctttggaataatttgcgcattggttgcggctttggtcttcgtttcccaaaacatcttctccaagaagctgttcaacgaaacagcgcgcggagaatcggagacacaagtgtcagcccaacggaaattggacaagttaaatttactttgctattgctctggattggccttcatactaacgctaccaatctgggtactctgcgagggttacccattactttcaaatgtattgcgggatggatccatctcgctgtnaggcaaggagaactccttagatcatggtgctctcttattggagtntgtgtncaacggagtntcccattttgcacaaaacatcctggcattcgttctgctatccatgatatccccagtttcttactcagtggcatctttggngaagagag

SEQ ID NO: 281 - DNA, 543 bp, Aspergillus oryzae
  modified_base (20)..(20): n is a, c, g, or t
  modified_base (29)..(29): n is a, c, g, or t
  modified_base (51)..(51): n is a, c, g, or t
  modified_base (68)..(68): n is a, c, g, or t
  modified_base (71)..(71): n is a, c, g, or t
  modified_base (75)..(75): n is a, c, g, or t
  modified_base (84)..(86): n is a, c, g, or t
  modified_base (90)..(90): n is a, c, g, or t
  modified_base (107)..(107): n is a, c, g, or t
  modified_base (110)..(111): n is a, c, g, or t
  modified_base (121)..(121): n is a, c, g, or t
  modified_base (133)..(133): n is a, c, g, or t
  modified_base (138)..(138): n is a, c, g, or t
  modified_base (148)..(148): n is a, c, g, or t
  modified_base (155)..(155): n is a, c, g, or t
  modified_base (159)..(159): n is a, c, g, or t
  modified_base (161)..(161): n is a, c, g, or t
  modified_base (170)..(170): n is a, c, g, or t
  modified_base (230)..(231): n is a, c, g, or t
  modified_base (242)..(242): n is a, c, g, or t
  modified_base (244)..(244): n is a, c, g, or t
  modified_base (247)..(247): n is a, c, g, or t
  modified_base (255)..(255): n is a, c, g, or t
  modified_base (264)..(264): n is a, c, g, or t
  modified_base (271)..(271): n is a, c, g, or t
  modified_base (276)..(276): n is a, c, g, or t
  modified_base (282)..(282): n is a, c, g, or t
  modified_base (289)..(289): n is a, c, g, or t
  modified_base (295)..(296): n is a, c, g, or t
  modified_base (307)..(307): n is a, c, g, or t
  modified_base (318)..(318): n is a, c, g, or t
  modified_base (323)..(323): n is a, c, g, or t
  modified_base (330)..(330): n is a, c, g, or t
  modified_base (354)..(354): n is a, c, g, or t
  modified_base (374)..(374): n is a, c, g, or t
  modified_base (377)..(377): n is a, c, g, or t
  modified_base (383)..(383): n is a, c, g, or t
  modified_base (395)..(395): n is a, c, g, or t
  modified_base (401)..(402): n is a, c, g, or t
  modified_base (405)..(405): n is a, c, g, or t
  modified_base (419)..(419): n is a, c, g, or t
  modified_base (421)..(421): n is a, c, g, or t
  modified_base (430)..(430): n is a, c, g, or t
tctctctacttrkgccgtgnggggcgacngtytgkacccaaggtttccctncgcaatgctagagkggnttnaggnctcccacannncaancaaggtaggckggcaanganntagcacaccntatagttcaarncagcnagkcaatcangtcckkntcgngnggtttatcnaatctcgttamgttttccctattmcttatgttatttacamgcccgcgcctgccckctccnngccgktgcctngnttnkgartccncaacacgtngtcgrkncckynctctantctaggnkgtgtnntttgtttttgnacgagcktccntgcancgatgtngacamcygcctcagcgcctgcgtnccctcckagctgygcgargngknttrgangggaacggatgngctgannttntccagacttcaccngntttcktcgntaacamgccacgacctccyyctccccgkyyctactggmtrcgcmccrttgtcacttgatcacgtgsgaractmrtmtgtccatcrcatrgckcccactgcgaakaacccctac

SEQ ID NO: 282 - DNA, 693 bp, Aspergillus oryzae
ggctcgtccggatcccagaccgaagcagctgcttccaccaagagagggtgagtctagtcgtggcgaggaagtcccctaagagacgacgcttgatcgctggacgacctccccaagatcgaaggaggcctagcctaccctcgtccgattctttgtcgagccgggacgaaagctcaaaagcgcgtattgatcaccttgaaccctcaaagtccggaccaccaccccttaaacgtgggcgtasagcgctagcccggagcgaggtcgtgccttggaacccgagcggcattctcgtgatactgttcagaagaaaagacgtgtcttgtccgaagacgggaccccgaacatcacggaatggaggcctcaaaaaggatcacacaacaggggatgccaagccccgccggaaggatgatgaagatcaccatgcagagtccagaccagatccattacgtcaaacggacaacccatcccataaggcacctgaacggaagccggttaaggaggaacaggagabacatgatatcaacggcctcaacgatattcctatggacgactataccgaacgagctgaggcagaggcagaggctcgtcgacagaagggagcgcgaaaggctagacaagaacgcctggcagaggaagctcgtctcgctgccgaagccgaaaaagctcggttggacaaagaagaggaggaacgtgctg

SEQ ID NO: 283 - DNA, 788 bp, Aspergillus oryzae
gtttgagtgtctggaccaggattgacggtgggcgcaatatcaagatcaggtaagcttcattgttggattgtctgtttcggggctcgtcttgaaaccttctcgttctgttttctaatgcagcgcagggagacgatcaagcgtctactaggcttccccatcgacaccaacattgtctggaagarccatgacgacagcattgctcaacgctctgccattgaccaagctcgtcaggagaaggccaccggaaacaacggtcatcaccatcatcatcaccaccaccaccaccaccatcaccacaacaataacaacaacaacaacaacaacaaccaacatcacaatctaggtgcagatcgacgaagagttacggcgaatgatgactctacgggggataaaggaaaggatgtggcgtcgtgacatgattatctgagcctgatttatggtcctgtatagtaaagaaagcagaaaataattgggacgatttgggatcggggcattggggcgaatagtgcgtctattttggacttgggcttgatttcatttcccgtcattgttctattttacgccagakgctatgcaagtkcaagggaactttttaggggacgcctggtacgtgaagcgcaatcactgccaggtgatatacattcggactgaaatgtatctattttaagttatagtccttttgatcttagtgtgaagcgcacagtgtaagagtrgtatacctaaggatctggaatccaaggctcgaaccgtttgtagtgtttgtcgataccttgttacaattattggtt

SEQ ID NO: 284 - DNA, 967 bp, Aspergillus oryzae
tcggcacgaggggggcacggtccctgtgcatgcatggaatcgagcaaccacctccgacagtgaaaagcctcctctgcaggwgcctgatttatcggtaaagaatggcaccccggcaacaacaacaacagaaggcaatatgttggtatcctgccagaattgcggcactacggtaactccactttggcgacgagacgagaatggtcacccaatctgtaatgcgtgtggtctctattataaacttcacggctgttatcggcctaccacgatgaagaagactatcattaaacgacggaaaagggttgtgccggcgctgcgcgagcattctccgacgggggccacgcagtcatcgaatgggtcttctgcctcgccggaagcgtctcctgctgcattggctcctcacgacgatcattatcgctattacagttcggagcccatggaccattacaagcatatgccgggtgatcgtatttcaccgcagccccaagacagtttggtttcgcgccgccgcctgttgatttcacgggtttcggctctgcgacagtttccctgccgcaccaccctcctccgccgaggctgttggaaccagaacgcatcaacgctcccagccattctcccgtctcgcaatttgctcgacgatccctctcgcctaatcctgcgaatcctaagaaacggactctcgcagagaccgcgtcatctgcagaggccgcctcgatccccacaacgttggaatcagggtcgaaccaactcccaccccatcatgtcagctgccaacccttccccaccgggtcggctcagctccatttcttccattctcaaccatcctaacacgcgggacgagtcacgcttggacccgtcgctcgctgcactgagtcgccagcagcaccaacattcgcaccaggctctggcacctccgcagcctcagttcttgcccggagtcaccgaactcgamagtatgcgagaagaacgc

SEQ ID NO: 285 - DNA, 907 bp, Aspergillus oryzae
  modified_base (456)..(456): n is a, c, g, or t
tttccctgtggcttcctgtttatgcaaggcttttcaaagtctcgtataaccttgcatatttacagtggacgtttccagttgttcactcgccgctcagtattgacaatgtcaaccactgctggatccctgcaaaagtttcgcccagtagtggtatcgggcccctctggtgctgggaaatcaactctactcaaacgactgtttgctgattatcccgatacctttgggttttctgtttcgcacaccaccagagctccacgaccgggtgagcagcatgggcgcgaatattatttcacaaccaaagcggacttcctggaccttgtgagcaaaaatgggttcattgaacatgcgcagtttggagggaaccactatggtaccagtgtccaggccgtgaaagatattgccaagaagggtaggatttgcatcctcgacattgagatggagggcgtgaagcaagtnaagcgtactgacctgaacgctcgctttatgtttctcgcgccgccgtcggttgaagagctagaacggagattgcgaggtagaggcactgagtccgaagagagcttgagtaaacgcttagcacaggccaaaaatgaactcgagtatgctaaggagcccggcgcacataacaagatagtcgtcaatgatgatttggaaaaagcctatactgagttgagggactggattgtcgacgatggtagattcggcgctgagcaataatcggccagtttacaggataaaatcgggtcttgtccaaggattgtcatgattgacgagatattgcagaactggcaacgttatggacggtgattgaccctattgtttataatgcattatccagcggcacctttgcgtkgtatcaactgtatttccctcatggagttatgataattaaggaatttagtacatgaga

SEQ ID NO: 286 - DNA, 527 bp, Aspergillus oryzae
atgagaagcaccgacgacttggagagaagctcgatcagatggcgcaacagaagaacattaaggctactagtattgctcaagcctacgtcatgcacaaggccccctatgtattcccagtcattggggtcgcaaggtggagcacctcaaggagaacattaaggctctcggcttggtactgagcgaggaggaaatccgtgaaatcgatgatgccgaaccatttgacgtcggattccccatgaatttcttatttgaaacgccgacacaaagctaccgtactaacatgacgagcaaggatatatggcagctgtcatgcaacactcggctagaaacagtgcccaagcaacagccgatcgaacctttctaaggtgcgaagtactttggttctgcctcaaaatgagcctagtggtggcggaatacttttgttggagagcgttgcaatatggatctgggctgttttgctgtatggttgatcaccttttcgggcgaggatgcctctttgatgagacgaattcagttcttttccccca

SEQ ID NO: 287 - DNA, 894 bp, Aspergillus oryzae
gctctactttcgctctctgtgtcagtgaccattcttttcactacccagtcgttcttttactttgcgaatagatttcgcatcccactctcgttacttgactagcgcagtctctctgaagagaaggaaacacaaaaatccccaatatcaaaaccaatatccatcgatatcaaagacattgactgtcatcgtacaatatcaacaagatgcatttcaacaacaagatctccgtcgctctgttggccgctctggctgctggttctgaggccagccatgcccgcaaccacaagctcttccatgcccggaacgtcaactcgactgtgtccacctcgtcggtgtttgtctatccaaccccaatcttgacccccagctcctccgtgcccgctggttcttcccctgttgcttcttcttcggctgcgggatcttcctccgtcgtcacctcgacctcggatgccagctcgtcggtcattacccaggccccccctctcggtaccggtgtccctggatcctctgacgctggtgatgacaactctggatcggccactgatatcaccatcacctataccctcggtactggtgcttctaagagtgttgtcacgactactatccacaagaccgctactaacaccgaaaccgtctacgctacccccgctgcgccttctgccggtagtgaggagcagaccactactcttcactccaccgctacttctaccgtcaccgtggtagaggttccctcttcttctgctgcctctggcaacgctggcaacggcggcagcgaggcttgcaccggacaggccaccgtcaccgttactgccactgtcactgaaaccgtcactggggcccctagcgctactgctaagcytggtgatgactacacaagccccatgaccaggcaca

SEQ ID NO: 288 - DNA, 729 bp, Aspergillus oryzae
caacgcgcagatatggcaagtgcgatgattacacggcgcaacagatgtatgttcgacatttgacgcacagatgaagcaaatctctccatcatcggcgtcgtctgcgggcgccgcagctgccttcttacccttgtcttctgccactgtagtcggcccttgagtcgattgtccactgggctccggcccggaatccttattaggggcgctgcggttctgcttatcgcgaccccctcctcctctgcggggcccactacccctagatcttgagccttttccgctgccttcagtcgactgctgcgagttctcaattcttgccgaagttggcctgctccccgtcctcgtccgcgacgaccaccacgctttggtccttgcgatccggagccttgtggcggctgagtgtcagacatggagggcggatataaaggtgggagttggcacgacggaaacaatttcaatagtgtacaggctcggaaatcagctcccagggattagaagagctcggcgctccttctgacactgcgcgacaaacactttccctgcggggataatgatcctagtgtggctggtggcagtkagggggacaaattgacaagcggcgggcgaaaatgttggctgtcggcgtgcttagtgagcagctttattaaatcactaaaaatccccattttatttatttaaccagctaattaactttccgcaatgactcccatcggcgtcatttcgactcacact

SEQ ID NO: 289 - DNA, 702 bp, Aspergillus oryzae
  modified_base (18)..(18): n is a, c, g, or t
  modified_base (166)..(166): n is a, c, g, or t
agattactcagcaccatngagtaccattcaaaatttgaagaatttcatacgtcatgggaaacaagctcgcttggtaactccccatgccgagccaaccaccaatgtttctcccatacatgccgagcatcaacgtcagccccaaggctcataccctcctgccgcagancctagatgccattgacagcaggcttggaaacggccaagctcaagcgcctcaaaagtcgtcggctgagactcagtcgaggcgagcccgtgatctagagatcgagcagattgtcgccgaggagcgaascaacgaaacaaaatgcctaagtacccaggactggagcgctggatcttgacggacaagatgggcgacggcgccttcagtaatgtctatcgtgccaaagattcgacgggagagcataacgaagtagcgattaaagtcgtccgcaagtttgaaatgaatagcaatcagcgcgccaacattctgaaagaagtccaaattatgcgccaaatagaccatcccaacattgtcaagctgatctcattttctgaatcacgccaatattactatatcattctggaactctgccctggcggcgaactgttccatcagatcgtacggttaacctacttcagcgaggatctaagtcggcatgttatcactcaggttgcaaaagcaattgagtatctgcacgagacctccggcgtcgtccaccc

SEQ ID NO: 290 - DNA, 800 bp, Aspergillus oryzae
  modified_base (800)..(800): n is a, c, g, or t
gctataaaaattataaagctttttgcaacattgacacccatagaaccacgattaacacgaaagcttatccggccattgatcaacataattcagacaacaactgccttgtcattgctctatgaatgtatcaacggcatagttcagggcggtatccttgatggtgaggaagtgctggaggaaaagaacgagattgcaagtctctgtctcggaaagctcagaggcatggtagtcacagagtccgatcccaatctaaaatatgttgctctccttgccttcaacagaattgtgatgtctcaccccgtcttggtgtcagctcatcaggatgtcatcatggattgtttagaggatccggacatttcaatccgactgcgagcccttgacctcgtgactcgaatggtaacaagcgatacactccagtcagtggtgaatcgacttgtcgatcaacttttcaatgcccgtcaagtcaccaaaagtactcttgcggccgggaagttgtgagacagggtatacgcactgacaatgggagaattcacattatcagaaggtccacatgctcagaagttaccgatcgccttgccagacgattatagtattgaagttgtacaccgaatcttagatgtctgctcttacaacaattattcggagctgcctgacttcgagtggtatgttgamgttctggtccagttagtcaagctgcttcctccaagtattgaagagcttcctacccactacacttcatatcgggacccgagcactacaaaaattgtgttgctttccgtatcgggtcagaaatacgcaan

SEQ ID NO: 291 - DNA, 862 bp, Aspergillus oryzae
  modified_base (13)..(13): n is a, c, g, or t
cgccggactctanttctccctttccctcattctcttcccccacacatccacatctctcttgcctttgaacaaactctgcacatttccctccgaatccacttacactcaagttcaacaccatggcggcagctattaaggaaaccgtatccaacctgctccatggtcattccgacaacactcctcgtcagccttcccctgaagagttccatcaactacaacagaagtataccgatgccgggcagggacatgtcttcaaattcgtcaatcaattaaaccaggtcgagaaggctcagctcttccatcagctgagcaacttcgaccctaaccggatcaatgaactggccgacaaggtcctgaaccccgccaaaactcaggatggtcccgttaccctcgaacccctccctgaagtggctactgcctctataatggactccgacccgaagacattcagcggtggtacgatgaaggtctccaggcggtgtcggagaacaaggttgccgtggtcttgatggctggtggacagggtacccgcttgggaagctcagcacccaagggctgcttcgatattggtctacccagtcagaagtccctcttccagattcaggcagagcgtattgccaagctccagctcttggcacaaggaacttccggcaaggaagccattatcccttggtatgtcatgaccagcgggcctacccgcaagcccacggaggagttcttcgagcagcacaagtatttttggactggacaagaagaacgtcgtcatcttcgaacagggtgtcctgccctgcatttccaatgagggtaarattttgctggagaccaagtctaaggctgctgttgcccctgatgghaatggcgg

SEQ ID NO: 292 - DNA, 319 bp, Aspergillus oryzae
  modified_base (151)..(151): n is a, c, g, or t
  modified_base (182)..(182): n is a, c, g, or t
  modified_base (189)..(189): n is a, c, g, or t
  modified_base (195)..(195): n is a, c, g, or t
  modified_base (201)..(201): n is a, c, g, or t
  modified_base (214)..(214): n is a, c, g, or t
  modified_base (227)..(227): n is a, c, g, or t
  modified_base (239)..(239): n is a, c, g, or t
  modified_base (251)..(251): n is a, c, g, or t
  modified_base (259)..(259): n is a, c, g, or t
  modified_base (263)..(263): n is a, c, g, or t
  modified_base (274)..(274): n is a, c, g, or t
  modified_base (289)..(289): n is a, c, g, or t
  modified_base (294)..(294): n is a, c, g, or t
cggcgtgtacagacattggagaaggagctgcgcgagacgattgacgactatgaaggtcatgaccaagggctaggtatcgaatttgagaaagaacggcgaggaaggtttgcaggaggcctcattggacgcggcttcggggatcggctggtgnagcaactgggaggacggcaatttaacgcaanagcggantcaccntggcantgggcatggcacntcaggcggtcaantggggacgagantgggaaccacsntatgaganccancactcaaccantgggtgctgaagaantgaanttcacagaaggagtgaatgcggtga

SEQ ID NO: 293 - DNA, 866 bp, Aspergillus oryzae
gctctcaaccaataattaaaggaatccccaatcggcgatttccaatccttttgggcatcaagcgtggactccattaaggttgaatagtaaggaatccccccaatcccctagattaaaaaggtctgggattgctgcccttaacgctcccaggtatccgaacctcccgttccttgacctcgcgtasaaccactaccaatcgcctgctaacccttcgcttcccacaaaccatcccctgaccgtttctaaccatcgccgattgaggctgtgcacgtcttgggacaagaagctggagccaattcggtcctggcaccaaattaccccatcgtcttagcttggtccgatcaacttccagccaccgctggtaccgccattgagagagggcaaaactcttttctggaatttaaaactccgcacggccctttattatctccttgtccactggtccatggttgtggctgctgtccccagtacaacccttcctagctctctagttttcttggcctctcactctctctggtcgagcttggagaagaacaaagtctaattcctggaagaaaattaagggataaattgctcttgagtcttgacacggttctacagcgaaaatcgtcagccgacaagccacagcataacgtcacctccacccggatacgttgctgctccattaagtgcgccaaatttcgaacggytcttcactgaatcccgtgccaaggtccaagaaactggtcgatatcttgcgactctcattctctcgagtaattgcgggttgcggtgccgaattgtcaccacaccaccactcaaatgtcgccgaaaaatttccgtacaagtttccgcagtcacacttgggggttcgagaagaagcatga

SEQ ID NO: 294 - DNA, 397 bp, Aspergillus oryzae
  modified_base (4)..(4): n is a, c, g, or t
  modified_base (45)..(45): n is a, c, g, or t
  modified_base (55)..(55): n is a, c, g, or t
  modified_base (60)..(60): n is a, c, g, or t
  modified_base (68)..(68): n is a, c, g, or t
  modified_base (71)..(71): n is a, c, g, or t
  modified_base (83)..(84): n is a, c, g, or t
  modified_base (88)..(88): n is a, c, g, or t
  modified_base (94)..(94): n is a, c, g, or t
  modified_base (96)..(96): n is a, c, g, or t
  modified_base (111)..(112): n is a, c, g, or t
  modified_base (121)..(121): n is a, c, g, or t
  modified_base (130)..(130): n is a, c, g, or t
  modified_base (133)..(133): n is a, c, g, or t
  modified_base (152)..(152): n is a, c, g, or t
  modified_base (157)..(157): n is a, c, g, or t
  modified_base (208)..(208): n is a, c, g, or t
  modified_base (210)..(210): n is a, c, g, or t
  modified_base (216)..(216): n is a, c, g, or t
  modified_base (248)..(248): n is a, c, g, or t
  modified_base (266)..(266): n is a, c, g, or t
  modified_base (279)..(279): n is a, c, g, or t
  modified_base (283)..(283): n is a, c, g, or t
  modified_base (334)..(334): n is a, c, g, or t
  modified_base (363)..(363): n is a, c, g, or t
  modified_base (367)..(367): n is a, c, g, or t
  modified_base (384)..(384): n is a, c, g, or t
tctntcttgttcgctgctgckgtttgtcctcttgcggttcttcgncttcgccctnctctntcctgctncyntccgtcggccgnntccntcgtgncngtcgccctccgggcnncgtgtctcnccgcgcgcntcntcggcgcgctcgtcttcgngtcgncttcggtgccgccctttgggyctcgtgcccgtctctgtgctcgccctgctncngccggncgtsgcctctktgccgggccttctgggsgtcncgctcttctccgtcgcgnttgggygggcggnsgcnctgccgccgtcgctgcggcctggcctcgtggggcktctstggtgttggttngtctatcctcttcctgtctggctcgccgngtcnccgcgcctcgcgctctnggtccctactcga

SEQ ID NO: 295 - DNA, 906 bp, Aspergillus oryzae
ggtgatatcactgttccccagattccttgtttgttggtcgagaactactcctcggacataccttcacggcattggccaccgttaactccagactgactttggcttccaaggggatcgcgtggagagaacggaatctcaacgccgtgacccaccagggcttgtgagaattttctcccaccgcggactttctcaacatcttttgcgcttatctcccagccccggtgttcggcggatgcgagaatagtcttataccgtctgccacggcctttgaaattcttctatctcatcactcttgaccgtctctgcgttcaacaggagaaggtaacttggctgtcagtatacttgactgtcttaatactctcctacgctcctcgccccgcaatagtcgcgtcaagatgttgatggaaggcgtccctccaccgtccgacccaatcgaggacaagcatggccaccccatgtatgcggacgatgatttgaaggcggaactggataacacccctgtcgatgacccatttggcaatgaggcaactgcggaggtcaagtacaagamgctgaagtggtggtaagtkgcggaccccctcgtatgcattggacaacggtgacagactaacgtctcaggcaatgtggaatgtgtatgtttagccgtcgaacgagacccatcccttcgatcgcgtastaacaatcctagtcatgattgccgaatcagtctcccttggagtcttgtcccttcctgctactcttgacacgctgggctttgttccgtgagttctcccacaatatcgcgtccacaamctggttcttacatttcgtcgacagagcgctcatcctgattgtcggtcttggtattctcgctctttacactggatatgtcattggccaattccgcgagcggcatccgcacattca

SEQ ID NO: 296 - DNA, 849 bp, Aspergillus oryzae
  modified_base (130)..(130): n is a, c, g, or t
gatcctcgaagatactccacaggcgcacccgttgcgccactatcgaacacaatggccgtcgatgcgatggaaatagattcagagcgggtcccagctgccgtaccatccccagaaaaagagcgcaagcgcnaaacacaagaacaaggacgtatcatcctcatcgccgtcaaagaagaagcgcaagatgaatcgagccaattaaccgacgaaaccgcggatcatgacattgaaaagaagaaaaagagcaagaagtccaaggataagacgaagagcaaacaggccgacacagaaggagcagcaattccagactcgccatatgttctgaccaccgcraggctstatcttsstctatggcgccatctggatttcsccgactcatgctaaagcctccctcctggcggaacatctctcccctctcctccttacttattatgctccccttcaaggtgtcatcttggcctactccgatgcctcgatatcgagtaccccgccttccccatatacgtcctctgatcccgcagatcccaatccaaaaccattgactctcgccaagacagcaggcgaatacggcgtgctgtacgtttacctgactgcgacattcctggtttttcggccacaaaggggtcaaattctcgaaggatgggtcaacgtccagtctgaaggtttcctgggcgccgttgtgctcaacctcttctccgtsggtattgaacgcaagagactcccttcgaactggaaatgggtcccaccaggtgaagaaggcagcgtcagggaggaccagcaaaagacagccaccacatccgaagatgacgamtccgaaccgtctgcctccttcgatcaagaaaaagagca

SEQ ID NO: 297 - DNA, 692 bp, Aspergillus oryzae
ataacgacaaaatggcagtgctccttgagaaagtactcactagcatgcgtgaccttgttgtcaaccctgaccggttccatgtcattaaggaacgcttgtcacgaggatataagaacgcggagtatcagcagccgttttatcaagttggcgactacacacggtatctgactgccgagaaagcatggctcaatgagcaatatgcttctgaactagagcacattgaacccaacgatatctcgtgcttcttcccccagttgctccgccacaatcatatcgaggtgttagcgcacggtaacttgtacaaagaggacgcccttcggatgacggattctgtggagagcattcttcagagccgtcccttgccccagtctcaatggcatgtgagacgcaacgtgatcatccctcctgggtccgactttgtctacgagcgggcactgaaggatcccgcaaacgtcaatcactgcatagaatattatctgtttgtcggaaacatgacagacgacgctctccgagctaagcttttgttgttcgcccaaatgactgacgagcctgcgtkcgaccaactccgaagcaaagagcaactggggtacgtcgtttggagcggtgcacgttattcagccacgaccatsggttaccgagtcattattcagagtgaacgcactgctcagtacctggaatccagaatcaatgca

SEQ ID NO: 298 - DNA, 877 bp, Aspergillus oryzae
  modified_base (452)..(452): n is a, c, g, or t
gcgctctatttcgactgacgatttgatctttctcattcgacatgacaaggccaaggtctcgcgcctgaagaccttcctttcctggaaagatgtccgcaagaatgtcaaagattcagatgacaaaggcggtgccgacgctgctgaatttgcaggagccgatgaccctcttgcagggggtgtcgtcgctgggccgcagatgtcgcttcgaagcctaaaaataagagggcccgtgttggtctcgcatgggatgtgaacagtttctactcggtccaggttccagagcgagatgacgaggaagacgaagaggaggaggagcagaactatgcaaccctccagcgtcttgctgcagcagatgaacgaaccaagcacatgacgaaggaagagtacgtgttttggtccgaatgtcgtcaagcatccttcacctatcgtaagagcaagcgttttcgtgagtnggccggttttggtatcgtaaccgaatcgaagcccaacgacgatattgtcgatatccttggtttcctcacgttcgagatcgtccaaactttgaccgaggaagcccttaaagttaaagaacgcgaagaccgagagaagaatcgtcgaggaggtgccgaaaatgactcgggcgagactaagaagcgtaasccgaaactggcctcttcgatcctcctgaggagggccgaacaccggttgaaccccmscatatccgtgaagcatatcgtaaacttcaagcaactccgaacaagaatatcgcaatgcttctccacaatgggcgcgttccagcacggatgcctttgagactgatttaatgggatggctttatattgagcttgtaccggaaatggttggacttatacacacaagatacccacatgacgactgt

SEQ ID NO: 299 - DNA, 572 bp, Aspergillus oryzae
gctcgtgccaagtgtctctcaatcacgaccgccaccaactggctcctcaactgggccatcgcatatgctaccccttatatggttaactccggcccgggcaacgccaacctgcagtccaaggtgttcttcatctggggtggattctgcttcattgccggtattttcgtctacacctgcatctacgagaccaagggtcttaccttggagcaggttgatgagctttacgctaagattcctgtggcctggcgctcccatgaatttgttccatccgtcagctatgctgasgttcgtgacgttgccgccggcaaagtgtctggcaacctcgctgatctagaggccgacgcccagatgaagcgtgatatggagcatgttgagaaggcctagaagtataatccggcgttggtcaattggagtcttcctgtcttggttaggtgttcaacttcttttttcgtttccatagtccctatactgcctttgtacctagcgagtggctttttgcaactttatcttggtgatgagagacgtggtataatgaccatctcacgaccaatattttctattgtwtgatattt

SEQ ID NO: 300 - DNA, 879 bp, Aspergillus oryzae
  modified_base (848)..(848): n is a, c, g, or t
  modified_base (851)..(851): n is a, c, g, or t
  modified_base (854)..(854): n is a, c, g, or t
  modified_base (859)..(859): n is a, c, g, or t
gcgccagttgatgaagctgccgcggatggggagggtaaagagagtcccccggcagaacatgcggaagccgtacccgctatcgaagagcctgcgcctgtagataccaatgaaggcgcactcaggcaaaggcaagaagggaaagaagaacaagaaaaagaagaagaagggcgctaccgcagtggaagagctcccccccactcccccgcctgaggaaccggaacaggtccaggatcctgctgtcgctgaagcagaagttgaatctgaggtcaaggaaacagacacagcagcagcgctaagtacggatgagataaatgacaacccggcagaagacaccgctgaacccggctcacctcccaatgaagaccaagccgatgctggagcagatgctgctagtgacgataagaaccctgaacctacggcagcggagcccacttctgaagagcccgttcccgaagaaccttccgttgataagcctagcgaggagtctgctaccctggaagatgccgagcatgttacagatttatctgaagaacctccagtcgagctatctccagaagaaggagctcctgaaacagaaggatccccggaggcagtatctgaggaaccgccaaaagaggagccaacggaagagattgtacctgagggggctgaggacagtgctagtgctggtgaagtgactgcagaggtctccacaaccgacgaaaagtcttctgaaaaagaaaagccgatcggagagccagccaacacggaagccgctgagcaaacaccggctgatgagggartcgacgaggcagcagagcccgcagctgaagaaactcctgcagaagtttttagcccaacaattgaangangcnggaangttacgacatcccccgatgc

SEQ ID NO: 301 - DNA, 761 bp, Aspergillus oryzae
gcgcgatgctcggacgtttgttgatctctacgaagccagccatggtagagacatgcgagagaaagctatacaagtcctgaccgaattacgaaatctcgcctcgaatatagaagcctgctatagtggagacgcacgtgaggacggccttgcgcttttcgaaaaactggccgcgtacttcgacggtgacgcactcgagagtatcactagctccgaattactgaactcgggtatcatcaaggtgttgctggacgtgcttggtgactttaatctttcgtctatgcgcaaggctcgtgctgcctttctacaggcattcatgggatctactatctccgagaaagcccgaagccaaagcactgctacgactccattcagtgtcctgatccagaaattgcaggacttgctcagccggactgagcatttcgaagtgcttactgtcagccacaattctttggaaaacacacggagtaatgctgcacatatgcttggaaaacagcttaggctcaagttggtggccgatgaagactccgatataccccgtacctatcgaagtataatggtgtcaatccacgccattgccacgttcaaagccttggatgatttcctccatccacgaattagcctgtcagatcgtccaaaaccatcacgcagccgagaatcgttgttctcacagattgctaatgccgcccgacttcgggatcagctaaccggcaatggcgagtttcctggaggtgatatcccgcctttaccgcgtcagagcacgg

SEQ ID NO: 302 - DNA, 579 bp, Aspergillus oryzae
  modified_base (66)..(66): n is a, c, g, or t
gcacgaggatcgattcaacggtcagccggagacaacccacttacaatttcctgctgggagtgtgtnggttattgatcaggaacacgcctttgtcgaccatcaatatggcccaactattctctcagaacatttacgagctttcgtggcgacagaatggggatctgtaacggaccgtatcaaccttggtcctggcgagttgaagttgggtttggacatcaacaaccgtacaggccttagtctgtaccggcctggacaacaggatctgaccgtttccatcgccgagaatctcaccgctcctgagatgccggaccgtttggcggatttcatgcagatcgcgatggtgaagccaatggtccgccggtttgactttgcaactgtcaaagaccttcacaagtttgaggccgcggtcacgggcttcaacgtgctgtatgatggkattgctacttccttcacgatatcacgacgtcgcatggtggkcccgattacgaagaagtgggaatcgactagagcccggattcaagkgggtcaacatgacaaggggatacaattgatagcattcttgaatgacttccaccatgg

SEQ ID NO: 303 - DNA, 611 bp, Aspergillus oryzae
cgaggattcaaacacgttattgattctgtcgggtttctcgctgagcgaaagcctttataacttgctagtcatacaaattcttcttcttgaacacatatttgtctttctcccgtacaaacaattttaaccttctttcaccgtcgatatggacaagatcaaggagagaatgaacgccctccgcctggaggctgacgaggcccacgagaagaccgaggagttgaagaatagggtcaagacgctggaacaggagaacctggcgaaggaacaggagatcacatccctcaaccaccgcaaccagcttcttgagggtgaggtggaaaagttggaaaccgctctcaaggaggctaaggatgctgccactcagagcgctcagcacgacactcagaacgaaacccttcagagacgcttgcagctcttggaagaggagctcgaggctgccgacaagactaccaggggrgacagttgagaagctccgccaaaccgacgttaaagccggscattacgagcgcaaagtgcaggcccttgagtcgtctcgtgatgagtgggaaagcaagtatgaggraatggcgragaagtacgccgagttgsagaaaggrtctccacgactttgg

SEQ ID NO: 304 - DNA, 731 bp, Aspergillus oryzae
ggcccaattcgaccagatggacgatcggcgacacaatttcggcctttgacagcagagaccgatatcctccccggcactaacggtagcgcgcgtgtcggttttgcggacggcacccaagcaatcgtcggagtgaaggcggaagtagaaaagacagtggtctcggcagatgcgctcaaactgccgcaacagactcaggaagaatacgtagggaataatgacggcgaggcaaatcaagggtcaagctctggacatgggtcatgggtgcaaatgtctatcgagatcccagggtttcgggatgacgatgctttgccggttttcttgtccgagatgatgcgagagcctctggttgagtctttatcaagcgagggctctgggaacggcgagatgactggtggactcaagggaaggctggtaatcaacaaacggtggcactggcgattgtatatcgatgtaagatgcttgttcaatctcaggtgggcggtcgactctaatgctgttgatttaggtccttcttctctctcaacctcagtcctacccgcttccgctactctcgttaacgactcatctggcgctcctgtcgacgaagcttccgaaattgaagtccaaaggggaggaagatccgttcttcgacgatgattgggatgctgcagaatacctatatccacgctctamctbcacagcatccgctactccttcccaacaagttcgccccccagtaacgttactcgtcg

SEQ ID NO: 305 - DNA, 494 bp, Aspergillus oryzae
ttcggctcgtggccaatgtctattacttcggccaggwgggtctacataacatcttggttatcgacctacttggtccgagtcttgaggatcttttcgatcactgtaatcgtcgcttctcgacaaagacagttgtgatggtggctwagcwgatgctctctcgcgtccaaacgattcacgagaaaaatctgatctaccgtgatatcaagcccgacaacttcctcatcggccgccctaattccaaggccgccaacgtcattcatgtcgtcgactttggtatggccaagcaataccgtgatccaaaaacgaagcaacacatcccttatcgtgagcgaaagtcgctgtccggtacagcccgctacatgagtatcaacacccacctgggccgggagcagtcccggagagatgacctggaagcwttgggtcacgttttcatgtacwtcttgagaggaggtctgccatggcaagggctgaaagcgcgaacgaacaagcagaag

SEQ ID NO: 306 - DNA, 219 bp, Aspergillus oryzae
aactcttattcctacgckcaccgcacttcgctttttatttcacagcacgctaacatccaaactwcctttccartagccctacattcaacacccaggtagatacacatacctctgckagggactttgccgtcgataamatcagcgagggtttccgttctcagaccttcgtgtacgggtccygasagcggcttttctatattgasaccgtctwgmctcctt

SEQ ID NO: 307 - DNA, 796 bp, Aspergillus oryzae
gcacgaggccaatgaccccagtggcggatttgaggaagagtatggccaagggcacttccggatattggaatgtcacgatacatcccagagactactccggtcgaggatgttattcaggcaatatgtcacatcaaggataatgtttttgaggaccttcccgctcgaacaggcatgaacagcacccgtgtcgccgagttattgaatcatcgtcggtcactgccacccctcgcctcggtagcccacgtccatacgttactggatgcaccaacgaaggtggagagagatataatggactttgtaaattctggtcgaatccgccgattaattgttccgggcagaggaaatgacgctgctgggttaggggattgcttagttctctctgaggactgggaaaggcttgtgcgagacagttctataggttcccatttgaaagacaagtttttggacgtgctcagtcgacccggtattatgttcgctgtccctgatacactttttactgccccagagtgtatggcgctcgtccgtgctggctttctggtctcgtcgtcttcggccaatggatctcccggcataatatcgcttccgaccttcccacccacaccttcatccggaaactcggccagtaggggtggtcccgttgcagtwcatgacaaagaaggcggtaaccgctctcgatctcatacaacagcttttttcctatcccttccaaacacagggccttacattagacttctaagcgctggtagagcgcatctcctcacacttgttagaaaatcaaactctagcgaggtgccct

SEQ ID NO: 308 - DNA, 734 bp, Aspergillus oryzae
  modified_base (217)..(217): n is a, c, g, or t
ggccgtgggtaaaaagaagaagcggtcacctgggagtatatacgccctggctgcacgccagcgaaagatccagcagcagtacgctaaccttcatcacccaccgagcatggaagatatctggatttgtgagttctgcgaatatgagagtatctttggccgtcccccggaggctcttattcggcagtacgagatcaaggatcgcaaggagcggaagcrnttggcagagaagaagagactactagagaaagcgaagatgaaaggtcggaagaacaagaaggcgacgaagaacgtgacgaagaatgcggcggctcaaccagcggcatatgatcagggatacgaccgggcgtctgtcgatcattcctccatgggtgggacaggactacatgacgatgattatatagcaaatgaagacgacgaggaatcagtttctcgcgcccccggcgccacctgcaaccccgacgtgcgtcaagactccgctaccgccgggcaatcaggccacggccacagccggcgctaagactgcgacagacggcggaacgactcgaccaccctgacaaataaatgcgcggcccactcgtgtggagtgatgtttcacccttgaggccgtgcttcttcgtttcctttgtcgtctttgcgtyattgttagtcttggtttttgcatgatcgcattttagcctttcagtttctttttctttttcagcaaatggttgcataatgaatccccactctgagat

SEQ ID NO: 309 - DNA, 509 bp, Aspergillus oryzae
  modified_base (248)..(248): n is a, c, g, or t
aattcggcacgaggctcgaacaagagaacttgaacgcgcgacccagtatgagcgggaccagcttatgctgcagcaatacgatcgtcgtgtgaaagacctggaagagcagatgaaccaactgacctcgaacttgaatatgcaaagtgcctcaaaagatgagcagatccgatctctccaggagcaagtcaacacatggcggtccaagtatgaggcgctggcgaactctactcccagctccgacaggasancctagacctcttgcagacaaccaagagcctcaagttaaaggcggcgtcggcacaggaggcgatcgaacggcgcgagaagcttgaaagagagctcaaaacgaagaacctagagctagccgatatgatccgggaaagggaccgtgccctacacgaccgggatcgtttgactggaaataacaaggaagagctggagaaggtcaagaragagctgcgccttgcaatcgagcgggccgagaatgccgagcgtwaaaaaggtaccga

SEQ ID NO: 310 - DNA, 551 bp, Aspergillus oryzae
ggtaattctccgacctaattcactacaaccaaaaccattgtcacttctactttgattccatagaacatctgcctcttttgacaaattcatcgcatcccggtgcttttcaccggcgaatcacccaccgcgggatctccctcataaccatcaacaacaacgacgaccatggcgtcgcaagggttcggctcgcgctcattcgcctccacaaggctacctgaccgatctatgaacgccaatccaactcccttcgccgcgtctaccttctcccgtcaacgactagctccaggttcaggcgaccaaggagccgacgcagcaagatcatcgcaacaggcgccacagccaccagtgcattcacagacccacggcccttcgcaggactccaatcccctgagtcgattaacagaggaacaacgggmagagatcaatgaagcttttaccctcttcgacctcgaccgcgaccaamacctcgactawyatgaacttcgcgtcgcctttcgcgccctaggctttactctccccaagcaagaactcatctcccttctcaacaacta

SEQ ID NO: 311 - DNA, 824 bp, Aspergillus oryzae
acgaggctggcctggcctttgacagattcttccaagtttggctggagaacattgactattcggatgcgtctgccgatgagaactaccaatggctggccaagcaaggaatcactctcaccaatttctttgcaactacccatccctccgagcccaactactgcgcttccgccggaggagacacttttggcatggacaatgataatttcaaccaaatcccggccaacgtttcgaccatcgccgacttgttcgacacgaagcatatttcctggggagagtaccaggaacatttaccttaccctggattccagggatacaactactccaaccaggaaacttatgccaatgattacgtgcgaaacmcaacccgttggtgctgtttgattcggtcacgaagaacagcacgcgtttgcgtcagatcaaaaacttcaccaacttcgaggacgatctcactgataagaagctccctcagtacgctttcattacccccaacatgaccaacgatgcccacgataccaacatcactttcgccgctaagtgggaacgtagctgggtctcccagttgcttgacaactcctatttcatggacagcactcttcttcttctcactttcgacgaagacaagacctaccccaagggaaacaagatcatgagcattctcttgggtggtgctattcctgacgacctgaagggcaccacggatgatacgttctatactcactattcgatcatcgcttccatgtcggccaactggggtmtgccatctctcggtcgatgggattgtggtgccaatatccttgagattgtkgccacaagactkgctatgt

SEQ ID NO: 312 - DNA, 673 bp, Aspergillus oryzae
ttcggcacgmgggaaagattagggctgtataactacgatgtgcctgttcagccgtgactttcgctacaacagactcccatcaatcctctgctcatgcatattgtatattacttgagttcctcccttgttcttcctttttataaattatattttttccccgctcttctccctccctcatcacgatcttgttcctgtgtatctcagccatgggaacaggaggaaggaataccaacttatgaataggcaagaaaggttatagttctacggtccaggacctgcacgttgattagttcaatatctgcgaccattgtttcagatatatggtttcctataaggactgagtgaacaaaaagaaagtaccaaatgctccacccctcagcaactgcagcagggatccatccatgagaagcttaaaacctaaaaaaggagtcttgttctggactatgaaagaaagaagatctcccagacaggagacttgtgggctactgctttattgatgtttgcttttgtgttatcttcctgcgagtgaataccactctgaggctccacatatgatcggacttcactccatgcgttttacatctccttgtttacgatggtgtcacctctgatctctcggcaatagatagctgtatacgtaagtagatgaaacgcgtgaaacttgactaccaat

SEQ ID NO: 313 - DNA, 696 bp, Aspergillus oryzae
ggcacgaggcgcgaagttttcgccgctgctccatttacttctggtacaggttagatccttctacctaccaggtaataaaccaattgtattcgccttcattgcccggtctgttttaatttgacttaagtcaattaatcaaccggtttatcggaatcattctcttgtagatccgatctttgaatacttgcacagcaatcatgggtgtttcaatcgttctgggcagccagtggggtgatgaaggaaagggcaagattacggatatgctcgcgcasaggcgacgctgtgctgccgtgccgctggcggtcacaatgcgggccatactattgtgcatggtaacaagacctatgatttccacattcttccctctggcctgatctccccttcatgtatcaaccttatcggtgctggtaccgttgttcacgttcccagcttcttcaaggagttggcttctcttgaggagaagggtctcgagggtgctagcaagcgcattttcatctccgaccgcgcgcatgtmtgccttcaattgcactccgttgtagatggcttggaggaggccaagctgggtggtcgcaaggttggtactactggtaagggcattggtccttgctacagtgataaggcttctcgcaggggtatccgtgtgggagagatcctggatgaggcggttttcgagcgcaagttacgctctttggatgc

SEQ ID NO: 314 - DNA, 677 bp, Aspergillus oryzae
  modified_base (640)..(640): n is a, c, g, or t
  modified_base (647)..(647): n is a, c, g, or t
ctgaaatgcaagcctcaggtgttacctctgagcctatggacgatgtacagccgacagatgccccagctgaagctgcaaccccgccagtgcaagcagaaacggggccgtctgaacctcaacctcgcgtgcatactactattagaggtcgcgagcttgacattactgggatggaaatcgaccctgagtatcttgaggccctgcccgaggagcttagagaagaagtaatcatgcaacaacttgcagagcaacgctctcaggcagctgcagctggtgaagagcctagtgagatcaacccagagttcctggaagccttgcccccagagattcgggaagagctattacagcaggaagctgccgaccgtcgccgccgggagcgggaaagtgcacgcagacaaggagcctctggtggcgctcctccccgcgctgaagacatggatgccgctagtttccttgctaccctggacccttcattacggcaagccgtactcgctgaccaacccgaggagatactagcaacgctggggccggaatttwgtcaccgaagcacgagctctacctggcaggcgcctgamccaatttggtgatattgccagagttgatcatcggcaaaggaatgagccaaccgacgaacaagagccgnagaagcnacagcggcgtcagatcgtccaaaatgcttg

SEQ ID NO: 315 - DNA, 529 bp, Aspergillus oryzae
gaattcggcacgavggcttgttagagctcgggctattcgatgtacaagtcatcttgtgatatcaactaatcgggcattgatacctttgaacccactttctatctcacggactttctctacttatcacgccttaacccgccattccgccgaaagctctgagctgtttgagtatacatctggaagatggatcttcaatgaatccctgagactcgcggaacgacgacgcgtcttcaacgtcccygaattgaagcgccttgctgccgagtcgattaaccaaagcgcggaggatgtcgccagctttgagaaggttgctgaggggkcgtttaaccgtgtttttctagtgacaatgaacgatggtaccaagcttatcgcccgtgtcccgtatccccttatcgaaccgaaatacttcgtggtagccagtgaagttgcsactttggattaccttcgactacatgatatacccgtacccaaggtgtttggctactcggctacgttggataatgcagcaggggacggaatacatctttta

SEQ ID NO: 316 - DNA, 899 bp, Aspergillus oryzae
attcggcacgaggtgaaacgcagtttggcagctggaacatgagatcgattaggttttcgacgtcgaccaacctcccagtctggacttggcttgtgataaacgccgatggctccaaaccacccttcgctcgccaggaggacttcgacaatgttctgggaggattcacagccaaactaaacgagatgggcgttgcagcacagcgagccctcagaggtgaaaccatawgtgttaacaaagacaattatgaggccggaatcacggcagcagttgggcgactcatgaacaagaagccctccttgatcctctcggtcctgccattcagcgatgcggattattataactgcatcaagagagcatgcgacttgacgtacggcgtgcggaacatcaacgtcctagctgacaaattccgggacgcaaacccccagtactttgcgaatgtcggactaaaggtcaacctgaaactaggcggtgccaaccaactcctagatgcaaaagaactaggcctcatcggacagaacaaaacaatgctcgtcggcatggacgtcacccacccttcccccgggtcatctgcgaacgcccccagtgtcgcaggcatggtcgcctccgtcgactctactctaagccagtggcccgcagaaatcagagtacagagatcgcgcgaggmaatgatccaagacctgagtsacatgctgaaagcccacctcaagcgctgggcccgctcccacagcaaagcctaccctgagaacatcatcgtgtacagggacggcgtatcagaaggccagtacgaattagtcgtkcaaaaggagcycccgctcctcaagaacgcctgttgggagacatacccagcgagcttaacaaagcaaggsctcccgcacatctccatcgccattgtcggcaaa

SEQ ID NO: 317 - DNA, 716 bp, Aspergillus oryzae
aattcggcacgaggacttcatccccatttacacaaccaccgccgtcgcaatcggtgtttgtcctattagaatttattcttgttttccaattctgttattcctctaatttcttgtattttcctcttacacgtcaccctcaccgacaacctcacgagacccgcccactctcagtgttccgcccctcctcatccacaaccatccgagcgtcctaccccttaacgcgttgtctggcatcactctaaatggacaacaatatggaaatcgataccgcgcggtcccccgagccccaccgcctgtcgccaacgtctgaccctgggtcgataccgacattggacggatggattgaaaatttgatgagctgcaacaacctagcggaggaagacgtgcggaggctgtgcgatcgggcaagagaggtgttgcaggaagaatccaatgtgcaaccagttaaatgcccagtgactgtgtgtggtgatatacacggccagttccacgacttaatggaactgttccgcatcggaggcccgaatccagacacaaactatctgttcatgggtgactatgtcgaccgtggttattactccgtagagaccgttaccctccttgtttgccttaaaatccgttaccccccagcgtatcaccatcctccgtggaaccacgagtcccgtcagattactcaagtttatggattctacgacgagtgcttgcgtaaatatggc

SEQ ID NO: 318 - DNA, 577 bp, Aspergillus oryzae
  modified_base (329)..(329): n is a, c, g, or t
  modified_base (341)..(341): n is a, c, g, or t
  modified_base (388)..(388): n is a, c, g, or t
  modified_base (477)..(477): n is a, c, g, or t
  modified_base (509)..(509): n is a, c, g, or t
gtgttcccaccctggttcggttgttagtgccgctcgtttctctgctctggttcgctctcattgctgccactatcaaactattgaatgcaaaggtggagcaaatttgtcaatttcacgacgaccttctcagatgagtatatgaacgtggagttccggaacagacctaaaaacgctccgtcccctgcattgcttagcccctcgcgtgggatcgactcctgatcaaaaggtcgatcttccctgttaaggtggatgtttctaccaaacaccatttttccatctcggtgcaaccatcatggtctcgaaagtgttcggtcgacttttgaccaccnggccttgtattnggcaaactctgtttccgccagcaccgaggcagcccatgacgatagtntagttgcatctcaagttgtggacaaatccctatraatatagatttcctacctttgggagccacaagagcctcgctcttccccatgcgtntgtgcaaggcttcaagctrgagggagccagcntcggcgccatttaggagcaactcggtggctgggaaatctcactagcgtggaactcctgccatgctact

SEQ ID NO: 319 - DNA, 934 bp, Aspergillus oryzae
ttcggcacgaggcaactcggtgccctttcctacaagagatgcgaacatggcgacgaagcttcgctacgtctgttgccagactaaaccataaacctgccggtcagggcgtcagccacgctcttacgatgcgcacaagtcctggagcaaagcaagagtggaacctgcagtttagaagatcaagagatcaagttgaatgggtttattcgctccgtccgaaagcagaaacgctttgcgttcgccgagatctcagatgggtcgacgattgagcctatacaggcttttttgagaccagcacaggctgccgaactgtctactggaactgctgtggagatttctggggtctggaaggcttgcccaccgggcaaggagcaaacccatgagcttcaaacgacagacgtgaatgttcttgggaaggcagaccctgagacgtaccccatccagaaaaagtatcacagccccgacttccttcgtcagattccccacctccgcatgcgcacacctttcagctccctcctctcgcggttccgatcagaatgcttgtaccagctaggaaatgtgtttcgcttcgccccgaacgggggctacgttcaggtccacccaccgttaatcacatcgtcggattgtgaaggcgctggggagacattcacagttctgccgcgggaagctatgggggcacagtctgagggcgagcatttcttccgggcacccaaatacctgacagtatcgtcacagcyccatctggaggcatatgcagcagagctaggaaacgtgtggacaatatcgcccatgttccgggscgagaagagcgatacgccgcgccatcttagcgagttctacatgctggaggcagagatgaactacatgcatgacctagactcgctgaccgactccgtagagtatattctccgtgacccagttcgtcggttacacgaca

SEQ ID NO: 320 - DNA, 542 bp, Aspergillus oryzae
  modified_base (16)..(16): n is a, c, g, or t
cgcggcagatgctgcntgaaaaggcagaagagacgtggcyccaagctcgctctgacggcgcaggctactttccctgcttccgagatcttcggtgtcaagattgttaacggttacccaacccaggcgcttgtcgctttcaccaatgatgagcctgcccccgtgaaggtgaacttcatcggtggcaccttgtccaccctagatgaggagaacagcgtgatcgtgcggaacttgactgcaactggatacagtgtggaaattcccgctggcgagacggagaccctgagctaccagattaccaccgagatgcatccccaggacctcagacttagccttgcttccataatctccgacaatgagggcagattctacacagtctacgcctacaatggcaccgtcagtgttgtggagcccgaaactagcttcttcgacccccagattcttttcctgtatttcttcctccyggcctgcttctccggtgttgtctacttcttctacactgtctgggtctgctccgtacttccctcagaagcgcaagakcggaa

SEQ ID NO: 321 - DNA, 1020 bp, Aspergillus oryzae
tacttgacattcattctctttgactccctgactgtattttcccccttcgatcattttgggggctctctacacctagtcgtccaagcatagcagaccttataatccatctttcaagcgctacataacatacgcwacgagcattcaagatgcatattcaggacacaactatcgttaaaccccctacattaaaccaacaagatatcaaacttgacccgacagctcacacaaaaatcacaatcactaccgacccctccccctcggacagtggtataacwaccccgcaacagaccaaaccgcgcccgctttacttcgcctatggatccaatctctccttcacacagatgcgtcttcgctgcacatgcgaccctgatctctcatctaagctggtcgctatcgctcgcttagatcattggcgctggttgatctgccaggttggctatgcgaatgtggtaccgcccgctgagttacgtgttggccgggaagcagatgagggcgaagatgtacctgtttctggggacgaggatacggtttatgggatattgtatgagatggatatcgaggatgagaggttgcttgatggctacgagggtattgaccggtcggcgctgccatcgcgggctacgcacaaggttcctgcgcatatccgaccgacggagcaaggccatggggactataataagtggtatgtccctgctacggtgacggtgtggttggatgaggaacagaggaaacggagggaaggcggggttatcgagaccttagtctatgtggatgaggagagggtgagggtaggccccccgagagacgagtatattccgcggatgaaccgtgcgawccgcgaggcggagtctttgggcttccctaagaagtgggctgataaggtgatgagaaagtcaatccctttgaactaggatgtcattggttttttttgccttcatagataacgccgcgcgtcatgtttgcaactagacaagacttkatgattgaacgmwtacaatggttcaagttatttcaattacc

SEQ ID NO: 322 - DNA, 790 bp, Aspergillus oryzae
aattcggcacgaggcagactgggagggcaagcaaccaagaatcccccagggagagtgaaaacaataaagtctcccgcaatacaacgtctagaagttcctatcattcaggtactcgcacagcaaacaattgcaccacgagtgttcctcaaagtacttcacggatagacatatcaaatcaagttgcggcgggagactatatgccaacaattgacgcagaggcaagacctctagtcagtcgctcaggtaatagggagaggataccgccgcctccgcccaggagccaccatgggaagttaatcaaccctagtcctggctcgactcccccttcccctcagcccgcaccttccaaacctgcaaaccgcttttcatttcatggttcccccccggaatcgtcatcgtcacccaagccatcacagtcaggagtggattatatcaccgaaacggctaatagcgaaccaaaaagtcgagtgagcctttaaggcgcacaaatctcagtacaagcgaccaccgacaccgccactgagcaggcgacacagtcagatgagaagatccaagaccactgcgtccaagccaaacccgagcaggctttctatgccggccgttgggatggagggcactgaatcccctccacctagtccaagctcctggagtttgaacccatcgcgaacccgggataccagaccaggcccttcatctgaggagaatccgaggaggccttctttacaacaccagagcgctggtgcggtaacatccacgccgagcacagatgcctcggtgccatcatctcagt

SEQ ID NO: 323 - DNA, 597 bp, Aspergillus oryzae
atttcaagcatctagataccaattttggacggactgccctttgcttatctggaggcgctacttttgcttactatcatttcggcgtggctagagcattgctggataatggagtcctgcctgaaatcataacgggaacgtcgggcggactttggttgctgcgttaatcgcgaccaggaccgatgaagaattgaaacaactccttgtccctgctctggcacatcgtatacgggcgagcagtgaaggcatggcctcatggatttggcgttggtggcggacaggagctcggtttgacactattacatgggctcgtgagttcagttggttctgcagaggctccactaccttcaaagaggcatatgaacggacaggacgtatattgaacgtttcgtgtgtgccgtccgaccctcattctcctacaatcttggccaattacctgacttctccaaattgcgtcatttggagcgccgtgctkgcctcagccgcggtccctggtatactcaatcccgttgttcttatgaccaagaagcgcgacggtacactcgctccatactccttcggacataagtggaaagacggtagcttgcgcaccgatatccc

SEQ ID NO: 324 - DNA, 227 bp, Aspergillus oryzae
  modified_base (49)..(49): n is a, c, g, or t
cctatccctcgcgctatgtcttgtttccatctccggccggtaccgcaanagccgaacgttttccgcttcgcatgccgacacattcgcttatagatggggactctaccatctacgccctttcgactgcatctggccgagctgctattgcggttgtgcgggtatcaggtccgggatgtgtgcggatatatcaagcgctatgtccaaaagcggcgcttccccgaccgcgc

SEQ ID NO: 325 - DNA, 719 bp, Aspergillus oryzae
  modified_base (1)..(1): n is a, c, g, or t
ngcatgatactagtgtgaatggattgttgccttcaagtgtgttacaaagatcaattaaagtacctctcgccggctttattgtagcgcttctttacatttataaaacaatatctctggtgattgctactcttgtcgccgtgttaagcaatggccgattggaagaaagctcttggcttcacagacaggctaacagccatccaatctttgacaacagcttaccaacgtgcgtcgtcttctgctgcatttgcagaggcgcagtctcaggcaaagagatttgagaccgaagcctatgatcaggccacatcgaaggaagaatatgatcaattttgccagaaggccattgacgcagccgaagccactggttcggctgctcctgtaattagttgccccgatctggtacagaataaggaaggggtagaggactggcctgcaggcaggatattggaccatacaaggcatgccttcatcatttcgacgggcttyattccaccatctacaaatccagacgtacagatgggaccctagttgctgtgaaagttactgttccccatctttttagtaccgccacatgacgcgaagtgcgaagttcagctcttacgagaaaccgctggaactcatgtgatacctttactcgaaacgctaaaacttgacgggaggacgactgaatctggtgttccccttcatgaaacatgactttgaacatctattgcgtcgaggca

SEQ ID NO: 326 - DNA, 487 bp, Aspergillus oryzae
  modified_base (152)..(152): n is a, c, g, or t
  modified_base (236)..(236): n is a, c, g, or t
  modified_base (255)..(255): n is a, c, g, or t
  modified_base (257)..(257): n is a, c, g, or t
ttcggcacgaggctgaaaagtgcgctacttatgtccctcttgtaatcctgattcttgtaggagtcgcgaccgtaaccgccgcaatatacagtccatggggcacaacggacccatttcactggacaagcaattatggccgcgacgaagatgtncttcgcctggtaacgccagggtttggggactgcctacaatatatgcattccccagtattgacaggagccttgtcactgaactancccggctattatcagccantnggtgagtcaggktgcgtggtcaaccctcatgtttaaccagagsctttctaagtcccgggaatgagcggaatcctgtaaaggacggtgtatacactgtgaacggkacctacgggctggacgcgctacaacagtatgttggaatggagtsggcgcgggatatctggccggggrtgataatatggttacttgtggttgttgtygcgatcacgctcatcatccagctcgccttt

SEQ ID NO: 327 - DNA, 564 bp, Aspergillus oryzae
  modified_base (13)..(14): n is a, c, g, or t
aattcggcacganngcgtgtttctatatcggtcccaagtataggttggccgctacctagtcgttcatttggatataagatattgtgcttttcgcactcagtctttctcaactcgatagtataacttcctcgtgatcagctacgcttccattccattggcacccggccaactaaacctcgcataccctggcttccccctaattcgctccttaatatgtcggccgatcaagagtttgaatacaaaaagtggctctccacgagctgccatcctattatagatggcatggatactgcgtacggctatcagccgtccgctggctgcaggcgtcgtcttcctcgttctctttggkctctcgatgatcgttcacacaatccagtttacctggaaaagaacctggtggtgtgctgtcttcagtattggttgtctgacggaggtcctaggctgggccggacgtacctggtcctcagaatgtccctacaacatgacagccttcctgatgcaaatctccaccctaatcattgctcccacattcttcacagcagggatctacgtcctcctcgggcg

SEQ ID NO: 328 - DNA, 921 bp, Aspergillus oryzae
ttcggcacgcacggggactggttcaaagagatagcagcttcgctggtcactcacttggtgaatattcggcacttgcagctcttgccgatgttatgcctattgaaagcttggtttctgtcgtattctatcgcgggttgactatgcaagttgcggttgagcgcgatgaacaaggtcgctccaactactctatgtgcgctgtcaatccaagccggatttccaagacatttaatgagcaggctctgcagtatgtggtagagaatatctcggaacagactggctggctacttgagattgtcaactacaacgtcgcaaacatgcaatacgttgctgctggagatctccgagcacttgactgtcttacaaatctactcaattacttgaaggctcagaacattgacattcccgctctcatgcaaagcatgtctctggaagatgtgaaggctcacctggttaaaatcattcacgaatgtgtcaagcagactgagtctaagcctaagcccattacccttgagcgtggcttcgctaccatccctctgagaggaattgacgttcccttccacagcactttcctccgttctggtgtgaagcctttccggtcgtttttgctaaagaagatcaataaaaacactattgatcccagcaagttggttggaaaatatattccaaatgtcacagctcgccccttcgaactcaccaaggaatatttcgaggatgtctacaggctcacgaattcaccgcgtattgctaacattttggcgaactgggagaaatacgaggaggagagtgagaacgtctcacgcggtggtggtggcacatccgcttaaaagaatggccggataaaggaaactcgtcgcacgaatgttacttcatattgttttttgttcctcgtctctatttctacccaaagatgtgtcggcttag

SEQ ID NO: 329 - DNA, 879 bp, Aspergillus oryzae
  modified_base (202)..(202): n is a, c, g, or t
tggcaaattggcaccgagttacactwcacgccgcctgagccggaatctcaacttgcagggccaraarcagacacgacaactgcccaagttgctccgttaaagcwtgataaaaccttcagcctcatagccgctaacagcgtcaagattctaggccgcagagcgaacctatatctccagatgcgggccctgtccaacatgcgtnctgctcaggtgatacactagacgcgacggagagagggcaacccgcagagtgggccctcaaacaaaccaggctctgtttttagagcgattgaggaacatcaaacaatccaagggggaaacagacactgtacgcaccgtttttagtctgaaaagggctcagaatcttgaagagcgcttgacgmggttgggcgcggacaraagagcaattggccgagattcagcaacttaacgatgccgcgcttcaaggaaattccgatgccatagcagaactagagaagatctacaawcaacttggtgctcargatcctgcgtmgttcgaagaatcrwtccaacagctttgagaatgctccaagtcggtcatcttatgaacctcaaaagccctgmcaatggggtcaccacaggttaatgtcatacgttacgtcacgcatactcgctgaactagcaatctaaaacaagccatatgcgggggcttagtataccacatgagatgcacccacccggccgatggcgaacatgaacagatcgattgawtttgactcctaaacacttcggccttggcactacgtcgttgaagcgggtttcgggtctttcgtaacgaccttggtgacttctcttcactaaccagtttattggcggtgtgcaacawartagccaacatgcatagtgcagcgtggcacc

SEQ ID NO: 330 - DNA, 207 bp, Aspergillus oryzae
gaggctttcccttcgctttttcttctctcagcacctcaaccatcactacttgactgcacgacaacgacacgtaatcccatgatttaaatttaaaagagagatctgatattcaatatagcggggcgcatttatcgatctcactatttctaaagggtcaactggagagtgaacttcaacgccttcaccatggatatgagcagcayccgc

SEQ ID NO: 331 - DNA, 561 bp, Aspergillus oryzae
tcgaattcggcacgasggagaaacaggaaactggtcctcacgccagctgccttcgactatcctcccatttaccgatgagaaatccagctccagtaccgttgaccaagctctggttgagcgattagcaggggaaattgctcgtcgcatgcgggacgagaaactgatgccaccagctcttgtggtggtgccttctggggccgtcctgaccatgaggaatacccccgccagcctatggtcagtgaaccatatacactgaaatgcttcttgattgcattcaagagctcctcacattcattccactttcctttgttccccagcgagtctggcgatactaatgactgatacgacataacttttaatttggcagcctgtcttgtactttttgtgtkctttcttatatattgtttctgctgtactctctttggagcgagtgtagatagtttgtttgtaccaaaagtgctggcgtttttgttattgtgagagtgtcctttctgcttgtctgtgcaggataccacttcgctctttctgtattgtattctatatgtgggtctggatcggatc

SEQ ID NO: 332 - DNA, 514 bp, Aspergillus oryzae
gcacgaggatatcatcaaacatgaggccaagaatcgctttgatgcgcagggcgtagtgctggacacttccagcaaggcggcaaagtctcacccattgaccgcattcgcgcgttccggttggccgtcaagtgcatggaacatttggaaacatttgcgggcagtctccggagaaatcatgaacgatgagaactcagctacggtgatcagcatcaacagtctcgtatcttctgctgccgatgggaggtcctaccggagttgaagcgaccgatactgattggaagcgacacggccgaagactcaraactggttggagatccaagaagctgtggactccttgtcaggacgctcgtctttatatgcgattccgaactgagggcatacactgtcgtttttacatagtctaatatttacgaagagagaggcgataacaattccsttaatacgccmatgatgattcccmatttccatattgtctttaactccaatggaattaacatgctatcaagagactcat

SEQ ID NO: 333 - DNA, 409 bp, Aspergillus oryzae
  modified_base (215)..(215): n is a, c, g, or t
  modified_base (222)..(222): n is a, c, g, or t
  modified_base (236)..(236): n is a, c, g, or t
gagcgacggtatgataacttatatcaatcggccgaggctacttctttttttcatatcagatttgacatctgatattgcatcgagtggaaatctatcgcggttagcgattttccgtcatgccaagaataagggaaagggcggtaagaaccgtcgtcgtggaaagaacgagagcgacaaagagaagcgtgaactcgtgttcaaggaagaaaggccangagtatncccaggttgtgaanatgcttggtaacggccgtctcgaggcgctttgcttcgacggggagaagcgtctggcgcacattcgtggcaagctcaggaagaaggtctggatcaaccagggkgatattatccttctctctctccgkgattaccaggacgaaaagggcgacgttctcctgaagtacaccgccgg

SEQ ID NO: 334 - DNA, 875 bp, Aspergillus oryzae
  modified_base (120)..(120): n is a, c, g, or t
  modified_base (190)..(190): n is a, c, g, or t
cagcgaacagccgctatggtacgcctgaagacctgaaggagctcgtcgataaagcccacagcatgggactaatggtgctcctcgatgtcgtccacagccatgcgtcgaagaacgtgcttnatggattgaacatgttcgacggtacagaccacctatacttccacggcggtgggaagggtcgacatgagtngtgggacagtcgcctatttaactacggccatcatgaggttctgcgcttccttttgagcaacttacgcttttggatggaagagtatggctttgatggtttccgcttcgatggtgtcacaagcatgctttacacccatcatgggattggaacaggcttttctggggggtaccatgagtacttcggttcttctgtcgatgaagaaggtgtgatgtatctaactcttgctaacgaaatgctccataacctctatcccaattgtatcacagtagcggaagacgtctctgggatgccggcactctgtctaccacactccctgggcggagttggctttgactaccgcctcgccatggccgtcccagacatgtatatcaagctcttgaaagagaagaaggacgacgagtgggacataggaaacctatccttcacgctgacgaacagacgccatggcgagaagacgattgcctacgcagaaagccacgatcaagcgcttgttggcgataaaaccctcatgatgtggctatgcgacaaagaaatgtacacacacatgtccgtgctaacagaattcacacccatcatcgaacgaggcatggccttgcataagttgatccgattagtcacacatggtctcggaggtgaaggctacctcaacttcgaaggcaacgagttcggacacccggaatggctt

SEQ ID NO: 335 - DNA, 421 bp, Aspergillus oryzae
  modified_base (172)..(172): n is a, c, g, or t
cttctcttccttccattcatctcgcctcaattgcttcatttctgcattagaaaccatctatcaccgatcctcatcgtcctaaacgatcaaaaatggttttcgctcgtgctaatctccttcgcgcatctgctcgcgctgtcggagctgcatctcgtagacctgcgcagaagtngctcgccgcacatacgcctccgagtcatcacacagtgtccagaaatccagtgacctgccatggttactaggatcggtcggcctaggcgtaccggctgcctattacttgctctcctccggtcctgaaaagaagccccacggcggccacggcgaccaccatgaggccgtkaaagaaacagagaagaaagaggaacaggcccctkcgggagaatccgtasccccaacccgatcsgggacgcggcacagacag

SEQ ID NO: 336 - DNA, 761 bp, Aspergillus oryzae
attcggcacgasgggcccatcgggtgcatgtggcgcccagaaagacacggccatcatccgagatgctgagttcggaagtgtcaaggcttctcctttgggtcgtactcttggtgctggtcccgtgaacccggccattgttatcaacaacttcatgggtgctgggacgcataagcgctcgcgcgttcccgctagtcatagacgtcgtcagctgatcaacgatgctgctggcgttattaccaatgctggtggtgctatcctcaatggtgtccaggaccttgcggacatgacacccgttggtggtgttatcaaaggtgtccaatccacaatcgacgatgcaatggctatcctccccggaaccgagtccggcgcagtaactggaaaaggtgtcaaggagaacggtatgcaactgtatgccgggaaaggcgcgaacatcggccttcctactgcttctccggacggcgtagttacgatgatctaccaccaggttaaccaggacggcgcgggtccgctttctgctgaaatcgacccctccagtggaggtactgatccaaaggccttcaagagcgcccgggtcatccagaacatccctggcgttgcgggattctctacctctagcgcaatggactatgctgtaaaggtccaggtccctcagggaatgaagtkcactggaaccgttggggcagctaagaatgtctgcattgtgcgggttcgcaacaatgctatttccggtccattcggaggctccggtgcttttacgcagt

SEQ ID NO: 337 - DNA, 584 bp, Aspergillus oryzae
  modified_base (468)..(468): n is a, c, g, or t
gacgtcgacggtatcgataagcttgatatcgaattcggcacgacggatcgtggttccaatggtttgagttcaccccttatgaattcttctgtgaggaactcggggccggcatacccacatgggcattaggaaggcatttcaatggaggattcaattcaattccagagggacactatccaatccctgaacttcgtgttccaggcctcatgggagtttggggaagcgctttctgcgcgaccttatctcattactataaagagatacgaccattggtacgaggtattactgggtttgcaggcatagactctttaatccaaggcaaaaataaagacctggttcgagttcatcccatcgaccctgccactataccgaactatgtgctaggcatgaaggatgtcttgccaccttcctgtcctgagtcaattttccgaagctcgcatctgcggctaatggatgcgggaatgagcnacaacctaccaatatatccactcctacgtccgggcagagatgtagatatcatcgttgcatttgacgcttcagccgacataaaacaagagaactggctttcagttgtcgatgggtac

SEQ ID NO: 338 - DNA, 613 bp, Aspergillus oryzae
  modified_base (8)..(8): n is a, c, g, or t
cggcacgnggkcgacatatgcccctcggattctgacatggattccatgtccgtggactcggtacggaggagtagacgctagcaacaggcaggacatcaakaccgagcaaaarwcctcgcttagtggaaggaacagayatcacstcaggtgtggktacgcctggagaaatcstgacacaatgatccacaatgcgatgaggttggtcccatcaaggggttccagatcgcgtcaccgtttgtwcttcatgggcacacattgacaggcatacatgacgsacatggtaccgtacataaatcccctttcgacctccataatttgckacgggtsgccggcgactgttcaaaaagaccaacaawacttcttttctgtacyaaccgctytcgagtctcgttgacactccgagaagatagrgtgayctttgtwtgtgggggcgcattgtttgawagtycaatccaagagagataggaaaagtagacgttcgctgtctccgctccttgcacagctcccactgtctgcgwtcaatctcccgggcggtatcttgcgttgacggacgagcgscggtgaactacaagatcagaagctttcttcagttaaggtgacctggtatgtcgcg

SEQ ID NO: 339 - DNA, 487 bp, Aspergillus oryzae
  modified_base (264)..(264): n is a, c, g, or t
ttgaactagaataggcgtatattgttatgtctttttcttacacttacctcatattgactttgccggctcgggtttgcacatgccgtcgtattcccaggtcagacttctccagacgatcctgtttgttgatatcccgtttgttctagattcttgtccgaataacccgtctttggatgctttgacattagcggcacttccgaaacggcccgtcgtttacgtcctctgggactatgttggaagctggcatgatggacacastgagtnagcagctgcggggcacgccgtctcaactcggagtaggaatgccactccagtttgaggcaaaggaattccaagccaccctcttgagttgaccggtgtgcaaggacgcttgtcacagaatcggcttgactgcctggtggctgcacgggcattgagcgagggccatcgaacarggtatctggtgtactcgttcagccagcggagaatcctaatagtgaagaaatga

SEQ ID NO: 340 - DNA, 746 bp, Aspergillus oryzae
  modified_base (503)..(503): n is a, c, g, or t
  modified_base (505)..(505): n is a, c, g, or t
aattcggcacgagggttttccaggaagaagagcacgcgagagcacgtcccgccaccctcgtcgtttccaaaaatgctctcagatgaaagtgacttgtctgctgcacagtcgtcggatgagtccccctttgcctccggtggtcttctgggtcgaacctatacacaacgccaacgtgcgatgaaggagagggaagaaaaggagaagaaggcgactgaagaaccatttactaatggccttgtcggtgctgtggatacgcgtcgtcagtttgctggccccggcagtcgcgctaatagccgaccaaatagccgctctaacacaatgacgtcgacgcacgcgccagaccccagtggcatggtgaaacggtcgcaatccgtaaagaataagccgcttgtcgacctgactcctgtctatcaagagcctccgcagcacactcgtaaaggacgggggttcacggttgaagctggaaagcccctggtggacgctgcgacgggaccggaggctgngncgggattgtaattccatctgcgacgacctggcgacgaccggaggtgccgtcgcccaccgcagacgctcggacccgaaagcgctccaataccaatcgcagcgccagtagccagcagcgccatcagtactcacgtaccgcgcctacgtctccgacaacccctgtggatcctttgccgtctcgcgaggaaccattcattccaaacagtcttttggctcgttctgcaccgggtgcggctgtcctg

SEQ ID NO: 341 - DNA, 680 bp, Aspergillus oryzae
  modified_base (141)..(141): n is a, c, g, or t
  modified_base (143)..(143): n is a, c, g, or t
attcggcacgaggggaggctattcagaggatcgaggctaaaatcaaggaggccggagtggctgcagcgtcaagatggcacccaaggccgtcaccgagcacgatgatgccgcactccaggagctcatggagaagcgtgaycngnagaacatggaggtcagcggtgacgagagccagtctgagagcgacgatggtgttcccgagtaagcagcgcacaagacgcctacagcgccaatttaggcctatgaacccgattcgaaagaggagaatgtcagaaaattccgatgtgtagttgaacaacactgaatacgaaggctggttatgagtactggttgcaaggatgggaaaaagtttaatagaagagtttcaaatgtgacacgaattatgagacgggagatggttcaatatgctcatgggcagaatcgagatcagcagtggtgttcagaggctatggggatgcgagtccagcagtcaacattggggttgctttacccgtccaaggctgtggttgtctcgtcgtttctcgtctaggggttgttggtcaatcatctgtccctgttgatgactgagctccagttcgctggggaactcgattccgcattctcatgtacataagtttctttgacctgcgggtcaagatcggtggtaccttgttagacacctactatcaaaactttcttct

SEQ ID NO: 342 - DNA, 829 bp, Aspergillus oryzae
  modified_base (750)..(750): n is a, c, g, or t
attcggcacgaggatcttctttcaacctgactgccgcttgtcggtctcttcccacgaatgcgcccgttcgctttcctctctttttagaagaattgacataaagtcatgcgtttcttacgatgtcttctcgctacatcatctctttacgctagtgtcacggcatttgtgccctaccacatagagcttggtgatcctgttaccgatgccgctagtgataagctactgcgtcgttttttcccatatgagttgccgtcagaggatgtgaaggatgaaccggaatcagccaccggggatgatattttaaccctggacatcaaaagggccgcctttcgccgtgacaacaatttcaagattatgttatcagatgatccgacatcacccaatacggccgcgctcaaccaaggcggaaatgactatacctactttgcagcggtcaaagttggctctcaaggtcagaagatgtggatgatgctggactccggtggtgtcaatacatggctcttcgggtcggactgcacaacaaattcctgcaaattgcacaacacatttggtgaacacgcttcgacaagtctcctactaaccaacaaggaatggggcgtgggttatggaaccgggcaggttagtggcgtcctcggaaatgatactttctcgattgctggtatggatgtgcgcatgttgttcggactggcttccaatgcgtcggaccagtttcagaattaccccatggatggaattatcggccttggcgcngctgaggagggatcgacggtcctcgttcatggagccgtcatagagcgaatccctcaagtcaacattgtcagcttcagtc

SEQ ID NO: 343 - DNA, 615 bp, Aspergillus oryzae
ggatccacctcggaccttccgtccattctccattttcttttcagctctcttctgagatctctgctgagtccccagaactagccacaagtgtcgggccaatacgtcctggacttttgcgacttattctctctttcggcttctgtttcagctgctttggaccaacattatcccccacaactcaccacttgcgtggactgcttgtctcccaatgatgcagcatccgacccgccactcctgaactggtctgcagcccatccgctgcagaaccgaacctgaaaagcaaatctcgctagaaaaatcaaaccatgatgtctacgcacagaggacagaagtctaaaaaataaaaaaggaaaaagaaagaggaaactcaaaaagaaagaagaaaaaggaaaaaaaagaaacgttcgaataaacatggttcgaggagtgtccagcgcgtcggaaccgtcagaggaacgaggacatgttccagcagagtggttcttccccccgttggacattgctgctgcttggctatttttccgccctgatttaggggggcaaagacacttcgccccgactctataaatcagctcccatggctcaattgccacgattagtcccaagactttgaga

SEQ ID NO: 344 - DNA, 855 bp, Aspergillus oryzae
  modified_base (745)..(745): n is a, c, g, or t
  modified_base (794)..(794): n is a, c, g, or t
gcacgagggaagaagcatatcgagaatgcccgccagtatggagtgcccgtggtggttgctattaaccgcatggagaccgacacggaagcggaaattgatgtcatccgggaggaggccatcgctgcgggagccgaggacgcgatccccgctaaccactgggctgagggtggagctggcgctgtggacctggccaagggtgttctggcagctagctccaaaccgaaagacttcaagctgttgtatgagctggaaggtaccatccaggagcgcatcgagcgcatcggcaaggtcatgtacggcgcggagaagattgaactcagcgaacttgcgcaaaagaaggtcgatacctacacggcccaaggatttggacatcttcctatttgcattgcgaagacccagtactctctcagtcatgaccccgccttgaagggtgctccgaccgggttcacagtccccatccgggatgttcggttggccgtgggtggtggatatctgtacgctcttgctgcggatattcaaaccattcctggtctgccgaccgctccaggttacttgaacgttgatattgataccgagaccggagaaatcgacggtctgttttagatgagctatgtggtcgactggatcgatcctgggatgcctggtgtaatggctgaggttgtatagagacgttgctctcaccaattcaccctgcttcccagtgctctaattcttttaatctgatatacatcatttgttctgtgtnatcaagatatggcggtattctcgggttcaattcaacatttacaagcgtnatggcgcaccagcctcagggacaggattgggtgcttttcaacaaggtgggcggacggagtt

SEQ ID NO: 345 - DNA, 578 bp, Aspergillus oryzae
scgagattgtcaccgctgtgaccggtgacagctgcactagcggaccatgtgctcgtatgcttcccctgctggttatcagaagtcccagtggcctagcactcagggcgccacatgccagtccattggtaggcctcgaatgtaagaatggcaagctctaccttaccaaccccaccctgtccaagaagctttgcattgagggtsttggtggtgttcatgctcagaacaaccttgcgcgaggagattgccatctgccgtactgattaccctggtaccgaatctgagaccatccctctggcccttggcgacaatgagcttcagcccttgacttgccctsacggcgaaacctacttcaagtgggagggcaaggtcacctccgctcagtactatgtaaaccccaagggcaccagcaccaagcagggctgccagtggggtgatggttccaagcctattggtaactgggckcccatcaacctcggtgtcggtcagaacaatggcaagtggctttctatcttccagaacagccccaccaccascgtgaagctcaacttcaacattaagatccagggtgacaacctcag

SEQ ID NO: 346 - DNA, 842 bp, Aspergillus oryzae
tctacatcattgaacgggaccaatcattcaattgatataacagttcctcttcttaccagggaataaggtagagtagttcctgtgtaatcctctaacttccccgaggtgaaccacggaaccgatcatctctacttttagcttccttggaccggaacactagggactgatctgttgttcccttgggaaccccactttaatgggacaacaaacgctctatccgaaggcataaaagagacatatatacctaatctagatcgcactcgagtgtcagtgctttcaccaccatttgttgttcgtcgtacaccagtgcccataatacccgccgagaaggaggggtggaatctttatcgataggaccgtcgactcacatccccagtctctgcgcgcaatcccatcgcgtgtttagagactttgttcttgaccactttgactcggtctggttggctcatccgcccagccaccgttttactatctgacccgtcggggatcaaagatactatcgcatacaattcttccgtaccacgcagatcaacgcgcacacaaaaattattatttcaagttcacattcctagctgtccatcgcatacccatccacccaatcctatctgttctccagggactgatcttcagcaacattgctctcctttcctcctttcccaccgcctcgtggtcatgagctctatgacctctttttcgctccttgtttcttctttctgctgaactctctatttcatctctgcatacactytttccctttcacctcaaacacaccatctaatgccgtatactctctgattgtccacggcttttgtcgcaaatctagttggttatccgtgggtata

SEQ ID NO: 347 - DNA, 712 bp, Aspergillus oryzae
gaagctgtatatggagacccaagtgccgaccgtggtaggaactctagagcacagaccccaatgagctcttccagagctcaaacccctctgacggaaccggcgcctgccattattttcccccgtcgtaatctgccccaacggccaaatgttccacctcgttcgcccgatgttagccatctcacattggaactgaaccctaactctgaatatatcgtactggtgtcaatgtatgaagtctataatgatcgcatctttgaccttttgtcgccagcgatagttccaggccaaggaagtaccgtgtcgcgagggggaaccaaccagaaggacagacggagacccctccttttcaaatctactgaaggatctcccgacaggaaggtcgtcgcgggcctacgcaaaatagcctgcagtacttacgaagaggcactggcaattttagaagtcggactcactgagcgcaaagtcacgggtactggcgcgaacagtgtcagttcacggagccatggattcttctgtctcgaggtcaagagaaggatgcgtaacaagagaacgggagaagaaacatggatggggaacacccttacagtggcagatctcgctggctccgagcgtgcaagaaccgccaaaacggctggatctaccctggccgaggcaggcaaaatcaacgagagtytgatgtatcaaaaaaaaaacttacaaatgcagagtgaga

SEQ ID NO: 348 - DNA, 442 bp, Aspergillus oryzae
tcggcacgaggcaagaccactttcatccaaacaaaatgggtttctttgacaacgaccacgagaacgctcaacaccacaaggaggtccaccagaaagaaggccatgagggacactggtcccacgacgccatcgcgcggtgccgctgcctacgaggccatgaaggccttcaacgaccaccaggcaaagaacggaaagccccaggmccatgcccaggctamscagatcgccgcyggcctcgccaccgctgcygctcactcacctcttcgagaccaagggtctcacacttcattcgcacaggggagaaggctgtagtaccgtgcctaagaaggacgctggaggaggccattggaccgtcactatcaggggttgatcttcgccgttgactcttgaccgtccatgatgtatataccatgaatatgaataccaattaacgtttaaggcc

SEQ ID NO: 349 - DNA, 689 bp, Aspergillus oryzae
  modified_base (12)..(12): n is a, c, g, or t
ttcggcacgasngcttcaattaacgatgactcggtgatgatttatgcccggctgttagacacttgaaccattacacaaatgtcttcgctttgaacgacacattcctggcagacgtcaactcccgagcggacaagtgtggcttcaacaagttccttgatgaggcttgacttacccgccaccaaggacttccccgtccttccggaaatcagctcggagtgcgctatctgggacgacattgttgcacgctgcttacgatgtcaacccttgcttcaactactaccacttaacagactactgtccttatctctggagcgagatgggcttcccttctcttgcaggcggacccaacaactacttcaaccgcactgacgtccaaaaggcccttcatgtcccycgcacggattactccgtctgcggagaaactacgatcttcaagaatggcgatcaatctcctcccagtgccctgggtccccttcccagtgtgattgagcggacgaacaacacgatcattggccacggctggcttgattacctccttttcctgaacggatcattggtgasaatccagaacatgacttggaacggtgctcaagggttccagaascctcccgttgagcctctttatgycccttaccattatggtctggcggaactcgccaatggcaatgcccccgagccattcaccttga

SEQ ID NO: 350 - DNA, 822 bp, Aspergillus oryzae
gtaaaagtgcctacgcaaatcttcctcaagcgatggtcaaaaacggtctaatccagtcgaatgcttatagcctttggctcaatgacctgggagcagatactggctcgattttatttggaggcgttaatacggagaagtatcatggggaactgcaaactttgccgattcagacagtcaatggggtctattctgagttcattatagcactgactggtgtctcattgagctcagcatcaagtcaccataattattcatcttccgatgctctcccagccgcggtcctgcttgactcaggaagttctctgacctatcttccaaattccattgtgcaagamatctatgatgacctgggtgtcacttatgagtmatccagcggtgttggctatgtgccatgtagcctggcacagcaaaatattaatgtgacctacactttttcgtcgcctattattacagttggaattgatgaactcgttctagatgcaggtgatctgcgatttcgaaatggcgcgcgtgcatgcatttttggcattgtaccagccggagawagcactgctgtcctgggggatacgttcctacgcagtgcatatgttgtatacgamctatccaamaawgaaatctccctggccaawaccaaatttaactccaccaaggataatatcttggaaattggaactggcgatgattccgtccctggagccacccaagtttcaaatcccgtcacatctggttgtggccgatgggtcaggggccaggatcgggggtccaactggtgavatcttcactgawataccttcagmaaaaarttctggcggcgctgcagca

SEQ ID NO: 351 - DNA, 291 bp, Aspergillus oryzae
cggcacgagggatcaatcttctctatggttctattacagagttttgttcgcctcagtcatgcccggagatgaaagccacagacgaatttgagtacctttggcaagactcagaacactttaagcggccaacgaagatgtctgctccggagtacatcgaacacctgatgagctgggttcagagtaatattgataatgaacaaatgtttcccagccgactgggtgttccgttccccaaagcctttaccagcctcatccgtcagatcttcaagcggttataccgggtatacgcac

SEQ ID NO: 352 - DNA, 781 bp, Aspergillus oryzae
  modified_base (106)..(106): n is a, c, g, or t
  modified_base (108)..(108): n is a, c, g, or t
  modified_base (184)..(184): n is a, c, g, or t
tcggcacgaggaccttctgttctattcattaccagacaatccttatcctttcattttattcatcatcaattatcctcatgtcatacatatacagagagcgtgavgngnaacgcgactgggatgaaccacgttctcccgtcacgatcaaacgttacgtcatctctcgctctcgtaaacgtgagtngcgatcccatagcaggctccgaaaggctcttcctgtcgtagcagctggcttgggcaccgctgctgcgacggggctttacgaaaagcacaaagagaagcaagaagagggcgaasttcgcgccgcaggaacgatctagatctcgaagcagggcgccttccgaaatctaccctgacccgacacgggactcggctggtttgatcgagtatggtcaggatccggttcacggaaggattcccacggcggactactacgggcggcctacgagtcaacaggcttattactccgatgcttctgacccggctgtcagcgacacgggatttggctcgtcacggcatcgtggtcgcagcattagccgcagccgcagccggagtcgtggtggaagatacagcggtagcccttctgggtctgatagcagcgatcgcagaaggcggcgaagaagacaagataagcatcgtagccggtctcgtgacttagccgaggctgctttggccgcaactggcgtcggttatgcggctcataaatatacgcagcggagagagcggaagaaggcggacaaggagagggaaaggccaagtgagtggccatagcagattgaga

SEQ ID NO: 353 - DNA, 867 bp, Aspergillus oryzae
  modified_base (20)..(20): n is a, c, g, or t
  modified_base (90)..(90): n is a, c, g, or t
atcgttaagcttgatatcgncbstggcabaggcaaacatctgaagcgccatctgctcasacataccggtgaccgcccatacatgtgtgtnctgtgcaaggatactttctcccgtagtgatattctgaagcgccacttccagaagtgttcgttacgacgcggcaacccgacgggagcgacccacttgtcgcatccccaggcacatttgaagaggtctcaagctgcgaatcctgctaaaccggttcaggatgaagtcagtagtaccgtctctcccgccactgcccttccgggtacggcttacggcgagggggccgtgaacggtaacgggctggcttcaggccgacctgggttcacggatcagcagcctctgggctatccgatgtcgtcggtcaatgggatgaaccgtggtcaaccggacgatgcgttccccgctggtcagccacatcagagaggcccctggctggcggctcccaagcagaacccgtatctggcgcaacctggcactgatgtatctcagcagctgagtgttgaccgtccttcctatgaacaggtaaagcccccggtggtgcaagaccctaagcgcccagtaatgcctgggcccactcccaatcacactggcgaaattgactggacttcgatgtttcagcccggagcgaatgatggttacatcaaccccgttttcccccaatccatggcgtctggccaggagccgatccatgctcacgtcgataccgaacggaaattctatcctaccacaaccggtggtccccaggaaggtggcatgaatggtctttacttggcttcgaccactttggccggtgatggtaccgtccagcccgcgaggcaatagtggcggaatgaaacgaat

SEQ ID NO: 354 - DNA, 1015 bp, Aspergillus oryzae
  modified_base (969)..(969): n is a, c, g, or t
cggcacgaggctttcgaccactgtatataatactctcgttgcatctccgagaccttttcgaagacaattccaggagactgtcaaaattagattatactcaacggcacaactttaataattacctatcttggtcgcgtcgggcaatagcggaaccccccaattctcgcgcaatctcttcgcctcaaccaaaattttttccttctgaacaatcttgatctctctcttacaccatatattcaaaatgcacgccactgctgctctccgctccgctgcccggactcctcttattcggttccttggccgtcgctcggtgcctcaatctattgaccacactcctcgccctcaccccgcctctccttcaggcgccctccccgactcgttcgctgcttaccgtgtcaaggcccagcagcacggccctctgagccgtggctcgttcgttgagggcgcgatcggccgtagctcgggctcctctctgggccccgttcagcccaagcagggagaatacttcgaccgtgccgagctccctcctcggttccagcgtcttccgtggagccaggctgagattgaagctatcgagaccggtggtgctagtctcttcgcttaagccctcttttgtgtacatgaatgagggatgatgcaatgaagacgattacaacgataaaagtgagatgattggggtactcgcttgcttggagggtcactgttgaacggagacacgacgcaagtagctctccgatgtcttcgatgcgatacgaagaacatccggatagcccgtggggctgggttaatctcacgtcgtcgtggaccctaacatcattagtcgacgggggtgggaagctttgcacctgatgggtccaggagaatctacatcaggggaatctcgggccgacccctgctatttttctttgatatcatttattcgtaccatgggcgctggtggttgttacttcttccttagsggtttttatntttttctggcgtggtatatggggtgttatcgtcttgacgtcgggtt

SEQ ID NO: 355 - DNA, 981 bp, Aspergillus oryzae
  modified_base (202)..(202): n is a, c, g, or t
cgaggagtgttggcacttgcgcagggaaattcgttgagacggtgatatctgctcgcacccagatattttgttcctcaagccagataagttggtgggatggcgaggcgctttgcacgaaaaggtctttctcctctaggacgcgggttgaataagcccagaggagaggagtgacctggatgagagatggggcgtcgcgcasgangtaatcgactcttcgttcagagggaacatggcgaacgcatttccgggggtcaaatttcctggatgttgcatgcctcgttcacggcgatgccagttcacgccagatgctatactaggcgacttctgtcgggacgacggcaccgggtcagcggatgctggccgtggaggatgggttggcaggccatcgaatgcttccagtggtaacgctgaatagtctaactgtatgctggggacacccgagtaaggattcgtggaatggggccgatgaataacaggcgggccttccaaggacgacaggtctattgggttcatctggacggcgatggtgagtacaagccgatgtcgatctggggaacggtcacaggcaaaaagaagcgaaatgattgaggagtaagggccggccgctttcgtaactatattattatactagatcataccagggcccatgcctaggaacaagtggcacggccgggtacgartcgtggaggcaagattccaaaaaaagcgatgaatacgatgattaacgaaagggccaagtggatcgccacacaaaatgcgtatttggcaacaaaagatgcctagagagcatttaagttcaatcaagcaaacccccgcgagataggttgcccgattcaacttatatgatcacacatggtcaaacgtcggacaatgcgttgaggcggtgctcggtgcagcttcgagtcctttgtgtgccgcgtccaacagagaagaacagcacaacaaaaccaacacttctgcgccgscccatgcatcaaagga

SEQ ID NO: 356 - DNA, 952 bp, Aspergillus oryzae
aggagccaatgggcttccggagccagccggccaactaccatctcagatgttttatcacgttagggaagtttctgtgctagataagcagcctgttgaattcctacccgtggatttgcaattaaatccaacataccaggacctctccagtggctttggagatgacactgccgctttaaagcggagagaggaacggaaagaacgtaacagggatgatccgttttatattgctgctgaagatgaatcctcctgcacattgaccccatttcaccagactctcaatatgtcaaatagtagcggactggatattgactctattcctatagttgacctcaatttgaatggcgccgggagtcatcgcactttggcatctctgtcgcgcgataaccgacaaggtggctcacgccctaaaaagtacgagatcgcacctgatgagattatcggacaggaagattcaccgcatcttgactcaaatgatgaaccgggtaaagccaaacggtctcttctacaggtcgactcgagtggactagagcatctatccttagatggtagaggtggttcctcgggagatcctacagtccctacggtggtcggcgggcatgatgtagagatggctatggctgtgcagaaagtggaaaagctgcggctagagatgcaaagagcttcagaacgtgttcatccgaatggcatccctgcagaagggacgctggtaaggaaaaaaagaaaatcaaaaaagcctacacgtattggatctcaggaagctgcactgctaaaagctgaagatgaaatgtcggtggacaacactcaacagatgccagtttcatctgtggcaccaaagaaaaagaagagagcgaaaaaacaaatcaatgctggctcaagtagcgcactctaaggtatatccacttctttgtgggtrtaatggagttatgtatcaggagattggtggttgggagtr

SEQ ID NO: 357 - DNA, 883 bp, Aspergillus oryzae
aagggagaagcaccactttactgttgaacctccctttggggactatttgggctgctggctctcactcttccacttgactttcccgcccgcccgaccttgtttcgccgagctttatcacaaaatatcatctacctgggacattctccgctgtccacctggtcgtttggagcttttcacggctcaggcagttgagctaatagttcgaccgtggcgattctcgatacctgacaatagactcgagaattgttatggcagagcagagcagccacgatgtggtaaatcaaaccctgtcgggcggcgagccctcgccttccgacgttcctgcgagcaccaacgacaagaaacctgccggaggggacgtgggggagatcaaacataccgcaacacatacacagctcgaaacaatcacgaacgccgaacaaggcacacttgatacgagtttatccgagacatataatgaaaataatgccgctgggagggatacggaacaatcgacgacagataattcaaggcaaggccctgggcccgtggcgacaagggcgcttgaattaaatggagtagcatccggttccgatgttggagaggatacggcctctcaaggcggctcagaatccgacgccagtgaaacggagagcagacttaactcacgtgcaagttcaaccaagaggccgacatcattcaagccagtctccttcgcaaaattttcagtacccaaagctccgggaacgcctccgacagcyaagatttctgagaaagctccgttgtcttcaactaccccgctgggtgtacctttgcaaagctcacgaccacgtttggtcgcgaaaaccactagcagtcttcgcgactcattatcgaaaaccgggacaggtgcggcgaggccagc

SEQ ID NO: 358 - DNA, 817 bp, Aspergillus oryzae
ttcggcrcgaggctgttatcgagttgtcaagggaatgacttctttgccagtacccggattggctgcagagtctgttggctggatcaaggatctcacggttgcggatccgtattttttgcttccagctgctacagcatttgctatgtatatgtctttcaagaaaggtggagagaacggtatgaaccaaatggcgaactcacccgtcggcagggctgttctatacggaatgcctgccttttctttcgcgtttatgtcctttttccctagtgctcttcagctttacttcctatccaccggtttgtttgctttggggcaggcatacatgctctcgtctaacagcttccggcaatttgccaacattgccattcctaaaaagccggtagaagctaccggaatgtcacccgaggagcatggccgagcgatccgcatgatcctcgacacccagaaagcggataaacccatggaagtgccagcagtagaggagggccaaaagcttagcttcgtcgaccgtacgctcaatagcgtcaaaaagaattacgataatcttacaactgatgtgaagggaaagttagactcggcaatggggaatgagcccaagaagaacgcagacgggtcgctggcggaacccgctcggctcagcgagaaggaccgcaaattagcggcagactacgagcagaggaggaaagaagaagaagactggaaacgggaggagagaaaccatgcgcgacgagaggcccacctcagagctctggagcttgaaagggagaaggcccgttccgcattcaaacactccaagcaaaggtgagcacgaggttat

SEQ ID NO: 359 - DNA, 1032 bp, Aspergillus oryzae
  modified_base (303)..(303): n is a, c, g, or t
  modified_base (339)..(339): n is a, c, g, or t
acgagggcaaggtagatcccgaagatgacttgacgcgcaagaaaatgagacacgcgatcgcaaacgcggatccgcagtcagcgaatattcgtaccgtacagccaccgagtgcccagtcccttgacgaagacattgaactcccagagcaagatattactggcccggaacccccatcagaccaagaagctgaacagctttccgctcaacctagtgcacaaccatctgaggcagcagcggcatcgaataatacgactgagcaaccacagaatatcgatgaagacgaatgggctgcttttgagcgtnaagtggcggccccaacccgggcaccacaagcgcctnctgcagttgccgcgcaggcgacgatatcagcagcacctatttctgctgagcaactggcagcacaacaagagaaagaaaatgacacaataacccgtggccgtaaggtgaggccgaagtgaacgtgaggacgcagcccgcttcttagaagacgagttcgacgagatggaacaactagaggagcgggttagacgattgaaacacaaacgtgaagaactaagaaatatgagggccacaggggtaaatgaagatgatttgatggatggtccagcttcggccgccacggtgtcaaaagaccatgaaaagggccaggaagacgaggaaaatgatgatgacgacgatgatgatgacgacgacgatgacgactgggataattggagattcaggtaacagacctgaaaagaatcaaactgggaaaacggaaaaggtgtcatttttttacaaagggaggtctcgaacttttcataattacattgataccccatgagccatacgaatcgcacaaaagtgttctctaatgtgtcacatacatcactggattccaagcctggcgccctggctattctgtatctattaggtatgagtttttgttgtcctgtgacctacgtcgaaccaataatttgtctggagayatagaaggatatgaatggtcacatagccgtcacggttcggcgggctgttcttggccagacaata

SEQ ID NO: 360 - DNA, 922 bp, Aspergillus oryzae
  modified_base (412)..(412): n is a, c, g, or t
  modified_base (517)..(517): n is a, c, g, or t
ggcaaacctcctggaggcggtgcattgatatcgccaactaccaggcactctctttaaaatattgattcttccgatcattccttttttcgttgtaccgcgacttttctctccctctaagaaacatcagtatcccgtacctcgaaatccgggttcccaagattaaaaactgcactctttcaacactctaccgacgtcgcaaaccggaccactcatttaattttgatcgctgatgcaagagggaatcgcatcctgcgaaacaaaccaaaacccgagtcccgtgggcagttgttgatctgtggctcttgcgaccgtgaccatctaaacctcacattcctacgctgggttccgtttcgttgcgcasagcacatgttttacgctccagtgtgtgtcgcatacggtgtacttgtgcctnactaaagtgatatctggagaaagaaccgtcacatatagcccgtaatattgaccgtgtggggtcagataacccaatctcaggattcatattccgccaaaatgagtncggtggatacaacgccattcccgatatggccgcgcgactttgtgagcgatctcaagtccgctccggaaacattatcgagttgggataattgtatggccaaatcgtattgcammccscccgtcatcgttgcgatcattgttggtgcgctcattgttatctccattctggcgtgcattatcaattgcctgtgttgcggcatccaatgttgcaaatgctgtggatgctgttcatgctgctgtccgtctccccgccgaaagaaggagccaaaatacttggatgacccttacaatcaacctccaccgatgccggaaaacaatccttatcagccacccgcaccccatctctgcctacctatcgtggagcgcaggtcgcacggtttgacacacccccgagccctgcagtctc

SEQ ID NO: 361 - DNA, 665 bp, Aspergillus oryzae
aggcggtcattgagcttcctttacatctttagacaccatgagcagtgtcgctcatgtggatcagcgagctgtcattcaggcctaccgtcatctttaccggcaaggactgcgggtgattaattattctacgccatcgcgccatgtccttctccgaactttgcgatcctcgtttcgctcgtcttctcatcatgatttcgatccacacagaatagccaacactctacgcttcctccagcgagctgcagacgctgcgggcgtggaacataagatcgtgaagaatctgatgatggttaggtactgggaacaaccccaggtgagaaaggatttgcgattattgaaagggctagggattgaccaaagagagtccaatttacgcagagatgccaatgagcagtttaatttgacactaatgcttctgaatgagagcttagggacatgtctcaaataataaggggtaatattgctcttcgttctagacactggttaaggttgtactttattgtgtgattctggaaagttggaggaattgtggtccagcagagatgtattgcatctccagtctgcgcctttcgattttaaaacacattagtggtgacccctgttgaatatacagtatatgtacagctaagaagtacaactccttaggtatatccttattcttccct

SEQ ID NO: 362 - DNA, 979 bp, Aspergillus oryzae
  modified_base (392)..(392): n is a, c, g, or t
aaaccaacctttacgcgctgaccttgccgactgcgctcttactccgactgccattagtcctttgctacaagcattggctcgcctgcctaatctcatattcattgacttctcccataacccagagcttttttccagccagcctgatgctctagtgactttccggcgtttcctgccaaaaatgccctcattgaagcgcatccatttggctgatgtgaatttgtcagccgaccatgccatcgctcttgctgaagtcctgcccgaatgccctaaactgtgccatctgagcatcttggaaaaccccgccatcagtgcgctactgctgcaacagactcgagtaaccaggaagaagcctgcgctgtttacgcttccttaatggcagcggtacgtgtgtngcggaccatcatagcagtggaaatcgaagtcccaagtgcagaaaacaatgaagttgtgaaggctctcgcctcccagatcgtggcctattctcttcaaaatcttgaacgaggtgctattgaaggagatttatctgtgcctggtgacccgtccggtgcacgtgagamcgttcctgtgcccgagatcctgcaacatattgttggccatggcggcggggatgaagttggcgatgaagatgatgagccagctcctgatgaggattacgtcattggaggaaccggtgtagtcaaagccctgggggtttgccttggtaacctcgatcatcatatgcccggagatcagtctggtccacccagtggaacgacaacgcctagacacaggaagtcccggtcttatgcggcgaaaaggccccgtgatatgtcgaagaacttacttgaatccgctcgaaacattcggaccaggattcaatcggctcttgtccgtgaggatagagccggcaatgatatcaattacagacgtcttcaattcctggatttcaccttgcataggatgattcagcgattcgaggacgagtacccagagacgcgga

SEQ ID NO: 363 - DNA, 843 bp, Aspergillus oryzae
cccttgctcatcacaaacgcagccgcagaactttagttaatagatttaattgcagataatgcgacgatcctctaagtcgttgcagggaccaactagtgaacacatcttccagcctccttgattcttactgaaccctccccttcctcatcacacatacacttattattctgttggcctgcgtataattctttgcaacatggcctatgatccacgattagccagtgcgggcactgcaactccggatcctccgcctcctccccctccccctcctgagtctgccatggcagcaccaacggagaccgagtcttcagacgggactgcagccgcccctacccaggagcaacagtcagactcttacaaacttagattttgcacggtgtgcgcctcgaaccaaaaccgttcgatggaagcccatctccgtctatctactgcaccgtctcctttccctgttatttcctttgggacgggatccctggtccgtctgccaggcccatccatcacgcaacctaatgtgtacaatttcaataccacctcgtattcccaaatgtacgaggaactgtactccaaggatgagaggctctatcgtaacaacggtcttttaaacatgctcgaacgcaaccggaacctgaaatgggggccggagcgcttccaagactgggtccctggtatgccccgcgtggaccacgtcgcgaaaggcgacaaaggcgccctgggggaccgagggcggcgtggmtcgatgtcattatcacctgtgaggagcggtgctgggatgccgttgttgacgatctcatgaataaaggatcgctcctcaacsgacccgtccatgtattcaatgtcgatatt

SEQ ID NO: 364 - DNA, 739 bp, Aspergillus oryzae
saggcaagacagggtataaattgtccaccgtgactgcctctcatccattacatatcattgatagggagagccctcacgtcgctcgccggcttcctatatttgcagccccctatgttcttagcgattacggagagggagcagtaatgggagttccaggtcacgattctagagatctggcatttttcaaagagaatgttcaacctgagtccatacctgtcgtaatcgaaccacatcgtgcatctgatgccgagtccggggctagcgccggccatctccctgccggtgatatgaaagcttacactcatgagggtttcctcaactcgagatgttggaaataccagggccttcattcccgcgaggcgggtcaacagataatcaatgacctcagagccgtagcatggagacaccgtggagcaatggagactgagagactggttgatcagcaggcagcgctattggggtacccgattcccatcattcactgcggggattgtggccccgtgcccgtgccggacgatcagctcccagtcaagttgcctaaaatagaaggggactggctgaaagggaagagaggaaatcctctggagtcgtccgatgagtgggttaacactgaatgtccgaggtgtcaaggtcctgcgaaggggaatacggataccatggatacctttgtcgattcctcatggtattttctcagatttctagatagcgccaaccgacgacagccgttttcaccgtcatc

SEQ ID NO: 365 - DNA, 819 bp, Aspergillus oryzae
aattcggcagaggctttgacaacacctgaatttcttcaagtggcgcttctggaagctctaggtggcgatatccccggggctgaagaatactttgatgactactcgatagaagaggtcagcccttttgaggacatagaaatggatgaagcagacgacgatacctcagaaggcgatgatacatcaacttccgaagcagttgcttaccaagtctttaaccgtatgtcacgcggtgtcttccccagtgatcccagtatctatggacaaagggagtcactaatagatttttcatcgactccagctccaacacatgcgaactttccgatcctccacttctcccaaacagatatccgcctcatccccaatccacttgcccctcgcgcaactgtattctgtggcacaccccttcggcaacaattcacccacattgttggatcgcttcgagacgcatgtgaccgcttcaacatggtcaaatatatcccagaacacggaatcgtagtggccgcctcgcaaaaaggccgtgccgcagtgattaccctaaccgagtcggaaaccaatggcctatcattcagagtcgactggatcgttcctttcgagagcmaggaaaagtacggtgaccgacctctgatccctctcctaggcatgagcgtcagtccaatgcaagggtttgagatgcctcctgacgtgcctaacattccacacaatgccaacggggatggcgtgaaattccactataagccaaccaccaacgacgagtttgacacgcctttacaaaacaactccaaatcagccaatattgcgagcgatgagctgcattcccct

SEQ ID NO: 366 - DNA, 859 bp, Aspergillus oryzae
  modified_base (474)..(474): n is a, c, g, or t
ggcasgaggcaggcaatttgttattgtgtgaaattgctgcaggtcttaccacgggccatgcctgccatcgcaagatgcctccttattgactggatcgttccactgtccatcctgcagacacaaacggtgggatcagtcacctcctcaattcgacaggtccgcaccttcgtcgaacgcttcacggggcagtactcccggtgtaaatggctatagccgagtcaccagtccccgtgaatatgcttctatagatggacgccggactttgacagctctgggcccattggcaggacccacccaggttctgtctatacgatctccgcctgatgtcgaccgtcatcagtcttctgaagatcacgggaattttgcaactccggaaactgacgtcctgtcccgcgccaggaaccttcttgttgactatggtcaacttgatgctgacaaagatataaggcccgagctcttgctgaaattggcgtnaatgatgacagagctcgaagcccaacaatcactgcaacaggaggttcaggaactgaaggcagaaaatgttgctttgcgaaacgagaatgccaacttccggggatactttacctcccggctgccaacaaacgagcccatgatcaactcttcgtcaaacatcatccctccgatcttcccaaggccgtcgtccgataccagtgggaagacttgggataggatcgtgatggatttaatctaaccctatccaggtataactgagatgcatacactgctcatcgatactcagggagggcaatatcctttgcgcgtcaactcatgcatatttctcacgaattgttgacgacatggggctccaactccgctggtgtcgtcactaagatacaga

SEQ ID NO: 367 - DNA, 687 bp, Aspergillus oryzae
  modified_base (495)..(495): n is a, c, g, or t
cggcacgagggaaaactataatgcttttcgaagtaatctggataaccagacgataacaagaacgccgccactattcaggccccggagctcggatcgatctgtcgctccaaataactgttggggcagtcaatcgtttgaccaacaatccctaaccccatcttccctagcttcgatcgcacatcaagaaaatcagtattgtttgacagctgaagatttgaaacccactttttaccccagagatgaattacaactgccccctgaagatattgatgatacggatgctgaagaattcgaggaggcttgtctaggctgtcgacattataaaaggaacgtcaaactacaatgttacgcctgcaagaaatggtatacttgtcgattttgccacgacgaggtagaagaccaccaccctcgatcgcccaaaaacagaaaacatgctatgcatgctatgcgggccatgctcagcctgccacgcaattttgttaggcaatgcggggnacaattcttcgcagttttatttgctacatctgcaagctctgggsgggcgagtctagcaaaagtatctmccattgcaatgattggggaatctgtggaatcggtcaaagggttaggcaaagacttttttcactgaaagaagtgctgagtttgtctgccttatttcgatcgagaaatacgcattcgatgcattga

SEQ ID NO: 368 - DNA, 670 bp, Aspergillus oryzae
  modified_base (313)..(313): n is a, c, g, or t
  modified_base (334)..(334): n is a, c, g, or t
gggttagactggggtgtccctctcgaccagcttcccgttatggagtgggacgactacgtcgagcaggccaagaatggccgtggtcttattgccattgccggtgttgtccacgatgtgactgacttcatcaaggaccaccccggtggcaaggctatgatcaactctggtatcggcaaggatgccaccgctatgttcaacggaggtgtctactatcactccaacgctgcgcacaacctgctgtcgaccatgcgggttggagtcatccgcggtggctgtgaagtcgagatctggaagcgctcccagaaagagagcnccgattacgtccgtgacagcngcggtcagcgggtcatccgcgctggtgaacaggttacgaagattccggaacctatccccactgctgatgcagcatgaagtcgctatttattcactttcctgtgatgtatgaatgtcttgatattgcattctttttctccacgggtcatgtctttatttagcaccttgggcgttcattatacgacaattaattgtttggggttcggagttgggtttcggtttagcagcaagatgacgggagaattgatttagttgagttttattcgcatcctttataaaagcgacarggtcagaacatacttatttgttcaatgaaaatagatgacgatatccacct

SEQ ID NO: 369 - DNA, 785 bp, Aspergillus oryzae
gcacacgcactggaattagccaccaccctgatagaagagaacaaagactacgtctccgcagcacacatccacgcagaacacctccacgacgtccccctggccgcccgtctcctgtgccgcggttctcgcttcgccgacgcaacacgcctcctcgcactgcacggcaagcaaaatctcgtcccggaaatcgtagatacaggtctggcagacgctatgggctccatgaccgaccttcttgccgacttccgatctcagctgaacgcccaagtaccacgtatcgtggaactgcgcgttcgtcgcgctaccgacccgctggcctatttcggaggtgatcccacgatgggaggagatatgggtgtcgatatcccagataacgtgtcccttgcacctacggatgcttctacacttgccggtcgcagtatgttcacgaggtatactggcaagacgggaaagactggcaagacgaatattacgagacagacttccaagactcgtcggaaggaagagcgttactsgacyagtggtaagaagggaacagtgtacgaggaagaatacctggtgaacagtgtacggcgtcttatcgaaagagttaactcgacggtgtctgaggtcgagactcttgttagtgcactgctccgacggggcatgcgggagcgtgccgccgctattgaaaaggctatgcaggaggtgctcaagtagtgtactgactctcgagtcgaagtgttcggtgccgtggcttcgccaggaggcgaacagactgacggcgctgagcctgagactaatgt

SEQ ID NO: 370 - DNA, 826 bp, Aspergillus oryzae
  modified_base (159)..(159): n is a, c, g, or t
cggcacgagggttcgttccacagcattcgtcagtccatctgtaatatataacttaccgtcttactttcgctattctaacacacctaatcactcctaccattaactaagcacctccatccaagtacccacaatgccaccatccctaacctcccgtgcctnaggctccatatggggagtctgcgtcggcgacgcactaggcgggccagtgcaattcatggacccaggcgccttcgagcccatcaccggtctagaatacgtgcaaccctttcaacagcccgcaggatcctactccgacgacggttccatgactctagccctagcgcaatccatcattgactcgcatggccaatacaaccatgccttgtcgatccagtatttcgtagactggttcaccaccggccggttcagcacgatcgaccgcgcctgggacgtcggtgcctcgacaacgctctgcgctccaaagctggaggaaacggggcacgagcgatcttcaacgtgtccaggatgtaatcaatcagaagctggatgtggagcaaagctcagggaacgggagcctaatgagaattgcccccattggactagctttgtggcgcgatccgggggaagcgagaagagtcgctagagagcagagtcgggttacgcatcctgtgctgggttgtctggaggcttgtbaggtttatacgcttttgatttgtggggttttgagtggcaaaaacaaagagcacctttgcaccataatcaacgaataaaacttcacccacagtaccctcgcccagcgactctycaactacaagaccccatccgactggcaagtcaaatccgttcc

SEQ ID NO: 371 - DNA, 839 bp, Aspergillus oryzae
  modified_base (268)..(268): n is a, c, g, or t
  modified_base (484)..(484): n is a, c, g, or t
gaaataatgttcgcttggtgtccaggggagtctagaaaatcgggacccctcttaaggttaatgctggagactgtactgtagatataaccccggcgcgacccattcgtttagttcgatcttgtttcttctccatctttttgtctatcgctaattccttagttcactccttttttcagtgttagtctggcaatttcatttattatcctttgaaaaagggtttgatcaccctctttcactctgttttatacacacgtttctttctcctgtnctattagtgtctgtatagcgcttacatccataccctcgttggtcccttactcctaatccatttgcatcctcccgaaaccccgatggagggacacagttcaccatctgccgctgcagatgtgccggcacaagctggagagggtcctgccccagttcaagccgacattcgttctcatgctgttcaccatgaccaaggagctctcccggaacgagagtngtcaccagctcgtcgtatcacacccacgcccaacctttctagaaaacctcgccagttccccgagattcccaatttatgcttgaccgacggaactctagcgaaatcgatcggtacttccatggcccccgtgacttggacaagcattcgaaatggcccaccttcctccgaatgcatggcagtgtgctgcccaagatgatcctgcctctgtcttttgttgcggcgtgggccactctgatcacactactctcgaaattctggggatcaacaacattctgctcacagttactggtttcgtcgtcggtttggcattatctttccggagttcgacggcttacgaacgatgggctgacggcgc

SEQ ID NO: 372 - DNA, 860 bp, Aspergillus oryzae
ggttcgttatctaaagtctacgcttcggggcctggtcagctgggctccgcactatgtgttgctgtgtattccgagcaaactgtgacgatgagaccttaaaggagtctcaaccggattctgcggagcaaactactgatatcaacttggctttgtcgcacctcgacctctgcaataagttagagatccctacaatagtggtcatcactaagatggaccttgcgtctcgcgctagcctgaaacaaaatcttactaaagtcctatcggctttgaagctttcgggcaaaaggccggccatactgcctgtacaatcaggcagttctgaggcttcactagacctgcaccacgtcggaccgaagacagtgtggaaatcaaaaagctgatcgctacaacagaagattggtcttccaccgttccaataatccttacaagtgctgtcgatggctcgggaatagggaggttacatgctttgctgggcaatctcccaatccctgcaagaccatcactacgaaccatttctccgtcgaaggcactgccaccaccggcacttcctacaaacattttcgatgtagatgaagtgtttgctattcctccgtcgaaagtktactcaatgtccgccgagcagtcctcaaaggagaaccacggtgtggttctctgtggcttggtccgttacggatcgatttcaataggtgacgagctggtcatcggacctcttctagacaacgccctaccggracacggaggtagggttcgttcagagcggcgttcagacacccagccacagtctgaaccctttcgaagtagggcatcatcgggggrcttttctacctcgttcgtccaaggatcctttccgggataaaaac

SEQ ID NO: 373 - DNA, 800 bp, Aspergillus oryzae
  modified_base (6)..(6): n is a, c, g, or t
  modified_base (379)..(379): n is a, c, g, or t
  modified_base (421)..(421): n is a, c, g, or t
  modified_base (423)..(423): n is a, c, g, or t
  modified_base (474)..(474): n is a, c, g, or t
gccgtnacattgtcactggctgggtgcttcgagtggcatacctacgcacgacagctwgcycccgatgccgcttggatggccagttgttcgctgatgcatctcattgaagccaccggacttcatctggaaccctcgtcggacacggtcctcggacaatcggcagagccgtgcgacccagaaatccggcggaggctattcgccatggcgcgccatctaaatgttctggatctccttcgagctaggacgttcccgcgtcgtcctatacggagcaacatctctcccgcccaccccaagatcgactggtgagattttcaaccttctcccagtatcagaaagtttggacccaaacaaagcgcagggctccctggatctaagagtnggcgctggagaatgttctggatgttgttcatccccttgcctnanataccttggcccaatgtaatctaatgctctgcatctaccggcgcttgcgtngtctcgactccgttatatctggtgctcttcttgaccgggtacttgagttggcaaaaaagggcctgaaggcttctcgcgacacgatcgcattgatcagtccgtggcatcagaccgccaatgtacccbtccagatcgtctgtgcattactagcgatcgacagccgcscttbattagcattacttggcgatgcgatgcagaaactccgcgaagttgccttagcgtatgacacagatgttatgagggaggcctacagtacggcatacctgctgagcctgttgcatcagcgacgaaaggmagatgaccccagaactcttcgaggtgttttg

SEQ ID NO: 374 - DNA, 168 bp, Aspergillus oryzae
  modified_base (1)..(1): n is a, c, g, or t
  modified_base (28)..(28): n is a, c, g, or t
nattttccaccccatgattacacgcgtnaaggatgactcctatggcgtactctacattaagtatgccaccgtgcttctgcaacaaatgacactagagcttgatgaggactttgtgttcgcaatgctggacttcgtgaaagtccctggtgcctcgtggtccgaagaaca

SEQ ID NO: 375 - DNA, 847 bp, Aspergillus oryzae
  modified_base (127)..(127): n is a, c, g, or t
  modified_base (144)..(144): n is a, c, g, or t
  modified_base (303)..(303): n is a, c, g, or t
tctcagtgcactgttcggaaccttatcactcgtcgatttcctcgacacgatcgaggtgttgcttcagcgtcccaacgacgaactgcgtcgcaaggttctccggcttttggaaggccggttgcgccanaaccccgaacgcgacantccttcccaaaccaggatgttggactttttgtccgtcttggtcaagattgtcgagtcttcaccagacatcctgctcaagcacgctgcggtggcttgtatcgaccgcatagccgacaagtatggtaagaaggatccgtcgaaggttatccccgccgcganggttgttgctagtaaggtctgcattggacaggaggatgaccgtattcgcatcatgggcgtgctgtgtcttgcctctatggccgaagtcctgggccaggccatgatccctgcgctgccggacacactcagtcgctcgctggccttgcttggattgagcytggaggatggcaaggagaacaccaggttgcacgatgccgtttactccctgttttcagctcttttcgtccacctcccttacatgatctccgcttctcatctagacaaggtccttgtgctttcgtacaagtccgccatgaacgatgagtttgaggaggagagccggcaggaggcgttkagacttatggccaagaaggttgatgcttctgcaacattcggcgcagtcgaccgcaactggcagcatgcgtgcaagccggaccagaagctacaaaggaaactttggaagttgtcagcatggccatcgagaagcatccgaagtcatctaccgcgaagaacctacccgtcatcaccaacatccttttcaaggcgtccgatttgcgtcgggagc

SEQ ID NO: 376 - DNA, 936 bp, Aspergillus oryzae
  modified_base (218)..(218): n is a, c, g, or t
ggcagagggccagctggtgctgcacaagctttgttttactcggagaccaggagtgcgcgtccccgtctaacaatcgccactcccggcaatcttaccccttggaagaagactcctcgactgagcataccagtgtctcctcgttcgccagaasgaccgcgacgggaggatgtaagtcccattagcgagaaggccccttcattaatggggtctcgcgaasncgcccgaagaacctgtgcctccacctcggaagcgtggacgaaatgaaggaaagggctctgggcgaggcagggaatcggaactggcaggggctgaggtggatggcaagggagggctgaagccgaagtagagaagcagaccggcaagggccgcgatagaagtgcaacttcgtctagaagtcgggggcgttctgttttgtcccgcgatgaggagtccgaatctgtatacccgggaaagattaagcatgagatgcccagcacgccagcwggaatctcggaggctgctgagcccgaaccccgtccttctagtggccgcaaaggtaccgctgcttcagaggaccgcccgggtcgaggcagaccgaaacgtaagcgcggtgccagtgaagcgtttggaagcagaagccctgcctccggagatcaaccacatcagccgcattgacccgaatcaatcgacatcttatgttctctgcgctcgtaacttccctagaacgggtgctccgatcatgaatgatgtgactactcataaacacgcatcaatcttcaccaagccgttgaccgaacgcgatgccccggggtatcgagatctcatctaccgaccacaggatctgaagtccatcaaatcatccattcatcaaggsagccaagccgtsgctgctgctacagaagccgcaaacacgcccgccgcagatggtgaatccccggccacgaatggcggaacacc

SEQ ID NO: 377 - DNA, 917 bp, Aspergillus oryzae
  modified_base (85)..(85): n is a, c, g, or t
gggaattttcctcacacgctcaatccctttcacgatgtcattcgatcccaacaacgtcgatctcgacaccgcagacccggcaganatcatctgttacctcaatgcctcggagaacgactatgatgggcgcttaggcgcgcgtatatccgcgatctttgtgattctcattgtctcaaccgctgttacattcttcccagtactagccaagcgtgctccccggcttcacatcccactatacgtctacctcttcgcacggtacttcggcgcaggcgtcatcgtggcgacggcctttatccatctcttggatcccgcatatgatgaaataggaccggcatcttgcgttggtatgaccggccactgggcggactattcgtggtgcccggccatcgtccttgcctctctcgtcggaatattccttctcgactttggcgcggagatatgttgaggtcaagtacggaatctgtcgagaggacccggagccgatcatgaccagcgcgacggacaacagcttgcgtactaccgcagtggctaaccaagctcctgttgagaaggaagcccagcttgaatctcaatctgtcaatgactcgctgtcagagaggtcattcaagcagcagatcgccgccttcctgatccttgagttcggcgtcatcttccactcggtcattatcggcttgaacctcggtgttacaggtgaagaattttccactctctacccggtcctggtcttccaccagtcctttgagggattgggtattggtgcccgcatgtcagcgattcccttccgcaaaggcagctggctaccctggattctgtgcacgctttacggtttgaccactccaatttccatcgcgatcggactcggggtccgaacaacctacaactcaggctcgtataccgcgaatgttgtctcgggggtt

SEQ ID NO: 378 - DNA, 215 bp, Aspergillus oryzae
  modified_base (212)..(212): n is a, c, g, or t
tggatgtttctcagcaaattcatcaaacttttcgggcattacatcsgatacscggtcgactttttacttttacstgtgtctatgststttgggtatttccacggaggaatcaaaatgtacgcmgtgatgacgctcaacgtgascacgtggggtagsagagatggtgccgacgattacgacgctgaccgtatcaacgaaacggacagacagtnacc

SEQ ID NO: 379 - DNA, 759 bp, Aspergillus oryzae
  modified_base (497)..(497): n is a, c, g, or t
  modified_base (546)..(546): n is a, c, g, or t
cggcacgaggtggcaatccaggatgacgatgatgttttcgccggtcttggtgacctggaagacaaggctagcagttccagactgcgaaactcgagtacctatgacgatttcggttttggtgggagcggtgatgatcgaagctgtggagattcgtcagacgagtggcctatgacggaagaatttgatgttggcccagaattcatcaggcgtcaacgcgcagaagaagaaaaatggaggcgtaaagtcgataagtgggtcagcttcgatcgtatgagatttggggacggctggcgatgggccattcgagacttggtgcaatctaacagcacatgggaccacaatagtgggtgatcattaaggcatatcgaacacatcccctttcagttcccaccaccctctctgacgaaaagggcgacgaaaaagtaaaagaagaaagataggtaaggggacgaaggtgggggggaagaaagaaggagagaaaaaagaaaaagcaaganagaaagaaaggaggagtgggaggattggtgaaaggatgttgaagcagtnatacccattgaagacaatggagttatactccattggtcgatgttccacctccaacacttctaatgtttttatgatggtaagaaacgttttcacgatagtgggataaccctaactgcggttaagctgcaatgggcatcctgcatgaggttatgacgaaaagccatggaccccttgaccttaatgaaccggtcaatgctatgatcttcctctctg

SEQ ID NO: 380 - DNA, 651 bp, Aspergillus oryzae
ttcggcacgaggtacgaggtgaccttgtacgagcactcttgatccaaatccagaagacgaaggtagatgttgagatcgcaattggcggtattgacgctctactgaagagccaggaacttgtttttggattcgttggccttacacctggtatcctggtctcgtacgcgtctcttcgatggttcttggatctgtttggcaatagaaagggtctgaggatgggtagacggcaggatgaattaagacatgcactgcgggctgctcatcgaacgttgatatcgcctaaccctgcacctaccggcgtgctcgcatacagggatcatggtcttctgatctgtgacgctgagattttgcttaagaaagcagaaactcttctgagtgggacagagctccgcgcctttcgagaagatgtcgctgaccttatcaaccagagaatggttgtccggcagcttgaaattgttggcagaatgggttgggtctactcgaaatggatgaaatgatggagttctggggacacagtagctacattgttggcgttgcgccccccccgaatagtcaagagttataggccgctaattgctattatttaaggggcgagtagaccatttatgattttaggccaaagagcatatttaattgaagaaattcataacc

SEQ ID NO: 381 - DNA, 809 bp, Aspergillus oryzae
attcgggcgaggtctggtttgtctacaaggcattatggaccagatgactcaaaaagtgtttccagacgcttccagcagccaaaatatacctgcctaaggcataagtcacatgactagtgcaatctcacgaactccgcattttagcttcagatctccgctccatccgcctcgatttcccctcgcagagctcacttgaacctaagcacactaagaccacaattcctaccaatcggcatctctactgtcaccagcgcaaagaactatctttctactatcattttacaacaacaagatgttctccttcttccgccggggccctccccaaacccctgaaatcccatcagaccaagcaccctcacaacaaacaacaacacaaactagccaatctccaccacaaccccaaaaccaaagacccgaatccgaacctgaactgaaattcatcaacccccaaacaaaatacaaacttctactcggcggcctcaccattttcgccttctcgctgtggagcacccgccgcgccttaaacagacgctatctcgcctccgtcccacctttctatacctcctctctctaccataagcccgacgtcagcggcggtgcggaagcctttgaggcgctgaatctggcgacgctgaatgtgctttccttgggcatggcgggcactgggggtatcctgtgtgcgctggatatcaacggggttgatgatatgaggaggtttgtgaggaggggattctatggtgatggtggagatgtgacgaaggtggataaggagctggaagatgaggttgaagcttgggtgggaagtgtgc

SEQ ID NO: 382 - DNA, 453 bp, Aspergillus oryzae
gaattcggccgagggcgattgaccctcccatcggattacttctcggtatagaacaccgcttacgcgcttccgtccatcggtcttcgaggtttccacgtcattgttcccggccattggatctgcgctgcatcatcccatgctatttttatcacagacacacactgcgacgagcgcaatcctcctccaacgtctaccgtcggctattgattactcgtcgagttcaaactcatagaagcccgtgcactttgcaattaccatccagactcctattttccccsacagaatcgagagcytgtcgactgctctagaacgtgcagttgcctcatcgcgggcacgagaccaggtggacctagcccatttgatggaaaattgaggttttctaagagcgtcaattgcatgcaagcatccagcgatctaattaaggatgccacaagctgcaagatgggtgggttc

SEQ ID NO: 383 - DNA, 245 bp, Aspergillus oryzae
  modified_base (17)..(17): n is a, c, g, or t
  modified_base (19)..(19): n is a, c, g, or t
  modified_base (22)..(22): n is a, c, g, or t
  modified_base (99)..(99): n is a, c, g, or t
  modified_base (101)..(101): n is a, c, g, or t
  modified_base (149)..(149): n is a, c, g, or t
  modified_base (183)..(183): n is a, c, g, or t
  modified_base (185)..(185): n is a, c, g, or t
  modified_base (208)..(208): n is a, c, g, or t
  modified_base (215)..(215): n is a, c, g, or t
gcagaggctggcgaaknanacntctgcgctcccccaggttctctccaactcatacggcgagaggaacagactgttccggagtattacgctaagagagtntncaacttaattggcttgatgggtctgcgaggaattaccgtgcttaaatnttctggtgacactggaattggcgcctcatgtatntntaacgacggcacccagactccanaattcanaccaattttccctgcaacttgcccctatct

SEQ ID NO: 384 - DNA, 786 bp, Aspergillus oryzae
  modified_base (168)..(168): n is a, c, g, or t
  modified_base (299)..(299): n is a, c, g, or t
catccacgataaacccaaaagcgctatagcgctgaagatatcacttcacggcgatatcgctcagtgctctgtgtgtgactgtcgaggcttcaactgttctcctcgtttgaacacaagggaattttcaggagtggaacagttgtttgatacagttcacttgctgcagtnacagggtggacacaaatttcagcgagatggaatccatgccacccgatgctttcgactctcatccgacaagtccatatgcgggacaattacacggtgcaggaaaccccgacctagacagtataaacggagtnacagctactacagcaccattcgtgaaggtggatgatccacctaagtttgaattggaatcgtatattgcaaattatactggccgaaccaagttcaaccgtctgtttctaataggcacgtgctccacatatctctccgtcgaggccctgaaggctgcgattgtcgaagccaaatcaagcaaagatgtttcccgatacgaacgtgcagtccgtgcactcgccgatgttgcgccatatgaggctgaagctacaccagacaaggagtggatagatcgtacacggaaggtcgtcaaggcggagaccgatcggctggagcatgaactgagagggtataagaacaaccttattaaagagagcataagaatgggcaatgaagacctcggaccccccyaccatcaaattggtgacttggtgtcggsttcgaaggcttactctcgcatgagagattactgcacgaccccaagccatatcgcgtcaatgttgtttaaga

SEQ ID NO: 385 - DNA, 974 bp, Aspergillus oryzae
  modified_base (90)..(90): n is a, c, g, or t
acggtatcgataagcttgatatcgaattcggcacgaggcgtgaatacccctagcgttcttggtctttcgcttaggcagccgtatggcgtncgttggcgctatcaatcccttggaatatgccactcgcgcttctctccattaaggttgcccctgctttggccgctggaaacactgtggtgcttaagagtagcgaaaaggcgcctttgacttctgctttcgcggcaaaattaattgcagaggctggcttcccacctggcgtcgtcaacatcatctccaggtttcggaagtccagccggtagtgccatagcatcccatatggatgtgcgctgcctgagcttcactggttccacagccaccggtcaaaaaatccaaatcgcagcagccaagtctaacttgaaagtagtccacttggaactaggcggcaaaacaccagcaatcatcttcgaagatgcggatatcgaaaaagcagcagaaaagactcaattcagcatccacttcacgagcggacaaacctgcttcgcgaactcccgcatttatgtrcaggagtycgttgcggataaattcatagcagtwttcaaggaaaagttcggcgccgcggcsgcagtgggcaatcccctcgagccgacgacgaaccacggaccgcagcagacaacattcagtatgagcgggtcaagtcgtacctagaaatcggagaaaaggacggaaagctcacgatgggaggggatggcggaatgggcttyatcaagccgaccgtctttgaaaacgtccctratgactctcggcttatgaaagaggaggtgtttggacctgttgtggcgatcaatacgttcaagacagaggaggaggcgattgaacgggctaatgcctccgagtttggtctttacgcctctgttttcacgaaggatatggatcgtgcagtgcggctgttaaagcttctcgaggcaggkacggtcggtgttaactgsacgagtcca

SEQ ID NO: 386 - DNA, 667 bp, Aspergillus oryzae
cggggtcaatgtatcttttctasttgttgtcttttctgtgttctgtcatggcgtatagtctgctaacctactactctcgttgattgattgtcctcatttcttatttggcttcgttgctcggcgtggggttgtcataagctccatctggagtcggagcctccatagctcgtgcttaccctcttcgcatatctgtgataycttcggatgatcttcgttcctttcttcatctctctcgcgatactgttcctttcttccgatctctagtctttttttaccccccattggcgccaaaatgtcgcccaaatccaagaacgccctggagcgtccagcctccaacgaagtctacccgctcctcaagtcgctccccgcaggccgaaaaaccgcaagaaggcacccgtggaaacgctgaattatggttcggatggagtgaaggacaacagtattttcagccttcctacttccgactacaaggccttggttctcgtcaccttggtcgcyactgctgtccgtctctttagaatctatcagccgacaagcgttgtcttcgacgaagtccayttttggtggttttgcgtcaaaatatatcaagggccgctttttcatsgatgttcacccgccactcgctaaacttcttattacacttgcgggttggttsgctggattcaat

SEQ ID NO: 387 - DNA, 785 bp, Aspergillus oryzae
  modified_base (260)..(260): n is a, c, g, or t
aattcggcacgagggttgcaaggctctgtacgccatgtacaaggccctcctggtcatgctcattcagctagtggtatcccggagttggtgccggcaacaacaagcgataaccgtgagcgcasatcagcaatggcagttagcagaatccggtacagccagatgcccaacctcaacagctgccttatagagctcggccgggagcagggccgatgggagttgccggttgatattatgctactgtcgcttcaaggacgtgtgtnaatcaatcctcgttttccctacttcttggtgctctgaatactgttggtgtatcattgggccgttcagcgttctttaatctttgacaggtttggatggagtactttttcttttacttatatccttcttgtctcgcatcgcaataattctcaaggcacaagccaatcagccccacatttgctggttttcacgtccgcyagatgcccttacctttaccctttcttgcctattcactgcctaaaagtgcaatatcatcattataatggtgggcctgactcttgcctctttgcgtcttgttgttcctggggaaccttttggttgtccagagtgtcctgtctatcattgcttactatacacatttctggtaccggagcgtccctatccctgatctcattgcattccagctgaaacctagcgtgaatatgtgctcgacctttggactgttttcttctttcaattctgatccgttctactccggtgttctgtttcttttctcatcaacagtgttgtgagaattattttttttt

SEQ ID NO: 388 - DNA, 822 bp, Aspergillus oryzae
gcacaggattccctagatttcaccttctccaaaagtgtctgcgaactgataccagctaccactgatcccggccaaagctcccatagttacctcgaagttggaatgtcgcctccagcttccacaacccttatcaacgaagatatccacgtcgaaacaaccttcgccacagacgattctgaagacgtccccgttaacaagaagaccagcttcaatggcagactgaaccagtacttccacacgtccaagaatatctccaactcttcaatacaagatacatcatccaagcgaaagtccgaatcagagtccaacggccaatccagcaacgacaatgactcgaactccaagcgaagaaagaaagccatctctaccaccgttctcaaccttccccaacggataacccgttctcgctccgcgtcatcatcgccggcctccttcgcctcgccgtccccgtcgcccgccacggagccaagcacaccaggtcgttctcgcgctcgccgtcagccctcttcccgcaagagtacaccagcgtcttcctccgtctcgctcctccgcgacaccatcccgccgaaccttacccttctcctggtaggcgtcaacccgggtatcatgaccggtgccacggggtacgtctacgctcacccatccaacttatactggaagctcctccattggtctggcataacggcgattcggcaccctccctctgatacctatcggctaccggaattatataatatcgggaataccaatatcgtagagcgtccgacccgcgacgccagcatgctcagcaaggcggagatggacgccggcgtgcccgtacta

SEQ ID NO: 389 - DNA, 823 bp, Aspergillus oryzae
gggtcaactccgtgctccagcgcctcggactcctacacccactgtagtccgcccttgctactcaccgtcaggcatcggctcctgatttccaccgtcggtcgcgtgatgatctggttgttgtgcctgccataacttcccgtgtcgcgcgcgccttgtcaacatgtacgtcaagcaaatcattatccagggctttaagagctacaaggaccaaacagtcattgagcccttttctccaaaacacaatgtcatcgttggtcgcaatggctctggcaagagtaacttcttcgcagccattcgcttcgttctcggcgatgcctacactcacatgggccgagaagagcgacaggctctcctacacgaaggttcgggttccgctgtgatgtcggcatacgttgagattatcttcgataactccgatgatcggttccctactggtaaacccgaagtcgtactccgtcgtactattggcatgaagaaagatgaatatacgctggatcgtaagaatgccaccaagaacgatgtcatgaatctgctcgagtctgccggtttttcgcggtcgaacccctactatattgtcccccagggtcgagtaacagccttgaccaatatgaaagactcagaacgactgaatttgctgaaggaagtggccggaacacaggtttacgaagcgcgccgtgcagagtctctcaagatcatgcacgaaacaaacaataagcggaccaagattgacgaactcctggatttcatcaacgagcgtctctcagagctggaggaggagaaggacgagctgaggaatttccaagaaaaagataaggagaggcgc

SEQ ID NO: 390 - DNA, 787 bp, Aspergillus oryzae
  modified_base (334)..(334): n is a, c, g, or t
  modified_base (336)..(336): n is a, c, g, or t
gatcgattgtccccgatatttgcatttcgcgacasctacgacgacaccgcccagactcgaccaccgccgcccctctctctctgcctattatcttccctgcttgactccaccactttctaccgatttctagtcccgagcgtcgaggagcatacagacttggatagtggacaactatctgtaataatacattttaagaattgggaccggaggaaagccacataatataacccctaaaaccgcttatcaagatgtggtcatggtttggcggctcggcagcccagaagcggaaggatgcgcctaaggatgcgatcctcaagctgcgggagcasttgantnatgctgcagaagcgcgagaagcacctggagaatctgatggaggagcaggatgccgtggcgaggaagaacgtgacgacgaataagaatgcggccaagtctgccctgcgacgtaagaaggtgcacgagaagaacctcgaacagacgacggcgcaaatcatccagctagaacaacagatatattcgatcgaggcggcgaatatcaaccaggagactttgaacgcgatgaagcaggctggcgcacatgmacgcagatccacggtaacttgactattgataaggttgatgagacaatggaccaactccgcgagcracaccaactcagcgaggaaatcgcacaggctatcacaaacacccagattggcgaccaggcagacgagaccgagctggacgccgagctcgaaggtctggaacaggaggcgatggacgagcggatgcttcacacagggacagt

SEQ ID NO: 391 - DNA, 818 bp, Aspergillus oryzae
ggcgacggttttacctacctatcttcaaaatgcttcgcagtccgttgcttctacttcaaggacatgtagctcattctctacactatcttcatcctctagattgatcaattctcaacattgcctccggtccctccaacgcttcaatccccgctccgcagctcctacacagcaatgccggaccttcctggtacaattaaaacgccagttccagaccctgaaagagaacgccccttcgacagctactcccctcccatcatcggccaacttgcaactcacaaatcttccctatttcattcgtcgtactgcctcgaaccaacttccagtatacctggtcaccaaggccggtggtaccaagcagcagaccaagatacagaagaccgaagtgacctggatgctcttaggaacgaccttgcacggtatctgggtcttgagtccggcgagcctcgctcccccaagagctcagacattacaatcaaccgtcttaatggacacatcattgtcaagggttggcgaaagctggagattcagaaattccttttggagcgtaatttttagaagatgaaaaatcccaaaaagccctggatatgagttatttgcacgtccctctccatctccctccactatccgctcgatcatcgacttcctatccatcttcctggcaaaagttctgaaccagaagggttatatgtcgaatccaccacagggcatccgggaacttaagtctgccgaaatgaattatacacaaatggaaagtagaatggaaagaatacaggcagcagacacctgactgagaaggtcttttgctgatcatcggcaga

SEQ ID NO: 392 - DNA, 824 bp, Aspergillus oryzae
aggaattggcatttgaaattgctgctaacgaaatcggcattcccgacctgcttgatgtggacgatgtctgcgatgtcccaagacctgatgagcggtctttgatgacttacatcgcatattggttccatgccttctcccagctggagcgagtcgagaatgccggtagacgagtcgaaaagttcatcaacaacatgcatggcgcttgggaaatgcagaactcgtatgaaagaagaatgaaggaacttctgcgcctcatcagagcccaacgcgaggmatggaagaacgcttcgttcgaaggaacctacaaggatgccaaggaccaggcctttcaattttccttgtacaagaaaaaacaaaaacgacaatgggtcgcggaaaagtcagaccttgctgcccttctgggtaacatcaaaaccaagctcagcacctaccgcctccgcccctatgacccccctgcagagctaagtcttgaggtttgcgaccaagagtgggaatgtctaacgcgcgatgagcatgaacgtatcagctcattaacgaaacgatccgagatatcaagaatgccctacgccggtctttcgcggacaaagcgaatgacttcgcactaactttgaagactctatctcttgcaatatccggtcttgatggcgatgtagaagaccagttagcccatgttaagagactcaatgacaaccttcctccccttgatgcgttcttagatactattgcggagatagacgagcagtgtgaggaagcgaacattgaagagaacgattacacaacatatacactagatgaactctcctacgagttgagcctagtcaagt

SEQ ID NO: 393 - DNA, 559 bp, Aspergillus oryzae
  modified_base (395)..(395): n is a, c, g, or t
aacagtccaatttgctcacagctcacccgagagcctggaagttgtcctacaatcagagctcgacgccgatcccaagatccaagagggctcccggaatgtcttcatcgtggttgaatccgtttatagcatggacggggacattgcgccgatccgcgaattcatccaggttgtcgatcgcctgccgccgaggggaaacggctatcttatcgtggacgaagcgcatgctacgggtacattcggtccacgcggggctggcatagttcaggaacwgggagtggaggagcggatatatatccgcgttcatacgttcggtaaagccctagcgagtcatggtgcgatcgtatttgtgctgccccgatacccgagattatctgatcaactatacacgaacwtgnatctacaccacggcgatggttcgtcatgctcatcgcacacatataatgtgtcgaaggatcacgaacttttcacacaacatcacaataactcatactcgacaataaaactgtactggacacactcaataacatcgaacccattttctccaccttaccgcactcac

SEQ ID NO: 394 - DNA, 906 bp, Aspergillus oryzae
aattcggcacgaggcctcgtgcgaatttgtctggttcaaggggaaaaggcgccaatcatggatttcctatcgaagcacacaacctgtctgtctaacctggagcttaatcttgctcctggatggcagactgtcagcgcgtatttccttcttgcagcaggaagcttgtttgtcgcctctagagctttgacttttgtcagagttcttctcagcctgtttgttcttcccggaaagtcgcttcgctctttcggccccaagggtagctgggccgtggtcacaggtgcatccgacggtttgggcaaagaattctcgctccaacttgctcgcgctggcttcaacatcgtccttgtctcccggactgcctcgaagctgactacgttgtccgatgaaatcacctccaagtacgcctccgtccagaccaaaaccctggctatggactttgctcgcaacgaagatagcgactatgagaagctgaaggccctggtggatgagctggacgtagccattctagtaaacaatgttggaaagagccacgacatccccactcctttcgcattgacttctcaggaggagatgacggacatcataaccatcaattgcatgggaaccctgcgtgctactcagttgatcgtgccgggaatgatgcagcgcaasttgggtttgattctgacaatgggatcctttggtggccttctcccaactcctcttcttgccacctactctggtagcaaggccttcctgcagcagtggtcgacggctctcggctcggaacttgaggagcacggtatcaccgttgagctcgtacaggcatatctcatcacttctgctatgtcaaagattcgccgggccagcgctacgatcccggatccccggtcgttcgtcaagtcggtcttgtctaaaattggccgc

SEQ ID NO: 395 - DNA, 909 bp, Aspergillus oryzae
aggggtttctctcctttgcagtcccatacattcaatattccgtcactttacattcatattaattcacatacggcaaatgcatgaatgaaaaacgatgaaccagtcacagagtcctggtgctacggttgttaggcgtgcgaaagtgagcgttgattaacccatgcgaaaccctccaactaggcatcgtattactcgcaattcaacgaaaatgcttatcgtcgtattcatctacctaggcctgcaccacctgccgacgtaaaaagacgaaatgcgatggcaggcgccccacctgttcaccgtgtaaagcattcaatttgccgtgtgctttccaagatgttttgaggcactccagtcgaactagccggtgagttcgaaagcttctctatgcattatatcctctgatctgattactgctagagcatatgttgaagagctagagaaacgcgttcaagacatggaaatgcagctacaagaccgaactctagatagctcatggcgagggttcgtatcagaaaacaagaggaactctcctgccccatcttcggcagccgctggtacaagcgacggcgcaacttttgaacttaacgctatagagagtcaaccctattctacatcaccttccaggtcccagccggaggaaggtaatgctcagccgaatgtggacggtggtgctagtcaggctccgtatgtyattaacgccgagggcacaaagatgcgatttttcggtaaacataaccctatgcgttagactgaatctgagttaacctcacctaaggagcatcatctggcttctcaatagcttcaggccaagacctcaactctctagagggcgggaaacgatccggagcgtggatgactgccagtcaaaaaacagcatctagatggcaattgtctagttggtatccccgc

SEQ ID NO: 396 - DNA, 555 bp, Aspergillus oryzae
gaaaagttctgtctacctcccattcttttccaccttctcctctcaccagagaaaatcataccaaatccaccatcacaatggcctcctctcgtatctttgcctctcgcctggcctcccagatggccgcaaccaccaaggttgcccgcccggccgctcgcttcgctgcccccaagcgtaccttcaccacccagcgcaagaccgctatccccatgacccccttccagaccgtcaagcgccacagccttccatgatccaggccaacgctcgccaggtcttcgccaacgtccaggcccgccgccagtactcctctgagatcgccgacgccatggtccaggtctcccagaacatgggtatgggttccgccgccattggtctcggtggtgccggtatcggtatcggtctcgtcttcggtgccctcctcctcggtgtctcccgcaaccctgccctccgtggccagctcttctcctacgccattctgggtttcgccttcgtcgaggccattggtctgttcgacctgatggttgctatgatgtgcaagtacgtataaacggatcg

SEQ ID NO: 397 - DNA, 879 bp, Aspergillus oryzae
gggaactcaagtttttgacgaagaatattcgccaattgctgggatcaggccaccctacgctggataaggtagccaaatattacaccaagagcgagggcaagcacatgcgtccgcttctggtgttgcttatgtcccaagcaactgcgttgactcctcggcacggtcgatggagctcttcaccgtcctatactgttaacgatcctatcagctccccgtctgtccttgcggataccaatcctgatttaaatccgcttgtatcctcttccgcggaagccaagtacgacttcgctggcgacgaaaatatcctgcccactcaaagacgactcgccgagatcacagaactaattcataccgcatcattattgcacgacgatgtcattgataatgctgtaactcgccggtcatccagctctgctaatcttcaattcggaaacaagatggccgtgctagcgggcgacttcctgttggggcgtgcatccgttgctctggcacgtctaagggaccctgaagtcaccgaactgctggccaccgttattgccaatttagtggagggagagttcatgcaactgaagaataccgcctccgacgaaaagaaccccgtcttcacggatgaaaccatctcttactacctgcagaaaacatacctcaagactgctagcttgataagtaaatcgtgccgtgcggctgcgctccttggagatagcactccccaggttgtcgaggctgcgtatgcctatggacgcaacctgggactggcatttcagctagtggatgacatgctggactacaccgttagtgatgctgagttaggcaagccgtcaggggcggacttggagctgggtctggcgactgccccgctcctgttcgcttggaagcaga

SEQ ID NO: 398 - DNA, 887 bp, Aspergillus oryzae
  modified_base (681)..(681): n is a, c, g, or t
cascagggtggacttttaattcaatatcttctgctctcggccttgttcacgagctatcctcagccatgaccttgactgacctagaaatctgcgccgaggaaattgcaaccgccgccagaaccctggcgagtgacgggcactctggcgggtattcagctgggctccctgaccatctccgacccgttcagcgaacgctgattgccaatgcctcgcaagtattagccctcgccagccagcccgccgacttggtccgacagttggctctctataaccagcttttggcatgcttgcggtggctgggggagttccaggtgctggcgtgtatccctctggatgaatccgtaccctttgaggacgtggcagacattgcaggagtccctgagtgtcggctacgtcggctggtgcgaccgttatttacaataggctttctttgtgagccgtcaccggggcatgtggcccacagtgtgttgtcgaaacagttcgtgacccaaccagccctgctggacgccattcttttcatgtcggagactctggctccgtcagcatcagctatggggacccaaacgcgcaggtttggggcctcagagcaggccgaagattccgcttggaatatggctgtaggaagtgactccccttttgccgcatgtcttcaacaacgacccaaggttaagcggcactggngtgcctacctctcctacgtgtcaagttcaattgatgccggcgtggaggatacgctcactcggatgaactggcaaaacttgggaatggcaacggtcgtgcatgttggcgcccagtcaccctcactggttgttgccctcgctccgcaatttccatcactccgtttcctcgtgcagacagaagctaagaccgagtctggcggtcatcaa

SEQ ID NO: 399 - DNA, 801 bp, Aspergillus oryzae
gcacgaggcaagatcgcccggatcgcctctcattggatgttcgctctcttcatcctgtccaccattctgaccttcgtcatgatcttcctctctccgctagctacgtcctcgcgacccccgcagtccatcgcaccggaccccaacgtcaacgctgctcacccggcccaccgtcgccgcacctttatcttcctccgcgcctttccgttcttcattctgaccttccttacggccctcttcaccattgtcgcctccgtcgtcgcaaccgtcatgttcatcatcttcaagaacgtgttcacctcggcggactataacctgaacattgaggcggaactgggcacccgcatgatggccttcatgtggattgcgagcggctgcaacctgctgtcgttcatcctgcagttgggctcctgctgtgcagcttgttgcggtggccggaaggccggaaggcgctgaagaacggcggtgcgaatggattgccggtgcgcgagaaggagggtcctcatagtcctgcgacgacgacagcyacagagtgagcktgatttccgtctcttccaacatgccccgttcaaataagagcccgttggaagcgatgattggttttgaattggatattattggtcatcaagaacatacatatacagtaagagccatatataagcggggcatatatctctcaacttttgttttagaactgttacatagacaggggtttctatacggatattactttaccacagcttggctcagcatcggaggtgcatttgatttagttagttacgatcgttacgacttgtcatgata

SEQ ID NO: 400 - DNA, 389 bp, Aspergillus oryzae
gcacgmggcatttcttctacttctgactttaaaacattctggaagaccgtcgctggagaatttgcatcgaacgagaaggtcatcttcgatactaacaacgagtaccacgatatggaacagtctctcgtccttagcctaaaccaggccgccattgacggcattcgcgcgcgctggagccacgacccaatacatttttgttgagggcaattcgtactcgggtgcttggaagtgggccgataccaacgacaacctcagtcaattgactgacccgcaagacaagattgtctacgagatgcaccagtatctcgattcgcgatggctctggtacctccgagacctgtgccagctcaaccatcggcaaggagaggctgcagaccgccacggagtgt

SEQ ID NO: 401 - DNA, 894 bp, Aspergillus oryzae
aattcggcacgaggataaactctcacttgcctgcggaaacgcccatttatacgacttcttcgctccatctcacgctcccctaattcattgtattcccaggagctcctcccactattccaaccgaactcaaaacctggaccgtataccccaccatgggcgaatctagacaagagcttctggcatggctcaacaacctgttgcagctaaaccttacgaaggttgagcagtgcggaacgggtgcggctctctgtcaagtcttcgactcgatctttatggatgtccccatgtcccgtgtgaaattcaacgtcaatgccgagtatggctaccttcaaaatttcaaggtccttcaaaacgtgtttgctcgccaccaggtagacaagccaattcccgtgcaacaacttaccaaatgccgcatgcaggacaaccttgaattcctgcagtggacgaagaaatattgggaccagcacttccctggtggtgactacgatgctgttgctcgtcggaaggcttcgggtgctcctcctgctgctgctggttctcgcgcaggcgcagctcagtctggagccacacggcggggagctacgcctaccggtgccgtagctcgtccacgagtcgcggcagcaagcgggcctaacgtgtctgcattgcagcaagagattgcgactcagaaggaagctattggcgggttggagaaggagcgggatttctattttgctaagctccgagacattgagctgttgctgcaaagtgccawcgaggcagagcccgagttggagaaggatgacgattcgttggtgaagcacattcaaggcattctgtactcgacagaggaaggatttgagawcccagctgaagagggcgcygcggatgaactggagaaattctaaattccgg

SEQ ID NO: 402 - DNA, 842 bp, Aspergillus oryzae
  modified_base (413)..(413): n is a, c, g, or t
  modified_base (417)..(417): n is a, c, g, or t
tggtcacaggagcgaagatccccttacacttcgatgaacccgaaccgggatccaaaacagggagaaaagaactcgagaccttgggaacgctagtcgacgaggagtttctcattctcctccctgaatcttctccaaccgactcctcgagcaaccaaggagaatctgaaaagtacatcctggaagcatacacaaccttcttcccttccggcttcgacacccgtaagaagctcggcctccgtcttgcatccatccacaccccggtcccggggtataaggagaagcttgagcgcagtatggaccgattttttgcacgggtcgaggtcggtcagttcgtgcagagggtcaactggagtattactactgattcggagttgttcgctgcgtttggtggtgtgcacggcgacaagggaganagtnggaagactttggatcttggggaactggacgtggattccacagttttaaggtgcgaacggcagacgttgcatcgccttcctcagagcaaggggctagtgtttgcgtttcatacgtatacgtatccgatccagatgatcaaggatgaagggctaggggaggatctggcggctgctattgatgggttgaaagaggggaatgtgcctgaaatgcattggtacaaacggggacctgtttggggcgaggctgtgaaggagtttctacgctcgtaatcatttttcgtgttgttcttcattctattacttttgtcggtttcttgtatatcatatctaagtyagaccgttccttgggtcttttgataaagtggcttactgcagtctctgcacgaccttgatcaggtcggcggacacgccatggcagttacgtct

SEQ ID NO: 403 - DNA, 870 bp, Aspergillus oryzae
cacgaggtgatctttcactcatgctgagaagctggttacagagaacggaggatcaactacagatctgttcctgtgtcatgttaggtaacttggcgcgctcggatgaagtatgtcaagcgatggttcaagacctgaatattcaccgggatttgatatcaatcgtcaagagtgacgctaaaggggccgtcctttatgctgcactaggattcttaaagaatttggcaatcgctggagataatagattgcacctgggacgagctggtatcattcctgcggtctctcaactctgggaatacgaaacggtaccacaagttcaattcgcagccaccagcatcgtacggcaggtgatcatcgcttcagttgaaaatgtatcccacttgctagagaattttcctggggacgaagaccacagaacttatctctcgcagttacttttgctgttcgagaaaacggactccaccccgattagaactgaaattggacgcatcatagcatccatatgccgtactctcatcccaaaatctcgtgaacaagatgaagaagcagatgccatcctcaagcgtctctttggtattcacagtggcattgccttcccattaggtgctatgatttctcaaacacagtggcccgttgttcggagtgaaggttggtttgccctcgcattgatggcatctagccagccgggctctgggacagctttggaatgtctagagaagatggatctgttcccaacccttgagcaaagcttgagttcgggatccctcggctcagcagacgaagcgaacaagttgcaattgatcaaagatcgtgacaacataatcgtccttatccaagaaatattgaaacaagatcctattcaactttcagact

SEQ ID NO: 404 - DNA, 851 bp, Aspergillus oryzae
ggcacaagagagcaggctacggctggtgttcgttgaaaatgcagtcaggaatttcgggtaagcagccatactgcagggtctgcatactatgatcaccataaagcgtgccccgcggctctctactggaccgaagtatgcacaggagacactaacaatcatttatattgattagtctcctcggagctacatgatgccttcaataacttcgcctcggactcatcaatcttctgcctcccggtgaatatcaccgctgagagtctgactcccctttcgccaatccccttctcctctccgggtgccttctacccctctctctcccagctctcctccgtccttcagccgaaaacccccatctaccttcttcttcgtcgtccggagtcggggtcttcgtctctcgttgccttgacctacatcccctccaatgctccggtgcgcgccaagactcttttcgcctctacccgtgcgacgctggttagggaactaggcagcgagaagtttgcctcgactgtcttcgcgactgaagaggatgaagttgtgggccaggaggcatggaaggagagagatgccgagaagaacgactctagcaagagccgttctcagcgcgaggagctgatgggtgagaaagagcgggagttggaagccgtccggagagccgaggatgaggcgagaagtggcacccccggtagggacatcggaatcgggggttcctttgctagaagaaatggtggcatcggagcaccatccagcttgcagtacaagatgcctgtggatgacgaggcgaagaatgctttggcaagtctgcagccgggtgacttggtgcagctggtaagtacatgtgaagggcgaagaaa

SEQ ID NO: 405 - DNA, 670 bp, Aspergillus oryzae
  modified_base (369)..(369): n is a, c, g, or t
accatgtgtatcagttggccctggaaggccagccctattatgcccctgtgcaccaaccgattctgggcggcgttttgttcgcagtgggatccgttcttgttctttccagcatgtatgccctaggcgtcaccggaacctacctcggagattatttcggtattctcatggatgcccccgtcactggcttccctttcaatgtcactggctcccctatgtattggggaagcaccctgaatttcctgggtgttgcactctacaagggcaaagttgccggaatcctcctgaccgccgaggtgttcattctgtactggtttgctcttcagtgggaggaccctttcactgctgagatctatgccaagcgcgagcgcngaacgtgcaaaggccaagcaaggcggtaagagccagtaaaagtgctatggtaccgcggccagtttaagccgccactgaaagacgggtcccacgcttaaaggattgagtctttggattttcaacaaccatcaatccatgtcagtcgggaggggatatatagacacaacccgaggtccctagctaggaactacgtgatgaagatgctagagtgggattcaacaatgggaggaagccggagaagatgcaacgaaaccatgaaagacacaatccgaatgttacgagggcgaatatggagagtagt

SEQ ID NO: 406 - DNA, 931 bp, Aspergillus oryzae
ggctcaactcccggggcctatggctctcggagcgacctatgcctcggagcttgctaaggaagtcggcaccgtcacgggcgagacgctgagactatttgggatcaacatgaactatgctcctgtgtgcgacattaactcagaacccctaaacccagtgatcggagtccgcagttttggagaccatcctggattggtgggaagattggcatgcgccactgcccaaggactccgagaacaaaaggtggtacccagcgtcaagcatttcccagggcacggagacactgctgtggactcccattatggccttcctgtcatctctaagacgagagaacagctagataaatgtgaattgagaccatttcgcagagctatagctgaaggtattgaggcagtgatgactgcccacatttcgctaccttctgttgacgatagtatctccctgctacactttctgctaaagccttgaatatactacggaaggatatgaactacgatggcatggtgatcacagactgtctagagatggatggtatccgtgcctcatacggtactgagcagggggcagtcctcgctttaggagctggctgtgacagcattatggtctgtcacacttatgatgtccaggtaggatctatcgacaagatctgcgaggctgtagaatccggaaaggtgccaacttcgcgtctggaggaagcttgtcgcagagtgactgcactaaaagcccgttttctgagttgggacgcagcgctcaagtcacagggccttaatgggcttacgtctcttaagcaaaagggcgcaaagttagcgaaagaagcctattctagctcggtcactcttgttgcgcgatacacagagtatcctyccctctctccttcgtcgaagattgcatttctctttccgggttacaagacacggctgcgtcattgatgga

SEQ ID NO: 407 - DNA, 850 bp, Aspergillus oryzae
gcgtatcgataagcttgatatcgaattcggcgkaggctctttgctactttggcacccgatagcgactttatcaggtcttctagtacgatggacccgctctcgataggcacaggtgttattgcgatcgcgaccctcgctgctcaaacatgttccgccctctcggacctgaggtcgctttgccaaagcttaccaggtcggcttcatgcggtgaacaatgaggttgctgaccttaacttcgtcctcttccaagtctccctaactatcgaggaccgagcttgtcttcctgaaaacaacttgtcggccctctcgcatcttttgaaccgcgcagatgtaaaattgcatgagatcaaagacatagtcgttcaactgaccgatgcttgccgtgcttctcggagccccatattcaaagcacacgcatggcgaaaagaacaaggcaggctacaaatgctccaggaagatatcaggacgatcaaggcaaatctaaacataatgcttggtgcttctaactcacaagacatgacgaagatccgtcttgatgtggaggctatctccgcagtaacattacagtcgtcgcaagagcagacactgctcaaagagaactttttggatggaatttctgccgttaatgagcgcatagctagagtcgaggagatgttgcaggtccaagccagttaagtccaggctagccagttcaagcaggtgggatcgttgtacaacgtgccttctgctcgtaggcgacgacatcagcccaccaaaaaagagacctacccaaatacgacacgttcggaggggatgggtgttcgtgtcacaccatttgttgttacttgtcggccaggttgcccatgcgcct

SEQ ID NO: 408 - DNA, 791 bp, Aspergillus oryzae
cgaggggaaggaatgagagctggtgatgttgttcagagttatatgtccggtatccctgaagacctgtggaaaagtatgggaggtgtcgtggatcctggtgtgctcgccgcaaggactgcttggagaggaaactgcttgccattacacatgattcccgttggtacattgatattcaatgtcggcttgcggccgaacaagggtggccagctctgccgtagcgccggtacttttgcaaccgtcattgcgaagggcagcaatactcaggctgcacagaacgagcaggctcaagaagatggtgccgagaagaagcccttgtcccagcgcgagcagcagaagcaggaacgtgttgcgcacatatcaccattcgtcttcaaagtggtgaagttcgcttgattcataaggattgctgcgcgaccgtcggcgtggccagcaacccgaactaccagtacagccagctcggaaaggctggccgatcgcgctggctgaacattcgtcctactgtccgtggtcttgccatgaacgccatggaccatccccatggtggtggacgaggaaagtccaagggtaacgttgatccgaagagtccttggggtcttccggcgaaatccggttataagactcgtcccaagtggaaggtcaacaaggctgtggttgttcccagagtccggaaccagggcaagcgtcgtagaggatacagctaaacgtatcccattgtccttctttcgtctcttcctcttcccttttacgcaagtgcgcccatgcttcctttgcgaatagtgtccaccaaggct

SEQ ID NO: 409 - DNA, 893 bp, Aspergillus oryzae
gaggatcaaggctttcgaaagtcttttcgggtcagtcacatgtttgccgggctgcttcaccatgtaccgtattcgttctgcagaaaccgcaaaaccgcttttcgttagcaaggaggttgtggaagcctactcggaaattcgcgtcgacacactccatatgaagaacctgctacatctgggtgaggatcggtacttaacaacccttctcttgaagcatcatcctagtttcaagacgaagttcctatttgcagctaaggcctggacgatcgcacctgaaagcttctcagtcttcttatcgcaacgtcgtagatggatcaactcaactgtacacaatctgattgaactgatccctcttcagcaactttgtggtttctgttgctttagtatgagattcatcgtcttcgttgaccttctcagtacctgtatccaacctgtttcgctcgcctatatcatctacttgattgtctggcttgccagagattcgtccaccattccatggacgtcttttgttctcatcgcagcgatctatggtcttcaggccctcatcttcatcttccgccgcaagtgggaaatgattggctggatgattgtgtatctcctggccatgcctatattctccgtggccttgcccttctactcgttctggcacatggatgacttctcttggggaaacacccgcgtcatcactggagaaaagggccgcaaagtcgtcatttcagatgaaggaaagtttgaccccgcctctatcccgaaaaagagatgggaggagtatcaagcggastctggggaggcccagacgtcgcgagagacccgctcagaagtttccaggcttctcatatggtacaagtcgtaatcacctgcgcagtcccgaatacggggttccctgggagcta

SEQ ID NO: 410 - DNA, 687 bp, Aspergillus oryzae
cccctcctcctcccactcagcagtggcagtataaccaaaaccaacctgcgactttcccctcacagtacggtccaggccatcatggccagcgaggtggacgtggtggtcatcatagagggcggggtaggggatatggaaatcgaggaggtcgaggagggtcatacatgccccatgcggcgaattcttcaaatatgggctacgctccgatgaattatcctggctatgctggtcagcccatggccaaccctcaacaaagtatcccgacgccgcaattcccaccttcgcggaccaccaactaccaagttccccaaagtacgacttcctttccttcttcacgaccatttccacagtctacaccaacgcatggacctccataccagcatcaacctggctactcagcttacggtccatctaccgctcagcaggctccgacgtatcactccgttactccaagccaccagaatgcccctccatctgtgcaaccgtcgatgatgggcccgcccatgcattggggatacaataatagcgcctctgggggagggtatactggccctccgcacgggaatcagcgaggtccccgcccgtacaatgcttacggcaaccaggcttccagagggggtggtgctatgccacatatgaagcgcgatcatacctcagcatttggaaagccacagaacattaccccac

SEQ ID NO: 411 - DNA, 660 bp, Aspergillus oryzae
agaggagctctcgtgttctttccactcgaattgcccactctcagcttctctcatcaccaacctcttctttctatcgtatcctccgacctcaactccccatccaaatcgtcactatgtctggcatgacccctatctccgccgccggtgcttgtcctcctgctggcccctacgtaagtccaccaaccgatcaacgaatcgtctatatatagtccttcccttccataaccaccccgcaaagaaggcgttcaatgttgttgacgtttgaattctcctacagtcccaagccgtccgtgccaatggccagatcttcgtctccggtcagatccccgctgacgcctctggaaatcttgtcaccggaaacattggcgacctgacccaggcttgctgcaataatatcaaggctattatcgatgctgctggctccagcgttgacaagatcgtcaaggtcaatgtttttcttactgatatggcgaacttcgctgagatgaacgccacatatgagaagtttttcactcataagcccgctcgtagctgtgtcgctgttgcccagctccccaagggcgtgcctgtagagatcgagtgcattgctctggcctaaaccaaaaatgtttttattttacatggcatacaatcaaaaggcaatcagatgtgattagtgtt

SEQ ID NO: 412 - DNA, 976 bp, Aspergillus oryzae
  modified_base (5)..(5): n is a, c, g, or t
cggcngagggcgtgacttcattgtgcaattctcgttccttctcctttatttccccctttagcgtctgtatttgtggtgtcacgagacacccacgcctcgagtcacttctacttatttgccatcaactccgaatcttgggaaactccctctccgccctgaaccgtacttgataagcccttgattactggctcagtcatcccttgtcgtcctgttttctcgccactgccttctattccgtttaacgaaaccaatcgtcgtggggataccaaagcttgcttttccaacccgaaaccaatcctaagtgttcgtgtccgtcttcgttacttctgtacttcgtgttcttcgccctggaatcgtcgcgccactcagtccatgacggcccgtcatataaacggcggaggttggtttctccagcgataggaaaacagccaacgttgacctcgttgtccacacgacacccttggttgatgtcgtcatcgtcgtcgagttctgtcccggcttctgcaccaggaggtgcttctaccgcatattccgccctggggcgtcccgcgggattcagaccccatgcgacctccgataccgccatgacaagcgaggctggtcctgcttttgacagacgctctgggagaaggcgctccactgtaactggcccggaccggaaaagaagattagtcaatgcggagggggatgtctggtcgagacagtcagtatccggcagtgcgactgaatcgggagggcggatgacggcacagatggatagcaggtctatttccagtgcggcgtcgatgcgacccgaaagctctgcgcctggtgcgtcctactccacgcctattgacttgtcatcgtcgcccccagaccagcgtcctcagcggtcaaatgaccgccgaacctcctggtcacgagcgggaaatgattatctagagtatatacggccgcggtggcagccggactcggaggtgacgggttgtccgatctg

SEQ ID NO: 413 - DNA, 1039 bp, Aspergillus oryzae
ttcgggagaggcacagcaccatctccccgcgaatacctttgccaatgttcgggagcttatcgctcgtcgccgcctggcccagatcaccgaccatgccaatgtcttcgccgggtatacgatcgtcagccccgagctagtcgttgagacgctcctgggtcccatgggctccgtgccgccgccgactggcctcgagaagctggaactcgccatggcccaacaacgggtccaacctcgcgccgccgacggaaccttgttacccctgcagccactcaatatgcgttccgaagaggtgacccgattgttgcagatgctccggttctcccttgtcagccaccgcgaccggctcgatgtgcttcagaagaaggagacggaaaataataagcaggagagtgctcacaagggcagtgttgcagctgtcaaattgcctcgcaagtttgcgtacctagagcagcaacaggaacagtcaccgaccgtctatcagtccccgtacaacatgccttctggcttcagcgagtatgctcagaagacgtttgggctgactccaagcgagccggagctccctaaaccctcactggccaatgactacttcgccagtytttccccggaggaccaagaaaagattctaaagacctgtggcagttttgtccaacgggccattgagcgatccgcaagccatagtcgccagagctccgcatctaacctccgactcgcatcggcactagcccagcaaaccgagaacccaacgatagacataacaacagtygaggacatgccattgtcaggtctggatttcccactacatgcggactctccgtgttccagtttcagtcgtccgcacctgcgcttccaatccccgaacgattacaacgctcacggaccagaaacacatcacgaccatyatgacctctttggcgaccagcaggccaacacacggttctggcagcatgggccctgggctgcaggcgatggcaatacgcctaacgaagaaactcggccattttttggacctcacgagcggttgaagcacgactatacctca

SEQ ID NO: 414 - DNA, 519 bp, Aspergillus oryzae
aggccacgcccaacccaccccatatacctcttttaaatttattctagagacctttctgtctcctcatagtcaaaatgggtgctattcctgaggccgatcccgatgagcccatggagaccaagcccttcaagttcgtcacagctggctatgatgcccgcttcccccagatgaaccagaccaagcactgctggcaaaactatgtcgactaccacaagtgtgtcaccgccaagggcgaggatttccgtccatgccgtcaattctaccacgctttccgctccctgtgccccaaggcgtggactgaccgctgggacacccaacgcgaggctggcaacttccccgttcgcctggaccactagacgagtaacaagtcattgttgattgatttttcaagcattttttgtgtcaacatgtactctacctgattaaagtgggaatacaaatccgtccctaggattggctcgggagaaagagatatatagattcgccgtagtcgaaaatccattgtgctcctattttggt

SEQ ID NO: 415 - DNA, 644 bp, Aspergillus oryzae
gaggattcattctgaccttcaccactgccaggatttcaaccgcctgacagctccatttcctccctaattacgctgtctatcacaatctgtcgcagtacctgaaaactgcatattcgtcttcttagcctttccctggactcaagtcctttttgaagattcatcgacacctttcctttcgcagacaccctcacccagaaattctcgaaggcatgatatttttaagcgatacatataccatggttgtgtcaggaatattccattaaagaatcttcctcgccaccccttatcaaccactaccctaaatagagaaccgacctgcacgtccatctcttccttcctacttttgtggcggccttaccctaatatgaatgataccgagttgcttgatgacgaacgctctgtcgagctgtcatcaatcgcggccatctacccggaaatcaagatcgacccttcgttcccgttcaaggcatctctagatatacctgtcaatccttcaccacctttacggatctgcttcgagcaatattcggacactgaacttccaacgattttgactccgcccacatccctagatgctagtgaagttggcttgggcttcgctaccaaaacagttgatggaggcgccacggcgagctccgatgaag

SEQ ID NO: 416 - DNA, 932 bp, Aspergillus oryzae
  modified_base (297)..(297): n is a, c, g, or t
aagaccagcacttcgccgtcatcgacacaaccaacgcccgaaacatcgtcctcgaagaagtcgaagcctcgcgcgcattcttcaccatctacgaaggcggcatcttcctccaccagggccaaacctacctcgtcaaggaactcaacccagacagccggtttgcgcgcgtggtccgcgtccacgtcgactggaacaccatgcaacgcgattacacagacatcgaccccatcgaaaccgaaaccatccgaaagaccagcccgacgacgacctcgcgcgcgtcctacggcgccgtgcgantccacgccgtcgtctacggcttcttcaagatcgataaacggggccgcgtcctcgacgccgtggcggttgataacccgcccattgacatccttacaaaaggcatgtggctcgatgtgcctaaacgggctctcgaaattctcgaatcaagacacctcaacatcgctgctgccatacatgctgccgaacacgccgtcctctctctactccctacattcgtcatatcctctccgggcgacgtgcgaacagaatgcaaagtcgcgaagaaggagccaggcaagaatctacgagtcgccgtcgaggcccgaagtagggagaaagagaatattcagaatatcctgcgacctccggctcgccaacgacccgcacggttaactttctacgacgcgaagggcgggtcttgcgggtctgggatcgcagggaaagcgttcgagttcstcgatgtacttcttcgacgtgcggtggcgaggatcgaggcttgtcagtgtattacgccgaaggggtgtattgagtgtgtttgcgatgaacggtgcaaggagatgaatgaggtgatgagtaaagctgggggcgggggtggtgtaaaggtgtttacttggttgggaggtcgatgttgactctttgccgttgggtgaagatgt

SEQ ID NO: 417 - DNA, 625 bp, Aspergillus oryzae
  modified_base (24)..(24): n is a, c, g, or t
gtcgagggtatcgataagcttganatcgaattcggcacgaggcttgtccctgcgccctggcggcactggcaaagtcgtattcccgcgccggaggaccccaatgacctacatcatcttcatataaaccctttcgaaatagcggtaccttcttcagcgttttaaacacccctcgaaaacgaatgtagaccttcgaccaccggttcagattgacctggcgcgcattctgttggcgacggaagacccagaccgtgcgtggtgccaaacctagcgatggttagtactgccctaactctcgtctttctcttattgggtttacgattccatcgytctgtacgagatgaaagagggtatgtggagaagaaaccccagggaaatggtgtatacatatacatacgtgctcgctcggcttttttgaggtatcgagaagggatgaggtcttcttcggaacagttcaggaagaccctcgccttcagaccgtggacttcgatctcgacgactttctcttttgcggacaggactactgcgttggatgagccctggcctgggatgctcgcagcggctcctctgtgatcctgttcgtctagctccatgagtaagaacacgtttggaagtaagaacgacagta

SEQ ID NO: 418 - DNA, 707 bp, Aspergillus oryzae
attcaatcgagccgcggccgttgctggcgacgtcgattgtgccgcagccttcgaaaatcttcccgctgctgatgctgatgacgccttcgccgatggacccggaagcaatcaccgagagacgctggccctcgccgatggtatccagggctgtctggatcgcggtgtagtagtctgatccggcgtagacctcctccgagcctacggtggccgtgtaggagccgtcgcgcgccgtcgacggtggcatcgggtgtgccggaaccgcactgggcagagactgtggaggccaaggccaacgtggctgtaatgagggagaaccggtgcatggtaatcctgttgactcagtggttgcagatgaaagtttcaggtagagtttgggatgccggttttgttacggagggaaagggtttatatatgccctcccatcaggaggatttccatgtccatggcagaggaaatccttccaccgtcccaccggaggaaactgcctccacccggagtggtgctcatccatcgggcaagaaggttaaaaccgagatccttgtcgcggaccatttctccgcttttctccctgtttggcccggatcctcaactttcctaagaccgacctgcgctatacgccttggcggggccgggataaaaccaatccgattgcagatcacaatcttctggatcggggggggggctgcttgaagaggcgcgtaaggagt

SEQ ID NO: 419 - DNA, 677 bp, Aspergillus oryzae
acgaggatcatgggttggatgttcgcggcgatcaaggtcttcctgagcaagaacaccacccgcaagttccaccctatctccaacggcgccaatctggcaagggagttcccacctgccgtcaaggaacagttccccaaggtctacggtggaagcgctcctgatcttcatgagggcgctcgtacggtcgcccttgaggaggacaacgagccagctcccgcccccgctgcccccgcggaacctaccgaggaggccaaaccggagcaagaagcacccaagcaggaaccggccccggaggccccaaaggaggaagcaatcaaggaagccctggtggaggctccgaagrgaaacccaagcagccagctgtcgaagagccggccaagactgacacggccgttacgactcaggagacagtggctcccgctgaagccaaatagatgcaacgactttgtcctttgatgctctggccgagccagctggttttgatggtaatggtagggttccaaattggcggagaagaatgcgtagaatggtttgcgatgcttgatttgtgtctgaaattttgatacctcggaaagtttgtgtttatgttcacaagagcctgtttattctgaaccacttaattagaatagtaatttttaataatagcccaggagcaacgcatgtcattgtttttgtta

SEQ ID NO: 420 - DNA, 865 bp, Aspergillus oryzae
gggcttctcgaactgtgcgctagggtcctgacgggacaaagcgacatattcatcaccagcttcgagggacttggccaggtccatcttcagaccttcgggagcggccacaacaacacggcatccaccgcactggcggacaactgagcaaggatctgttgcgtgtaagaaagatgcggaccagtctctcagatataggtcaacttacaaggccggtgggaccagcaccgaacagcaaaacggaagagcccatcttaggagcgatcttgtccaaaccgtgagcggcgcacgaggcgggctcgaggagggtggcatcgacatcagagaggttcttgatcttgaataccctgccagctacagagagtcagcaatggcatggcagtggctcccagattctaccactacttaccaggatacgcgcagtactcggcaaagcaccgttcatggtgacaccgtgagcctcgaagtgttcacagaacaactcgtctccacggcggcagtagaagcattcaccacaaagctccgagttatcggcgacgacccgctcgccgacttcaaagcccttgaccttggggccaacagccgcaacgacaccaacagtttcgtgacctgagcacacctatcagtatattatctactacctcgacgggacatggcgacatggaagtccttgacataccaggaaccaaggggaactagcacagagtcagcaaaggctcaattgattgaatgttggacagctggaaccataccttggcaatgaattgaccctcatggatgtgcaggtcagtaccacaaacaccgcaagccttgaccttgacctatagtaatccgtcagcaaacgatttgcatggccagccatacgact

SEQ ID NO: 421 - DNA, 870 bp, Aspergillus oryzae
cccgtcctttttctttccctccgcccctctccctctcttcctcctctcctatcctctaccatcccgcttcatcatcgtcactatctaaccggactatgtcactcgtgcctcgcttctcttgtctccatcagccttgtcaaacttttgcctcaccctgaccaagtcgcgccgccgcgtttgacgtctggaaccacttctccagccaaccaacttgtccgtcacccacgtcacaatcgccatttaaataatatccaactttctgccttccaccaacactgccactccgcgtctcaacggcttttacttccccttcacacccgtcgggtctaattgtcatttcttctaccctacccttacaaaatcgctatcggcagattacccattgagctgaaatgcccgctgctactgccaccaacggtcgctccagtcggtctgggccctcttcgaaaggggtcgtcgtcctcaagctctcaccggacttgttaagtcgctttgccagtcctcctcccccagaggtaaaggacaggaagaagagtatcatcaaggacgacgagtctagagccgactcccccgtcaaggaaaaagaaccttcctccccggcgtcatcttccgtggaagcacctatccctccgtccgacaatgcatctgatgctgcatctacacctgccgcgggaacttcggctgctgacaccccccgtcgcaaaggtgtacctggtcccaagcctggagccaaacgaggtgtgaaccagataagcgagacaacccctaaaccgagaggaaagcctggtccgaagaagaaacctagacttgatgacggtggctccgaacccgtcaagattgcaccatcccataggttggggcccaaagcca

SEQ ID NO: 422 - DNA, 834 bp, Aspergillus oryzae
aggccctgatcattggttccatgtcggaggagacgagatccaacctaactgcttcaatttcagtacccacgtcaccaagtggtttgctgaggatccctcgcgcacgtaccacgacctggctcaatactgggttgatcatgctgtgcctattttccagaactacagccaagaacgccgtctggttatgtgggaggacattgcgctgtccgcggataatgcacatgatgtgcccaagaacattgtaatgcagagctggaacaatggtctagagtacatctcaaacttgaccgctagaggctacgacgtcatcgtgtcttcctctgactttctgtacctggactgtggtcatggaggctttgtcaccaacgatccgcggtacaatgtgatggctaacccagatgcgaatacccctaacttcaactatgggggcaatggaggatcgtggtgcgccccttacaaaacctggcaacgtatctacgactacgacttcactctcaacctcactgagacgcaagctaagcatatcattggcgcaaccgctcctctttggggcgagcaagtggatgatatcaacgtctctagcatgttctggcctcgtgctgcagcyctggcagagctagtttggtccggaaaccgcgacgctaatggcaacaagcgcaccacggagatgacacagcgtatcctcaacttccgtgaatacctcgttgcgaatggtgtwcaggctcaagctctggttccgaagtactgcttgcaacatcctcatgcttgcgatctctaccgtaaccaagccgcaattcagtaaacatagttgctcacttgattactcgtgtgctt

SEQ ID NO: 423 - DNA, 902 bp, Aspergillus oryzae
aattcggcagaggcccgaatctaaagtagcggagtcgggtgtctcggagcagcgcggggatagccaccagaacaggcaaactgagcatgccgatatacaatcgttacaagagagcgccgagatcactggtaaggttgtcctattgagtcggggtggctgcggcttcttggagaaggtcaaatgggtccaaaggcggggaggaatcgcgttgattgttggagatgatacccgaggaggcagccttatcaccatgtacgcgcgaggtgacacatccaacgtgacaattccggctctcttcacctcgtataccacggcgcatttgctctcatcgcttgttcctccgcagcccggggagattcgagcgcagatgatgctcccggaccacgccacacaaagcttttcggtcagagcacgactgaaaaccaggagatagtgccttcgacgacatccgccgcggctgtgtcgccaacttccacacgatatgccgcatcatctggcggaaaatcgaccacggcgacccgcaaagcaggcttcattcagagtcttgtgtctctgttaggaatagggaggaacagcggacgcttgccagaggatagccaacgacctcccagtagtggaaacattgattgggttctaaaagatccctgggatgatatggagatgtccgaggatggcaccgaccgtgtccacaaccgggcaaaagccgatagcggtgctggtgaacgcaggaaatctgatgtttcttcacaagaggacgacggtgatgggtttgtgattggcgtwcaggattggcgcgacccagaccttttagtcccgatcagcagctccatcccactcccgagcagtgtcccggagtcggacgctagcaaaacccagactaccgggaaaaggctcacgcccca

SEQ ID NO: 424 - DNA, 907 bp, Aspergillus oryzae
  modified_base (349)..(349): n is a, c, g, or t
gagggtttataataccactcttcctgagtctcaagacgatttcacaaacggctttggaattatcgggagtaatcaattctctaacgctgacttttccgtgttcttcaagatgggtgccctcaagtacgtggaagaaatccagaagaagaagcagtccgatgtggtccgcttccttctccgtgtccgttgctgggaggtgagaatttccccctcaatatcgattatttaacatcccgccggatactcgtgtgctatgccataggatacctttttcttcagagggtgttgctgggcggctcgatccgattttttcgccggcggatggatgtggcacattccttcgtgtgtnttgctatacactcgttgaactttgctgagagtgcatcaatatagctccgtcagctgaacgctatccaccgtgcttcccgtccttctcgccccgataaggctcgtcgtctcggatacaaggccaagcagggttatgttgtctaccgtatccgtgtgagamgcggtggccgtaagaggcccgcacccaagggtgccacctacggtatgcagaaaattccctagccgaattgcgacagaggtcaggagggacaagggctaaacaggtttcgattgtaggcaagcccaccaaccagggtatcaaccagctcaagtaccagcgtgctctccgtgctaccgctgaggagcgtgttggccgccgttgcgccaacttgcgtgtcctgaactcctactggatcaaccaggactccacctacaagtacttcgaggttatccttgtcgacccccagcacaaggccatccgccgtgatgctcgcatcaactggatctgcaacgctgtccacaaggttcgtttctcctgtccagtgctacctgggggcctattactgatatggctttctgc

SEQ ID NO: 425 - DNA, 952 bp, Aspergillus oryzae
  modified_base (757)..(757): n is a, c, g, or t
  modified_base (911)..(911): n is a, c, g, or t
ggcacgaggctcgaccgtcaaggtcccctaaccagcagggccttgcacccgcagacgtgcccaagatcccaccacgtcccactcatcgctttgatcgctccgtgtctcctcttcgagatagcwacgccccgtctcccttgaatgagccacccaatggctcgagctcgagtcgcacaatttcccaggatgtgccgcagcgacctccgagtgtgacgataccttcaattggtgaagaaggcaatgaatacgaagctttgaacatggacgatatctccgatagtcatcgcgagaaccaccattcgactcccgcagagatgcgcaacgtgggtagtgatctgaagctccatgcgccaaggccttcactaccttcttctagcgccaaagccaaggtgcaagccgtcacacgtacggattctcgtcaggctgcagcagcaggccttggtgggacatcatcccccgctcctgatgaccatgaacgaccaactcgctcgttacagtctcgaacaagttactcgcgtgcggactcttcgacttccattgatcgccgactatctatgaacggcgatgagcatgggattagggttccaatgtaccctaatgcgggtgatgtacaagccccttccccaagtccataccatctagaacagaacccgggccagcgctctggccgcagtcataaccgaactcggagtggtcgtgacgcttctcttccgcccdbdagctatggtcttcacggtcatggcgtacaaactatganagttcgagaaagcctggtatgaaaaacaccggaagaatacgtcaaggaagagcagggtcaatatggcctggagttggatcgccacggccagattgggcgttgagtagtgatgatctgaacaagattgtacggggctctgctgtcaccgggagtngacttggcacatcaacctgctgtaatcggaactccagaaga

SEQ ID NO: 426 - DNA, 958 bp, Aspergillus oryzae
cttcaccacccatacgcgtatgctggtcatgctgcggtccccatggaacagcccattgcctatgatccgacaatggcacacccatccatgatgcatccaatggagggctacatctatccgcacccaccttttgacatgatcgacttctaccatcagcctattatggactacgaggaatatgcagagaacttgtctcgtccacggttgactaaggaacaagttgagaccctggaggcccaattccaggcccacccaaagcccagcagcaatgttaagcgtcaattggctgctcaaacaaacctcagccttcctcgggttgctaactggttccaaaacagacgcgcaaaggccaagcagcagaagcgacaggaagagttcgaaaggatgcagaaggcgaaaacagaggccgaggaagctgcccggatcaagatagagaatgccgagaaatccgaatcgaacccagacgtcaaagaagagacagacaaggaaaccccaaagcaatcatccgatcagaccatgtctgatgaccgtactaagacacctgcttctaactcacgatcgaagcatcacaaaacaaagagcgagtcggctcgggaagcaacctttgcatcattgcaacgagccttgaatgccgctgttgctgctcgagaacattatagtccggatgaacagggtcaacctgctaccatccatgagggctcggtgtctccgacaacaacctactcaggcatgaacaaccacggtgatagccgagctgcccagagcagttccacaactccgttctccgaatgggaaaacgccaaggagactgcgatgtcgtggtccgcatctcagagtccccaagaacatcttggctactccgctgccgagtcgctaactgtcccggaattagacggctctcatcagaatgtgcagcacagtgacaccctccagttccactcttcacaaaatgaggagt

SEQ ID NO: 427 - DNA, 883 bp, Aspergillus oryzae
ggccccgattcctccggccgcagagcacgctgcgtgctgtctcctcccttacacagaaacccgcctccgctctcccacgcttccagactcgcggactgcatcgtgtgcctcagttgactcacgatacccacttcaagaacaatggaattcaggagctgttatcaccagaggcctttgacttcgcttggacgcaataccagaaccttttgattgataagttgaatcttcttacacaggatactgtcgatgcggatgcgaaacctggagaactgctggtcaagtactcccggcgcccagagatggcctccgtattcaactacgcctctatggctcataacaaccatttcttcttcaacwgcwtgtcgcccacccctactcagatcccggacaagttcgccaaggacatcgttgatacctgctcctcgatcgaatccctgaagctcgacttccttgcaactgccaatgctatgtttggccccggatttgtgtggctggccaagaacctggagagggaaggattgatgcacatcttctgcacctacaatgcaggctccccttacccggccgctcactcccgtcggcagcccgttgatatggctacgcactcccccgacgctcccttgggcaaccagtttgctggtgcgatgggcgcycactccgcgaatcagaagagcctagctcccggcgctgtcgatgtccagcccattctctgtgtaaacacatggggagcatgtatggatgatggactacggcattggtggaaaggctgaatacctcgagcgctggtgggatcgcattaactgggaggttgtgttcgataactacaacgcggtcagctcgatgaagggcacacggcatgcggccaatcggaaccgcagcctaa

SEQ ID NO: 428 - DNA, 1017 bp, Aspergillus oryzae
cgagggcgatctacagcaatggtcgatagctaccacggcctccgtcacggtgctggcgttcgtgacggtttgcctccgactgcttgcacgttatgaaaggaagcaaaagctatggtgggacgactacatgatcatattttccatgtcatggaacctagtcgttgtcggatttatttacgccatgataaaagaaggaatgggtcttcatgccgacactatcccaacgagtaacgtcgtcatgatcgcgaagttcctagtcgtggccgagattctttacgtattcaacctcgtctggaccaagctcagcattttactcatgtactaccgcatcttccggtttccctacttcaagacatgggcatacatcatcggcaccttcgtcattctctgggtcatctgcatcacattccttttcatcttcatctgcgtaccggtcgagaaactatggtatccccaaatccccggccgatgcatcaaccaagtcgggacatggatcgccaacgccgtctcaacaatcgccaccgacatcgttatcctactcctcctaatcccccaagtctggaagctccaactccgcctctccgagaaaatagccgtgtcaatagccttcagcctcggcttcttcgtggtcttcgcctccgcctaccgcttctcagtcctcttcacctacaccgcaaccgactcctcctacaccctcgccccaacagtcggctggaccgccatcgaaatgtccgccggcatagtctccgcctgtctcccaaccctccgccccgccctccgctacatggcccgcaaactaggcctccacggccgactcccagccctcttccagagcacaacaggacaaatgtccaaaacctcgattcccgccaccggaccctcccgaacggaagaaagcacggccactattatccaacactcggagcgtccgaaacggcattcgttttaccatttaccggatgagacggactcggcgggggagcaggccattcggatacgtcttttcggccggattat

SEQ ID NO: 429 - DNA, 764 bp, Aspergillus oryzae
cgaggtcacaaagctcagcccggatggaagaacccttccgccactgcagtaccgcgatctggatcttttgcccttcatcaaaatctcatcaaggaaactctgcgcttacatctttccattcactctctcatgcgcaaggtcaagaacccgatgccggttcctggcacaccttacgtcgtccccgcagaccacgttctactagcatctcccggtgtgaccgctctcagtgacgagtacttccccaacgcatcccgctgggatccccatcgctgggagaaccgggttgaaaaggaggatgaagaggacattgtcgactacggctatggcactgtgtccaaaggaacatccagtccttatttgccctttggcgctggccgccatcgctgcattggagagaagtttgcctacgttaatctaggagtgattgtggcgaccatggcgcggcacatgaagctattcaatgtagacggcaagaaaggggtacctgccacagactactcgtccatgttctccggtccctcgaaaccagcaattataggttgggagcgacgcttcccagaaaagtcatgagccctaattaaagccttccttgggaagccgatctgttccatcaaagcagtccctatcgtcggttttttttaccgccgtgtaacatggtgaactttctgaagcttatctagagtcaaccatagttagcgccgtgccctgaaaaggatatgtgtaatgttagcattagatattattaataatatgatgtccacagt

SEQ ID NO: 430 - DNA, 1004 bp, Aspergillus oryzae
ctcaatcacaatttgtatacccacccagagcatttgccgacgaatggaggatgaggccgctgaaggggtatggggctacctcattccgcttgatgaaaaggttcggaggccccttgttctgagaaaacgagatagttgtgaaggccatgcggatgccaagtccaagggcaaggctgggaaggcaactcgacggcaagataaatcatcggaggacaaacaagcgaagatccatccccctggcggttacttagttggtcgccatccggaatgtgacttggtgatcaacgtccccactatatctaatcggcatttcttgatcttccagaaaacagaaagggtggatcggtcgcgataatggaggatctgtctagcaatggtacttttattaatgatgcaatcgttgggcgtaacaagcatcgcgaacttgaagacggggatgaagtcactatcttggatgaagcacgctttgttttcaggtaccctcgcacaagggaaacaagtgggttccgccagcaatacaggcttcttcaacaacttggaaaaggccattttgcaactgtctacctttgtgcagaacggtctacaggaacgcaatacgccgttaaggtttttgagaaacgtcccggagattctcagaagtcccaagtggacgctttacaacaagaaataggtctgttgatgggtgtcagccacccaaatctactatgccttaaagatacgttcgacgaaagtgatggcgtatatctcgttctggaacttgctccagaaggtgaactcttcaacttgatcgttagcaagcagaagttttcggagacggaaacgcgccatatattcgtacagcttttcgaagggttaaagtatctgcatgatcgtggagtcgtccatcgggacaaaaaacctgaaaatatcctcgttgcagacaaggagttgactgtgaagctcggtgattttggccttgcgaagattatcggggaagactcatttacaacaacactatgcgggac

SEQ ID NO: 431 - DNA, 1041 bp, Aspergillus oryzae
gaagaggattgtacctgcgtatatatctacgcatcgtccttctttttgactatcctactgagttcactcctttaaccatcaatcttacgacgaaggctttcccgtctcgctgtatctcacttgcattgcatatcgtatcaacatcgaccttacctcgacatcttcaattacctttttcggattatcaaatcgccttagaacaatttcatcaaaatgcgttccatcttctacttgactctcagcgccatggcgtctctcgctgctgctgctaccaacagtgccaacccgttcaacatcccctctgagggttattcgttcgaggctggtgagccgactacgctctcctggaagcctaccaccagcggcaccgtctccctgaagctccaatggggcgctgtgatgacttcgaacacgggtactaccattgcccagaacattcccaactcgggcagctacacatggactcctcctgccaacctcgcggctcagcctgactacaccattgagatcttcaacgacgatgacaccagtgaggtcaactatctcccgcggttcaccgtggccggtgctactgccgccgcgtctaccaccgcgtctgccaccactaccgctgagactacctctgccaccgagtcttccacgactgagacgaccactaacaccaagtccgccaccgagactcataccacattgactaaggcgactgctagcactgcctcgagcacttcggctactgcctctggcaccagcaccgagtccactagcgcctccgccagcgccaccggcacctcgaccggcacctctactggttctgcctcaacctccactgaggcttccagcaccacctccgccagtgcatcggcctcgaccactagcgttgtcaacgtcaatggcggtatggttaaccgcgtctctggcggcatgctggcgatcgttctgggtgccattgccgttctgtgagccttcctccggactctagtcggcgatctgaccatacttcattaattagatagttcttaactactcttctatcgcttcctt

SEQ ID NO: 432 - DNA, 937 bp, Aspergillus oryzae
gcacgaggggaggtcaatgttgatgggcttctccccacactcgcggagacggccacgggtcaggtaccgaagatccggaagttctggttcttagggttcgagaggaaggcatccacgaagctgtcccagatggtatagtcgacgaggatggagttgctaaggacaatgacggggctatgaggatcagtgctgccctctaggcggtatgggagatcgacaccgtccggagtggtaatgaacgactcgacggccgggcgggttggggaaggaaacgttctggtgcgaccgtcgttggaagcccaaggtccggcgacatccttatgggccagagaagacaattcgcggggcgctggaccaaatgtgtaagcccactggtacacgcgccgcttcttgctcgtagcaggatcattcatgaggcggttgcgccacggggtatccatcgcagctttgtgttccgggccacccaagccgttgatcgcgctgtattcatagaggcataggaattctcgggctgctttggggtcgatcgatgatgtggtgaagaggcggctgcgacgcagcctggtacacgtgctagcatagggaagtgttcttcacgataccacttctggaggtcctcttccttgtcggcgggaacggtgaccaaggcagagacaagtaccgagccggcggcttcagtgtcgggtatatcctcgacaggcttgtagtcggaggctttatggtcatggagaagatcataaaggcgacgatcaacgtcaatctgggccatggtagccttttcacgtggggtcttcacgccatccccacggagagccaagtaagtctcgcgtgtcagctccaccatgtcggtaatgtcgtacggagccacccactccggctcgatgccgtcgacggcacggtkagcggaagccatttagtgacaaagggcagtcggaga

SEQ ID NO: 433 - DNA, 963 bp, Aspergillus oryzae
gcacgaggatcctttgctcttctctctccctccatccttgctgtcattctcatccacaaatcctcctatcgccccttttaacttgagcactcctgccatagtcctctttctcttaccttttgaccgaagacctctccccgcataacacacacaatggcagccaaagctttgcctacccacctcagagctccagccacggaaacctcaaacgctggctctttcggcaagcaccacggaaagtctcagtctcacatggtaagtcttgtggatttcatgacactcgtctggagttgcgactgcgcatgttggcccgtggtttcctgaattgtatgcacacctccttagctgctgggttgcgaccctgcagaatactgtgggggaaggacccggggcgcggatgggttgcaactgcttttaagcaacttgaagtctaccttgccttgcttattgaccatatgggcatatgaacctgtcttaaatggtggcctgcatggacttggtatacttagcatcgcatatccctactactgaaagcacgcatttcccttgcacggttttctgctcagagaaagcgtacattgtattttgctgtgttaccttgctgaaaatcttcaacacttatcctgtgctccttgaaacgtataccggattcccctgaaccgttatctgaatttctttgattttatcactcgtttgcgaccttctcttcgtttcaggacattagtttctatagctatctttacttctggagcacctctaggttgcgggttgtttttagatttttacaagtcgttttttgctttgacatccgccgaactcctgtcatgtcgtggtttaagacttgcatgctaacaggccgattccctcaggcgttcgagaatgcatcgaccagcgttgctgcttctcagatgcgtaatgctctgaatgccctctcagagaccgtccctgatcctcaggagcgca

SEQ ID NO: 434 - DNA, 753 bp, Aspergillus oryzae
ggggtgaactttgccaactttcctgacacccctcaggatgctttcagaatgtggttggacgaggcgatcagagccggcgtcaaagagccccatgccatgacgctacgccactgttgacgaacaaggctacccagacgcacgggtcctcatcctgaagaatatggatgagcgtggctggcacttcgccgtcaaggcagatagcccgaagctcagcagctggaggccaatggatatgctgctctgacattctactggccccaggttggtcggcaaatccgagtgcgcggaacagccatccagctgccagacgctgagtgcagggaggacttcgccgagcgtccgttcaagtcgaaggtgmgcsccatggcctcgaagcaaagccaggtgcttcaggaccgtgaggagcttacccgtcgaattgcggaggtagaatgcaccgcatcgtctgggcaagaggacggcttccggaagtggagagtttatgccgttgcgccaatggcggttgaattttggcaagggtcaaacgatcgccttcattataggctacgatatgtgccggataaagaacaaagtcattggcaaagggaccaattgtggccatgacatgctctctaactcgccgaaacggctgaatccgaaaacggacagaccaggccggctgaagggctttattatagccaagtatttgacaaagtcaagccctcaaatagcgatgagaaggctgtccataatggaaaatcagtcactaccact

SEQ ID NO: 435 - DNA, 398 bp, Aspergillus oryzae
  modified_base (77)..(77): n is a, c, g, or t
  modified_base (105)..(105): n is a, c, g, or t
gaggccagggcccaacttctttgctcgaccggtgattgggggccattttgcctttttggctcttcagcgtgcctgtnaaggtcgggcgatggagggattggcctnccttaacggaaagccaggctttggagatgactcggtagcatctgctgagacgctcagccagtgggaggccatggcagctaaagcggcggaaaagttcaagtttgacgggtatgaatccgagagggtagaattgtaatcttttggattcgtgtatatatcctatctaatcggtgtatgtaaagggttggtaagagctggtaaagtttggagagatgaagcatagcacctttgatattgaccaaagctatgtaagaaggcgacaagatacgtatataaatttcaaagggtctact

SEQ ID NO: 436 - DNA, 971 bp, Aspergillus oryzae
acgaggcgcttctacacggtggatttcactccaagacatcttacaaactgggcctttagcgaaatcgaacctaaagattcagtcgatcaaggccaggtattctataagcttgtgctgcgggcattcccgaaccatttcaagggaaactcaatctacgcacatttccctttggttattccatctgaaaacaagaagatactcacaaagcttgggtttgctgagaaatacagctgggacaaacctggcctcactcccccacccgagtttattaactctcattcggcttgtatgtaaatattgtctgatcaagagacattcaaggtcacatggggatcaaagattgagtttttaatgcatcgtggcaaacagccttttggcagagacttcatgctgtccggggataggcctccaaattccgcatcgcgcaaaatgatgggagctgctttgtaccggaagagatgggagaatgaagtcagatcattctatgaagacataactctaaagcttctgcacaggaactcttacaagattgctgggatcaatcaagttgacattgtacgagacgttgcaaatcctgctcaggttaacttctgcgcaaatgtgttctcattgcccttgaaaactgaatctaacccccggggaatcttcacggaatccgagctctaccaaatcatggctgtkgttttcacctcaatcttctacgatgcggatcctgcgaactcatttgaacttaaccaagctgcccgggaagtgacgcagcagcttgggcagttggcaatggccaatgtcgagcttgtcaacaacactgggttcattgcaaacctggtgagtagtttacaccgacatgacgtgctcagcgaatacggtgtccatatgatccaacgcctcctgggcagtggactgccagcggaggagattgtatggactcatattctgccaactgctgggggcatggtagcaaaccaggcgca

SEQ ID NO: 437 - DNA, 839 bp, Aspergillus oryzae
ccaagaagactggcgatagggccgttctgagtagaactgatattgaggttctggcgcttgcatatgaagtagaatgtgaaagaaacggtggcgattggcggctgcgcacgtccccggacagaaacaggtgaatggcaagccacccgttaaggaggaagaaaaaaagcccgagacggcggatgagtctggccagattgaggagaaggtcgaaaatcccgaagttgatgcggttgcggaggatctgaagaacacggctttagagaaaccggacgagaagtcacaggatggagtcaccgctgccgcagaaaccaagccagtggaacaatcaacccctcaagagcctcaggaagaggacgacgaagccgctgactcggacggcggagaatggatcaccccttcaaatctgaagaagaagcaagcccgcgacgagggtatctctgcgtcggcgacaccggagcccaaggttatgcaagtcgcgacgatgacgactgattttgcgtgccaaaacgtgttactccagatgaacctgaacctactgtcaacgacaaccttgcagagaattcgccatcttaagtccttcattaaacgctgtcacgcttgtttcttcacgaccaaggacatgaacaagcagttctgcccgcgctgcgaaaaagacacccttactcgtgtctcttgcactaccgatgccaatgggcagttcaagatgcatctgaagaaaaacatgcaatggaacaaccgaggaaacgtattcagtattcccaagcccacccatggaagctctagtgggaagtggaaaggaggcggaggtaaaggtggctggggaaccgaactcgttctcg

SEQ ID NO: 438 - DNA, 925 bp, Aspergillus oryzae
cacgaggctctagtgctatatatttccaatctggctataatccacatccttaatcatacctttcaatctcctccgtgacctatctagtcaaatttcccgcaacactcggagaccatggcggaatcttccaattccgctgcggcctctggcagactcaaaccgcggcaaagcctacgaaggcaccgaacccagtatggaaaatgatgggaatgcctaacttccgtctcaaacttccttcccgcaattggatgatctttctcacagtaaccggctctttcaccgctgccctggtctatgaccgcaaacagaagaagcgcgcacaacaaaaatggtgtgacctggtagcgcacctctcaaaggagtctctcccagttgatcaaacacggcggaaactcacagtctttctgtcggcccctcctggcgatggtctccgcgttgcccgtgagcmctttaaagaatatgtcaagcccatactggtcgccgcggctttggactaccaggtgatcgaaggacggcgagaaggcgagattcgggccgggcttgcggasgaatttcgcaagtttagaaggaagtctggcgagccaagcactgtggtggaagaaactggcattgaagaggtcgttgcggatgcccgggagaagatcggagtggtagaggaaccagtycccaagggcgatctgattatcggacgtaatacctggaaagagtatatccgaggtctccatgagggctggcttggaccactcgaccctccccagccgcctctttcgacagatgtsccgtcaccttccgagggagcagagaccaatggctctccagatgacacccctaccgcagagaactccgagaagaaagaggaacctgagaagaaggatgagaagccttctaagcctaccggcccgaccccagcatacatcactcctgc

SEQ ID NO: 439 - DNA, 991 bp, Aspergillus oryzae
tcggcacgaggaaggcacgctacctcgaggcccatgaaccgcaccccgagcaccatagcggaaaatccgagtctgaatctgacgaaagcgatgaagatgcggacgatagcgacgacgacgaagaacttcaacggctacaacagaagatcgccgaaatgacacgtcaggtggaagctattgctcagaagaagaaaaagaagacaccacccggatcgaagaaggctgggaagctcaagtctagcaccaaggaaatcaagaaacctggaagcatgaatctccccaagaaggacaagaagagcagcataaagccatcgaaacccgagaagcagcgctgggtcacatatcaggagaagcaaatcatatccaatgggatcagtagccttccggataaaaagatgcaggaagcgcttaagatcatccagagtaatgttccatctctaaagggcacccaagagacagagattgaactcgatatcgatgagctgcctaacgatgtattactaatgctgctcagattcgtcaagaagaatgcaccccaggtcatggaagacgaagacgtggcgacgcccactgctatgatgaatactgctgctgctcccaaacccaagaagaacaagcctatgagcaagtttgaacaggaagctcagatcaacatgctcgaaagcaacctgtctcgcttccagggtggtggccgatctccagatccagttccttctgtcgaagccaacgaaagtagcgacgattcggaagatgactcggaagagagcgaggaggagtaaaccttcgctggatgaattctagctcaatgattactctccggaaatctcccccctttgttcttgttgatctactttgctagtcaccctgggcattcctattcttcatcttacgttatccattattctaattagttgttcccccatcttagttgttgacctgtgttaccacactacccttttctgttggtcttttcttttctactatttagcga

SEQ ID NO: 440 - DNA, 665 bp, Aspergillus oryzae
gaattcggccgaggctcgccgtttggtttttctttttctttttctgttttcttttagtctttttttttttctccgtccattttaactgtgtggatttgtgtatcgttccgtattatcgtggcgtggctgggggatcataatcaagggctctgcttcgttaatctcctagggtcgttggaaaacgcgagtctcaaaaagggggaactgctcacggtcaagaacaagaaccaaaaatttctattcaagagccgcagatctaggaaaaggaagtggaaaggggagagaccaaaggcgaagttaaaaaaaggacgatttgaagacgmcgaaaattcccaattgggaaatagcaggaggacactgaaccgcacgactaccttattgaatactttccaccaagtgcccctcccccagcgtcttcctctcacgactaacgattcacgactacaattacacccctcctctacgtkggccccaacttccctctttcgcctcggttccttccctttttacttcccttgtgtatttctaaattttttgccactaaagaagccctactcctgaacagatgcatcatttctaagcttgcatcgtccttctcactcatacttctgsasggcccttcttcccccttccagaactgcacgtgcatatcaacatgccggcta

SEQ ID NO: 441 - DNA, 721 bp, Aspergillus oryzae
ttcggcacgaggcgccactcccgtacgtccagtacatactcaatggaatattacgtttacatcgcattctagtcttaattttagggagcctgtcagtcccccaattgtcatttaaagtgctccgctcttcgcctccccctcccccagctggggtgttcggattcctgcggttccccgagatatgacctttccccatccccatggctacaggaacggtcgacccttcggcccctaaggatgtccaggggacctcggccccggccggagacatcgatacggggtcaggtaatcttcacgagaaagaaaaacaaatggtgtctgctatccgcccgccgcaccagcgacatctgagtcctttcgtcatcaccgagcggccggaggaaaagcaactgggtgtgtctacccgcaccttgacagttgatgactttgcccttttgaaaaccctcggtactggcactttcgctcgagtatggctagtgagattgaaggacgaaatacgtcagagagataaagtgtatgcactcaaaatactacggaaggcggatgtgatcaaattgaagcaggtcgaacatgtgcgcaatgagcggaagactctctcggcggttgccggccaccctttcataacgacactgatagcctcattttccgacgaccaaagtctgtacatgttgttggactattgccctggcggtgagatctttagttacctacggcgcgcgcc

SEQ ID NO: 442 - DNA, 728 bp, Aspergillus oryzae
  modified_base (25)..(25): n is a, c, g, or t
  modified_base (391)..(391): n is a, c, g, or t
tccgtttctcctttccgtccgacangctaaggtctgcctaatgttgctccgtcacaatatctcccggttatcaacaccgtcgagctggatctcgcgggtttcaccagcaaccatgcctctccgcgccaaagtgacaaacccagctttcaaagctgccacaatgtcaacttccacgaaccttcccaaagagttgcccggcgatgagcccgacgatgttttgttcaattctttgtacggatgcgcttggtcgagcttaaccgccctaagaagctcaattccctgaacggttcaatggctcgaaagatcctccctcgactgaaggagtgggaaaagtcccagctggcaaacgttgtcatggttgccggcgcaggctcaaaagctctctgcgctngcggagacgttgcagccctcgctctgcagaatgagcagggccctgagggacagcagaagttgaccgacttcttcggtctggaataccaactcgatcacaccatcgcaacctactccaagcccttcatctccgtcatggacggcatcaccatgggaggtggtgtcggcctcagtgttcatgcccccytccgtatcgcaactgaacgcactgtcttcgccatgcccgagaccaccatcggattcttcccggatgttggcggctccttcttcctgccccgtcttgacgcggaaatcggaacctacctcgccctcacttcggagcgtctgagcggtgtcca

SEQ ID NO: 443 - DNA, 927 bp, Aspergillus oryzae
aattcggcacgaggaccatgttgagatctttatagactcgatatcgaacatattcccttcattatcagtttggtcacgagtctagaagcgtctaatatactgctgctccgctcgggcgcgggaccctccctcaccccacagcgtccgcctcgtcatcgggcatccgctttttaggctgagcttatcgagggatatccacaagaaaacagccctttgcccttaaataggacagagcaaaagcttccctctcgacagataacgcctcgctccagacgcccatccctcacctcatcctctgcacatctgcgatatccaacttttcctcctctaagtggctcagttgaagagtggctgtcccgctcgaggcctatcagtatgacgtcaagtcatctggcggactacacgcccaggccactgagcgaaagctgggcaacactgagcgcttccgacgttcattctgaggatggtagccgctctgaacaaaccgacgttgggtctttaattgaccaagccggtccggatgacgttgcaagtatcgacgagcagtatagcggcasaaggttgatgggaacgaagatgacgattatgactcgaaaagcaacgtgtttggatctcaggaactgcctgctcttttcccccagatcagaggctctatcgatgacagtaacataaccacgaaaactgcttttcgtcaatcaaccgagtcgatagagtttgccgagcctgagaaatggcctgaagttgaacaagtggaactgaaacacactatccgtatgtttgaaggtattgaggccgacgagctgaagagtcaattctctatcaacctgcgggactctatccttacagccaccgttcagcaaaccatgacgaagaaaagccttgacactgataagccgttccgtgtactctacattggagatcctgagt

SEQ ID NO: 444 - DNA, 776 bp, Aspergillus oryzae
  modified_base (228)..(228): n is a, c, g, or t
  modified_base (426)..(426): n is a, c, g, or t
cggcacgaggggctcatggactcttccagctcagcaacggcctctacaccgggctcgctgttatcctgctcctcccctggacgctgaccgcactcggtttcacagctctcaacgtactgaacagtaaaagtacctacctcgaaatcattgcgttgagcagtcttctgactttcctcatctgtcgtctccttgttgcctctgttccgtcaactagccaagatgatactnttgctcggctcatcgcatccgcagactatggatcgcgccgcggcgcagtcattctctttggcctgtgctgcacctggctatacgagttgcttaaccaggcggtgctgctgtttttcatgaccatctttggaagtgtcatggccactgctatatacaatgatgcattcacggacaacaatgttgatcccgatgagagtncaacggccgtgtcggttgaggtgaaaaagttcgaggacatggctgggtttgatccgacggcggtttttaagttaattccgccgcggttgttggtttatcttgtcggactggtatggttgaactttctgagcttgggcgcttatgtgctgtgtcatgcggcggtttctttgaagaaggttttgagttcgtctgtagcggtgggaaggaacgttacagctggtgagaagaagctggttgctgaacagtagatggtgtatggcaattatgcggcgttactgtcgcctacacgatggacctatagaaaacgactgttctgatacataaattgactactcgccatttgaccacat

SEQ ID NO: 445 - DNA, 802 bp, Aspergillus oryzae
  modified_base (298)..(298): n is a, c, g, or t
  modified_base (302)..(302): n is a, c, g, or t
aattcggcacgaggcaggtggcgaagacggcattggacaccagcagcgatggcgcggtacccggagagacctttgtatacggcgattcgctgtatgctaagcttcaacggctcgcaggaaagatcaatatcgagcagcgtggaattgaacgggtaccaccagacgagcagacggatacgtcgtacttcaatattggcagcatggtgtgtttatgattccgttgcgttaattttgtctgtgccagcaattgtctggcattccaagcaccgcctgtccaactgcacccaacacgcaggtntggncggccaacatggtagtcagttcctttgccatyggtgtcctcggaaaatccctcttcgctcttggctttgtggatgccatcctggtaaatctcttcttcaacttgttgggtatcatgactstgggattcttttcgtgctttggtcctcctttcggtctgcgacaaatggtactctccagattctggttcggatattgggggacaaagttcattgcctgcctcaacgttttggcctgtattggttggtctgcggccaatgcaattgttggtgctcagctcctccatgcggtcaataccgacgtcccaggatttgcaggtgtgctaattatcgccttctgcacgtttattattacttttgccggatataaggtcgtccacatgtacgagtactggagttgggtgccgacatttatcgtcttcatgatcgtctttggcatgttcgcccactccggagattttgtgaacatccccatgggcgtcgggaaatccgaactcggcagc

SEQ ID NO: 446 - DNA, 1052 bp, Aspergillus oryzae
aattcggcacgagggattaacctgcttaatgcccacccccacatggatctgcgccacgtttcttctcgcgagctggctggcaagaagttgcaaggttatgataagagggagatcatctacgagaaccttagccccgaggatgtcaagcgcatgtctgcaaatggcgatgttgactgctgggttatggctctgctaacggtgtctgcaagccgttcgtcgaggctgtcgaccaaggctcggagaagggtaatgttattgttgatttgagtgccgactaccgtttcgatagcacctggacctacggtctgcctgagttggtctctcgttctaaaatcgcccaggcatccagaattgccaaccctggttgctacgcgacasgcccagattgctattgctcccctcgtccctcacctcggtggacagcctaccgttttcggtgtttccgggtactcgggtgctggtaccaagccaagccctaagaacgacgtggagaaccttaccaacaacatcatcccttacagcctgactgatcacatccatgagaaggagatcagctcccagcttggcaccagcattgcattcattcctcatgttgctgtttggttccagggtattcatcaaaccatcagcatccctctcaaggaggaaatgtcctcccgtgatatccgcaacatctaccaggaacgttatgctggtgagaagcttgtgaagattatcggcgagcccccggtggtgaagaacattgctggtcgccatggtgttgatgttggtggattcgctgttcactctagtggcaagcgcgcagtggtgtgtgctaccattgacaacctgctgaagggcgcacaccccagtgcctccaaaacatgaacctcgctctcggatatggcgagtaccagggtatccctctggagtaaacaatcttcagtatactcatctctataacctcaatatagcggaagtgtagatatatgaactatttycgtggacggtggttttcgtttcttgaattgaacatggtgtcatctttctcgcgtgtctcataccccgggtgt

SEQ ID NO: 447 - DNA, 912 bp, Aspergillus oryzae
  modified_base (86)..(86): n is a, c, g, or t
gactgttcaggctgtgacttggaccatactccttttgatgatattgccggccttggccaaaatttacgaaaaatgaaacattctgnactgcatgctyagcaaaatcttaagcggcctcatctgattcattggactcctatgagggtaacgcctaccacaatttagattcatctggcacctaatgggacgcttcctcagacttttcccgagttcacgactccccccgttatggaaatgcttgcgctaagcccgatgccctggaaaactgccactactcatcccttaaggaagacagggcctatgcccaccgtagttgagcacgcgagcgctctgatagggctaccttctcttcccacagggactatgataaatcgaattcgtgacgtgcaacctcctcggcttctacccgtatcacctcctcagggcccttgtatgacaactagcgggcatcatcgggtggcttgaaataatactcttgttctttagcgagtttagcaatggcccagggtaaggagaagtgaagcagtatatccttgtatggctgatgccgcggagaatcacggcctatttcccgggactatggctacctcgtctcccaatcctgcggcgcaaaaatggcctccattgaagattcttttctccaaggaagtgatttcggcagcacggctgattactatagtacccataaagctgacaagaggaggtataactagatctgtgcttttggccagcatggggaccatagccgcgrttacaacaagtatgccttatggcgccagaccggaaattcaggcatatattcttgagtaaaaatctatgcaaacgccaatgattagcactcgtaccgcaagggctattgctcatacggcggagcaaaagatacttcgtggctgtgatgatgactaacactag

SEQ ID NO: 448 - DNA, 788 bp, Aspergillus oryzae
aattcggcacgagggttctttgcctgtgaacttttctctacaacagtcgcaatcatgtctaacgataaaggattggaagagatccctgagggtatgttcttattgtggattccatatctttggcctttcagtccatttgacggactttttggattttttgtggtgctggtcattttttttcaccttcgatgtcgggtcaaagagggcaaaaaagaccaaagcaccacaccacacaaaccaacatcaaatgtcggatcaaggctaactcgacttttccaatcaacaggacagatcgagaccaactacgatgagatcaccgactccttcgacgccatggagctgaagcctgagttgcttcgcggtatgtgttaactttttttcgaccagaaggatgtcgataacaggaagtgctgacggagtttcttcaggtgtctacgcctatggtttcgagcgtccctctgctatccagcagcgtgccatcaagcccatcatcaaaggtaggtttcgttccatttttagggttgatgagttgtaactgatcgtatataggtagcgatgttatcgctcaggcccagtctggtactggaaagactgccactttctccatctccgctctccagaagctcgaccccaatgttaagggctgccaggccctcattctcgcccctacccgtgagtwggctcagcagatccagaaggtcgtcgttgctatcggtgacttcatgaacatcacctgccamaaaaatattggtggtactgcggtcgtgagcatgaaggctctcggagaa

SEQ ID NO: 449 - DNA, 985 bp, Aspergillus oryzae
  modified_base (56)..(56): n is a, c, g, or t
aattcggcacgagggcactagcagagtctgggaatgtaggcgaccagactctgaanccaatagcggacggggtggtgtgttacaaatctgtcctgaattcgcagagtgtccccgacctcaacccatgtcttgttgccactagggccggagctcctggctctttagaaaaagacttcaccaccaagggcactcaggggaatctgcactgcccattcgcaaaatccaagattatgccatctcagaatgggatggctaatgggattgagaatcctttcaagatccagaatggtgactcgtgtggacacgaaagtttagaccccataaaggctgaacgaaatgatagacattctagtcagactccttcggtgaggacatcgactacccaatgtcctgttgcccggtgccccattagatacctagaccaacatagcccggaagaaattgccgactatgttgaaagacacaaacacgaaataccccgaagccatgctatttgtgtccaacgttatcaaaaggattctcatagcatgcggcatctagatgcaaaatatggtagtctcattaatatgattcgagggttatcagtcaaacatcaagcgttcctcccgaaccgtggtaatagcggcgcgccgacatccagttcctctgccgaacgagtggaaaagtgggcggaagaggttggcatgaacccggagctacagccctctaccaaagaggccgagacagtrgacgacgatggtagggagggccgctttgaccgtccgctacgtgaggwccgcgttggtgaatctccaagcaggccttggggaatccctgtcccgatgcccttgcctccttcagcatcgcctccgccggcggggcctttacctgagaagtctgagaagccgcctgaggaaaaaaccattgggttctcttcaatcccgccccgtgacgctacacaacaggcgcctactacggcacccaaatctggtcgttgccctttcgg

SEQ ID NO: 450 - DNA, 704 bp, Aspergillus oryzae
  modified_base (246)..(246): n is a, c, g, or t
  modified_base (251)..(251): n is a, c, g, or t
  modified_base (402)..(402): n is a, c, g, or t
  modified_base (427)..(427): n is a, c, g, or t
atgtgtggccaggtacmdcggtgatcgttcttaccatgcccctttcataataataataataatctcacctttcgtctctctttttctgtttcctaccgacactcctttacatgcccttttgcggcaagccattcgtttacaacttctgccatcgcaatgaaattccgattaaatgccattgtccgagcgtcggaaagccgaactatgcagatcagcaatatgtgtcctcgccgacggacgcaattncccantcttcgccaattacttctgactgtcattgcagtcccatccgttgttgcatccgtgatcccatccgccgtccggacagatttagattctaccaacgctctcgatctcccgcttagcgcgagatcgtcagcgacgatcttcaagatgtatctnattctccactcaaggaacgtgcggnatgggaccccgtccagctagacagcagtcctgaagaagcagacgcaactcactcgcccatcctcatcgcactggaggagaactcgcagaccagcgagaacaacgacaacaactcccaaccagcactatcccaaagatcgacaagcagcagcagcagtagcagcagtgagacgcmaacgccattcgacaccaacctctcgacaaacttcacgtccgacagctgtccgaaattcttcaaaaactttctctccggacaccaaattcaccaactgctacgc

SEQ ID NO: 451 - DNA, 702 bp, Aspergillus oryzae
  modified_base (229)..(229): n is a, c, g, or t
cggcacgaggtgtcctttggattattcatatttaacacccccctttcccaataatttaattgtttctataagcagatgcttgcagggttgctgtcgtggtactagggtcaaggacttggaaaaggcataccaggagggacatccattaccactccgacatacataccctgaacgcatattactcctccttttccaacttcttgaatcactcccctgctgccgcaggctnacgcatcacttcggaaccatcgtgtacccgctgtagcagtgattgkcttccggctggacagggggcgcagtgttcttcggggtctcttacaggccggcgtgtcccaaggattcggtacgctgcatgggttaagcacaactaacggaacccttggcggtcattgccctcatttaagaatccaacccggtgtctcgtgcggtgttggaaattcccaggttttttttttctttccagccttccaccatttaatcgtgacttttacatgatccttcagtccaacacttcttctggaagcgttgttgtagtggttgaggaataatcttggctcgtcgccaaactagaccaccgctctttttaattcggcgtgtcttccttacctactacttatctcactatctgccactgccgctgtgcacttgcatctgaccagtgtgaggaaaagtgccttaggctgtgctcatcgccttaaacca

SEQ ID NO: 452 - DNA, 969 bp, Aspergillus oryzae
ggcacgaggctcaccgtgcctagtcgctctgccctaaaagaggctattgcagcacacaaaaaggctcgtctggccccggccaagactttgcctccacgaccggaatcagcccagtcatcgtttagtgaaacaaaggtatctgatcccccggcgaagtctactgggcgcaccgctcgggcacctctttcttcactttcttcggcgcctatgcgacctggtgctaaaccccgtcgacccgaattggcacgacccgcgactgccgatccatattcttctcgcaaaaccgccgccacagatgccgttcacattgacagctcgccaagacctaggagggtagcaaacctggggcaggcgcccagctcaacgaagagcaagcccaagaaactcgatattcccatgaccatggccgtcgacccagttgcacctagcgcaagcaacgaaaatgagacccaggttgctacccaggttgctagtaaggttagaaagcgttccagcttgtctgaacaattcgctgctatcaagagaggtattcgggccagaacatcccccaaaacaacacccaaaacatctcccaagttatccccccaaacacccccaaatgaaccagatgatcgcgatataaatgccctgagcgaattatccatcaataagactgaacatcctcatgaaattgccgtgggcgaatcgtccaacaatgaagcaggtcgtcacgatgaccatgcaccttgcgaaatatctttcgataaactagatcgtcacgatgaaaataaactgagtgaatcacctacccctggtccagatcatcacgatgaaaatgccctgggcgaattatctatcaatgtaccggatcgtcgcgacgaaactgcactgggcgaattatctatcaacaaaccacaacgtcgcgatgagaatgccctgggcgaattatctatcaataaactagatcgtcgcgatgaaaatacaccaagc

SEQ ID NO: 453 - DNA, 858 bp, Aspergillus oryzae
tcggcacgaggggctcaacgctctctcctggtcagcgtgaactgcaaccatgcgatcctttgaacgattcttcacacgttatacagcatgcgtgctttagttaaaccgagtctgcgaccgtgttttcgctgtagaactctgctaccacaccgatggactcacaggatggccgaccgccaggcaattgaagaacagactctgcctttctacgatcagaagcagtactacccagtccagcctggcgagatgttgaaggatcgttattgcacaattgctaaactaggctatggagcgtattccaccgtctggcttgtttgggatgaaaagtttctggtccacgtcagcccaccaatcttgttcctttgttactgactcgcgtgcagagcaagagaatatgcctcattgaaagtttgcgttcaaactgaggagaatgagtcttctcccgtgctgagcgagattaacatgctccaccgcttggagaagttcgccgaaaaagaccacccaggactggattttacgcgccttgcaagggatatctttgagatcgacggtccctcggggagccactactgtatcgccttcaaacctcagggcaatagcgtccgcacattgcaggaaacattccccaacgcccagttgcgtaacatctcgtaaagtccataatacaccgcttattcttcgcggtaaactggctacatgcaacctgtagtgttgcacatacaggtatgttaaatgtactcacgggacgctcgaaatgcttagactgatttcaatagacatctcgtcggcaaacattgtgatggacatcgaagacgacacaattctcaaagatgtcgagcaacaggagactgagtatcc

SEQ ID NO: 454 - DNA, 749 bp, Aspergillus oryzae
  modified_base (381)..(381): n is a, c, g, or t
gagtgtcgtccgcaaggtcgagaacatgaacacccaggcagacaagcccgtcaaggacgtcactattgtcgagtgtggtgagctcacgggccaggactacgatgatgctgataagcaaacccctgatgctaccggcgacccctacgaggatttccccgatgatcaccaaggcgaggagcttaatgcccaagtctgcttcaagattgcgtcggaactgaagaactttggaaacgctgctttcaagagcggcaaccttgcgcttggtctggagaagtaccagaaaggcctgcgctacttgcacgagttccccgagcctgatgagaatgaccccaaagagcttgatggtcagatcaaggcccttcggtttgccctgcactccanctcttcccttctggccaacaaactggcacagtacggaaacggtcggtcctgggctacctacgccttggacaccgccaacgccgccaatgcgaaggatgccgacaaggccaaggcctactaccgccgtgccgtggcctccagcggtctgaaggaagaggacgaggccctgaaggacctccaggaagccgagaagctggcccccggcgacgcgrcaatcaccaacgaaattgccaaggtcaagaaggccatcaaggaccgtcagccaaggaacgcgccactgccagaaagttcttctcataagcgcgawaatgccatgaatgattcatgaatgtttctactaccaaccactttattttccttctgcataa

SEQ ID NO: 455 - DNA, 1013 bp, Aspergillus oryzae
  modified_base (362)..(362): n is a, c, g, or t
ttcggcacgagggcttaaagctgatactttatggatggtccaatagaatgcgtggagcggatagacctattttctactcttttggatgggaggacgccatgatactgacgactcgcttctttcccaggatttcattcttcctgttggcgaaagtctatcaatcaacgccgcaaccatccagacccctcagcaagaaccacgtgagccgcccgtatgaaccgagacgcaagcatataaattggaatcatggcatgccaaatccactaccagaagacctagacagtattactgacggatatcattcaatatggagcaatacgacgtagcagttgtcggacttggtgtcctaggaagtgcagcgncctaccaagccgcgcagaggggaaagaaagtcatcgcatttgagcaattcgaatttggtcacgtacacggggcctcccacgatacatcacgcattattaggacctcgaaccccctacccgaatacgtgaagctcgctcggtctgcctataaagattgggctgagttggaagaagcgaccggccaaaagctgcttactatcactggaggcctggttttcgtcccgcgggagaaggcctcaccattcgaaagtttaatcaacaccctaaaagtcacaaacttaccccatgaaattctgaatgccacggaggtgaaaaagcgctggccccagttcgacatccccgacacggtagatgcagtgtacacggccgacacgggtatagcccatgcgtccaaaacagttgccgccatgcagtatttggcacgttccaagggcgcgatcctgaaggagaatacacctgtcgaccgtgtggtccccaagaaggagggagggttactattcagacaccgaaaggagaattccacgcagccaaggtgattctcacaaccgatgcgtggacgaataagctactcgcacctttgggagtccatattcccctgtctgtcatgcaggaacaagtcacctacttcaagccgacagatacagctgcttt

SEQ ID NO: 456 - DNA, 790 bp, Aspergillus oryzae
  modified_base (155)..(155): n is a, c, g, or t
  modified_base (160)..(160): n is a, c, g, or t
  modified_base (386)..(386): n is a, c, g, or t
  modified_base (395)..(395): n is a, c, g, or t
cttaactaccttccaaaaaggggacccgtccactttcagcagggatgaacagaaacctgtacatgctctcccgttaaggcagaggcttcctgccaaagcatgggatacacatatgcatgtcgttgagccgcatcgctttccggttgatgcaagtncagtntatcaaccctcgacacatactatcgaggaggctctagcgtttgagttctcactaggaatcgagaatatcgtccttgttcaaccatcgatatacggatatgataattcctgtcttctcgaagcactcaggcgtatcggtccctctcgcgggcgaggggtggtggtgattgatccgataaatacagatacccatacattatccagatggcattcactgggcgtgcgtngagtacgtntgaacttgaggtcagtagggaaagtgatggaccaggatgagctggcacagacgctattacaacacgcggagattgtccgtcctttcggctgggctattcaagtctacgtccccctcgaaatgatcccactactcgagcctattgtcccccagcttggtgtcaaactctgcatcgaccactttggtggcccggacctacgatctatgaactggacagatggagcctcgttcgacccctattcactgcccgggttttcatccctagtatccctccttcgagcggggaacacatatgtgaaaatctccgcaccctaccggctcagcaaggatcatgaaatgcgagaaatcgagatgatggcccgggaactcctccgacaggccccaaaccgcgtgctt

SEQ ID NO: 457 - DNA, 855 bp, Aspergillus oryzae
  modified_base (75)..(75): n is a, c, g, or t
acgagggcgtcattccaaaggaacattggtcgtaccctgagtggatcgatcaagagaaggcgaaaaaggtgcgtnaggacatgggccaaaggaaaatcatctacggtgattccgagagtcaccgacacatgtgtgttacgaatctgggttcttcttccggcaccctttgatgctgaactacgagtactattggcgtgtggagcccagcattgaattgttctgcgacatcagctttgacccgttccgattcatgaaggaaaacaacaagaagtatagctttgttctgagtctgtatgaatacttcgatactattcctaccctctgggatagcgtgacgaattcatgaacaatcaccctgaacatattgcggaagcgaactcaatggacttcttgagcgacgacggtggaaaaacctacaacaagtgccatttctggtcgaatttcgaaatcggacacttggaatggctcagatccaagccatatatggattacttcgaatctcttgaccgcgatggcggcttcttctatgaaagatggggcgatgcccagstacactctattgctgctggtctgctcttggaaaaggaacagatccacttcttcaatgaaatcgcctactaccacatccccttcacccactgtccgacgggtgagcaattgagactggatcttaagtgccactgcaatcccagcgacaactttgactggaagggttattcctgcacttcccgctacttccatgttaataacatgaaaaagcccgcgggctacgagaatgagagttgactacccgttttcgggaaagtcttgctctcgttagccattattggcggccttgtccttgcaatcagcagc

SEQ ID NO: 458 - DNA, 855 bp, Aspergillus oryzae
ggcacgaggcaacgattgcattgcatgtacctgtgaattgatcaccatggagactgttgacgtgacagtcatcggagcgggtatgtccacacgtcggaattgatacgtcgcaagttccccaactcacgtcacaccaacaggatggagtggtctcgctgccctcaagacctaccaccaggtcgacccctccgcctcgattgtgctattcgagagcgcggcctcggtcggcggcgtctgggccaagcaccgcctgtatgccggcctcaaatccaacaacatgctgggcacctatgagttcagcgacttccccatggacgcctcgttcggcgtccagctcggccaacatatcccgggcaccgtgatccaacagtacatggagcgctttgtcgagcactttcagctcagcgagttcatccgcctgaacacgcgcgtgcgcatcgcggaacataattccgacgggacctggaccctgaccatcgacgacaccgacggcgagaagaccgtcgtgagcaaaaagctcatcgtctgcaccggcatcacctcccagccctacatgcccactatcaccggccaggacaccttcgatgcaccgctcttccactgtcgcgacctgccccagcaccaagacgccgtcctgcaacccaacaagcgcatcaccgtcctcggcggcaccaaatctgcctgggacgccgtctacgccgccgcaaccgccggcgcccacgtcgactggatcatccgcgacaacggccacggccccgtctggatggccccggcctacgtaaccccattgaagaaatggctcgagaagctcgtcaccacgcgcctcctcacctggttcagcccctgcatctgggg

SEQ ID NO: 459 - DNA, 892 bp, Aspergillus oryzae
aattcggcacgaggcttttcacagtctccttcttttcatacaacaagcgaccacataaaggaagggtaattactttaggcgtcaacccggaaattgagccactgacgcagattttcacctcaaggtcggccaaaatagcatctttaccaactcgtcccgcgccgccagctgaaaactagggcaaggaatatcctgagagagcatcgacggcacagtttccttgccgaaaaacggcaagagatcttcgagaacaaggtttaccacatgctcttaaatcacaggccttgctaaatactttttccaactttctattctcctcagattcgctagataactaatcttgacggaacagctgtagcgacgtcgtcaggtattgcgttcccgttcttatttggattgcgttgaggactacgagaaagggccaaagaggctcactacctgctgcccgcgatggctctggatttcccctggatttatcctgttcgggttgttcaagtgatttttgcaattatcattcttggtttgaccgcatacattgtcagcgtgtacaataatgacaccgtcaacttcatgcttttcaatagcatctggacggctttcttcgccactccgtacctcgcccttgcgcctgtgcactttccccaaatcgcacatcgcttcgttataccagccgtagaagcgatcactatgattttctggtttgcaggctttattgcgttgggtgttctgcttcctgcccctaggttctgtcactggagcgcttgcaactgtgctcaggcagccacggtatttggggcattcgagtgggctttgtttgcggtcacgacagttgtggctgttatcggagctttgcgtaccaggtcaagcactggtacgaagcctgcccctcaaa

SEQ ID NO: 460 - DNA, 811 bp, Aspergillus oryzae
attcggcacagggttttcgcgatcgaaggagacaacttggcagtcactcgggctatggaactgagactttgatctcttcttcgaccctcaccccttgaatcttgcttcgtcttcgcctctttcgccagcccaagacacgacacgaccagcatgtgacctccgacggaaagcgctcaaggatttgcctgcgagtggggctgattcgtcaggtcgcgcaacaattggcttatttgagggagaataattggcgactactagcctacggttacgagggtatcaccgcctgatacgggagctgcgtcaactgaggatgaggagttgtacatctcgcccgagagcrccgtcctttcggccttgaagccgcgtttccacacaaacgatccctaaagtgccagtcacgaatgaccgattctggcggctgtcattcgctctgtcccgtccgcttggtcgttttctccatgtgccttcccctctcgtctagacccaaggcacaatgacgacgctccctagcttgttttgccgagaattacaccggtgtttccatacattccacccctgggcattctccccayaaattttggcgttctcccagcgttttctcacccaatctttctctgggttctaccatcgcaaaacgtgcattatttctatgccacaaaacgctctatttcgttcctgatatccttgaaaaaacacaattcacaccacatatacggcctcggaaaatgaattcacagagatgtgccgcggtcgtcgtgggagccggccccgccggtctcgccgttattggaaatctattggagaagcaact

SEQ ID NO: 461 - DNA, 511 bp, Aspergillus oryzae
acgaggtgtaaatacattctttcttttcataccttattacattcttgacactcgtttgtctccttaattgctcttcattctcttttcttcctccytgtttcgtcgagtggccggagactggtccgcctgtcttcttcgctgccatggcacccaaattcaaagatggggatgccgttgtagcggttaatgggaaawgggtgtcttgggcgcacacagtcgctgcctatgcggccttcttgagtgcctcggtagtacgaatgtctctgcattcccggaaaatcgtgcaaaacgaacattatggctatcctgacgaatggtttccaycggtgctcagcaacgatcggtgatcgctacccgcgagcgatctttcttccaagtgtttcattgctatcacctcgcggccctcggtyttgctctagtgttcctcttggtacatcctgacctcgcgccccaactcagctcttcctaagtttatcgccggcgttggactgttccggacgtttacatgcgg

SEQ ID NO: 462 - DNA, 270 bp, Aspergillus oryzae
  modified_base (43)..(43): n is a, c, g, or t
  modified_base (87)..(87): n is a, c, g, or t
ccgaaatccagaactygacctccaagacgctgctgaagtgctngaccttttgccgaactgaaagactgtatgttgcaggagcatgtngagggtgatctcactgtggaggtggtacagaagctactcttcggccttccaaacctcttcgccgtcgatttctgtggctgctcgacccactccttctcggcagtctttcaggaagccttcttggcagggcctgctctgccatcggcgttgccaaacactgaaaagggtctcgctgcacgcagt

SEQ ID NO: 463 - DNA, 815 bp, Aspergillus oryzae
  modified_base (112)..(112): n is a, c, g, or t
  modified_base (115)..(115): n is a, c, g, or t
  modified_base (123)..(123): n is a, c, g, or t
  modified_base (137)..(137): n is a, c, g, or t
  modified_base (177)..(177): n is a, c, g, or t
  modified_base (186)..(186): n is a, c, g, or t
  modified_base (214)..(214): n is a, c, g, or t
  modified_base (292)..(292): n is a, c, g, or t
  modified_base (294)..(294): n is a, c, g, or t
  modified_base (325)..(325): n is a, c, g, or t
  modified_base (445)..(445): n is a, c, g, or t
cgcacaggcgcacgcataccatacattttaaggataaatcccttactgcacacccgcttctaaccagtcttgttaattaatacatttcataccaatctaaacatggatccanttncccctgtncaggaagatattangagagtcgggcggaaggagttatacacggactttggaaancgcatggantatataaagacatttctggatttcacanaccaccacgtcataatattcaacaaaggctcgaaataccttaaaacagtcattccggaactcacccatcgtctctatnanaagatgctcgaattcgatatcacagcccgtnctctccgcactcggagtactacgtccgaagcacaaatcgaggatttattcacaattgacagtcctcaggtgcaaaggagaaagattttctggaaatggtatctgactagactatgctcanaccccggccagccttcgtactgggaatatctgcgaaaagttggggaaatgcacacaggaaaagtactgatgcacccattaacaatagagtacatccatatgaatgcttgtstcggttasgtaaaacaacttctctttgaaaccatctcactgcacccagacatgtctgtcaagttcaagttcgctctcatcagatccatgagcaaggtcttctgcatccaaaacgatctaatctccaagtgctacataaacgaaggccaggagttcgcagaagaagcgtcaaacaccaccaatgcagacaatgcaccagccaaaggaaacacagacaatgcatcaatcgscacatgcatcacggacaatgcatcagctgt

SEQ ID NO: 464 - DNA, 885 bp, Aspergillus oryzae
  modified_base (621)..(621): n is a, c, g, or t
tcggcacgaggagaagaggctgggaacgaggcaagccacggaccttgcccttcatgcccggccccgttacccacgttaccgatgcgatctccaacggccgccgccagaacttggacgagtatattcggaaactgcttagcatgcctcctcacatctctcgttgtcagctggtccgggaattgtttgctcctcgtgcaggcgacttcgagatcgaccccagcgcgtttggagaagatgcgcggttctccggtgggtcgcaccactccgcgcatgagcccccccgcagcgcttcccgccagttctcgcaggcccagatcaacccttcgcacgaccgtaactcgcaccagcgcgcccaggcgtcgatatcgcagggcaacggcatgcctcccccgatgaaccgacaggccagctctctgacgcaggtctccagctcgagcagcggcgcattgaaagtgaaggtatccttccagggcgatctcatcgcgattcgggtcccgaacgacattagctttcagcagctgcgggagaagctcatggatcgcctgaagatcaacaatgaaatcgcggtgcaatacaaggacgagccgtcgggcgcctatgtggatctggtcagcgacacanytctcgacacggccatccaacgcaattccaaactgacgctattcgttgagctcgtttgaggagctcctttccggatttaccatagaaacttgattcccgtgggcattttgcgatagatttgttgctttatctgcattgacatgcctgttttcttcttttcgacctccccaggtgcctggtggacacggtgcaacggtgttatggttcctttttcttatgagccatctgtcgattcccccggaggctgatggatgataagaatgt

SEQ ID NO: 465 - DNA, 517 bp, Aspergillus oryzae
  modified_base (197)..(197): n is a, c, g, or t
  modified_base (263)..(263): n is a, c, g, or t
ttcagaagaggagaaaacaccgcactccggcacacttcagcatacttcttccccgtatactgccactccaaattgtcaaatacagaacatcatgcgcagggtttctataccgattgtacgggcggtcctcaatgcggcagaagagcacttttcacttgaagcggaagaggatagtgatggcgatatcgatgagagtnttggacagcgggacattgaaggcgctgcactgagtggtgtcttgggtatacwcgccgagtggactnaagaacggcgagtagttggactgggcggagaaaagatcctcgcagggggcgccgccagttccaatgtatgtagttgggtccatctagcgctggtgaaggacatcctggagcatgtgcaggggatcagcgaaggtcccaaccgctgctctaaagaagacaagaagctcctcttctctctccctascaasctctacatcgctcctcccgctgtacccccaagggctggttctcgcaatctggaaggcgaagaccca

SEQ ID NO: 466 - DNA, 850 bp, Aspergillus oryzae
attcggcacgagggtgaagagctcgagaaagcattagccgaaatcagcagactgacgaaggagaatgaggcactttccgtgagattagctgaagaagagatcatgagagcagaattagatatgagactgaaatctagtgaagaaacatgtctcatgatcgagcaggaagtgcgcgaagagtgctgggccgaaatggatgagaggatggaagaagagagaaagaagtggcaagttgctctggaggagcaggctggtcataatgatgaacaccttgataagaagattgaactattgtctcgtggtttccaagtccatacagatcccgagccttctagggacgagaaggtggaagaactggagttcgaaattgaccagcttcgcagcaaggttacatctttagaacgcgaactgatgtgccggtctcctaccaagaagtccaagtcaaaaaatacactcgagccgtctcgcaattccaatattcttggtcgcgaaagtgacattgacatggcactccaacggatggatcagttgaagcttgcagacagcatgttttctcctgctccgcctgcaggctcccccggaaaaaggcttaggaagatggcaaccagaaaatgggatttcgccccggaggaagagatctgaatttcctgatgataccctccacagactctttcagattgaagttttgacacggcctatcctttcgcttcattttctttttgacatattgggacgcttattcactgtacattatatgaggaggatcatgggcggttttctttggcgtgtgatagaatggggattggggttacgaaatgtttatgtataaatattaattcttgtttatggt

SEQ ID NO: 467 - DNA, 851 bp, Aspergillus oryzae
tcggcacgaggctgggctatccgctggatccaggatcaggagtcgaccttcggtcagcgtctcgtggccttcgccgctgttgagggtatcttcttctccggatccttcgcctctatcttctggctgaagaagcgtggcttgatgcccggtcttacattctccaacgagcttatctctcgtgatgagggtctccacactgactttgcttgcctgctcttctcgcacctgaacaaccgccccgaccctcagattgtggaggacgttatcgtggaagctgtctccattgagaaggagttcctgactgacgctcttccttgcgctcttcttggcatgaactccaacttgatgtgccagtacattgagttcgtcgccgaccgtctcctggtcgctcttggcaacaacaagtacttcaatgccaccaacccatttgacttcatggacaacatctccctggccggtaagaccaacttcttcgagaagcgtgtcggtgattaccagaaagctggtgtgatggccagcaccaagaaggaagccaagcaggaggagagctccggcagcgctggcggcctcagcttcgacgaggacttctaaaccaccaacttcacgaatatacccggcagtgtgctcgctggcacctgccatcagatacgagctaatttttatcttggtcgttttattgctgggctccgcgttattgatttatgaggctatttgaggtataagcatgggtttggcgttggactggcgggactcttttctcaaatgtattgtcagtgtctcatccgacatccgaccctttccatgggatggatgggcggtagactgtacttgaataaataggatatcactgt

SEQ ID NO: 468 - DNA, 299 bp, Aspergillus oryzae
gcacgagggtcgaagmgtgataaaagccacgtatgagctgaaacccaagcttcggaggcacttcaaggggagcatataaagtgaacgcgaccgaagtagccgagtattttgagtaaatcagggggagggcaaaaactggcatgagaacgagctaaaaaaaggaaagaaaggaaaaaaaaaaaaaaaaaaaggcacatcatgggtcccttttccgscccacgaccaaattgcatcgcmccctgcaactcagcggtgatacggatcattggaggaatcgagatctgatccccttccctcca

SEQ ID NO: 469 - DNA, 342 bp, Aspergillus oryzae
  modified_base (164)..(164): n is a, c, g, or t
  modified_base (186)..(186): n is a, c, g, or t
taaaccgtctctccttaggctgcsgacaaattcaaacatcccaaaggagacacttcagccactccagaccaaccgcaagtccagcaacagccgcagtaaacgaaatccaagcagcacaaaaatactgctctgatctcctcattaaatatgaccgcccctcctanaccctccacacattcatcccanggcacgcccaacaattctacctcgccctccgcgccctaaacgtctccctctcgatgatcccagaaacaacaagctcccacacaatcggcctcatgcgcctccaattctggcgcgaatcaatcgcaaagatcctcgccggcactccgcctaaagaac

SEQ ID NO: 470 - DNA, 821 bp, Aspergillus oryzae
  modified_base (408)..(408): n is a, c, g, or t
cgaggtaaattgttacctcaataaggatatctcgaaagcgaaatgcatattctaactccgccccgactctgcacagctctcactgtgctcacaagtctaatcatttcctcytttgccatcgatacccccgcgacgaaagattctaccattttccgttctaccgtgagctgccctgcttgtcccgatcgaaactgctacaaatgcacgcttggccacgaaaccactctgcaggccaacaccggtggactggcctatatccgctctctgatcgcgtttcaacttccagtcccggcggcctccatcacagcatgcacagtgcagtttcccgccttcacaaagccactcgaggcacctgttaatgtcacggccgcccaggcgctctcttctggctgggacgagggtaccgtntaccggagagaacgcaccagattcgggtgacgccttcacagaaattgaagtacctgcctatgcgaatatggggcctatcgatgttacgcctgcttgtcagggtgcggatgaggatgggaatttttctatcttcttaggaacaagatttggcagaattgaggtttggtcgaaggactcaggaaatcccgcgattctccatattacatcatctgcttgaatgtttttttgtgatctactagggtaatggctctggcctttataaatttgctttgaaggactttggtagctagtaatggtcatgagagatgtggctctgcgggtgttttaagctttgacagaaaaggcttaattatgacagtgtttgccattcgtgcttcttatacttatagtacagaataagaatttccttagct

SEQ ID NO: 471 - DNA, 827 bp, Aspergillus oryzae
cgaggcagagtttgccaaggtagacacctgaccgaccagatactcgtatcttaggttaagctgtactcattatgctcaatggcctggcaggtataaggttcttgacaaaggctttccgactttgaacaagatccaactatttccttctcttgtcttctttcgatttatgcgcctttggaaaatattggatcacatgctactacattctactatacttaaatcacgcagcggaacggaatctactcaagccacagtaagccaatatggtatatgggggaaagccgagcacgggatgctacttgtgccgcaaacggaagatcaaggtaggattgtaataggaaccttgttgtcttagcctcattttcaccttccttacccggctggactccatggaatccaagggttcattcatcttgattcggaccacgaagctaagcgcaacttaaagtgtgatgaagcgctaccgggctgtcgaaactgctccgtatacgggcgaccatgtccaggataccgaccagatacaatttttcggaatgagaaccaaaaagtggaacggctgatgaggaaaagaagtgtcacacccactactgctagccagcacagcagtcggagtacctccgttagtcatagcagtccggaactgccgttaatactttcccaagtcgccgactccacatgggaggaacgagcagtctgccacttctttgatcagttcacatctgttagtgatgagtgtttgaaccatctggggttcttgccttccctatatgctacgtgtagggacagtgggcaggacgattcggtgtcgtcctgcctaaagctggcaa

SEQ ID NO: 472 - DNA, 933 bp, Aspergillus oryzae
aattcggcacgaggattattcttcttatcagtccccaagcgccaaaacgacgctgggtacttgcttggtactcccagtattttatgtgtatgatctggaagtattacactactccgtgtcggcaaaataaatcttcggtgaggtcctaataatggagtcgatctcacccgtattctcgtcgggcacggagcagcggtactctccaccatgggaggatttgagtattatcggtatcgctggtagctcgggctccggcaagacttctgtggcaatggaaattgtgaagtcactcaacctgccgtgggttgtgattctcgtaatggattcattctacaagagcttgacgccggagcaacacgccaaagcgcataataatgaattcgacttcgactgcccggatgcctacgatttcgacgcccttgtgcagaccttgaaggatctaaagcaaggaaagaaggcagatatccccgtttactcatttgccgaccatcagcgccacccgcaaacaactaccctttactccccacatgtgatcattttggagggtatccttgccttgcatgacccaagggtgctggaacttttggatgtgaagatatttgttgaggcggatatggatatctgcttgggccgcagaattatgcgagacgttaaagagcgaggaagagatattgaaggcatcatcaagcagtggtttacttttgttaagccgtcgtatactagatttgttgaaccacaacggtctatctcggaccttatcatcccccgtgggattcagaacatcaccgctatcgacatggttgtgaaacacattcagcggaaactcgatgagaagtctgagaagcatagagcggactaggaccaattacgcaaaattgcgtcgcaattgcagcygtcgcctaatgtcatggtaatgccttcgacatcacagtt

SEQ ID NO: 473 - DNA, 896 bp, Aspergillus oryzae
attcggcacgaggagcatccaaataatccacaatctgcttcacagcatcctggactggcaaatcatggttatggatatgcacctcaggcttttcaggttcctcgtaaggcgcactgatgccggtgaactccgaaatcttacccgccctggccaacttataaagacccttggggtcacgctgctcggcaacctcaatggggacatcgatgaagacctcaacgaagggcaaaccggtctcttcacccggggtggggacttcgtgcagtttgcgcgcggtgtcacggtctgcacggtagggcgagatgaacgaggtgatggcgatagaggcgctgtcggcgaagagcttggcaacctctgcaatccgacggatgttctcgttgcggtccttttcgctaaaaccgaggtccttgttgagtccgaagcggatgttgtcaccgtcgagacggtaggcgtggacaccccggtctcggaggagctggtgctcgagctcaacggcaatggtagacttgcccgaggcggagagaccggtgagccagattgtgagaccgcgttggttgcggagttcgctgcgttcgctgcgcgtcagggcgctggcatggaaggtgatgtttcttttggtgattatgttagtggctgcgggatggaggggtatctgcatggtgggggagggcaaggatgtatagacttacgtggacattgttggagagagctgatggtggaatgaatgaggatagtgatttcgggaaagaaagcaattgaggaaattgaagatataaattttttaagtattgtgatgaggaatcaggaggggtgaaaaggaaaggacgtggctgtcaatgccgaagactgaaacagcggggcgccgatcgcgggggtccattccttcggtgtgcgta

SEQ ID NO: 474 - DNA, 865 bp, Aspergillus oryzae
  modified_base (18)..(18): n is a, c, g, or t
  modified_base (20)..(20): n is a, c, g, or t
ggcacgaggcctcgtgcntnctccgtgggcccaacgggtcccgatagtcagcctccaattgctcgacccaagtcgtcctctggccatcagcccatggggcagttcagccaggcgtcttctggcctccgttctcccctcccgcagactgccacgattcctgcacccgaaattgaggctcctcttttgtcgccatacaatgttggtaatgccagctgggcttccatgaccaacacaccgatgacagmtactttcgcgcasagcagcagcagcagcagcaacaaaactcgcaggctgatatggtcgccaatgcgacggcgatgaagctggctgctctctcgactgtgaacaaccgtattgcgcttgacgatgctcggaaatatcgtcgtgcccgctccaacgacggacagggaaagaatgctaacgctcacaacgccaatcagaacatgccccaaggcggcctcgcaagccccggtctcccaggtcccaatcaccttgttgctggacaacttttgaacgcacaacagctggcagcgctccaggcgcasagcgaggccgctatggcaggtcggcgttctcgcccaacttccccaggaattgctatgcaaggaggctctctcggtccaatgggattcacttcgcctcagaacaacgggttcttggcggcgtatgacccgaataaccctctcatgggcaatggactgggcgcgcttggcattggacagtttggcctcggcggccatgaaggctatctctccgatcactcggaggtcactcgcggccgccaccgcggtggagctccagcttttgttccctttagtgagggttaattgcgcgcttggcgtaatcatggtcatagctgtttcct

SEQ ID NO: 475 - DNA, 941 bp, Aspergillus oryzae
gcacgagggtttcgtttccgattcccttgagatacccccatttgactagtcgcgcgttgctttttcagggtctggctggttcagatcgtccatatcttcctccgtcagctcaagtatttcggcttatacaccagacctttcgaaccctgttaccttcgattgtgagactttgagtgtcgttacatcttcgwaamcccacagaacgccacwaccgcctcgatagtcgtatccgataaatggacatcactcgcggtgctgtcgttcaggattcttcattgacgttctcggctcagccgcaatgcccttacttgacgcccactcaggcccctcatatggcacactcgatcaaatggagagacacgatcagtacgaaggagagcaactccttcccactggatacgacagcgatgaccatggcagtgagataacatcggatgactcggtgcaggaaggtgttcggaagattgaagccatcaacttgacctggacaacgaagtcattggttgttgcttatgtcaggtatgcctaatgtgtacaacgtggttgtttccttgatgaaagtggactggtcgcactgactcgctgtagtatcttccttatggcgttctgtacttctttagaaggccagaccaccatgtcactctctgcttatgccaccagtgcatttagcaaacactcattgatttcaactgttcttgttgttcagaatgtagtcaatggtgggtagtctttattgtgcaatctgtcctcatccagctgacaagtatgtagctgtcatcaagcctcccatggctaagatcgccgatgtcttcggtcgcttcgaagcgttctgcgtgtgcatcttgatatatgttctcggttatatacaaatggctgcttcgaccaatgtccagacttatgcatcggctcaaatattctattccgccggctcgacgggctta

SEQ ID NO: 476 - DNA, 982 bp, Aspergillus oryzae
aattcggcacgaggcgagctgacgacgctggttgccttgctgcacaagagttatttacttcctaggctgctcctgtcggatgccgattccaaccgagaatgcgaaacgttctggcatcatcaatcaacttttcgccacaaccttatgtcattatccgatctcaaactatcgccattcaagtgcaatgtttctgcctatcctgttaagtcgtctgtggggtacgacaggttggtgggttgatttgatggccgatatcagaaatttttcctctcaaccctattcaacctaacccggtgtggccggatcccaactacccccagacgtttcggcgtccgcgtgcagcagatcatggggtctattgactgaaaggagcactacccggcctccaggatacctacatacctaccaacccgggccttgcatctctgcctactgcaggcggacgaactaaccggacgagccctacctaataggtatgtagtgcagtacagacctagggaaaagcgcaagtaaagcatgggttgcagatcggaaaaaaagagaactgatggaagtgcaaccggacaaccccccttttcctcccgtgcttgtaacggaatcgcatcttacgagtctagacggtagttcgaatgacttccacttctggtaaagtctagagacgacggccgacgaagctcagtccaatggtaggtcgtaacagggatctcaggtgcagcacagtgagccgggctctctcgccatcagcgaatctgaggcctgaacaggcacccttccagcttcccaagattttttaggccctttagctcgccccacgaggactcgacccgcgattcatcaagtgagatactaggaaattgtttttattttcactgtcgattaattttcctaatatgctgttcaccctttcctttcctcattgcacgtcatatgtggaacgagacaaggtggaaggtgggaaaatggggagggacaaagaaagaga

SEQ ID NO: 477 - DNA, 681 bp, Aspergillus oryzae
gataagcttgatatcggcttctgatccattcttgatccacattgaaagatacgaatttgtcttgaaaactgtatcaatatgtctgaacgcttcgscccaaggtacctgttcaactcgaagaccccaaggatgatccgatcaccgtggaggaattgtcaaagtgcgacggtacggatcccaaccgtccgacttgggtagccatcaagggtatcgttttcgacgtatccaaaaacccagcttatggcccgaatggttcgtatcgtgtctttgcaggaaaggattcttcccgagccctggcctgctcatctctgaaaccggagactgtagacctaagtgggacgatctcgaagataaggaaaagacggttttagatgagtggttcacgttcttcagcaaaaggtataatattgttggaaaggtgaaagacgctacaaactattgatatcaagggcaagcgaggaggtcgcaagcgggtgatgcggaatcagttatcgttacaccttggaataagtactatacccatgggatttgagctattttcatttcagatgtttatggagcatcacagatgctttccgcttctttcaaggtaaaccatgtctaaaactgaagcacgagtaattataaatcaaatgttgtgtacaatattagccagatataacttttgaacccccagctacg

SEQ ID NO: 478 - DNA, 659 bp, Aspergillus oryzae
gcacgaggggactccaacaggctatacagtattgaagtgcgggcagttggtctccccatctcgaataatcgaaatcaaaactggagcagccgggaaaaacctggttatctctaagaacacagaacagctttggttttcccagacaccctttctctgcgctggtcattacgatgaggttgggaattttacaagcattacgaaaaagaaccacttgaagttgggaacacttcagaaatgggagaatagccatcaagaacagctaaagaaacttgcaacattgcttcgagtaatcgttgaattggcaaaagcagcagcttggaagaaattcgcattggtttcatcagaaaacacattgaaagtttttggtttgacaaatcagaatgataaaggactacctgttgacttgcactctatgtgggagtagatcggcagtgtagtcgacggttctggatgaagtgtttttgtcaaatgatctttctggctgtcttcagagctgtgcaaatttttaatgtgcagctctctccttaatcttctcgaaagggccgtgagsaaggtatcatcgccgctcttctccttcctctttatcttctttttcattcttttttttttgaattccttttcttttctacttttcttttagacagggcgaacacgtgact

SEQ ID NO: 479 - DNA, 1018 bp, Aspergillus oryzae
  modified_base (494)..(494): n is a, c, g, or t
gcacgasgcgctcgacatgcacgcgcacacagattctttccacaggtttgacaagtttaacctcaaatataatcctgtcggcgaatctcgactgcgagaaatattcctgaagacagacaattatatcaaagggcgttatctagcagagataacaaaggaggtcatctcggacttggaatccagcaaataccaaatggtagaatggcgtatctcaatttacggcaggtctatccaggaatgggataaacttgcagcctgggtagttgacaataagttattctcccctaatgttcgctggcttgtccaaataccccgactttatgacgtgtacaagtcgagcggcatgatggaaaactttgagcaggtcatcaccaacgtcttccagccgctatttgaagtgacaaaggatcctaatagccatccaaaacttcatttattcttgcagcgtgtagtcggttttgacagtgtcgacgacgagagcaaagcagagcgancgactgtataggaaatatcctattccaagagaatggaatacgaaacaaaatccaccatacagctattggatatacttcatgtttgcaaacatcgcatccctgaatatctggcgcaaacggcgaggattcaacacgtttgtcctaaggccgcactgtggcgaactgggtgaccctgatcatcttgcggttgggttcctctgctgccacagcatcagccatgggatcctgcttcggaaagtccctttactgcagtatttattctaccttgatcaaattgggattgccatgtcgcctctcagcaacaatgctctgtttctgacgtatgacaaaaatccatttgccaattttttcaggcgaggcttgaatgtgtcgttatctactgacgatccattacaatttgcgttcaccaaggagcccttgattgaagaatactcggttgcggcacaaatctataagtttagcgcggttgatatgtgtgagctggcgaaacactcagtcttacaaagtggtttcgagctcgcctt

SEQ ID NO: 480 - DNA, 955 bp, Aspergillus oryzae
cggcacgaggcagccgaagagctatacagattagctggctaggttacgcctttccatgcttactcctagcttatatcggacaagcagcctatattagtgttcatccggaagcatattcgaatccattttttaatgccgcaccaccgggcacggtctatcctgcgctagtcattgcaattctagctgccattgttgcctctcaggccattataacggcaacctttcagctcctgacgcaagtgatgaaactctttacattccgatagcgaattggctccttatggttggaacaatacttatagcttccatctacaacaataccacatctctgggtaacgcatatggtgtctgcgttatgttcgtcacattcttcgatacatgcatggtctcgttagcagctatgtttgtctggcgtatcagccccttcatcgtgctattcccctggctcatagttgcttgtctggacggtgcatatmtatcttcctctctcatgaaagtccccactggcgcctggtttaccatcgcgcttgctacggtgttggccattctgtttttaatatggagatttgggaaagaacagcaatggtttgccgaggccgaagatcgctttcccacctcacacttcgtctccaaagatccggatggccaaatacgtcttaccgatcgatatggaagtaccccattgagtataacaaaaggtctcgggatcttttttgamaaagccggggagaccaccccaatcgtgttcagtcagttcattctcaagcttaccaccatgcctgctgtgataatcttctttcatctycgcccgatcgaaacgccgtcggtgccagcggaagatcgctatacggtttccagacttgcgatccctaactgctaccgtcttgttgttcgctatggatacaatgacgagatcatcacgcctgatttggcgaacaccatcactcagcaggty

SEQ ID NO: 481 - DNA, 1033 bp, Aspergillus oryzae
  modified_base (362)..(362): n is a, c, g, or t
cggcacgaggctactattccgcctctgatgataaaatttccaaacatttcaacacggaagtttaccgctcaattctcttacggccacgggttttcattgactgcacacaatgcgacttggatactacgttgctgggacataagttaggaatgccaatatatgtgtcccctgccgcgatggctcgattgggccatccggctggtgaggcaggtatcgccgaagcttgccgcagctttggagccatgcaggttatctcaaacaacgcatctatgacaccagagcaaattgtaaaagatgcagctcccgaccaagtatttggatggcagatttatgtccaaattgatcgcaagaagagcgavgtngctggcacggataaacaaactcaagcaaatcaagttcattgttttgaccctggatgccccggtgccgggcaaaagagaagatgacgagcggggaaatgctatcggagcatcagctccagttccaagcgcggcaaagacagcagatagtgctgaagatgaaacctctcggattaatcaatcttctggcggtgttgggaaacaactcttcgctggaacagatccctcactgacctggaaagaaactttaccatggttggccgagcgtactaacttgccaattatcctaaagggcctacaaactcatgaggatgcctatattgcttctctacatacacctcaagtcaagggcattattctttcgaatcacggcggccgtgctctcgacactgctcccccggcagttcatacgttgatggaaatcagaaaatattgcccggaagtattcgatagattggaagtttgggttgacggcggcatccggcgtggtacagacgttgtaaaagcactatgcttggggggcgaaggccgtggggaatcgggcgacccgccctgttggggcctttggggccggcggtgtcgatggtgtcaagcgaaccctgcagagtatgtttggaaccctggattttaagaaacaaacgactgaccgaggcttagtactggcggacgagagc

SEQ ID NO: 482 - DNA, 953 bp, Aspergillus oryzae
aattcggcacgaggattccacattcttcatcaatcttcaatcctcacctgtcttttcttctctttcttgtctgttagattatctgtcaagaagacttattactatcgtgcctaattgattcgaacggaacgtcttctttccacaatgaagttcttctcttcgctcgctctgctggtctccgccgttgcgccaaccccattctccgtacccgcgacacacctaagaacttccatctcaagaccactggcgctgacaactcagcacacaacgacctctacgtctacggctaccacaccggtgctggattcaacgatgctgttctcacttcggacgttggcaccgcgagcccggccttcctgaacggcacgaatgtccagttcagtctcgacacacctttcccttggggattggtaatgcgaccacagaacaactacggtgcgtgggagccggtcgagatcaacactgggtatggtagcggtagtttctccatcaacgatgacagcctggagtggtcggaacagcagggattcggtggctggttggtctgcgactggtaccacaatgcgccccagctcttctatctgtacaagtaccgcgagcctaccattccctcctcctgcagcaaggttcaactcgccgtcgagccagtttcctaaagcggagaacctgcacaaggttttgccactggccttccatgggtaaactgccctgccttgggtctcggagtcaccgaggcttcgtgagttgtgatttcataggggatccgggaaagacgtcccggtacctgagatgattgtatcaatacctagatacatgtatatgctgatttaatgctaataattataatgagtcggttgggatgggatttggattttgagtgtatattattacaccgtggttgacgatcttcagtacttaatgaccctgatgttacagataaatagcaatagcca

SEQ ID NO: 483 - DNA, 980 bp, Aspergillus oryzae
  modified_base (255)..(255): n is a, c, g, or t
aattcggcacgaggcaaaaaacgaaacgaaaaagaaaaaaatgaccgaccccacaacagaaatcgatgtcgacctcgacgtccaagaaatcctcctcgccgcctcccaacacgacatccccaaactccgccaactaatccgctcaaaccaaacaatcgcaaaccccgtcaatgtcaaggaccccgaaaccggatatgcgccgctgcatgcagcaattgcggcctgcgagcctgacgacgaggagccgaacggcgnccagaccaacggggagcagggagacgagcagaagagcgttgaggagaagggctcggcgactgtkaggtttttgcttcaggagggtgcgatttggaatgatcttgataataataatgagacgcctgggtgtgttgctaggcggttggggttgacggagctgtatgagcagcttgttgatgctggtgtgcgggcggagttgcttttgaatcggttggatgggtatgaggagcttgaggatgatgatgaggaagaggaggagggacaggaagagcagactgggactgaggaggtggaggtggagggtgaatctgctcctcaattggttgaggcgactaccactactgaaacggctatggagacgggccccgatgtcactaattcccggtatcttgattccaatttgactttccagaatgatcggctgctggatcaagatcagaatggtgttatgatggcttgggagacggatatcatggccaagtcggcgaagaagctactgcctacgtctggactgcgtgttctgaatgtcggacatggtatgggtattgtggacggattcatccaggagcagtcgccagcagagcaccatatcattgaagcgcacccggaggttgtcgccgagatgaagcggaagggctggggtgagaagccggggtgttacgatccacgagggccggtggcaggatattctccctgacttggtcggacagggagttatgttcgat

SEQ ID NO: 484 - DNA, 902 bp, Aspergillus oryzae
aattcggcacgagggccaccttctttcatgggctcttcccctcctgggattcctgaggatggcccgggacctcgatttttgcattcacagcgttcggtgaaacacgaatgctctctgcgagtgttccgcggcttaccgccttagatgattgggatgacagctatttcccgatggaggaggactacctgcctatcaatttgcacgacgatgtgctgacgccgcagagcggctgcgacgtctttcacgcacagattatgaacctagttcaagtcatcgtgatctcagtgggcttggtatgactggtaccagtctttcaaaagtcggttcgcctctgggtccagcccatccagatttggtgccctttttgcgaaacagcgacagaagaaggaggaggatgcacatggcacctcactaccacaagtcggatctcctctccgtgagtcttcgttaaactttggcgcaagtcccagccttggccccatcggaagccggcagacgtcgggtgacgtctcgccctttgtctctactccttctcgacagcagtcaacgtccatgatatcgcaacaactcagcagtatgtcacttcaccctggacctgcccgtcattcttcatcagtgggagctagtggccgtctcgaccgtactgtctcgtcgcctgtcagtaccagcagaatcgatgaggagcaaggagacttggttttctccatggmagaagaagagaacaacaaacggaattgtacctcctggagtaccagtaaagctgagtcccacgatgacgattctacaccgacgagtagctcaggctttcagtcctgatatccttttaggaaagcgcaaaaccaggatatgataggcacccattctgacaccaatttattagacctcaaaatctttcatcaggg

SEQ ID NO: 485 - DNA, 738 bp, Aspergillus oryzae
aattcggcacgaggctcggcgcggtctgcccgtctgctggtctctcaccgtgattccgattagcctcctccttttgtgtttcttccgcaagggctatcgcgcccgctcccaggcggacgcggagatcttgaagaagcgatgggatgctatgggcttctggacgaagctgcgtctgttctttgtgtggggattgcggttcaaatacccaccaatgctgggcccggcgccacacgcgtgaagaccagcaagcagccaggaaagaaccccggaccccgcctgctgactcccagtccatcgcagagtgtggcgccggattcgcgtcagggatccaccgctggacgcagtgctggagatctggaaatggcagaagcgtccccggaggctttgcagcatccttcacaggctgctgtcccgccgtcgaccgcatcaggggcactcccacctcatcaagatgaccatattggcagagcgcactaagtaacatgctggtgttgggatgggattgcaggctagctaccatgtcggggtgggactcgaagcagatgtagcgcgacaacaagtcgaggttcccgtcacccactggcccttattttctggaggtcatatcatactgcaaggggcctcctctgactatttactccttactatcttctgcgctcagcttccattgtgcctttcactgagaagcctccgtggggacttcgataatgtcttaatgtctacgagtcagtttaatcg

SEQ ID NO: 486 - DNA, 986 bp, Aspergillus oryzae
  modified_base (1)..(1): n is a, c, g, or t
ncggatacgtattgcaagtatacgttaacggctcgtggcaacacagttcttatttcccctctgttggctaaatagtaggacgcgaggaggacacataaacagatcggccaactggacgcggctccagcaaaggcagcttcgccagcggtcaggcgtacgcttacctaaataaaccaacactcggtacgtaaagcttggtcggtagggacgtcgtcagcgtcaagattatcagcggtactgtttatcagaggaggttctaggctgggctactacgtcttgaaggtcatatacctgggttagggcaactctgcctacaggtactcccccgaatctgccctgcagcccctgtcctccgctataggtgtagccatcctaggcatcaggctgctggtatatatcacacagttcgttttcatcggctcagctgtagtcaagttggcgcacacaacggcccaactagtgtgggggtagatacaataggacgtagaggaagcattcctatagggcatagtaggtgcgggatgcactgacgtaatctgagagaaatttccgaactgaacccttgtcatcaacctcccgaacagaaactaacttttcatagttgtactgtcactggaagtggtaagcaggcatggtgtattctcagacaccaagccagtacacgtatcctccttggtagaggacttgttagttaggatcgtcagggagggtactaaggatacgttcatcacctaagtcggccaccgatacgtctctgattttctcgacctgttggtcaacaggcccgggatcttctttgccgctgggaattcagatacggcgtggagcacgtcggagtaccggccatctcaagacccatcctgttcgactaggtcggcgatcagttcataccctaaatcatacctcaccacttcgccaacttgacttccaccggctgctaggtcgtccacatcttctagtacttctccgactttaccgtcagaact

SEQ ID NO: 487 - DNA, 926 bp, Aspergillus oryzae
  modified_base (334)..(334): n is a, c, g, or t
  modified_base (410)..(410): n is a, c, g, or t
cacgaggtccctccatccttgctgtcattctcatccacaaatcctcctatcgccccttttaacttgagcactcctgccatagtcctctttctcttaccttttgaccgaagacctctccccgcataacacacacaatggcagccaaagctttgcctacccacctcagagctccagccacggaaacctcaaacgctggctctttcggcaagcaccacggaaagtctcagtctcacatggcgttcgagaatgcatcgaccagcgttgctgcttctcagatgcgtaatgctctgaatgccctctcagagaccgtccctgatcctcaggagcgcaacsnttcgaggctgagatggacaacttcttcgccctcttccgcagatttctgaacgacaaggctaagggcaacgaagtanactgggaccgcattgctccaccccagccttcccaggtcgttaactatgagagcttgggcagcgaggcctcggttgagttcctgaacaagttggctgttgttaagctgaacggtggcttgggtacttccatgggttgcgttggccccaagtcagtcattgaggtccgtgagggcatgtccttcctggatctgtccgttcgccagatcgagcacctgaaccgcactttcaacgtcaacgttcccttcgtcctgatgaactccttcaacaccgaccaggacactcagtccatcatcaagaaataccagggccacaacgttgatatccttaccttcaaccagtctcgctacccccgtatcatcaaggactctcttctccccgctcctaagagctttgatgcacctctgcaggactggtatcccccaggccatggtgatgtctttgagtccctgtacaactctggcactcttgacaagctcttggagcgtggtgtggagtacatcttcctgtccaacgccg

SEQ ID NO: 488 - DNA, 815 bp, Aspergillus oryzae
acgaggagcctatccggaaccgcacccgtcatcaacgagaccaggagccccccgcagtctgcggacttagcggctggtggtcagggccggctctctctggattcttccgctccacaggagttttccatctcacaaaacaccgtgggggatagctactataccaatccgacggcaattggcagcatgaatcatacacaaccatacatggatgtccactcatcgcatttgtcatcggcacagccctatgcttcacaggcggccactgctggtggaatcgctcattacccccagtatcatcagcaaccgcctgtattgcagccggcgtccactacttatggccccgccagttcctatcaatacgcgtatcctggcggtgtcacatcgtcccaacctggcccgcaacctcccacaacatcagtgagcagccaggtcccagctcagctgttaccactgccagttaccagccacactgttgcacctgcgggatacggaaacaataccggaacgcctatgcaaggctacgtgtacgatgctacaggtcaagtagctccgcccggtgccaaaccacgggtcacagccaccttgtgggaggacgaaggcagcctttgctaccaggttgaagctagaggggtctgtgttgcccgccgagaagataatcatatgataaacggaaccaaactgctcaacgttgctggcatgactaaargtcgccgcgacgggattctcaagagcgaaaaggttcgtcatgtagtcaagattggtccaatgcatctcaaaggagtttggatcccatttgagcgtgccttggagtttgc

SEQ ID NO: 489 - DNA, 872 bp, Aspergillus oryzae
ggcacgagggtttgaggaagttctcagcggaggagatgctttgcgaaagaaacaagttccactgtgataactgcggtggtcttcaagaggcggaaaagaggatgaaaatcaagcgcctgcctcggattctggccctgcacctcaaacgattcaaatataccgaagacctgcaacgacttcaaaagctgttccatagggttgtatatccctatcaccttcgccttttcaatacgacagacgatgcggaggacccggatcgtttatacgagctgtatgcagtggtggtgcatatcggtggcgggccatatcatggacactatgtcgccattattaaaacacaagatcgcggatggttgctgtttgacgatgagatggtagagcctgtggacaagaactatgtccgtaatttctttggtgacaggccaggcctcgcctgcgcctacgtcctattctatcaggagaccacacttgaggctgttatgaaagaacaagagcaagaaaacatggacctaaacacgagcgtcgccgatatcaacgactcaaccttaaaacagaatggctatcctctatctccagggttggcccatgttcacagcgcatctcagataccatcacccagtgaaccagcccgattcagcaatctccaacgggcccctactgcacctcctttattccctcacccggaacatgcagactctgaaagttcccccgcagatccttcgactactgcatctgccacccctcctgttccaccaataccggacattcattctctccctctcagccccaagaagagcgactctcatttcaaaaaggaacgggccaaagaggaaaaggagcgaaagcaaacgagacagaaaaagagaaacagc

SEQ ID NO: 490 - DNA, 888 bp, Aspergillus oryzae
aattcggaacgaggccgagaccaagtcttactcagcgcaacccccatcaatccgcagcgaggcctcacttcatccatctaaccccccatatcacctcttacctcaaatctcgccctttaccctagaccctcgacaacaccaactcaatccaaaccacaacgaacaccaccatataacacttaacacaatggagccctctacaaaccagtcaacatcaatcgagtcctcgaaccccccgagcgtcgaactcgcctacaaacgcaaatgcgtcgccttaaagaagcgcttaaatgagatcgaaaatgagaacgatctgatgcgtgtccgcaaccgccgcggctggcaatacatccacaagatgcgtctcgagtcatgcattctgctcgagcgcctagccaaggtcaccggcatggcagaggaggcccaggcaggtgtcaacccggagctacgggcccgcgccgcgctatgttgtccaatgcggcggttctggatcctggtgagaaggagggtggtggtggtgcgtattatgcagatgacacggaggggagctcggatgaacagccgcctactccccaagaacgacccctgcgtgtgaaacggtcccggaaatcaaatgtcggtgacggtgcagatgatgatgctgccccttctgctaacaatgcgcctgagttttcgtccgctgctggatcagcctcgcttccgcggttagcgccagccccgtcgcaggaggacatgacttcttcgttccgcatccaggctggcaacggctcagcacaagataaagagaacaataccggctctggaagtgaccgtggtggtagccagaacccggagtccgggtcaagagaacctggtcaaggagaggtttctgtggagccgacgacgcct

SEQ ID NO: 491 - DNA, 903 bp, Aspergillus oryzae
  modified_base (208)..(208): n is a, c, g, or t
acgaggcttgggttgatctgcagcttctgactcacgccgattaaatccaagtggcctcttaacgaccctgaagatacgctgtgtgcgaacctttggtcctgaggtcgatccgtggaaggcctagcgaatctcccgcagtttgacagctccttcttacggctcaaccacagcgatcgtcaatcaccctttgaaaatctgagcggagtgntagcacgcgttgcgaattgattgaactcttaggccagtcgcgcatcctacctttcgggtacgcccctctttcgccactttttccctggcgccctctcagaaattgcatccccgcaacgatcgtaccthtcaacactcgcacgcgtctctccccacaaacagtttactgtgacccgtaccattgtgtgctatatttttttatcagctcgcttcagtgcccggagttgtcgcagcgcaggtcgaggaccgacaaactttcaatcagtgcttgcttcggtcgcggctttcaagcactccagctatcgtttaagagtcaaatggtctaattgtgacgttggacgcttttcgtatgctctctagacgctagcgtttcatctacctaagatactgttgctctagctcttaacacattcacgaaacgggagcaccggttatcgttaccgtttattccactctcacgccatgtatgctatcgaagaaagggcacacccaccaccaccaccgccgcctctctccatggatcgaatccctccgccttcctcatcatatcccacaccgggctctgggggtggaatggtctccgcagcattccgtcatccagccacctagcgccgctctcgactgtccatgagggtcgcatttggtctctacaagttgtgcagcaccaattcgagcccgaatgtgcggcttcggcga

SEQ ID NO: 492 - DNA, 1020 bp, Aspergillus oryzae
aattcggcacgaggctactgcgtccctgtgcaaaaatttgtatccataggaccgctcggctggaactataaatcacataatcatgcgtatcttctctgctttgagcagcctccttctggccggagctgctctcgcccagagctccgactgctcgcccaagtctggtgatgtccagacccttcagttcgcctgggctctccagcatctgtccgaacggttctggtcgtctcaatccctcaaccagaccttcctgaacaatgccaccaacgcctcccaggcaaactacgaacccaacttcaagggcatcacccgtgagaaccgtctgggcatccgggccgtgcagcaggttggcaacgacctctmcaacttcaccactcctcgttgcaacatcaccatcccgcaatctcaggacgccaacagcttcctcaagaacgccctgcaggtcgagcagaccgttgccggtggcctcatcggcctggccgcctacacccagtctcctgaggtcgccttcctcctagctcgtctggctgcccagcacagcgcccaagccgcctacctcggtactgagacgaactccaccttcttcccctcgaacagcacctctttgatccccgcctatactccagaccagatcctcaagaccggtaatcagaccggccagctgggtacctatttcaacaagtgcgtgactgcgccctccggcccttgtggccagaaggttaacgtcggtcctctggtcgcaaccctgaactccactagcactggcggtggtacttctagctctgcatccccctctagcaccgccactgagacttcgtcggcctcatcctcgactagcacgtcgacggccaggaacaggaagtacttctaagcttctgattcgaatcatatcgagtatatcgacaagccaacagaggccgagaaagacaatccgccaaagatatacttcgcaattttgggttggtaaaagtctgagtgtgacttatgatgaccaccattcatgtatcaaccacgttctgt

SEQ ID NO: 493 - DNA, 584 bp, Aspergillus oryzae
attcggcacgaggggttctcggagtccatggaatccgtatctcctttattaaccgcggtcgacgctacggtgcaacctatctaccggacgttcctgtggagcaagggtggaccaaagagcagacattgaaaagcttgatggaaaaagcaggctgggatgggggtcatgaaagcatgaccaggagatttctaaggggtagcaacagcggaggtcacacgtctggctccagcaagccatgggagcaggtctccgacttccgagtagtcaagtaccaaggtttgaaggcatccgcgagctacaccgaatggcaggaatggcggcagtgggttctctccctgggggatgggagcgagaagcttttgaatccagctgtatgaacaaatgtgatggccttggtttctattctgcgcatgatattttctagcccttggcctgaggagcgcatttgaagaccatctatctatctggttaatgatatgatggtgttaatgaagaggtgatggcgtgttcggtttgataatttttagggtctgcatgttttattgatatttagggacatcccgaaattgaggcgtacaacgtct

SEQ ID NO: 494 - DNA, 900 bp, Aspergillus oryzae
  modified_base (485)..(485): n is a, c, g, or t
acgaggcttgcacttccagtccaacacagagggccagaaaggtggcaaataccaacgacaagttgttcaggatgagagctttaaaaagcttataaatcatcttcagccgtggaccaagaatccggagtttatcgggcatccaaagttggaatatctgaaatcggttgttctgaatcattttatggatgctggtgaagggtccaatggagaagcaagtgacagccagtcatccacgagaattatgatttttgtacacttccgggacagtgccgaagaagtgacgagggtgctgaaaagatatgagcccatgatccggcctcacgttttcgttgggcaatccagcgcgaaggggtctgagggcatgggccaaaagacccaacttgatatagtgcaaaagttcaaaaagggcacgtacaatacaattgtcgcaacctccattggcgaggaaggtttagatatcggagaagtcgacctcatcgtatgtnatgactcttctgcatcgcctattcggatgcttcagcggatgggacgtacgggacgaaagagagctggaaacatcgtcctcctccttatggagggcaaggaggaagagtcgtacatcaaagccaaggacaactatgagaagatgcaacaaatgattgctagtggatcccgctttacctttcacgatgatatctccccccgtattctgcctgcggggatacggccggtagcggataagcgccatattgatatcccagacgaaaatgcggaacagagcttaccagagccaaaaagacgaggacgagctcctaaaaggccaccgaagaagttccacatgcctgacaatgtcgaaaccggcttcactaaggcttcatccctaacagcgggacccaaatcaaaagctgagatgagtaggaa

SEQ ID NO: 495 - DNA, 795 bp, Aspergillus oryzae
gcacgaggcatcaatgccatggacctcgagtctcaagaccacattctcaactatcaactccccgtcgcgattcaacgctacaacgtcggmctcgttgtcatcgattccataacctccaactacagagcggaacatacctcccacaatatcctaggtctatcgactcggtcgggggaactcacgaaactaggacaaatgctacgcaatctcgcggtacaagaggacattgcaatcgtagtcgcgaaccaagtctccgatcgattcgacgccatggacaatccatcagtattcccaaggataggaggtggtgcaggaaacggatccccgtctactcaaccccaacaaatcccatccgcccgcgaatcaggcactgcatcccccttaccaagggtccgggcaaccgagtccggcaacgtcgaactatcccaatataacgctatgcttccatcttctccctcccatttcccatcttcaccgtataccaccgaagaagacccgcaacggcaacatttcgacggctcatacctggtggggaatccggtgcgcagtgagatcctcagcctgctacatcaacaacggttttttaccggatggggcgactcgccgcagtcattcctcccaagttcatatccaggtttccagagaccggcggagaaaacaccagccctcggtcttgtctggtcgacgcaaatcgcgtgtcgaatcgccttgaagaaagagcggcaaacggccatggatccgcttctcccggggagtacccctatcccatcaacagcgaaactactaccggaacgg

SEQ ID NO: 496 - DNA, 903 bp, Aspergillus oryzae
  modified_base (30)..(30): n is a, c, g, or t
ggcacgaggttcaagagagagcgcgaccanagaaactaacaatgcgtcacttcgatgcctggttacttcgagatccgtactccgtcttccactactaccccaccggacgaagatggcaagagactgttcgtgatttgattcaagaacgcaagatctgtgcgcccaccgtggatatcttttctcatgcytyctccacatcatccaaaccagtcgacccatatgcccggcccatggcatcccaatccgacagcttattcttccgcaagctgcctgccgaaatccgcctcataatttacaattatgccttcggcgatgaagctatccatctagtccaattgaagggcaagatccgccatgtccggtgcaagcacccttcgtcgtcgctcgaccgcaaccgccgctgctgccctgttaccccagcccgctggcgggtccaggagaactgtactgcaggccaaggccactccgacagcgtgctctacccgcacacccacgcctccctcccagcgtccctgagcaactcatcggtggccttgctgcgcacatgtcgtgccatatacgctgaagcagccgacatcctttacgccaacgccgtctttgacgtagacgacctccacaccttcatcgccttctctctgatcgtctgcccgcagcgtctccgctccatcaagcgcctcaccgtccaatggatgcccatttggcagcccatggccggccaggagcacaaatcctccatctattcccacactcacaacgaccacctctgggctcttttctggtcccggatcgccgccctccgcggcctcggacagttacatctgagccttgacctcggccgcttcagtggtaacgccatgggccgtgtgattggcggaaaacgccttcgcctggctatcgatgagc

SEQ ID NO: 497 - DNA, 1032 bp, Aspergillus oryzae
aattcggcacgaggaatgcccgcaacttcagcacatccgtggaaactccagtcccaagatcttccctatgcatgggataatctaattggcgtagacgccgatgtggcgccgatgtctgcctttgatacgatcattgagccaccgcccgccaacgctcatcgacgagtgagtaccctgtggggaaaaacacctcgtcacctagtcagtccatgatctaatgattatgcagccgaattctcaagatattctcgattctcccggctacttgccacagtggtctccatcttctgcagaccttctcccgtgggaagcgtacgagaattggacatctccgaggcactcattcgccgcgcccaaccagtttgaggacgcgcccgtgctaccgccactcaagcaagatctagtacagaacacatcgaaactttcttctaaaacccgcacatcgcctccgcaatctcattgctctgcctcgagctcaaccatcgcctctttatcgccgccgccatcttccccatctggttcgcccagttccacgcctcacgaaggttcagcgcatccctcatcccggcgctcagcacataacagaattgaaaaacgctaccgggagaacctcagtaagaactttgctgcacttgagtcgtctctgcaaggctattacacgcgaggggttggaagtggcaggccccgcttctactgtcagagaaagcatgcttctaagaagatggcagttctgaccgatgccgtcaattatatcggggagttggaggcagagacagttatgttgaaaaagaagctggagacattacggcaagcgctgctaccgaatggaatatggagatacaccttaaccgatgactaaaatttcgccgagcgtttcaggttccgcaggggaatcattcactatttgacaaactcgtgcctcggcaagtgtgacttctgtacatatcttgtagtgtattagcgttatcgatcctggatcatgatgatatgctattcaacgacaagttccatgaaaaaaaaaaaaaaaaaaaa

SEQ ID NO: 498 - DNA, 803 bp, Aspergillus oryzae
tcggcacgaggaattaagcgaatatggttattgcagctgtggggcaattatgctcgactgcgagcatgactgccaatctggcccagtgccagatactggtgcgcaaagccgttgctgctggagctagagcattgtttctccctgaagcgacagactatatagggtcctcgccagcagaaacaatctcacttgcgcgctccgtgcatgatagtgaattcgtactgggcctgcagaaggaggccgtgcagtctaatttacacataaatgtcggcattcatgaaccatctccggatggaagagtaaagaatacccttatctggatcaatgaaaagggcatcattacacagcgctatcagaaagttcatctatttgatgtagaactcaaaggcggtccggtactgaaggagagcgcgagtgtcgagaaaggcatggaaattttacctccattcgagacccctgttggacatgtcggcttagctatatgcttcgatctccggttccccgaaattagtctggctttgaagcggcaaaatgcccagcttatcacttatccttcagcattcacggttcccacgggaaaggcccattgggaaacactcctacgggccagggctatcgagactcagtcatatgtgatagcagcggcgcaasaggggcctcacaatgaaaaaagaagaagctatggccattcgatgattgtgaacccctggggagagattgtagctcagcttggcgacgaatatacagaaccgcagatcgccttcgcggatattgatttggaccttctagcgaaggttaggaga

SEQ ID NO: 499 - DNA, 660 bp, Aspergillus oryzae
acgagggcgatgatggcgcctaggatgcgtgaaggaaagagttatgttcagcttcaaccgtgccagtgaccgccccgatccgacgaccaccgctcagaaccacttaccaacactggttcccagcgtgaggtcaaatgcctcacgcagtcctcgcgtgcggccgatctgatcctcgagggccttcaagaaccccagcgtgacgacgccgcgggtgccgcctccgtccaggaccaggatggtaggccgtttggttggagggagcaaacggacggtgagggagaacgacgcctgacacgcgggacactcggttagctcgacgtgatattccgcgccagcacgttggcccaaaatgcacgcgcagacgtcgcagagggcatgcctgcagggcagcacatgctcggggggccgctgcagacagaacaggcacacccgattcgaatggagcgtcgaccaggtcgactggccgttgcggaacacctcccgtcggatctgggcggaccggccggccacgcgaggggtggaaaagagcgacacgaactcgcgttcgacggcacggtgggagacggcgaacgctgggcggaggggagatgcggcgcatgcgggcttttacaggggcccgggcgtagaaaggtgccgggaacgtccacgatcggggatata

SEQ ID NO: 500 - DNA, 781 bp, Aspergillus oryzae
  modified_base (192)..(192): n is a, c, g, or t
gcacgagggcaaatgcgcccgacgcagccgcaaccacagaaaaggattgggttccatcaggtggaaagaagatcgacacgggactatcaatcgtgttggagaatgtggcatgtgggttcaaacgaccaaacgtcttggacgtcaaattgggcgcacgattgtkggcggacgatgcgccgcttgcgaacgaancgaagctggacaatgtgtctaaggagacgactagctccagtctggggttccgaattgccgggatgaaagtgtggactggtgtcaatggggagaacgacgaagggggcaagaccgacccgtatgcgactaaatatgagggctcagagggcgcaaagggcgaggtcattgaaaaggacggctataggcgttacgataagtggtacggacgttcattcagtgataagaatgttaaagaggggttcgagactttccttgctggtgccaaggctggttcggttgaccgctcgaaacttatcgccaggagactggccgatgaactaaagaacttgcaggaggttctcgaatccgaagagagtcggatgtattctgcaagtgtcttgatcgtctatgagggcgacccagaggcgatggagattgcactcgaggaggaaaagaaagtcaaagagaaccccaaagaggactcagaggaagaagacgatgagagttttgagcttcaagtccagcaggacggcgcttatcaagtggtggatctcccggtcgggaaagatggccaaccttcagcaggctatcaatatcagcatcgatccgg

SEQ ID NO: 501 - DNA, 808 bp, Aspergillus oryzae
tcggcacgaggaatttgtggaggatgtccgccgcacattccaggcgaccggcatcttttgcttcttccccatccagtacatcaatgacaacggactgggcaacgcggcgagctttttgtcgaccatgttgaccacgaacggcgtcccgaacgatgtcatcagcaacttcaactctctcagtatcatcgcgtttgcccccgtcctcaactacgggttgtatcccctcctgcgtcacttccacatccgatatggtccggtggcccgtatcacaaccggactggccctgtctactattggtggcatcggctacaccgttctgaactactacgcctacaaactcggaccctgtggcaagtatggctcttcggacacctgcgtggatgccgacggagtttccttggtggctccaatcaccatttggtggatggccattccctatgcactgggtggtatctccgaactctttgtcaatgtccccgcctacggtatcgcctactcacgcgcgcccaagaacatgcgtggcttggtctcggctatcaatctcctcaacaccgccgtggcttatgcgatcggactcgcgtgctcagccgtgatcaaggatccatacctgacctgggtctttggcggtccctccatcgtcggtggcgtcctcaccgtggttttctactttatgttccgccacattgacaaggaagaatacgtgctgagcgagaacgccgaggagacacacgtcttcgagggggctggaaaacaaatttacggagaactcgcataacaaaacgaccaacccaacccctgccattgtcga

SEQ ID NO: 502 - DNA, 652 bp, Aspergillus oryzae
acgagggtcaaccctcgcttcaagacgccccgtcttctgagccaactagccagaagaaaggaagttctaagccggttgcttcttatttgcagataccgtcatctatcaacaatagcaagggtaatctggccgactttgctgctcagatgacatgcttgttctggtttgaaactacggccaagttgaacgatattgaagaaagaaagaatcctcttctgtacatcgttccagaagcaattccgtccgctggtttccagaaatgggtaacgaacatcctttcgactacgcaagtyagccagaatgtcattctattagcacttctcttcatataccggttgaagaaatttaatcaccgagttcgaggaaagaagggtagcgagtatagattgatgacaattgctcttatgctgggaaataaatttctcgatgataacacctacaccaataaaacgtgggctgaggtttctggcatttctgtgcaggaaatacatgttatggaggtggagtttctcagcaatgtgaggtacaatctcttcgtttcggaggaaggatggacgcagtggcattcgaaacttagtctttttgccgactttttcaacaaggcttctttagcgccagaagcgaaggaactagagtcgacaacttcggcacc

SEQ ID NO: 503 - DNA, 771 bp, Aspergillus oryzae
aattcggcacgaggggagcaccgtacaatgcgggaccatataatgctggaccaccgcacaaccccgggccacagcccaatgtcttccccgatgatccaagcgctatcgtgacgtgtccgatatgcgaacaatctgtatcatctctgaaaatcaatgaacatattgattccaattgtcagaacttcgttgaaccaaagtccagcactggggacctgacttcttctcagccaaatcatggccccccgtacaatgctggactacagtcgaatgctggaccatacaacgctggaacaccgtacaatcctgaccaacagaacaacgctgggccgtacaatactggactacagtcgaatgctggaccaccgtaccaccctgggccacagaacaactctggrccgtacaatgctcacccaccgtataacgcgtgacccacagtcaaatacgtgggcggtacaatgctggcccatacaatactggaccacaagacaatcttgggccgtacaatgctggaccacagtataatgctgagccacagcacagcgctgggccatataacgctggaccaccatacaaccccgggccacagtmcaatgctgggccgtacaatactgggccataacacaatcctggttcacagaataacgctggcccatacaatactggrccacaagagaatcctgggcmgcacaatgttggaccacagcaaaatgctgggccacagtccaatgccggacagtctgggcctcctagatactgttcgtaaggttaagg

SEQ ID NO: 504 - DNA, 1025 bp, Aspergillus oryzae
gcacgaggatcgcttcaacttggtctcttcagtcggggcctgcctttcattttcatttttgtttgatattgttctttcttttaccagtctgtcgttaacaaactttggctgctaacagccagtcatctattctcttatcttttctatttaccttcgagaagtcattcgctgactacactccacattcgttgctattctagcataatgcgtgctaacaaccttctgttgctcgccggtctggcgactccgttgctgcttaccccgccgatgtcgagagccgtactcttggcccccttctggaaggtattggcaagggtattgccgatattggtgagggtgttggagaagggattgaggatgtcaccaagggtttggccgatctcatcagcctcctcttcggtggcagcagtggtcacaccacagtaactatcctcgagggaatcagcgctcaggcagccgcggccctccagggtggtgctttgggatgcactgctggtactattcatgccgacgcacgtgcagagttagttgcatggctcaaggctcatgctgagtttgatgcctccttgaaggcagccctcgtggcctgggcccagggcggagcttctgctaccttgtccgtcgatgtctgtgctggactgtcattgttcatccccacttgtgccgacatcgccgctaagggtgatctgtatgtgacccttgacggtattttctctgcaaccgatctggctgccgaagtcgtgctcagcgcttcggctcagtcttccttgtctacattcctctctggacaccttggtgttggtctcgatgtcgacatcagggctggtcttggcctctgtgctggcggtggtgttgtcgctgacctggccgcggatgttaaggctgcccctgaaggcttggctctctggctcggagtgcaccttgagccattcgttgaaggtctctgttctggccttggttggagggtaaggtcgaaaccggtgttgtctcattggctctgttccttctggtggtttggcgactat

SEQ ID NO: 505 - DNA, 535 bp, Aspergillus oryzae
aattcggcacgaggaaccaattgcatctatcataatagatacttcaccctgtcctttgacctatcttctaaagcacccttaaccttcacatcacaaataatccaaaccaaaatgccccgcggtgcagaatacgacgacggcgtccctcacagcgacaacgccatcccacaaggcgaaacaaaggtccacggtgccggtaactctaacgtccaaatgggccgcgtgtctagaactgccgagctccctgaggcagctaaggagctttccggtaatgcggtgagctttggcggcagtgctggccactctagcggaaagggtggccatgagcctaagtctttgggagagaataagggtcttggtgctcataaggcttgaatgaggttatgaattttcatgttccttttttactcaaattctgggagtttgattaagggttaaagacattgtatgatattatctaggcttctgctacggtacaggggctattatatcatttatcattagctatttaatgatatatgaagatgagacatct

SEQ ID NO: 506 - DNA, 406 bp, Aspergillus oryzae
ctgccgccagagcagacaaatgttgccctcttccgacccgagaacaagcacatacgtgatcgtattcacccggggcatacatttaggcccccgactgaataccctatgccttctgttggattctttgagtcccgccagtcgtctcagtggacatacgcagaggatgatgaattacgccgtcttgtaaaggagtactcttacaactggtctttgatctccagctgtttgactccttcgtcgcaattcacctctggagcggagaggcgaactccctgggaatgctttgaacgctggatcggtctggaggggctgcctgcggatatgtcgaagagcaatactttagggcttaccatcaaaggctggagactgcacagcgtactgttctagcgcagagcaagcagcccag

SEQ ID NO: 507 - DNA, 845 bp, Aspergillus oryzae
aattcggcacgagggccccgcaagcccctctttccccgccagtcgaggaccagcccaagtgctctcttccctctatctcgactctcttggaaggcgccgacagcgcatcgacatatgctgcaaagcgtcaaagaaccagcccacccccgcgcagggagtctgagttccgttcaccttatgactcagtctcaacaccaaatggccctcctactccacctttgcgccctgaatcgggcttccacagcggccaccactctccctctgcttcgtccgtgactagtggaaaggccatcaagctcgagtcgtactcgcaaacccccatgacactgcctagcccgtccgatagatcctcgatctccagccagggctctgtccaccacgtttccgctgctccctacgcttctcctgcccccagtgtggcctcgtactcttcgccggttgaatcctcggctccgtccgccatgtactaccagagaccttccggctcctaccagacccccgctactgtgcctagcccctccgctgctcctatgcctgcatctgccacacaccagcagatgattactcccgtcactccggcctggcagcaccaccactacttcccgccttccagctcggcaccctaccaacagaaccacgaccggtatatctgccggacttgccacaaggccttctccagaccatccagcctgcgcatccactctcacagccacactggcgagaagccattccgctgcacccacgccggctgcggtaaggcgttcagcgtacgaagcaacawgaagcgccacgagcgcgsctgccacaccggacgccccgtcgccaccgccatggtataaaaacca

SEQ ID NO: 508 - DNA, 738 bp, Aspergillus oryzae
cgagggacgcttttgagagtataccagaggagcctctttgggatgaatttagcacaatgccttctaaaaagaagggcctcgttgcggaggaaacgccgtcaaagccagccagagggttctgggcaagcttcggagcagcagcgatggggatgcctaaagccactaaaaagaagtcggcagaaaagccaataaaagagccggagccccagcccgaacaggatgatctgcttattgacgtaggggatgcgccgagagaggctggtgcggctgacgcggctgacgcgccagtcgcagaagtcgaacctcagccagccgcgccgccaacaaagacacctgttgtcacgtcaaagaccaagtcatcaaccaagaactctgtcgcggagcattaaggcccttgaagagaaaaagaaagaaaagtccaagggraagtcgacagaaaaatcaaaagcgaaggaggtgccgscgccggtagaagaccctccagaacctccgcagaaccggagccggagccggagccagaacctgaaccagttatagaaagaaggatcttacgagacaccgtaccagggagctttccagacgcttttgacgacgatttcgatgacctcccaccccctgccccagaaccgccagcagagcccgagccggaagtacagcctgaacctgaacctcagcccgagcctgaaccagaaaagcagccagaagtcgagcctgagccgggagtattgtccaagaagg

SEQ ID NO: 509 - DNA, 803 bp, Aspergillus oryzae
acgaggcagatatcacaggtttttggtgatcgtcctctccgcccggcacctgcaactgacccagcaccaaggtttgcagcaatgcttcgtccctgggaagttgaagaaatatcctgtgtagctcagttctatagagtccttctagaagagcttagcgataggatcgaggaagactttgtgacaatggcaaaggagaaaatggatgcgcgcgccgatgtcggcggtgagaaagaggaaattggggctatgctggattggtttggcctatggtggtatgatgaatcctccaagggaagcgaacggtcagagcatatagactatctgatctcacgaggaatgctagccgtgcggaagctgaccagcgcacccttgtcaattgtgagaaggatggttgtaacatcagattcagaagctcaaggtaaaaagtctatattgcgtggtttgcacgagtcggggtctcatgaggaaagagaaggaaatgaagaagaattcattaaaaggcaagctgcagatgacaattctgatgatgagagcctcgggcattgcaatttcggctggctatgggctgtcgggaatgataagacgaaatggagatgggatatcgatctccctgttaactatgagctgaggaatcgaggatacgttttttgggacaaagcacgactactgaaatgtaaaaagttccagtctcctcgtgacccagtgaaggatgcgtttgagttccctgtcggttatcaagagtattctgaccaaccgggtattcagaccaagctcaaagacttccttatcagttgggatgttgt

SEQ ID NO: 510 - DNA, 905 bp, Aspergillus oryzae
ccgaattgaccggcgcaaattcaaaatcgccacggacgactcgctctggtacagagtcggagtggaaagatactgaggaggaaatcactaatgcctacaaggacataccgacgacacagataccctcacatcgggctacaacgcctgccaatgccccgatctatcatcagccattagatcaatcccaacattcaatttggtctaatacgacgatagacgcagatccaaatgacaaccaacctataacccatggccccttgagcagtcttttttccatattccggccgaaagaagctgttaaaataccccttgggcacaagcaatctaagatgctcaaacgtagccagacacttggcacatccagtggtgtcatacagggaccgccgtctccttgtgcacctactcatgaatcatatgccgatagtcaaccgtctgaagagtatgggctttatgcgccgccaaagacgaccctctttgagtcagccagtgatcttctcatgccaccccttccgcctattgaatttataattgatcctacttcaagacctcgaactattttccatgaccgggtctatagccctgaggacatacctccccccttgactcctaagagacgaaccttaacctttggttcttcccaaagtaaggtctcgaaaacagggccattttcatcggatgaatctccacatcgtggctcaaacgagagcgagagtgggctcaaagtcgaagagaagatcgccagggcttatcaccgtgacttaacgtggcgaaaagttctcgttcgccttgaaccagatgcacacaacaatatcattgttcgacgaatgttcacgaacgcgtatggctggcccgtggtaaagcatcttgttgatactcactttgggtatacatctgcggcccaatct

SEQ ID NO: 511 - DNA, 920 bp, Aspergillus oryzae
aattcggcacgaggatttccggatgctctatacaccagacgctctatcacacgaacaggatcagctcactcgatcgttgatgacacctccctattcgtactaaattgactatcgccatggacgatctgagcggcctgaattggaattccacttcgtccaatgacccccgtaaacccccacctatgagctccagcctcttgtttccaaatgtgagacgcaatgatacctccggccgatctactcctctttctgcctcctccggggcttcaaacccgccctccaagtctgcaacaccggacaaggacagcttcgcgaacctcgtatctttcaattcgtctaacccaaataagaacctgtcccttatcgagcagcagaagaggctacaagaagagagagccaagaaagaggcagagaatcgatctcggttcgaaacacaatatggggcgcaaaatgctcaattctgggataatctcgagaagggtggccacaaacctgctgcaattggcatgacctctactcagcaaaaagtccagtccgctgatgaagatgatctccttgccgcatttgacgcttcggcacctgttgatgcatcgactcacttccccgtacctagtccaagcccgacgccacgggtagacgccaggtcgccgcagcccacccccaatggatcctctgcagcgccacagtcctctggaatgtcgttcatggacgacgacgatgatcctttcggccttaatcaattgaaacctaaaccaaatcctcctccgccgccgccgcaacctgcagagactgacgatgatgacttcctgggcttgctgggtaagcccgtttctgaagtccgccgaccggaaccaccagccaaacctccaactccagagcgcgcagaccctaccccatctcccaagccgttaaatgggact

SEQ ID NO: 512 - DNA, 876 bp, Aspergillus oryzae
  modified_base (394)..(394): n is a, c, g, or t
cacgaggtctcactcgattctagccttcgtttagcagcccttcgccttcgcatcttcttttaggtagctgatctattcagtccaaggcaccatgcgttcttctgtactcttgctgtctaccctcgccggctctgcctcgcgttgccgggagttttccctcgcggttttaatacaacttctccctctcacagcgccacccactctcatacccttcttcccaccggcggtgcggcggagagaagcccacggagacaggaaagggtggtgagtctcagactaccaccgctcctggaggctctggctctgttcccggaactactgtgacttcaaccatcaccgacaccattaccaagacgaccttcaagccctgttccaccccagtccacaccgaagncactacctactatagctcctgggtgactgcttctacctatgagactaccacctgctacaccaccaccactgtcttgacttccacccctactgccgctcccactgcccctgccgagaccactgtcgcccctgctcccagtggtggtcatggctccgagacctgtcctcctgcctccaccgtgaccgtgtatgtcactgtcggcaacgggggctctggtgctaccaacaccgttgctcccggtggccagggcggacaccactgcgagcgctgcgagaccattacttataccaacactcagggctacactactaccatcgtgatccctcccatcgcagagcccactggcactgagaccgagaagaccacaaccaccgaggtcccctccaccactgagaccaacaagcccacgggcactggatcccaccccacccacaccaagccgacagggactggcaatggacccgctcccactgagactaaga

SEQ ID NO: 513 - DNA, 877 bp, Aspergillus oryzae
aattcggcacgaggctcctgttggttatattagaagtttcgtttcttgatcggtacttcttaagctattaggctggcattacaacatggaccactcaatgcaccacgcgggaatggatatggaccatggtcatggtgggcatggggatatggatatgggaggacagtgcaatatgaatatgctcttcacatggtcttctaaggacctttgcattatattccgccagtggcgtgtcgacggtcctttctctctccttgtctccttggttgttatcgtacttttgacggcgggttacgagggtatccgacaattgaccaggcggtatgaggcagcgcatgcacaacggttgaatgcgttcaatacgcctgctttgggaggcaatgagaacgtcggcgaatctgccccggccatcgccccttcaagccatgctcctcattcctgcgacgaaagctcaccgctacttgtaggtagggacaacaggagggttgtggagcagcggggaaagctcatcatggccgcactatatgctgtgcaggtcttctatagtttctttatcatgttgctgttcatgacgtacaatgggttggtcatgattgcagttgccgttggagcattcgtagggtatcttgtgtttggagacaatatgtcagccgcaaagaccgttgcttgccattgatcattccctttcagataatggttgcgtttgagaattagtggaaagttttaagcttggcaaagcttagcggtgagccgctcgatagcatatactgcatcacataatggtatctttgcatttctgaccaggagttggtcttgttcatcagtcataatgcaaatctgtggatcagggaacctccacgtcgctcccatcatctcc

SEQ ID NO: 514 - DNA, 1058 bp, Aspergillus oryzae
aattcggcacgaggattgacttctccagccctcgaagtcgattagtagcttatgatatattactattgcctaatttaatccaatcgtcaacgcacattccagtctagtaactttgtcatacttgagaatggcgcccagcagcgaatctgatgacaatatcagcgcctatggagctactcgctccaccatcaaggggcagcccctggatgcagatgaggtccgcaaaatggacgcatacttccgagcaagtatgtatctatgcttgggtatgctctatatgcgagacaatgtcctgcttaaagagcccctaaaggtcgaacacctcaaagctcgcctactcggccactggggttcggatgccggtcagtcctttacctggcttcatatgaaccgtcttatcaaaaagtatgatttggatgtcctcttcgtttccggtcctggtcatggcgccccgcgctgttctctcgcagtcatatctagagggcgtctactccgaagtgtatccggacaagtccgaagatgagaagggcttgcagaggttctttaagcaattctcatttccaggaggcattggttcgcatgcgaccccggagacgccgggatctattcacgagggtggtgaattgggatattcgatttctcatgcatttggaagtgtctttgaccatcccaaccttattacattgacgatggtcggggatggagagtcggaaaccggaccacttgcgactagttggcatagcactaaattcctcaacccttgtaccgacggagccgttctccctgtcctccacctgaatggatacaagatcaataacccgaccgtccttgctcgcatcagccacgaagagctgaaaggtttgttcgttggttatgggtggacgccatatttcgtggaaggcaatgatcgagaaagcatgcatcaagcgatggcagctacattggaacactgtattgtggagatcaaaaagattcaaaagcaggcaagggagttaaacaaaccattccgaccccgctggcccatgatcgttcttcggagtctaaaggttggtctgctc

SEQ ID NO: 515 - DNA, 969 bp, Aspergillus oryzae
aatttacaagcggcgggcgacgtgcatgacatgtacgaccggagtttggaagtggaacccagagaacgggaggacgagaagattgcgagactgctgtctgaatcgggcttcctgtaagccggcgaactccgtttctccgtcggggtatagattgcgatacgtggagatccctgtcctagcatccactacgcacgtgccgagttgttaccgccggcaacccgacaaagtttatcacgagcgatcacccacgccaatggcttccatgcgaggtgattggcggcgatagaatccctggcgtttaccacgactcactagaacgacgccgtctatcatctatgcgaccgtgcgaaagaaggattagtctactacggccttatcaaattgcatgacgcggcatgttggaacctacctggggtcgaactgcaagacatccttgcgctgctcgagagtgcttctgcacctttactccagccgcactccaggattcctcgacgcctccttcaagctattcgttctcatttgacgcgacgttcatgtccatgccgttggccaaaccgaacggttacggtccgggcgccatatgatcatttgatcatcctgagcatattgtctctggttggtctatcaacagcctgacaaccagaagaaaatttttttttaaaaaaaagaataaaaaggataaaaaggacaagttgaggggacttcgaacattatacgaaacccccctgactttagcgccccacagctacttgaatcgcatgtgatagaacgattgcagtggaagcttgtgataccctcgacctgttgttgtttattgtcttttatcttcacttttgcggacgagaccactctttaccatcagacgctaccaactcaacccttgcacggctctgctatttcttttgttctttttcgccttcacctcggcggtcttacagtcccttgaccctttctctatcttaccattta

SEQ ID NO: 516 - DNA, 946 bp, Aspergillus oryzae
  modified_base (8)..(8): n is a, c, g, or t
aattcgdnacgagggtggattcggaggcatcatgtctaacatgcagttgaccttggccacaaaggccagccaggcttctttgcttcctgttcttcttgtcgcgacctctattaatgaagcacgaccatccccggtgattaacatcacctacgaggataaggctgttcttgaacagggcgacaaggctgtagttcagttcactggtgttagcggaactcctgttttcggaactgtgaacgctatccaagagttgctcaaggacttcccattcctcaactcgaaggatcagaagctggagaacgagtggcttgctcagcttgatacttttactaccgtcgatttcaaggccctcgatcctttgctccagcgccttaatacccacctccttctccggtccttcatcgtcggatactcgctttccacagctgacattgccttgtggggtgctctccgcggaaaccgtgtcggtatctctgctatcagaaagggggctcttgtcaacttgactcgttggtttaccttcttggaagacctctgtccgtgggcaacatctgcccttgaggcgctgaatgccgcagcaaaggacaaaaagaccaccaagggcaagcaaggcggtgctaactacgacgttgcgcttctgaacactgataagggcgttgtgacccggttcccccctgagccttcaggatatctccacattggtcacgccaaagcagctcttctcaacgattatttcgcccacgagaagtacaatggcacattgcttgtccgcttcgatgacaccaacccgaccaaggaaaactccgagttccaggatgctatcgttgaagatcttgctctcatgggtatcaagcccgacaagatgagctatactagtgactactttgaccagctctacgagtatggtgtgcagatcattaaggatggaaaagcatacgccgacgat

SEQ ID NO: 517 - DNA, 924 bp, Aspergillus oryzae
aattcggcacgagggtcgcttatcttatctaaaatacaaagtttccccgcatcgccttcctcttgtgttaggtagagcatagctccctcgcatgatccaaggttctctaaatgcacatctagtgctgtggaaggccactaaaaagtgcatctcaatggcatggtattgctctggctcaaccaatgcagaattggttgataatctcttcaaggcgggattggtgaagaatgaaagagttaaaaacgctatgttgggggttgaccgagcccattatgcaccttcgaggccttactcagattccccacaacctatcgggtatggtgcgacaatctccgctcctcacatgcacgttcatgcatgcgagtacctcatcgatttcctcaggccgggttcacgggtactcgatattggctcgggttctggatatctgacccatgtcctcgcaaaccttgttacagatccctccatacctgatgaattggatggccatgttattggaattgaccatataccagaacttgttgacttggctaacaagaatatgcataagtcggaccaagggtgcaaattgttagatacaggaaaggtgaagtttattactgctgacggccgtttgggatggccagagggagcaccgtatgatgctatccacgttggtgcagcagcagaaaagcttcacccggtactaatcgcgcaactccatgcccctggccgaatgtttatccccgttgacacggagttgacgggagttctcatggatttggcggcggccaatatatttgggtagtggacaagagggaggacgggtcagthcacaaagaaaaggtgttccaggttagctacgttccgctgaccgacccgccaaagaagttaagaaacggttggacatgatgtcgttttcgcattctacactagcaatgaaag

SEQ ID NO: 518 - DNA, 853 bp, Aspergillus oryzae
gaggtcgacggtatcgataagcttgatatcgaattgcggcacgaggcgcctcgttggtctgagcgccgtctgtctagccaacaatcgctctccttggccccgtctctctgtcaagcaccagcgtcccaaattttaaattgatacatcctaactctcgaccggcatggcattatctagcgccaactccgtgcatcgtacttttgcgtggattgccatgctctttcccatatgatcggagcgactaggttgcattggacatttgtcgcaagcggtcgggtctcactgggatatacgagtaggctaaaggacctaggtacctgtggctggcagaccctggatctcatcatgtggaattcatttcgtcaggagagtctctcagcacatgatcgtaatctctactggtctggtccttgtccatggcttgtggaatgtgaatcggtgctgcggcattgcatatggtggcatagactgtgttatgcatgtcattatatatttctgacattttacctgccattcgacgaggaactccaaccaacaagatactgtagccaagactgagaagtgttcattaattcctggcacatattctagaccgtcacaaaaaaggacaaaaagacaaaaagaaaaacaaaaaagaaagaatttaaaataactcaacataaacctcatcatcctagatctaaccgcggagaaatcgccaatccccaattcacaaagcaagagcacagacaggcacatccgcgtctcttcctaccgcagcggatcccacccgcaacagggaacctagacgctgctcgcaattctcaacgagagaaccctactacctaattacaatagttcgattcgctcaata

SEQ ID NO: 519 - DNA, 866 bp, Aspergillus oryzae
  modified_base (341)..(341): n is a, c, g, or t
gcacgaggcaccgttcatgctccgaagaaactcaactcgttgcctcattttctggttcattaccaaacgcaatccgcatcctgggctgaggtttaccacgtcaacttgcaatccgcagttgtaactaaagcttacaatcttcctcgcttggaaggctggtctgccttctccacaagtaccaaggatgcaaatgtttactttactcggatcacgcagtcggaaatgactgttgtatcttctgtctctcatgccatcttggggaggtggcctcttcagtcccctccaatggagcgcgcgctacatgcagtgtcagaagttgtcccgaagcgatagcgtcgcgntgcgatcggctgctgctttggagtcgggcgactggcaattactccgaaatggtcagcctgaatggactagatacgaggctttggctggcgctttggctgccaactgggctgaggaggaataccaggaggagctggctcaccagcttgaggttgagggtcatgagagccttttcgcagcgtacgcgcatcgtgtcaggcgccacatcaaagacctcgaacatcttcctgagtggctaaaagatctgccaaagcgcatcctcaccagtttcgtgaccgatgaggtttcaaacctggatagtttcggcatctccagacaagttatcgttgctactgagaatgggcgtgtctattcgctcgatggtggaaacacggcgccgtttcttggggtgtaaaggccgcggaggcgaaaacttgggctcctgttgcagtggtcactcaaccaggccttgccatttgtctacacagatgatggsagctcggttacattgaacgttgcctctggagaaatcatcaagcgcactccgg

SEQ ID NO: 520 - DNA, 1023 bp, Aspergillus oryzae
tcggcacgaggaactccccctggccagcttcttcagaatgattaacacccgacctatggcttctgcccttgtggaaacgaccgctcgaggtgacgataccgaactactaaaggatctctactaccaagacgaccgtccgatcgacggctcgaatgtgctcctctcggaagcattgagtcagacagagttgccaagcaaaactgagaagctgcaccttgcctctcgattattagtcgactcgaaagacgcgacagtagtcttgcagcaaaaacttctttccgaagcatcacagttgttgaaggtccaggaagccttggataaggacattgcagatcggtctgagtttgtgggtctaagcttgaacgagactatttacagactgatccgatcgggctacggcaagagagcacaaaagcttcagagtgaatttaaaatgccggataagacatattggtggcttagactaagggctctagttgccaaacgagactggggtgagttggaagagatcggcagaaacaagaaatctccgatcgggtgggagcctttctataacgagatactaggtgctggaaacacgaaactcgcttcgtttttcgtccccaaatgcaccaatttaccggtcgaagaaaggtggaaatgtgggtgaaatgtggaatgatcgtgaaagctggggaggaagccttcagagccaaggactttaataccctggagctcctccggacgagagcttcggggccatctgtcgctgatattgatcgaatgatcaactagcttaggccaaggaaatagttgacgtggccagcctggtatctcctttgcactgtcgctatgacatttcagctgatatcatcgtccacgtcaatatctgcgtgttggtcagccaccaggttttgagccggctgcggctgcggcttcgttgtcttaggagccgcggaaacatcggccatagcgtcatcgtcgtcattatcggcctcgtcgttgaggttctgaaacatggtcgctcccgccttgcgatttagg

SEQ ID NO: 521 - DNA, 803 bp, Aspergillus oryzae
cacgaggcggatagttggcatttgggtaattggaagactcccctgagagacgtaacgtgctggagtacttgccctcatatcatcttacttccctcccacacaccagccttgtgcggctgaacccctccgagtccacctgcccctccctcaacaatcacagcaatcaccatgtcgcgccatcgcgtaaaggctgtggcttacgatgaggatgacttcgacgatggatatgactccccggatcccgaagaacaggaatttctcgaacagtgtactgcagaggtgttgagtcagctcctcgcggggtcgccttctgtgacagccacgcgggacgaagttcaggaagcactatggcattactataacgacgtggaaaagtctgtgaactacttaagaaataagaaagctaaggaaacgaagaaaaaggagagcgcgcccgctccggcggcgaaggcgaaagtgcctgcataccctttgcctcccgatctggttctgcaagagcctccacacttctccgccgcagacttcttccgcgactcgccgtggctcaatgtcccggcgcatcgtaaggccgatattctcatagagcctctttaccctcggcttgggctacttggaggggctcctgaatctggcggaaaagtttcgaaactggctgctttggccgctgcccgcaagaaaaaggagggtgacaaggcttcaactgcagcccctgcgcagaatgctgaggtgaataaaacaccagtgccttcaacggaacagaaaggcgcttcgttatctctccgcgaaaggctcgctggcaatgg

SEQ ID NO: 522 - DNA, 963 bp, Aspergillus oryzae
aattcggcacgagggaaacaccgatccggacgcaattcggtggtctcatcttaattcagagctgaagagagaccatgcagaagtgccgggccgtcaattccgccttgggctcgagggcatttgccccgcccccaaggtccaacaagttcagcgccggaatctccaagatgtcgcgatcactagaaccggaaagccgatcctgaaggtccagggtggacggtcgtctcttggaggtcacaccgccactgtcttcggtgctactggtttcctcggtcgttacattgtcaacaggctcgcttcgcagggatgcacggtcgttgttccctaccgtgaggagatgaccaagagacatctgaaggtcactggtgatctcggaagggtcaacttcctggaatatgacctgcgcaacacccagtcgatcgaggagagtgtccgtcattccgatattgtttacaaccttgtcggtcgccagtatcctactaagaacttttcctataccgacgtacacgtsaccggtacagagcgcatcgttgaggctgtcgccaagtatgatgttgaccgatacatccacgtctcttcctacaacgccagcagggactctccttccgagttcttcgccactaaggcctggggagaggaagttgcccgttccatttaccccgagaccaccattgtccgccctgctcccatgttcggtttcgaggataacctgctccacaagcttgctaaggttaccaacctccttacctccaaccacatgcaggagcgctactggcccgttcacgcccccgatgttggcaatgctctggagcgtatgcttcacgatgactccactgctggtcagactttcgagctttacggtcccaaggaatactctactgccgagattgccgagctggttgaccgtgaaatcgtcaagcaccgccgtcacatcaacgttcccaagccgatcttgaagcctgt

SEQ ID NO: 523 - DNA, 483 bp, Aspergillus oryzae
acgaggtctgctcccacctcaacgtccatcctcaccatgttccccactcgtgtcttgcggatgcaggcctctcggccttttgctttccctactcctaaggaggcccacagcgctcacactatctcccagcgtctgcgcaccctcaagcgggtccccccggagttgattcctctcggtatcgttcttggcgtcgctgttggagctgctatctactccagcggcaggaagctcatgaccgaaaagactctccgtcttagccgcaacagccctgagagccgtgagcactaaagtgtattaccatatttcaattgcaatggcgatccttggtgtgatttttgtcggcggtctgtattattcacgggaaagttgatgtcgcgggagaatttgaaacttcttaaaaaactcggttggagcgcgtgtatatagtacggcttgaacggagggttctgatggagtgatattgcaatattactgtcgcacggc

SEQ ID NO: 524 - DNA, 716 bp, Aspergillus oryzae
cgaggtactttacccggcaagcacgcgtggcaattcctcttccctcccttcttctcgtcgtcttgctgcttgtcgcttattctagtgagccaattgctcgtcgtcatcatgtgtggcatcttcgcgtgttataaccaccctgatgtgcaaaaatttaagcctacggctttgcgcatggccaaggccgtgcgccatcgtggacccgattggagcggaaactacatcgctgataagactatccttgcacacgagcgtctgtgtatcgtcggtgtcgactccggtgctcagccccttgtgaacgatgacggttccctcgccctggccgtcaacggagagatctataaccaccgcatcatcagaaagaaccttaagaaccaatatgacttcaagacacattcggattgcgaagttgttattccgttgtacatggaacatggtcttgatgcccctaagcaccttgacggcatgttctcttgggttctttatgacagaaagcaagaccgtgttgttgcggcacggatccccattggtgtcactagcttctacatcggctggtcttcggagacccctggagctatctacttcgcttcggagctgaagtccctgcacccagtttgcgataagatcgaggctttccctcctggccacattttcgactccaagaccggctctatgactcgttatttcgaacctaagtggtgggaccccactaacgt

SEQ ID NO: 525 - DNA, 643 bp, Aspergillus oryzae
aaaattgaaataaaaaataaaaaaaaataaaacaagacatcatttccacccctgtcaccgatctcatcaccgcctttcatgcggtgaagcgcatgcaatagaacactgagggcggcatccgtcagaccgcctgtggaaaagtgcaaaagtcatcgttttgccgttgcttccaacaattattcctcctccatcccactcttcctgtctctccaccttatcgcactccccatcacagctgttattctgccgttctcaatcgtctggtggccggtgaatcgcctgcaattcggcccatcgtcattgtcacatccgcgacacacgcgggtggttgttgtttttcgtgtgctttgtggcccactggtattttgccgtcccgcaccaaaccacccctcgtcctcctttgtgcgcgcgattcgatccaccatttgtattctgctgtcgcttttaatcccactgtaaggttgagcgtgacctaattatccccatcgggacctctggccctgggaatactcgacgcctctggctcccgacccttcctgtcgagtccttgtgttgcccgtctcactcacccgtcatgggtcgcaaaccgaaccagctgatcctcgagttcttcattcgaggccagaaactcgaggatgccagt

SEQ ID NO: 526 - DNA, 747 bp, Aspergillus oryzae
acgaggcttccctatcaccttctaatcatgtagcgcggtttatcagaaatgtctcttccaaaatacaccacatcaacctccttgtcctcttcgccctccaaacaatccattcggcggattacggagtcaaacgtcccttctcgcccggaaagcaccattgatcgacccaccacggcccaacagactcgcaccttctcccaagaacaacaagttcatgagccagtagcaaatgttacattcccacactcggaaaatgaaaggccgcatgagatatccacttcacatccgccattccaaccgtttttcaccctgattgaagacgccagtacctccgaatactatcacccaactgttcactatatcttctccgatgatgacacggacatcgtgaccgaggcagccttgcgctccttagagtccgagcaaaatacactgtctcgcggcggaaagggaaaagccagggccacacgtgaccagctcccacaggaacagggtgaaggggcagaggatgatgaactgtcgaatgagagaaaggaatcattgcttccgcctccgatacctggtgttcgcgataactacatcatcctcgacatggacgtgcttgctccagataatatgcaacacacgaataccgcaccaggacacgatgtcagtgtcggttccccagggacccaatctgccgttccccaacaacaacaggattcccaaaaccataaccaacatattcaaaagtttgcggtcacttca

SEQ ID NO: 527 - DNA, 630 bp, Aspergillus oryzae
aattccatggaggtcgacgcaagtaacggagagccagtaccagctcctgccccccgcaagtccgttagcgaggatatctcgttcgtggatgacgatgatctacaagcctctcttacccgccagagggtgctgctttcaagaaacgccagaaagcacgtcccgaggacatcgcacgacaactcagagaagaagcgtcgcaaacaccaatggaagtggaaggtgagaacgaggaagagcctggtctagttatagatgagacctcagaatttgtctctaacttacagaaacctacactccctgaacgccgtgaaaggcggacaacaaccccggccgaagaaccacgtgcttyatctgaaggtcctggcatcaaggacgagcctgtggaggacggcgacgtggatatggaacgttcatacaatgatattgaggacgaggaagaccttaaagcgcgcatcaagagcgaagaagccacagttaaccagcagatcagtggcaccggcttggaagaagagtccacattggaccaaggtcttggtgccacattgtcgatgctcaagcagcgtggcttagtcaagtcatccgatgctgccgattcataattctctcatccgtgaccggcagcgtttctta

SEQ ID NO: 528 - DNA, 812 bp, Aspergillus oryzae
cgaggctcaagctggctcgccctgtaccttccgacatcgccatctcccgcgcacagtaccccaaggcaatcacgcagattgcttcggaaattggcatttctccccacgagcttgagccttacggtcacaccaaagctaaagtaagtctcgatgttctcgatcgcttggctcaccgccgtaatggaaaatacatcttggtgtgtggtattaccccaaccccgcttggtgagggtaagtcgacaactaccttgggtcttactcaggccattggtgcgcacttgaatcgcattgtgtttgccaatgtccgtcagccgagccagggccctacattcggcatcaagggcggggctgctggtggtggctacagtcaggtcattcctatggatgagttcaatctgcacctgactggtgatatccatgcgattactgctgcgaataaccttcttgccgccgctattgaaactcgcatgttccacgaagcaacccagaaggatggcccactctacaagcgtttggtccccgctaagaagggcaagcgcgaatttcagcctgtcatgttcaagagactgaagaagttgggtatcaccaagaccaatccagacgaactgaccaacgaggagattcgtcgcttcgcgcgtcttgatatcgaccctgaaaccattacttggcgccgtgtcctggatgtcaatgacagacacctccgtggcattactgttggacaggcgcctacggagaagggattgacccgtgaaactggtttcgatatctccgtcgctagtgagtgtatggccatccttgccctgagcaacagt

SEQ ID NO: 529 - DNA, 823 bp, Aspergillus oryzae
tcaactacgcgaagactttgcgtctgacgagcgatcagcttaaggctttgaacttgaagccaggcgccaatgatatgtcattcagcgtcaatagagccacttgtacggcaaccatgtatctgtggaacggcaacacaccgattgtcatatcagatattgacggtacaattacgaagtgagttaccatgagtcaggctgactatttctggcccatctttggctaataacactggtagatccgacgctttgggtcatgtgttgaatatgattggccgcgactggacacacgctggtgtagccaagctatacacagatatcgtcaacaacggctacaatatcatgtaccttactagcagatctgttggacaggcagataccactcgcgcatacatctacggtgttaaccaggacggatacagactgcccaaaggtcccgttatcacaagccccgaccggatgattgcagccctcaggcgagagatttacctgaggaaaccagaagtgttcaagatggcatgtcttcgggacattctgaacctctttaatggaaaagagaaccccttctatgctggattcggcaatcgattgaccgacgctttgagttaccgatctgtcaacataccgtctaccaggatcttcacgatcaactcgaacgccgaggtctctctagatcttctcagtctgaacaagtataagagcagctacgttactatgcaggagctcttggaccatttcttcccgcccgtcagtytacttgttcaggctgggggtgaagagtacacggtttttacttactggcgtgaacctccaccagggctagccg

SEQ ID NO: 530 - DNA, 689 bp, Aspergillus oryzae
aggaatggagtgtgcccttgtggaggcagtcggcgttgatcccatcgaagagatgatcttcttctggaacggacatagtcggatgacacaagcccagctcgatgaatctatgcagaagctcgcctggtccgaaagcgacgaaaacaagaagtggtcccgggaaggtcccgaagagaaggcaattctacagctattgcgggctgccgtcatgcgtgcgatgcgtaaacatgacgaggctagacagttgcttaaagagtctgtcctcaaccatgacaagtctttgttcacgggccatcttaaagacaattggatccacccagtggctcatttcgagatggcggctaatctctggatggaacgtcccggttacatagccgttcacgacgctccggctactgagggcaagatcactaacggtgaggaaggaacacaactcgaaagaaagcaggtgcaagaatgcaaggaataccttgagaaggctgctagatgggaaagctacgagctggacgctcgtattggtctcaaggtgaccgctgctatggaggcagtgcgcaagtgggagagcacgcactctactcccgccaattgatgacttgatgtattacgatcatatacatgtatctgcatgaactatctttgcaagatatacgatgggtagaatatatgaatagaggactacgatcatgttc

SEQ ID NO: 531 - DNA, 885 bp, Aspergillus oryzae
  modified_base (453)..(453): n is a, c, g, or t
gagggagaatccttgggtggcagtggacagccggattctaagagacgggcattgacgagcgaagaagccgctgcgcgcttccgcgatggcctctttgaaccctcggagcagcagaagtataccgatcaatacgccgagtccgcaccgtacgtcgacacctgagttctcacaaccacacaccggagaaaagaatccacatgtgtagaatgctgattatcaatcaaggtacaagcatggagtcatccatcccctaatcgagccttccttgctacgcgcggtccgcaacgaaatccaagagaacttggacttcaccgagaaagagacggatatttacaagatctttcagtccggagatctggcgaacctggacgggctggacgatgcatctctgtcgcgactcccctccctgctgaagctccgtgatgccatgtactccgcccgctttcgtgagtncctgtcgtccgtgactggctcgggcaagctgagtggtcgcaagacgatatggctatcaacatctacaacgagggatgccaccttctgtgccatgacgatgtcattggaagcagacgtgtcagctacatcttgtatctgactgatccggacaccccctggcaggcggaatggggtggtgcactgcgcctgtaccccacgaccacgaagaaggatgcacagggcgaagacgtcaagatccccagccccgacttcagtctcagcatcccgcccgccttcaaccagctgagcttcttcaccgttcagcctggtgagagtttccatgacgtcgaggaggtttaccatttcaaagagggtgaggacaggtcaaagaagcgggtgcgcatggccatcagtggatggttccatattcctcagaagggagaagacggctat

SEQ ID NO: 532 - DNA, 931 bp, Aspergillus oryzae
  modified_base (12)..(12): n is a, c, g, or t
gaggcacggtangcatttctgtgtttggtccggcccaactcctgatcacattctgcagtttgtaaagtttcaccaacactgtcacttttcttggctattgttgtgccttgtggaatctttctgaaaatggcatcccttaacctttcatccaatgggccttcaatagtaaagagctatcaagctgttgtcaactcttccccacccacaaactcttcttcgcctacatatggacaatgggcagtgttttcagtttcagcaccgcttgttagtgcttttcagcaagacacgggcagcaaggagagcgttctaaaggtccagagcaccggagatggtgaacttgccgatcttattgacgaattctccgaagaaagatgcaattcgcctttgttaaggtcaccgacccaaatactggacttcccaagagtgtgcttattgcatggtgtggggagggcgttcccgaacggacgaagggttattttactagtcacctatctgcggtctcaaaattgttacatggttaccatgttcaaatcactgcacgtgcggacggggacttgactgcagaaggaattatacggaaagttggggacgcatccggtgctaaatacctgcaggagctggacagccggccgccgctcctacaaagccgccaatctcatccaagccagttttcacaccatcgcggaccgatggtatcagctcgaatgccacaccagctgctccccagaaacctctccagaaagatacggacaatgatggctggggcccagatgcccctccagtcaccaggacagaacttgaaaaggtgcagccggcctaccaaccaaccagggttaacatacaggcccttagatcaggaaagccacatgtagcaaacatgcaggttcaacataccaccgaagatcatagcgacgttgtcaagggcggctat

SEQ ID NO: 533 - DNA, 554 bp, Aspergillus oryzae
  modified_base (291)..(291): n is a, c, g, or t
  modified_base (295)..(295): n is a, c, g, or t
  modified_base (366)..(366): n is a, c, g, or t
  modified_base (517)..(517): n is a, c, g, or t
acgagggcaaccatggcccggcctattgtcttcttcgacatcgcagtgaatggcaccccccagggtcgcatcgaatttgagctattctcggacgtcacacctagaaccgcagagaactttcgcgccctttgcaccggtgaaaagggattggggtacaagggaagctctttccaccgtgtaatcccgcagttcatgctgcagggtggtgacttcacccgtggagatggcaccggcggtcgatccatttacggcgaaaccttccccgacgagaatttccagttgaagcacganaganccggtctcctctctatggccaatgctggcccgggcacaaatggctctcaattcttcatcaccacagttgtnacagattggttggatggagcccacgtcgtctttggccaagttactaaaggcttcgaactggttaaattgatcgaatccttcggaactccccagggtacaccccgtgccagagtccagattaccgagtctggtcagcttcaataaatgaatnaattgattggggatacaagggtggatataagaactga

SEQ ID NO: 534 - DNA, 865 bp, Aspergillus oryzae
cgaggctccgctatctgtccctgcaagccttagccatgcctcactcagatactcccccaacctccaactccacgggtggtaaagctcctaatgttgctatcgtcggcggcggcctaatcggcgtgatgctgggtctcggcctctcacaccgcaacatccccttcacaatctatgagcgcgcctcggactggcatgagattggcgccggcgtggctctgaccagcgtcgcgcagagcagcatgcagcgacttcatccggaggtcctccctgcgctccaccgagtcgccaaagccaatcatttcggcttctgggacggcttcactccttcgaccaaggaggccgctcaggctctgaggctctgcatttcctgcttgatgtgcccgggactgactattggtgctgcatgaaatcccagttcctccgcgagctggtcgctctactgcccaagggatcgacccgtttcaacaaggaactcgaaagttatgtagatgatccgagccgtgaacaggttctattgcgctttaccgatggaaccactgccgaagcagatactttactcggcgctgatggcattcattcacggactcgtcagctccttctgggagatgataacccggccgcacacgccagtttcactcatcaagtgggctatcgcaccgtgctccctatctccgaatcgatagaggtcttgggcgaggccaaaggcggtagtgacttttgcatccatactggtcccaacgcctacgtcccttcctatcccatgttagacggaacagagaaagtcctgaatctaacaacagtvatctacaccccggaaccatggtcccacggcgagaagatggtcgcaccagccacccacgacgaa

SEQ ID NO: 535 - DNA, 455 bp, Aspergillus oryzae
aggtattatttcaacaaccgtcatcatacagccatatactgaacaagaactagaatatcaagaagcgttccacaatggcctctttctaaatcctcccccaggaaagagctcgtctatctctcgtgagacaggcatcatagatcctcaacggacttcgtcttttatcaatatatcttcaccacacccctcagagtctcctgtcccaggacctctgaactttagcaccacctcgggtagctcaagttctttgaacaacatttctacgttcgayttcacgtcgttcaacacggatcaccatcagcaaacatggctccctacacccccgccccagcagcctacggctcagaatctgaattacaacgacaacaacagtgccaactccctacaggaggaytttgtgctatwtccccagcatcccagggaytytcgtgcgccagccctcgagtacaacccct

SEQ ID NO: 536 - DNA, 927 bp, Aspergillus oryzae
cgaggcaacaatcgtttcataatccacaatactcagctaaaatggaacaactcacwgaggaacatcatattgcgttacagtcaccaggtgagccagaggckgggatttgtatattacatgtctcgaagggcagtcaaatttatcctcgatatcgtcgacgaacaaagcaagaaccagagaaggcattccaagttgttcaaaagcgcgtcgagacgtccctctgacattcgaggcctagtggataacgaagaggacggaaccgtggaagatcgtattgagcaactactgaacgatgcgaaacgttttgtgaacgcagacgaacaagaggactctgaccacaagaaacaggacagttcaaagtctgataactctagtgagaatatctcaccggagttcacaccgcaaaacagctatcacttgcggcttatcgcccctcagattcagctccaaagcgagaagaaccaaaagtcggtcgtgttggttgccgcgaagggcatgcagctgaaggtcgtgtcaatcatggacaaggaacgtgtttctgacgatgtcagcggtctggtacagcgccgcttctccctcgaaatggatggtgctcaattcttcgttgcaacgcagaagaatttgatgaaacatttacagttttacgcaggcaacaaatacggcaattctccaggctcggcatggccaccttggttgactatcgaagcgatgtttgattttgaattgaatccattcggtttctcgagaattgtccagaagacttcggccagcttgagatacgacaagtacaacaatcttcgtctgaagtataacgaagaagtgggtaagggacaacctgatcatgaacatggcctcagcagcgaagaatctagaatagatcaaatcagtgtcgaattcccccacctccgcgctatctgcgactcggct

SEQ ID NO: 537 - DNA, 839 bp, Aspergillus oryzae
gctcgggccaagatgaaccaacagcgcgcacgacgattcaggacagctttggatgctgaggttgcgaaggagaaagccatcagtcaaggaatdgagatgcccaaggaggatgcttttgacagcaattgcattaccccgggcacggaattcatggctaaattgacagaacaattaaaatactttatcaacaagaagatatcggaagataaagattggcaaggagtcgaaatcgtactgtcaggtcatgaagtaccaggagaaggtgaacataagatcatggaatacatccggcatgcgaaagcacagccaggctatgaccccaatgttcgtcactgtctttatggtctcgacgctgatttgatcatgttgggacttctcagtcatgaccctcacttctgtcttcttcgtgaggaagtgacctttgggcgtcaagtccagaaaaagcctaaagaactcgaacatcagaacttttaccttttgcatttgtgcatggttagagagtacttagaattggagtttcaggagttggaacggacagacgttttgagcttttcttttgacatggaacgggttattgacgacttcattttgatggcgttctttgttggaaacgactttctacctaacctgcctaatctgcatatcaacgaaggtgcattggcgthcttgtttaaagtctacaaagagatcttgccaaagatgggcgggtatatcaacgaacagggcgttattaacatggagcgtttgggtatgcttcttgacggcctgagcgatgttgaattccgcttttttgaagctgaatactcaggcgagcgatggatccaggccaagaaaaatgg

SEQ ID NO: 538 - DNA, 716 bp, Aspergillus oryzae
aggcccgagggtcccccctagactatcgcagattttcacgtttaacccttcatgacctgggaataaacagtccgaatctcctttagattctctgccaacttctcactcccccctcgagtcacaccttgagcgaattggttttcccatcttactttaggggaggaaagcagccaccacggatcgaattctccatcgtcctgacatccctcatctgacggaatttcatctacgaaacctatcccctttacgatcctctcgcccatcatgcgggaggtcaacttcagcatcccaaatgtcaacaaggcttcggtgaacatcacaactaccctttacgaccgccgtgccctcgattgcacatcaacactgcccctcataaattcactcaaccatctcgcctatctgaccacttcctccgctcgaattcgcgatatcctcacggtcgatggcggcattgaacggttggtctgcatcctcaaagagggtcgcagtagagatttgatggaaatgtggaagtggagcctcgccttccagtgtgtggtcaacatcggggtgcggggctcagagagcgtgaggacgagggtagtcgaagcggacatggtgccagtgattgcgaccattcttgacaattacatcaaggtggtggacaaggcgcgggcacgagcggatagcgaaaaccaaagacactcatcacggcatcaccccaaggcggctcctgc

SEQ ID NO: 539 - DNA, 685 bp, Aspergillus oryzae
  modified_base (542)..(542): n is a, c, g, or t
tatcgaattcggacacgaggggtggcccaaagatcgcccggtctccggcatagttccgccgtactggagtaaccatcggaatgcctcccgtacctctcagatctctctcgaacagcccgcgatcaccctggaagaccatacagaggatccagattcggagacgagccgcggactatgggccaggagcgtatcagtagatgatcatgttgtcgtccagggaaagtccggcattggcgcatatgtggtgtggagctgtaccatacaaaccctcgagggtggtcccatcagcgttcgcatgaggtactctgaattcgatgacttgagaaaaaagctgatatcctcattcccgcacgcgaagaatgctttaccagccctaccaccgaagagtgtcctcttcaaattccgtccagcattccttgaatcccgacgggtcgggttggaatacttcttgaactgtgtccttcttaatcctgaattttcgagttcgccggtcgtgaaagactttctatttggacgcatgtccaaattgcacgtcgactgtnccactgctatacactcacagaatcatgacgttacgcctatctatatattgcccggagtgaatggagayccagagcaacaataatacttgtactttagcatggctagatgtcatgctccgcttatacaaacacgttttgttcgt

SEQ ID NO: 540 - DNA, 685 bp, Aspergillus oryzae
atatcgaattcggcacgaggggacgtggcaagtcagttgtagcagaggccatcattcctggtgatgttgtcaagagtgtgctcaagagtaacgttgacgcgctggtcgaattgaacaccagcaagaacttgatcggaagtgcaatggctggaagcttgggtggcttcaacgcgcacgcatcgaacattgttactgccattttcttggcaactggtcaggaccctgcgcagaatgtggaaagcagtagctgcatcactactatgagaaatctcaacggtgaccttcagatctccgtgtcaatgccctcaatcgaggtcggaaccattggtggtggtacgattcttgaaggacagtccgctatgcttgacctactcggtgtgcgcggttcccaccccaccaaccctggcgacaacgcccgtyaacttgcacggattgttgccgccgctacgcttgcaggcgaactgagcttgtgctctgcmtttgctgccggccatcttgtccgtgcgcacatggcgcmaactcgcagtagcgctcctacacggtcatcaactcccgtctcggccgctgttggcgctgctcggggattgactatgacgagttcgaaatgaacgagggtctaggtggccatttgttcctttcgctgcctcgtgacacactaccgccaatcccgctgctatgtagcaga

SEQ ID NO: 541 - DNA, 676 bp, Aspergillus oryzae
  modified_base (243)..(243): n is a, c, g, or t
ctttatcgacaattgtggctagggtcctctaatagaacctgcccttctttcacgggccttcgaacggctcggctctcttttcccttcccctgttcgttcgctcttgtgttctttctgctgtcatcatggctcccccgcggcagtgcgacaccgttcacgatgactctcgatccgaagttctagtactacaagagagcataagactggcactggaaaaggccgcaagagcaaccagctctgcgntggtgaactctgtctcccatgccaaaatttccgccagtgtcgccaatgtcaccagcgcccccatgggagatggcgatcagtcagacagtcagcccaaaatccactggtccgagatgcctctcgaattcctccactcctaccgacacgcctacaaaatatcctcacccagcgcctatcccaccgaatactcccagctcctcctctcccaaggaatcggcctcttatcccctacctccatcgccgctcaacgagcccaactccgccaaacccagaacacaaacggctctcagaccaacaccaaaaaaccccatcacccccacatcgcaagcagggccaatggcaccaaaggcccctcaggacacaatcccaagaataaaagcgcaattgaaggaaagaatgccctaaaccacattatcggccaagaccgcgtgas

SEQ ID NO: 542 - DNA, 818 bp, Aspergillus oryzae
gggaaatgctgaactacacccacctgcttggtacccactgggaccacgcctcgaacaaaccgacttcaacattgaccagtgaccgtgtgatcgtggctttcgcatcacagacgccatggcctcgaattcggtgatcccagtcgaccagcctaacaccactgcagagatcctccgtctgcaaaatcgattgacagacatccgcaaccaacgcaaaatactggaactacgcaatgagattgcccgcgaaagccagctgttggccgacgctcaacaccgtctgcaagcgacagaatcacaaatgatgaccggcgatcgctccctcaattcatcgcatacacctactcgacttactgcaggtagtgccataccagcagataagggcataaaggcaaagccatcggactcgagacccaaaccckdtactggtcataataacactagcggcaatgtcatatctagaagagaggtgccaaagcttcccataaacaaaaagtactgtggacgggatcgatcatcgtatatcaccctggtcagcaacttgcgaggtttcttttgcaaacatgaacagcattttgcttctgataagaacaagattgccgaagcaaagagacatctatctcgccttatcctcgatgaatggacgacacttgaagagtctagcggacgaacacatacatgggacgagttctgcttctttctactacggcaaattgagaggccggcaacaccaaggctggcgcgccatcgatggaatgtcactcgaaaacactgcgatgaaaccgtgcaagacttcgcaaactatctggtgatgctggagg

SEQ ID NO: 543 - DNA, 902 bp, Aspergillus oryzae
ggcactatacggttacttattatatagttactttcatatttgcagctcccaatatcactgaccagctcattacccgtctcatcactgatcaaagtggtatcactctaactccccacctatctatcaaccgttatcaacccctccgcacgtcaatatccccaaacatacaactataattatacaacaggctcatattgacaaagccacggactcatcgcatctaagcaaaatctaaagaagagaaggagatgtctaattctactccctttcaattcccaccgacctactccttccccccattcttcacaccccagccgaacagcacaacacgactctcgcagctccaaaaatggtccttattaattcaatcctggtgtcgccaccaccgaacataccgtctctccttaatagaagctatcgagtcaccgttattccataattccacgctgcggaaacgaattccattgtccgaggcgcggaatatcttggactggatggcagagagcgaagagaagggtggaggaggaaggagggcggagtgggttgatgggacgaataagacgattgcttgggtttggtggaggaggccggaggagtgggcgggaatactggcagattgggttgagaataccggacaaaagaacgtggttttgacggtttatgagtaggttgaaggggaggccactatgtcacaagaatggcatggcatggatgtagatgttatgatgaagtcgctcaatgtcctcgtgaaagggggcaaggcccaggtctttggtagttagggccaggaaggtgttaagtttttctgatgagagccttttatctaacgcaggtcttgaaatcatgcactctcatcatggctgttcattaaatcgctcagatacgataagtaacttctacat

SEQ ID NO: 544 - DNA, 851 bp, Aspergillus oryzae
ggacacctatagcccaacaaacctcgaattactcatacacttaatttctctacactaccccgccagtatggaagcacctaggaatcgaaagcaacggcgagcagctgccgccgcctccaagagcgacaccgactcaaccctcgatccgtcctccatcccgatggcccatccaccccgaaacacgacgaagaacccgaaagaaaagaccctagtcgaattgatagctgagcgggagaaggaacttctaggtctgggtcaggacaggagttcgaccggaacggcggttcgacccctgggatggagacccgattcgtgagcatcgacccgacgtccggcgagatttccaacttggacgcatccaaactcccaaacgaacaacaagggacgaaaggatccatcatgaggtcagcgtcggacgagaattcaggatcggaggaagacgagggcgcgccaatcccaccgttcatcgacacggtgctgctttccgtgcccctgacgacgttacacatgacgttggcctatctcgcggctcatcagtacgcagaatacatcgtgttggacaaacttatccgcgaatctgtattcgttgcctttccgatcctgacatttgctattcacctggcacatgggcatattgtgtccctagggaatgctcagagttcagaacacgtctcgctcatcccgttcagccgggataaactatcgatcgcgtttcttcgaaagctgcttttcccgccgtcattgcggactatggtcttccttccgcttgctatctaccttgggggcaagctgatggctatgaccaacgaagagccatactacgctgttatgaagcgagcgccttctattgg

SEQ ID NO: 545 - DNA, 743 bp, Aspergillus oryzae
gggcgcctggtcgcaaacgcgtcgaccttccccggcagcgcatccaccatcatcgtcaatcggacatcgcattcgctctagcttaagcgtaaatcgacctcaaaaaccacagccaccayccsaaagaagagacgtggtccgaccctggatgagctcttagctcgtccttggtgctactactgcgaacgtgatttcgatgacctcaaaatcctcatatcgcatcaaaaggcaaaacatttcaaatgtgagaggtgtgggagaaggctgaacactgctggaggattgtcggtacatatgagtcaagtacataaggaacagttgtcggctgttgataatgcgcttcccaatcggcaaagtctggatgttgagatcttcggcatggaaggtgtccccgaagatatcatccagtctcacaaccagcgggtcgtaacacagttccaccaagccgaggcggasgacaagcccagactggtaaccctcctcctggcgcaggtgctggcggacagcacgaaagagaccgaagctcgaaaacgtatcggatctgaaaaagcgactggbagaacataaagccaaaaaggccgaggctatgactggtggaagcagcggtgacgtgacgcctgttggtgcaggacaaacacagaatgcaggtgcctttagccaatcaccgtcgacagccgctccaaactcacagtacacatatcctcaaccgtatggtggtgcgggctctccctatcaacaaacgg

SEQ ID NO: 546 - DNA, 773 bp, Aspergillus oryzae
aattcggcacgaggtgacggccagccttcccaacctccctcctccttgtccgcttcctccgttcgactgcctcatgcccgcttgctgagcgtggcaacaggtcgttaccttctactcgattaaaccccccttctcgccagtacaactggggtctttcgtcaccatgtccaaacccactaagtacctcctcgtgtccttccccacctccatcaccccgtctcaccaccgcgacgacgctctcgatgctgtctccgccacggtcgccccagaaaatggatcggtcgccccattccctattcccgagttcaagatcggtacattagacgccttggtgcagcaggccgatgagctggccaaactcgagaccgcctgccaggttgttgtgtctaaggtcggcgatgcgctgaagaatatcttggagggtgatgaagcgcaaatcagcaagatgaaggctgttaatgataagccggtggatcagtacctgcggacctttacgtggaacaaagtcaagtatagggccgataagtctttgggtgagcttatcgaccttctccagaaggaagctgccagtatcgacaatgacatcaggtcgaagtactcccagtacaatcaagtcaagaccaccctggccactcttcaacggaagcaaacaggtaacctagccaccaagtccctcgcatcggttgtcgacccccgcagtgtagtccagaattcggaatacctcgagacacatctcgtcgccgtcccggctcaacaggtcaaagagttcctca

SEQ ID NO: 547 - DNA, 690 bp, Aspergillus oryzae
aattcggcacgaggtgacgctcgagatccgagtcaaatctctagatttcgacccgcagctttcccagctgcatgtgagtggccagattgtgaacgaaacgcaacacaccaaggttggccagcaccatacgctggatttggagttgaatcgcaacttcacgcttgaaaaggaaataggctcggacggcgagggggtgggatgggatagtatcgccattcagatgcttaaagatgcggttgatgacggcgggaaacggagggcggaggctgtggctgttgtgatgcaggagggtcttgctcatatatgttttattgggcagtttcagacgattctgaagcagaaggttgagatgtccgttccgcggaaacgacagcggaggcagcgatcatgataagggattgacgaaattctatcaagtcacacttgacacccttcttcgccagatggaattcaacactagctctacctctctcaccagcaacgagaccgtccgacctgtcctccttgcatcacctggtttcgttgccgccgggttccagaagcacatccagtccgtcgcagcgaccagcacacccgctctgaagcgtctactcccgaatattgtggtcgtccactccgcctccgggtacttacattccctagcagaagttctacagtcaccctcagtcaaaacgatcctcgccgatacga

SEQ ID NO: 548 - DNA, 551 bp, Aspergillus oryzae
gaattcggcacgagggtggattttgacgaatggcttctcggtcatgaagtatagcaaggagctcgatccgaacgacaagaccatggaacttacatgggagggccaaaacggcgcagtacacgaatcgttcctgcacgagttcggtcctttgcgcgaaaaggactgggataagttcagctacgtgctggaagactccgttgtcgatggcaacaaggtacggcaatggtatgtccatcgcgatgctgagaagggtgatcaaattttagaattgatttggcgagctcaatagaggactgtatgagttctcattttggcgtctggtggtgtttctttcctactacattcaatcggcaccttttttatgcctctttttacttttcatcgttggctcgggtatgcctaacagctctctggccaccaccttcacccacataccccctttctgtctatagataaaagaacgcccttcggcggaagcgtatatacggtttaatcgtcacggcggatagattatgagtttcgttatttatttctgatgatatcaatttgtg

SEQ ID NO: 549 - DNA, 756 bp, Aspergillus oryzae
gcccagacataaatcagcctcggccatcatcatccctacaaaacactagattttggaaagttgaatgctccagtattgacatcggccacttctactccttcgcgcctatggtttgactcgttgtcacgcttgcgccgttcccgatgaatccactgtgcggtcccgttgacgcttgaagaaccccgccactccaattaagggattatggacacgagcccaacgagcacttcgcccggccatgggccttcgaacctgggtgcgacggcccagtcccagctgaataacacctccgcgccagtatctaccccacagtcgactgcgtcccggtcgtcgacggcaaaggccggagctcgtcagattacccgaaaccgcgccastacagctgccatacttgtcggaggcggaaggtgaaatgcgacaaggtgcatcctatctgcggaaattgcgtgaagaacggaaccgaatgtatctacgatgctgcgccgcagaaagacaccgggtcgcgcaacggtcaaacagcaggtgggcacggtattaagcgacggagggaatcttcgcgaccgctggatgaggatattgacgatattgggtcgctctacgggcatctgaggcaggctgggtctcctgagcagaagtacgggtcgcaggcgatcgaagcgcggttggataaactcacgtcgatgattgagcggctcagcaagactaatggacctttggatgcggaacaacggctttttactggctcagaatgtcaat

SEQ ID NO: 550 - DNA, 766 bp, Aspergillus oryzae
acaggtcaatgggttggtgactgctttatctacaccaattcgaccaaccgcctgaactaccttgttggtgatcagacctacacaatctctcactttgaccagggaatgtatgtccttggctacttgcctcgcgatggcagggtgtatctagccgacaaggatgtcaatgttgtttcttttggtctttcacttagcatggtcgagtaccagaccgtggttcttcgtggagacatggatatggcagcagagctstgaaggacatcccgcagaccagatcaacaaggttgcgcggttcctcgaaggccagggctacaaggacatggcccttgaagttgccactgaccccgaacatcgtttcgaccttgccctttctctcaacaatctcgacattgccctcgaaattgctcgtgaagctaacgtcgaacataaatggaagactgttggtgatgctgccctggcaggatggaatctggaattggctcaggaatgtttcaccaatgcaaaggatgtcggctcccttttgctgttgcacaccgccagcggcaacaagcagggtctccgtaacctcgcagaacaagcgtccgaggccggtctgcacaatgttgctttctctaccttgtggtctctcggtgatatcgatgcctgcacagatcttcttgtgcggaccaaaccgtctcgcggaagctgttccttttcacacaaacctacaagccatcccgggcacccgagctcgtagttcagtggaagcagttgcttgagcagtctg

SEQ ID NO: 551 - DNA, 947 bp, Aspergillus oryzae
aattcggcacgagggtcgactttagatccaaggttatcgcaattcctggcgatgtgaccaaaagaaatctcggtctacggccagahaccttcagtcacctggcgcagtggtcgagtgtgatctttcattttgcagggtatgccaattacaccttgccttactctgttcacaggggcccaaatgtccttgggctcctcgagacccttcggcttgccaataccgagcgattgaagcctatccattattgctctagtatctccgcgtgcggtatcagcgaaaacctcattggccccgtcccagaggatgtccgacctcgccccgagtctcagaatgtggcacaaagtattggctatacgcaaagcaagtttgtcgcagaaagtattgtctgggacgccattgagaatggtttcgccatagccatataccgaccatcacttgttactgggcacagtcgtacaggcgtatgtaagaaggaggatataattaacagacttctgtctaactgtattcggcttgggtgttatcctcatccaccccagcagcggttccactttattccggtagactttgcttgttcggcggtatcccggatctcattaaacaggtctagctttggccatgctttcaatatcacccagccagaccaagacaaggtcataaccctcggagagttctacactatcttgaacaactattcccctactcctctcgtttccattcctaccgccgaatttattaaaaggctaaccaagaaacgagactcactgattaaagtgtccagttccattctggcggagagactcgccgggcacaggatttggtgggatgattgggagtatatggctgcttatagcacggagaacctccgccgagcgatgactgatcacccagatattataggactcaagcctgttcccgagctgctcaaggtctactataacttttgg

SEQ ID NO: 552 - DNA, 835 bp, Aspergillus oryzae
aattcggcacgagggacaattcttggcgtmgttcctccataacacatccctttcctacaagctctatctttgctttaaatctctactttacaggtcttacccatctacatccaaagcgaaggctcatcatgaagggtcttgaccgaggtctcgccctcgtctccacactagctttgctcttcgtccaggctgtagcggtccccctctcagctgccgaaaatgcctcccccgaccagacagtcctaggcgatacctacaactttccctcgacccccgaaaacaatgctgacaccttcgagaaagaccccgaggcagaagccgcaccgtcatggttcacttccaccctgatggcccgccgactcctcgctctctcaaccacaggcgtastccaccatcttctctcacacacccaaggacgtccacgtcccagccgccgtggccggcctgtccatcagccagaaagaatacatctcagactgcgacgaggccctgcccccttcaagcggcaacggcggcaacggcgacccgaccttcctcgccctcgaagtcgaaaccaccttccgcaacaccgctgaaggctctaacatcagcatcaccctcgactggtgggaccacttgaacgagaccgagccgctctggcccggcttcccgctcagccctgccggtctcccccgcgttactctcttcgggtacgtcgagtccttcccgtcccctgtyccggagacacggaggcggctcttcggtcctgctatcttaaagctcaccccgatgcccgggtgtggctgccggagcggccgggctccccgcataggagccactgggtccgcatggttgt

SEQ ID NO: 553 - DNA, 927 bp, Aspergillus oryzae
aattcggcacgacgaacgagagcagtatggttgtccacacatctaaagagactcgctatcgcgtatggtggtccatttacatgctagatatccaactctctgtgatgactggccgtccaccccactgcagcagcgacttctgtactacaccccacccggtgccatttcaggaggaagaatttctagatgataacgtcgctcaaattatcatggataatgagagccgtaacatcttcatggaggcgctatcctcaaggaactcgacaaaatctaccagcgaagtaacatcctccgaagctttgggcccccaatgtcgcaccatggtaaacaatatgggcaagctgcctacaatgctgtggactcgctcacgccgaatacctcgctatattttctttgtctcgttgacctaggattgatcatgcgagagtctattgacacattatatgccccaggagctgctcgaaagtcctggcgtgaggtagagatagccatctccaccctgaatggcaaagtagacgcatggctctcccggcttccgacagccttccactttactcacggtcaccaagcgtttgagaggcagcggtcatgtctcggcttccatttctacagtgccaagctcttgattactcagccatgtcttagtcgtctcacacggaaggcgccgggtgttgaaataccaggaaatttctgcaatacaatggcggttatgtgtgttgatctagcgggccaaatgcttgacctcttacccgattcgccggaaccttcatgggtctaccatgtctcaccttggtggtgtgttctgcactttctcatgcaatcgaccgccgtgctcctgactgagctattactccttgcaaaggaaggaactgtccaacacaggacggcttgggaaaaattttgcaaggtgtcgcgctggctagctgt

SEQ ID NO: 554 - DNA, 828 bp, Aspergillus oryzae
ggcataacctcaccgaacaatcagcatataacaagtccgcagcccattgcaattcactccctcttcctttcctcccgacacgacctacacagaatcaaaacctgtctctcaaacgaagacaccaaacagccagggaacccgggctcgaccccgcgcccctcgtcacttcaacccctcccctcaaacacaagttcaacaccaacaaccaaaatgtccacctacgaagtcgaacacaatacaacagacccgggcacagcaacgccctcaacccaccgcgcgcgcgccgccgacctctccaccttcttcgcgaccctctccgaaataagccccgacgaagcccgcacaagagaacatgccgtccccgtcccgcgcgacgtgagcgcagcttctattccctcgccgaagctttcgacctgatgcgccgcgagggcgatcacagcgtacccacctccggcgaaggcgataatgacctcctgacgcagatgattcagagcttgctgagctcagccgagacgcccccgcgggaggtcgagggtgttagtgaggagttttgcgatgttctcgaccgtgtgcccaaggcgtcattgaagccgtcgcagagttgtccgatttgcgggaatgcgtttttggaggatcagtatccgcttgtggtgcggttgccttgccattcgacgcatctttttgatctggagtgcgtgcggccgtggttgaggttgagggggacgtgtccgcttgatcggacggattttgcgacagsagagggagaaggctgaggctaggaggaagaagccggttgaggatgatgaggaagagtgggatggtatgtat

SEQ ID NO: 555 - DNA, 918 bp, Aspergillus oryzae
gcaagaacatagtcaatttcttggacagttatcttcatggtctggacctctgggtggtgatggaatatatggaaggtggcagtcttaccgatgtggtcactttcaatatcatgagcgaagggcagattgctgccgtctgcagagaaactcttaatggcctacaacaccttcattccaaaggtgtaatccatcgtgatatcaagtcagacaacattctcctctcattggatggcaatataaaattgaccgattttggattctgcgcccaaatcaacgactcgcacaataagcgaaacacgatggtcggcaccccgtactggatggctccggaagtcgttacgagaaaagagtatggtcgtaaagttgacatttggagtttggggattatggctatcgagatgattgagggcgagcctccatatctcaccgagtcacctctgcgggcgctgtacttgatcgcaacgaatgggactcccacgatcaaggatgagcagagcttgacaccggttttccgagacttcttgcatcttgcattgaaggtcgatcctgaaaagagagcctcggcccacgacttgctgaagcaccctttcatgtctttttgtgcccctctatcccatctagcaccccttgtaaaagccgcgcggctcagcagggcccaggagaaagctcaaaaaggggggtcattgagcctcttcgcacttaattgtctctatatacgtcgatgtcttctgtcttctccagatacccattgctcctgatgttttcttatatcttgctgggccatgatatgctgctactgcataatggcacaatctctcatgatgacctcccatgcccgtgtttctcttcttctggatctaaatctcatagatggcgatgattgatggctttgcaaattcctgctttcctgctgtgaca

SEQ ID NO: 556 - DNA, 573 bp, Aspergillus oryzae
cctccccatcaaccctccgctccctaccctgccaagtcatcgacgacctccccagaccaacagaagagcacttcctcacctccaacctcaacagcagaagtatctccgagctcctcgttcactcagacatcctcaacaaaacctggcaacacgtcctccccaacaaaaacccggagacgccccggccgcccttccagctcaactcatcgttcttcggcctgggcggcgacattttcagcatgggtcaattggtctggtgtctcgagcaggaaggtctccaggtcaggctcgaggaattgctcgagcatcctactttcttgggccatttggctgtgctagcattgcataatgctaaacaggagaatttggtggagaggaccaggactgttgagagtagagctcgtgttccgtctgtctcggtcaagggtagaaagagtgccaattggaatcctcttggtaaggccgttaccttggccaggaggtttactaccaaatggagttcgaaggcttgattatattgttacgggatgtcgtttgactgatgggcttcgttcatttgccctttccatcatt

SEQ ID NO: 557 - DNA, 801 bp, Aspergillus oryzae
tggctactcaccatattcacctataaacactgtgcagccttcaccgtacgcacactcctcgtcacagcatcctctcacttcgcaatcgatgatactgcctcaccagaccagctctgcgcccataccccatacccaagcaccagctgtcaccatggcgactagccccagcacagttacggctcagcagcagccgacacctccacaacggacagttttgaacccaccacttcctacagccactagcgccccaatccctccaagcagtgtgcatcatcagaactcagctattggagcaagtactagcgctgcaccaggtcccattccagccaccaccccacttgtcgtacgccaggacagcaacggagtccagtggattgctttcgagtactctcgggaccgtgtgaagatggaatacaccattcgttgtgatgttgaatccgttaacgtggatagccttagccaagagttcaagacggagaattgcgtctatccccgagcctgctgcagtaaggaccaatacagaggtaacagactagtctacgaaactgaatgtaatgctgttggatgggctttggcagagcttaacccagcattgaggggaaagcggggcttgattcaacgtgcagttgacagctggaggaatagcaatcaagatccacgacttcgaagcaggcgtgtgagaaggatggccaagataaatagacggcaagggctcccagcacaaccgcctgctcatatggccactgctacacctgttgcacccggtgttcctggcgctacttgacagctcccggtccacgt

SEQ ID NO: 558 - DNA, 930 bp, Aspergillus oryzae
aattcggcacgavgcggaaaggtgtccgagcagtttgatcagactccggaccagcctctgaagcatccgatcgaggaccctttcaagcctatggtcttgccagaaagtaaactccatggcccagtcgcggtggatgaaatttatcagctgagtgaagaaatcgcgagattcaagcctaacgttcccgccttctccgaacttggtgtaattgatatacacgcactcacgatgagtatcaagtcagggattcacgcggagatgcgtctggctttagatacccttgcaacgatatcctgtgaaccggcaattcaaatctcactggacaattgcgaggatttggttgacagcttggttgagtgtgcagaagaccaagctgaattccttgctgagcatgctgctgaggtgtcagatgtcatgcttcttccatcgtatgaagaggttactcggggttgtcagtcagagtggacatccttggccgatattcccgaatttggaagtcttgattatgatctagatcgagctgttgatagactcatctgtatcacaacgatattgcgcaacttttcatttaccgagtcgaactttggggtactttcaacgccaccggtcgtgcaattcatctccactatcgtccgctatttgggaactcggaacatgcttttacgaaataatcagaataccctggatttcatgaaggacacagtcatatatctgagtaacctggcccacaccattcaattgccgagcaaagaagaagctctctctctcctacattttctcctgtcatttgccccattccctggaccgagtcagggagcggatggcgtcatgttcaccgcctacagtgcttccgtccataagtatacacccggctgcggtggacagcttagccaagctgttggcgcgcgatgaacccaataggacgttttt

SEQ ID NO: 559 - DNA, 863 bp, Aspergillus oryzae
ggtcctgacgaaccctgcccatctgaagctacttgagacgtggatgaagagttacaagccggagagctcttcgacaaaaatggcaagctcgttgaagagttaaaagcgctcgcgccctcaggcaattctcgtatgagtgccaaccccgtcggcaatggcggtattcttcgcaggcctctccagctgccggacttccgggactatgctctcaaggatattgaccccggcgtctctgtacgcgggagcatgacaaatatgtcgaagttcttgagggatgtggtcaaagaaaacatgaccaccttccgtgtatttggtccggacgaaacagagtcaaacaagcttgcagagatctacaaagccggcaagaaggtttggctgggtgactacttcgaagaggataaagatggaggaaacctagcctttgaaggtcgggtaatggagatgcttagtgaacatacctgcgaaggctggctggaaggctacgtgctttccggtcgccatggtatactaaacagctacgagcctttcatccacgtcatcgattcgatggttaatcagcactgcaagtggattgaaaagtgcttagaagtggaatggcgtgcaaaggttgcctctctcaatattcttctgaccgcgaccgtctggagacaagaccacaatggcttcacccatcaggatcctggtttcttggatgttgttgcaaacaagagcccggaggtggttcgaatctatctgccacctgacgggaacacgctcctctcagtcatggaccactgtttccgtagcgtcaactacgtcaacgttgtcsttgctgacaacaagaacacatccaatttctcagtatggatgaagcattgaacaat

SEQ ID NO: 560 - DNA, 761 bp, Aspergillus oryzae
aattcggcacgaggggagactactcctggtgtgcggctatagtcctcgtctccgtcgtaaccatcttcctcttggatttaggcgccgaagtatacgtagagtacaaatacggcgtccaacggaacgacgacgccacagaggccttcatcacacactcctgcgcttcggattcagacagtacatctcatgccgtggagtccggcacgccgatccgcaaaagcaccgacattcacacggaagtggcctgggtacgttccgagcgggcattccgacaagaaatcgcagccttcctgatcctcgagttcggaatcatattccactccgtcataattggtctgaacctgggcgtgacaggcgaagaattcacgactctgtatcctgttctggtctttcatcaagcctttgaaggtctagggattggtgcgcgtatgtcagcgctccattttggatcccgtcggtggctgccgtgggtgctgtgtcttttgtatggactaacgacgcccatctctatcgctattggacttggggtgcggacgtcgtataacccgggatccaagacggcgatgatcgtccagggtgtgctggatgcgatttctgcgggggttttgatttatagtggactggtggaattattggcgagggactttttgtttgatcccgaccggacaaagaggagatcgcatttgtttgtcatggtgggatgcatgttgttgggagcggggatcatggcattacttgggaagtgggcgtaaaaagaatgc

SEQ ID NO: 561 - DNA, 792 bp, Aspergillus oryzae
gattggagatgatcttggatgtggaaccagaggaggatgaggacgaggacgaggaggaaaaagaagaggaagacgaggatgaactattaggtgatgagaagctccccgggtatcggcgagccggtgaccgaagcatacgcgggtagccagtgatctgagcgttatagagagctctgctgagctgctctacggcttaattcatcagagatatatcacttctcggccgggcatacagcagatgctggagaagtacgagatgcagcattttggtgtctgcccccgcgtctactgcaatggttgcaaggttctgcctgttggtcgatctgatactccaggccaagagacggtgaagctcttttgtccgagctgccaggatctgtatacgcccccaaacagtcgtttccactctgttgatggtgccttctttggaactacttttggatgcttatttttcatgacattccctgacttggacattggtcctcggctcgatagctctcttgtatcgccggcacggtcatccacagtaaataaccaggtctctcccgatgttcctcctgctcatcagccggtggagattaacggggtacgaacggccaatttctgccccggacttggattgggcaagatctatgaatcacggatttatggattccgggtttcggagcggtctcggaccggaccacgtatgaaatggctacggatgaagcccacggatgttgaagaactcaatgagatggcccgatatgaggcagctcgtagggaagccgacaacgacggcgatacagaaat

SEQ ID NO: 562 - DNA, 728 bp, Aspergillus oryzae
ggatcaaagtcaaggtcgctggcattgactgcgatggcatcctccgcggcaaagtcatgtccaaggagaaattcctaggcattgcggaaaagggattcgggttcagctctgcagtttttggctgggacatgcaggatgtcctctatacaaccgatgccaacattgcgcccaaggactctgggtatgtggactttatcgcagttccagatttgagcacatttaggaggataccctgggaggatgacatccccttcttcttggtgcggtttattcagaacggtcaaactgtttctgcagatggccggaatatgctcaaattgatatgcgataagcttgcggcagagaactgtcagggaatggccggtggtaagcgtctcatccatactggtattccctagtttatctctaacgggattagtggaattggagttcatgaacttccaaaccccctcagaagacggatacagcaacggctcccaaacccagaatatcgcagccttcctcgaaaagaacacccctggatctctgcgccctataactgcaggcagtttctcctacagcgcaacgcgaccagtggcgttcaagaaatatttttacgacatcttcaatacctgcgcacaaataaactgtggaatcgaggggtggcatacggagggaggaccaggcgtatatgaagcagtgagtgaccttgacaggcaatcaaacgaatgtgtcgcttatttcccagg

SEQ ID NO: 563 - DNA, 806 bp, Aspergillus oryzae
aattcggcacgaggcctagatttgtgtctaaaggcaaggttgtatggctgatcatgggttgtcaggcaatccagaaccttgcgggttgcatatgagagctctacctaaactaacttattttcgatcatttaggctacatcgagtccctcagaggctggcggaggatacgcaacgcggagaggccatgcatctcacctgtcgattagtgacccaagtcaccatgtcacggaggccattggtcatatgtatgatgatgattacgacagaaggaactcccagcgcctcagctatatttcctcccctttgagtgaatcgatctcaataattcctccgaaccttgccggcgctgcatcccctacctcgccgcagtcaatacaattgcagaaccatttaaatgcagtcaacaatcatcaccccgtgaacggaaagtcccggccgcccactgatggggccacttctttggatagggaaagtagcagtccagcatcacctagctcaaccgcatcacctggatcaacagacaccgccactacatctttccccctcaacgacattgactacgagtcagaccctgctgctgtggcccaagaactcaacaatcttgccgctatccgacgaatgtccatggatgtagctgccacgggtgatcctgaccttccgagcttcaactccgatttttccgtaccaccctccccctccgccgacgaaaatgacgctgctcggttattttgggttcctgcacgtctgcatccagagttagcccctaaggagttcaaatccttcctcgagagttagacggagcaaat

SEQ ID NO: 564 - DNA, 650 bp, Aspergillus oryzae
  modified_base (508)..(508): n is a, c, g, or t
  modified_base (530)..(530): n is a, c, g, or t
  modified_base (537)..(537): n is a, c, g, or t
attaatatgaaaatcgctaaactcaacatggattcgcaagacaagactcggtttgagattcatggcaaatcatccgtcaaataccatctcaaagctaatcatgttgtcgaggcaaagcgttggttctggactctcaataatgctatacagtgggcaaaagatgaggcaaaggaagaagagagacgccaatctcgacatgccgaggtgcttcgtcaagccaagatggaacaaattgagggacgaacagctgatagctcatccgattcaccctgcctcgctgctaccaagtccagcgggaagggccatactaccccatctctgggtgttccaggtagcagtgttacaagactaagtgcacatgcgtctcgcacaacgctggagagcatacccgcagaagaggaaggctctttccaaggatcatacgaccagggtgctctgcaaaatgaggtaaatcgggtggccagccatgtaacccactgcgccctgaaggtgagggtgatgatgatgnttatggtgactatggatcccanccggganggtgcccaatggctgataaagacgctctgaacatcactgcgcagtctgscaaatcttcaacttgatatcctcgcgagtgtagcgtcctcactacaaactgagaagtcgaggaa

SEQ ID NO: 565 - DNA, 869 bp, Aspergillus oryzae
agcgcagtgaaggggggtcccgatacggagacagtcgaggacggaagtgctgtggacgacaaggaaaaagaagacgtcgtggttgtacgctcgccgcaatttgtcaatgcaatttgggagtacggtatacagcgttgtgagaatggaggtggaatcaaagtgattcaaaggaacgacgggcgttccaatccgttcgtcgaaacttccctcaactacgctctcacctatatcagctatgtggccgactcgaaggactttgggtccctctccgtgaccatcctggccgacactgattactactctgagactgccttctctagggtttctgagtcccctggaagattcgtgaacttcggtgttcctcttcacgaggcccacaagacaggactaggttcctctgcggctctagtaactgccctagtatcatccctcgttattcaccgtaccctgcagcctgacgaccttggagcttctcgtgacaagcttcataacttggcacaggctgcccactgtgctgctcaaggtaaagtgggatccgggtttgatgtggctgctgctatctacggctcttgcctatatcgccgattctccccaagcattttggaatccgtcggcgacgcgggttcacctgggtttgaagagcggctgtttgcagtcgtggaggacgccgaccctaagcatccgtgggatacagagtgcttggatttcggcatgcgacttcctcgaggcatgcagatggtcctgtgcgatgttgagtgcggctcaaaattccccttcgatggtcaagaaagtgctcgaatggcgaaaacaaaaccagcaggaagccgatcttctttgggctgccctccagtcaaacaatgaaaggctct

SEQ ID NO: 566 - DNA, 863 bp, Aspergillus oryzae
ggttcgatacatatgtgagccgtggtgtaatgctgaataactatgccaatatctttggacttattatgcagatgcggcaagttgcaaaccacccagatctgattttgaaaaagcacgcccagagtggccagaacgttcttgtctgcagtatttgcgatgagccagcggaggaagcaattcggtctcgctgccaccatgaattctgtcgccgatgtgccaaggactatgtgcaatcgtttaatacgggtacagttatcgattgtcctaggtgccatatcccactctcaattgatttcgagcagccggatatagagcaagaagaagagcatatcaagaaaaattccataataaatcgaattcgaatggaaaattggacatcctcaacgaagatcgagatgctcgtctatgagctttacaaactgagaagcaagaagcaaacgcataaatccatcgtcttctcccagtttacttcaatgttacagcttgttgaatggcgtctacgacgggctggatttaacaccgtcatgcttgatggaactatgacgcctgcacaacggcagaagtcaattgactttttcatgaacaatgtagatgtcgaggtatttcttgtgtccctcaaagcagggggcgtggcctgaacctcactgaggcatcaagagttttcattgttgacccatggtggaacccagccgctgagtggcaaagtgctgaccgatgccaccggatcggtcaacgtcggccttgtgttattacacggctgtgcattgaggattcagttgaatctcggattgttttactgcaggaaaagaaggccaacttgatcaatggaaccatcaacaaggatcaatggagaggctttggag

SEQ ID NO: 567 - DNA, 800 bp, Aspergillus oryzae
gaacggtagagtaattgtcccaggaaaccgaagctcagacagatataaattacttaatatctacagagggcactggcagtcttggagacaattgtttagtattgccagcgctctatccagagccaagataaaatgtcgccccctttattttccaaatggccatttatcatatccttgatggtatatgcggttcgtcccgcatgggcggggaatgggacttgttcccctactgagaaatgtgagacaggatgttgctcgagggaaggattctgtggctttggacctgaattctgcggagatgaagtctgcatctcgagctgcgattctgtggcggaatgcggaaaatatgcgacaaccaacaataccgagtgtcctctgaatgtttgctgttctcaattcgggttttgtggaacaactcccgagttctgtgatgttgggtgtcaaagtgggtgtgacgctgtcagggagccatcctgtagtggtacatcaagcgaggccgtttatatcggctactacgaagggtggaatttccagcatccgtgtgatgttgttcttcccgaggacattaatgtatccccatggactcatctatactacagcttcgcaggcatctcaataattgactttagtataacgacaacaaacccccgggatgaggacttctgggcaasattcacgagcttgaagaagaagaagccatctttgaagacctacatttctgttggaggttgggacgttgggggtacaccattttccatcatggtccggttcccgggaacgcgcaacactttcatcaagtc

SEQ ID NO: 568 - DNA, 540 bp, Aspergillus oryzae
  modified_base (381)..(381): n is a, c, g, or t
  modified_base (383)..(383): n is a, c, g, or t
ggccatggcctcggataggtcaccgccccagaagtcgcagcaacaccacgtgaggcccaattcttcctcttccgctgcagcaactgccgcgggtcaacgtcgcatgcccacccctggccagtcatcccgaacgggttctgccgactctcctaccccccaagggctcgccaccctcaacgaacggcagthccaacccatgactaccagcacttcagcttcagaagttgcgggtacggagccgcctagtgcctccgccactcctgcgccctatggaacgcgctccagaggtcgtaatgcggctccccgccccaactacgcagaggatcgtgacatcgacatggacctggaaatcgctcaacccgcaacaaaggctgcgaacgnanctaacggtgtgcctaaccaatctgccaatggcaccaaaacagatggcgaaaaatcagcgccatcttcgaactctcgaaaaagtcaaacggcggtgaatggaactagtcccgcttctgctgccaaagattcaattcctggaacatcgtccttctctgc

SEQ ID NO: 569 - DNA, 861 bp, Aspergillus oryzae
  modified_base (280)..(280): n is a, c, g, or t
gcttcagactctctgcacgcacatctcgtcgatgtcgatctaatcaaccctttctcaatcatatattatcccattttttagtgactggtaacagcaccgtcgcgcttatgcgttttttctcgaccttcacttctcaggactacatctcggatcatctctggaaagcttccggaaactactgaaacctttgtttcaagcaccaactgtacactcttctactctaaactacttgacataacatgttcgctgcccgactcttcaaggcaatgcccgccaggcntctgccttcccttccgtgaacgcttctatccagtctcggttcatggcaactgtgcgtaacggtcgcgttgcccatgagcgtgccaccttcacgatccgagatggtcctatctttcacgggaagtcgttcggagctcgctctaacatctccggcgaggccgtcttcacgacttccttggttggataccctgagtccttgactgacccctcctaccgtggtcagatcctggtcttcacccagcccctgattggcaactacggtgttccctccgccgagaaggaccagcacggccttctcaagtacttcgagtctcctcacctccaggctgctggtgttgtcgttgccgatgtggccgagcaatacagccattggaccgccgtccagagccttggcgaatggtgtgctcgtgagggtgtccctgccatctccggcgtcgacacccgcsccattgtcacctacctgcgtgaggggctttcctctctggcccgtatcactgttggtgaggaatatgacgctgaccaggatgaggctttcgtggaccctgagcagatccatctcgtgcgttaggttagcaccaaggg

SEQ ID NO: 570 - DNA, 625 bp, Aspergillus oryzae
gtcgcacggtatcgataagcttgatatcgaattcggcacgagggcgtatctctgccatgatctacgaggagacccgtggtgtcctcaagaccttccttgagggtgtcatccgtgacgctgtcacctacactgagcacgccaagcgcaagaccgtcacttctcttgacgtcgtctatgccctcaagcgtcaaggacgtgagtygcctctgctgttcatcctcttctatcaactcttgtctaacatatcaaatcaggtaccctctacggtttcggtggttaaatgctttcttttctcgccttttgttttcagccatcctgcgcggtcgacgcgtcggttgtccttccgcagcagtgacgcgacgggttgctttttcgggttggtttacggtatgactgggacgttggggtgttattgatcttttaccatgggtctctgggtttgcttttaacgtattttactttactattacgcgtccactactgggtctgctagtgttcgtgattgaaatttctgtatcatagcggccttcatgctatcggctggtacctctagaaccatcgcgtcatggaaatgcgcggtctggtatgaatacgaacgcttgaaaaaaagatgaaatatttttgt

SEQ ID NO: 571 - DNA, 581 bp, Aspergillus oryzae
gatcgcagggggtacaaaacccaagattgatctgtccaagaaactttcagaactgcgttcaaaccgaaagtcccaaccggcgctaccttcccgcccgtccagagaacctgctccagtcaccccgccgctttctaaccctccggatctatcctcccaccaatatgcacgcccagtttgccgaatcttatcaaaccatgaccatcagttgttcctttcctcgtcatcatattctctaatcctcgccttcatcttcggtctctccgattcggttcgcgggcgtgcaaccacagactcgaaagatcgtccggtttcgcccaacgtctccaagatcctcgccgttgttgaatccatccggacacttctggatcaacatccttctatcgaccaaggtggctcaagattcggtaaccctgctttccgcgacttgtttgacgatgttgccgcgcagagcgcaaagtggcacagggagatccttggtattcaggattcgaccgccatagaagaagcatcagcatatctcatacactccctgggctcgcgagatcgtctagactacggttcgggccatgaattaaatttta

SEQ ID NO: 572 - DNA, 899 bp, Aspergillus oryzae
taccgaatatgctcgtgaccgaagaggttcttgctgggcgttcgaaggtggcgaagtgtcctactccaccatatattcctacttcaattccttggccaaagatcaacaggagataattcaaagtaatcgcgatctcactagtttgtgcacgtcacttcccttatttacaggtcttgatacgatccagctttgtttctcatcttattttaagcctcccttcgactggtgtgccgaacgcatgctactggacggtcaactctcattccctcgtcatgtagaggtaatggcaacagcaattgccgcagccaagaaataccgtgttgctattcgtactttgataatatcaggattctacccacgggtcctctgccattctcggttagtcactgatattattaacgaagcattttccgatgtcaaagagttgcaacttcacgatagcccagctatcttgaatttctttgagcaatgccctctgcctcaactggaacggttcgaaataggatgctattggatgtcagtttcgcatttggagaggttcatctatgctcatgcaagaacgatcaagttcctccatcttgaagacatctggctttttcgcgaaaaccgagaaggcaatattcttaatcttacactggccgatacaaaaatgatacttgacagcttaaccaatattcgatactctggtattttgagtgaactgacgataaatcggaaaatcgacggatgctatgagatgaaggaaagttttgcgtgaaaagctggataggctatattctcaaaatccactcagaaggtgaagattgggaccaaacgctttcattttcttttcctttttctattttttctgcgctccattgcttttgttcttcatcccctcccccttgttcgggttgctt

SEQ ID NO: 573 - DNA, 876 bp, Aspergillus oryzae
  modified_base (13)..(13): n is a, c, g, or t
aattcggcacgangcgaacacatcccgatcttggtggctaaggggcaactgtgcgcattgccactaactcgccattctggtactatataccagcgaaccgcaaccatgacggacgaaacgcaggtcgccgatgaggtccctcagttctccttcaaaaaacgatcaaacaaggccaaggccaattttcgcaagaagcccgaagcgccgccacctgcttcggactccgatttcacgtcgtccgatgatgaagagggccgcagaatcaaaaggcgccgcaagaacgcagcagtgacagcctcgtctacaaccaatgcaccccggagagacgaagaacagcccgtcacagccacaccgatcccattgccatccagcaacgatgccaccaagcattcgaactggtatgatgacgagttggacgcaaagaatctcttggggaacacgcgggcccaaccaacctcgaacgccccctctgcatcagatggcacgtacaaaggcgcggcgaattaccagtctttcatccaaaaaaaccccgattctctggcaaaacagttcggtccgatcaaagcccccaccaacattcgtactgtgacgtttatggattacacgccaaacgtctgcaaagactacaaacagacgggctggtgcggatttggggacgggtgtatctacgctcatattagagaaaacgtcttgcagggctgggaattggacaaagaatgggataaaaacactcaaggaaagaaattggatggaaaggtcgtctcccaacgtgggggtgacaaaccaaaggacgacgacgatgaggatgaggagcttctcgaaagcattccatttgcctgtatcatctgcaagaagtcatatcaaaaccccgattgt

SEQ ID NO: 574 - DNA, 804 bp, Aspergillus oryzae
  modified_base (13)..(13): n is a, c, g, or t
aattcggcacgangaaaacatctaaaaaaactcgctagcttgaatactccaattaatctatggttttgagcatcgaaaacaaacaatttatgatatgatccttatcccttcccttgtgatatcataagcatcgccttttctactggtcaccaatctccggtgcaattgctagtgcatcgtccgatggccacacaacaccaccccgcttcttcctcgtcgggtctggcatctcgtcgtgatgtgtggcatggtcgaattccaaggtctcccaatccttcacatagccatgatgaagctggtctagccatccggaataaggttctcccggatctaccgtcagtaaacgcttccttctcctggagcgccaacccattccaaaaatctacagaggattccaataatagcaataatcaaatgcaaaaactatgataaaatcatttttttcgttgaggatgcccttgcactcaacctcctccttctctcactgtccactcattttcatggcagtctcgccatatcttccccgtcgaacatcccatgcattctctagcttcaaatcattgtcgtcatccatggaaacaggccgtgtccggtaccggcctattgagtacgtggagagaatggagtattatgagcctggagggtatcacccagtaaaaattggagattgtttccataatcgctatcgggtaatccataagcttggccatggtagttattcaactatctggcttgctcgagacgagatatccaacacaaatgtagcagtcaaagtctgcagggcaaactccaacccgcgcgaga

SEQ ID NO: 575 - DNA, 868 bp, Aspergillus oryzae
aattcggcacgagggcgaaagatatcccgacagcgattaccgaatcagtctacgagccgggacggggatccgaatgagggattgtcggatgcagagagggaggagaggagggcgacggaggatgattatgcggcgtggtgttgggcgtttagtgaggggaggtctacgggggatcattattctcattctcatgctcattctcggggaattggcaatgggaataggggtgagtatgagtatgggtatgggtctcatcgggaagctgggcatggtcagggtcagggatatggccatgaacaaggctatgacgagaatctattctcggagttcgacggacaaagtccagaaatgactatctcacgggaccacgctccgcaaagtacgaacatacatccatcgatcatggtggggaaggcgatacgacgaacacgaggggaacgtacacgtttctccaaacacaggaggatcgactgggacgacacgagagctcggaaagtgttccggccgatcagctgctgcgatttacgccgatcggacactatgggtatagtcctttgaccgcggggtctccggtgtcgccgccacctcgcatcctcaccccggccaggtatgcggagacgaatcggatgcagagggagaagagtcaggagctgaagcagaagcagaaggcccagagaggcttttgggggccggtgcgagcgctgtggctttctctgcggcggtcgaggtgagattctcttgcatgtcatgtcaacctcggtccattcctttgatatttcttggtttgtttctgttttactacaatgtgtcttctactacgattgatacccatggataggataaatgtcagcggtacgttaatcaccag

SEQ ID NO: 576 - DNA, 936 bp, Aspergillus oryzae
  modified_base (500)..(500): n is a, c, g, or t
ttcggcacgaggctgaccggacctgccgtgcaactaaattaaagcggcattgtccaccggtgatatttctcattccactacagactgtgtctccgcattgactcaacaccaccatggggtcttacagtgtatcgtcgcgacasacagtgcgcggacgggaggaagttcgagctccacttacagtgatgcttccgatcgttcgaaaagcactgcccctacgatctatagcgagcggcccacatcaaagcggagagagaacatggacccgaaagattcagtatcgacctacgcctcgacgaaccacgacgacgaactaccgaagaagccgcgctatgaggtggttactcgcggggccgagtcagatattttcccttcggatgcgattccctcgaattcctccacttttgggaagttgttcccatcttcgcgacggctgcttatcgggcatgatgatacgaccctcgatgggaacatgaacctttgtgtgcacaccctggcgncacggagagatggctatcagcaggccgttatactttttcatctccgcatgtacgatttgtactcaagagacttttcgtttcgccgctactgtcgcaattccgagcgcgaggtgtgtcactcagcacgaagaccgatatcgtccggaggcccaaacaagcggccaggattccaacgatctttgagcagtgcattagccggcttacgcccaggctcgaatggcgaccattcgacgcatagttccaagcgtaaggkcaggacctgggtcagaagtcggttaaggaggacgacgaggactttgatggccaggacagtcgcgaccaacctctggctgaacacgatcatgctggaattctcaaattacgctcacgtcgagatcaaaagacgtggtgccggcttgtctaagcgatatgagttcgaatattggtgtacaagata

SEQ ID NO: 577 - DNA, 866 bp, Aspergillus oryzae
  modified_base (30)..(30): n is a, c, g, or t
ggttacattcggtcatgagggcggtacaantcccggggaagctgaacccgttggatctgccagatgactttttccgagttcgcctggtctgcactctcctggacacctgtggtcactgctttgaccgtggatctgccaaaaagaagttggacttcttcttgacgtttttccagtactacatgacgacaaaagatccactgccgatggacattgatttccttgtccaagatacattctctatgactcgtcctcagtggaagttagtcaccgacctggaagaggccacccgtatcttcggggaggctgtagctcagaactacaaaacacaagacgccgagaggcctgcagagccagatgatgaagaagcagaaagtagctcatctgatgagggtttcgaggatgatgtcatgcccgaggtggacgaggacggagagtccagtgatgaagctgaagcatcgggccccaatgccgagcaaaacggtgacagtgactctgaagacgaacaaatcttcgttacacgccaagaggaggaacgagaccctgaggccgaagccgaattcgatcgtgagttcgaaaagatgatggcagaaagcatggattcccgaaagttcgaacgcaagggtgtgtttgacatacctcttcccatgaaacgagctcctcgggatgcagcaggcgaaagtgcccccgagactagtcaaccacaaccacagccgcagccgcagccgcagcctagtacgatggctttctccttgatgactaaaaagggaaacaaacaacagacccgtaccatcgacctgccgtctgattcgagttttgcagttgccatgagaagccagcagcaagctgatcgagaagaacaacaacgg

SEQ ID NO: 578 - DNA, 874 bp, Aspergillus oryzae
ggcgacaccttgattgggactcaggaaacgcttttgtcatggctgaagatgatgctgagaaggcctttttccaggcccaggcaatgaatgcggactccgtggactataaagctgttgaagatcagggcgctagttcagattcagatgattatgatccttcgaaaacacttcaagatcaatattctgcttccattcttgattctaagcaaagtgaaattgctccttcaagtgcttctccttcagatccaaatccccctacacagtctatcccccctgaaacagatcccagccagcccgcggacagtgcctacccttcccagacaccaycccgagctgactcccaggcatcagtgtcggcacctgcgtcgggtacttctgtaccattgaagacgaggacaattgggggctttgtggttgaggacgaagatgaggatgacgcgggtgatgcggattatgaaccgccagctgtactaggtgtcgaggacatgaatactatatctatgaatgtgcctcagcaacccatttcaggaaatgcaaatgaagatactcctacccctgatgtatcaatggacggtgctgtgcaggcatctgccgacgcaaagaattttcccaatagctcttatacccctgcttctgctgctgcttctaaaagcgatacgcctgcgcttttgagccaggacatgtacaactcacgtactttgcagtctgaaaatatgcaagatagcgctgcagctactcccgttcctgattctccgtcaacctccaagggccgattgcctcacgatcgcgttggtattttggaggacagaatacaagaagacccacgtggtgacatcccggcatggctcgagttgattaatgaacacagaaaccg

SEQ ID NO: 579 - DNA, 302 bp, Aspergillus oryzae
gcaacatcaatggagccaaaggctgtcgacaacttccagtcacacttctctcggggtttctgggtagtggaaagacaacgctcctggaacatattctacagtcagaccatggatttaagattgctgtcgttgttaatgacatgagcagtctaaacatagacgcaaccctcatcaaaaaccaccacgtgtcccagacaaaggaaaacctcattcaactacaaaatggatgtatctgctgcacattacgcggggacttgttggaagaactagcccgacttacgaagcaggacgacgtgcagtat

SEQ ID NO: 580 - DNA, 773 bp, Aspergillus oryzae
aattcggcacgaggctcattaattgcttctttacttccttcctttctttctttctttttcttttcccttctcacctgtcgtaatttacatacgctttgaacgctagttttcttctctttttccattcacattcctttccagttccccggaacccgccatctctcttgtacattttacccactcttccatccgtctatcacatgaaaatctctccgacacacttccacaacttatttgacaacgacaacaacaacaaccacaaccatcatgccgtctgcacaaccaccagcatccctcgcttccagctcttctgagacctcgtgctctcccggtccaggaattattaacacgaccgacgaccgcaatgaccgttcttcatctacccccaccgcttcatcatccaagcatgccggctcaagcagcgcccaggacaaggagaaaccgcgactgacagagcaagaaaagaagaacaatcacattgcatccgaacaaaagcgccgtgcagcaattcgcgagggcttcgatcgcctgacggagctagttccgggcctggaaggcaggggccgaagcgaaasattgtgctgagaaagacggtggatttcattcacatgcaactgcaggagagacaggaactcatagctgaaattgagcgcagaggtggtcgcattgacgatacgtttcggtcgtgacatcggcgcascccgggagttttacatcctcagccgaggttcgatcgggcatgaaatatgatgatgttgacgacttgatttacg

SEQ ID NO: 581 - DNA, 796 bp, Aspergillus oryzae
gaattcggcacaggctccaatgcaggacactcagaaccttgaaatgattaaactgtgcatggaaggaatgaaggtagcaatccgagttagttgttcgttcgacttggaaactccacgagttgcatttgtgacggctctcgctaagttcacgaacttgggcaacattagagaaatggtggggaagaatgtcgaggctttgaaagctctgcttgatgtagcacttacagaaggaaactacctcaaaagctcctggagagagatcctcacatgcgttaccagttggatcggctccaacttctcactgacggcgtcgacgaaggatcattgcccgacgtttcgcgggcgcgtattgtgcctcaagcatcgtcagagggttcccgcaaatctttccagtcatcaagacggccgcgccctcgatcaatcaatggccccacggccttccgcaccgaagctgcaatggaaagccgatctgctgagatgataaggggcgtagatcgaatcttcacgaacactgccaatctctctcatgaggccatcatcgacttcatccgggcgctgagtgaagtaagttggcaagagatacagtcttccggacaaaccgactctccccgtacctacagtttgcaaaagctcgttgagattagttactataacatgacgagagtcaggatagaatggtccaaaatctgggaagtccttggacagcatttcaaccttgttggatgccactccaacacaacggtggtcttttttgcgctagactcgcttcgtcagctgtcgatgcgctttatggaga

SEQ ID NO: 582 - DNA, 853 bp, Aspergillus oryzae
  modified_base (13)..(13): n is a, c, g, or t
aattcggcacganggaacgtatagaggtctttggccagaaacaccgcttttggtggttggcactgtcgggagagaacctcaaatgtggccaacttcaccttaagcaccaatgtacgacccttgaactcagtccgagtcaagtctttctcgagttcctgagcaatcgcccagagtttttctctaagggcttccttaccccccatttcattgaaagtgctctcagtgccgacactttttcgctcatagttttccaccggctggatctttgttctccccaatccaaggtagcattgagccaaaaaatgaaatgccttctcaccgaacagcttggccaacagtgcgcgttgagaataaatatcgccgcagttttaattccaactgcatccagctcacgttcaaacactcgacccacaccgttgacttttcgcaccgggagatccttcatgaattccagaatggcatctctatcgttggggacacgaaactgaccgtttggtttgttgcggttggatgcgatcttggcgatctttgcattagctgcgatgccagcagacaccgagattttcgtttgctccaatacctccgctcgcatgcgattaacagcatcttctgggtcgatttggttttctgtgcaataggcggttatattcaagtacgcctcatctatactagcactttcgaagagcgggtcgtattgggcgaaaatagcccggatttcctgcgccttggcactgtatttctggtggtttataggcaggcagatgagctgcggacacaatttcatggctacgaatgaggccatcccacttcggcagccgaatttttcgagcctcataattacaggkagttaaga

SEQ ID NO: 583 - DNA, 881 bp, Aspergillus oryzae
gcaacctctctgctgaaaacctcgcttctatgaatgctttgacgaacaccgacatctccgcttctgcgctacatagccgtctatcaaacctctcaaacctcaatatcactcgaccccatcagccatcgcccaccgaccatgagtctcagaacgacagcgaacaccgacgtctaggagttcctgcagattactttgggccgtcatcgggttctaattctcacagcccttcgagcccggtgctctcgcggcgaccctctgatgaagttgaccatgagcacgttccatccggaatggccacgccattccatcctcagtatgcggaagtggagactctgagccgtgttccgagctattcgaccgcagtccgtacaacggtccgtccccatgattctgatttgccggattatgatgccgtcgttgcagaagacattcccgttccgccacctctccagtcacctcagcaagcccatatccgaaatgctgggcgcggatctagccaactcttctcttccctggatattcttcatcatcggccgggccttggtcactctcactcctctagtcacgatgatgaagaccgaagactgcgactcgttcaagctcgggctcgagtctagaatcaggacagaggccgcttcacctgcatagcggaggggacgttgaactctccagagatgcgcatttatgatgattacggtactgtcggcgctggacgctgagaggcgctatatttcagagactctcctaatttcacgatagaagaaaagcaactaccttacttcgttttgtatctatattagaccgggtattgggtgctcctgggtgctttccttttcttttttcacatatctatagaggtggggatggtatggatttgttca

SEQ ID NO: 584 - DNA, 815 bp, Aspergillus oryzae
gcttgggcaaatgccastctcgacaagccgacgacccaggaagaggacaacaatcttgaaatttcaagactgccgtcactagcccggccaatagggaaagtgccgtcagcaccagataacttagggaagctgaactcaggtccgaaatcatttcgagcaaggaatgtgtcagtcccagggcccgataccttaatcgactcaccagacacacccagcagtgcgtttcccccttttgatattcagaaagggacggggagtgctgcagggccagttttgcccaccccgactggcgcaacctttgctcctaatggtcttccaagtggggggctgtatctgttcgacagccatatacactcaccaaccaatctcggttcaccaaatgcgactgcaactaatgcgcctgcgcccttagaacactgccctgagtcatttctcttgcgcccattttggcttatgcgatgcatatatcaaactatagcccaccctagcggtggctacttgacaaccaaactattcgtcccgcgcgatgtctggcgtgtgaaaaatgtcaaaatcaaggcagtggaggagaaagtctcgaattgtgacttgttgacggcggcgttgttaaaactggctaaggttgatacttacgatgccgacgccgttctagaagaaatgcagtyctttgagaccgttctcgaccaggttcagtcttcgctctcgaaaaagcttggcggtgaagttggcgttcagggggctatggctttatttaaagcctctcagagttcagacgatgcggcagcsgttgatactttgccttcgaaaacctccgg

SEQ ID NO: 585 - DNA, 744 bp, Aspergillus oryzae
tcaatatggcggacggcattgacasacgggcagatgaccgcatggagttcaacacctccaaggaggtcacggttgctcctaccttcgaggacatgcacttgaaggagagcctcctgcgcggtatctacgcttacggctacgagtctccatcggcagtgcaatcgcgagccatcgtgcagatctgcaaaggccgcgacacgattgcccaggcgcagtccggtacaggtaaaacggctaccttctcgatcagtatcctgcaggtcatcgacaccgttgtgcgcgagagtcaagcgctcgtgctatccccgactcgcgaacttgccacgcagatccagtccgtcatcatggcgctcggcgactacatgaacgtgcaatgccacgcctgcatcggaggcacgaatatcggcgaggacatccggaagctggactacggacagcacgtcgtttccggtacgcctggtcgtgtcgcggatatgatccgtcggcgccacctgcgcacccgccacatcaagatgctggtgctggatgaagccgacgagctgctcaaccgcggtttccgtgaacagatctacgacgtctaccgctacctgcccccggccacgcaggtggtggtcgtctccgcgaccctcccctacgacgtcctggacatgacgacgagttcatgaccgaccccgtgcgtgtgctggtcaagcgtgacgagttgaccctgggaggcattaagcagtacttcatcgcggtggagaa

SEQ ID NO: 586 - DNA, 638 bp, Aspergillus oryzae
aattcggcacgadgccacccgtgacccttctttcttcccccctttccctctcttccttcctctctttctctcaccatcctctcttatctccttccttcctttcccccacctctttgacttcgttcttctggaggagcgagtctcctccggtcacccaatgtgtcccctctccgaatcgaaaaccgagctctttcttcaggaagagaatgaaacgggaaagattgtccctatggtgactgtcgtccgtcgtcgcggacgcttgcatttggtccaccctccctggtaccggaacagtttattggcgagcacagggtttctcgagttcgccaatgccggtgatttcgctgccaatgtgtggaatgagatccctgtaccccgacatgcaatgatcctgatggccattggaggaccaatcgctttgttgatgagtattgtcgccctccgtgactttatattgagttggaggaatgcaaactgctccgcgccgaacgccgatacctacaatcgctgaaacatgattacctggcttccgccaaccctgacccggatctgatccggctgatcgacagccgtctttggccttggatggcgggaactgggaacggagctcattgatcgtgtcgcgatggacgttttcc

SEQ ID NO: 587 - DNA, 648 bp, Aspergillus oryzae
gagcaatctcaatggggtgtcatgttgaccccgaacgatttggcctgggccccatcgagcgcgaggaacgtaggcgtgcctggactggtctcatgatcctctatatcaaccagaacaacacctttggcggtcccgatcagagaatacattctcaggatgtaaagttcccgttggagatcaacgacgtggacttgctcacaggaggaacatcagagcccgcaatgcagcccactcaaacgacctacctcttgctggaatatcagctatccaagatctcttcgatgatctgcgaaaccctcttcacgttcgcaccaagattcagcatctcgcagatcgagacggagatcctagcaatccatgaaacctgcgacaagcggtatcaactcgatgccagcggcgaaacacttccaagccaccatctggccaacttaaacaccttgtacggccacctccaccagctgttccttctctccctccgtcctaatctatgccgctacttgcaaggcgaggttacacccgagacatgctctgcgagagctaaagtgcgccgcatctgccaaggcaaacactggcaatctaccagtctctacacgacctgccccagtattccacgtacaaatggtacaacagtgggttgggaagcttcca

SEQ ID NO: 588 - DNA, 333 bp, Aspergillus oryzae
  modified_base (49)..(49): n is a, c, g, or t
gcgcaatcacttaaccccgcacacggacacttttgccggttggactttnggtaattccatagagttaccttctgtgcgtgggaggcttactgaaccctttcgagccccaatctctttatcttgaatcgcaaatacccaacccctcaccatgcccaccatttcggtcgacaaggccgcgctcttcaaagagctcggacgggagtacactaccgaggaatttgatgagctgtgcttcgaattcggtattgagctcgatgaagatacaacaaattcagaccgaccaatcgtggatggagtgcaggagcctcctcagctcaagatcgaaatcccggc

SEQ ID NO: 589 - DNA, 403 bp, Aspergillus oryzae
  modified_base (295)..(295): n is a, c, g, or t
  modified_base (328)..(328): n is a, c, g, or t
tagaatcgattctcattccggagatcgccaccttgtttttaggattgaactcgaatatggcagcggcatgacccggatgaagtggatcattcatcggacgctgagagatttcgcaaatcttcatctgaagtacaaattgcattttggaacgcagaagtatattcaattgcgaaataccgaagcgcacataatcttccacgtttccctcgaagtgcatttccttacctacggggtgttcggggcttagaaagcgacatggaggacgaagaagatgacggtggctacgaaactgcanccgaggcgacaagtggcaatgaaagagctgggnagaggcagcagtcacggccggcgatcgtccggtaatatatcccgtcgacagtcgactgtaacgaaccccgataca

SEQ ID NO: 590 - DNA, 631 bp, Aspergillus oryzae
  modified_base (150)..(150): n is a, c, g, or t
  modified_base (370)..(370): n is a, c, g, or t
  modified_base (437)..(437): n is a, c, g, or t
  modified_base (468)..(468): n is a, c, g, or t
  modified_base (471)..(471): n is a, c, g, or t
gggcggggcaccccgtgcagcctacattcctgcgccaaaagatgatcttgatttggatgatcctcgacagtcccgcaaagattacgctgttcgcgaggtcgacttctactaccgtgtccgcggtccgccactgtcccaaagcggcaccgnaaactaaaaactggccctgcagatcccaccggacctgtatcttctgcgaccggctttttccgcaacctgttccgaggaaagactaaagaaagcggcaagggattcgaagttgttcgtagcgcaagggcacccccacctggtctgcttcctgaaggggatgatgtccacgagccataccgagatgagcctgacgaccaggcttaccgcaggcacagccgtngagtctcaggaagcgaccgatcatatccagatacagatagtgatgacaacaaccgaacacgcgaggngctgataagcctgcctcaagttgagtccggngcngctattgaactgcccagtcgcatcggctcccagcatagctcaccttcaggggccccacaggcctcgcgaccttctcgacgcgattctcgatcgttgggctttagaggggtgacactgcatctcacagatctcttcccattgtgaccaaagctgtttcgga

SEQ ID NO: 591 - DNA, 663 bp, Aspergillus oryzae
aattcggcacgagggcgccggcagcggcctcgcccccttccgcggcttcgtgatggaccgcgccgagaaaatccgcggccgtcgcagctccggctccatgcccgaacaacccgctaaagcgatcctctacgccggctgccgcacccaaggcaaggacgacatccacgccgacgagctggccgaatgggagaagatcggtgccgtggaagtcagacgggcctacagccgtcccagcgacgggtcgaagggcacacacgtgcaggatctcatgatggaagataagaaggagctcattgatctctttgagagcggggctaggatctatgtctgtggtacgccgggcgttggtaatgccgtccgggattcgattaagagtatgttcctcgagagacgggaggagattcgtcgcattgcgaaggagaagggcgagcctgtttcggacgatgatgaggagacggcgtttgagaagttcttagatgacatgaagactaaggagcggtatactacggatatttttgcttaatttaagtggtgggcttatttgactttggacatattttgggttctatatcatggattctagccgattgagctgtttcgggtttattatgttgtattttcagctgcataccctgcattactatcatgtgcattagattgagt

SEQ ID NO: 592 - DNA, 733 bp, Aspergillus oryzae
gcagaataccagtcacaagaattgtggggtatttatcgtgattcacagtatgagtcatcagatctccataaccctatgcatcaatttcaacatcatgaccaattctccaccaaaacatttatctccacaacccgacatacatcaattatcaatccattaaacaactaaaccaaacaataaaagatctcccaaagatgcatcaaaacctcacgttcacaatcccaccccacctaaatgagtacaacgtccccctctccagcttcaaagccgccaggcacaatggaccaacttcgtagttgggggacttgtcttttctcgtttctcacgtgattcccaagacaaaagcaaggaggagggcgaaccaagagtccttctgctccagcgtgctttgaccgattccctccccggttactgggaggggcctggcggaggctgtgaggagactgatgagacgattttgacagcggctgtgcgtgaagtcgtggaggagagtgggttgcatgtgtcgaggattgtggatttggttggggtggaggagtggacgaaagagaggaacgggacgatgttctttgtggctaagttttcgttcttggtggaggttcatgaggctcaaggcgtctttgggggggattgctggaacggacggggagaagacgattgaggttgagggtgatgctgttcagcggtgggaggatagggtccgattggagccgagttagctttcgacgtttga

SEQ ID NO: 593 - DNA, 760 bp, Aspergillus oryzae
aattcggcacgaggatcagcgaaggtcccaaccgctgctctaaagaagagaagaagctcctcttctctctgcttagcaagctctacatcgctcctcccgctgtaccctcaagggctggttctcgcaatctggaaggcgaagacccaatcgccccaagtgctcggagtaaccaaagcgaggttagccctgagaatgccgcgcttgcacaagaggtgaaagagcttttggacgaaacgatcgaggaaggtctggcttctgaagcggctagcaggaatgcccttgtcaaggtcaaaaactcggtccttaagctcctagcagcggctcagggccgcccgagtagctcccgaattcgcgagggaaccgaggagggagacagtgatatgctcagtcttcgttccggccggtccggtagcgtccgcccctccatcgagcctggtgcttatcgtcgcggggtgtctatcgaacccagcattatggaggaggacgagaacgaggatagcaggacgacgatcaagtctgaagcacacgattactaggatttgcctaatgcgttccttttctgggttggcgttgactgatgggtcctgttgggatatggtctcgggacgacatgcggacttgttaccatgtatttaattcatgtttatacatttcgaggcttctttgtaaatgttttctgttctttcatccaagatacttgaaacgccagatatcggttaatgatcgtcgaagcttgaattgcgcctgatatatcatgaga

SEQ ID NO: 594 - DNA, 746 bp, Aspergillus oryzae
gctcgccttctcgcccttgtctttctttcaattcctctctctcactcttcacacattcacaatggctcccctgaagctcaacaacaaaaacctgtcgcaaattgcggcggcaggtgagacccaagtcaaggtcccaacctacaagcgtggtggcgacgtgaaggagggaattgtccacgtcggcgtcggcggcttccacagagctcacttggccgtttatgtcgaccagttgatgcagaagcatggtgtgactgactacgcgatttgtggtgttggtttgcagccctttgacgccgccatgcgcgacgccttagggtcgcaggaccacctctacaccgtcattgagcgttcggccaagggcagctttgcccatgttgttgggagcatcaattcctatctctttgcccccgataaccgcgaggccgtcatcgccaagatggcgcacccggatacccacattgtgtcgctcactatcaccgagagcggttactactacaacgagaacacacacgagctccaaagtgagcaccctgacattcagttcgacctccaaccagcgaacgagaagtccccgcgcaccacgttcggcttcctctatgccgctctggcacgccgctaccagcaagggctcaagcccttttaccgtcatgtcgtgtgacaacatgcagaagaacggttccatcactcgccacatgctcgagtyctttgcgcgcctgcsaacccccgagatcgcgagtggattgcgg

SEQ ID NO: 595 - DNA, 920 bp, Aspergillus oryzae
aattcggcacgggggaccttttagacttcgacttcatggatccgccgccacaggaaaccatctcaacgtcactcttcgagctctggtctttgggtgcgctggataacctcggtgatctcacgccgttgggacgtcagatgacaccattccccatggacccaccgctcgccaagcttctcataacggccgccgagaactacgagtgcagtgaggaaatgctgaccattgtatctatgttgtctgtgccgagtgtcttctaccgtcccaaagagcgcatggaagagtcggatgcagcccgtgagaaattcttcgtccccgaatcagaccacttgacgctgctccatgtttatacccaatggagaaccaatggctattcagatggctggtgtatcaaacattttcttcactcgaaggccctgcggcgagccaaggaagtccgcgaacaacttcatgacatcatgaccgtgcagaagatgccgctcgtcagctgcggaacagactgggatgtgatccgtaaatgcatttgctctggattctaccatcaagctgcgaaggtgaagggtatcggcgagttcatcaatctgcggaccagtgtgaccatgcagttgcatccaaccagcgcgctgtacggtctgggatatgtgcccgagtatgtggtctaccatgaattgattttaaccagcaaggagtacatgtccactgtcactgccgtggatcctcactggctcgctgaactcggaggcgtcttctactctgtcaaaaaaaaaggatactcgcagcggggaacgccgcgtaacagaacttgaattcaatcgccgcatggagatcgagactcagatcgccgcagaccgtgaacgggctgcagcagaaaagcagaaaaaaatcgagcggaacgacccatcaagacggaagaaagaagt

SEQ ID NO: 596 - DNA, 879 bp, Aspergillus oryzae
  modified_base (113)..(113): n is a, c, g, or t
aattcggcacgaggccttttttctcaaggaacaattcgtgcaactaatcatggcggactccgaattgcccactcgccctaagcccgaggagacccccgccgcggcccccgcgnagggtgcggaaagagcaagagcgccacaagaacgctgcgaagaaggccgcaaaggagaaggccaaggccgagaaagctgctgcgcgcgccgcccaggagaaggctcaggccgccgctgctgaggccaacgacaccgcaaaggatctctacggcaagatccccgaatccgaagacgtcctccccaccacgaagttcgatgatattaccgatgaccactacgagaaggagatcaccgtggtcgctcgtgtggacaatgcccgtgttcagagtgccaagctggccttcctgatgctcagacagcagggcaagaaggtgcaggctgttattgccgctgcggasccatctcgagacagatggtcaagtacaccggtggactgaacgtcaactccattgtccaggttactggtgtcgtcaagaagccccaggtgcccattgcctcggctacacttaacaaccatgaactgcacatccgcaaggtctacacgattgctgaggccgctcaacagcttcctatgcaggtcaaggatgccgagagaccgcctccggagaccaccgaggagggcaacgaggttgacgctgatggcgtccccatcgtcactcttaagacccgtcttgacaaccgtgtcctcgatctgcagactgagactagccaggctattacttggatctcgagcggcgttgcagagttattcgcagagtacatgatcaagagcggctcgcggtggatcttcactcctaagctggtttcttccgctacggaaggtgg

SEQ ID NO: 597 - DNA, 981 bp, Aspergillus oryzae
aattcggcacgagggtcgcatcgcccaccatgtctttcgaccgtcttagttctctagaatcacagcctactaccctgcgtcgctccgacgatccacagtatcgagatgatcccgagttttaccaactcactgagagtctttcgaatcagctgttcagcctaacgtcgaacatcacccggctatcggaccagatcgcgcttctagggacaaggcgagacacggaacgagtccgtgaacgagttcacaatcttttagagcagactcgttcggggttcaagggagtaggcgaaggtatcaagaaggtgcaagcatgggaggatgttaatccttctcaaaaatggacacagcaaaagctatcttcagaattcaaggctactctggatgagttccaaactgtccaacgccgggctttggagaagcagcgcgcatctgctgttgctgcccgcaccgccgtggaagaaggtgaacaaccagcggttgaggggagctacgcaagaacagcaacagctacttcaggaacagcctcgacttgcgaaccaggatgaggtggacttccaagagtctctaataattgagcgcgaasagaaaattcgcaatattgagcaaagcgttggcgaactcaatgagttgttccgcgatgtcgcccacatcgttcacgagcaaggaggccagctcgatataatcagcgagaacgttgaaaatgttaccaacgacacccgaggagctaatgttgagctccgcagtgccagcagacatcaaaagaacgcccggaacaaggcttgctgtctgcttgtcatccttgccgtcatcctaactatcattgtgctggcggctactattggataagtcggttcagttacgccttaatctttccacctatcattcctagtctacttgtattgttcattatggcggctcttgttcatgatatcctcttgtatgcagttctatgtattgttatgaactatctattctctctca

SEQ ID NO: 598 - DNA, 920 bp, Aspergillus oryzae
  modified_base (31)..(31): n is a, c, g, or t
gctttggcaagacagtgcgtgacgcagytantgctcttgacgccatctacggtattgatgctcgcgataactacacgcttgcccaaaagggaaagacccccgagggcggctatgcgcagttcctcaccaacaagaccgccctcaaaggcgccacattcggtattccctggaaatccttctgggcccttggtgatgaggaccaaatctctcagctccttgagctggtcgacctgatcaagcaggccggtgccaccgtgatcaacggcactgaattgccccattacaagaccatcgtctcccccgacggcttcaactgggactacggctctactcgcggatacgccaacgaatccgaatacagctacatcaaggtcgacttctataacaacctcaaggactatctgtctgaggttgagaacaccaaggtcaagtctgtcgaagactcgtccagtactatcaagacaactacggctccgaaggcggatacccaagcatccaccccgccttcggctccggccaggacggtctgatcgcttccctcgaaagcaagggtatcatggacgagacctactaccaggcgctcgagttctgccagcgtaccacacgcgaggaaggaatcgacgcggccctgaagtacaagaacagaaccctggacggcctcctcgtgcctacagatgttgcgcagagcatccaggtcgccgctcaggccgggtaccccgtgattaccgttccggctggcgttggcaaggagtytggcatgcctttcggactggcgatcatgaacactgctttctcggagcccaccttgatcaagtatgccagttctattgaggatatgcagaagtcgactggaactaagtaccagcgctctcttcctgagtggcgtggctatttgactcgcaacctccctgtgattatgt

SEQ ID NO: 599 - DNA, 647 bp, Aspergillus oryzae
aattcggcacgagggtagtcccggaaacctgcgctttattatatatctaacgccacccttcatgcctctatcgcgtaccattttactgcgccattccgacctccgatccatcggcccgcgcctcttctctttatgtccgattcgaagtcatcgtcgtcctcgcctcgtcctctcgcaccggctcctggtcaaccccccagacgaaccagttctagcgacgatgtagtccgcggggcggaaacacaaaactaccgcttgtagggcgtgtaagctgaaaaagctcaaggtgagtttgctttgtgctcgatcgcgttcgtcctatactcctccccttacctttctatacgttcctataactaggactatsgggaacagtccttggccgatcagagtgccaacsccacggctgatgttgctagtgtcgrggggatccaccgtgtgagcattgcactctcaatggcattgaatgtgtggttgatgagatggcggatatgcgtcgaaagttagccatgaagsggaactggatcgacttgaacaagcggaggacaccttgctacacctaataggtgccttgcgagggagtgagaatacacgcattgcacaactactgaacctcatccggagtaatgcttcctttgatgaaattg

SEQ ID NO: 600 - DNA, 414 bp, Aspergillus oryzae
ttcggcacgaggcggctccttcactgcacagaagaaagccatcgagatctcagccacagtcatcggcgacgtgaccctcgccacagtcatgcaatcagcctgggccatgacactagccaagctctccgcacaatccgacgtggtattcgggctcacaatcagcggccgaaacgccacaatcccgggtatcgaaagcaccgtcggaccctgtctcaacatgattccagtgagagtcaagttcggagaccgatggacgggtctcgacatcttccgctacctccaggaccaacaagtcgccaatatgccctacgagtcgctcgggttcagagaaataatccgaaactgcacggactggcccgattccacatttttcaccacctccgtcttccaccagaacgtcgaatacgaaggcca

SEQ ID NO: 601 - DNA, 770 bp, Aspergillus oryzae
gtgcggtgctgtaccgggatttcgaaaactacactcttgaccgtgccgggaagtttgtgggcggttgtctcctgacctttctaggcgtatatttcatcaccagtggcagggtccgcaatgacgacgagtcttcgtactctaatgacgaagaggaagctattggtctgctggcaggagagaggtaccgtgatagcgtcgacatgtcacctcctgcgcgtcatgtaagagtgcagaaaccttcacggattcctttggaaacccaggcagagaatatgcagtccccctccgggtcgctccttagtcacggtattgagggtattgacgagggccagcgtacgccccggggtgtttcatctgctgctccatcttctcccgttggttcattgaccgccgactctctcaccggacagtctctacagccttcccctcccatgcaccctaactctctcctaactaatccttgggctgatgctcatgagtyggccattgtgacccccaagtccgagccccaaatcccccaaattgaccgtccagtcactcctgaacagtcgaggccgacaacatctggctcaccggttcttcttcgtttcccaccagcgcctggcatcgaagacaataacctcaaggttcctgccgcctcgggaacggaaaccgcatcgccagggatccgaagtagtacggttccacagacgccaccggcacgccgactacggaattcgatatcgtcacgtttctcgcctggcccgctacttccgactatctctgccggg

SEQ ID NO: 602 - DNA, 328 bp, Aspergillus oryzae
  modified_base (292)..(292): n is a, c, g, or t
atatcgaattcggcacgaggcggatataaacaaaaataataccactcgatcacaatgaagttccttgccatttcctccctcgttgcagcagtctctgctcttccctctgtgcctgcccctaaggctcagaatgaccccaacgccttcggtgtcgtcgccgctcgttccgcctctcccatccacttccttaccctgaacgccgccaactcccacttctacctcggcggaaaggccgccacctactgccccgagaacatcgagaagctgggcgcctgcccccgggcaaggagancgctctcctcggcgacaagtaccttgacgtcgccgt

SEQ ID NO: 603 - DNA, 727 bp, Aspergillus oryzae
aattcggcacgaggtggacatcaaggacttgagcaactccactacgaagactatcaaacctcctccaggcaccaccgatatctactttggcggtaccggctgtctactctttgtcactcccaccaccgtcgctcttttcgatatccaacaaaagaagcagttggctgagttggctgtcagcggcgtcaaatacgttgtctggtccaacgatggcctttatgcagctttgctcagcaaacacaatgtgacgattgtcaccaaatcccttgagcaagtaagtagcttgcacgagacgattcgtatcaagagcgccgcytgggatgaagctggcgtccttctctactccaccttgaaccacgttaagtactctcttcttaatggtgacaatggcattatccgcaccctcgaccagactgtttatctcgtcaaggtcaagggccggaacgtctactgcttggaccgcagtgccaagcccagaattctggaaatcgatcctacagagtaccggttcaagctggcgctggttaagagaaactatgatgagatgctccagatcatcaagacatctagtcttgtcggtcaaagcatcatctcatacctgcagaagaagggctacccagagattgcgctgcagttcgtgcaggaccctcagacccgtttcgagctcgcgctggagtgcggtaaccttgacgttgccgtcgagatggctagagagttggaccgcccc

SEQ ID NO: 604 - DNA, 714 bp, Aspergillus oryzae
attcggcacgatggcctgtttcaaattcgtcaaagtttaggtggatttgccatgaattgtatagtccagagatcttctggacctttccatcgctgagcgctcctctttaacatcgtcatctcggacaagaccgggtagatgcagcaaaactcgagaggcgccaccgagcagaggagcggtaagcgcaaatcgaccggcaagaggaagctttctgatcaagaggaagccttacaacaacctcagcaccaacaggcgacgatttcggagctcctttcgcggaaccacacaacccacgggaaagagcatcatcatcatcttcaccagctatcctccccgacgagcaagcgtccccggctattgccatccccctcgggtctaactcctgcacaaggttcgcggggaccagcttcatccaacaccatgtacaatttctcaaacaaggaaacgaaaggcagtggatcgtttggtcaagttacgccgggcaccaatcctggaaatacagcagcaaggccccgctccttcaatgcaccagtgcgccaaagcaacttcactcctcacaccggtgccaagaaacttgtggtcaagaatcttcgggtgggttctcggttgaatcaagattcatacttcgagaagatatggggccagcttgacgccgcgctgaccgcgatcttcgatggcgggaaaccggagatctcgctagaagagttgtacaaa

SEQ ID NO: 605 - DNA, 860 bp, Aspergillus oryzae
  modified_base (17)..(17): n is a, c, g, or t
cgtctagccaaatgccntcccgtctcgacggccgtaccaacaaacgaaccaaaaaagtatgggccccggccaaccttctggcttgacgttctttgccctacggatgcagagatgcgagtkattgccaaagccttcggggtccacgcgctcacggcagaggatatcatgatgcaagaggcacgggagaaagttgaactgtttcggaattattattttgtcaattatcggaccttcgaccaagacccaaatagtgagaactatctgcaaccagtgaatatgtacgtggttgtgttccgggaaggagtcttgtccttccacttttctcagacacctcacccggcgaatgtgcgccggcgaatccgtcaactaatggactacttaatcctcagttctgattggatatcgtatgccataattgatgatattactgatgtcttcggcccgctgatccagtctattgaggatgaggtcgacgagatcgatggcatgatcatgaaaatgcactcccctgagccggtaatgggccaaagtagcaagctagaggacgatggggttgaagcttcgactacgctagctccaggtgaagtgcttcgaagggtgggggtttgtcggaagaaagtaatgggcatgtatcgactgctgagcaacaaggcagacgttgtcaaaggctttgcaaagcgctgcaacgagcagtggggaagtggcgccgaagtccgagattggcctataccctgggagacatccaagatcacatcatgacaatgacgagtagcttgacctactacgagacgcttctgtcccgagcacattccaactatttggcacagataaacattctcatgaatgagcgccaggaacag

SEQ ID NO: 606 - DNA, 729 bp, Aspergillus oryzae
  modified_base (109)..(109): n is a, c, g, or t
attcggcacgaggcaattacgatgagctgcagtcgcccagccaagactcgtacttcgaagacgcggaggccccgtcgaagtacaaagtgttcattcccaagcgcacaantattcaggagaatatatttgtcacccaattgacccagccgccgtcaccacctragatgattcgtggaccccgctggaaaaagccagagcccagtatcgcgagagccagcaccataccaacacagacgatcggggaaggaagagcagcaccgaacgcgcctgctgcaagtgtcgacgattacgacgatgaggacctgaatgctgctattgcagcgtcgctagaatcctttgagaacgagcaatcccggcctcccccttcaaacacaaaagccccgacacatcaaccgatcacacgctcccctacagtacaaaatgagggcgcaacagatacatcattccttctcgaagatatacccgacgatgcgttcgattcggatatatcattgtctccgccaactagagctcaacagcaacccgcgaccagacaattcgggcagtcctcaaaccgcccactcggtgtccgtcaaacctccttgttcgacatgacatcccgaaaccaaacagaccaaccgcctattggagagcaggtatggtctccaccacaaaaggatgagcccccgacgcagcataagctagatcacgacgctcttagtacctgggtctacccaacgaaccttggga

SEQ ID NO: 607 - DNA, 686 bp, Aspergillus oryzae
aattcggcacgaggcagacattcagaagttacacacatattcctctgatgggtattatagcccatgagcgtgcttcatatggcatattggggttttactttgcggggattccagcatgggctctatcgacgtgcttatcaatttgccgacaccaccctctggagcgcttgatttcctcattgcaaggcaaatttcctgataatgatgtactttcgaaacttgcgcggtcatcgttgacaattctgcattctgcgactcgggggacattgcttgtcctggctatacaatcctatgtgtattcactcttacaatcgcttcacctcgttcatccgcatggcttcccaggaatccggttcctggtacctttgggagaacttactactatgttattgccaccattacctgcagccttcacgttgcaatccctgggcgatttctgtttgaacttactgaaagcccctccacttctcgtctatatttatgtatatcttcgcccagttatagagataaggctttaccggttaattcgccgacgcctaccaaaaccaacccttgcagatgaactgtccatcaaagtggccatcgaaaatgacctcatcgactggatggccccaaccctaggtcgcagatcagaagaagagaaccgtcgcaacaatctttctttgcttgaagatctcatgtgtgaa

SEQ ID NO: 608 - DNA, 878 bp, Aspergillus oryzae
cggaacacgatacctacttataattgattgctaaagatcactttcttccatcttatagacgaattatgtcgaagagaaataactagccctcccatcatgacttccaaatcccgagatgcacaccatacctcaaccccgtcggatttccctccctccsggcctggctataacgtctcacaagcgtcgcttctggggcactaacccacttcctgttattcgacacattgtggtcagctggcgattggttaaccttctcatccatatccaccactccctctcagtattctctggagtctccgaaacgcgcaactcaacttgcgatcagtacagcgattyctgttttgccttctcgtgccgcyascccsggtcgtcgtttttcactctccaataaaggccggcccsgaaatccgccatctatcaccacttcccaccctcctgtttggtggggtaactggggttcgctatgcaggctaccaaagcccgctggggggcatggtttgggcgtcgccatcgttccggccagatcctvcatcgggtttgggctcagccgctkcctggtcttcagccgctccccaccccgcataacagtggatctyatgggttctcgggaccaacggggcgcacccagtgcccaccggcccgtggccacccttcagcccaatcccattcsggragccggctctggggcccagcctaaatcsgatttcgtttctggggcggaccaaagccttagcsgagggttycccggatcatkggtktctggtatattatcccgttcatttgcaaacaattcgcccgcccatttyccctcccttttttttctccccatcmaaaacccaccccaccacccaccccaggtcgcattcctccaggccaac

SEQ ID NO: 609 - DNA, 699 bp, Aspergillus oryzae
  modified_base (145)..(145): n is a, c, g, or t
tccaggtggactccgacgtctctgtgaacgcgaaacttctcactggtggtcttcttcctctatgtactacgatggccagtaatgaaatcttccaggcattttcgagtccggaaaagagtgacgctttactccacggacatagctncacggcacatgctgtgggctgccaggtggcagtggattcgctgcagaccatgatgcaaatggaaaacagtggatcctgggatgggtaccgccagactggaagccaacccggtcagactcccctgcgaccctgagcgcgcgggacagccccgacgtctggagtgtctggtcccatggcttggttagtgatctatcgcatgcaccatcggtggacggcgtgttcgcaattgggacggtcctcagtatctcgctgaaggatgtgcagggaggaggctacacctcgacagccgccagaggcttgcagcagcgattatcgacgagtgacggagagtttaatgtgcattcgcgtgtcctcggaaacgttctgtacctcatgtctagtgttacttctcaccggagcgctacgctccatcgaggggttgctgcgggaggccctcttgtagtaaatgcctgtgtaatttactgtacattggatacattgctgctaacgcctcaacaaaaatcaaaagggagatgagaaaggggaaataaatgcctgaatgagattaaacgagt

SEQ ID NO: 610 - DNA, 514 bp, Aspergillus oryzae
aattcggcacgaggcggggacatgacccgctgacttctacccagagttcctcttgaaataaagaggcaatcctaaataaaatggcaactcccgcaccttcaatagcccctgcgcccactccagctccgttggctcccgcaattgccgccaagccaaccatttcaccgtctcccggaccgggtacacccggatccgtcacctccaaggaatgggttataccaccacgtcccaaacctggccggaagcctgccacagatacgccgcctactaaacgtaaggcgcagaatcgtgcggcccaaagagcgttcagggaacgtagagccgcccgcgtcaatgagctcgaagaccaaatcaagaaaatcgaagaagagcacgatattcatgtggcagcgttcaaagagcaaatttcaaatttgtctcatgaagtcgaacagtgccggaatgaaatacatggtggcgcgaccgatgccacgctctggagaaggaagtctcggtcgaaagaagcgcgaaggaa

SEQ ID NO: 611 - DNA, 349 bp, Aspergillus oryzae
aattcggcacgagggaaacattcctgatccttttgcaagtgacgggtgtccgtttttgagttggtctgtcgtttccaccctcaccatcgcgtccacgggctgtcgtcattcatattggtcgaaacgtattgccgggtgtccacctgtctccaagtccttgttgcaagtcctgtacatactccgtaagggtcatccagcgttcgactgcataattcgctgcttgatcgtgattatttttgttcccctcctgtaagttggttcttccatccaagtgtttccctttttcccctcctatcattccgtctatcaaatttagcccttgatacttggattagaaatcaacgaaggt

SEQ ID NO: 612 - DNA, 749 bp, Aspergillus oryzae
aattcggcacgagggccgttccagttcttggttccagtccctctggtcattactcattacctcgtcttccatgctactgacgcctcgcattggtccttgattttatccacccgttgaccttttcaaaccttctgcctccttctccccaacatcgttatatcatcgaccaaccttaacgcattgtcgatcccttcttgattattgtaacaccacaacgcaaaaaggacacccccccagaacgcgaatgaagaacagctggaataatatcacgtacaagtccgacttttaatttccagtggtcataggattattcttattcctatcttttatttacttctttcaattatcctctttatacattattattattatcatcatcatcattataatttgttcctttgatctcctctctgtcttctacttttactttccgtcaccgcccatatctatataactatattacacaatgacagcacgccaatcatcacctacatcagacaactctcattcggacagcaatgttcgcaagagggtatgtaaggcatgcgatcggtgcagactgaagaaatctaagtgtgatggaggcaacccatgtggtcgctgtaggacagataatgccatttgtgtttttggcgagaggaagaaggctcacgataaagtgtaccctaagggatatgttgagatgctcgagcaacaacaagcgtggctagtctatgggcttcaagagctatatcgacgcaccagtgaag

SEQ ID NO: 613 - DNA, 840 bp, Aspergillus oryzae
gcgcaacctccctactcgccctctccggtctcttctacctcatccaggagaagaacctggattacccacagttctaccaaaagctctactcgctactcgatgccgacctgctccactccaaacaccgttcccgcttcttccgcttgatgaacactttcctcgcctccacccatttaccggctactctgatcgccagcttcatcaagcgtctctctcgtcttgcgcttaacgcccctccaaccgccatcgttgtgatcgtccccttcatctacaacctcctcaaatcccaccccacctgcaccttcatgcttcaccgcgttatcaaggacgaagccaaagccgaactggaagctgagggcatggacgatccgtacgattcagaggagccggatccggttcgcacaaaggccatagagagtagtttatgggagatccactccctccaacaacactaccatcccaacgttgccgcgattgcacgcatcatatccgagcaattcacgaaacagttctataaccttgaagatttcctggactatacctaccagggtatggtgcaagcggaactggggacagaggagaagcccatgaagcggatccctgttattgagtatcacatccccaagcggatatttaccgatcgaatgttggaagaggacgggggcgtggataccgcaccggggagtcttgtcagagggctatgggattttgcataagggttacgcgcaatgcacaggtagactttcattttcttctttagcgtatataattggactggtttgattaacatacaacgaatataagtttacaaattagaactgttgaaaatgatgaaatctt

SEQ ID NO: 614 - DNA, 827 bp, Aspergillus oryzae
cggcacgaggcggccatctgataatagtccactagagacaaagattttcattcccggcaccgtgccgcctccgtttctgaagcctaccgagagcagggatcagtatgggtttcggaagaccagtcaccacgtcacattgcaacagtacgaggcctggagtcgcccgtatgcagcttttgctaagagtcggagaattaaatggtcagaattgctgaaagagcatggtatgcccaccaccgaaccgaggacttttccgcccaaatcgaacaagatcaagcgtcttgtccgcaaaggcatccctcccgagtacagaggggcagcttggttcttctatgccggtggctacgagcacttgaatcgtaaccctggactatatgatcagcttgtcagccaggctatggaaagcccaagcaacgatgacaaggagcatatcgagcgagacttgcaccgaactttccccgataatatccacttcaagccggaatctactgacgggctcgggaactcaggcgctastcttggtagcagcaacctgaagcatggctcggtcactgtcgaaacgcagatgattcaatcgctccggcgggtgctctatgcattcgcgttgcacaacccccaagtcggttacacgcaatcactcaacttcattacaggcctgctccttctgttccttccggaagagaaggcattttggatgctgcatatcattacttccgtttacctccccggcacccacgagataagtctcgaaggtgccaatatcgatctatggatccttatggtcctcttgaaagattctacccgctaatctaaaaaaaaatcacggg

SEQ ID NO: 615 - DNA, 845 bp, Aspergillus oryzae
  modified_base (228)..(228): n is a, c, g, or t
acggagcagtattgatagtcggatgaatcagggaataagctcccttgccataaatcccgcttctccatatcacagcacgaacgcgtcgcagaatcgatcgtctcggggttacaacgagagcgtggaatatctatggatgtgaatatgaataatacctaccgaggcccccgctattctgggggacagcctctctcccctttgggcccacgggctggcgaacatcgtggnatttgcggctggccgcactgcacctgcaatttcgtcgaaccctcgctcggaaatttataatgcggaggcgcccacagctggtcttgcatacgctttcccagatccggatgttgcacggtccaattcaatctcttctacgaccgaaaagtcgaacgcacagttttgcagaaaaggaagtacggcggagtctttttcaagcagcatctactcagattcccgtttgcctcgtggtcagcatgaactccctcaaaatgtccaccatcattcgctacaacataaacaagttcgtggacttattggagaggccgacctacacagcggcagtacgccgtacagcaggacacctgagctgagggtgacacataagttggcggasggaaacgccgtagcgagatgaaggattgcttcgaggctctgcggatgcgtcttccgcaaagccagaataacaagtcgagtaaatgggagacccttacaagagcgattgagtacattggacaactggagaagatgctgagcaacgctcgccgggagaacgatcttctccgaaccgaagtcgacgaaatgcgggcccagcttaatcagcagcagcaacagcaacaagctaatgggcaatcgcg

SEQ ID NO: 616 - DNA, 755 bp, Aspergillus oryzae
  modified_base (2)..(2): n is a, c, g, or t
anttcggcacggggtcaaaatcccccgcgacggtgatctttctccagacaagtgaagctcttctacagcgataccccggctaatctcatatcatggctcctaccgagtccaagaagcgcttggcgttgcaatcatcgactttctgggctccagtttgaaggatggaacccttactgctgatgacgcagaatcgatcgaaatcgctcagtcgtgcatcgcggataccttcaaggttgacccttccgatgaggctgctgtgaaggacgctgtcggcggtcagtctcttgcaaacatctatagtgtctacgagaagctccgcaacaagggtgactctgctggcgccggagcgcagaccagctcgagccagaagccccaggctggtgctcctactgccgagtctgacaagctgaagtcggagggtaatgctgccatggbgcgcaaggactacaactctgctatcgatctctacaccaaggctttgtccattgccccctccaaccctatctacctctccaaccgtgctgctgcctattccgcctccggtcaacacgagaaggccgccgaggatgccgagctcgccactgccgtcgaccccaagtattccaaggcatggagccgtctgggtcttgctcgctttgacttggctgatttccacggcgctaaggaggcctatgagaagggcatcgaagctgaaggtaatggcgggcacgaggccatgaagagaggtttggagacctccaagaggaagatcgcgg

SEQ ID NO: 617 - DNA, 827 bp, Aspergillus oryzae
cggcacgaggctttggtttcatttttatcttttgtcttttatttttttttattgtgcttgctaataagagaccacagacattggcgaacgggtatcttcgctttcaatgaagcaggaccgcttgttgtgtgctgcagctctcaggttaaatattccaccggcttatgacaagtatatggaatggggcttctttgatggtagcgtgagattctattccgcggacagtcgaaagcttctcggacacttcgaacatcttcatattggtcagctatcagctgcaatatttgcggattctcgtacgctagttacctcaggaacagactgtaccgtctcgacatggacatttacctctacagcaaagtctgtagatctacaacctgcaggatcactcttcggacatcgctcgcctgtaactgtattagcagtctcgcggtcatttagtgttcttctctctgcgtctactgatggccaaatcatgctttgggatctcaatcgccaaaccttcgttcgagaacttccagccaaaggacatgtagattgtgcgagaatcaacgatgtgacaggagagatcgcagtctgtcgcggaagtcgtatcagcctctacacactcaatggagcactattgctagaccaggctgtgtgcgagtcagaggatgatcaggtgatgtcctgtgtcttctacgagggtgtaaacaacgagtggcaggagcgagaacttctcttcactggtcacagacgaggcgtcgtcaatatatggagtaaaatcgttcacaatggacgctttgagtttgaattgattcggcaacttcatcatactgatagcagtc

SEQ ID NO: 618 - DNA, 556 bp, Aspergillus oryzae
cttcatactactcctccatcggcaactggctccccatcatgcagaactacgagaacttcaagccctcctacttcgctahcccacccacccagctggtccacgccctgcacaccaccctgtcccagatcacctcccggcccatggctgagcgcttcgccgtgcacgcccaggcctcggaccgtgtcaaggctgctgtcgccgagctcggcttgaagcagctggccgcgaagcagaaaaccaggcccacgccatgacggccatctggctgcccgagggtctggccccacccgacgtgctccccgggctgctgaagcggggcgtcatctttgcagcgggtctgcacaaggaggctgcgaccaagtacatccggttcggacacatgggcgtcagtgtctccgatcctgcccgcaaggacattgacaacgctattgccgctctgaaggaggccatggccgaagccaagcaggccaagggactgtaaatgatgataccttccatgtttcacgaacttaagtagaaatgaaaataaaaaataaaaaaattaatatttcatgtt

SEQ ID NO: 619 - DNA, 819 bp, Aspergillus oryzae
aattcggcacgaggggctaatgaccaagatgctctccgcagacgagagaagagacacaggagggccgagtcgcccaagtgtccgcccgggggctgctatcgaatacctcaacagggtcagctccaggtcatgataaagaatccgaacaagacagctgttaaattatttttgattccatacgatctcagcgacatggaacctggaaccaagacatttattcggcagagaagctattcagcgggccctgtcatcgacatgccgttgactgcgcggaagaactacgggaccgatcgtccagaggcatccttaagctcatcggaggatccaaatgacaagcccaccctgaggtacctgatacatttgaacatatgctgtccgtccaagggccgtttctatctacactcaagcatccgtattgtttttgctaatcgagtccctgacggcaaagaaaggctccggaatgagatacaacatccagagccccgatatgcgccgtataagcctgctcgtgatgtcaatcagacgcagatgaatacgaagctagtaacggatagaggatgccgaagaccagctgctgatcaaggatccattccagcttcattgcccgatctcccttccccgtgtgggcgggagggccagcctgcaacaccaatgccagtyattgaagcgcaggccgtctctagtaacttgaaggatgcccgctcggggcagcgagctcctcatccgttccggcccattccgtccctaarggaagaagtgcttyccctgcatgaccatgatgcagccgaaacctatcaaactggtagtggatcgtatagt

SEQ ID NO: 620 - DNA, 904 bp, Aspergillus oryzae
cggcacaggaatttttcctcgtctccctgtgaaactaactcctcggcatattggctcgcaaccccgacggtattcctgcaaaggtggggatcgtgcaatttcctctctaactggagaataatttcttccagaaagtgtctctcccttgtctcattactagacttcagccgtcgccttcatcgccgctccgggtgtcaacctgtagtcagacgattcactttgacagccctatttctaattaacggcattcaatttcttgacctttaaaaagctgcttccactcacctatttttttgccattcgtctgatcctggtacttccccccttgctttccgatctgcccgttcccgtatagaaggctaggcacccatttcaaacttcacccggttgttcgatagtcccgtgtctggcgcggaagggacatcttgcaatcatgtcatcgggaccggtgaaatacgtgcgatatcttctcttcgccgctgcgggtttggcagttttctttttcctctctagaagcgcaattccaatccccgattccattggctcgaaattgaacccggccagctacaaagataactctgcctcttccccgtcctctcatgacaatgctgctaccccgaagraacataccaatgacgcttcagggagcgtaggcacccctcagggtggtcgggtcaatgctacatttgtcacgttggcgcgcaattcggatgtttgggatattgcgaartcaatccggagtgtcgaagatcgcttcaatcgcaactaccattatgattgggtattcctgaatgataaggagtttgatgacgaattcaaaaagatcaccacggtctggtttccggkaacacccattatggggtkattccaaaggraccccggtcgtaccctgagtggatcgatc

SEQ ID NO: 621 - DNA, 685 bp, Aspergillus oryzae
ggtggaattctccttttggataatggaaatcgattcgtgaacgagcttgagacccgcgagcacattacgaatgtcatcatgagctcagcgaaaccactggagacagatgcgcgtcaatgggatgttagccttctcttggacgaagggaccgctgccgccttaggctcgcatatgggattctatctgtggaaagggctaatgcgtaagacaacggtgcacgaacttgatccaccagtgctcgaaactatcaaaacatatgcagacattgtctcaggcaaacaacaagatgagtttggccgtgcagctttcggaaactggactctgaaggatgtgacaccggattctgtggtctatattgggaaggtcactcctgttacccactttacgatgggaggagctacaattgataagcgcagtcaggtgctagataagaatggagcccccatcaagggtctctgggctgcaggagaggtcactggtggcctacacggtcagaatcgcttgggagggtcgtctcttctggagtgtgtcgtcttcggaaggatagcgggcaatgaggccgcggctttctataagaagcactatgcttcctgataatgattcctaggtagtggagttttatttcttttctagttcttactcatgagcgatgattattatacatgcagaatcattactcctttgt

SEQ ID NO: 622 - DNA, 866 bp, Aspergillus oryzae
aattcggcagaaagggaaaaacaataatctaaaaacattttattaacccagtcaaggtattccaagaatccatctattvtttccagcaatccaattcagttvattaccccaccatcccaatccgcaacaagccaagtactaagaagcatcagcatcagctaacttaccgcaaaamtttcgagcaagcgcatcaatcccaatcccagccatgtcttctgctgaggctgagcgcgatccgaaccccgccgaactggccgaccgcgagcgtgaggaaaaggagcgcaaggccaaggaagacgccgagcaagcgaagtgccatacaagtggacgcagacaatcaaagacgtggacgtgacgattcctgtgccgggaaatcttagaggaaaggatctggatgtggttttgactaagactaagatcaaggtggcggttaaggggcaggagcctattatcgagggagatcttcctcacccggttatacttgacgagtgctcatggacgctggagacgacatcgcaaccgcccggaaaggaggtggccgttcatctggacaaggtgaataaggtcgagtggtggccgcatgtggtgacttctgcgcccaagatcgatgtcagtaagattacgcccgagtcatcgaagttgagtgatctggacggtgagaccagggctatggttgagaagatgatgtacgatcagcgccagaaggaaattggtggcgtgascgcgatgagcagcgcaagatggatcttctgaagaagttccaggcggaacatccggaaatggacttctccaatgcgcagatcggctagttgatgggacattcctagatgtgtatgaagtaatgagcattagtcttttccaaaagg

SEQ ID NO: 623 - DNA, 833 bp, Aspergillus oryzae
  modified_base (138)..(138): n is a, c, g, or t
  modified_base (140)..(140): n is a, c, g, or t
aattcggcacgaggaaagggaatgcacagaggaatgcgcccagcgattgaaacagtggattatgatgactccgtgtccagggctatcagctacgcatgcggaaacgccattgtgtgtgatgacttggcgacagcaatnantctctgctacgaaaaacatgtggatgcgaaggccgtcactctcgacggtacagtgatccacaagggcggcctgatgactggtggccgaggccctcagcagaactcgaagcgctgggaagattccgaggtagagaatctattcaaactcaaggacaaattgatggccgaccttgccaatctgcccaagggccaccgccggggtaccgaagaagaaacgctacaaggagagctggttggtcttgaacagcgcttagcgtatgcccaagaggagctcaaggcgcttgagaggaatcttcaaagcaagcacactgaattggactttgttaagcgccactcgaggaggtgaagccaagtacgtggagaagcaggaagaactggcggacttgaacagacaatcacaacatcgcaagaaaccgtcagcaacgttgaagatgaggtctatcgtaaattctgcaagcgccttgggtacagcaacattcgtgaatatgaagttcaacagggatccctgcatgaagaggctgcccagaagaaacttgagttcacaacccaaaagagcagaattgagaatcagctcagttttgagaagcagcgtctccaggccactcttgatcgaattgccagtctgcaaactcaacaccagcgtgaccaggatatgatcgaagagctcaaacaagaacaagagggcattcgtaa

SEQ ID NO: 624 - DNA, 792 bp, Aspergillus oryzae
ggttcgacattcagatcttccgcgaggacccgggcatcttctactcgattgcgaaggatattcttcctactgagaagaaatactcaccgactcatgggttcattcgactcctgcaggataaaggaaagctcttgaccaactacacccagaacatcgataatatcgaggcgaatgcaggcattcttcccgagaagatcgtgcagtgtcatggttcgtttgcaacggccacgtgtgttaagtgccagtataaggtgtcaggcgatgcgctcttcgaggacatcaagaaggggaacgttcctgaatgcacttcctgccagaaggatattgaggaagacgctttgaggccacaggggcaaaagcgcaaacgaagcactaatggcacacacaagagccggaaatccgatggggacgagagctctgaagaggaagactacgaactccctacccccggggtgatgaagcctgacatcaccttctttggcgaagatcttcccgatgagttcggacagcgcctgattcgccatgaccgtgacaaagtagatctggtcattgtcattggtacttcgttgaaagtcgcccctgtagcagaagtgccgggcgtgctgccccgtcgtgtgcctcagatctatatctcccggactcctgtgtcacatacaggctttgatattgatctcttaggcgattgtgatgtggtagtatctgagctctgtcgacgggctggatgggacttcaagcatgagatgattccccccgatgagaaggtcgaaatcactcttgctgaaggatacgagt

SEQ ID NO: 625 - DNA, 782 bp, Aspergillus oryzae
aattcggcacgaggctggaccttctggcgcaagaatgggggtcagttcgatccagtgctgttcggagactggcgagaacctcaagatgcaattttgtggcaggacttcggtaccttctttgacgatgccttccccttgccggatctgggaagtccatctcacaattttaatgaggtggctaacccgcagccaccgaagaaggatttgattgctgaaatcgacaacaaattggatgaggaggtggtgcctggggaggacaaatcacagatgttgtcttgcaccaagatttgggaccgcctgcagtctatggagaagttccgcaatggcgaaattgacgtcgacaatctttgctccgaattgcgtacgaaggcccgctgttcggagggtggtgtagttgtgaaccaaaaggacgtggaggatatcatgggtcgcgtcaaataataatctttgccatctgactataatgcacaatcgcgtgctgcagtttttgatacccatatctactatgatacaacactgcaactgacgtcatgacgagcaaggcatctgggcactatcatactcgcaaaattgagtcacatacgctctggtatatgtaccatctactttcattttgggatcaacattatccaacgatatgtatttgtgaggtatctgtctcttcatgctttattcttcctttttctcttcggtctttggtatcatacaaggcgaacggggaggcacagttcggttataaactcattactggtctcggcttggaaagcatgtacaccgatgat

SEQ ID NO: 626 - DNA, 265 bp, Aspergillus oryzae
gaaggactttaactttttctcgcgcattcgcgctccctctcccggcctccgctctggtcagatcactcctcttgaggagagggatcctgacgcctatrtcgaacggccatctcamtatcgtaggcggtattctctccacccttctgaagctctatgatmaamcttctcagcaaaactattctcgaggccggtatggtcactcacgtcaaagcagtacgtcaggccttagcgggcgaggcttgtccccggaccctggttggaagcc

SEQ ID NO: 627 - DNA, 830 bp, Aspergillus oryzae
  modified_base (185)..(185): n is a, c, g, or t
  modified_base (187)..(187): n is a, c, g, or t
aattcggcacgaggaattaattacctagcttggtgctgctagaagctacctggttactggcacaactgacattgagcctgacaagttcaagttaaacttaattgtatcgcattctcctgccctcgcaataaatttgccggtacccctcagcggaaacctcgaggcaaatttatttgcgaagaatntnaactgttcaagtatcacgtaaaaaatcagttgaatggccttcgccgcacccgcgattggttcgaccttactattctcacgaattttccgtccgttctccaccagcgctccgtttctctctttaacacctgaatctgcatcgcgcaacatgtccaacaacacgcaaatcgccactctggctgctggatgcttctggggcgtcgagcacctctttcgcaagaacttcggcaatgggaaaggtctcctagatgcgaaggttggttattgcggtggagagacggcgtcgccctcgtatcgggctgtgtgcaccggagataccggccatgccgaagcggtgcaagtgacgtttgatccctccatcgttacctaccggtctcttctggaatttttctaccgcatgcacgaccccaccactttgaaccgccagggacctgatgtcggcacccagtaccgtagcgccatcttcacccacggagacgagcaggagcagatcgccaaggatgtatcggagaaggccaatggtgggatgcggaggagtaccaccagctctacctgaacaagaacccaacgggctatgaatgtcctgctcactacgtgagaacgttcccgcctctttctgcctgactggaggcgaagatatgaga

SEQ ID NO: 628 - DNA, 881 bp, Aspergillus oryzae
aattcggcacgaggatcctgttgcgtatacaaaacaccacgtctaaatctcacaatatttaatactgtctttgcgccaaattgttatgagaaagtcacgacccctttgcttgtatctgtcaaagtccaccccagccaccatgcagcggctttacgctcttgctctactgtcatggtgcagcgcacaagtccaggcaaaggcagtctttgctcacttcatggtgggcaatagtgccgaattctcagataaagaatggaagaacgacattcaactagcccagaacgcccacatagatgggttcgcgctgaatatggcccacaacgagatgctccccgcgacccttgacaaagcattcgagcaagccgaagacctcgacttcaaactcttcttctccttcgattatgctggcaacggatcctggcctaagcaagacacgatcgaccttatgaacaaatataaagaccaccccgcctactacaagtacgactcgaagcccttcatgtccaccttcgagggcgcaacgtccaaagactggcccgatatcaagaaacaaaccgactccttcttcattcccgacttttcgtcaattggtcccgaagccgccgccaacagaacatacgtggatggactgttcagctgggctgcctggccaaatggccctacccgcatgaacacctcagctgatgatgcatacagacatgcgttgaatggtcgcccgtacatgatgcccgtctcgccttggttctacactaatatgccgggctttgacaagaattgggtatgggctggtgataatctgtggtatgatcgttgggaggaggtcatttcattccaaccggagttttgttcaaatcatttcttggaatgactacggcgagtct

SEQ ID NO: 629 - DNA, 517 bp, Aspergillus oryzae
  modified_base (469)..(469): n is a, c, g, or t
ttattccggtccctaccgagtacattctttatttcacgtcactctttaccttcggggagaaagtctaccaacgatataaaacaaaaatccaacctttaatttcatattcgccgttctttggacagaaaatttaacaaataaacaaaatgcgtttctccgtcgctgctgttttcgccgctgtggccgctggtgttgtcgctgaggaagtgcgcactgttattgttaccgaaaccgccacttactgccctaagtccaccgatgccatcgtgtttctcccaccgagtctatcagcatccctgctggctacaccaccactcgtcctctcatcacctcgaccgtgactgagtgcaacaagtgctccagcaccgcccctcctgctggcactcccactggcgtcaaccctgttggcagctctacccccagctctcccgttattcccgtcgttccaaagcgttcccggcgtccccancagctccaaggctactcctagcagcagctccatcatcaagggccccag

SEQ ID NO: 630 - DNA, 625 bp, Aspergillus oryzae
  modified_base (373)..(373): n is a, c, g, or t
aattcggcacgaggatcctcttgagttcctgcagacccaggtattatcctggaagacacctttaaattttkcggccgtcttgaatggccgttacgttttgataacaaattgagaaggaggtcatggccaatcgcctgcctcctctgaatgatgtggccccttcctcggccctcgactcttcctcgggaacccgggagaccccagtcgcgaccgacaccgttaacttggacacggaatatgtgaaactggaggattctcctacgccatccgcgttgacgcctgcagatgcagatgcagaaacaccggcgccagacactggcgggcctgcggggcggaaacgcaagttgaatagtagttcccgcaagaggtgtanccaatctcactcccgagcagctggcgaagaaacgagccaacgaccgacaggcccagcgggaatacgcgagagaaccaaagctcatatagattcgctggaacaccgcgtccgcgagctgtcttctcagaagccattcttggatctgcaggcggcgttgaagcagaatgaagccattcgagccgagaaccgcgacatcaaacaggggttgaaggggatcatggatgtcattcagcctttagttggaaagcacga

SEQ ID NO: 631 - DNA, 483 bp, Aspergillus oryzae
  modified_base (324)..(324): n is a, c, g, or t
ttcggcacgaggcttggaatgaatggctgcagatgcctatgtcactcaaggatgccccatacaagtgccagcttgcgataaccatttgggacctgtccccatttggcggtgaaggtgcgcagggccactatgtcccattcggagggacaacaatatctctgtttgatgaagagggtaaattgaagatggggaggcagaagtgcaaagtatatcgccacaaagctgctgatggattctcttcgacaactacaccttcaatcccctcaacgaagcgacggaaggccaatgctcccgatccgctgggcccttctcccgaggagatanagttggaacgagtggaggtgctgattaagaagcacgaaatgggggaaataccacggatcgattggatggaccagatggtctttcgtcagcttgagaagctgaaaattaatgctgaagaatccgcaagaagcgcgccatccttctaaaatcgacgaagca

SEQ ID NO: 632 - DNA, 767 bp, Aspergillus oryzae
  modified_base (457)..(457): n is a, c, g, or t
  modified_base (491)..(491): n is a, c, g, or t
ttcggcacgaggcagaaatatatggtggaatccgcctggaataaaggcgggcgatgcacccaacggcatatcacacccgatcagggagtcgttacgagcctgcacctcaccccaaagtatattgtggttgctttagacaacgctaagattcatatctatgacaccaatggagataatcagaagacgttgcaaggtcatgtgatgggtgtatgggctatggtcccctgggatgacatactggtgagcggtggctgtgaccgcgaggccgtgtctggaacatggctactggagccggtatctaccttttgcgtggtcacacgtcaactgtgcgctgtttaaaaatgtctgacaggaaaacggctatctcggggtctagagataccacgctgcggatatgggacctagcttcaggaacttgtaggaatgtcctggttggacaccaagctagtgtccggtntctagcgattcatggggatttagttgtttccggnagctatgatactactgcacgcatttggagcatctctgaagggcgatgcctccgcactctttcgggccattttagtcaaatttatgcaatcgccttcgatggcaggcgaatcgccaccggtagtttggacaccagtgtgcggatttgggacccgcacagtggccagtgccatgctatcctccaaggccatacatctttagtggggcagctgcaaatgcggggtgacacactcgtcactggcgggctcggacgggtctgtccgtgtttggtctctgac

SEQ ID NO: 633 - DNA, 809 bp, Aspergillus oryzae
aattcggcacgaggttatctttgtctcatatactgagtaggtctagaggcttactattcttgtcactttcccccgaatcttggagttacatccgtctgtattccaaaatggcggaattcgtgcgtgcccagatcttcggcacgaccttcgagatcacgagcaggtatacagaactgcagcccgtgggaatgggtgcgttcggcctcgtgtgttcggcgagggaccaattgaccggacagcccgtcgccgttaagaagattatgaaaccttttagtaccccagttttatccaagagaacataccgcgaactgaaactattgaagcacttgcgccacgaaaatatcatcagcctaagtgatattttcatttctcccctcgaagacatctatttcgtaaccgagctcctgggtacgacctccacagacttctcacatcaaggccgttggagaaacaattcatccagtatttcttataccagatcttgcgaggacttaaatatgtgcactcagcaggcgttgtgcatcgcgatcttaagccgagtaatatccttatcaacggaaactgtgacctgaaaatttgcgattttggtctcgcccgtatccaaagaccctcagatgacaggctacgtgtcgacgcgatactaccgtgcgcctgagattatgctcacatggcaaaagtatgatgtggaggtggacatctggagcgccgcctgtattttcgccgagatgctggaaggaaagcctctgttccccggcaaggatcatgtgaaccaattctccattatcacagagcttcttggtactccacgg

SEQ ID NO: 634 - DNA, 702 bp, Aspergillus oryzae
aattcggcacgaggcttcaacgggaacacggccttaatgatgtcgcagataacatcgaacaggccacatttgtttgaggacgacttacccgaaagtgcgaacacggaacgaaagatcttcgcagaatgggcatcttcagttccgttcgagaaaaaagcggatgattttcaaattcacaattcaaaagagttagacaccaagatagttcccttcttaaggtcactcaaccttcttgacaaggggtattcattggtacagataccggggccgaaatatgcgccattccaccacagcaaaggcgatgcgtttatcattccaatcgagatacttggcaatagccccagcgcctcgggaaagcccctccaagaaggaaagcgactatatatgaaggtaaaccaagaagtaaagatcgaaccaaagttgcgcctacttttcatcttgctctagcggacagattgtacgaattattatgcgggaatagtggggatggaagaaccctcatgtggggtaggactttgtcggaaggtttgagacggcctagaaacatcacttgggaatgaagaacacagaggttgacgaggcaattgtgattgagctgaaacactggaaggacccctggaaaatagactgagctcgtgtgactcactgtatggattggggtttccagtcaagacgcaattagcattagttgtatttctagag

SEQ ID NO: 635 - DNA, 844 bp, Aspergillus oryzae
gcgacggtatcgataagcttgatatcaaattcggcacgaggattagatattaagggctgtcctcgcatcacaatgttcaaaagaggcctgttttctagtcttgcttctctcttcctgcgcactgtcacggcgttggctttgcagcgacagattctggaacttttcaggtgcttcagcagccaaacctgaacttcaccaagaacgctgctgctattcatttctctgatttggcaaaatacaatgtcactctcaattctacctacgcagtgactgccattacggcagcaaagcagtctggaggcaccccggcaattcctctgatttgggaaagtgaatacgtgtgtcctgtcgtaattggaggacaaactgtttacctcgactttgacaccgggtcatctgatctctgggtcctctcaaccttgacaaacgttgagggcatcggtcacaagatctatgacccgaaatttagcccttcctccaagttactgcctggagcgacatgggacataacgtacgccgatggtagtgggtctggtggcatcgtcttcaaagaccatgttgtaatcggaagcagcgttgctatcgaccaggccgtggaggtagctttattttgttctcaccgcaattcgccagcaatcctttcaacagcgggcttctaggtctggcttttagtactatcaatactgtttctccggtccaccagttgacttactttgagaatatcctaccaaccctcaaagaacctttgttcacagcagacctccaacatgggcgtccaggaacctataactttggctttattgacccgccgcgttcaaaggggcccatagcatggaccccgtta

SEQ ID NO: 636 - DNA, 639 bp, Aspergillus oryzae
cacaattacacaaacacagtaaacaaaatgacatccccccaaaccctccaatcaacctaccgcctaaactcagcgccacgagatccccatcctcggctacggcgtctatctaatgtccgtctaacgctctccccaagatatcctacaaactaaccaaaggraaaaccaaaagctccccatcaaaaaccgaaattcccgtcctagaagccttgagcaccggctaccgccatgttgactcagcaatcatgtaccgaaacgaaaaggcctgcggtcatgcaattgcaaagtcagggctagaccgctcccagatcttctttactactaagatcccgcccgagtctatggggtatgagaggactaagcgggccgtggagagtagtctccgggaggcgggggtggagtatttcgatctaatcctaatccatgccccctacggcggcaaagaagaccgtctaggctcctggaagcactcgtcgaagcgcagaaagcggggaaaacgaaatcaatcggcgtctccaactacggaatccaccatctcgacgaactcgaggagtacatccagcaaggaggcggcgggaggatcgacgtcggccaatatgagatcatccgtggtgcgcgcgcgaggatatcgtcgagtgg

SEQ ID NO: 637 - DNA, 629 bp, Aspergillus oryzae
aaagattgaatagcactaatcgtttactttacagacaagcagaagccgaacgtcgctctgsattctgaaccaaatcctcgaacccgaagctgccgaccgcctgggccgcattcgcctcgtgaaagagtcgcgcgctgtcgacattgagaaccgactgatcatgttggcacagacaggccaactgcggcaaaaggtctcggaggatcaactcaagcagctcctgaatgctgtggctgagaaccagcgcaaggatgaggaagagcataaggttgtattcagtcggcgtaaaggaggctgggatgatgacgatgacttgttggatctgtgaaaagttgaattgcaaaacagcgaatgccgtttaagcctaaacaaactggtcctaggcgtttgcggtcggtacatggtgcaatccttcgacagcactcaattccattaatattcaaccacgtcttaacaccggatgcttaactgacacaaggatcagtttctttccagcatttgtgataccaaacaccccgcttgcaacaataatctaatgtccgttagatgaagggaagagttcatgactctatcgaatacacggctaccggaggccatctaataaataatatacacattaacaaccccac

SEQ ID NO: 638 - DNA, 1101 bp, Aspergillus oryzae
  modified_base (12)..(13): n is a, c, g, or t
  modified_base (44)..(44): n is a, c, g, or t
  modified_base (625)..(625): n is a, c, g, or t
cggcattatkdnncggaagccatatttgcgactacgcatgagtnggtaacggttggacgctgaaawttgtttattaggcatgcctcctgggaaaatatacactgcaagactgcgggatctttgctatccctggtgctcgagaattcgagtagccgcaattagatcgtctatctcgtcgcaacgtactatatgcacaacatctactgctccctatcaggattccgctccctgctcagtgatttccgttcccgcgaccctcacaaactgtcgctatgctcaacgtcatccgcggacggttgccgcatcccctggtccttgttttcagattcgccgggcttcttcgcaattttcccgagtggtcatgccccgtcccgggaccactgctgagacatacgtggcgtatggaatgacacaaaagctcttcgaggcctgctctagccaggcggattatagtataccacaggcaacccaaaagggagcacaagtccctaaaactgaagctggtgaagacctcggagttggggaaggatggtggtatgaagaccttggcctcatacccaccttctcaacttggtctcaaattacttttttgcacatgtaccttctgactgtccgcttgcgagtnctaccgtcgtacgaaagctttcaaacttattcccgacatcttatagaccacttctcgcataatgctgaacatcgcatggacgtcctacatgggttcacgagtcgtacaatccggaacaagtttctcaaggatctcttcatccagtggagaggtgttcttgcagcctacgatgagggcattgttaaaggagacgccgtactaggtgccgctatctggagaaatttatggaaggcaagccataccggaccagatgggaaggagcyggactggacgaaaatagctcgggtcgtcgcatatatgcggcgagtaacttcagagctttctcaggtgagcgagggggatctcatctcccaactatgccagcaaactggcgacaaacccagcatttttcggatactctgaactcgataagagactagtccaaggcaagcgataattgactgaagaccttgtttgtaatgactttttttcgcgcg

SEQ ID NO: 639 - DNA, 548 bp, Aspergillus oryzae
ggaaaacaagcaagacataatattatcattcatccttattccaagcttgaaactcagactgctgctccaagatgcgtttcactgcagcttcactagtgactctcgggctacttgcctctgctctggcttttccggccccggccaactctcttgaagttcgtgagccatccaaggagaaatacgatgtctacgatgttcccgacaagcggtccaaggagaagtacgatgtctacgacgccgtcgacaagcggtccaaagagaagtatgatgtttatgacgtcctcgacaagcggtccaaagagaaatatgatgtttatgacgcccctgacaagcggtccaaggagaagtacgatgtgtacgacgtccccgataagcggtccaaagagaagtatgacgtttatgatgtccccgaggaagagtaaagaactcggaactctttcatgacagtggagagagcttgttctcctgatgtgcctttatctcatcctttgttgtcatgtcgatctgtagtagcctcggaatgaaatatgaacaatcctttatcaagg

SEQ ID NO: 640 - DNA, 561 bp, Aspergillus oryzae
ggatcggcattatggcgggaagaacaggaaccagccaagatagaagacatgcacaaatccattttaacgcgcacaacatatactaaatctcatccgtaaacccactcctgacaatacacacgacgcgcgcttcaaccacaatcgacagcctacgagcaatgcctcgtcacaagagactagacccgtacaccgattgcctacccccagtgtccctccaatctgtatcaagaaaaatcctactctacaatgtcatcgtccamcgagcaaaccccccaacaacaacatcaacaacccgagaatgtcgctaccgactccaccaccgaaaagaaaccagagcatgtacctagctcttcgccgacgcacagcagcgccgatcagacacagcagcttgatgttagcggtgatgggtcgacggtgaaattggatcacttgggtccgtwagtggwcaaccaggagtgggacgttatcccgcgatcgcgaactgggcgcagatgacggagattgagaagaaaaatacgttgcgggtgctaggaaagagaaacaagcaacggatggaggcac

SEQ ID NO: 641 - DNA, 318 bp, Aspergillus oryzae
tggcggggggcagatcttgtgcgtcttgtgtctgttgtgttactatcgttttgtagatggtccactgtctctgcgatgggattggccggatttcattcattccatcgagaaagaatggtgtaggacaatacctcaccttttaacccccccacgacgcgcaatccattgaaccctgggatgaggggaatatctgcacgctgtgtgtgtaaagtagtacttacttcggaggagttgatactatacggatatgatctaggaacttgaagctacctgtcagataggtcttgcccaaagcagatagaagctccagtccgagcc

SEQ ID NO: 642 - DNA, 614 bp, Aspergillus oryzae
ggactcatcgactttatcaatcttccattgaccattccaggcttgtcgcccactcatataatcttctttccccggtctcacatcaatcacccttcacaccacaacaccatggacaccgatttgdgcgaagtacaattccaaatgggtcgagttccatattcgggaccacctgaaggacggcgagatctccgtgcggcacaccgtcatcgaggacggcgaattccaagaccccaacaatcgtagaaaatcgatccatgaagacgtgatcgacgagatcgtgatcccttccgacggcattggcgaaatctgtgcccacggacgtagaggcagtgaaggtcgtctggacctgttccatggcaacgacaagatttgcgaactgcattgggacgatcgtgatgggagacgcgagaacctggtcgagatgttggacgaaagtgacaaatacaggatcgagcatgggggatggagcccagaggccaacggacctctgggccatgtttacgttgacgtgtgggctaaggacaagagcaagtggtctctctcccctatacgtgataccgtagtcttttacgggtgtagtcctttttttcttttcattatgagttcaacttttt

SEQ ID NO: 643 - DNA, 701 bp, Aspergillus oryzae
  modified_base (139)..(139): n is a, c, g, or t
  modified_base (259)..(259): n is a, c, g, or t
ttcaagcccccgccgatttcacatacctttatggcaacactgtcgctctctcacgccaaaaactcgaccttcatttaccaccctctgcaaaccctgaagatggaccggatccaatgcgcgaggggtccgcgagctagtngatgagtacatattacgtacctttacatcggcttcctcctcgataagtatcaacggccttgactcttcatcgcctcagtttccctttccggctgctttcactgcacctgcggagacagtngagtacgaaccatatgacgggcatcttgcatcacgtgtgatttcgctctacgcacagttagaatcgctcacgacgacagtgcacagttaagacgggatgcgccgcagcgtgcagcagagatgtatgcagcggaactgaagaaggtgttagaggaggacgaacatgatgacttggaagatgaggaaattctggaaaatggagaaaacaatgaaaggcaaacaacagaagacgttgacatgcctgatgcagaccagaaccaggagcagacttccagcaatggtcccagtacgaatggctcactccggagaacagcgaaaacgagtggaaatttacatgtgccccttggcaccgaccatgaagcggaactatggcgcactggagagatggcagawgtatatgaggatacactacggactttgcttcgactccagggtgaggctgt

SEQ ID NO: 644 - DNA, 841 bp, Aspergillus oryzae
  modified_base (155)..(155): n is a, c, g, or t
  modified_base (401)..(401): n is a, c, g, or t
  modified_base (558)..(558): n is a, c, g, or t
  modified_base (664)..(664): n is a, c, g, or t
ggggttgttttgggtccgcggagaaggaaccttcctcacagccgaggagcaaatatccgtgatcaaggcattcgtccagtccgtcgacaataagatccccattatcgcaggaatcacaggagagggtacggggtggccgcactcgaagcgasagncaaagggcgctggtgcagcggctggtctactctacccatctcacggatggttgcgctttggataccaggacggcgcaccccaggaccgctatcgacgagtctacgaatcagtgggcttcctttgatcctcttccagtacccagacaacacgaaggcgacctacagtctgaagaccatgcttgatatttcagcacaacccggtgtctttgctatgaagaacggcgtccgtaacatgcgccgttgggntacggagattccagtgattcgtcgcgaacggcccgagctgcagatcttgagttgccacgacgagtatctcttgcatacatcatttgatgtggacggtttccttgtcggttatggtaacatcgctccggagccattgatcgagttgatcaaagctggnaaggccaaggattacaagaaggctcgcgaaatccatgatcaactcctaccagtcacgaagagtgtttatcatcgaggctctcatatggggggcacggtcgcccttnaacacgctctcgtttgctcgtggtatactgaagcatgcgaccgttcgatcgcctcttttgcctcttgagcctggcgcagaacaggaaattcatgcagctattagtgcagctagtctggccagagttgcatagataaggagttgcagggttaaacgaaagagattggaaagcgagaat

SEQ ID NO: 645 - DNA, 1082 bp, Aspergillus oryzae
attatggcgggggactacaatcctcagcctccattctaccaattcctctttcaccactatcgctgcaactcgctcggtacggctcactatgaggccgcgccgcagaatgaccttctgggtcgtttcgctatgggttaatttaaccacacgggtcaagagctcttgacctcaaattgtgccaagatgtctactgacaagattaccttcctcaccaactggcacgcgacgccgtaccacgctcccctgtacctcgctcagagcaagggttacctcaaggaagaaggcctgaaggttgctccgctggagcccaatgacccctctgatgtcactgagataattggtagcggtaaggttgacatgggcttcaaggccatgatccatactctggctgccaaggctcgtaacttccctgtcacctcgattggctctcttcttgacgagcctttcaccggtgttgtgtacctcaaggatagcggaatcactgaagacttccgctccctgaagggcaagaaaattggctatgttggagagttcggaaagattcaaatcgacgagctcaccaagtactatggcatgactgcggacgactacactgccgtccgttgcggcatgaacgttaccaaggccatcatccgcggtgacattgatgccggcattggcctggagaatgtgcagctggttgaactggccgagtggctggcatcccagaaccgtccccgtgacgacgttcagatgctccgcatcgaccagctcgccgagcttggctgctgctgcttctgctccatcctctacattgccaacgatgccttcttggccgccaaccccgagaaggttcagaagttcatgcgtgctgtcaagcgtgcaaggakctacgttctcgcagagcctgcagcggccttcgaagaatacattgacatgaagcccatcatgggaacccctgtcaaccgtaagatcttcgagcggtctttcgcctacttcagccgtgacctgaagaacgtcagtcgtgactgggctaaggttaccaactacggaaagcgtctgggtatccttgatgccgacttccagcctaactacaccaccca

SEQ ID NO: 646 - DNA, 575 bp, Aspergillus oryzae
attatgggggggaacgtcctggatcgcgacgactttatccaatttggcctggacttggtgaagggatgccacgagacttataatcaaaccctgactggaatcggacccgagagtttcggatgggatcccaagaatgtgccatcggaccagaaagagctgtatgagcgtgctggcttctatattagcagtggcgcttatattcttcgtccggaggtgattgagagtttctactacgcctggcgtattactggccaggaaatttaccgtgagtgggtatggaatgcgtttgtcaatatcaacaagtactgccgcaccgactctgggtttgcgggcttgaccaacgtcaacgctgccaacggtggaggccggtatgacaaccaggagagcttcctctttgcagaggtattgaaatacgtgtacctgacctttgctcctgataacgagtggcaagtccagcgcggcaagggcaacaagtttgtctataacaccgaggctcaccctgttagggtggcggcgtagttgtatatagcagtgtactatcgggtattgatataaataatcattaagtttacggt

SEQ ID NO: 647 - DNA, 393 bp, Aspergillus oryzae
  modified_base (203)..(203): n is a, c, g, or t
  modified_base (245)..(245): n is a, c, g, or t
  modified_base (300)..(300): n is a, c, g, or t
  modified_base (313)..(313): n is a, c, g, or t
  modified_base (339)..(339): n is a, c, g, or t
  modified_base (358)..(358): n is a, c, g, or t
  modified_base (371)..(371): n is a, c, g, or t
  modified_base (387)..(387): n is a, c, g, or t
aattcggcacgaggaagaaccagcccagattggatcccggcagtatacccccttagccgaatggaagttccgcgagtttaatgaactctggcatctattcgagcgccgcgtcaacatgtcgtatccttttgctagtcgctatgtggaccaatttcctaaggataagactgtccaggttgctggctttgtggcgttcgtttccngcgccctagcgtccgtactggccctggtatccatcatagatncagaactttttctgggctttgaaatcactcatgaccggacgtccttttctacctnggtgtttttggcnctgtctgggcttttgcccgaggcttngttccggaagaaacaaatntgtttgatcccanttcgcacttcttgaantgattg

SEQ ID NO: 648 - DNA, 362 bp, Aspergillus oryzae
  modified_base (352)..(352): n is a, c, g, or t
aattcggcacgagggtcgcctgtcatgctgaaattcctcaagaattaagactgctattatctgggatcaatgattgaggttctctcgtcaattgttagggcgtatcgtgtttccaccgcaccattgggtcgcattgtgtagacacccaagttagattataacggcattctctgccatcaattgcaaccgactgtcaaacatagcaatgtcaatctttcggccaggccggttgaggacagtcctctcagcaacagccgcattaattctcatttgtactttctatttatactggactccgcctccggcttccgacgattcctagtactgcctttgaagttcctctcactgaacntcaggttgca

SEQ ID NO: 649 - DNA, 594 bp, Aspergillus oryzae
  modified_base (327)..(327): n is a, c, g, or t
  modified_base (329)..(329): n is a, c, g, or t
  modified_base (375)..(375): n is a, c, g, or t
  modified_base (403)..(403): n is a, c, g, or t
  modified_base (406)..(406): n is a, c, g, or t
  modified_base (444)..(444): n is a, c, g, or t
  modified_base (457)..(457): n is a, c, g, or t
  modified_base (492)..(492): n is a, c, g, or t
  modified_base (538)..(538): n is a, c, g, or t
  modified_base (552)..(552): n is a, c, g, or t
aattcggcacgagggctgttctgcggcgtctccctaggcgactgctcgtggacctgccccttgaacaagatcgactggccatccttaagatccacttgaaggaagagaatctcgatagctctgttgacctcgctgagctagctcgccgcactcagctctattctggatccgatttgaagaacctttccgtcgccgcggctctagcctgcgtccgggaggagaatgacctggcggctcagcaccagggcgacgagccctaccaatacccagaaagacgtacgctgacctggaagcatttcgagcgtggaatggaggagatcagcgccncnataagcgaggacatgtcgtcactctcggcgatccgcaagttcgacnagcagtatggcgaccgcaagagtcggcntangaagagccctggatggggattcacacctgctagcaccnaagaggctagttncgatgctgcccgcgtacggacatgacatgactacnatatgggaacattttagaccgtttggtgttcattcttgcgaccatnggaatttggggatntcacgccgacgactttgtatactattagcgatatgataaacc

SEQ ID NO: 650 - DNA, 430 bp, Aspergillus oryzae
  modified_base (217)..(217): n is a, c, g, or t
  modified_base (281)..(281): n is a, c, g, or t
  modified_base (289)..(289): n is a, c, g, or t
  modified_base (313)..(313): n is a, c, g, or t
  modified_base (352)..(352): n is a, c, g, or t
  modified_base (372)..(372): n is a, c, g, or t
  modified_base (396)..(396): n is a, c, g, or t
  modified_base (414)..(414): n is a, c, g, or t
aattcggcacgaggcgaaagctgtgatgatcgcgcatcacaacgtcatcgcgcaatgtatgcaagtggatcaaattttgcggaaggatgtgaacaaatcattggctgtattgcctttgttccatatcactgggctggttcaccaaatgcacctccctgtaatccgcaatagcaccgtgtatatgctcccgtccttcacaatggaatccatgctcgcnaccatagtcgaatatcaaatcaccgagattctctccgtaccccccatcataatccgtctcctcnctgatccnattgtatccaaatacgacctctcncatgtgaaaaccttttcctcccgtgcagctcctatatcnggtgaaattctccagaagcnggaggcccggtttccctggacagnggtttaagcaggggtatnggatgaccgagtcttt

SEQ ID NO: 651 - DNA, 257 bp, Aspergillus oryzae
  modified_base (9)..(9): n is a, c, g, or t
  modified_base (78)..(78): n is a, c, g, or t
  modified_base (127)..(127): n is a, c, g, or t
  modified_base (149)..(149): n is a, c, g, or t
  modified_base (155)..(155): n is a, c, g, or t
  modified_base (157)..(157): n is a, c, g, or t
  modified_base (203)..(203): n is a, c, g, or t
  modified_base (212)..(212): n is a, c, g, or t
  modified_base (230)..(230): n is a, c, g, or t
  modified_base (255)..(255): n is a, c, g, or t
aaatcggcncgaggtctcactacacttctcttcctatcagtttgtcgtttcacataaaaattgttggaatttcccccnagaaagaaagcagtgattgcccttttcttgtgacaaacgaaaactagtntagaccatgacgtccaccggtnctgggntncgatctttctaaatcggtcttctcgcccgatggggcgccactttcngggtggaanatgcagctcaagcggttnaaaatagcggaacagcccttttgtnta

SEQ ID NO: 652 - DNA, 397 bp, Aspergillus oryzae
  modified_base (130)..(130): n is a, c, g, or t
  modified_base (163)..(163): n is a, c, g, or t
  modified_base (216)..(216): n is a, c, g, or t
  modified_base (228)..(228): n is a, c, g, or t
  modified_base (294)..(294): n is a, c, g, or t
  modified_base (309)..(309): n is a, c, g, or t
  modified_base (325)..(325): n is a, c, g, or t
  modified_base (352)..(352): n is a, c, g, or t
  modified_base (382)..(382): n is a, c, g, or t
aattcggcacgagggcaaaagaaagcgcggccacttattctaggaggtcgaaggcccggaaaaatccaaaaacatcgtttcccaagattgtcctctgcacgcatgcccatagttggttcaatcaaccccnagatccctcggagccagtggtctttcttcagcngccgattgccctaagactttagcttctgcattgatgagctgtattgaacaccngtctcagttgcnggatgcgggtgacaacagaatgcacgaatcaaccacagccaccctttgacgaaatgtgccagcccnattgcaatcaccacntcttaatcgcccggangactaaaaacagaccgaccaaaagtcngatggaagaaattccgttgtttatggaccngaaccttccaaaaag

SEQ ID NO: 653 - DNA, 351 bp, Aspergillus oryzae
  modified_base (145)..(145): n is a, c, g, or t
  modified_base (164)..(164): n is a, c, g, or t
  modified_base (189)..(189): n is a, c, g, or t
  modified_base (258)..(258): n is a, c, g, or t
  modified_base (263)..(263): n is a, c, g, or t
  modified_base (269)..(269): n is a, c, g, or t
  modified_base (296)..(296): n is a, c, g, or t
  modified_base (305)..(305): n is a, c, g, or t
  modified_base (316)..(316): n is a, c, g, or t
  modified_base (341)..(341): n is a, c, g, or t
  modified_base (344)..(344): n is a, c, g, or t
aattcggcacgagggccaccctattgaagtgcctgtcaagcgtgccgacgagatcaaccagatcttcgatgccatttcctacatgaagggttcttccgtgctgcgcatgatctcgaagtacctgggagaggacgttttcatccanggtgtccgcaactacattnagaagcacgcttatggaaacacccngactggtgatctgtgggctgctcttgctgacacaagtggaaagcctgtccagcaggtcatggatatctngactnagaacntctgattccctctggtctctgtggccnaagataccnccagctcgtcnatcaagctgaccagaacgcttcttncgncctggcc

SEQ ID NO: 654 - DNA, 314 bp, Aspergillus oryzae
  modified_base (101)..(101): n is a, c, g, or t
  modified_base (166)..(167): n is a, c, g, or t
  modified_base (169)..(169): n is a, c, g, or t
  modified_base (199)..(199): n is a, c, g, or t
  modified_base (215)..(215): n is a, c, g, or t
  modified_base (233)..(233): n is a, c, g, or t
  modified_base (275)..(275): n is a, c, g, or t
  modified_base (286)..(286): n is a, c, g, or t
cggcacgaggatcggctctggaattggaggaacccatgccttgcgaggaatgtacaaggatcggtacctagacaagccacttcagaaggatatcttgcaanagtctttcatcaacactatgagtgcgtgggtcaacatgttattactctcctctgctggacctatnnanacacctgttggtgcttgtgcaacggctgtnaagtctgtttacatcnggtacgagactattgtcnaaagaaaagcccacgtctgttttgttggtggctttgatgacntccagggaagngggctcatatgagttcgccaacatgaag

SEQ ID NO: 655 - DNA, 255 bp, Aspergillus oryzae
  modified_base (251)..(251): n is a, c, g, or t
aattcggcacgaggctcacggcaggcgggcaaagtggctaatccaatgataaaaccagtagcttggtattatcaaaggcgctgtggatccctcatttctctgcctgtcagcagaatcatcatgacatgagggtgaggggaattgcaaaggtgtgattaaatttacgtaataatttcaaataccgcctgcaccccctctttatggccttgagatacaagccataggtcgggtacatactcccccaacccccnaccc

SEQ ID NO: 656 - DNA, 497 bp, Aspergillus oryzae
  modified_base (100)..(100): n is a, c, g, or t
  modified_base (160)..(160): n is a, c, g, or t
  modified_base (334)..(334): n is a, c, g, or t
  modified_base (394)..(394): n is a, c, g, or t
  modified_base (432)..(432): n is a, c, g, or t
aattcggcacgaggcgccgtttacgataccatggaatctcctaatttctcggcgttccctgtcctacgcaacccccctccaaatgtgccccccaccgatnagcagagagaagcgagcttggagagggctcgaatggcagtactttcctccaatgaccccnaaatgcaattggcttgggctcaggacgccctagcttacgtcgaggtcgccgtgcagaatgaggctcgtctgtccctaatccaacccccgcgtccccaaactccgcaagtggagcatcagttgaaggttgatgcgatgaacatcgtttatttcttggccgatcagcatcaccccnaagctgaattcatcaagggcatgtggttggaattcggaaaatttggataccgtgttgatnaaaaggaagcattcagagcttactcgagagccgcaganaaaggctatgccagggctgagtatcgcatgggggatgcagtttcgagagttttgtgagccgaaaa

SEQ ID NO: 657 - DNA, 582 bp, Aspergillus oryzae
  modified_base (507)..(507): n is a, c, g, or t
  modified_base (576)..(576): n is a, c, g, or t
aattcggcacgaggcttatttgtcacatttccatccgtccgtttcggtcaatgcggctcaactgttagagcacaagactatgagcggaaagccagatatgacgatacacacattgatgcacttcctcgaccgctttgtttacaagacgccgaaggcctctgccgctacccggggtgcctctatcatgcagcctcttgccggcagtgacgcgcaggatcggttggtgtccggtaccaaacagacccaggaacttccgcttaactccgaggccttctggaagaagaagtccgacgaggtggccgcggaggatgtcttcttccacgagtacttcaaccgtgtcgagaaggacaaggataagagccgcaagaaggccaaggatcccgtcgaacatgctgaagaggatggcgagctcagcgatgccgagtcggagatctggaaggcactggtggattcgaagcctgaagtggaaggagctgatagcgatgatgaccttgactggatgactcnagtcggcctacgatcaaagtgaggatgaggaggctgaacagagtgaagacaagggagtcatcttcaacnaacaag

SEQ ID NO: 658 - DNA, 551 bp, Aspergillus oryzae
aattcggcacgaggacacatccctattttaattcttatcgtccgcgatcagatgacaccatctgacgacattgccgatacggtatgtaaaagttgattgtcctctttcaactatctctatatttccccagtaaatccgcgctgcgaaaatggctttcgcagctcttcgccattcgatcccttcccccactcgcctgcttcgtccgaccatgtcgaccccttctcaagcccgactccaatcccaatgtcgccaggtttccttctcctcatacctggtctctcccaaggagctcagtgaggccctcaagaagaatcccgcaaccaagatctcgactgcaccgcgtgttgtccccctctgcgctgcatggtttatgcccaatgatccggaaggtcgcaaagggattgacattttccggaaacatcgcatccctcaggctcgattctttgacttggatgcgatcaaagatgcggaatctccgtacccccacatgcttcccaccgcagagacatttgccgatgcgatgagcgagcttggcatccggcgtgacgaca

SEQ ID NO: 659 - DNA, 464 bp, Aspergillus oryzae
  modified_base (234)..(234): n is a, c, g, or t
  modified_base (358)..(358): n is a, c, g, or t
aattcggcacgagggggctcccttatgccaatccacatacacctcgtcacagtttgcctgccgcaaacccgaacgacatgaacccgccttgcaacactttgtatgtgggaaacctgccgccggacgcgtcagaagaggagctaaaagctctgtttatgaagcagcgtggatacaaacgcctttgcttccgtaacaagcaaaacggacccatgtgtttcgtggagttcgaggacntgggcacagctggcaagtccttgaacgaactgtatggctacaaactttccaacagcattaagaccggtatccgtcttagtttttcgaagaaccccctgggagttcgttctgggcagccaggttncatgagtgcatccaataatattgcatctcaaggtgcagtttctggaggtagcagcctttgtggcatgcacaatcatatgttctccactgtcagcgggcctcctcca

SEQ ID NO: 660 - DNA, 454 bp, Aspergillus oryzae
  modified_base (264)..(264): n is a, c, g, or t
  modified_base (319)..(319): n is a, c, g, or t
  modified_base (416)..(416): n is a, c, g, or t
  modified_base (448)..(448): n is a, c, g, or t
aattcggcacgagggtttgaaacaaccgaagggccctatgaaggaatcgaagcggaaaatgcgcccaccccgaatagatctctctctgttatttccaaagccacgagcggatgccgccccccttttgtcgccgcaacgattggtaaactcgccatctgcgatatcaatgacctctgagcttcctgcagccaaaccgaagaatatgacaaccctgcaactacaaagagagtcacaaaaactcctccttcgggccatgaaacgaanggtcataaagctactgacgtcgacagcgagtcctcaccgatttacgagtcaggtnatacaaactggcttgatccatcacttgaaagaacagtgcgcactagtgagatggatatggctttgaaacggtacagccaattccagaaagctccccngcctagttgaagtggcccgatccagtcagttncatttg

SEQ ID NO: 661 - DNA, 625 bp, Aspergillus oryzae
  modified_base (511)..(511): n is a, c, g, or t
  modified_base (514)..(514): n is a, c, g, or t
  modified_base (560)..(560): n is a, c, g, or t
  modified_base (566)..(566): n is a, c, g, or t
  modified_base (568)..(568): n is a, c, g, or t
  modified_base (604)..(604): n is a, c, g, or t
aattcggcacgagggtgtcctaactcaccacaagaaaggtgtccgaaaccttgctatccacccccgggaattcacatttgctagtgccagcacaggaagcatcaagcaatggaagtgtccagagggtgacttcatgcaaaacttcgagggtcataatgctgtcattaactctctcgccgtgaacgaagacaacgttctcttctccggtggtgacaacggttccatgtctttctgggactggaagaccggataccgtttccagtcgatcgataccatggctcaacccggttcgctcgatgcagaggcaggcatcatggcctcaactttcgaccggaccggcctgcgtctgatcactggtgaggcagataagaccatcaaggtatggaagccggatgatgaggctacacctgagtcgcatccggtgacttgggctcccactcttggcagacagagatattaggttggtggttgttgttggccgtctgtcatgtttatacccttcattagtctnggntctgatataagaatcggggcatgttcacttcacgcactttacggantttagncnttcgaaaatgtctgtttgttatctgtgactagttantgggaatcggttggggtttat

SEQ ID NO: 662 - DNA, 541 bp, Aspergillus oryzae
  modified_base (390)..(390): n is a, c, g, or t
  modified_base (393)..(393): n is a, c, g, or t
  modified_base (451)..(451): n is a, c, g, or t
  modified_base (527)..(527): n is a, c, g, or t
aattcggcacgaggagcgctttcacccactctggagtactaggggtccacaaaagggcgccgacggggcagctctaacccccggaggggcggtcgcagggccggccatagggggcacagttagaccgacaacggactcttgcgtagcagcaggagctcctctacggaggcgggagccgtagtgacaaccggacgctcatcttcagtctcatcgaattcgacaccctcgtcctcgcttgcgatcagcgcctgaactcagcgagggagcagagcagaagacctgaccattgcaatcatcgaagttagctaccgaactttgcacattctcaatcaatggctcactgttgaagcaagggtgtcatgtgcctccttatatagggttggagagacngcntcacctattgatgtatcttggcatgctggacagggaatcacaggcagctttgatgaanaagaggactagtcaaaaccattgttatcttcatctagggatccatggatttccaactttatgattggacattcgantttacagcttctag

SEQ ID NO: 663 - DNA, 546 bp, Aspergillus oryzae
  modified_base (139)..(139): n is a, c, g, or t
  modified_base (312)..(312): n is a, c, g, or t
  modified_base (323)..(323): n is a, c, g, or t
ttcggcacgagggcgtttcctcgccgtcacgtggaatccgtcgagttcttgcgggtcgctttcctaattgggaagttttatagggctatcactgagtagctgataaatcggcgtttagtgccattgtttggctttgacnggttatttaccctctctccatcaggatcccctgaccctggtcgtggtcagctgagggccttgatatctctagtcactgtcactgattcacgtcgggaccattatcagatcatttgcacataatggcggtccatgacattgagaaggggcccggtagggctcctcaagaagatncgggtcagaangctccgggatttgtaacagatcccctcggtagcaacactccatttgtcaatgcggataaactcgcccgtaatctttctgcacgtcaagttcagatgattgctatcggtggtactattggaactggtttattcttgggaacgggtaaagctctggccactggcggtccggcatctatgcttatcgcctacgccatttgcggtggtattgtctttgtgaccatgc

SEQ ID NO: 664 - DNA, 388 bp, Aspergillus oryzae
aattcggcacgaggcgaaaaaccaaaaacccggtttactcagccatttgcctttggctcctgcgtccggcccattgttgtctcataggccataatcaatatctaggatgtgattggttgatttgctccctgtgagaatggaggtcaggagacagtcccgcaacggacatgctacattccagcgtacctacaaggcatgtcttgcctgccggcagcgaaaggcgaaatgtgagttagggacaggtccggatggtcttgcattagggccgccgtgcgcaaagtgcaggagggagcaaagggaatgtgtgttcagtgagaagaaggcatgggagagacagaagaaacgagggcaatcggaagaaggtacaccgttgcctgcaagggcacgt

SEQ ID NO: 665 - DNA, 450 bp, Aspergillus oryzae
  modified_base (222)..(222): n is a, c, g, or t
  modified_base (224)..(224): n is a, c, g, or t
  modified_base (411)..(411): n is a, c, g, or t
catagctgtttcctgattgggtaccgggccccccctcgaggtcgacggtatcgataagcttgatatcgaattcggcacgaggctttcattcgcttagacaaagcatgattctagtctaaggatctcattaagatggacgacgcgacaaaggctctgctcacagagcatttcagctacactccgctgtcccttgtagatgacgtgatcaactcgatcaacaangngatctatcaagctatctcgagtctcgaagccggtttactctccacccctcctgaacgtttgggcttctcgcatgctaccaacggttcgaccatcccggacactgacgaggatgggaacgttgtttaccctgaggcgaggctggagatagaagatggactacacaaacttgaaaccctcctggaggcnaccgtcgacaaggcgttcgataagttcgagattattgtt

SEQ ID NO: 666 - DNA, 283 bp, Aspergillus oryzae
aattcggcacgaggcagcggtggtcactgtggtgtttgtggtgagcggtgttttggtaatgaagtggcggtgttcctgcagtcggtggggcccagagcctactgtagagactttggttgttttctttcgttgattgctcaaaggctatctcgcagagctccttggtagatacactagggctgcgatccaaacaaaagaagcccctgtcgatagagggtgcattatcgtgatggaacagccggtatatctagaaacttgcagcttttatctttccgatcggtca

SEQ ID NO: 667 - DNA, 387 bp, Aspergillus oryzae
  modified_base (95)..(95): n is a, c, g, or t
  modified_base (353)..(353): n is a, c, g, or t
aattcggcacgaggaaacgctcaaatccgccccagcaacctcgcacctcctggacctctcctgcgccgccgacgtagaccaatgctcgtccttcntgaccgacctcgcatcacgcatcaccaaatccgacgcctgcggcaaggactacgacctcggcaacccggtcgtgacagacgcctacacggacatgatcatctacgaacccatgtaccgcgcctcgtgtctcaagaaccccagcacaggcgactactgcttcgtcgacgccgccacgaacagctcaaacccctccgactacgacgtctacttcatcccctacgggagcgcaatcaccaacgccccttatcccacctgcnacaaatgcgtccaggcctccatggatgtcttcgg

SEQ ID NO: 668 - DNA, 485 bp, Aspergillus oryzae
  modified_base (21)..(21): n is a, c, g, or t
  modified_base (27)..(28): n is a, c, g, or t
  modified_base (31)..(31): n is a, c, g, or t
  modified_base (50)..(50): n is a, c, g, or t
  modified_base (58)..(58): n is a, c, g, or t
  modified_base (73)..(73): n is a, c, g, or t
ggtaaagcgacggccagtgantccgtnntcntggtcatagctgtttcctnattcgggnaccgggccccccctngaggtcgacggtatcgataagcttgatatcgaattcggcacgaggctttgcgatcgaaagcggccctggcagctttgcaagccccaatgcaacgactagtcctcaaataacgacgggctttgatgatgctacgttcagcagtgcggtgacagcaaagtcaaatggcctctctgcgaacggaccacgacctacgattacgacaccgagtttaaagcaccaaaacttacaggtcggggttagacgacgccaacggaacccctcatccatatatgagaacgtcaaggagccgtatgcctacaccaatcgtttccataatctgaccgcatttattcaacgacgcttttcgccacagaagactttacaaatcgccaaggcgctggcgtcgatccgcccgtctttcattgcgacgacc

SEQ ID NO: 669 - DNA, 289 bp, Aspergillus oryzae
aattcggcacgagggatgcatttcctttgtcagctgggcctcgatattgccaaggttcaggagcctgagcattgggatttgacgcgcgccactgagctattgagtgcgttagataatgtttacagtcgtgcccagcctcatctactctctcgagagcattgccattgcctacaggagcaccaggagcatcttgccctacggatgcacatgtcattttgcgtgtcagtgctctgtcggccgaccatccgaagttctccaagccgcttggatgaccctcattatagtcgcc

SEQ ID NO: 670 - DNA, 287 bp, Aspergillus oryzae
cggcacgaggcccttccaccccctctcaatctccacctcatctctttcccctaagaccctctctaaaaggagcaactgtttgattgagttttttggtctagtttggaaatactagaaagagttgaagtcgggtttctgctcggtagcagcgaaaaggaaaagcggcctaccgcctcgcattcaattcccgccgattgccatcagttccacgaactcctgcccccctgatcctctcaacccccatccgcctttaagcttggcctagtcgactcactagacccgccgtt

SEQ ID NO: 671 - DNA, 447 bp, Aspergillus oryzae
gagggaagcccgcggatacaacctcgctttcgaatcgcccaagagtgacaagctttccttgttcgagctcggagaaagagcttacgaccatgtcctcctccttcctcctcggtcgaaaggcttcggaccttctttgaaccccaagaacatcatcgaattcatgaacaaagacggcaacgtccttctcgccctttccgggaagtccactacccccagcgctatcagctcgctcctcttagaactcgaccttcatctgtctaccgaccgttcctccgttgtcgttgatcactttgattatgacactctttctgcagatgagaagcatgatgtcctcgttctccagcgccccggccagttgaggcgcgacaccaagggcattcttcggtgggtgagggcgttctggctttcccaaggaccgccccttcacactctgggtgactccaaccc

SEQ ID NO: 672 - DNA, 455 bp, Aspergillus oryzae
cggcacgaggaacaaccttatcatctactataccttccattttccattcctcttactgagtccttacaatggcgacagatatcgctacaagggatcttcgcaagcccatagatgtcgctgagtacctcttcaggcgacttcgtgaggttggcgttcgtgcagtacacggtgttcctggggactacaacttggtggctttggattacctgccaaaatgcgatcttcattgggtaggaaactgtaatgagcttaatgccggatacgctgctgatggatacgctcgaatcaatggaatgttctgctttagtcaccacctttggttgtgggtgagctatcggcgctcaatgctattgcctggtgcatactccgaatttgtgcctatcgttcacattgttggtcaaccgccatacgaaatcacagaaggaggatgctcctcccccacaccttgggcacgc

SEQ ID NO: 673 - DNA, 291 bp, Aspergillus oryzae
cctcggcacgaggctcaaccccaccacaacagccatggcacacaccacagtagccgaccccccccaatccgtggaacccacaaattctctcgaagaaacaaataccccagacgagcatgtcgccagcgaggaaaatgccctcgccgtcacccagcccgccgagtccgccgtcgcggaaggcgcgccgaagaagaagaagataatcaggaagaagcgccgtccagcacgcatccaggtcgatcccgccacagtcaaatccgagccgcctccgcagacgggtacagtctttaa

SEQ ID NO: 674 - DNA, 395 bp, Aspergillus oryzae
  modified_base (374)..(374): n is a, c, g, or t
  modified_base (380)..(380): n is a, c, g, or t
ggcacgaggggcaggatagtctcattccgagcgaatatgaacgatactggaacgaaacagctagtgccagccctcagggggagttcaaacccgtccttggatacaaccccgcgcagaatgagtcccaggatttatactccagtagtccactgcagacgtctactactgcaccaaatgcagctccgcaacaagacataacccctaagttgaagaggcgattctcctgggagtctgcctcctccgaggaacagcttgtgcccgcgacaaatgtccaatcccctccagtagggccgattccccggaacaattttcctgtggtttgaacgagaaaattctttcagcccgaaacccgagccccgaaactttgagccccnaacacntgttggcttcccccc

SEQ ID NO: 675 - DNA, 529 bp, Aspergillus oryzae
  modified_base (501)..(501): n is a, c, g, or t
tcggcacgaggcgaaaaggtggagggtgtaaaggagggttgtgaaagtgacgtccatgccgagcttttggccagtgccgactggactcggtcagcaacttcgcctcccatgactcctgtcttcatcaacgccaattctctcaccgccagtcagagctcagacttcctctctgcccacgggtcttgcccctctctttctccttcgccttctcctgtatcttccttgtttactccgtctcagtcggctttccctgttgagcaggccacctccgacttctgtgaccctcggcagctgactgtcgagtcttccgtcaacacatcctctcccgctgagcttcctcctttgcccactctctcctgcgatgaggaggaaccgaaggtggtcctgggaagcgaggctgtgactttgccagttcatgagaacccatcacccgcttacactagctctaccgaggaacccctcagttcgttgccaattttgaaagcttccccgaaccttaantcgaagaaaaatttgtcaaccgctatta

SEQ ID NO: 676 - DNA, 496 bp, Aspergillus oryzae
tcggcacgagggattatctgctctgatacactccacggaggttactactattactatgaatattctccattctactctctccacttggagagaccgtcttgccccagtgtcccgcacctccactttccgcaacaccggccagatcactcccgaggaattcgttctcgcaggcgactaccttgtctacaaattcccatcgtggtcatgggccgacgcatctaaccccgcaaagcgcgtttcctacctgccccctggtaaacagtttctcgttacccgaggcgtaccctgtcaccgccgactgaacgacaacttcgctggcgatgcaggccacgatgatgagcttgttggggacatgctgtctgggggaacaggaggtgttgatgatgatggatggctacgaaccggcggagccaagattctgcggaccgacaagagaataggataaaggatgttcgaacagtggaagaattcgggaacatgggagaacgagaggagg

SEQ ID NO: 677 - DNA, 288 bp, Aspergillus oryzae
catatcggccaattgagactcggctcttcatcaatggcgagtttcaaccatcgacggatgggaaaacattcaagttgatcaacccatatacacatgaaccagttacagacgtccatgaggcaagtgagcaagatgtagacaaagctgtggcagcagccaaagccgctttcccagcttggagagacctcaccccagatgataggggtgtctacttgcgcaagctgtcagctttaattagggagaatatacccgagttggctcgcttggagtctatcgcaatggggcaag

SEQ ID NO: 678 - DNA, 300 bp, Aspergillus oryzae
tatcaaattcggcacgaggacgccattcacaatacaatcataaatatttccttttcctagaaaaccccttcttatctccgcagaacacgcggaatcataaccacagagacaatgtcagttattaacgatgacatctgccgcttagatacgcaactggatcaaattaagcaagaaatcaatgacctacaatttgcctcactggagacccaaaaacatacgcatgatttggacgccaatacagagcgcacatctgacctagccaggatgttatcacctctctctctgtgcccctccaagttc

SEQ ID NO: 679 - DNA, 298 bp, Aspergillus oryzae
atcaaattcggcacgaggttccaacttcactttacagctagattttcttctctccctcagaaatacctctggtcatttgtctcggcggatacatcccggtgacttcgtgctttccctcgaacggattcgtcatctgccgcccacatcgagccgatcaggcgcccatatattcccgttccctgccggggtgtttccagcccaccaagggattggcacaatggatacgacgattcttcgttcgcaaagataccaccaagggtcctcccttggcggatcttatcgttaggatgggtgggcg

SEQ ID NO: 680 - DNA, 312 bp, Aspergillus oryzae
  modified_base (283)..(283): n is a, c, g, or t
atcaaattcggcacgaggcacggaacgattcgggtagtctccggtgtatatactggggatttgatagtccttcggtcaatcaacagagaggtactccgtggtcaacggctgcctatttgccatgtcgcaagagaccgagcccctccttcctcgctacgaggaggacacgaccctccaacggcggttgcatcagaaattgcactcgtttcagatgctggcgtgccccttttcggagggttacatgccatctaaccgagcaggttcaatcattaatctcccgtancttggtttggccttccgaatatcctggaa

SEQ ID NO: 681 - DNA, 377 bp, Aspergillus oryzae
gcacgaggggtactgacctttggcccaaggacctgaccgagtacaactggactactgagtgcaccaagttggacgatcttttcgtctggtggaccaccccggctaaccgcgacaagtatggtcacatctctcacactttcactcatgaagagcagaacaatgccacctacaacgacgtgaagagggagatctctttcaaccaggcttggttgagacagagtggtttctatgatgccaagtatttcacatccaacggtatcatccctcccgccattactgggttgcacaacggcgatgccttgcgggcctggttacgaaaacggcatcaccaactggtgttggtgataacactcgcacaccgcttcctcaaccaagca

SEQ ID NO: 682 - DNA, 403 bp, Aspergillus oryzae
gatcccgaaatcggcacgaggctgtcttcgtatattccctggtatcaagccagaaatgattgatgccgtgttgagactagacggactccgtggtttagtgttagagacctttggagctggtaacgcaccacacggtcaagataacgctttgattaaagtgcttgcggatgccatcaagcgagggattgtgattgttaacgttactcaatgtttgactggcagcgttagcccggtatatgccaccggtatgagcttgtctcgggctggtgttgtcgcaggtctcgacttaactacggaagccgccctaacaaaactggcgtatctccttggtctaccagacgcaaccccggagttccgtggccacgggacatgttcgaaatcactcccgaggagaattgacgga

SEQ ID NO: 683 - DNA, 442 bp, Aspergillus oryzae
cggcacgaggcagaaacgcttgccaccagatcaccccagtcatcccagtaatcactccgtcggcccctccgtcggctccggcgcatcaacggacgttgtcgttagttcgggtgtgacggcggagaagctaatgtacgatcgggcactagagatgagtcgggcagccgctatcaatgaacttacgggtgaagagctttccgggtgcgagatagcgtatgtcacagccattcggatgttggaagctgtattggaagaagaagaggtatcccggtctgagccaggaagcggcaccgacagaggcgatgcccggcgagatggcgaacaaagccatgctggatggcgttccggatggaagaaccgacaggtggtgattaaattggtatccagcatcagggttcgcttggcatcccttgcgcaaaaaacttcgccctgttggcaaaac

SEQ ID NO: 684 - DNA, 275 bp, Aspergillus oryzae
cggcacgaggcacagccccagcaatcaacgccctcggattctcccaaggcggccagttcctccgtggctacatcgaacgctgcaacgtgccgcccgtccacaaccttgttaccttcggcagccagcataacggcattgccgaattccaagaatgcggctggggcgactggatctgccgcggtgccgaggcgctcctccgggcaggacgttggtcgcccttcgtgcagggccggttcgttcctgcacagtatttccgcgatccgaccgaaatccat

SEQ ID NO: 685 - DNA, 501 bp, Aspergillus oryzae
  modified_base (336)..(336): n is a, c, g, or t
  modified_base (407)..(407): n is a, c, g, or t
catgccctggcttggaagctaagtcaatcccctcgggtcgaaatcgtctatgtcgccccaggtaatggtggaactggttcgggggctactagcaagattacaaatgccaacgtcaagggcaataactaccctggcctagtggcttttgctcaaaagaacggagtcaatttggtggttccgggaccggaagcccctcttgtggatggcatccaaggatatttccaagcaggtgggaagatcctcaattacaaacaagacaggcgagatgttgacatttcgacaaagtcggtattaggttgctttggccctttccaaggccgcttgcgcgccatgganggcttcccaaggcctttcttcccaaagattttcaatgaagccgttcataacattttccccacggcctgcgnttaacgagaactttccccgccgagttatgagccctggccccggttcaatacattgaacttcattttcccccacaatgtttgttcattcaaggca

SEQ ID NO: 686 - DNA, 472 bp, Aspergillus oryzae
ggcacgaggcttaatacaacgaagcttcctccaactatcatgttgcaccgttcccagtatcccttcccctagataatcatgaaaatagttataatcggtggaggtatctccggatgcaccgcctacctccaactcaaaaagcatctccccaaaccaccctccccagacgaggaccacgaaatcaccatttacgaagcatacgacacaaacaaagacaccacctgtgacgagcgtgatggcccaacccactcctcgacacttatcgttggcggcgggctaggtatcgggccgaaacggcctcaacgtcctaaagcgtctggatgaggatcttctccgtgatattgtccgcggcggatatgtagttccgacgttccaacatgaagaaaaaaatggacgtctgctcatacgcatggacgcatcggatgagccaacctcgccgaaatgaattaccaatgcatatgctcgggtgcag

SEQ ID NO: 687 - DNA, 270 bp, Aspergillus oryzae
cggcacgaggcacaaggccattgtcaacgccatggtaaatgacggttgactagttcaatgatgggacagattgaaacatcccaatgtccgcctcagacaatgcgttccaagaactcgcccggatcttttcgaccagaaataaccgcattcttgagatcgagattctcccgccagctcttggtcccctgctccaagacgaatgctctgtaggtataacaaagaaatacctggttcagtcgtttgtggttgctagacgtagagcacagaata

SEQ ID NO: 688 - DNA, 433 bp, Aspergillus oryzae
  modified_base (289)..(289): n is a, c, g, or t
cgaggcatcactcgtcgcttggagttggttcccttcccaagtgaaccgggacttggatcccgctgcgattgcggatgcaattgatgctgaaagccactttcatttcactcgcatccccttcgaagagctggtccgctactccttgggttatcctgcgatcgctgtcgaatggtttttacaacagcataccgcactgtacatccatctgttgaattacttcaataccttccccgaggagattgtgagatacaccaaagtttgaacaacatcttcgaaaatcgaagcccanttgcccaccgcgccttgcttcattgcttgctcgccctgcaatcgggaggaaaactatgagctaaccgagtggccacacctggctttcgaattcatagcggaatccgattcaggtcttgttcaaagagctcccgcccagtctgga

SEQ ID NO: 689 - DNA, 447 bp, Aspergillus oryzae
cgaattcggcacgaggctcaaagtgaacgtttagtaggagttttcttctactacttcacgcatattctttggttcatatattaagccgcattcgtgcgcatctttcaggaaaaatggctgccaacaagcaaggcaagatggatagtattggctaacttgttcaacttcatagcaaaaccttatcaactatcggatgagagttactcttaacgatggccgacagatgaccggtcaaatgctcgcatttgataagcacatgaacctcgtcctcgccgatacagaagaattccgccgcgtcaagcggaagttccaagccggctgctggaccggctaacgctcctctcgtggaatcggaagagaagcgaacgctcggtcttaccattgtgcgcggtacccacgtcgtctcttgctccgttgatggacctcccccgggcagaacccttttgc

SEQ ID NO: 690 - DNA, 449 bp, Aspergillus oryzae
gcacgaggggtgtttcgcttttcgtccttggtttcgccatcggacctctgctctgggctcctctgagtgaaatgttcggccgtcagatcattttctttgtcacttatctcgctttgactgccttcaactgtggaagtgctggcgcccagaacatccagactctgatcattcttcgatttttcgccggatcgtttggctcccccccccttaccaatgcgggaggtgtcattgccgacatgttctctgctaaagagagaggtgttgcgacgagtctttttgcggctgctccatttctgggccccgtcctcggccctatcatcggaggtttccttggaatgaacgccggatggagatgggtgatggtttcttgggagccttttctggctttgtttggatcgtgcctccctgctcacacccgaaacaatgcaccggttcttcttcgtcccccc

SEQ ID NO: 691 - DNA, 259 bp, Aspergillus oryzae
ttcggcacgaggtaaaagcatgtcaccttctggattcaacatgtcggtccttaagaggcgcggaacccttagtctccgcgaattaagcttgtcaacacctgttacggtagtaagctgtcgcgcgcggtctttctcctttaataatcgcccgccgccaaagtatcccggccatgtcccgctgaacttcgtccaacgtggtgctctggcggttgggtctgctgtgggagctttgttgaatcctcgaaagcaaatctatccc

SEQ ID NO: 692 - DNA, 442 bp, Aspergillus oryzae
  modified_base (405)..(405): n is a, c, g, or t
gcatcacgctcgtctcaatgcactcctcgccagcggcgacggccaagatacctttggaaacgtcggtgatctccgtatacctgctcaacacaccgcaccaggcaccttcgtcaactctgctggccaaggtctcgaccgcctacgcgccaaccagaccggcagcaacccattcttcgcccaacaacggttcgtcccccagcaaacagggttcgcccagcagcaaaccggcttcgcgcagcctacgaacaacccctggggtgcacagaaatcataccaagcagcagcctcaggctggaggcagtctgatagatctgtgaaagacgaaaatgttcatccgtgatgtccgtggtatacaacttgacgggtttgtagtggaagtggaatacgataccaggtcttttatcntggctttatcgattatatctctacttttctctccttt

SEQ ID NO: 693 - DNA, 417 bp, Aspergillus oryzae
cctcactccgtgtctcctggggagtcccctagtcatcgcaatgatgaagaagtccttccggatgctcctccaacagatgcgacccccagtggtccagaagagaaggagtccgaagccactgaaaacgatacgaaagacagacttgcggacctacttttcgatgatgacgatgacgacgaatttcctgcatctagtgcgccagacacgaagaatgagaaccctgctagtcgagatgcagtagattcctctgcaccgcaacccgctcacgtagacacagatactatgcttgccttctaccagcgacttttcccattccgatacctttttcagtggctaaaccacggaattgttccttccccagactttgggaaccgtgagttcgcgcttaccctacagaatgacgcctacctacgatta

SEQ ID NO: 694 - DNA, 513 bp, Aspergillus oryzae
gacctacgaggctattgcgtacacttttgatggcaaggagaaggatgtcgtcccggtcccggctaaggatacctcttctctcaaggtgaacaactcgacctacgatggatttatctgggccattgtgcacaagaaccacatgcgtcagttccgtcaggaccgctacgatgcttctatgacttttaccaaggagaacccgaagctcccaccttgggtgaccgtcatgacggaaagtgccgagatcaccgagacgctgctcaccccggaattgatccaggctgttgagaaggccggcgacaatttcaagtatctcattgtcacagaccagcctgtcgataagcctctgaagatcgaggagaccgtccctcgcaaacgtgtccatatctgcttgtcccttccctcatccacttccggctacacttcttccattccgctattcaatcaattccttcgtttcgctgacaggctcgtcgccgtggctcacttccgcgccgaggtgatgcgtaaggtccg

SEQ ID NO: 695 - DNA, 369 bp, Aspergillus oryzae
atcgacgctattttgcgctggtggtgcgctgacacgcttgacaatggctggtggccactctgcgcatgatgtctcttcgaagaaaagtttatcgactcccctgagtgcgaagaaatctcacaagaggaagagagatcttgatggctccgtcgtcagtacctcgactccaacgccgaccaagaagccgaagaaaacccagagcccttcgtccacccctacaccactcaaagagagccggaaaaagaaaagaaaatccgaatcagctgccagtggtgctgttcaagaagaatcgtcccaggaagagagtgctgtctcgccggtcagccgaaaaaaggcttcttcaagtaaaaatgacagcaaggataaaac

SEQ ID NO: 696 - DNA, 529 bp, Aspergillus oryzae
tatttatcccggaggctcagcttaccacacttattgatagaccagttgattaagggttgcatccgcaccctgttactcgcctccattggccttctaagcagagacccttgctccgctgcctgcgacctccgtatccttctctgaccaccatttatcaacatggaagagagtaacgtcatttcaagcggcgctgtcgatgatattcactccgcgactgcgacccaagatgctccaggtgaagtgattaacccttctgacgctccggcctcacccaaagctcagaacaccgaaggcgaaccggaggatgaagagatgggcggcaccgagactgagccaaaaaaagaaagcgagggcgctgacgaaaatgccgacggcgttgcgcagtcaggtgccgaaggtgctacagaggatcagtctggacaaggcaagtcgtctgatcgaatctttcggcgcgcttacatctttgtttcgcaaacacatgccatttatcctttcccagttattccacgtggttctgacatgcacaccg

SEQ ID NO: 697 - DNA, 547 bp, Aspergillus oryzae
ctacacccgctgaaaacgatacccctaaagtgaccgaaactggagctagcgctcttccttcaactccttcaccagacgtcgtggctcaagataagtttcatgtagctgatgattctgcgctggataaggcaacgcctaggaggtctccaagacagaaaaccatcaaactgaaccccaacggaaagcttctcagctcgcctgtcgcggataagtcggaaaagtcgacaaagaagaaggatagggggcgcggcaagtcagggcctcaaagggatgtgggcagcaagcataaagtcgtgatcatcaaatattccaacacaaatgacgctgcagagagcttgggaaaacgcattgacgacatcatcaatgatcggacgaaatacgccccgccagttaaacgtcaaccgactgttcgtcctacagctaaagatgaaccagggaaacccacccatccattctttctaaagaaggcgacgcgcaaatcagatgccttgcaacatcagattaccaaccaagattctcagccgcaacaaagggggaggaaaggagt

SEQ ID NO: 698 - DNA, 378 bp, Aspergillus oryzae
ttcatccttgcgggtgtgttcattacaatcattgtctgtgccgtcatgccccatgtgaacggtactggctacgcatcaaattcggatgtgtggcgtacttggcaaaacggtactggatattctagcgagggatttgtcttcgttgccggtatgctcaatggtgcttacagcgtgggcacgcctgactgttcgacccatcttgcagaggagatccccagaccgagtcggaacatccccaaggccgtcctcgcccagatgacggtcggttttattaccggcgtcctctacatggttgcagtgttctactcgattaccgatctagatgcagctatctcaagcgtctatggcttttcctctagccgaaatctatcatcaggc

SEQ ID NO: 699 - DNA, 660 bp, Aspergillus oryzae
tagggcgaattgggtacgggcccccctcgaggtcgacggtatcgataagcttgatatcgaattcggcacgaggcgagtttctacaaacctaacaccagataatcaactatcctttcaacctaaagtgacttctacaagcttttcgagctatctgcgcgctctgtttttgttcttcatccttcgtcatgacgttcgctgaggaattccgctcgagaaacttcagtatctacggacaatggacgggtgttgtatgcattgtcctatgcatcgccctcggcattgccaacattttttcgtttaacgccgttcgcatcgtcttcagcatcttatgccttgtttcgggattcgtcctcgttttcatcgaggttccttttctgctcagaatttgccctacctccgaaaagttcgacacctttattcgacgtttcaccactaattggatgcgcgctgccatgtacgttgtcatgagtgccttgcaatgggtcagtcttgtctcccggtgcgtcgagtttgatcgccgcagcggttctcctccttctcgccggtctcttttatgccttggcaggcttgaagagcccaggagtttgttggaagtaagaccttgggtggccaagggcttgcgcaaatgattgtctaggagaagtcaacatggtatcttgt

SEQ ID NO: 700 - DNA, 565 bp, Aspergillus oryzae
  modified_base (506)..(506): n is a, c, g, or t
ttcggcacgagggttaattatgtccctggtgactctgacagtgctctcttcgggggaaatagcaactggcgcggaccggtctggctgtgcgtcaatttcttgctggtcgagtcgttgctgcgcttctacatgttctacggcgataaattccaggttgaatgtcctacagggtccggagaatatatgcatctcgggcaggttgccgaggaaatccaacatcggttacagcatttgtttgcccgtaacgatgaaggacgtcgagcggtacacgacaactcggaccttctcgacttcgatgagcactggaaagattacatgtggttccacgaattctttgacggtgataccggacggggccttggagcatctcaccaatgcggctggactggtttgattgccaagatcatccatgacactgggtaagtgaaccaatctaacatgcttcgctgtcagcataatctaactatatgtacagaatcaattgccgcattccgcaaaccccacgntccccgtttgcggcggcatcacactactttgatgatatcttcagccgttctcgaccacg

SEQ ID NO: 701 - DNA, 359 bp, Aspergillus oryzae
gaggcgactgttcatatctcaaactttgtgcatcacctgctcttaaacctcacgggcacttacactgcggactactccttgtatgagcccgacgtcgctgctcggggtgtacaacctgagctttggagctatcagccagatcccaataatttgaccgtaaaatggcatgtgccaaaacgtgaagaactcgagtttgccgtcgagttattcaagagccaggctgagtctgccctcaagcaactgaccgatctcacccatgagacatccagtgtcaaaagagatgggagtggtaaagcgtggtcggatgaggtttctaggaactttgggttctactacgacttatcatttctggtattctg

SEQ ID NO: 702 - DNA, 467 bp, Aspergillus oryzae
attcggcacgaggttcagctgcaacgtgagcttttcttcgcttccggtgttccttcccacgaycctgaaggacatggggttcacttcgatcaacgcccaagggcttacggctccgccctatttcgcttctttcttggtcacgattgccaccacctggattgctgatcgattgcaacaacgtggcttgatgcttgtaatcctgtctctgaycggagctgttggctatgttctccttgccgtctgcacgtcagttggcgcgcgttacgcaggcgtgttcctcgctgctataggtgttttcccttgcatcgcaaatattctcccgtgggctctcaataaccaaggctcggattcacgacgtggaatgggtattgtcatcctcaatatcatcggccaatgcgggccctttctgggaacaaacgtattcccagaaagcgacggaccgcgctacatccgcggacaatccattt

SEQ ID NO: 703 - DNA, 589 bp, Aspergillus oryzae
ttcggcacgaggcacacattcaaaatgcctcgccaattcttcgtcggtggtaacttcaagatgaacggtactgcggaaagcattaccgccatcatcaagaacctcaacgaggccaagctcgacgagaccaccgaggtcgtcgtctcccctcctgctctctacctgaccctcgcccaacaggtcgccgacgagaagaagaaggttgccgtttcctcccagaacgtcttcgacaagcccaacggtgctttcaccggtgagatctcggtttctcagctgcaggatgccaagatcccctggaccatcattggacacagcgagcgccgtgtcatcctgaaggagactgacgagttcattgctcgtaaggttaaggctgccattgacggtggcattagcgtcattttctgcatcggtgagactcttgaggagcgtgaggccgacaagaccatcgaggttgtcaccaagcagctcaacgctgccgctaaggagctcaccaaggagcagtggtctaaggtcgtcattgcctacgagcccgtctgggccatcggtaccggcaaggtcgctaccacccagcaggcccaggaggtccacg

SEQ ID NO: 704 - DNA, 425 bp, Aspergillus oryzae
ggcacgaggggcatgtggagtgctagactccaactacaaccggtgcgtgggcttaaagcccccggccgagcgctgtcgagttcattcacgaggggacgaattagctctcgtggcccccggaattcgatacgaagaccagagcccatcagaagggccaatataccctcacagcaaccggaccagccgagttcagcggcaaatgatgccagttccccaaacccgaactatgaccccgctcacaacactctgctctcccctgtccatataccagaagatccccgtggagtgttaaaggaaaaccaccctgcaatgggtatattggcaaattctggcctagttgtgcagcggcaactggagctcatgaatgtcatgattgggtttgagcaagccaacaagtatgtaattatggatgcgaatgggcatca

SEQ ID NO: 705 - DNA, 333 bp, Aspergillus oryzae
gccctctcctccgcttcagtcaattcgtcatggctgagacgaagatccatcctcagtcccctgaggagttcgagttcattgaaactycccctgcctcctgcactactcccgctgagccctgtggtgtgaggacaacgtcgtacccggccatcaaaaatgcccccgtcccagcggattctccgggcagtgatagcttctccaacatcctcctcttctctttgcttctgctcatcccatggtatctggcccgccaggtcggtggtggtttttacaccaccatttttttcggaatcttcaccactatccctattttgatggctttttggtccgtcg

SEQ ID NO: 706 - DNA, 678 bp, Aspergillus oryzae
aggagaaaatgcgttacggccagaccttatagcgatttactgtgatttttactgggtaccacatgcagaggcgccaaacctcttgctacttcattgttccaacttttgattttctcagtagttactaggatgcctgctcaacggccacgggcggcctttgagcccatttctccagacctggatattgcgcatttagtagactcgacgccaaatttcgaatatgtagctaggatacactgcgatgcaattgatgcgaatggcctggagaacttcgagaaacttgtttggcttcatgtggttttgggtggaaagcctctggttgtcgaagggtttaaccagaggcttgatagttctatattctctgagaaatggctgaggagtcactattcaatgaagacggaatttgctcggaatctcacgacacaaaccgaccttccacttactattgggcattatttaaagaatatgcatatccttacgaatcaatggactcctcataactacaaagaaccaaatcgtcaaaggatttatcttaaagatatcgactgcccccaacaatggcatgaccacctcaaacagcttatccctcctccgttgttctatttaaacaagtcaccagagatgtttgaaggccccggagcgaagacatcatcgtcaaatgacgaactattagcacga

SEQ ID NO: 707 - DNA, 407 bp, Aspergillus oryzae
  modified_base (23)..(23): n is a, c, g, or t
  modified_base (282)..(282): n is a, c, g, or t
ggttctatttgaatcttcaacgngaggmgcagtacawgcatccaaaggcctccaattctacttttacgacccactccaccacttccctgcaacagcggtccatccgctcctcaaaatggctgcgccccatacatccaaggcccttgacgggcgtggggacgaagacagtcagtctttcgcctcggaacggctgattctcccgataaggtgaaggatctcgagaatcagcgacacccggagtgcaatccgattcggacacagacgatgttggaagacaaattnaaatggaggcgggtaactccatcaaataccgaacatgtagttggcaaaagacggccgcgttgctcttttccgagtacatctgcctggctattatgtcatttccctggtcttattccgttctcggg

SEQ ID NO: 708 - DNA, 395 bp, Aspergillus oryzae
  modified_base (340)..(340): n is a, c, g, or t
aattcggcacgaggttttctgctagcaaatttaatcatatatctctggaaagactgttaaactagagttcgactggagtcttcgtgaagaacatctagtgtccccgtgaaaaaaaaaaaagaatagatcaaatagctgctccctacactgggatggaggagaaccgggattttgagaaaggcgctatagcacagaagagtccggaaagcgttgcacaggaatcacatgatgacatttacaatgtccggccttggaacagccctctggatagactccaaagcgcggtaagcacactgggcgaaaccgatgaggaccccgggctacgcaagccaggagattncaaacaaccccaggtcttcggaggaaggatgcttctctggctcgcctatcaatca

SEQ ID NO: 709 - DNA, 682 bp, Aspergillus oryzae
ctcgcaaacctacgcaccggtcgcagtcttctcattcttctgcatccacaatgatgtcccagccccccgtacagattycctcggcttctcaacgctggtcttcgcagtctcctggagctgagtccatggcgagctcaccgcagtccggatatcgatcatcatctatatttgatagagtagagcgtgggtttgattcctcgcgagctactagccccgacagcacagccttttcgccattaagggttagtcgacgaagaagcagcttctatgatgctagttttcgatctcctgaaacggatgtttcggtcgatcctttggatgatggcgttttcaacaagggtcttggggatgcgtaccagcctgtcataccggaggaacgggaggactccgtgcattacgccacatctgagagagccttttctcctgcgcctgatgatgtatttgcttctccttatcgcccgcgggtagacaatcgcatgagagcttgttctctgttgcaggcatggacatccatactcccagtcgacgtccatcgcggatggaggatgtctcgaggcccttctctgctcgcgtcccgcgccgtatcttttctagtaacgatcggttctccaacccagttctctcaacgagcacagtcaccgccaatagagagccttcgaaaattgaccagtcttcacaaacg

SEQ ID NO: 710 - DNA, 503 bp, Aspergillus oryzae
  modified_base (2)..(3): n is a, c, g, or t
gnncgacgccgtgtgcgcgcgtaatacgactcactatagggcgaattgggtaccgggccccccctcgaggtcgacggtatcgataagcttgatatccgaattcggcacgaggccgagatgttccttcacctctaccacaatgacttggacaacaaagagcacttagcaattgtgttcggaaacagtatccgatcccgaagtttggacgcaatccgcccgggggaaacggaaatggaccgaatgattcgtggggcctacatcggtaccctccgtcccggccgagtgagcagttggtatgacagctccgcaaatactgagagcgcttctagtggacaagggcggagcaccccagatgcccctgtttcgtcacagacatcagagttagcacagagtagcacaaaccaagcgccgctggttagaatccattcggaatgttacaccggcgaaacggcatggtccgcgcgctgtgattgtggtgaacagctcgatgaggcggcacgttt

SEQ ID NO: 711 - DNA, 731 bp, Aspergillus oryzae
  modified_base (621)..(621): n is a, c, g, or t
cgaggcgcaaactgatcaacgtggtaacgttggccttgttatcgagtaccgcgagggcgatgcaaacgcccttcgtgtcaacacccgctcattgcaaagtaacgtggacaccaagacactcgacagcaacgctccctccagcaatgaatgggacgtgtactcctggttcaagggtacaccccactcgacgacccgatttattgcattcaaagctcttcccctctccaactctgtaacacaaacaaggaagagcagcataacagtcagtgaaacagactgggtgcggtctgtctgcgaggaaatagagcgagctatgaagaccggtgaagctcagcgaccagaatcaaatgatcaaaaggaaggagccccatccataatcgaggcatcggatattatttccttagacgatgctaagaaacggacaggtatctttgagcatttggtttatgacatcaaaaagttggtgtgggcatagagaccgacagtatattttgttgtcttgtgtgggttacaagcgaacacaattttttctgagagacgatatcctaatatatagaataccacataatgctcttggatttgttgagagcatacaagaacctgctatctgttttgcaacgnttggacctgctccctttctattgttatttgctctgttatttttatatttcacatcaaagtacggggttaggcacaacatttaaatgtatgtatagtatggcatcaagcag

SEQ ID NO: 712 - DNA, 829 bp, Aspergillus oryzae
atggaccaccgacgatgcatggcaaagtttcctcctggtatcgatcttctggacgatcgtcctctatggtgatgccatcattctgtgggccggtccgcccctcgtggtggtcggtctcattctaggcatgtactggagacgctactcccccttatcgaccagatccatatccggagagaaaccaggccatcagagagctccctcggagagctccctacgccatcatgacagcctcgatgagattgttgaaacgatgagagccttcacgactcgctgtaacatgctcctggaaccattcctggaacttacggatttcttgtccacccaaaggacggctacatccgcgaccaccaggccagccctgaccacactcttcttccgaatcctctttgtaacacctatctggattgccctgactttgcctccgttgcatctcatcaccacgcgtcgtgttatcttgawcatcggcaccattatcctcacctaccactcccgaccagcgagggtatcccgcgttatactatggaggtcactaaccgtccgccggatttgctcgttgatcaccggtctatcgttctcgttgaacgtggacaagacgccgtcgactcggacacaaagccatggccatgctgctagcgttgcaactcgtcggcggggagaatcatccggtgtgcgctttaccttcatcttatatgagaatcaacggcgctggctcggaattggctggacctactcgctgttcccatccgaacgtgctgcatggactgatgagcacctcaacaatgtgccatcaaaggatgaatttgagctacccgaagtacaaagcggg

SEQ ID NO: 713 - DNA, 439 bp, Aspergillus oryzae
gaatcaaacacgaagcatagatccaagttcacacataagtccgttatggctacttctgagattccacagaagcaaaaggcggtcgtctatgaccagcctggaactgtgtcaaccaaagtggtagagctagacgttcccgagcctggggcaggcgaggtgctgawcaatctgtcccattccggcgtatgcattcggactacagtgtcatgacaaactcttggagctggcttccacacccaacacagcccggacaagttggtggtcatgaaggtgtcggtaagattgtgaagctcgggtctggaaccgaatcctctggccttaaggtcggagacagggtgggaatcaagtggctttccagtgcttgcacgaactgtcaaccatgtcaggctggtgcggaaggactttgcgtcaatcagaaggtttctggatactatacccc

SEQ ID NO: 714 - DNA, 355 bp, Aspergillus oryzae
gctcacacatcactattttccatctcttgttaccgacctggttacttccagaaccctttccgttattctttctttctaaccttccyctccacggtacctcatatctaaccttgtccagccaacttccttccgcctttccyctctagcgacttcaagtcgcgggcattcggtttccacacgtcttccccgcttccctgtggccggagagctctctcctccggccctactgccgacacaatggctgaaagctctttctccagcgctagccccagctcaaggtgggcacaaaagatgataaaacttcagcatttcgaaagatctcagaggatgaggggtgggcggcgacgtcaccaac

SEQ ID NO: 715 - DNA, 576 bp, Aspergillus oryzae
  modified_base (480)..(480): n is a, c, g, or t
cgaggaggaaatcgtacaggacgtgacgctacatgacctggacatggccaacgctcggccacaaggtggacaggacgttatgagcatgatgggacaactgatgaagcccaagaagaccgagatcacggataagctacgtcaggagatcgacaaggttgttagccggtatatcgaccaaggagttgctgaactggttcctggtgtcctctttattgatgaggtccacatgttggatattgaatgtttcacctatctcaaccgggcacttgaatcctcaatctcccccattgttatcctcgcctccaaccgcggccacactgtcatccgcggcaccgacgacatcagcgccgcacacggcattccctctgacctcctcggtcgcctcctcatcatccccacccacccttactcttccgacgagatcaagaccatcattcgccttcgcgccaagacagaaggtctcaacattaccgatcccgncctcgacaagatctccgagcacggcagcaacgtcagcctgcggtacgactgcaattactgaccccagctagcatccttgcccgggtcaacggacgg

SEQ ID NO: 716 - DNA, 594 bp, Aspergillus oryzae
  modified_base (245)..(245): n is a, c, g, or t
ccccccacattactctagaccatcatacattctagactatcatacyggacccctagtgtcaaagagcccaagatggcgctcgatgcaaaatcaccgacagttgctactttaaacgatggcactacagactatgtccccatgaggmaaaagtacacctccaaccagccgcacatcactgagcaacccatcacttggggcaactggtacaagcatgtcaactggttgaacygtttctttattctctncattcccttcctaggctgccttggagcatacyggacacctctccatctctatacgggcatcttcgccgtggtatactacttcaacgcaggtcttggcatcacggccggataccaccgctgctgggcccacagatgctacaaagcaactctcccattgaggatctacctagccgccgcagagccggtgcaggacaaggctcgatccgatggtggtcccgcggccaccgttcccatcaccgatacacggatacagagaaggacccatactccgtccaaaaaggattctggtattcgcatattggctggatggttctgaagcagaacccgaaacgaatcggtcgcacggacg

SEQ ID NO: 717 - DNA, 669 bp, Aspergillus oryzae
  modified_base (499)..(499): n is a, c, g, or t
  modified_base (633)..(633): n is a, c, g, or t
ggcacgaggctgagctcacacaacctcaatagtggattatggagcagcaagaacgatgtgcccaagtatgggtctccttgcggtttggtccgccaagcgcgcgtgccgatagcaaatacagctcttttgcatcgctatattgatcgacgatgtgaatgagatgcatgcgtcgtgagtctcccgatcggccattggcatacatatcgatatgtgcatgcgttctgaactcgtagcttgtgacacttgattcgaagaaactgaaatgtcgccttcgccgtttcgaataagctacgtctgtcagtttatgtagtactccactacttcttacggtcgcatacgcctggggatacatggagaagcctcttacgctcgaaggatagtgctttgatagatgctctacgacatacgcaggcaaatcaacgatgtttgagcgaatatcgccgtgtcgctgctactacgagaagcttgtcacgcgttcaaggtcgtcaaatcgtacgcnttcgtcagtgttacgcaagtccacagggctcagggaccctaccattgagtgctccacaggtagtcgaggattgatagaacactcaggcatgtcaagagaaatagcgttgagggcgattacgagaaaacagacgnaaacaatgctacattcgtcgacttattttacacagc

SEQ ID NO: 718 - DNA, 635 bp, Aspergillus oryzae
  modified_base (228)..(228): n is a, c, g, or t
agttctcctcttcttcttaagttgtctggctagctcttcatccacccctccttagcttccatcaattgccattcctcatattgcccgttgctccattcaccctgaccctgccataccttccaagcccctctccttcctgtgtcaccttgctacttgggcaacatgtctgaaggcacgccgggaggaggaaaccatccgtcggtgctcctgtgtcagaggcttcaagtntcccattggtvctgggctttagccgtcccaagcacaaacggacttatactggtttagcgccacagaagtcaaaagtgttgaagctagcatccctgagccgctgaggagaagcctggagaaagcattctgccactggctttacgaaccaagatgagtttgaacaagagctggtccgtcacgtcgagactaccttggctcgttcgctctacaattgtgatgagctgtatgttcatatagccccaggcacatttccagatacccaagtaacaaaaacagcgctgcgtactcgggcactgcacttgcgttccgtgaccgcctgatcatcgattggaataagacccaacagctgcaaagttctgcagaccagaagagggtatactacctctctctttagttccttatggggc

SEQ ID NO: 719 - DNA, 736 bp, Aspergillus oryzae
ggcacgaggctcaaacaggctggcaatgagaagcagactttggagcaactgcacgatttcttggtggccaacaagccactgacttttgacgattgcattagcctgggctcgccatcagtttgaaggtcagtacaacaatgcaattcagcagttactgtacaacttccctcgagattccaagacctcttctggacagcctttctggtccggccccaagcgtgctccaacacctttgaagttcgatagctcaaaccccacgcacctcgggttcatcgttgccggcgcgaacctccacgctttcaactatggaatcaagaaccccggagcagacaaggaatactaccgcaaggtcgtcgacaatatgattatccctgaattcacgcccaagtctggcgtgaagatccaggcagatgagaatgaggccgacccgaacgctggaaacgctggctcatctttcgatgataacgcggagatccagcgccttgtcgactcgctgccatcgccgaagtcacttgctggattccgcttgaacccagttgagttcgagaaggatgatgataccaaccatcatattgacttcattacggcggccagcaacctccgagccgacaactacgaaatcccccaggctgaccgccataagactaaattcatagctggcaagatcattcctgctatcgcgacgaccaccgcgctggttactggactcgttgccctagagttctacaagattatc

SEQ ID NO: 720 - DNA, 741 bp, Aspergillus oryzae
cggcacgagggccgtcatggaatcccttaagaccaaggcccgccagcaaggcctgtggaacatgttcctgcccaagaaccacttctcccagggcgcgggattcagcaacctcgaatacggtctgatggccgagtatctgggaaagagcaagttggcctcggaggctacgaataatgctgcccccgacactggaaacatggaagtcctcgccaagtacggtaacgaagcacagaagcagcagtggctggcgcccttgctggacggcaagatccgctcggccttcctcatgacagagcccgaggtagcctccagtgatgcgacgaacatccagctgaacatccgccgcgaaggcaaccaatacgtcctcaatggatcgaaatggtggtcttccggcgcaggcgatccccgctgcagcatctacctggtaatgggcaaatccgaccctaccaacaaggacccctaccgccagcaatccgtcatcctcgtccccgccgacacccccggaatcaccgtgcaccgcatgctttcggtgtacggctacgacgacgccccccacggccatggccacattagcttcaaggatgtgcgcgtccccgtctccaacattgtcctcggcgaaggccgtggcttcgagatcatccagggccgtctgggtcccggccgcatccaccacgcgatgcgcacgatcggagccgccgagaaggcgatcgagtggctcatcgcacggatcaacgacgagcg

SEQ ID NO: 721 - DNA, 741 bp, Aspergillus oryzae
gcacgaggaaaaaagggccaaaaaaaaaaaaaaaaaaaacagggaaacagtgatccgctacctattattaggtggtctgtcccttcgcgactcgcagattcgccgcgaggattccggagctattcatggggttgagcgatgatcgattgagaagtggatttgtttctcgtgcatctcattcgtgctcccttcggtcgcggctcgtcggtggcctcgcttgaccttcaacgatctgatctcgaatggctgaagctgacacttgccatttcggttgaaccatccagtaataataataatagcctcttttatgcgtgctgtctccgtcaccctacgcactactaccccccggatccctcctcctcccctactatcgcgcccgacttcgtcccatcccccatccggcggggcgacaagaggacgtttcggtcgccatcgcaatgcctacatatccgatccgacgccggcctcgcgagtgcaaaacttgtctaccatgtcgcgccagtaaggttcgttgcgatcgcacgtcccgtgcgggaattgcgtcaaacgtaactttacttgttcttacggtcgtccgccgccaactcaacctaaaccgccgttcattccagatcctaccttttcagctgccgcctccactgtgtctacacctcaatttccttcgggttcagcctatatatcttctagtcgagacgatgcccccatttcctcctacagcgcagagccgacctcggatgatgc

SEQ ID NO: 722 - DNA, 744 bp, Aspergillus oryzae
ttcggcagaggcttttcagtcattcctttgacttagattatcgttgaggttgaccctccgactttcatttctatatccacccttcccggcccctccttagagccgaatttgccttccctccttatttctacgacagcccttgtcaattcccattcactaccagcagaatgatgctctctaagatccttctttccgcagtttgtgcgatgactgcttctgccctccctcatcactaccccagaggtagtcctgtcagcgttgctccgaccaccacttccatcgccgccagctctagctccagtgccagtgccagtgccagcgccagtgccagcgccagcgccagtgccagcgccagtgccagtgccagcggaagtggcaatgtccagattgtgaacaacctcggcagcaccgtatacctgtggtccacctccgacacctccagcgacacgcagaccatttcctctggcggcagctattccgaggcttggaagaccgagtccaccggcggtatctccatcaagatggcaaccacagacagtgaaccagcgtcttgcaattcgagtacaccgcggatggcgacaccgtttactgggatctctcgtctatcaacctggactctgactcggaatttatcaccgctggcttctcggccaccccgagtgattcgagctgttcgtctgcatcctgctccgcgggagataccgactgcggcggttcgtatcagcagcccgatgacaacgacac

SEQ ID NO: 723 - DNA, 741 bp, Aspergillus oryzae
cagaggccggcctaccctaacctcagtggtaactcgtttgtctgctcgtctgcgggcgctaaagctgggcagcgtgctattagcggtgatgactatatacaggtgaactaccagtatagctacgggcacgtgtggcggaacttcggcatcttgattgcctccttgttgggttcatgatgatttacttcattgccactgagttgaattcgtctaccagtagcactgccgaagttttggtcttccgtcgtggacatgagccggcatatttgcgcaccgactcaaagaaacacgatgctgagagcgcagtggagctcagtgcgatgaagcctaccacggagtcgggtgaaggggatatgtctatcataccgccacagaaggatatctttacatggagagacgtttgctatgatatcgagatccagggtgaaccacggcgactattggatcatgtttctggatgggtcaagccaggcacgttgactgctctcatgggtgtcagtggtgcaggtaaaaccactttgcttgatgtactggcgcaccggacttccatgggtgttattacaggtgacatgttcgtgaatggccgaggcctcgaccaaagcttccagagaagcactggctatgttcagcaacaggatctacaatctcgaaactgctactgtccgcgagtcgctcagattcagcgctctccttcgtcaacccctaatgtctctatccaggaaaagtatgactatgtggagg

SEQ ID NO: 724 - DNA, 741 bp, Aspergillus oryzae
cgacagcacagacaaataccactgccagctcatcgtctcctgggccgactcaaagggcatcgacgtcccgaaatcaaacgcagagcgcctggccctcatgaaatctctaacgacgaactgggctgatccgttccggtctcttattcaccagatcccagatgagacggaggtggtttcgattcgtgttgtcgattggattttcagtccgcggaggcaaaggggtcatcctcgggttgttcttgtgggcgattcggcgcatactatgactatgtgtttgttgtccttttctttttagtatcttgtggggtggagctgtttactaacggaagggatgtagtcagaggtgaaggtgccaataacgctatcgtggatgtacaggatctggttaagaggattgattttacgtcagctgagtatgaaaccactcttagttgggtttggttcatgggtgatgtgatatgctaacgaggtgtagatcgttcacgctagatgcccttcgttcttctgttgccgcatatgaacaggatatctttgcccgtgcggaaacgtctgttctgaattccagacaggcgtgtcttgatgcgcatgattttgagaagattttgaatgggagtcctttggtttcgaagagggtgcttaaggaggataagtaagtctgagtatctttaggatagaattcgatcggagatctacccgggtatgcaaaagttgggtataactcatgaagatcaagtgatgaga

SEQ ID NO: 725 - DNA, 688 bp, Aspergillus oryzae
ttcggcacgagggtttgtcattagtcaccagagccatacctactcgacttgaataacggtgggcaaagttagcctgctgatatatgcattgaatttctatatatttataagaactacctgatgtaatgatcgggtatccaaaaagacactccaccgccgagttggcccgtacccagaaccccaagacatgaaaataatagagaaaaagaacagaaagacaacgctaaatcgcaagtttcatcccagaattatgtatataggtgggtctcgtttgtcgcttgtagctctgcgcggcggagatatggggttggaatgttgtgcgattggcgcggttcatgttcttgagctcgctaaagtccttccagatatcaatggcgaatgcgccgcgattgcagcacctagagcggtagtctcgtgcatcgctggccgttcaacagggatctggataatatctgcctgggtctaagggaacaagttaatttcatgcttcttattgtgttaagtgaaataagtgcgacatacctgcatgcaaatatcggaattactcataccaccatcgacggcgagttccgacaatgcgtgtccgctatccatctccatggcatcgaggattgccttagtttggaagcaggcagcttccatggtggcacgagcaatgtgtccacgctgcgtgtgctgagttattccg

SEQ ID NO: 726 - DNA, 741 bp, Aspergillus oryzae
cacgagggggaatcattctggttgaatccctcgagagtgtgctacaaaagcatcttgtactctctgtcaacctttgtcatcctcatttactttgggaagcaagggccttgattccttgcctgctcgggttgattgctatactcaagtctttcttcctctgtatatcattgtctatttttgctccattgtctctacgcaaaccctatcccaatcgggaagttgcagaacatcaggtgcccgtgcatctccaaagcgatacagccctctgtttccagagtcattgcttcgtctgacgactgttccccccctgggattgatactacgcaatctcttggaactacccaccagatccattatacccattgttggcccttttgaaagatttgatctcgccctcgcattccgttctccacatactgaaataaccacccttgaaccaaagtgggcatgcaaggccacagtgaccatcctgactttgtcctctttcctccgcaatacaacattgaaagtaaaatgttggccttcgaaccgtcgagacagcagcaaaccccatacttccagcatttcactatggatcccgctttgaccgagcccttcccctttcatgtggacctgagtggcttcggacaaagtcccaattcctcacgactgccccagtcatcttattacgatactccgtcgattgatgcatactccgataataaagcgaccagcttcccgccgatgccggctactccaccc

SEQ ID NO: 727 - DNA, 741 bp, Aspergillus oryzae
gcacgaggctttcttcattttttttcctcttcttttctccatcctctcctctcctctccactccttctttgtttcttttcctaccctctccttccttctccaacacccacaatgtctgcttctgctcttctaagaagtcgtgttaggcggccttcrctacgctcaagaagctagcvaaaggcagagggatctcatcgaattctttcctcatggctcttacatcggctggtccggatttacgggtgttgggtaccccaagaaagttccaacggcactggcasacctgtcagaagatggacttgaaggaaagctgcagtacaccttgtttgtcggtgcttcatctggcgccgagacggagaaccgctgggctagactgaatatgayacgagcgtcggagtcctcaccaggtcggcaaggagattgccaagggtatcaactccggacagatraaattcttcgataagcatctgagcatgttcccctcagatctggtttatggctggtacamactgaacaagcctaagaataggctggatgtcgccgtcattgaggcatccgcgatcaccgaggatggtggtatcatccctggtgcttccgtcggtgcttcaccggaattggttcagatggcagataaggtcatcattgaagtgaaamcgccagcccttcattcgagggcctccacgatatcaccatgtctgagcttcctccgagacgcaagccttacctcatccttcagcccga

SEQ ID NO: 728 - DNA, 743 bp, Aspergillus oryzae
ggcacgaggcaccatcgcagtcgccaaaatgccttcccgcaagcagtggatcgataaaaagaatgcaactacataccaactcttccaccgatccaaaatgaccccctgattcacgacgcctcagccgatgaccgtgttctggccccggtgtcaaggccctgcaagcaaggtaagcttttacccctcgaaggcccgcggtaagaagctctcggatttagctagtgagtttgggggcgagtccgtccggaaaaacgaaggtgaagccgcgaactatggtattttctacgacgactcgaaatatgattacatgcaacatttgcgtgaactgaacaccggtggtggtgattcatatttcgtggaagcgaagagcaaggacaagggcaaggctaaggggatgaagctggaagatgctctgcgacaagtcactctggacgatgcgagaagcgagtacggaccgggaagtgtctacggatctgatatgcgttcaactgcctcgtcctatgtccggcaaccgacctaccaggatcagcagaacgtgcctgatgcgattgctggattccagcctgatatggatccccgtctgcgggaagtattggaggctcttgaggatgaggaatatgttgacgcagacgacgaggaggatgtgtttggccaattaaccactcaggcggaggagatggaccagggtgattgggaggatacgttgtttgacgaggaagatgatgatggatgggagtctgatg

SEQ ID NO: 729 - DNA, 419 bp, Aspergillus oryzae
gcacgaggggcgaatcgtcgcgggttcggattctgatgcaggacgagtacaacaggtattcatggagctttttcacccaccacgtcggtaatagctggcacggtaaagatgcacgcttgattttctggatgggacagcattggatgttcctgacggtgtgcggctttatccttgtagggtccgttggtttctgcctctggtgggtttatggtcgactgattttgttgggctcgaagtatcgttatcggtacaccaaggttccaacattcatctctgtttccggcctatcccctactcgcagaccacggcgcccgaccccgacattgctgcgccgtgtctcttttaaagaggacgaagaaacagggcctatcactgagacctcatacgagctctacagtcgtcgtgattgagcgtgtccg

SEQ ID NO: 730 - DNA, 626 bp, Aspergillus oryzae
ggcacgaggcaagagcctacctcataccctcgcttccaagagactcccaaggtctacgatcaggagctttccaaccagctagacatcactgagcgtgattatcgtcgtcgtgtcaaccaacagacctacgacgtctataacaccaacgctagctatcagcagtctagtgtagagtcctacgagaaccgtcaacccgtctcgtacgaccgtactcctgcccacccccagctcgacgtctcgtacgacaaggcttatcaagctcccaccctcgagacctaccccggctcttctcgcagccaacgtcaggtctctgtcgagccagtcaacccaccttctcaagtcaaggttcttagcactactactgtagttgattatccccctgctcgcaagatgggatactacgccgccgccgtttcccgtgmcggtgcccaccmcgccstccgcgtcgttgagccccgcagcagcgctcgcagaagcgccsccaccgtgcccmttccctgcaacttcattcgcatcggcgacatcttcctcctccagggccgtccctgccaggtcatccgtatctccgtgtcgccccagacccgccagcaccctacctcggtgtcgatctcttcacccgccacact

SEQ ID NO: 731 - DNA, 801 bp, Aspergillus oryzae
gcgaattgggtacgggcccccctcgaggtcgacggtatcgataagcttgatatcgaattcggcacgagggattatttagctagcactatgccctctcatactgaatcaaagtatgagtttggtggacctttgggtgctgctgccatcaccgtgggcctccccattctgctctatgtctttgcctttacatgcaacgatgtaactggctgtccagtaccatcactactaagccctcgtaccctgagctgggggaggctaaaatccgagattggacggcctcttgggggcatctggggtctttacagttgggaggtgacgggggtggtgcttgcatattacctcctcagcatgttcctctggaagattctccctgcacaagaagtgcgtggcacaaagttggttcaacacgatcggccgttgacataccgctttaactctttctcgtctagcgttgttcagctagctgcatgcgccattggaacatatctcaagggtgcagactttgttgtctggacgtacatcgcggacaattatgtgcagctattgaccgccaacattctgatatcatacgccctttccgcgtttgtatacgtacgcagcttcagcgtggacaccaattatccaaacaaggagcttcgtgagttagctgctggtggaaacactggtaattctgtatacgatttttatatcggtcgtgagctgaaccctcgtgtgtctctcccaatcttcggcgaatttgacatcaaaacctggtgcgagatgcgccccggcctgactgggtggatattgctcaacttagca

SEQ ID NO: 732 - DNA, 607 bp, Aspergillus oryzae
cagcgacccgcgcatttccttctcgaaactggacgacaagttcttttggaaacgatgatggtcggagtttgaatacgatacggctttgaagcgatggattccgacggtgtgtgcgcgctttctctccagctggtgattcctgttgtgtttttccggctgttgaaatcctgctctgctgttgttttctattgcgactgcgcgtgaaagcgcccaagaaccttcttccgttgcaaatatgctgggatagctatgactgcaaggactttggatggttcgtgaactgatctcgtggtgggcgccgcttttgcgcgcccgtgggtattctccaggtagatgaacaactgctccgacaacaacaagaagcctataaagttgagggcgtagatgacaatgacgaagtccggcatcgcaactcaagaaaaaacgcaagcaacaagcgacaaaagacgaggttagtggggtattcacctttggcttatgtcgcaagcctggggggactaacattggtggattctactcaggggaacggccaaaaaccgaagaaacagcgcgttaacacagcggtctatgtcacatccattcctcttgacgctgactttgaagaaat

SEQ ID NO: 733 - DNA, 630 bp, Aspergillus oryzae
cccgagagtcgaccaccccgcagacaccggtaacttcgaagagtatcccgatccggatgtgagaagtcaaaacgtttataccgatgatctgaagaaaaagtatgaggctttgtttagcgacttttaggcaccgtgcccgaacaaactcaaatatacaactgaacaaacacccttctgtgaacgtactgctgccacgcgatcaggtcgatttcgtccaaccggatcaccccagcgggacgactcaagcatccgcgattggcaacggaggcttaagaccttcactgaaagatcaggagcaatgctgcgcatgtctatgtacgaacgatgttcagttcgttccgcaatacccccgcctcatgcttagcagccaactattatcgcaagggaggcttccaatacgttcacggtcgcctgacgactctatacaacatgcttagaagtccccgtcgttcagccagtgcctcttgtttccatactgtccattgccatgcgcccccctgttgactgcttatgtggccttccaggagctgctactaatattttgtaccaatgatcatcggtgacccggatggtctttgacactctatcatgagatatgatattttctttgctatttaactctctttgatg

SEQ ID NO: 734 - DNA, 640 bp, Aspergillus oryzae
tcggcacgaggcactttcaaatccctcatacttccgcatgaaaaggggttcgcaagctctcaattgatcctcctgtctccaagcaaacttacattgagctcacaaactgagccaaaacccctcaacctctctttttacgacctccgcggattcccgcatctcttttataattctttctcaacactgtcaccgagaacaataaccaccgcaaccgaatcaaaatgtcttcccccgacacctccgtcgccgcagaggccttgaaggacttttttggccaattatatacgttcttcgagacgatgatcgttcggttcttcaggaacttttataactctttcgcgacagtgggcttcaaccggtggacgaaggtcacactctcggtgatcggttacattataattsgtccatatatcgaagcctggtttaagaaaatgggtgaacgcgatcggaagaagatggaggagaaggaaaagggcaagagggaggcacaaggaggcaagaaggctaaggtttcggccaatacactgcgaggtggtgctagcggggcgggagaggtgctcggagaggtcgagaataccgatggcgagattgagggtggagaggactgtgcgactggcagcggagtgccggagtggacaga

SEQ ID NO: 735 - DNA, 538 bp, Aspergillus oryzae
  modified_base (435)..(435): n is a, c, g, or t
ggcaacaatcctccataatgtcgaatccaaattcactatacggcatcccccgatccaaattagcctcgcaatctcaatccaaatgccccttcctcctctacgctcgccttmacgacagccctatcctccctaataaacaaagasggcgamaccwttacccgaggccgaccccgaccatccaaaaccaacaaatcagacatcttcgggsgccccaamaaaggsgcccagaaacgkgccgccgttgacctccgggasgatgacactcaccaaacaaaccagggatcccaagacatatgggggsgtagamaccgccacgtttcaccgttccaaggggggaatggaggggaagggggggatgtacggggacctcaagaaggggatgtacctggcagccgggagcgactcggaagaagaaacaaaggacgagtatctcgngcgactacgggggggggaaaaagaggggttggtggattttgaccagaaatgggcagatgcgcaggagggaagggttctgggagtgagggcgaagaggaagatg

SEQ ID NO: 736 - DNA, 438 bp, Aspergillus oryzae
ggcacgaggggacaatcggtggtggtatgcctggcacatatcgggaggccagaagacaggcagtactatataacaacgaatcggtgttcctcatctcgttgtggaagtccgactgattatttatggacactaaagggccgaaattatccacaaatctagctcaagcattagcggctatagaggcagatggacatgacgagtgaccatacagctgtaccaacttgagagacaacttagaatctaagatacccttctcaaaactgttacccaagaaaggagattcaacagggatgcggtttgtctccccaaaaaactcagattggaggtcctgaattagccgaacgggtttaggtaggaaaggaccgaatgagtttccttcaatggaggccgtttcttccgtatgaacactccgagctagcggaggggacggagatatta

SEQ ID NO: 737 - DNA, 530 bp, Aspergillus oryzae
attcggcacgaggctcgtttcgtggcccacagtcttgacacgatcatctatctgtattgtagttgttttttcaggtcgtgaatgatgttaatctgtgatttttgattcgccaacatgtcgaccgatcgaactccgaagtatcggcaggaaatccagcagatgatgttcgtctctggtgagactgccgagccatcagtggaaacaactactctgatagaagagatcgttcgccagcaagtcgttgagattctcgcacgcagtacaacggtggcaacacgacgaggtgttcgctctatttccgactgacgatttgatctttctcattcgacatgacaaggccaaggtctcgggcctgaagaccytccyttccyggaaagatgtccccaagaatgtcaaagattcagatgacaaaggcggtgcccaccgctgctgaatttgcaggagcccatgaccctcttgcagggggtgtcgtcgctgggccccagatgtcgcttcgaagccsaaaaataagagggcccctgttggtctcg

SEQ ID NO: 738 - DNA, 761 bp, Aspergillus oryzae
aattcggcacgaggctcagagcaacaagagcactgcattccgcaaagcgatcgagtctgttaaactcagccgctcaagtttccaattggtccgtcgcgctgcctacgatgtccggcgcatgatccctttcactctcattctcatcgtgtgcggggagatgacacccttagctgtcctagccttggggaacgccgtcacgccgttcacctgtcgtgtccctcagcaacttgagaaggaccgcgcgcacggtggcccggaaacgcgccgctttagttgcgcagaggcagccaccagcgggtccgttacgccgcctgccgcgggatcggatctggagctggatattctggtcaagatgtatacaaatctggaatggatcgagagtgcgagcgccgaggaaatcctgcgcgcgtgtgcggtgctgaatctcgtgaagacacatactagatcttccgtgttactgtcgctgtaccgggcgaggctgcagcggtatgcagagtacttgtctttggacgatcagttgattaggcgctgtggaggtgttcgagcgatggagggtgcagaggtcaggactgcagtggaggagcgcggtggtgttggtgtgaccgagggtaaggagggctgggatgcggagagggatgagagacgctggctggagaaatggctagagaggaggtaagttggcttatcaatgtactatactgtagattcagtctgtctgtaaactagcgtgtctgtttcagaaatatagatacagatatctc

SEQ ID NO: 739 - DNA, 824 bp, Aspergillus oryzae
aattcggcacgaggatgcacacctgccgctcagtatggtgttgtgtccgtcgagatctcgaaacaatagcgatggtaaacgatgattccaagggttgcagaacatcgcgagctttcggaagttcatctctaagcactgaccgctcgctgtcttgatttactgttgcaaagaggaagcttgaatgcgacttttgtcggaacaagccagttgtgcttaatgcgtcagggaagatgcatccgggtctggtacatattcccttcggtgatttgttgctgctgttggtaacgtatacctcacaggtctttccgaaagaacgtcgaagtaaaagtgtgacttgctctctgcaggtctgatgactgaggcagaggcacatcgtgacagttaggctactcaggcaaacatgccagggagaacagaaactgtcatcaacagagtatatacacagtctactcttagtctatccctcatggtaacagcttaacacaagctacatcacgtatctacttgcaggataattaaagacagtctataaataagccgaagcccatttccgtatctagaaaacagcagctaatattacacgatcataaagaccaacaggtaaagacatgagaccatggaggaaaaaatgtacagatacagaagcaccagatggactcaggtcgctgcgatccagtgccccgttcgccgaacctttgacaatccctacccagattcaacgggttgttttatatgcatctattgcttcgattcttttttctcctgagctttctgggccttctcttccttccggccgtcaagctctaacttcttaatctcccgct

SEQ ID NO: 740 - DNA, 445 bp, Aspergillus oryzae
  modified_base (10)..(10): n is a, c, g, or t
  modified_base (250)..(250): n is a, c, g, or t
  modified_base (275)..(275): n is a, c, g, or t
  modified_base (277)..(277): n is a, c, g, or t
  modified_base (281)..(281): n is a, c, g, or t
  modified_base (293)..(293): n is a, c, g, or t
  modified_base (298)..(298): n is a, c, g, or t
  modified_base (305)..(305): n is a, c, g, or t
  modified_base (308)..(308): n is a, c, g, or t
  modified_base (310)..(310): n is a, c, g, or t
  modified_base (313)..(313): n is a, c, g, or t
  modified_base (316)..(316): n is a, c, g, or t
  modified_base (353)..(353): n is a, c, g, or t
  modified_base (370)..(370): n is a, c, g, or t
  modified_base (389)..(389): n is a, c, g, or t
  modified_base (415)..(415): n is a, c, g, or t
tcggcacgangcacacaactaatttcgcaatggctaagtcaccgcagatcttcaaattgccattctgggcgctggtatgggagggcttacatgtgccctggccctcgcccaagaaggcttcaagaacattgatgtctatgagtcggcttctgacttgggcttcgttggagcgggtatccaactggcgccgaatatggctcgagtactggaccgtctgggagtatggaagggaattgaagcggaggccgtnaacatcgaagagactagcgtaagantnggtncaaccgacgctnaactngcacatnttnanctncantatatcaaagacacatatggatacccgcacatggttngccaccgttcatcactntccaacggactctaccaangctgtctccgctacccgaacatcaanttccatttcgccacgtccgccggaaacgtc

SEQ ID NO: 741 - DNA, 652 bp, Aspergillus oryzae
  modified_base (365)..(365): n is a, c, g, or t
  modified_base (416)..(416): n is a, c, g, or t
  modified_base (425)..(425): n is a, c, g, or t
  modified_base (427)..(427): n is a, c, g, or t
  modified_base (440)..(440): n is a, c, g, or t
  modified_base (455)..(455): n is a, c, g, or t
  modified_base (479)..(479): n is a, c, g, or t
  modified_base (482)..(482): n is a, c, g, or t
  modified_base (488)..(488): n is a, c, g, or t
  modified_base (506)..(506): n is a, c, g, or t
  modified_base (531)..(531): n is a, c, g, or t
  modified_base (535)..(535): n is a, c, g, or t
  modified_base (550)..(550): n is a, c, g, or t
  modified_base (552)..(552): n is a, c, g, or t
  modified_base (557)..(557): n is a, c, g, or t
  modified_base (559)..(559): n is a, c, g, or t
  modified_base (563)..(563): n is a, c, g, or t
gtgcttttcgtcataccctttttcgttcgcacttctcccactccatcaccatgtccgagaaaactcaccccactatccaggatggctggttctccgagaagtccaacatgtggcctggtcaggccatgagcctcaaggtcaaccagatcctgcaccacgagaagtctaagtaccaggatgtcctcgtcttcgagagcagcgactacggcactgtcctcgttctggacaatgtcatccagtgcactgagcgggatgagttctcctaccaggagatgatcacccacctcgccatgaactctcaccccaaccccgagaaggtcctggtcatcggtggtggagacggcggtgttctccgtgaggtcgtnaagcacgaaaccgtcaagaaggccatcctgtgcgatatcgatgaggccgtnatccgtgtntntaagaagtacctncccggcatgagcatnggcttccaacaccccaacgtcganganttcgtnggcgatggcttttgagtncctcaaaacccacaagaacgagttncgangtaaamaaaaamganancaccnancctnagggtcctgctgagagtctcttccagaagccctactttgagckcctgcgcgatgcgctcccgtgacggaggtgtcatcaccacacaagc

SEQ ID NO: 742 - DNA, 486 bp, Aspergillus oryzae
  modified_base (56)..(56): n is a, c, g, or t
tacactacgaccgacatctacatcgcggggttagtggtcatagtaaccccccaacncccccccactatcttttccccctttcaacatgtgatagaacgacacgacctggtttgcatttttttgaactgcatccgatgattgatttcttggttattgagcctcattcgcattgacttggacatgagtggacggtgtaatgcatggkgcattggtttattttgggagcattgtcatagcaggcgttttgtgttattatgcagttagcaagcatttcctttgttatgtttcaaaatcagaaagaatacggtcccaaaacggatgggcggtcatttgtgaggggttactgtgttggtttctccgggcgattggggattttcgccctttgtttaattttgacgcatacctgctattgttatgtccggcatgatttttggctgcatcggactggctgcattatctacactcttccatgtatgacttagcatt

SEQ ID NO: 743 - DNA, 334 bp, Aspergillus oryzae
ttcggcacgaggcgaggttcttgtgaagcggccccgtgcgtgaactcgaatggattggatgacttggcgataatgaacaccgcatgccatcatatcagcatatcatgtcttccatatcatgtttatgatgagctcatgttatcgattgattaatgttttcatctagcggcaacagaatatcgaaactggtgcgataacagtctttgttacccgtctcccttcctcttcctggctcgtctgtccagaggtggtggaggatcttcagatcagtccgttccattcaatgtattactgtattttagaggcataattatcgcacttgttgatctctttc

SEQ ID NO: 744 - DNA, 907 bp, Aspergillus oryzae
ggttcgcgtgcgaccgcttatactcagtttgagttctaataatctttcctatgcgcgtgcgggggagttacttcattggtgggatacatacccggtccccagtgaagcacccgctccatacaacgaccaatcggcgtgggggatcgtcccggcatgggggtatgccacggtcctcgaaagcacgactgatatcgcaccgggatcgacactctggggattctggccgacctcaggactcccgacggagctaacgctgatcccgggccagccgcgcgggcattggactgaggtgagcgagcaccggaaacatctcatgacgtactacaaccgatacgaagtggtgagtgaagatgaccgggacactatggcttggacggcagctattcgtgcgatttggggcgccggctatctgctcagtgagtatgtcttttcgtctacaggaacgcctgttcatccttacggcggtgcggctgggttgagctggactactgaggatgcggacttrtartctgcagttataataaatttggctgcatcgactaagacggcgcgttcctttacgtataatcttttgtgccggcccgctgggtcggggccgttgggtgtcttgcagattacttcttcgcctgaggctttggagagggctgctgagttgcagattgcgaasgtacagacgcccgctgggccggtgaaggctctggcgtattcggatgtggatcgggcagtgccttggttggttggtcttaagccggcgaagttggtgattattgattatggtgctcgggataatgtactcgtgcgacttcgtgaactggtgcagagcaatgaggcgcttaaggactgcvaggttgtgataatccaagtkggaagccagcggaaggtgtataccgaggaggaggtgcgcgaa

SEQ ID NO: 745 - DNA, 832 bp, Aspergillus oryzae
aattcggcacgarggtcttgtttgaagctgcccttagtttgtttggagacacctgtgcactggttgcattggtttagttgttttgttcaattcattctactataccttaataatcatctttctatacttgccccttcacctctttgatatcaaaaaaacaaaaatcatactcaaatccccctaacagacgagctgtgctctctaataccccaatttccattatccacgtcttgattttgacagttcaactttgtcgctggtcgacgtctccattcagcagctcacaaccttgctcagccttgttcattttatcgccgaggctttttactatctttttctaattttcgtgtcgtggactggatccgcgagcaatactgttggataccgcagtcaaccaaccaacaaaccaacacggacttgattgaatcggctctggtagtctttcgactcaagtcttatatcttctgcatcgaatactgtggaagagtgctttcatctttgacttcgacacgataacctatacattcaccgtgaatattattaatctttaatctaactacgtcaatcactcaaaatgtccgctgtgcaactcaagttcactcttcggacttcgtccaatgtcaagactgtccacctgcttggctcttgggacaactactcccgccagatccccctctccagggatgagggcaagcccggttcatgggttggcaagttccgcttccagacctccatgcttaagctcggcggccgccaccgcggtggagctccagcttttgttccctttagtgagggttaattgcgcgcttggcgtaatcatggtcatagctgt

SEQ ID NO: 746 - DNA, 697 bp, Aspergillus oryzae
tctctttctcgctgactctctctctattcgatccacttcccggtcatgcagcggtccgacccagaaacgcccaggatacggagttgatgaccataggttcctgttggtggataactaagttttgtgtcgagagatatggcggctttctcgaacactgtcggtattgattgatgaatatcgcatgcwttgttgtacagatccaattgtggcctcaggataagagagagaaccgatgttgaaggacctgcggactccgtcccatcactatcgatctaggctcgcgcacgggaccaaaagaagaaaatagtgcaaaatcctccgtgcataccgatccatccattcatgatcgatcatttccagtccaatctcatattctccggaaaggggtaaagaaggaaaaaagaaaaaggtcaaagttaaaatccgaaagagctggaaaccttgaagactctcctgcgctcaacaagcgagtwgatttgctgcagctagccgtctttatcatccctacggtcccatagttcggtacgtaaccacatagtcccagatgcwataatggatctacggccagtygatcggaaacccaaagaagataattttttgaatcatgaaattccatctctcccgattttcgtccccaccaggtaccgttgcaggattycaggaacctcttccccgaagaccccgtccttacactagt

SEQ ID NO: 747 - DNA, 335 bp, Aspergillus oryzae
  modified_base (201)..(201): n is a, c, g, or t
  modified_base (228)..(228): n is a, c, g, or t
  modified_base (231)..(232): n is a, c, g, or t
  modified_base (236)..(236): n is a, c, g, or t
  modified_base (241)..(241): n is a, c, g, or t
  modified_base (245)..(245): n is a, c, g, or t
  modified_base (249)..(250): n is a, c, g, or t
  modified_base (253)..(253): n is a, c, g, or t
  modified_base (258)..(258): n is a, c, g, or t
  modified_base (261)..(261): n is a, c, g, or t
  modified_base (267)..(267): n is a, c, g, or t
  modified_base (269)..(269): n is a, c, g, or t
  modified_base (281)..(282): n is a, c, g, or t
  modified_base (284)..(284): n is a, c, g, or t
  modified_base (297)..(297): n is a, c, g, or t
  modified_base (301)..(301): n is a, c, g, or t
  modified_base (307)..(308): n is a, c, g, or t
ggcacgacgattctggcgctcctcaacctggtagatctgccccccagtacccaccctcagctccgcattaagtggtttactcggcatccgctgaggtatgccgagtacatggatggctggattctgcgggacaacaccggcctgaagggttccgccgccgactttacacaacaacaactggaggaggacaaactccctcantccgaagccggccggttcatcaccaangtnnactncggangcgnccannaancaacncantatgancngcatctaccgtnntncacccacctcgtncaanctgtannatttactcgggatccccttccccagct

SEQ ID NO: 748 - DNA, 798 bp, Aspergillus oryzae
aattcggcacgasgaccactcgatcaacgtctccatgctgaaggagcgttgtctataaatcaagcttcactaacttgcctgaggctataccagctcgagctcagtttgcgctaccgaaatcccattatatctgcgttccgtgtgtggacctagacggtcctattgctccgcatcatgacggccggcctcaaaacaattatcgcactgtcgtttgtcctcgccattggcttcctactcgtcattctttcctcagctctttggcacaacttcttaccgttgattgtcgttgcgacttacgttgttgctcccttacccaactggatctgctcacgatgtgcgaacccagatgattttatggacagctctggaaatgctgcagctgattttggtcgtttcttaacgggtttcctagttttgatgggcatcgcgctcccagctgtacttgcgcatagcggcgcaatccaggtcccggcgatgatcatgtcgattcttggcggtcttttgatttatggaacaattattagtttctccatgtttttcaaggagcaggaggagtgttgagtgactatgggtgtgagcgagttagggtaaaatcacttaggtgcgcttggccacatctgatttgccgatttaccagamctatgaaggcttcctctagtattcatggggcagtggattcctcatgaaatacctctttgttctgacgtatggkgagagttctttatgtgaaatttgccgcgaattctagcctttagtttacttctatactgttggaatgatatgatttatgtkctatag

SEQ ID NO: 749 - DNA, 393 bp, Aspergillus oryzae
  modified_base (76)..(76): n is a, c, g, or t
  modified_base (124)..(124): n is a, c, g, or t
  modified_base (129)..(129): n is a, c, g, or t
  modified_base (134)..(134): n is a, c, g, or t
  modified_base (137)..(137): n is a, c, g, or t
  modified_base (156)..(156): n is a, c, g, or t
  modified_base (161)..(161): n is a, c, g, or t
  modified_base (164)..(164): n is a, c, g, or t
  modified_base (168)..(169): n is a, c, g, or t
  modified_base (175)..(175): n is a, c, g, or t
  modified_base (178)..(178): n is a, c, g, or t
  modified_base (180)..(180): n is a, c, g, or t
  modified_base (185)..(185): n is a, c, g, or t
  modified_base (193)..(193): n is a, c, g, or t
  modified_base (195)..(195): n is a, c, g, or t
  modified_base (198)..(198): n is a, c, g, or t
  modified_base (200)..(202): n is a, c, g, or t
  modified_base (206)..(208): n is a, c, g, or t
  modified_base (216)..(217): n is a, c, g, or t
  modified_base (219)..(220): n is a, c, g, or t
  modified_base (227)..(228): n is a, c, g, or t
  modified_base (231)..(232): n is a, c, g, or t
  modified_base (236)..(236): n is a, c, g, or t
  modified_base (265)..(265): n is a, c, g, or t
cggcacgaggattgccctctacaccaagtcctagggactcaattgctcaacatgttgcctttggctcgaagccggntcgcggcgttctctgccgcctgggctcctcgcgttgccgcccgggccnagctnctccnmcnmcgtccctcgtttctccgnagaanagnatcnnaagccnaangnaccgnaacccccngnaangnnnaagnnnaatgtatnngnnagaatgnnatnntgtngatgctataggttccgggatgcgcccttnaggagatgtttagcttgtgaacgcaacgcsagcttcaggccctaaccgcgccaggactggggcgccagccagcagccaasagagaaggctatgactsggactcgcttcgcagcagacaatcatggasa

SEQ ID NO: 750 - DNA, 342 bp, Aspergillus oryzae
  modified_base (134)..(134): n is a, c, g, or t
  modified_base (230)..(230): n is a, c, g, or t
  modified_base (280)..(280): n is a, c, g, or t
  modified_base (286)..(286): n is a, c, g, or t
attcggcacgagggaacgggtgggatcggcggctggccgtctgatttgctttccatcwtataaactgccgttttggtttatggagttccatgtcgcttaattaaagtggtctgggtggcgtacgcacagctgtntagcttttgatacctggaaatttgtatggagttatgggatatgtatatatggtatgatcaggctcaccccgagctctcgtttgtaatgaggcactngtgggatgctctctttataatgttcgaaatatgggtcgtttttagatgantctccnacgtkattgtgtgccggttgttacgtatccsccarccgatcgttcttttagcgaat

SEQ ID NO: 751 - DNA, 496 bp, Aspergillus oryzae
  modified_base (8)..(8): n is a, c, g, or t
  modified_base (242)..(242): n is a, c, g, or t
ggcacgangagagtggatttagggggttgtttgaagacggaggttagttgattaaggataatctagaaacatgacagggatatttttggacggagggggccaatgggggccataatgtgatctcgcttttcgtattgcattcaagatcttattctgtttctcttctattcatactttaattcttcaaggttgtgtcacaccccgctcgttgggttttgccttggttgcccggtccgtgcctngtgatttatattatttaccactaggcttggctcctgcagatgtctttcgcaagctgtctcctgatccttgaagtatcagtcgcttttacaagagtctatcctctaggcggttgagagatctacctatttaacacgaatcactgaaagagaagcggactctccctaccctgcagggactgtacgccacggaaggcatcctttcactacatggtactcaggaatttggcatgagtacttgcacctatctcctatcc

SEQ ID NO: 752 - DNA, 680 bp, Aspergillus oryzae
aattcggcacgasggaatacacaagagatcctcgacgtccactgccaattcccaagtgccaagagctacgccgacgtgtacgacwcatacggccttctaacaccacgaacgatcctcgcccacggcgtccatctatcacccgacgagcaagatcttatccacgaccgaggcgccaaggtctctcactgtcccgcgtcaaactctgccctagggtctggcatctgtwmmgattcgcaagctcctcgacaagggaatcactgtcggtctcggcacggatgttagcggcgggtatagccccagtatcttggaagccgtccgacaagcgtgtctcgtatcccggttacttcggcatgtggaaccggccagcgaaggagatgaaggaaagaaactcgtcctgagcgtggaagaggctctgtacctggctacacgtgggggcgcactgcggtcaatatggagaacgatatcggtggattcgacgacggcatgctgttcgatgcgcactgaatccatctggggcggttcttacctgcgagccggtatgacaatrgcgaaagcaaagttgatgtctttggatgggagaagtgggaagagaagawtcacaagtgggtgtggagtggtaatgatcgtaatgttaagggtgtctgggttggaggaaagctggtgcatggggaggatgctgt

SEQ ID NO: 753 - DNA, 412 bp, Aspergillus oryzae
  modified_base (115)..(115): n is a, c, g, or t
gcgcgagttcatatcaacccctgaacagacacaaaccgtgatccatgctttggaagatcacgttgtggagttggttcaagatttgaatggtaatcatgtgattcagaagtgcctnaatcgtctctctgcggaagacgcccaattcatctatgatgctgtgggtgctaattgtgttgtggtcggcactcaccgtcatggatgttgcgttcttcagcgctgtattgatcatgcttctggtgagcagagggctcgtctaatcgcgcagatcacatccaacgcttttgccttggtccaagatccttttggaaattacgtggtgcagtmcatcttggatctggccgagcctcatttcaccgaacccctttgtcagacgttccgtggaaatattcccgccttatcaaagcaaaaattt

SEQ ID NO: 754 - DNA, 634 bp, Aspergillus oryzae
ggaaaacatatactcaatcccctctcaaaccgacgaactcccctcaaccccaccacctcaattaacctcctctacctcaacgggctccccaaaaagccaaaaacacagaaaaaatggtcgacatagtccccctctccagcgacccaagckacatcgacctcctcccctcaatccaaacctgcaacatcaccaacctccccgaaaactacttcctaaaatactacctctaccatgcgctcacctggccgcaactgagcttcgtcgccgtcgtccgccccaagaatggatacgccaaacacacagckcccggcgggggcgcaaccgccagcgagcagtatccgaagtggtggggtacgtgttggccaagatggaagaggagccgacggacggggtgcgcacatggacatattacttcgtgtgagtgtgatgaggacgcatagacggttgggtattgccgagaggttgatgaggatgtttcaacgtgctatggccgaatcacaccgcgcccagtacgtttcgcttcatgtgcgtttgarccacaccgctgcactgcggttataccgcgataccctcggattcaaggtcgagactgttgagagcsagtwctatgccgacggggaggatgcgtatgcga

SEQ ID NO: 755 - DNA, 506 bp, Aspergillus oryzae
  modified_base (333)..(333): n is a, c, g, or t
  modified_base (345)..(345): n is a, c, g, or t
  modified_base (358)..(358): n is a, c, g, or t
  modified_base (375)..(375): n is a, c, g, or t
  modified_base (397)..(397): n is a, c, g, or t
  modified_base (415)..(415): n is a, c, g, or t
  modified_base (419)..(419): n is a, c, g, or t
  modified_base (421)..(421): n is a, c, g, or t
ggtggagggtatggataaggttgatatggaataaggatgaagtgatatatgagtttcatgggaagagtggtgatatggtgaatgaggtgaaagsggaggaagsggtagtggsstgtgtcgaggtggagagtgggggagaggggatggtgaggggaagtkaggatatgagggttaaggtgtttgagcgggagagtggggagttgtgaattgaggtaggggggtggaggaggaggtggatgttgagtgtgaagtgggagtatggagcgatggtagggagaagggaggattgtggaggtctgatgatacagtttccgtatacagtacatgcgattnaattcttacatnaatatagccagangggtagagatatatttngtttttatgttgtggatgagancaaaacttgccctttganccantntatagccctagtgattsaccctsttgtcgtcgtctcccaasttcgtttctagtctttcgcgtyttttttcgcsctctttccatat

SEQ ID NO: 756 - DNA, 481 bp, Aspergillus oryzae
attcggcacgaggattcagtcaactcggcaacgtcgccggttcctacgtctgggatctctctgaaaacggataccggaagagctacggcatcgtgacagccatgttcggcatcaccattgtcggctgctacggattccgcatgatgctcaagaacttgaacaaggagctcgaagaagccgagactaatgccaccactgagcccgaatcggatgagaccctggctaggagcaagggtttccggtacattacttaggttcggcttgttcttgtttttgttcttgtctaagggtctttcatgggctgggctggtttatgggatctcggttaacgattgctggctggtttgatttttttttttagattttctttctcgtttcacgatggaacgtgtatatgattttatttgacatgatgggttttttccatgtytgaacatattttatctcaatcaaaatatcttgaaaatccaattatacgagg

SEQ ID NO: 757 - DNA, 798 bp, Aspergillus oryzae
aattcggcacgabgggatgacgaattgcaaggagaagcacatcgtactgtctcaaattctcatcctgaaaccagacagcgctttgacttgcggcggaatttgattgtactcttctcctttcttcttcaagatagcccatctttgcctatctcaaatgagcctctagttaggaccattacttgggattcttcctcacccagacgcagattaggaagttcacaaaatagccccaatactagtcgaatatccgatccgccccataataatgatgttttctctcaagtcaatgaagaaaacgcacgaggaaatgaggaagaagacagaaccagctcctttatactaactttacccattcccaatacgcggggaaagagacaaatggaccgcaagatgagacacaagactcgaatagaagcgttaaaaaaggagctggagccattgtgtacagacaatggatccgccattgttttactgtgctggggtgaaagttcctgctgctccattttaccagtgcctgtgcagtacccagaagacgagtagctacttggacagagataaacaaggcctggtacactcgcagaggaacttggggggaagtatctcccgggatttggcgtcacacgggtagacattgttgaggtttgttacgtcatgtctcttgataaagtattactgatcaacaggtcaagatctcgattctagggctgaagaagacctcgaagggtcgagaaatgatgaatatattgggatatacactgagaaagacaccaatgctgagaggagasgactaccatatac

SEQ ID NO: 758 - DNA, 489 bp, Aspergillus oryzae
tgacgttggtctcgggtgatggcgtttgaattcgtccttccgcgtagtgcggcctgtgtctctgggacgatacgtcggatgctggaaccttctagtaaattcgccgaagcattgacaggtcgctgcatactggagaatatcagtggaatcgtcctcgagaaggtctgcgagtacttttgctacaacgagaagaataagaaccagtcaaatgttccagatatggaaattccgccggagttgtgtctggagttgttgatggcggcggattatctggatacctgattttcgcctccgggtctacctgctcttatgcgttacgatttagatgatctttattattcgattattatttgcggaggagtttaacagtggaacaaagtacttggcgttgggtctcgtgtatatatgggtttatccggttgacactagaatatcgtttcctgaagactatggaaaaggataaaaggtataacatgaacattatatctc

SEQ ID NO: 759 - DNA, 748 bp, Aspergillus oryzae
  modified_base (197)..(197): n is a, c, g, or t
aattcggcacgmggcttggattcaccttgatccatctcttcattccattgttactgacagaactgcaagggcttctcggtgccctcgcacttcgttatcacttgtgaatttcccttgtctttcgtttgcttttctccgattgccatgctaggcttgtcttgcgacacaatctccgcagactgccaataacgcgagtngctgttgtatagctctcgtcctgtcgtcctcctcccacgtgggtctctgtcaccaggacctgaacgcgaggcggatgatctatcagatcttctattatagcaattattttctttcatccgcttgtcagaaatgacgccggaatgccatggccccatttgggccatcgatgacgtttcccgttgctttcaacttatctacaagtcattttaccactgaccgcatgtgggctctcgcttttatttatcgtacttcgcgtctcttattgctacttcgtctctcgaaaaggtgtctcgtacaagatcctcgtggatgatgctgcggaaactggtgcccaagtggctgaggggcatggagaagaaacggatcggatgttgtccaaggccgcggaagaggaattgttacaatttgaagtcgatcgccctcgaggcgaagtcgctctgataacgctcgaagtagtggcgcttctgggagaagtggccgtcttcatcgcggttctgtggacaaatacctggggcaacagcggtaaactctctgcggtggcgaactaagt

SEQ ID NO: 760 - DNA, 876 bp, Aspergillus oryzae
agtcctcaagtcaacagcccccgcgtagatacccgcatgagttagtacagcagaggaccaagcagaggaccaagcccgagcccaagcacatatcaatccagcagcatgagaagtcggttcagtcagttaccgactgtatctaccccggcccagcggccagctgatgtagcatactcgccccatgagtacccaaggcgaacttctccaaatcccatgagccgtggcgtttcaccgcagccacagttcaggcaacaggcccgtccctcgagtgctggaggtatggagttgcagctcgccaattaagttgacatgtacggaggtgaccacggttcgccaaggcaagctggaaaaccaggatccttttatgacgcaggaagccatagaagcaggtccaggagcaggaccctggccgttgcggatcctggcagacagttcagccgggatggtcgccccattctccacttcgcccgagccatgtacagctataccgctgccatcccagaagaactgggtttcaccaaaggtgatgttctatcggtcattcgacttcaagacgacsgctggtgggaagctgaasttactaccacccgtggacggaccggtttggtccccagcaattacttgcaaattatctaaataatgtccatttcatgaacaacagcctgtgtacaggtgaacgatgtttattatgtcttcatgatgtagatacggatttacaccccttctatgtgattctctatgtttttggtgcacatgcttttcctttgtgttccagattgcttgcgattgatatcacccagttgttgtctttggcctgaccataccttctgtttgccctttaccctctttttcctttggatttcagtttcttgagaa

SEQ ID NO: 761 - DNA, 493 bp, Aspergillus oryzae
attcggcacgaggctcaaagagtggctttgacgttgcccttcctttatgttgcttgaacaatacacctttgaagacaaagcacattgttcgaacactccttatataccaaacatcactccctgcctcttcacacagcttctcacatacactgtacattcctttctgtcgtgatcattcaagtcaagaatgcacgtactatctacactcacccaggctctaagcctctgggctcccctcgccgcagccgcatacacactacaagatgactacggcacagacacaactttcttcgacaaatttagcttcttcacaggcagtgatccaacccatggcttcgtcaaatatgttgacagaggaacagctcagaacacaggcctaataaaagccgatggaaccatctacatgggcgtagattacacaaacgctgctccaggcggccgccaccgcggtggagctccagcttttgttccctttagtgagggttaattgcgc

SEQ ID NO: 762 - DNA, 591 bp, Aspergillus oryzae
aattcggcacgaggcttcacagaaggtgactccagctcctgcgactcccaagtatccacctggtgatcgttcccatattcctgaagacgcaatgcctatctatgagatcctttcggcggatatgcagcgcatcaagggccgtgcgcctacatcattcaagcaacaagttgaagatgctgaccggcggttgaaccttctgttcgatcacctgaacaatggagatctgctcaaaccaaacaccgtttctgacatggcagacttggcccgtgcaattcaggcgcgtgattacgaggcagcacgtgctatccacgtggatatcctgacaaataggactgatgagtgtggtcaatggatggttggtgtgaaacgtctcatcagcatgagcmaggctaccccataaagggctatagcgtgtaaacggtgaaagggtgtatgaggcaaatttcatgatttgtgcgtatgagaagaagggtctatgttctttgtgtagttgctggtgatctttcaaggccagttgtatgaygttctcaggtattggtctagaaattgttcttcttgtctaaatgttattactatgttcattgtttatgg

SEQ ID NO: 763 - DNA, 758 bp, Aspergillus oryzae
aattcggcacgaggcatgctggagaaggccaagcaagatcaagcaaacaaccagagggagttagagcggctgagacaagaacagagagatagatacggcaccgatttcctcaggaaggtcaacattgctaaaggagcctattacgaaaaagaaaggatcttaaagcaagcgtgggaaaatgttgcgcgacttcgtcgggagttcaatgatgcaaatatatttaagaaggctcttttgctgccggaactcggggcagccgaacttgctcatgaggctgcaaaagctgtactaggtggatacctcgaagctgccaaggtacttgaagacacccttaattccgacgcctttcaatccatcgtcacagccattgaagatgcagaaaaagcggtggaaagcgcascagatggaattgacaaactcctcagcggaggcggttttgacggatttatcagagcctttgtcgacacaaaagacgccagaatcaaagcagctatacaagctctcgaggcaatgcagaatgagaacaacaagtatcaaaaggctattcgggaggcgcasactatccttgaccagaacgcacccgacctagaagaccagatcgcccaggccgatgagaacatcaaatccctggaagaggatgcgatgctggcagatcttgagcgaaaatataactatcagcttgaggtccataacaaagtacacaacaccatccaacaaatgcaggctggactagaaactctcaaggagaactggcaaaa

SEQ ID NO: 764 - DNA, 620 bp, Aspergillus oryzae
cctgcacatgttagccgtcacgagaagctcgattatstcgaagaggtgattaagccacttgggatggaagcgtacgcagatgcggycsttggtgttcctsgtgaaggtctgcaaygttgaacagcggaaacgtctaaccattggtgttgaattggctgccaagcccagctgcttctgttcctcgacgagcccacgtccggtctggacagtcaaacttcctggtctattcttgatcttatcgacaccctgactaagcatggtcaagccattctttgcactatccatcagccttccgccatgcttttccagcgctttgaccgtctgctcttcctggccaaaggtgggtaagaccgctgtacttcggtgaaattggagagagatcatcaactctcgcgagccatctcgaacgaaacggtcgccccgaaacttcccgttgaggcgaaccccgctgaatggatgctcgaagtcattggtgccgctcccggatcccacagtgataytgactggcctgccgtgtggcgtgagacccctgagcgcgaastgttccgcaaccaccttgcagagctgaaatccacactttcgcagaagtcagttgactcttctcacagcgatgagagcag

SEQ ID NO: 765 - DNA, 798 bp, Aspergillus oryzae
  modified_base (493)..(493): n is a, c, g, or t
aattcggcacgggcgcatgggttattgtttcgacggctcttgtcttgttgatgattccaggagtcggattcttctattccggtcttgcccgtcggaagtcggcactttcgctactatggctctcgataatgtctgtcggaatagtmtccttccagtggttcttctgggggtactctctcgctttctctcataccgccggaaaatatattggtgacttgagcaactttgggttcaaaggggtcctgggtgcgccatctgttggcagcgccaaggtcccagatctcttgtttgctgtcttccaaggcatgttcgcctgtattacagtggcactcgcggttggtgctgtcgcagagcgtggccgcatgcttccctgcatggtttttagctttgtctggtccaccatcatctacgaccctatcgcatgctggacctggaactcgagcggttgggtggcaaaccttggtggtcttgattatgcgggtggtacaccgtntcacatcgcctctggttgtaccgcattggcatactcgctgatgcttggaaagcgtcgtggacacggcacccacgagctcaactatcgcccgcacaacgtaacacatgtggtcatcggtacggtattcctttgggttggatggttcggattcaatgccggctccgccttgagcgccaatcttcgtgccgtcatggcagccgtggtcaccaacctcgccgccgccgtkggggggagttacctggtgtatcctggactaccggcttgagaggaagtggtctactgttggtttctgctccggtgtgatt

SEQ ID NO: 766 - DNA, 868 bp, Aspergillus oryzae
cgccgccgtccaccagagatgaagggctattcgaagatccatccgcatcacaccacgaccctaagggagaattgtcatgggcgaacatgtcttggatgaagtactacaacagcggctccttgaatacggcgacatcatcaagcttgtcggtgttgcaaagaatctagatgataacacggcgctcaggaaatttaagagccgggcagaggaagcacacgagacctccattaatcgctatcaaccatgggcgacaatggacaactcagtcgtatccyaaatggtttcatgaccccagtgtctcaccctagcctacctttcaaagctgctcctggtcaactctctgcgaccgaaatccgcaaggggttgtccctgatgggagagataaagcaaaagaagtttgcagtgtttggcacccccgtctcaggctctcgctccccggtcctccataacaccctcttctcccaggcgggccttcctcatgagtatggtcgtttggagacggcgaacgttgaagacgtcaaggacttcattcggtcccctgattttgggggcgcttctgtaacaatccctttgaagttggacatcatgcccttactagaccacatcacaccagmcccccccmtcattggcgccgtgaacactatcatccctgtcgctgatggagacaagccagcgcgcttagtgggatccaacactgactggcaaggaatgaccctctctctccataacgccggtgttgagactgccaataaggatgccagtgctctcgttatcggtggcggtggtactgcccgggctgccatctacgctctccacagcatgggattctctcccatctatgttattggacggtcggctccaagctcca

SEQ ID NO: 767 - DNA, 828 bp, Aspergillus oryzae
  modified_base (12)..(12): n is a, c, g, or t
  modified_base (313)..(313): n is a, c, g, or t
aattcggcacvngggaatctaggctagcacagggtggtgcaagtgcagcagccgccgtgcagattacattcaaaggacgcactaccacattgcagtctcccgcggacattgcagcatggattgaagagcggaagaaacggttcccaactaaggagaaggtcgaggagaaaaagaaggcgatggaggaggcgaagaaagctaaggaagaagctcagcgacaaaaagaatcgcgaaagcaagaaatgaagaaagcgcagaaagaccatcagcaagctcctgcagatccgatagacgcagctgagaaagcgaagcnaaggccgataagctacgacggaagctcatgaaagagcagaaaaaggtcgaaaaagcggaagcagatgccgagcgggctcggatgagagtcgaggaactgcaacgaggatcgacggacgttaacagagacgttacctctgcatcaacacaagaagctcaagctgagccaggcactgaagacagatccaatactgctcctgatcaggagacgagatctatagagactcaaggtgtgccgctcgcttcagggcatattccgggcgaggtttcccaacccaacaatgatgtcgggccatcatccgcttctgaatccaaatcgaacggggagggtgtcatagaggacgtccgggccgatgctgctgtgtcttcggatatttccgacagcagcgactggacgtcatccagtggatcagacctctcttcttcagactcggaggacagcgacagtdattccgcccccgaggaggcaamctctcgccgtgagggccctgaacgggtagctccgcctccacggga

SEQ ID NO: 768 - DNA, 674 bp, Aspergillus oryzae
aattcggcacscgggtctcttgctccgttgatggacctcccccggcagacccctctgcacgacttggaacaagcgtcccaggcgctgctgctgccgcagccactctcgccgccggtcctggaatcagcaaacccgctgggcgtggtctacctgtcggacttggaggccctgctgctggtgttggaggacctccacctcctcctggcggcttccctggtttccctcctggtggtttcccaggagcgccgccaccaggattcgctggccgcggagscctcccggaggacctcctggtttcgcccctcccccaggatttgcgccccagggcggacctccggccggttttcaaccccctccaggattccagcctccgggccagggacgtggatttcctccaccaggatttggaggacggtgaagctcgcatgtcgagcggcacaatcgcttacaatattccgaccccaagtgaaacatggcggcctactagtgttgggataagaaatacgcatcctattcatatacctgttcgatgattaggcatagcacaccgagttttaccaggcaaaggcgttgcggcgtgtgcggatgcagggaatgcccgagtaatagcaaaggtcgacctgaaaagaaaaagtcgaggaccaacagaaataatgctacataggtttaaacgc

SEQ ID NO: 769 - DNA, 353 bp, Aspergillus oryzae
gtgaatttcaatatagactgaacgacaaattatacaacagacacaatggtcggaagaatagctggtaaaaatgccatcgtaaccggtgctgctggaggcatcggtctcgagactacaatcctcatgctccgcgaaggtgcctccgtcctcatgaccgatatcagcgagccgggtctccaaaaggcccgtgcgaaagccaacgacgtggttcctcagcgcgacggcaaggtcgagtaccagcgtggtcgacgtatccaaaggaatccgaagtcgaggcggcagtggcccatactagacgcctggggcggcctggacgtacatagttacaacaatgccggaatcatgcaccccaa

SEQ ID NO: 770 - DNA, 502 bp, Aspergillus oryzae
agggcaccaggctcaactgccagaccaacttgaagtcccctgcccctgaaaacacacgatatcactctcgcgaactgaggtgaccgtcacagcctcgcggctagatttgacgcactgacccgtattcggaattgaagcctcgatgtattgacctacttctactacagagagcacgacgtgtttatctaaattatgcgtctactacataccgaagagagtcacacaggcaactttgagattattgaatttacagacgacaggatcccgccttatgcgatcttgtcgcatacatgggagggcgaggaagtcaccttccaggatatgcatgcagaccaacttcatacgagacagaaaaaaggatacagcaagattcaacggtgttgccatctcgctaaaaccgaagcttcgaatatgtttggatagattcttgttgcatcgataagacaagcagcgctgaactgtctgaagccatcaactccatgtatcgatggtaccaaaaaaa

SEQ ID NO: 771 - DNA, 685 bp, Aspergillus oryzae
  modified_base (251)..(251): n is a, c, g, or t
cggcacgaggatttgctctaccagtgaacctggtcctattaccaagctccatattgcttgcttcttgccaggaacgtttgcgggggaaccgctgttcggttggactcggcttgtgtcggctaccgtttccggatacggaaggtctacgttagttccatagtaccaacggggggaagtagggttgcaatatgctcgtccaggaggtttggaagacgttatccattgagggggttgtggtgggggtgtctgcnttgctgggtttgttgtcttttgcatatgtcatctacaaccgcttcttgcatcctcttcggaaatttaacggtccgttccttgcgtcgataaccccctgggtgcagctgtatcatggcttgaagggggaccggcatttgtggctgcataatctgcatcaacagtatggatcgcatgtgcgtgttgcgccgaactttgtctccatcaattccgcgcagggtctgcatgatatctatggacatgggaagaagctgaagaaggccaatttctacaatgggttcactgcgattaagggcgtgtataacacgcacaatgtcatcgataagaccgtccatggtcggaagagacgggtgctgagccaggctttctccgatcaggctctcaagagcatggaagatgtyatgttgctgcatgtcccccagccttgcacggctct

SEQ ID NO: 772 - DNA, 685 bp, Aspergillus oryzae
  modified_base (466)..(466): n is a, c, g, or t
  modified_base (517)..(517): n is a, c, g, or t
  modified_base (547)..(547): n is a, c, g, or t
  modified_base (549)..(550): n is a, c, g, or t
  modified_base (562)..(562): n is a, c, g, or t
atggtcgatgagattcttttcgttcaacacccagccaatgtccgtgcaggagtttacaaggtcgtcgtcaccgtctcgatcgctctgctcaggaagaaacccagtgactggtacgatctagtcataccaggtctccccaagctggagacggggaaaagtgggttcattctcttcctgattcctgacaagtacggtgttgaattttgcaccacatatctccgcagtttaggatggtggaagattgcttgttcgctgaatttgtggacaagagggatcttgtgataccaatgcgatcttttgatcagaggaattatggtattatcaaggactttgtcgtggaccaggaaattgaagcacgtcctttcttgagctctgtctcagagaataacaagcacacacagccaggtttgtcggtgaggtatcatgcgatgtgctcgctgaggttacatgaacgttgcttttgggntgagaagtgctgcttctttctccgcacctcaccacggagggccacaagganttttccaatgcagactccaaccccggatanannttgcaggtggtntatatacccagcagyagttcatattctatcggtgtctcccaccttcaaatcatatgtkcgccaaaggacttaggaatgttttgcattacttsgctagtcaacatgcccytcccagcaaggaar

SEQ ID NO: 773 - DNA, 454 bp, Aspergillus oryzae
tcaccagcaacacgtacctacagtaaccacacacacctctatcacgatacacgcaacctgcccaaaccagcactccaacttcaaacccgaaaaatgtcatcaacatcaacacctctaacaacaccaccaaccccgcaaccagacccccgctacgcccaactcttccacgacctctcaacccgcttcgcgcaaacctccctccccccagaaaaatggtacatcctcgccatatccacaatagtagccagcccggaccggaacgctgcgaccagctctacctgcacctaatcaccaagcccctacagcacccatcagctagacagactaatcggcgctccgcgaagcctcttcaaagcatcatcatagtaggcgtgtgcaacccatcgagcatctagcatcagcaatacgacgcgagaagaaaagactacactttacgcgggggactggcatgcga

SEQ ID NO: 774 - DNA, 621 bp, Aspergillus oryzae
  modified_base (333)..(333): n is a, c, g, or t
  modified_base (353)..(353): n is a, c, g, or t
aagaacggaaagcggacgagctggattcgtccacccatgccgaagataatccttctccgcagaccccagtggcagcctccagcggtttccttcacctcctttaccccacaccagaactatggaccgcgtcgctccctcatcgtactcaagtcgtttatacaccggactacagctacatcctccatcggttacgcgcgcgtactggaagtaccgtaattgaagcgggagctggaagtggctctttcacccatgcctccgtgcgggcagtgttcaatggatatccttcagatgatcaaccgacgaaaaagagaaggcttggcaaagtctgcagtnttgaatttcacgckcagggncggataatgttcgcgttgatkttaaccagcatggcctcgatggactggtggaggtaacacaccgtgatgtctatkaggatgggttcctcctcggggacccgaagacaggcaaatccccaaaggcgaatgcgattttccttgatctgcctgctccttggctagctcttaagcatctcgttcgcaacccacccgagggtacggaatcaccgcttgatcctacatccccggtctatatatgtacattctctccctgtcttgaacaggtaca

SEQ ID NO: 775 - DNA, 759 bp, Aspergillus oryzae
gggattgttcgatttccttatccctccttgattgaagatccaagtcgacccagaacttcgcgcacagttccgtctagagtctggccgcctacggtgtctgactttgaataataataatcctagtataagtggagcactctcggggaaccacgcgactgctctccacctacgtctgaggagtcagaagccataaggcgaacaacgaccctcaagaaacattgacaatacctgtttctcagacgcgtcgagcttgctttagtaatatacaacgcaatggcaactgaaatgcagtgcttctacacgccctcgacctcgacgcacatctcctcccacgctccagccgcggtcgacgagctgattaataagtactcttccaccatgtcgacctctacgatcccaaattcctccggtgtcagccatctgacgatgaagaaccctcgccggaatgtcatacagcggtttgctgatcgtgtccgcctcgaatactaccggtacgaagtcacattcggactctacgtcatgacgccgggcgagaaagtcgtggccaactccttcgtgatggtggtgctatcactgcttttatgggccctactgctgtatttcccaacactgctctaccagaagctgatccgcctcgtatggctcttgaccggccacagcagcgaggagatgggtgccgctttgggcatcttggaaacccacgttggctctctgtcttcgtcattttctggggagagtgcgttgtaagagagaacgagt

SEQ ID NO: 776 - DNA, 495 bp, Aspergillus oryzae
aattcggcacgaggcgagtcatacagttccatgcacagaaaaatgcttcatctaagcgagatgcgagcgatctgagcggcacgaacaagtgggcggccaaaatacatcacccattaccggtccgagtccaacctgcatctgaatcccagcgagaggcagatgtacgcgagccatctgcctttagtggactatgttgggaatttgactcagaaaagttcaagcagtctcttgaccctgcactcggggtagcgaggctctcgttacgcctgtccaaaacagtgcttgaatggttcttgcaatctccaaggagaaccgtgcgggcacgacccagaaggtggttccgataattctctcttctatggggacacagagatagcgatttctacatctcagtaaaacagagacagagttcgtcgagagatgaagtgtcacagttgggcctagttagcaatttcctctgtagatatgataaccatataatggtgttaccagccc

SEQ ID NO: 777 - DNA, 278 bp, Aspergillus oryzae
aattcggcacgagggcggtggggaggtatgcgctaagctcctgcagacgctgaaggggatccaagccggcaagatcgaagaccagtttggatggaacttcaccgtggagaggccgccggaggctgggccactggtggcggggagacggaatcagatggtgccaatgtgccatgatcatctggcgctcgaatcgttttgatgtgatgcggtaattttctcaaaagattcgttccaaaatattgttggctccggtagcataattgacctatcacaaaggg

SEQ ID NO: 778 - DNA, 715 bp, Aspergillus oryzae
  modified_base (1)..(1): n is a, c, g, or t
  modified_base (106)..(106): n is a, c, g, or t
  modified_base (108)..(108): n is a, c, g, or t
  modified_base (152)..(152): n is a, c, g, or t
  modified_base (354)..(354): n is a, c, g, or t
natacctttttgtatcgcgatacttcatccttcttcacaatgacgtgagatcgtgcacctccaaactggccagtgtggtaaccaagttgagtaccgccttctggcnanataaatctctggcgaacatggcctcgacgcgtctggagtgtacnctggctccaacgaccaagaactggagcggaatgaatgtctatttcaataaggtcggcaaccagaaatatgttccccgcgcggtcctcgtggacttggagacccggcacgatgagacgcacgtccgtactggtccgtttggacagctatttccgaccggacaacttcgtattcggccagtaaagcgcgggaaataactgggcnaagggtcactatacggaagagtgctgaattgrttgattctattgtggatgtcgttcgtcgtgaagccgaaagctgtgactgactgcaaggattccagatcacacactcccttggaggtggtacaaattccggtataaaaactcttttgatctcgaagatacrtaaagcatacccgaatcgtatgaaagccactttctctgatggagactwcgmcgaagtcatcggatacagtrrtggarccatacaacgacaaattgtctattcatcagctggtggagcataccgacgagacattatgcatcaataacgaggmcctatacgaaatctgcatgcacacccagaaactggcttctccttccta

SEQ ID NO: 779 - DNA, 919 bp, Aspergillus oryzae
  modified_base (413)..(413): n is a, c, g, or t
  modified_base (603)..(603): n is a, c, g, or t
gcaaggagcgtcgtggagattacctcggaaagactgtgcagatcgtcccccatctgacgaatgaaatccagaactgggttgagaaggtcgccaaggtttctgtggatgagtctggaagggagcctgatgtctgtatcatcgaattgggcggtactgttggagacatcgagagcgcaccattcgttgaggccatggctcagctccaaagacgagttggcaaggacaacttccttcagatccaagtcagctatgttcctctgattggctcggagcagaagaccaagcctacacagagggccatcagtgatgtccgtagtgctggtctcagacctgacatcattgcatgccgctgcgagacacccctggaggaggcaactattcaaaagatcgccaattcttgccaagtggaacgnaaccaagttgttggcgtacataacgtctctaccacatatcaggtccccatccttctggcgcaacagggattcctcagtactcttagtgaactccttaaaaccgactctatctctaaggatcagaagcttattgacagtggtaagctcatctggcaggaatggcagggcttggctatgaaccaagtgcatncccttgagactgtgacgattgccttgattggtaaatacacaagcttgcatgactcatatatgagtgtgagcaaggcgctggaacatgcgthcatgcattgccgcaagaagctgaatctgatctggatcgaatcgactcatcttgaagatgagcacaagacaaacaaccctgcggaatactattccgcgtggcacaacttgaccaccgccaacggggttcttgtccccggtggctttggttcgagaggtacgaccggtatggttttggctgcccaatgggcccgtaccaacaacgttccctaccttggtatttgcct

SEQ ID NO: 780 - DNA, 974 bp, Aspergillus oryzae
  modified_base (238)..(238): n is a, c, g, or t
ggcaatggcaacaagcagcttcacagaccaccaaccgtggtatcaacgcatccaatggtttaatctttccatgttggttctcatccctctttgggcttttatccagtcactttgggtgcctttgaccttgaaaaccctggtcctgtcagtcgtatactacttgttttcgctgggctctataacagccggataccaccgcctatgggcccacagatcctacacagcatcaacgcccctnaaatggcttctcgccgcgttcggcgccggaagtctccagggctcaatccggttctgggtgcgcgagcatcgcctccaccaccgatacacagacaccgaccttgacccatacagcgtgaacaagggtctcctccacgcacatatcctatgggttctcctccgtcagcctcggaatgaaagaaaacagcgagcccgcatcaacctctccgatatcgaccacgaccctgtcgtagtctggcagcataagtattacttcttagctgccttcggcatgggctggctgctcccctgtctggtagccggactggggtggaacgattggacgggtgggtttctttacgcgggcgttctccgagcgttctttgtcaatcaggcaaccttctgtgtgaactctcttgcgcattatctaggccatcagccgtatgatgatcggcatacgcgcgcgatcatctgctcacggcgcttattaccctcggcgaggggtttcataactttcatcatgagtttccctcggactatcggaatggcattgagtggcaccaggtcgatgtgacgartggtttatctaggtgtgtagctttgtcgggctggcgggtgacttgaagaggtttcggcataatgagatcgccaaggcgcgccttcagcaaaggtttaagcggcttaatgaggaaaaacgacgactagactggggcacgcccctggaggagcttcctgttattgattggacggagtatcag

SEQ ID NO: 781 - DNA, 943 bp, Aspergillus oryzae
ttgatatcaaggtccccactccaccaggatttacgcccgaagctactcgcgagtctggaaccgttgtacacgccggcaagagtgatattcgggaaggaaagagtctatatgatcttgaggttgctcttaattacggtcaagccacgggtgctccccaactgctgagatacgtcacagagcacacagagctcatccacaaccccccatactcggactggcaatgttgtctgaactgtggtagcaccttcggatgggatgtggcactcagactcttttgcgaacggggcgattatatcatgatggaagaatataccttctctagcgcacaggaaacggccctcccccagggcttgaaggtggcacctgttaagatggacgaagagggccttttgcccgagtcccttgacgaggtcctgagtaactgggatgaaagcgctcggggtgctcgcaagcccttcgttctctacactatccctacaggacagaaccctacgggcgctacccaacaggcggagagacgcaaggcagtttacaaggttgcccagaagcacgacgtttatattgtggaggacgaaccctattacttcttgcagatgcagccatacgctggagctgatggcgagcccgttccaccgcccgccaaccacgaagaatttatcaagtctcttatcccttcctacctgagccttgacactgatggtcgtgtgcttcggctggaatctttctctaaggttcttgctcctggctcccgggttggctgggctgtcggatccgagcaaatcatcgaacgcttcaccagaacctgcgagactagttctcagaacccaagcggcatctcgcagcttgtgctttataagctcttggaggagcaatggggccacgctggatacctagactggctgatcaaccttcgtatgtcttacacggcgcgcagagactccat

SEQ ID NO: 782 - DNA, 943 bp, Aspergillus oryzae
cggcacgaggatttgctggcactaacgacgaacgaatctccgtcacgacttttcaaactccctctttcttcttccctatatttttcttcttcttctttgttattttcccttgtttatataagtttggaaattctttttgtttggtttccggcattcgaggattggtttcgsttctttgacaactgctcggcgctatttcgatatctcccccagccgcccgtaaccgccattcgtcccgtccatgtggcacactctcttggctgagacttcttcagctgcctatttgatcttgatctcctgattgcgatcgtgaataacctatctcaagtctcactatctaccgctggaaatacctgtcgtctccdcccctcccgtcttcgtctctgcctccccaccgggccgacgtcccctccggccccttcgttgtgtcgtgtcggtccttatcctcgagaaattgttcgctaccaccatgtctctccacacttcctaccacgccgactccgatgccgacgatgagtacgagcgcagtgtcatcacttctccccacctggctaccgattccgaggcgtctccctctgaatccgacttcccctcctccgaacagaccccgactactttcgcaaacgccgacgaacatcctaaatcccccaaaaccatcatcaccgaatggacagtcgaagagtgcgcccactttctcgcctccctaggtctccgtcaatattgtccagccttcctcgaaaatgacmcyctgggggaagcgcttattgctctgaaacatgatgagttgaaggaaatggggattgctagcgtgggacatcgattaacgatcctcaagagtgtctatgaaacgaaggtgaaacaggatattccgctggatgcagaccattatattcctctttcggcggaccaaagtatgaatgaaactgcatcacaggaggatgtc

SEQ ID NO: 783 - DNA, 861 bp, Aspergillus oryzae
aattcggcacgaggataggatgcaatgactggtgtcttgccgaaaattgcataatgacacacttttaccttcagaagatctacgagaaacaagcctgcggtgacttcgagcagtctaatcaagggagggcggcctggctggcatcaagtggttcgaaaagactacttcatcgccagtggaagatttgggggtgaagtcatcacatcataggagtggctctacacagtccaacctggaggtctgccgacaatggttatgcgtgttgctaaccttgaggatatgaattgcccaaggtgccagaaggagctatcttcgccaacagcacaatgccactcttggcccatgggctacgagcataatgaaagttctgaagaattagattgaaactcgtacccaacccgtccggccgggccctgcacattacatgaagtcaataccgaagaactggctgatgttaaaatgtcacttttcaaatatatttactattcaagggcttaggaatgaatagagcacgacatgcagattgggtcatttgtctatcgagaatttattaccgccggaaatagtgatgaccttaaattattgcttcgttcacaattatcgcaaactctgagtactcggcaccataactgggatcgggtatctgaaactgttatggcccggctaagaaacccaccttgggagtrtcgagcgcgactraaggatggtcaattggaactttcgggactgacccagatgggaaatagatataagcmatatatgatcaagtatctggtccaaagaatrgtgagaggacattactctcctttccctgggcacttggaggcggcattgtggcagtgggcattgtgagaagactgt

SEQ ID NO: 784 - DNA, 727 bp, Aspergillus oryzae
  modified_base (270)..(270): n is a, c, g, or t
ttgaagactaagggaaacactcctaagtacggtctgctgtaccactcctctttcattggcaaggatggccccaagaacaagggtcggatctcccgattccttgcgaacaagtgctctattgcctctagaatcgataatttctctgaggagcctacgaccaagtttggtgaagtcctgaagaagcaggtcgaggagcgtttggagttctatgctaccggagccgcccctactaagaatgaaatcgctatgaaaaatgccatggatgctgtnttagctgatatggacatcggtgcggatcagagcgatgaagagatggaagatgctgaggctgagagcaagaaggagaagaaggataagaaggcagaagaagaaggagaagaaggagaagagttagaagaaggagaagaaggagaagggcgagaaggaagasaagaagaagaagaggaagtmcgatgtcggtgagggcgagtctgagaagaagaagcggaagcacgacagcgatgctgagccgtccmagaagaagaagaaggtctaaagcaccattttctgggacatgagggcgtbattgtagcggcgttgtagggttgattttgagtdcattttcctatatatgttctgttttacttcacgacttgttgggctgggtatttgtaaattattcgattgaggcctccgtcgtgctaaaatttgtctgtagctccycaaaatgtcaatcggatttttgtgt

SEQ ID NO: 785 - DNA, 418 bp, Aspergillus oryzae
  modified_base (342)..(342): n is a, c, g, or t
  modified_base (349)..(349): n is a, c, g, or t
  modified_base (351)..(351): n is a, c, g, or t
  modified_base (361)..(361): n is a, c, g, or t
gctcatggcctggatatatcattcatgcttggaagtcactgggtcgtactgtgattcggacacgacgcctgaaagatatcatgttattccttgcatcgtggtttcttttaagcgatggaattgccactgttagtggcacagccgttctttttgctaaaactcagctgggcatgcagcctgccgcattgggtatgatcaacgttgtcgcaatgcttgctggggtatttggtgccttttcctggagttatatatctcggctgctcaatcttcgcgcatcacagactatcatcgcatgcattatcttgtttgaacttgtaccactctatggccttcttggatcantccagcnantagagatttngggatttcttggctcagcagcatgggaatgttcctctcagcatcgtgtacggtctgg

SEQ ID NO: 786 - DNA, 710 bp, Aspergillus oryzae
  modified_base (76)..(76): n is a, c, g, or t
  modified_base (215)..(215): n is a, c, g, or t
cggcacaggctccacagtccttcgttaacaacccaccaaccacgcgtttctatacacccgttaatttcctcgagtnttaacatcgcctcagcgctccttgtcatcttcaaaccgtcaagatgaagcacaacctcattgctctgacttctctggtcgccttgaccgcggcccagtcgactgactccacgtcggactctgccaccggcaccactgtngcaccttcggcgactgtcagcatgtctcctcaacagtcctgcgccaagaagtgcgacgcaaccgaactgtgccgcattgctggaagcctcgaggtcccccgccccaacgattctcaggctaacgacaccaacacttgcgtcgccgcctgcccccagggcagtgtgcaccccatctgacactgagcgccacgccgcccgccagagctcctgcaacagcagccacttcttccctatcactgccacgggtaactctggagcctccaagacctctgccagcaactctgacgccaccaccaccggtactggcaaggacagcacttccaccgggtccagcgaatcctccggctcccgttcttcgggctccaagtcttctggcactggtaccagcactggtgcagctgccaccggcaccgagaccaatgcagcctccgttgccaagcttcagatgggtgtgtcttccgccggtatagcgggtctcgctctcggtatctgggc

SEQ ID NO: 787 - DNA, 928 bp, Aspergillus oryzae
  modified_base (329)..(329): n is a, c, g, or t
  modified_base (333)..(333): n is a, c, g, or t
gctactcaaacgtccattgtacatggtcagcgctggagagctgggaacggactcccggaccctggaggctgagctcaacaagatcctggatatcgcccattcctggggcgcagtgctcctgcttgacgaagcagatatattcctcgagaagcgcacgatccaggatatccaccgcaatgctctcgtcagcatcttccttcgtctcctggagtacttccaaggtattcttttcctgaccactaaccgagtggaaaccttcgatgatgccttccagtcccgtatccatgttgccctgcgatacggcgacctcaccaccaaggcgaacgaanbcantggaagatgttcgtcgagaaagtccaagcaatggacggtgtgcaaacagccaccttcaccgaaaaggacttcgacaatctcgctcgtcacaacctcaacggacgacagattaaaaactccgtccgcaccgcgcaagccctagccgtcaacgagaagacccctctctccatggaacatatcaagcgagtcttagaagtagcagaaacattcgaccacgatctccgcggtggaacaggctacatcgacgcaatgagaagctacacataagacataacatataaaagcagatacgacttacgaacgataattaacacaagaatatgagaaacggaatgagatatgaaatgagataatacgggatcgacacgattttttccctgtgagattagctattcctggagatcagttcattttattgatttatttgtcttctggcttggttgtttgcgggctgaaggataccctatttagtcctagccttctctcacttttcctctgattttgttcttcttttgatttatcgtgtttgtagcgggctttggttgattggtgttttgttgtttttgtgctaacgatgagggatgaattcactaaa

SEQ ID NO: 788 - DNA, 1000 bp, Aspergillus oryzae
  modified_base (864)..(864): n is a, c, g, or t
  modified_base (911)..(911): n is a, c, g, or t
  modified_base (943)..(943): n is a, c, g, or t
cggcacgagggttctgaggagcgccagaacgccggcaccatcgagcttaaagatgacactgtcattgtagtacttggtgcatcgggagatctcgcgaagaagaagacgttcccggcacttttcggcctttaccgtaacaagttccttcccaagggaattaagattgtcggctatgccggacaaacatggaccacgaagaatatctgagacgtgtgcggtcgtatattaagacccccactaaggaaattgaagagcagctggacagcttctgccaactatgctcctacgtctcgggccaatacgacaaggatgagtctttccaaaacctcactagacaccttgaggatatcgagaagggtcacaaggagcagaaccgtgtcttctacatggctctcccccccagcgtctttactactgtgtcggaacaattaaagagaaactgctaccccaagaacggtgtcgctcgtataatcgtcgagaagccattcggtaaagaccttcagagctctcgtgatctccagaaggcgctcgagcccaattggaaggaagaggagatcttccgcattgaccactacctgggtaaggagatggtcaagaacatccttatcatgcgcttcggcaacgaattcttcaacgccacctggaaccgtcatcacatcgataatgtgcagattacctttaaggagcgcttcggcactgagggtcgtggaggctacttcgacgagtttggtatcattcgtgacgttatgcagaaccacttgcttcaggtgttgactttgctcgctatggagcgccccatctcattttctgccgaggatattcgtgatgagaaggtgcgtgtactgcgcgctatggacgccattnagcccaagaacgttatcatcggtcagtacggaaagtctttggatggnagcagcgcgcatacaaggaggacgagacagtncctcaggattctcgctgccccactttctgcgccctggtcgcatacatcaagatgagc

SEQ ID NO: 789 - DNA, 764 bp, Aspergillus oryzae
  modified_base (52)..(52): n is a, c, g, or t
ggcgctgtttgcagattgtgtagaagtcatcctcctgcacgacgagtgcagngatgtacctgacccaagcaaattttcgtacgagcgccgcttggctcgttatctggtcatacatttttcgattggtcggggagtgaagctccgtcactacgtcgcagagatcgatttgccatttccgaccgaggtgatgggctgtgcagtagcctcgcaggccttctaacatggcctgacggtcgacgggcagtgtcagtgtcgctagaaatcggagcaagagtgtcgcggtggcacggtgattgccgtctatgatagggatcagccattggtcgtcatgggcgtaacgcggatatgtggcgaccaggatcgggaccagggggcaggcctggccatcgctcatggcaaccgccccgagcatctcctccacgacttcgaggacatgcattggcactgaaaattccgctcgagccaatcggtccaagggtacattcacgtagggaagttgatggtgtgcgttgaagtggacgagagtyagccgctgcagcaacgggttggccagatacgaggcctcttgagcggcttgcgcggccaaccgttctagatctttagcatgcaggatgtccaccctagtggctgccatgcatttccccaacaggtgactgaaaaagaactgctgcagcgagaacggccgcgacagtccatagattgggtccttgagaaaggcatggatttgtaaaaacgccaatgctccgtcaaaatgccccctcccc

SEQ ID NO: 790 - DNA, 822 bp, Aspergillus oryzae
  modified_base (25)..(25): n is a, c, g, or t
  modified_base (33)..(33): n is a, c, g, or t
  modified_base (38)..(38): n is a, c, g, or t
  modified_base (44)..(45): n is a, c, g, or t
agggttggcggtatctccgcgtccngtctttangggtncagttnnattcatgtccatcatccgcgattcagcaaaatgctgtctagtattccccatgaccaagcattcacacaactactaatcacacaaatcgtgaattattatgataagtgctgcgggtggtacagagccatcgtgacgaaaatctcccctcgtgacaatggtgaatttcgactgaaggccgctgcgcaatatgccaaatcgggtgacatccacgatgtagtcagtgagctatggaaaacagaagcaaacaacaaggaggggctcgtagacaaggaaaccgaacttctcctcgaacacactagtaaagtgcctttggagccgtacgatatcatctccgacccgaagaccgttatggctctctctcttctatacaatagcacgcaatggcttgcaagccatctatggaaattgcgccaagtcacgcagccatcatctgaatcacggcagccacaagaaagcggaccaccaaaccgcagatggaccttgattagtgctatggcgccaaagcgtgagggatcaaatcagcccgtgtaccttcccttaaatcaagaaactgcgactgcgttcgatactactatcgaatcgctacgcgatctttcttcgaccgcactttttgccttacacattgacattcggtgcggtattattcacatgctcacaaaaaccatggctggccccaaccccaggaacaatcgtgattycgaacctgcaaccccctctcctaactcaaacattgcttggtggcatatagtyctgaacagccaacgtctgcttcacagc

SEQ ID NO: 791 - DNA, 689 bp, Aspergillus oryzae
ttcaatagtataacctagcagacatgattgatattcacactggaatggacttgtcatatgttaattccatatgacatttgtaacacacacatctagcattcctttacgattgactcaagagtatccccactccgttgcttctccttgaccaatttagcaacaagttctcctataggagcaaacagatatatattatcagggtcatcacgagaagcggaacattccctcaactcatactgaccctgcaacagcgcatcacgaattggccgctggtgtcttcaaaatggcagtgtaccggtctccattcctgaccgcacatcgaagtgaaactgacgatgttcatatttcatctgttcagcaaacgatctatccttcaaggccggaacatgggcatagagttaggggatctggcatgccaagccaagtaataatgttgaatcatcgctaggaagatccagccagctatcgatcattgcatccagcaagcctgccaatggtggaaatggcacctggtgtgatgatccatcttccaaaggcgcatattccagtcgtatatcggtggtgagaggaaatttccagtctatagcgggaaggaggacagttcttgtctcgcccgcaggatatcagtcgctgttgagggaagaccaccaagtccacctctgcgtactaataagatgtggttcttgcat

SEQ ID NO: 792 - DNA, 494 bp, Aspergillus oryzae
  modified_base (174)..(174): n is a, c, g, or t
  modified_base (338)..(338): n is a, c, g, or t
  modified_base (365)..(365): n is a, c, g, or t
  modified_base (378)..(378): n is a, c, g, or t
  modified_base (435)..(435): n is a, c, g, or t
  modified_base (453)..(453): n is a, c, g, or t
caggacactcagtccatcatcaagaaataccagggccacaacgttgatatccttaccttcaaccagtctcgctacccccgtatcatcaaggactctcttctccccgctcctaagagctttgatgcacctctgcaggactggtatcccccaggccactggtgatgtctttgagtncctgtacaactctggcactcttgacaagctcttggagcgtggctgtggagtacatctctcctgtccaacgccgacaacttcgggtgctgtggycgaccttcgcatctyscagcacatggttgataccgagtctgacgtacatcatggaattgactgatcaaganccagcgccgatgtgaagcggctggtantatcatcgactancgaggcgcamggctcgtctcttgcgaaatcgctcagcgttcctacaggagcacgtcnaacgagttcaagtctatnamgaagctccaagtacttcaacacgaacaacatctggatga

SEQ ID NO: 793 - DNA, 917 bp, Aspergillus oryzae
  modified_base (335)..(335): n is a, c, g, or t
  modified_base (783)..(783): n is a, c, g, or t
  modified_base (888)..(888): n is a, c, g, or t
aattcggcacgaggatcttgcgaaaaactgagccatgtcgtcggcttgcactcactcgttcatctgctacacatcttcccctcacgctaaaacggcggggtttaagcgacctgatacaggagaaagactggccgcggcggaacccacagaagcactgctcccagaggaggaatatacgttcgataatcctgcaatgtttcctccccccctggttttccccggtgacgaccttgcagaggaccctgagtaccctccacagaactatcgacaatggtttcgtgatgaagaccgaaacccagtcactggaaaacgcagaacggtgtacgtcgtgcctncaccgcttgtgggcgatgaagttagctttatgaaatcctggagcatacctcgaggcgttggcgagacgcacgagcccacacaccgaagctcctggatattcgcgattatttggcagcattctatcgtggtttgccagtgaaagctctaacccagtcaccgctagaattcatgtcatgggaagagctaaaaaagtcaaaaaagtcccaacgagaccctcaatatgtcggactaaggataggagacgaatgcgtgggtatacgcactcgagcatgttctgatggaatatactctagacagctaaaccttgacgatcttcttgatgctgcaatcagcatgctcccaaaagacgcctatgcgcttctactgctaacggagcacgacctgtatgaggatgatgaagacacattcgtctgcggtcgtgcttatggtggaagtcgagtagcagtngtgtcaaacgcacgatataatccagacctagatgctctgcaatctgttgatcgtctccacgcctggccctgtcacattgtgcggagtatatgtgcacatgctgtnctacttccgagccaagacaaacgccagat

SEQ ID NO: 794 - DNA, 916 bp, Aspergillus oryzae
  modified_base (43)..(43): n is a, c, g, or t
  modified_base (65)..(65): n is a, c, g, or t
  modified_base (69)..(69): n is a, c, g, or t
  modified_base (75)..(75): n is a, c, g, or t
  modified_base (100)..(100): n is a, c, g, or t
gggcagacgaagatgaatgaacgcaatggaacccttactgtanatcaatctggccgcagccgcancttngctatnacatcgccgacaactcctaaaattnaatttaaccgtcccgtctttgcggaacaacaggacatcttcgcttctcatctgccaacaccagccatgacccaccccatatacgaaccccacccaggattcgagattgacgtcaagacagaaagacatacatttgtcaatgatgttcctctgcgacatgactccatgagctcaacgttcagtacctttgctccaccccaattaaacgcaccgctaccaacgttccccmaaraaragtggtttcccgacgagtacttcccacaggccccggcactccctggtatcgacccggcactttgtgaccagagaattcagcagacctacgccatcttgcagtcgaatatccctgtaagcgaccacgaccgtcctctgctcgaccatttcatcaacaacgtcttgcgcattatttttcccgtattagaggcacatcagcgcgggcacttacgagcacaagctatcctgcaagccttggagaccaacaaaacctatcttcactgcygcctcagtgtggccgctatccatctcaaaacaacggaagggttagttggggaacagatcgaccacgacatcatgcgacaccgctttgaagctgtttcccaattgtgtcttgcgctgggtgaagacaccaagcacgaggagatcctggatgcgacattagccatgatcttcttccattgctctgtgggtcctgcggatgactaccttccggatatcccctggtacgatcacttccaagcggcttcgaacttggtcacccsgcycsgtctttcgmctcaaatccccccatgtggtaacccatacatgcttcccccttcaa

SEQ ID NO: 795 - DNA, 921 bp, Aspergillus oryzae
  modified_base (32)..(32): n is a, c, g, or t
aattcggcacgaggggttatctcacatgagtnctgagaattcatgtggcttttgaagggaatattaatttatcattgactcttttcaaacaatcatttcagtdaagtcctagattgaatagagcgtaccccttgtccaatatggcttccgcagactcttcccttaggtggaaacacctccacaaggtattaaccaagccgggacctttcagcgatgaagactgggtacctgggtcggagacattagtgctttggagacatcaaaaattctagttatcggggctggaggcctaggatgtgaaattctgaagaaccttgctttgtccggtttcaaggatatccatgttattgatatggataccattgacatctctaacctgaatcgtcagtttttattccgccaggctgacatcggcaaacctaaagctgaggttgcggctgctttcgtagagagacgagtcaaaggcgtcaaaattaccccttatgtagggaagattcaagataaggatgaagattactacatgcagttcaagatagtcgtttgcggtctcgatagcatagaagcgagacggtggatcaatgcaacacttattggcatggttgatcctgaaaaccctgaaagcctgaagcccttcattgatggaggaactgaaggcttcaaggggcaggcgcgtgttatcctaccaactctgtcttcgtgcattgaatgtcagcttgacatgcatgctccccgtcctgcggtcccactatgcactattgcgaccatccctcgacagcctcagcattgtatagaatgggcacaccagatcgcctggcaggaaaagcgcaaggacgaccctttcgatagtgatgatctggaccacattggttgggtgtacaatgcggctcttgagcgagcgaaacaattccatatccacggagt

SEQ ID NO: 796 - DNA, 759 bp, Aspergillus oryzae
  modified_base (112)..(112): n is a, c, g, or t
  modified_base (124)..(124): n is a, c, g, or t
  modified_base (127)..(128): n is a, c, g, or t
  modified_base (135)..(135): n is a, c, g, or t
  modified_base (151)..(151): n is a, c, g, or t
  modified_base (154)..(154): n is a, c, g, or t
  modified_base (313)..(313): n is a, c, g, or t
  modified_base (322)..(322): n is a, c, g, or t
  modified_base (328)..(328): n is a, c, g, or t
  modified_base (331)..(331): n is a, c, g, or t
  modified_base (361)..(361): n is a, c, g, or t
  modified_base (429)..(429): n is a, c, g, or t
  modified_base (433)..(433): n is a, c, g, or t
  modified_base (436)..(436): n is a, c, g, or t
  modified_base (439)..(439): n is a, c, g, or t
  modified_base (442)..(442): n is a, c, g, or t
  modified_base (447)..(448): n is a, c, g, or t
  modified_base (454)..(454): n is a, c, g, or t
  modified_base (458)..(458): n is a, c, g, or t
  modified_base (460)..(460): n is a, c, g, or t
  modified_base (462)..(462): n is a, c, g, or t
  modified_base (475)..(475): n is a, c, g, or t
  modified_base (501)..(501): n is a, c, g, or t
  modified_base (508)..(508): n is a, c, g, or t
  modified_base (519)..(519): n is a, c, g, or t
  modified_base (523)..(523): n is a, c, g, or t
  modified_base (541)..(541): n is a, c, g, or t
  modified_base (543)..(543): n is a, c, g, or t
  modified_base (548)..(550): n is a, c, g, or t
  modified_base (553)..(553): n is a, c, g, or t
  modified_base (559)..(559): n is a, c, g, or t
  modified_base (562)..(564): n is a, c, g, or t
  modified_base (568)..(568): n is a, c, g, or t
  modified_base (573)..(573): n is a, c, g, or t
  modified_base (603)..(603): n is a, c, g, or t
ttgatatcgaatwcggcagaggctcactctcacctctcaccactactcagacacatcacataccatcagtcaccatggcccttaaaccggagattccttccccgagaacgtngtcttccagtangtnncctggancgaggagaagggcganatnaccgcctgcggcatccccatcccctacaacgcctccaaagaatgggccgataagaaggtggtcctgttctccgttcctggcgctttcacccccacctgctccgtcaaccacgttcccggatacatccagaacctgccccagctgaaggaaaagggcgtncaggttgtngctgtngtngcatctaatgaccccttcgtcatgagcgcntggggaaaggccaataaggtggaaaataacgatattctgttcctctccgaccccgacgccaagttctngganagnatnggntgggnnaaaaanggtngnancggtcgctatgcnattgtaatcgatcatggcaaggtganctatgcncagatcgagancganaggggtgtggttaaggtntngggtnnngangctgtnttnnntcanctgtnattattctcggaacctcgttttccgaagtnatgattatctagagtgaagcaactttctgcttagctagcsycyycttataattaaaattcgctctcgatatgctgggcctagtactacaggttagtaccaggcaggaaagaggcgttatcgagcgatgacttatgtctaatggaagattatccggt

SEQ ID NO: 797 - DNA, 548 bp, Aspergillus oryzae
  modified_base (180)..(180): n is a, c, g, or t
  modified_base (188)..(188): n is a, c, g, or t
  modified_base (192)..(192): n is a, c, g, or t
  modified_base (276)..(276): n is a, c, g, or t
  modified_base (302)..(302): n is a, c, g, or t
  modified_base (427)..(427): n is a, c, g, or t
  modified_base (474)..(474): n is a, c, g, or t
  modified_base (491)..(491): n is a, c, g, or t
  modified_base (495)..(495): n is a, c, g, or t
cggcacgagggacccctggtgattttgcatccctgcaagaagtcaaagaaggactgagtactgagsactatatcgcatggcggctgctggtgcaacgatgaggatgaaccagacgaccaatacttcccactgacactacgaacgaaaaagacatccgatcgacccgcatcgccgctcgancgcatatnagtnaatggtgggaactgattgacagctgcataccttactggagaattactgcctagcgttccactccccagcgcgttgccgtgcgcnggttcgaatccctctcgttgtgtgtntctgtgcaatagctttcttaacatttgtcatttttacttacttcaattgcatgtttattgatattctttggagagaaacacagtgaccctttccgggccaagcacggttaaggctccctggatanagcttcacgtcttcatcatactttgtttgtactgttgtattcatgtnatttctgtctttgtgtnagcntgccagcatgggaattgtcttttaagagcgtggataaattcattgcatgatgt

SEQ ID NO: 798 - DNA, 904 bp, Aspergillus oryzae
  modified_base (711)..(711): n is a, c, g, or t
aattcggcagaggcacttcccgtccaggtccctccttttataatttgtttccttccctcttctctccttcttcctttctaagagacatatctttttcgtttccaatataattggcttctgcttcbgtttcggtccttgaccttccttctcaactatccttcaatcctccggacctgaagacaactataaacactcctcactctaccgtccttccaacacctggcaacgctattgaatccttctcactgttgcttttcacgtcgctattgtttcggaagctcccatctcttcaatcttcactcctctcaacacccctttttggtgtccgtatattggtccccaattagggttcgcgcaattatcgtcacaattgtcgaaaagcaatctaggtggtattcggtcagaacaacactgaaattaaattgcgccaggggcaagatatgttgaagcccctttaattaaaaaagcacgtctctactaccggtttcaacgatcttatcatcattgcattccctcccttcagaacgagcggagaatctggaacggagacacattcctctcggccatatcttccgtcaattgctagtctatagcaaggaagagactgattaaatccctttccctttcctcgcaagggcattcaaacccgggaaaagagtttctaccgccaaaatgtttaaacgtctttcgggtggtctacagcgccacatnggtggtggcggtggtgattggtccgcctttcctgtacgccaactttttgtgttagcatgttgccgaatctgcgagccaattgcgtttatgtacatttttccttatgtctatcacatggtagaatcattccacgtgacagacaatgatcgcaaaattgctctttacgcaggcatgattacttctgcgtttacat

SEQ ID NO: 799 - DNA, 902 bp, Aspergillus oryzae
ggggacagggtatctttttagcagtgcggcacagctggagcgtttggcgggcttctagcgtatgcaatcgggttcatggatggtatcagcggacttcgaggctggcgatggatcttgatactggaaggtatcccaaccgtactcctaggagtggtggcgtggttcgttctagccgatgagcctgacacagcttattacctgaacgaagaagaaaaggccctcgtgctccgccggcggatgcgctacgtaggtcaaacggcatctgcgcagaagttccactgggcggacgtcaaagaaggcgcacttgactggaggatctgggcgttttccatcgctcagtttggtatcgataccatgctttatggctatagtactttccttcccaccatcatcaagggcatgggctcatggtcgacgcctgaagtgcaggcactaacaattccatgctatgcgcttggggccttggcctatttggtgaccgcttgggtcagcgaccgaactcagcgccgcggtctgttcatctgcattttctccgcagtctccgtcgtcggctacggaattttgatttctgatacatcctcgggggtgcattacttcggcgcattgctcatcgccctggggctgtatgtggcggttgggttgccactcgcatggcttcctactacgcttcctcgctatgggaaacgtaccttcgctaccggcttacagctcacgtttggcaacatcagcggtgtcatgtcaccgttcttgtacaaaaataacgaagcgcctcggtatgtccgaggaaatgctgtracgttaggtcttgtgggatttgcaggaatagtatatggactaatgtggttctactaccatcagaagaacatgcgcagagtccaaggcttcgaggacgagaaggttgc

SEQ ID NO: 800 - DNA, 909 bp, Aspergillus oryzae
  modified_base (64)..(64): n is a, c, g, or t
  modified_base (113)..(113): n is a, c, g, or t
acgaggacaacctgcattttctgagccagtgtttcctcttgtcgtagccttcctccagtgcgtncaagatgctggccggccaaggggtcaaggcaawmgtggtgatgtgggtnatggtwattatatcctttattcttgtccctttacggctgtacaccagggtttatatcgtcaaagctctggggctggatgatcatgtgttcaatctgggctgggtattcctcctcttatatacggtcttcaccaccatcgccggaaagcacgggttcggacagcccattactagcctgtccatggatgaagccgtccaagccgtgtacatggaaatggtcggtcagacgttcgccgttctggggatggccattgcgaactttcattgggtatatttcttttgcggatcgtggtaaaagcatggcatcgaagatcgatttggatctcaatggtcagtctatcagttgtctctgtgatgacggcgattatcttctggacccagcgccttccctccaaggcaatctacgatcctcgtgtacctggtcgaactattgtcagcgttaccccgttctcagtactactcggctcatggtgtgcagcggtcgacttttactttgccattctcccgtggatattcatttgggagctcaacatgcggttcaaagagaagatgacgatcgctatcagtctgagcctaggattcattgccggtatctgtggggtcattcgtactatagagctcggcggattgtcaagtgctaattacacagaggacacggtgcctctcattatctggtccgccgtcgagctttccgtgacgcttatctgcgttggcattcccacgatccgtcctctttaccggtacattgtccacggatccagtgtcaaggagtygcatgaagtctacaaacggcaaga

SEQ ID NO: 801 - DNA, 606 bp, Aspergillus oryzae
  modified_base (285)..(285): n is a, c, g, or t
aattcggcacgaggccctctcatcgctttcacccttttggaacaacgtttaaaattttcatttttttagggcctgcttttttctgactggcccgtcgacctgcmgmcgtcctctccacaacccccggtctaatctgtcgagacccgttcaggtcctcaggagcgaatcctgtcccctgtcgtcatggcatcgcattcgctcgagacacttttttgttcgccgccatgaataatcttgcgcatcccaagcgcaaggtcgctgccggagatgaaagggatagcacanacggagtagtctagtcatgtttaagcgaastccgttgaatccttagatacatttgtgccgcgtggtggcattacatccacttttacccaatattccatttctaaattgagcaatggccttttttttttatcaaaatgcaatgacactggatgcgatattatttatactcgtctccctctcatctaaactcctatctcttttcttttctgtttcatcaatatccaacccatcttctagcaaggatttttccctcatcattcttaattcttccgcttctatatwttgtaatctcccttgacaaaaagttttaatagcttatcc

SEQ ID NO: 802 - DNA, 922 bp, Aspergillus oryzae
  modified_base (748)..(748): n is a, c, g, or t
  modified_base (781)..(781): n is a, c, g, or t
  modified_base (806)..(806): n is a, c, g, or t
  modified_base (835)..(835): n is a, c, g, or t
  modified_base (857)..(857): n is a, c, g, or t
cgccttgaaggtctggaaagacgggaagatgttcgaggaagtcgtgacggtagagacacctcctggcggagtggacagtgtcacatacgggatagataaacagttcctcgcgatascattatggcaactcctccatctcactcttcaacatcccctttgcggacaagcagcaagtgaagcccttcgacgtggtgaagttgcccccgcccaaaaatgtcaccgaaaaacagcccaagtcgcaaccccatcaagtccttctcgaccccaccgaatcgttcatcctgtcgcctgatctgggatccgatgtgatgcacgtgtttgcgattgaccacaagtcgggtaaactaaacaagtgcgggtccaactcgacgatctactatgataagggaagcgggccacgtcatggagtgtttgtgacctcgagtgaaggccaccacgcacggcgggccaggagtccgcatagggagcggctgawggggcgcgaggggaaaaagacgacattrtataccgtggaagaactccgcggcaatgtgtgttctttcgacgtgtcaaatgtgaacaaagggtgccccgtgttcaagccgttgacatgcttccgcccttaccccggctcaaactttccctcgaatacaacgacattaggtgaaatccgggcagcgggaccgacccccccymtctctgttcgcaaggatggtaattcgatggaaggattctctggtgacgttaagccaggacagaagacggtgancgacggaagaaatgwattcgtcggcggcaagancccgcgcasttcgtgatctacaggnagggggactggtcgctgtggtaacaagantcgtcactattgtcatcatcangagggatccgagactgggagctgcttaatgaggtcgcttctctgctggttggcgaggcgcccccg

SEQ ID NO: 803 - DNA, 558 bp, Aspergillus oryzae
ggcacgaggcacaatcatcatcatggatcasgcccasttggctcgcatgcaggctagcgtgcggattggaggcaagggcactccccgccgcaagtcaagaaggtccacaagtcctccggcgccgacgacaagaarctccaggctaccctgaagaagatgaacgtccascccatccaggccatcgaggaggtcaacatgtycaaggaagacggaaacgtcatccacttcggtgctcccaaggtccacgcctctgtcccctccaacaccttcgctctctacggtaacggcgaagagaaggaactcaccgagctcgtccccggtatcctgaaccascttggccccgacagcctcgcctccctccgcaagctcgccgagagctaccagaacatgcagaagaaccaggccggtgccgagggcaagaaggatgatgatgaggatgatatccctgatctggttgagggcgagaacttcgagagcaatgtcgagtaaattcattaaccatatcatatcatatcatgggttttaattgattgatataaaaatgtgaacaaagacatt

SEQ ID NO: 804 - DNA, 889 bp, Aspergillus oryzae
aattcggcagagggttggaaccccgccataggcacgcgattcttttccctctcccccgtcacctttcgagccgcccaggtttctaaaaaaaaagaacaccgccatggcgaccgttaataccaagaccggtcaggtcgtcgaccgcacggtcttggagtcgatgctccgccgccgtcttttttacaccccctccttcgagatctatggaggggtatctggtctatatgactacggcccacctggttgtgctcttataaataatattgtcgatttgtggcggaagcatttcgtgctcgaggaggacatgctggaggttgactgcactatgctgaccccgcacgagattcttaaaactagcggacacgtcgagaaatttgccgactggatgtgcaaggaccccaaaaccggcgagatctttcgtgcggatcacctagtagaagaagttcttgaggctcgcttgaaaggcgacaaggaagcgcgtggccagaaggttgtcgtggacgaagagaaggaggccaagaagaagaaaaaggctaaggagaccaaggctgtccgattagacgatgctgttgtcaaggagtatgaggaaactttagcgcaaattgacaactacgacggcccggagctggaacaaatcatcaccaagtacgatatcagaaatccgacgaccgatggcaatcttcttcctcccgttgcgttcaacctaatgttccagacttcaatcggtcctagcagcaatatgcctggctacctccgtcctgaaaccgctcagggacagttcctgaatttccagaagctgttggacttcaaccagcagtaaatgcccttcgcgtcggcctccattggcaagtcgttccggaacgagatctcgccccgtgccggcctgctg

SEQ ID NO: 805 - DNA, 783 bp, Aspergillus oryzae
  modified_base (152)..(152): n is a, c, g, or t
cttgtggatacgccaatttgaacaaaatgcatgcatcgctagcactactcctgctcccacttggggcattatcattgccatttgaagattctgtacaaacagtcgaggcttcccttggcagacgatgcggtagaagtccttgcaaaggcgtncctagcacaaacacacccgatgccctctgcaataacaaattcctgggaccgaagctcacggcggcggatgaccccgaatggtctgaaatgttcaagggatacagccctctcgggtcttactgcccaaaggacttcctcctagaatttgctcctagtggcaagcaatacgattatcctgagcaggacggcgcgctgttggactcggttggtgtgccggttacgaccgaatacaccctggaggaaggaatggaactcgatcggttcggaactcagtatggaggctacttggcgccaaggggaactcctttcgcctggagatccattccgccaagcaacttgaacaagtatcccaacagtccagaatacaactactgggtatggagggtcgtcgagagcttcaacgtcacgggtgggccaatcgcacctttctttgggcaaccaggttatggcttgcagttctactacgagggtggcttgaaactgttggaagaccagggagttatcgagcttgttgataagaagcagttctcatgtgaggscccgcgcgacgacttgaaawaaagtcgctgtktatgagtttcasamtmacataatgataaggacttcatgctctgaaccttggcgcgactcc

SEQ ID NO: 806 - DNA, 922 bp, Aspergillus oryzae
cggacttcaacctgttagatctgacaatcttggctgcctcaggcattaaatagtaaagatgctgatatgcttggtatacttgataatcgcgccgctacttacactaagcttggtcaatatgatcgggcactgaaggatgcgagagcacatgatcaaaaatgacaagcaagatgaacgaggatatcttcgctgcgcaaaatgccttcttttggaaggaaagctcgagaaggctttagaactctacgcctatgcgctaaagactttgcctagtaatcatcctcggcgtgagctcgtagaacaactacacaacaagcttcgagataaactaacatctaaatgctgtgacccattcagtgtgctgcctcttgaaatagcagcgatggtgttagagcatcttaacttcaagcagattgtggccatcctgcgcgtatcaaaacaatgggacagcttcctgtcctcaatgcgagacttatggatgcggattgacttgaccggtgcccgcagcaaaatccattggtgttccgtccgggcttacatccggcggtcgaaatccatggtgacccatgctattgtgaagaatatatcctctagttccgcagaaagagtccttcaattcttcagcaggtgtccaagattagaatacttggaagtcgggacgccgtttagctgtcagaacttctatgaaatgttcaaaggctcccgacgcatgaaaacgctgataatatcaagggatatgccggtaccgcaagagtatattaccaagttcctgggaagcttgcctctccttgagaatatcaaaatatacaaagccagaacttcaccttcatcaaaggtacaatggccctcagagctcccacacctacggagcataattctcggcactacagagggatcatggttaaacgggcatacgtctgcccta

SEQ ID NO: 807 - DNA, 848 bp, Aspergillus oryzae
ggacgttccgggctcagaggatgttcaattcgctaacttgggaatgcaaccaccttatgctgcccaaggcggtctacggcgcccgccagttgagaccaactccgtagctcggagcatatttcgtcgtcatcctttcagccaaagtcactctagctctggcttccagagccccgcattcccaagcactggtcggtcctcagcggcagccagcgtaccggggagctccactggtagctacgctggtagctttggaatggcccctcccgtgacacattctggtctgtccactgattggggaagtagcctctcagccggggtctcatcgttttcgacgcctatgagcggctcagtggacccgttcgtgcaaatgggattcgatcctcagttcttgcagcagttgaatgaccgttatggggagttggatttggatgacctacaaggattggaattagggggagacagccggcacgagggtgaactcctacctggaagagacgaaagtaaattggacactttgcccgactctaacgtcgggtcagcacccattcctattcccagcccaaaacaaacggacattttgatggctgatgctgttccttaccaagggccgcaatcacctggtaagggtggtttttgagagagttgggataggagaaarggttggaactgtatacagtgggccatgatttcagagctgtttaaaagtttcgtgatgtgttcttttctttctcggaggacctttattctccctcaggaactctcatgcagagcttctcagcgattcccgacatggcagcgtgttagtttatataatgaaattaatccatggcgattttgcctttccgtct

SEQ ID NO: 808 - DNA, 563 bp, Aspergillus oryzae
ggggaatcaatccaggaagctcaatttgcagatattgaaatgtcacaggacagcacttgggacggagcatccattaacactcatcagcacgcgtaacctcgcagatgattacagaaatctggggcttctgagaaaggcagaagcgctgcaaacgcaagcaacagagacttccaaacggattcttggagcagagcatccggacacaatacgtgccacaggtagtctggcctcaatatatagagagaggggccgcctcaaggatgccgagaagttgcacatgcaagttttggagaattatcgaaagactcttggtgcggaacaccctagtactttatgggctatggcccctctagctgacacctggaggagaatgggtcgatatactgaggcgactgagctgctggagaagtgcttacacttggaaacgaaagttttgggagcggactactctggtacgtcagaagatagtcgtacactgcgccgatggcacatgcaccagcaggtaatgagtgggtgcactccaagcaagtcgatgaacagcctgcatcgaacgctgtcactga

SEQ ID NO: 809 - DNA, 438 bp, Aspergillus oryzae
ggagggacaacaggcgcggcaccagtgcgctatgctgttcgccaagtccttgaccaggagtaccgcaaagagactgtacgaaaacaaaccgaagcattgagctccactactggccccaaaaaatcagccggtaagtctgcagacggccagacacaggacgaggggcagggggcaaaaagatcaggccgggaagctggcatcaaacgcgactttttcggacggataatccgtgagccttcgccgcagcctggaggcttacacgagggtccagtgcagaatgaggcttcaaaggccggcagaaaggtttgggtgacgtatcacgacgggttctccaatgctgtgcgaaagcccatctcaatgagcgagttgctagcgggactgtaggacacggctgcctaaggattaattacatagtcttaatacgaaacggtcatgact

SEQ ID NO: 810 - DNA, 712 bp, Aspergillus oryzae
  modified_base (420)..(420): n is a, c, g, or t
  modified_base (474)..(474): n is a, c, g, or t
  modified_base (480)..(480): n is a, c, g, or t
  modified_base (489)..(490): n is a, c, g, or t
  modified_base (502)..(502): n is a, c, g, or t
  modified_base (510)..(510): n is a, c, g, or t
  modified_base (518)..(518): n is a, c, g, or t
  modified_base (538)..(539): n is a, c, g, or t
  modified_base (563)..(563): n is a, c, g, or t
  modified_base (569)..(569): n is a, c, g, or t
  modified_base (578)..(578): n is a, c, g, or t
  modified_base (580)..(581): n is a, c, g, or t
  modified_base (590)..(591): n is a, c, g, or t
acggtatcgataagcttgatatcgagagaatcgggctaccatgtcttcttcatttattactgttgaaaaacgtcactttgaatctttactacagagagcagaagctcattcgtcccaggaaaacaaaagctctgcgaactcagattcagtgaccatctcaaactcagagtaccaaggtctgcttgcagtatcaactcagttcgcaaagctaaagaagtcccttttgaatggcggtttgtcccaggaaactctcgatatattgatatacggttcaccacctctatccgataatcagaatagcagccaggtgtgcactgaaagcyccttaaaatgcaagaaaactccatcacctacaagagcaaatctatccaacgaccacaagcgttgggaaagctacgatgatgatgatgcagaagaagnagaagaagcagaagaagaagaagagggtgtcttgctagcttccccagatagtgntagggntgattacgnngactcctctagnagctcagngtcgtcgntagcttcaacccctcagcgnnccattctgctccgtggccttcctnatcgtncactcacananntcttgttgnngccataaagggcggcgccttcttcatgttcaccttcgaacgcgagargcaatggccagcatttcgttcgttgaggaggaaaacgcacaggaattctatsagcatgcaaaaagtcacggggt

SEQ ID NO: 811 - DNA, 540 bp, Aspergillus oryzae
  modified_base (42)..(42): n is a, c, g, or t
  modified_base (45)..(45): n is a, c, g, or t
  modified_base (99)..(101): n is a, c, g, or t
  modified_base (355)..(355): n is a, c, g, or t
tatctgttccacaaacaaggcctacwgagcrtgkcatgaggnggncaaaaggatcagaacgccgactagggagcgccctgtcaccggaatggaggcgvnnnkbgtctatacgggatcggtgtcagccgctcactgcgatggccgccaccagtacaccatcttctccaagctgaagatcgatctcggtatcagtccggcggacgttgaatccgcactgaagagcgcctggaagcggctacggtctgagcagccccagatcgccaccacagttgatgggacgacgatggtgtatgaggttcctgatgaggcagctttgcaggagttgctggcctcaacctttgttgtctcatctgcngcagatgcggaggatttataccgcaatgctgagcctatcaagcaggttacactgtattatattccgaagtcatcggagcttgtactgcgtgctcagcattacacaattgacggcaccggtacactactcctctgggatcgctatctgacagccttggcaaccccagccgaggaggtcacatttgg

SEQ ID NO: 812 - DNA, 847 bp, Aspergillus oryzae
ggaggtttccatcctccagcggcaaaagcgcgtgccggctatcgtggactttgtcaagtcgggctctcgcttcacagttcttgtgcctcgtgagaacgccaagctgaccctcgtcctgtcgggtattcgtgcgcctcgatcggcccgtaaccccaacgaacagtccgaaccattcggacaggaagcacatgacctagcaaacaggcgttgcatgcagcgtgatgttgaaatcgacgtcgagacaatcgacaaggttggtggtttcatcggcaccctttacgttaacaaggagaacttcgccaaggtccttctcgaggaaggttttgctactgttcatgcctactctgcggacatccggacatgccaccgaatacttcgcagcggaacagaaggccaaggaagctcgcaaggggctctggcatgactgggatcctagcaaggatgttgaggaggaagaagaggagaccgctgataccaccggcgctgatgaggcttcccagcgccgcaaggattaccgtgacgtgatggtcacctacgttgaccccaccaacggccgcctgaagatccagcagattggcactggcacctctgcgctcacagacttcatgaatgcattccgctcattccatctgaacaaggctaacgacacaccattgcctggccctcctaaggccggtgatttcgttgccgccaagttcacggaggacaatgaatggtatcgcgccaaggtgcgtcgcaatgaccgtgagaaacagcaggccgaggttctctacatcgacttcggtaattccgaggttcttccctggtctcgtctcaggcccttgagccagcctcagttctccgtgca

SEQ ID NO: 813 - DNA, 440 bp, Aspergillus oryzae
  modified_base (140)..(140): n is a, c, g, or t
cggcacgaggatcagtgtgtcaacaatgactctgtctggtgttcccgatatacacaaatcgaaccacgcgttgaatggacctaaaaaatacagtaaattttaaaaaacggcaatgcatgacaacacaacccgcatgcgtnttgaaaagggtatacaaagcatctgattgaacaatcgcctgcgatttccaaaatataattcacgggtttgggccggcgcggcattaaaaaagaatggacttaatggttatgggaatggctttcatccatctgtcatttcggagtctttgatccttctatgtacctttcttcttctcccctcatgcctctgtttctggaagtcctggagcgggcaatgcatgtatttgtataagtcataccgattccttttctttttcgtttcactgatgtcgttttttacttattttggtcgacatatgt

SEQ ID NO: 814 - DNA, 471 bp, Aspergillus oryzae
aattcggcacgaggctctccttgtagctgttcttctcgagctgtcctttgcgtatggcaacaagctcaatgctaggttgactgagacggagatccgtgaggcatacaccgatgagcagttgctggcgatgggagataggtctccgtttttcaaatacacgctgtgaacggggttgtagtttagctggagcctatggatgccttttcggtcaggctgtggggtgattctgactagctagctaagtcctttctataggaactacttgtggcctcccccttaccgattccatttctttatgagagtatgtaaggggaatcaaggaaaggaggtaggacacttctgagaaggtgcctaggagctcataattcgggcgaacgctccgttgatgttactaggaggtaatcagatgacacaatcagaaatcagctagaattaggagaagtatctgcaattcagagaggaactaatgag

SEQ ID NO: 815 - DNA, 631 bp, Aspergillus oryzae
gaggcaaaggcatggcgacactgggaccgtcggtgcttcgacctaatggtcaaattcggtttccgggacctccccaccgcactgtatcccaccatcccagcgggagcaaatcgttccgagccgccggtgactctcaccacgaccaagtatcaggaaatcgcaggcctataccgttcgaatttctcggctcgcgcgtctggcgggattgatcgctctgttcatccggatatggatcctatccacgccaacagaattgtctatcgccctgaaccgcgcaacacattctcaaagattccccacttgaggcctcctgtgctatggatcctgggagcaaagacatttcttggcattgacaaccttcgcgaaccatcaaggtgtgcggggtgggggtcgggggcagtggtggcatctcccatggtcaggtcaaggaagttactctacccgaacgtggccatcttttccctttcgaggatgtgaatcagacggctggttattgtgcagcctggctggtccaggagatgggaaaatatagggagtcggagcttgtgtggaacaagaaacgatcgtcaatgacccagcgtgatcatctggtgtatggtgatgattggttcgaagctattccgatgccaaa

SEQ ID NO: 816 - DNA, 907 bp, Aspergillus oryzae
ccagcggtccttgcctagcttttcaggttactcctgctcattaggattgacagttctttcccttcggcgcgtctggatcgccgtgtcctcctccccgcctcctgtcttttgactggttggcttccattgtctctctttctcttatcgaatctgccttttgttttgatttcttatttccgatttctcctcaccccctcacctcccaccctttcatcacgcagacttctctgcctatgacaacaatgccagtcaagaagcgcaagtctgaaagcgtgcctgcggccgaagaaaacaattcccctaaaagagctgctgtccctgatccagctactggagagaaaaggaagagaggtcgtcctcgcaagtaccctgaaggaagtggccccaagccttcgccgggtcctaaaaggggccggggccgtccccgcaaggatccgtctgccagtactccctcgaaaccgagtactcctaaggagggcaagcggccagtcggaaggcctaggaagtatcctgctcagaatggagcagacaccccgacagacagatccacgcaaccgaaatcggagtcagcagatgccaaggctgaggatgaggcggatgaagatgattccggccgctcgtattggttgatgaaagctgagcccgagtcgcgcttagagaaaggggttgatgttaagttctccatcgatgacttggcctcgcgtasaagccagaaccctgggatggtgtgcggaaccctgctgcaaggaatcacatcagagagatgaagaagggcgactacgctttcttttaccactccaactgcaaagtgcctggagttgcgggctttatggagattgtacaaaaacatacaccagacgagtttgcctttgaccctgcacacccatactacgacgagaaatcttcc

SEQ ID NO: 817 - DNA, 731 bp, Aspergillus oryzae
aattcggcacgaggacaaagacaaaatacattctattcattcgcacaaccaaaagaggaaagaaaacagaggaaaaaaccaggaagagatgacaaccccaaccttccaaatacactacttctcatccgcaaccacctacaccggcaaacagaccgaacccctccccgccccactacccctcagccaactcttcaatctcctggagtccaagtacccaggcatacaagagaaggtgctgagtagctgtggagtgagtatgggagaggagtatgtggatgttaatgattgcgagggggtggtgattgaggcggggaatgaagttgcaattattccgcctgttagttcgggatgattgtttcatttttcttggtttgttacgaagggagaggtgaggaagtaatgttggatttgtgcttggttttcaagtggtgttacgtacaatggaatgaaagacatacatggtgcagaatctgaagaaaaaaaaagagacagacagagagacagagaaccaaagaacatcaggaaatggagaatatwarggaaaacagtccaatatacaaaagacaaaacggaaatcataaaggaaaacgatattttcttcacaatgcagcgcttcgacaatacccaccgaccccattatcatcaaacctcccataaccaatacagattactcatgttgaaccggttcaaccttccagcttctccgttccactcgccttcttctgcttcca

SEQ ID NO: 818 - DNA, 891 bp, Aspergillus oryzae
cacgaggggtgacatgaatccggagatagctcacatggctgggatgcttgcaaagagcggaaatcccttcgatcaagaatcttttcacgaccatgaaaacctaccactcgtcacctcgtctcgaactgtatcgagagatagcacttggtcgtttcatatcgaccgacacacagctgctgtcgccttcaatgagcttgctgctcaaatacatctagttccactggacttggacaattatgagtcggacaaagaatttggtccggctgccccagttgatgatcccaacgtgattggagacaacgagcccccacgacgccgcgatagggtccttggtcggatccgggtaatgcgatcaacccttcatatgaaagctcagcctgccgtaacccatacacgaacgctgcgtcgtatgaaaacattggccaatttctcttctcggtcctgcgaactgtctgcactgaaaggcaggtctttagaaaatctagctcggctaggaggacatagctttctgagctttccagtggaattcgcaccggctatcctcaggctaccgacatgtttcgtcgcgactatttcctatttgagatgctttgggttgtmcacgccagaagtgttctgtaacgcgggtaacttgaagacggccgcccggatttacaatcactttgcgagacaggtgctgtccgctgagaatgtgcatgataggattgaggtgacggtccggcgtggtgaaatgcccgtcgatctgatcagaattctcggccatgatacttcctgtgaatgctcttcgcaggttctcagtgttggctgggtgttcaaggctctactggccggactgcccggcggaatcctggggtcggcacgcttgtaccgtatactcgttagcatttgcta

SEQ ID NO: 819 - DNA, 747 bp, Aspergillus oryzae
ttaccggaactatgtcgaccatgcctttggagcctcccatgtatctcagctctctccagaacaacatccgagctcggcccatcccgtgggagggagcagttcgagctggtaacatcaccgatgatcatctgaaaaagatcaaggcagtggacaaggttcgcaaagaccagaggcgtcagactgtagagggcgatatctctggctatgtaaccctgctctctggaagtgccgacgccaagagcgttctggactccgcttctaggaggaccgatatcgtacagtatatccttgtgctggcagcggacttgatcaatgatgttccagcgctctcgtctgccctaatcgcgcatcctgatccctacaagccatttctccccctcttgcgtcattctacgaatgccgaggaccctatcccgctgctcacttctaccttcctgacaaaccttgtctctatcagcctcgcgtcttcgtctaagtctgcggcccgagatgaagaggcacttccacaactgtacacttacctttccagtctgacccaaaaccaggacagtggattgcaagacatcggtgtccaggagttgtcggcgctgcttcgtacatctagatctcgggaaattttctggaagcagaggggagaaacggtcacccctttgattgaaattctacgtgcggcgaccggagcaaggataccagttccagcaccgtggctggcagttcgcgggcgatcgagccaggtctctccggcgg

SEQ ID NO: 820 - DNA, 943 bp, Aspergillus oryzae
cggggcgacacattcgggccgcagccaccatgcccggcactactacgacgacgactatgaatatgagcaggaccgcggttccgttgcgtcgcgcccggattcttactatgaccgcccacaggacctagtccgtcgacatacccatcatgatatcgccatgcgggggcccgaagctcgaccgacaactagtcgctcaaagtcagatgcacacatcgacatggacctggcgtacggcgactacaatcctcacgtgttgaccaaggctccgccacaacaaaaccaactgcagaagattgaggacccagaactaagtggtctagtaaaccgcgcacaatggctcatggaggaagccaactgtgtacatcatagtgccacggccacgattgctcatcttcagaagaatcccgatgccatggccgcagttgcactcaccctggccgagatcagtaaaatagcctcgaagatggccccggccgcactttcgtcgctcaaatcggcagcccctgccgtttttcgcactgcttgccagcccgcagtttctcatcgccgccggtgttggtctcactgcgacaattgtcatgtttggcggctacaaaatcatcaagcaaatgtccggtaacggtaacgaagtcagtcgaggaccagaccgcgggctcggccctcgaccgggtgagtccgtcggtatggatgacatggtagagatcaacaccgaatgcctcagcggtgttgaaatgtggcgacgtggtgtcgcgatgcagccgatgagagcatcggcacctctgtcgatggtgaattcatcaccccaactgctgctatgatgtccggcatcgatgtgaccactgcacgcatgatgcgggaccctcgtttcaagttcgacgacgaggaatcgagggcatcatctcaccggtctcatcgttcacgccccccaagatctcgcgcgcct

SEQ ID NO: 821 - DNA, 737 bp, Aspergillus oryzae
cgctgatacgatcggcccrgggctgcgcctcactctggtgcctgtcacctccactggaaggggatagaggaggggcgaaccaaactgccgggcccaagacgcgtccccttctcgcaccaaacttgccttggaacccgcccgttgatggtctatccctccggaaggcctttcctctgccgccagttcagagagacatgcagttgtcattcgacgggcggtatgtcgtcgaggacgtatactgatatatcatcatcccatgcagactggcggtctccagtaattccacatttcccgtcttttgctccgtttagttactcttcgaccccccttgacgacttggtagaagagcgacacgcatagcttgccagtttcaaggcatgcgtcacgcacacttttgacagaatcttgtatgctttgagccactcgtcatcagctgaagctcatacgccacgcctaccacgcatatgtgggcaggcttcgttttatgaaaagcccttggaatatcatgacggggataattcaaaaattaagaagaaagcggaactctcttcggagctgcactcccgctggggcgatgtggctatcacgtatcccaatgcaggctcctggagtcaatatkagcagtcgcctgttggaacgcccaattcgatacccgttaaaatgttggatcactgtcgacgacatggttctctcgattcgctcgatcgccatggtcacacatctgctctaccttcggg

SEQ ID NO: 822 - DNA, 457 bp, Aspergillus oryzae
  modified_base (108)..(108): n is a, c, g, or t
ttacgaaaccgacaagacggcccctcgccaaaaacgcacgcccccatcgtcaagmagcgcaccaagaccttcaagcgccaccagtcggaccgctctcaagctgtcgtnccttagtgcatggcgcmagctaaggcgtatcsactcccgcgtccgtagacgctycaagctcgccacatctcccatgccctccatcggctatsgctccaacaagaagaccmaccacaygmtgccctccggccacaasgcyctcctcgcccagmaccccaaggcaccttgagctccttcycmcgcacaaccgcacccacgctgctgaaatcsgccacgccgtctcctcccscaagcgcgtggaaatcaccgccaagcgccaargctctcggtgtcaargttaccaaccccaagggccgtgtcaccactgaggcttaaatgctttarcctaattaaatcaacaattaaaatc

SEQ ID NO: 823 - DNA, 287 bp, Aspergillus oryzae
cggcacgaggcgtaaaactcacggagtcatacgggcctcagtggtcactgcagtattggcactttccctttttcggcctctccgccaagatgccaagagccctgcgggatttcaactacacctgcagccgccgttattggctgcctgggcaaaggaaagtgtctatgatccgcgttcggaggtggatgggcggcttggcagtaatacaccagatctttcggggggttagtttgtttacagcgtatgcactattacataccctaatactttggtggtttttttctttt

SEQ ID NO: 824 - DNA, 957 bp, Aspergillus oryzae
  modified_base (579)..(579): n is a, c, g, or t
cggcackakagcttggacattgacgaggttatcttcgctggtggtgcctctcacactcccaagatcgcccagctggcccgcaacatcttctccgagaagactaagatccttgccccttcgaccttcactggcgctatcaacccctctgagctggcccccaggggtgccgccatccaggcctctcttatccaggagttcgagcaggaggacattgagcaatctatccaccccatggtcactgccactcctcatctgaagaacgccattggtgtcgagttcaccaccggtgagaccgtcgagttccagcctctcctgaacactgagaccgccctccccgctcgtcgtgtcgctcagtacaacgcccccaaggctggtggcgacgttttcattcgcgtttgcgagggtgtccgcgagatcaaggtcaccaagcctgagcctaagcccaaggaggagaagcccaagactgaagaagatgaggacgactccgacttcgactctgacgaggatgaggaggaagagatccgtgagatcgtctggaagactgagaagcccattgccgagcttgccgtcaagggcgtnaaggccggcagcaaggtcgagctgatggtccacgtcaacgccgacctgggtctgcagatcaccgctcgcgaagtcggcggccagaacgccgttcgcggtgctgtacaggctgcttaagcttttcaccggtagtacataacctatttccttcctatcttcagacgcacctcacggttaatgctttgctccttcccactggacttattagaacatcaaaattttattagacatcatgcacttcctgtctatctccaccgcgtcatatcccgtttcaacgtgatcggtttatgavaagagattctggatatgagagaccttctgtcttagacgcgtcctgtcttgcaatgactgtccgatgatgaatgtatccattgatgg

SEQ ID NO: 825 - DNA, 334 bp, Aspergillus oryzae
cggcacgaggaagagtttaagaccggtttctggttgcccgatcttggccaggaagatgtactcaaggctcttgcctcgtggaatggagattggtccggactcagtagcatgaagttcattcgcttgaccaaggatggtgggaagcagtcttcagcttttcctcctaaagggatgtcgtgatctttagttatgggtttgatttaagaccgtatcgctcgcattggttttggcacataatggcgttgacgaccgtatataccagcatcttgatattcgttagctactgctctcaaggtttggctacacaagcaaattaacaaaaatgtctgctatg

SEQ ID NO: 826 - DNA, 146 bp, Aspergillus oryzae
cggcasaggaaaaaaaaaaaccgaatcacccttcacgagaactaaaagggtgattcggttttgtgtttgatatgatttacttcggttaaaaggtagcacagcaaatgaatacggatttgcaatacccactgaatactttttacgat

SEQ ID NO: 827 - DNA, 667 bp, Aspergillus oryzae
aattcggcacgaggctcaaagccccctttgcctagaagaaatcctatctttgactcaggagattcagagaatcatcctgatgagttgctggttgtcgaggccccttacgactcaggccctaatagcccggtcgttgatgtcgcccccgacaatgctttgccggggcccagtacacagcgggactcacccacgtctaaagtgattatgagacggtctaacgaactttgggagaaagcaaatggacacgaccgatcctccctggtcgaggacaccgaggctgacaaacacggcatggcaatattatcagcaactgacggcatcattccgtgaagggcgatgtgatatggaaacggatgctgtcgagcctatcgagcagagctcggtgtcgatgcggacgggtccatcttataatgatcgatttccgtgcccaacttgccaatgtgggtcctatgctcttttccctttcacttcctctttttgtttgcattgcagcatggccgcttgtcctatgtataccctctggccagttatatgatctgatcggcatcatcagatggtgtttaaggagcgatgttcaactttcaattcgtcatagtccggtgtcaacttatgactgttggcccgggtatggacgtaagggtgaatacatgactgtgtcttacacctt

SEQ ID NO: 828 - DNA, 848 bp, Aspergillus oryzae
cggcacgaggctcagtcacttactacttcacctgctacacatcaacttcacagaccagaagatagtatccattcttaccagtttacgcctcgagtttaaaaaaactttcgcagaattttcccttgatctcccttcttccaatatgaatccacaccaacagaacaaagtcgatactgcctccttatcccctgaagagcaacgcctattgcgtctctacggaaagatgcccaccaagaaggatctgttgcagaacaaactgaaggagcggaagtacttcgattcaggtgactacgccctgagcaaggccggcaaagcctctgatgtgggtgtcaccaatattggttctcagcaccccgtccccgaaaacatccctcatttgacggctacctctcctggggcgaataacccagcagctgccagcaatggtggcagtaccaactctcaaggacagcagattcctggcagcatcagtgggcacccgggctctattggttttcaaagccgcagtcccgtgaaagaaggcagctatctacaacgcggaactagcgcagatgagtctgagggtaacaccgctgcacttaaagatgcaaaggaacccagcgtgagttcgccccctgctcgcagcggcgttccaatccggcgataatcggcctttggctcatcctctcttcttattcttcccctatttaactgttcctgtttgttacatcatcatcaacatccatgtttgtttctggtttttgttgctctgtccggtgatggtcacatataaaagagcctggcgctatggttttgtgttctatgatgttgtcacgaagctaccctaccctcgccctccccactaaact

SEQ ID NO: 829 - DNA, 789 bp, Aspergillus oryzae
aattcggcacgaggctctatcgcatccccatcaatcagactgtctatatgcatctgcaatcatgaagttcttcgagaacgtatttacttacgattactccttccctgctgtctctcttgcctacttcctgcgctatcctaacccgtattctcgccatgtcctcacgactgatgttatcgatcgctacgtcgatcccaagacacagcgtctccatacaattcgccttcatttaaagaaatcaaaagtccccgctggcatactcaaattgcttcccaagggcatgggaggatccgacaattccggtcaaagctatattctagagaccacggtcgtcgaccccaaggaaggctggatggaaagtgaatcacgtaacatggaatggactggtatcctcagtgtcgttgagaagcaggtttaccaacgtcagccaattgaaggggctcttgatagtctcgaggggcttgccctttgacgacaagagaggcgagcagacgaccgtgaagacgaccgtcacgttccgttctcgtttcggacaaggaaagctgctcggaagaagaaagtcagacccaattggtgaccacaatgtcgaggctgaagaggatgcgccgaagaggggctttttctcctctctatcaaccgctggtattcagcggacaattgaactcattggggtgaagcggacccgggatgctgtgcttaagagcaaacaaggcatgaatgttgtcttagaacgtttgcgtacggtgggaatagtcggtgtcctcgaggggatgcgccaggatcgggagg

SEQ ID NO: 830 - DNA, 827 bp, Aspergillus oryzae
aattcggcacgaggttctgcatgtcttttcgctccttagctcccaaattttctgagggttgagcttgttgggcaacaaggagctcccagtccacggtctttacattattcttctctgaaatacaattctacagtacaactagatcgcgatatcagacagctcaggagaagttacgcccaaagcagtcacaatgggcgaccacgtcctcttcttctacggaaccttaatggccccccaaatcctccaccgggtaatccacggctcaccgaacccagagccctggcaaaaagcccttctcacattcaggccagccattctgcacgggtaccgacggcatcgggtgcggggagctgactaccctggtatcgtgccggccaagccaacaactagagagccaggcacggattcgaatgctaatggcatggcagccgtgcttgggacggttgtttcgggattaacggacggtgatatccatcggttagatatttttgaggggacagagtatgagaagggtaaggtaaaggttaggattttgcgggaatcgctgggtggcaaggatggggagctggagggaaaggatacggataggcatttgatggatgttctggatgctgctggggcggagtttgcggatgaaggggaggaggtagaggctgtcacctatgtttatrwtgccggggaaagtaagctggaggatggagagtgggattttgaagcgttcaagagggataaaatggcgtggtgggttggggcagatgaaagtgagtggtaatatatccttcagaagatatgaaaagatttccataggaaggccaaatgtttttttg

SEQ ID NO: 831 - DNA, 848 bp, Aspergillus oryzae
cagagaaggatggccacatcctgcagcaattcaaggcgcttctgtttggcgctgccggctcgcgccgaggatccagttgtcgtcaaggccgcccacscsatgttccaacgctttgccgcgggcgaaaccagcgctatccatccgaacatccgcggtagttttcagtatcgttctgaagaacggtggcgagaaggagtacaatgtcgtgtacgaccgattccgcaacgctcctacctctgatgagaagaccactgctcttcgctgcctcggctctgctgaagacccggccctcatccagcgtactctgggccttgccctcagtgatgaagttaagaaccaggatatctacatgcctcttggcggtctgcgcaaccacacagccggtattgaggctcgctgggcctggatgaagaacaactgggatgcactctacaagcgtctgcctccgggacttggtatgctgggcactgttgttcagctcactacttccagcttctgcaccgaggcgcagttgaaggaggtggaggacttcttcaaggacaaggatactaagggctttgaccgtgccgttgagcagagtctcgatgccatccgggccaagatcaactggatcaaccgtgaccgcactgatgtagaatcttggctgaagtcgaatggctatctccgcgatggcaagctgtgagggatagcatactaataatgaatttagtgtgggatgatggacatgttaagaactgaggatctggaacaaatccttgcatcacgcccaatcgggttaaacgtttaaaactctacggatcagattccgatgtatactagaaaataccattcagctctaccgagtacat

SEQ ID NO: 832 - DNA, 798 bp, Aspergillus oryzae
aattcggcacgaggaaatgaatactacatcgtattccccgtcatatgttgcgcacccgcagtcttcgtttcatatgagcccaatctattttttctttgaccctctctcgtgtgacgacacctgaaattgcgatatttcctagttgagaggwytttccctttacggtcgagggcaccacttccgaacgtctatgtccggaataccgggatagtggcaaaaggggtccaagataataataataataaaaaaaaaaagaataataaacaggattacttcgtagcgcatcgaaggtgtatcctccacaactgacttgccgaagtacagttgagacagtttcggagatttcctccccacggccatacaaaaccgcctcggagccgaggggcgggaaacgcatcaacctcatcatgaggcttcagcaaacatgaggctccgcttgtggggtttccgtttcggaaccagatcgacaaatatatagcctttgactgtgaagaaaaccggttataccagcttccggacttcacccatttccctgaaccaccgctcaatccaacgactgagatcggtttctcctgtcagcgtactcggagaatggtcgcacatgggagctggagcctggagggggaatccaccagccagatgcattctaatcccaaccacgaaggattgatcaggcaatccaggcagggactgtcgactcagatgctgaaaccgaccctttctagtgtcctcttgacgatgacacgtttccaggggatgatggaggaccgaacgcacggatacaaatgggaaacacga

SEQ ID NO: 833 - DNA, 755 bp, Aspergillus oryzae
aattcggcacgaggcttattgcctattctgtccgagtgctagccacttatcatcatgaagaacatcttcgttgccactttgggcctgttcgccgcagtttcgtctgccttgccctacacaacccctgtcaatgacaatcccatctctgctttacaagcacgcgcgacaacatgctcggccaaggccacggataacctcatcttcaaggtctccatgaagaccttccagaaggcgcgcaaggccaagaacccctccaagtgcaactggtcatcggacaactgctccaagtcacccgataagcccgatggatacaacttcatccccagctgccaaagacacgatttcggctaccggaacacgaagaagcagaagcgcttcacaaaggccatgaagaagcgcattgacgacaacttcaagaaggatctctacaagtactgcagccaattctcgggctggagctcatggaagggagtggagtsccgtcgccttgcggatgtctactatactgctgtccgccactttggcaagcgtgatgaagcgcttgagtttgaccctgaggttgagttcgagaagcgtgatgaggtggccgatgtccagcctgacgaatttgataactttgacggttctgaagttgaccctgatatcgagggccaggtcattcccgaagttcttgaagatgatggagtggatgtggagaacctcgacgatattgaaaacctgtaggttttcggcattggctctacactttgcaaatg

SEQ ID NO: 834 - DNA, 605 bp, Aspergillus oryzae
aattcggcacgaggttctcatgttcatggcctatttcgtaccactattctatgtgcctttctttgcctcgcaggtactcgagacttcgacagatatgagcttttatctcgtgtcaattctgaatgccggttctgccgtgggtcgtttagggtcggcgttgttgacgcaaaggctaggcgctggtttgatcttgagtgtcagtgttaccacatcggcggctttgattttcggttggattggcatcaacactcaggcctccttcgttgcattttgtgtgttatttggcatctcctctggagttttaatatcagcaaatcctttggtgatcgcgcatcccgttgtctcgcccagtccggctattattgggacccgtatggcatgctgtggtttgcagcgagcctgggggtgctgattggggcacctattgcgggcgttatcgaaggccatggcggaggcaatgagtaccttgggctgcagctgttcagcggtgccatcatgaccggcggagggatttttatgatggtgcctctactggcagcttggcgatatgattgccatcagaaagagctagaataatacatcggctgaggccgataaaaccacac

SEQ ID NO: 835 - DNA, 417 bp, Aspergillus oryzae
cggcacgagggggaatggcggttgccgagtacggcgtgagtgttaagagaggcgagttctaccggtagagattgggtgatgggataccacaatgagtggctccgcgggccgttggttggacattctgaggcgtgagatggcagcagattcttgaacgtcgactttaattggaaggggtttgcttactggcgtaaatactgggctggggacaaacgatatcctgcatttgggcttctaaatttttaccacacgagattttgcataggcgtttgggatggtgaagaatcaatggatataatccattttgcactgcttcatgtcgaggtcgacagtggttgtctttcttccttcttgatgcgttaaagaaccgaagaatagatcacaatattgactcaatgatactgattatcctgactc

SEQ ID NO: 836 - DNA, 470 bp, Aspergillus oryzae
acgaggaccaccggtctaaagtgcttgcggaccaagctcaaagcgtcaaccttttatgcctcctgtccatggactaatataccctcttattccactatgccacgtccctgcatccaccctgggcccttcgagaggactataccagtgtcatcactctgtgttgcgtctgtggaatggaaaaaacaggagctggacgccagcagagattttaatgatcatgctcccgtactgtgtccccagaagcctataataagaaattccgctattcattatacggcctgtctgattgtccctatcacactcccacgaaacaggactcttgtaccaacgttccactcgtgctttatctcccggacatatacgctcgagattgagcttctttaccatactacctatgtgtctatgccgacggcgattaagctcaaagtaccgcttcatatcgcatcgtcacggagaccagatgatcccag

SEQ ID NO: 837 - DNA, 431 bp, Aspergillus oryzae
aattcggcacgaggctctttttccgccctcattccctaattcaaactcgtcacaatggccggcgctattgcttccgctatctaccagggcctgatccgcagaacgccgtttacctcacggccactcttcaccagctgccttcgctttcgagattgcctatgactcggcctccaaccgcatctgggatgccatgaaccgcggccgtcaatggaaggacatcaagcaccagtacatgcgtcaaggatgaggaggatgacgagtaaagaaaaagcagtcattgatggagccattctgggcgcacaggcttgtcggtcccactgttataatacagccgagcactggagagacattggtatatgctgcgtgtgccttgtatgaaatagattttttaacactgtattcacctcggaattcacttgcttcattttccc

SEQ ID NO: 838 - DNA, 736 bp, Aspergillus oryzae
attcagctcgctggaggaaattgatatccctgtgctcccgcccatgaccgtcatggagcgcggtatggttgtctccccggacaacgaggacgaggatatttcctgccctcccatyatcgatgttaatgtagctgccgaccatgatgttgatgagatggacaagcttctgtttggtttggccatgactgctgatcgtttggaccgyttgctttcttccctcctttactcctacggaaacaccawggttggtatcatcgtgttggtaccggaatccgatgacgacatccccaagcaagagatctacttccgtaaccgtkgcttggacttgatatttattcagttccctcttgatttcactgctcgttatttcggcctggttgaggtgttcgctaattatatccgttccaagcgccctcagatccaatgggttagctttattgatgatgatattttctggttgttcctttccattgttgctgaggagttkaagtttttcgatgttacctagaagtattatattggtttttgttggaagttcattggtaggttgacacctttggtcacattgcctttggcggtgctggtgttttcgtgtctyagcctctccttgacgttctcgaagaatatyacgacgaatgtyagttctggggtgagcagcctggagaccagaagctcggacagtgcatccagagatacggagatactccccttaccctttggccctctctttaccaga

SEQ ID NO: 839 - DNA, 733 bp, Aspergillus oryzae
aggcaatcgtcatcttccggaggaccgaaaccatctcttattcgtcccattaactacatgcgactcatttccgcggtgacaattgtaatgggtgtcttaaccttattcaccgttctgtcaccgtatgttttaccggtcatacagaatcgaaacttgtgggccgcattcagcttgatttctatactattattcacaagcggccacatgttcaatcacatccgcaaagtgccatatgttgttggcgacggcaaaggtggcattagctacttcgcgggtgggttctcaaatcaatttggaatggagacgcaaatcattgctgccatctatgccatcctttcctttgcgacaatagcactcgcgatgaaagttccccgtatcgcagacagtaaagcgcasaagtggctgtgctaatctggggaactgtattatttggtatgtacagctttcttctgagtgtcttcagggccaaaaatggcggatatcctttcttcctgcctccgttctagttcaattcacagccacaacgctggtcgtctctaccaccatagtctgcccaatgattgcattgaaaagaaagaggacaagttgaaggctttgactcggcgattactctgggccataaatacctgattgggacatttcgagctaggaaatgacgtttcggctttctcgatggtaacgaagcgtactagtgttacatcctggctatgtacccctgaacgcgcatgtgctt

SEQ ID NO: 840 - DNA, 811 bp, Aspergillus oryzae
  modified_base (275)..(275): n is a, c, g, or t
cgcatcaccgccgttccccctctcattccctcctagaatacttatctatctctcatcttgctctcacccgcataattaattcttacctaccgtcatgtctaccttagaggatctcsacgaccttgaccgtgaagagagagagaagaagccccaagatggcgacggcaacggcaggaagccctccggagacggagacgctgacatgaaagacgctgataagaaggacgacgaagaggacctcttggacgatgatattctacaatcgagcacagcgnacatcgtcaagcgacggcggatgctggagaacgaaatgcgtataatgaagagtgaatatcaacggttgacgcacgaacagagtaccatgagagaaaaggtcaaagataatcaagagaagatcgaaaataacagacaactaccatatcttgtcggaaatgtggttgaattgttggatttggacgtcgaggctgaagccgcggaagagggtgccaacatcgacctcgatgctactcgagtcggcaagtctgctgttatcaaaacctcgacccgtcaaaccatctatctccccctcattggtctggtagatcatgagaagctcaagcccggtgatctcattggtgtaaataaggattcatatctcgtcctcgatacattacccgccgaatatgataaccgagtsaaggccatggaggtcgacgaaaagccaacggagaagtacacagatattggaggtctggataagcagattgaagaaattgtcgaagctatagtatggccgatgaaggaggccgaacggtttaagaagctcggcatc

SEQ ID NO: 841 - DNA, 1013 bp, Aspergillus oryzae
cggcagaggtctgtccattcttctgctcttggtgtcggtattccttcaggatatcctcctatgtcccagaacttcgcagactcttggcctgccctcccaggaaaccgtcgggccaatggtaacagaggaaagggggcgcctagcattgctggcgaatccattgcagcgacagaatctgacgttactgcaagcatcattgatggcaagagtgttgatcagggcggcgtgagtctcgctggacttagtatccacgatatgagcaaacagcccagtctcagtcagtccgaccggctgaaacgctatgtcgaatccggtggtcgcgagccttacaagcctggtgttgctgataataacagcatctttggtggaagctctgccagcattcgtgtgactcgtggtgtaccaggccacatcattgatgacgacgacacacgcagcgtttctactgcgtttgcgagccaggtagggggaaactacgattgattgcggtaacgttgcgttgtacgctggtctgggtggcaccagaaccttgcagctctcgcaaagccctggatacgactgttcgcagcactgttgggccactaaaacatctttcggtaacctgagaggaggctcgagttgttgaccgtctttttgggcatgaaacacccgcaccttcagggtagcatcaatggatacatgtctcagccmccccgtggaagatggaaaatactcctcgaacctcgaatttcacttccacgatacacatatctatatcaggatatcacggttacctttccagaggtccaaagcaatgacagtaccatttgtgggggtgaccatgtctagtctaattggcaggtttatggtcctccatgaagtaacgcgagartrgtagtggtctggcatgcacatgacacctgttgatcgatcattagctgtcaagggctgtgtcatttgaggactaatggagtttccatagattcgttcggcttgtaggcgacttctaaggctacaggaaagctcaacatttt

SEQ ID NO: 842 - DNA, 559 bp, Aspergillus oryzae
  modified_base (78)..(78): n is a, c, g, or t
tgtcggttgtgaacgagacgactgggcagaaaactgtgtcggctttcaaggcagggggcatgttctcgggccgcagtnaggaggtcgtcacgaaaacactggactctagcggtcgtgagcagcctctcgggctgacgggtacctggaccacctctctccagatgaccaagaacggctctgcacagcacctgtgtggaatgccggaccgttggttcccaacgcaccgaagcactacggcctcactgtattcgcagccaccctcaacgagatcactccaatcgaagaccataagcttccaccaacggactcgcgtctccgccccgaccaacgggccttggaagacggcgacgttgaccaggcagaagaggttaaggttaagctggaagaatctcaacgtgctccccgccgcgagaatggaattagcaggtcaaacgtggaatccaaaggtggtttacccgagtkgacgatgatcttgtcggaaatgaaggcgaagtcgtgttggcgtctaaagtcgggtaaagagggatattgggaagaacggtcgaaagggaattggacc

SEQ ID NO: 843 - DNA, 473 bp, Aspergillus oryzae
  modified_base (414)..(414): n is a, c, g, or t
crgcacgagggcaaaatgtataaaccaaattcaatgtggacgtggtccttctgtattgtgacccttttccaagcagtcgtcacactcgctctagaatgtcatgtattcgcagacttccagctcaaactcaaggagatagccgtcaacgtgacggcatccaaaacaataccgacctttttagcactgtacagtttcggttttgtctatgaattggtactggtctacgatgcactgcgccttaagaataccattcaaatcatcgggctgtgtgtatgcaacgttggtctactgatttacggtgccgtgcaagtggagcaaatcaaagatgcgatcggagtcttgaatgacaattcagccattgacccggctgtgtggggacagattaagccttttctgattattatcccatgtgtngtggccatgggcacgctgctgatgatgatcgttgcttggaaattatacgatgaatttgc

SEQ ID NO: 844 - DNA, 458 bp, Aspergillus oryzae
  modified_base (342)..(342): n is a, c, g, or t
aattcggcacgaggcaagggtcggaacgaaaatcgtgaaaggcgaaattcaactacgccttggttcccttgctcctgcgcgtggctccccaacgactcgcttatgcttgtcgaactcgcccggtgctccagagcttgtgctacatcagtaggwttcggtgaggaacttggtcaaccagagtctcgatgtggtggatgtcagcacttggactggcgacccgctcaatgcaagtatcatatatggacagctgcgcttattatatgaaacgctgtctgaggctcgccagaagttgaagggcgagagttatcaagtcaggggcaagtggtgggagacaagtgcgcntgaggatatgtttgatccaccgttgccgcaaaacctttcgttccatctatccatcgccgactctgctctcgtcttgtatctaaggacgctcgagtctagcacacccacacatactc

SEQ ID NO: 845 - DNA, 471 bp, Aspergillus oryzae
attcttcagagaatctcttgcccaagatgcctgttacagctatcgaatcataccaacagttccaggagcttatcaccggtgataagcctgttttaattgatttctgggcaacatggtgtggaccttgcagagcaatctcccctgtttttgaggaaatgtcaaacgccgagggctttgataatgtcgggttttataaagttgatgtcgatgcacaagaacaaattgcccaagaagttggtattagagcaatgcctactttcatgctctttcgcaatggtgccaaagttggcgatctggttggagctaatagccaaggattgacagagcttgttaaaaaggcaactgctctcccctaaagcgcaacaaagacactccgcattgcccgtattgttctatgacaccggttgcagtgaagaagggaggggcaagtgattgtatctaattctaaatgcctttatcagatctcccgct

SEQ ID NO: 846 - DNA, 468 bp, Aspergillus oryzae
  modified_base (123)..(123): n is a, c, g, or t
cggcacgaggctcactgttttacctagaatcttgctacaaccgtctctcatccccaggtgctcggtgatctctcaccatggataaaaccgatattgctcatctagaggtcttgagctttgcgnasttgcgagcaaagaccagaccgagttgaacaagcttctcgatgcttgtcgcaaacaaggcttcttctacctggatcttgctggttccaatgtgtctcatgggctccatcagcgactgaaagccctctctttgatgaaagattggtttgaccgtcccaatgaggagaagatgaagcttcacaaggattcagtgaccaatggatacaagcctcctggtacattgagcggtgttgtcaagcatatgaaggacggatttgagaacatcaagctaccacgggacaacttcttgggaactggcgactctcttcctgaagtattcaagaatgacaaagaggtctttcgcga

SEQ ID NO: 847 - DNA, 757 bp, Aspergillus oryzae
  modified_base (183)..(183): n is a, c, g, or t
  modified_base (238)..(238): n is a, c, g, or t
  modified_base (341)..(341): n is a, c, g, or t
  modified_base (352)..(352): n is a, c, g, or t
aattcggcacgaggcgaatccgtgcaaccagcttagccttgccatcaaagctggagaccatcctaaagtcactgaaatcctggacagtggcctacaagtagcgacacctggacactttctccttgcgacacaaaaaaaggattatgctacacttaagctgttcctgtctcatggatgggatancaatacggatatcgatagtctcgttccatccgcattagtctacgcctttgaagangtagagcttctcgactggttcctggaccatggcgcggacccgaacaaagaaagtcgtattcgggattgtacaccgctctcctacgctgtcatggaagcgccantcaacattgtnaagtatcttttcgaaaatggcggtcaacttaagcgtgggcagctctcacattacgcggctatgcgacgcaaggatgacagttatgaggtgctacaatttatctacaacgaagacccagattataacgagctacaaatcaacaagttactggatgaaggaacatcgcatcatctcatgaattaccgaagtggacttggcactcctttgcattacgctgccagctctggctcggtggatatggtgagctttctgttggataagggtgcagctcatagactcgatccttatcaccgcagtccaatcggctatgcgttttactatggccattacgaggttgaacaagtcttgaaggccaggatgaccttgggtgcagggtcagcatagcatattgcaaagtgagcgcgc

SEQ ID NO: 848 - DNA, 813 bp, Aspergillus oryzae
ggctcttgttcctatctcccacaacaaccatgccacgatcttgctgtcgtaatgctaggcagctatagctgcgcggcttaattgccacaacttccattttgaggtctcgccatcgctctggtgacagagcctgtgtggctcaccatgagcatcttacccgggagcaatgggccacttctgccctccatcgagacaagttgtgtctcaacaggagttacgaggccgccggtccttaatccatcgcgtcgtccagaagttgacgacgctttggcgaaactcactcggattgagagacccttggtgagtttcctacgtattactatgtttacggatgttcattcgtatccttgtgtaactctaggatttttattagtcatgccttcggtgatgggaactgcttagagctgtggtgaacgtgctttgcgcatctgaaccgctagaccacatgacgatgcctctatgttcaaatagacataaacctacaccttcgcgaggacgcaacaataagttcgcatcttggatcagtcagatgtttgtcatgttgtgtctctggccctgcccccctctggtggaatgcgcatactggggggaaaaggcgagccttcgattatttagcgacgttgtccgaagggacgttccttgacgccatataaacgattggatctagagacacttaccgattagctatcgagtaggggggactgtggggtgttgaccagagcttctgggagctgtagctgcctaaagccttgtggctgggacaggaccttttgcgaaacggcacatattgtaagggacttgctatttgggttg

SEQ ID NO: 849 - DNA, 520 bp, Aspergillus oryzae
acttatgttctctgtaaacgcttggttcatgtttgccgtctgaactgagattttcttggcccargtgatatgcttgctgagaraagttggggactcggacttttggtattcttcgactgcagactgcatgacaaattgtgccgcagtatcagcccacgtcgcttctgataatctggcaccgacagtgtagcagagagttatgaaggtccccgccaactccgaaagcgaaatggattttccttctgaccaatatcgactgcaacttaatcgggtttcgcgagcttgagaagcaatacgtgcatctggataacatcggagcgcattggcaaattcaaataatcggacctttactccaatgtcatcaggaagtagtccagagtgtggaagaactgattcaatggctaaagttaaataaaaagtcgcattcgtttgcctgctcagcttccaccccgctaacgtataccaatccgtatatagaggtgcaaagtaggtagtccaatattaacaggtctacatcaga

SEQ ID NO: 850 - DNA, 819 bp, Aspergillus oryzae
gaggcttaccacctcccttgatcaagaactcattttacacttagagccaactccagcagactcacagctatcatggcagaccgattcccctcactagaagacttctccgctggccaaactgaagtcgtggagaccaacggcacagatgccgatgacttcctagcccgcgagcgagccgttctaggtgacgatgcagagcagtttgctacccctcaagaccacgttgctaccacggacgatgtgaatgctggcgatgacgatttactgggcggtgcggaggacgctcctgctggcgcaccccgagatctccggattcgaatcttctttccctgctattgagacacagaatgagcaagttgcgcctggcggcatgatcactggaaccggcgctcccttcccgcctacgggcttctcgagctaccaagcgccggaggaggaacccgagcccgttaggvaatggcgcgaaagacgagatgcggacattgcacgccgcgcggagatctccgaagaaaagaagcaagcgactattaagaaggcccaagaagatatcgatgacttttacgtttcttacaacaacaagaccgacaagctgcatgctcagactcgtgcggatgccgaacaattcctcgccaatcgcgaagacacttcttccggaggtaccagctgggatcgtatcgcaaaacttgttgatgtctctggaaagggcgctaagggtggcgcgaacggatctggtaaggaacgtttccgtcagcttttggtcgatctgaagaaggacgagaatgcccccggtgccagtggcatctagatcttgtttgcatt

SEQ ID NO: 851 - DNA, 669 bp, Aspergillus oryzae
aggcaacagctaggctatctcccacagcaaatctgctgcggaagtctcgtctgttcgcgctcccgcaagcattaaaaccacctcaggatccgcccacctcaaaggtcgtctttgaatccgacaccgcaacccttcctcatcctacccgagcgtccattgttaccccaagatcatcgctagcaagaggagattggggtctcaagagatcgcttcctgcgaaatctacgtctgctaaatcatccaggcctgttgtgagggtgaacgctctcgacacattcgaacatgttaccgacttcgagtctgcggccgaccatacggtgacccttgagaagttccaggaactccatatgcctctctctttaccttcgaaggtcaattatgcgactagtattgttcctaggcatcagagccctttcgagtcgtatgtggacaacacagatactagcaaaggcctcgaagagaccggtgccaaacaatttaggcactccgggccttggctggctggacagacggaagccgaattcagtgcctacctgaagaaagtgcggasaataaagccagagcttttgcaaaaactccgccaactcttctccgaaaagcgaactgctgaacggagaaagcaagctcaagataacggagaggatttggaggcgcttgagcctgtaaagg

SEQ ID NO: 852 - DNA, 282 bp, Aspergillus oryzae
  modified_base (139)..(139): n is a, c, g, or t
aattcggcacgaggcaaggatcgcagcggcggccaacacgtcatggcgttctatgatcttgattgatcctgtcgctcttactgctactcgtacctgcacgaagagaattggcttgcgggggacagacggcacggcaggnatgcatagcgtggggagtttgtctatgggaagaaaccatttagattggtgagatgcaaggtcggaacccttgcatcttatagtatgtaacttaatcgggttaaccctggatattatatgtcaatattggcaagtattctctat

SEQ ID NO: 853 - DNA, 474 bp, Aspergillus oryzae
cggcacgaggcccggttttattgaatcatcataggccccacctccagcttcaattggtggattccttcaatttcactcctagcccggcctcgttgccgctgattcgtggaaacggttcgacagatgtctttcgatggccgagaatttcctcgaatctccaccccggatttccccagactcccccgtcccattttaatgatgccccaacacctcgcttcattcgacatttccccagataccccaccacttaaatgtctgagtgttcgttatcaaaactgggtcaggatgctagtgccgccgggaaggattggtcgagctcgcttggctcttaacgtggctggagggctacagctatcacgcttgtgtcccgtggttcttatacgaatattgtcttctcatcgtctcgccttgtcgttctttctatcaactacctgatgactcgtaccactatatatacctgagtgtggcagtgga

SEQ ID NO: 854 - DNA, 425 bp, Aspergillus oryzae
aattcggcgcgagggctcatattcttcatttatctaaaattaccaagcatatttcatcaccaacaccatcacatcgaatatacctgccatagtccaccgctgcattagtattctcccacaatgacaaccttccctgaagcggacgttatctggtagaatgcgagctcctactacgttcgttgtccgttctgcgaagaggttcatcaccacggcataaactggaagacgaacacgttgaggatttcacattgcgagaagatggagacttacctttgctgcttccccattggcgatcaaggtcaggttgcgtatgaaattgacaagagacgaggccgatgtaccaatatttgtgtatcgcctgatagtgatactgaggatgacgatgttgatcatctggcgattgagttggctcagaaggctacaga

SEQ ID NO: 855 - DNA, 475 bp, Aspergillus oryzae
cggchgaggctctttttgtgtcaaactttttgtaaactctgttcgcagcccttgaaatatccctttcctgcagaagactagaattgctagactagacattccagaccacctttcagaagttcttcaaacataccccgcaatggcagaatcaccccgctatttgaccggagacggtgaaggaatccgcgagttcatagacaagttcgacgtcttcctctttgactgcgatggcgtcctctggtctggtgaccatatcttccccggaacaaacgagacactggagctgttgagaagcagaggaaagcaagtcgtgttcgtcacgaacaacagcaccaagtcgcgcgccgattaccagaagaaactcgactccctcggcatcccaagcacaacggaagagatcttctcctcctcatacagcgcctcaatctacatctcccgcattctccagctccccgagaacaagcgcaaggtcttc

SEQ ID NO: 856 - DNA, 745 bp, Aspergillus oryzae
aattcggcacgaggcaggtctactatcctccctacagcgtggtatatggttacctcgctcgtccaatcggaagtcgcattgtaaaatgaacgctatccgtcagatccagtcgctcaataagcgcgaacttgaaaatgcaatgtgcgtggtacttttgcttgagactggaatcccgcccctcaaaaggacatccccctaactcttattgaccgatacagcccacctgaagcgtcctggcacgccgattaccgagacacagcatacatctacattggtggtctgccgttcgacctctccgagggtgacattgtgacaatcttctcgcagtatggcgaaccagtccacgtgaaccttgtgcgcgacaaagaaactgggaagagccgaggatttgcgtttctaaagtatgaagaccagcgcagtacagaccttgccgttgataacttgggcggatccacagttctgggaagaatattgcgtgtggaccacgtgagataaaagagaagagatgatgaagaggaaggggataatgttgcaaaactgatgggcgamgcagttaaaagagtgcaggtgatggggatacagatgawgagcgacgaaggcggagaaagggaagaactggtgaagacgagttccaaagacgaccactactgaaggaagagaaggagccttaggagttaatggtgaaccacgatgaagaggacccgatgaaggagttccttatacaggagaagaaggaggaagttgc

SEQ ID NO: 857 - DNA, 697 bp, Aspergillus oryzae
cggcacgaggagagtctcatttcaaaccaagcctccaactatcataattctctcacctatttccttagaatcatccatccccatcaactcgctctcaaaatgaagaccacattcgccgtcatcatctccgtcctcacggcatctatctcggccgctcctcttgaggcccgtcagtccaaccaagtgactctggccctgtctaacgaccagagcggtgcctatgccggcgttgccttcgccgctgacggaaccgacaagagcatcaaagctctctacggcggcacctctgttggagcgagcggctccgttctcgcttcttccgctcagctggcatcattccctcagacaatccactgcgttatcaagaacaacggcgcagtcattgcaaatctcgatgctcagcatacctttgctgatttggacggaaacccggcttctgctactcctgtcaacctcgaccacggtattgtcaactgcagtgcttgatgggattttaacagaaccatccatcttcacacgggactatggccgttagattaatgagtgtwatgagggggtttcatgatcggtgaatgaattgagcttaatgattgatttatgtgcctgaaagcgggttaatgtgcaagagttcggtttctgataatcaagcgcaagaccatatatgtacgcactaatagaaacctgatttcactgctga

SEQ ID NO: 858 - DNA, 902 bp, Aspergillus oryzae
cggcagaggcccatttcaacccccctcatctaccttttagtcattactccattatcgcgttatttgcgagactccctcccacgttgcaaccctttgacatcccgatcaactcttctgtctttcggggcttccctctaggaagctatcctttacctttacatcgccgatacttatattccgtcagcagctatggagcgactaggtcggatgcttcaggctgcccaaagcatgggcatgggtggtgctgcccccggtggtgatacccctaacctgatcgataactccgaaacagtacatatctcatcgttggctctgctgaagatgtagcgacatggtcgggcaggtgtacctatggaagtcatgggtctgatgtagggagagtacgtggatgaatatacagttcgagtagtggatgtgttcgcgatgcctcagagtggtactggtgttagtgtcgaagctgtggaccccgtctttcagaccaagatgatggacatgctccgccaaacaggacgaccagaaaccgttgttggctggtatcactctcaccctggttttggctgctggctctcatctgtmgatatcaacacccagcaatccttcgagcagctcaccccgcgcgctgtcgccgttgtcgttgaccctatccagtccgtcaagggcaaagttgttattgatgctttccgacttattcaaccccagactgtggtcatgggtcaggagcctcggcaaaccacatccaatttgggtcacctgaataagccgtcgatccaagcactcatccacggcctgaacaggcactactacagcattgctatcaattaccgtaagaaagggttggaggagaacatgttgatgaatctgcataagcatgtatggacggaagccttgcagatgaaggatty

SEQ ID NO: 859 - DNA, 532 bp, Aspergillus oryzae
aggctaaatcgaaagaaacacaagcacaccatggcctcaaagtccttgaccggagcatgcctgtgtggaaagatcacctaccgcgtggatctccccgccgacgcgccatcccccaaggttgctctctgccactgcgaggactgcaaacgaaacacgggtgcccccttttcgtcgaacctgatcgtccccaaacccgccttgacctacacggccggaacccccaagatctacgcccatccgtctggaagtctgggcaatgagctccagaggcacttctgcggggattgtgggtccccgcttaatacgcagccgggtgggagaggaactgttactgtaaagacgggcacgttagatgcagagtctcgtggtgacttgggcttggctttggaaatcttctgtaagcggagggagcaatgggtggatcagatcgggagcgtgcctaagattgaggccatgccgtagcttatcttgtctgttttgtcttgcagggaggattatatgtggagatcgcaatattatattctttttatcc

SEQ ID NO: 860 - DNA, 475 bp, Aspergillus oryzae
aattcggcacgaggctccctcgagtcccgtcccggtccctttccctaatacaacaaagcccgtcaaaaaacttaatctagtataccgcgagactctacattcaaatcaacacatcatccgtcacgcgacccagaacactccttcacggtcgatcaatcgacccttgtttgtctctcgctcatttgaacccacaactcaaaccaacaccaagaccctcgtcttcggtgacacacacaactcgttcccacactgcgaatttcattatcagtactactcgtttgcaagcctcattttgtcattatgttatcatcttcacattacattccctgcacagcacgtacttgtcccaccattcgttgtttgtctgttttctcaattgatgtctgtatctgtccttctctgtctctctgtgtctgtctatcttttctttttcttttctttttgtcctatatatcaaagtcacagcaagaagaac

SEQ ID NO: 861 - DNA, 662 bp, Aspergillus oryzae
ggctgcaattgctttgcccgccatgtctctctcctccgcttccagcactctgttgcgcgcttgcccgccaacagctgcccacttctcgcgctgccatcgcctcctgccagcagcggaggggagtcgctgatgcgtccaagtcatccttcgagagccctttcaccagcgccaaggaatcctcgacctacaagatccctgacttcagcaaatatgcctccaagaagcccccacgctccaaccaggtcttctcttacttcatgcgccggttccctcggctcttgcctctgctgtcggtgccaaggctactgttcaggacttcctggtcaacatgtccgcctctgccgatgtcctcgctcaggctaaggtcgaaatcggccttgcttccatccctgagggcaagaacgtcatcatcaagtggcgtggaaagcccgtcttcatccgtcaccgtacccaggatgaaatcaacgaggccaactccattgagtggcaaactctccgtgatcctcaggccgatgaggaccgtgttcagaagcccgagtggcttgtcatgcttggtgtttgcacccaccttggttgtgtccctatcggtgaatccggtgactttsgcggctggttctgcccctgccacggttctcactaccacatctccggccgtatcacga

SEQ ID NO: 862 - DNA, 487 bp, Aspergillus oryzae
aggcgcttaaaagccatcttagacttgatcagcgacccagaagagctctggagcgattttggtattcgcagtctargtaagaaggatgagttctatgggactgctgagaattattggaggagccctgtatggatcaacatcaattatctggtgtttaagaacctttatgacattgcgaccacacctggtccacatcaagaacaggcccgtgaaatgtactctaagctgcggaagaacgtagttgagaatgttttcaaggaatggaagaagaccgggtttgcttgggaacagtataacccagaaacaggtaagggacagcggacgcagcatttcactgggtggactagtatggtggtgaaaatgatgtcgatgcccgatcttcctgcgactgagagcaaggggcatgatgagctatagaacagcaacactcgctgcgtacgcastgtgtttaggatagggaatactacttgtacactatcgttcctcc

SEQ ID NO: 863 - DNA, 772 bp, Aspergillus oryzae
  modified_base (330)..(330): n is a, c, g, or t
  modified_base (352)..(352): n is a, c, g, or t
gctttccacgcttcttgagtctgcccagtacgctcagttctggtccaccctgaactccgacgatctctacgccgatctgaccgccgatgtcgccggcttcgaggagctcgtccgcatccgcatcgctgttgaggttggcaaggcattccgtgagatcaacgccgaggttctcgagcaatggctcgacctgaggagccgcgaactcttgagaagttcgtcgccgaggtctgcagctgggaggtcgacaagtccggccccaacggcaccgttgtcaaggtccccaccaacaaggagaacgaggttcgcagcgaagtcaagagcgagcgcgtnggtgtcgagatgttcggccgtnttatcagacggggatttgagcaggccgcctgagcgactctactctcatcgaaaatcccaccgtgtctctttccttttcttgctaatattatgcctagaagatccaaccctgtatacggatcttcgcttcgcgtctttccttgattgaaaagactcgtaaaaggattatgtccgcttcagacccacgaaacgagctcggagcccaagatgatgatgacggggatagacctgcatgaggagggttgggaagtcaggaccggcgcatttggcgttacgtgtttgcttgacatcacttatgtttctcatcatcatgatgttgtctatgtgaaaaacaacttttctttctctcccatatttacttcattatattcgagaagatatcctatagaacaaagatgactgaggatttctcagtaactgc

SEQ ID NO: 864 - DNA, 633 bp, Aspergillus oryzae
  modified_base (38)..(38): n is a, c, g, or t
ttgttcatttccactggtaattgkttktgtgttatctngaatgctcttwatccctgttgaatcttacaattcgtcccggacagcctgcgcgccaagatgtccgttctccgtcacggaggttcgtacctccagcgacgccttaccaagatgtatacagataccaagacctcttgcgagagtttgacgactgcttcaaaagccgttgatgacccggagctagttgctcttcaccggagctttcgaacacaaagagacagacttctggcatggggtctagattggagcgacgccagctctgcgcaccgaatgatatcgatgaatcgctaacgcaagctggctacagcgatgttgttgccagcgtcatgtcctcaattcaagagcttctcaatgaagcagaacgcatccagcatgcagggacttccgacctaccccccaaaggcgctcggtcagacccaccctcgaaggatggtcttagtagtctaccactcaagasgcactggactgacgaagacatcaatcggtctaaacatctcctcgccgacctaaccgcttgcattgacaccctttatgacctgtcccgctcacgacgcaacatgacctctagtgggcagtcagctaccaaggcccgaccac

SEQ ID NO: 865 - DNA, 778 bp, Aspergillus oryzae
gaggcggcggactcatcatgggcttcctgctggatgtccctggtctgaatcgtcaatggcgggctcgacttaactggctattcctattcgtcacggggatggcgatctggggtggaggatacgcgtttcaactctggtacgatcgtcgcgtggcggagggcaagaagcaagatgtcgacttcactgatagcagcatctccgttgggcccatgttcctctacatcttctatggcatgtacgatgccttctggcagtcgttctgctactggttgatgggcgctcagtcgaactctcccgcggtggccgccatccttgtgggggcgtacaaaaccttccagagcgtgggtggtgcgatggcgtggcgactggatgcgatgggcaagtcgccaatgctgcaatttgcagtcgactggggcctgtgtatgggttcgcttgtcattgccattccggcggtgttggccgtcactctcaccaatacggatcaagaaacgctcgacgaggtggatattaaacataggcaggacgatacgactgcggacggtcctaaaccgtgagttggaatgtagtgctgtcttgatctttctttttgtcggcacgaaccagtgtggagtcttggacgatctaggcagcgcaatctagattagaatgacgtacatacgggctgttctatgggtatattttcgggggggtgggtcgtggatttgacgattttcattaatgttatgagatcagactagtaatcatgatatcctataggtcaatctaatattcattgcat

SEQ ID NO: 866 - DNA, 530 bp, Aspergillus oryzae
  modified_base (430)..(430): n is a, c, g, or t
  modified_base (480)..(480): n is a, c, g, or t
  modified_base (495)..(495): n is a, c, g, or t
aattcggcacgaggctccctccgacaacaggtgcattcgggcgtccataatgtctgaccacgggggaagtcggagggtcgaaaacactacggscttccagggtccctcccccaagggaggctctcggcgggagatggggaaccggtggaagcctccttcaacaagtggagccacgagggatggtgagatcaggggatatttcttgaccgactacatccagattcggtaaccccgctctaccttcctcactccgccgggtcggttatgccggccaagcggtttccgccaagggctcaggtgcccccatccatatgagcgccctcagccaacctcgcctcactgatggaacggggcgcgcacacacggggaaggaagcsgcactgggstgggcgcatcgttgctcacgctttccagatcatccaccatcatnacccagcacaacccccctcccacggtcgccgcttgatgccattttcaacntgcgggtgcccggtnaaaaaagcgcccgctatggggttccgccgggtacc

SEQ ID NO: 867 - DNA, 504 bp, Aspergillus oryzae
aattcccactcaccaaacacccccccagtttcaaaaatgcgtttctcaatcttctccaccctcctcgtctctctcgcgaccctctccaccgccgccgaactcgcgcactcgaaaagacccacgagcgtagaatscacccscaagcaccgttaasggcgacaccgtccagatgcactacaaaggcacgctccagtccgatggctccgagttcgactctagctacaagcgcaactcgccgttgaagttcaaggtgggctcgggtatggttattaagggatgggatgagggtcttttggatatgtgcattggtgagaagcgcactttgaccattccccctgagtatgggtatgggtttcgtggcggttggaccgatccctggtggtgcgactctgatttttgagacggagttggtgggtattgatggtgtttcgaaggatgagttgtaaatttggttctgggtttagatttctttaatttaatctctgatatcgggttctccttttc

SEQ ID NO: 868 - DNA, 291 bp, Aspergillus oryzae
  modified_base (119)..(119): n is a, c, g, or t
  modified_base (143)..(143): n is a, c, g, or t
  modified_base (217)..(217): n is a, c, g, or t
ttatstaaacaatgtaagaaaattagttactgatatctaaamtcgtttaggataatctttggtcaaatataggcatagttrgakaagcggtttcccaymygctatagcaytgactccancctacccgcrctgttgcacsaawnccgmgcaatcgcttgtctgttatsggtattttwttccggctgatacacaccragagctaaatgtcsttagcwangtyctgtcttccaatwtggaatacagtgtgctagtgcgtgtataagatgaagaattaccccattttttcatgtc

SEQ ID NO: 869 - DNA, 822 bp, Aspergillus oryzae
tgatttcctcatatccgtctggtggtacgactgtactctccaagccctgaagaggtgctatccgaccttcatttcccggcggaaagtgtgactttcctctcaacgccacatccggttgcggtgttcatggtgctctaacaccttgtgaataacttcttggaattgatattgcctttctgttatccttgtcccgataaattcttggtcgatcgtactgtgattgacaatcgattttcttcactatttaaaaccccgagttttaaacgtccgggttagcagcttgaagcgcgaaagccgaagacaaatacgttcttaggttctaccgaacactatcctgttgagcttgcgattttcttttctctgctcgctactgttgttctacgtacatcttagttgttgtgattttttctctactcttagcgctataaagctagtcatcatgtctgtaccggcattacagcgtgacactgccttccaggtgcgatccttgtttcgctccttgctccgtcagtcgtctcagttctccaattataacttccgcgagtacgctcgccggcggacgagggrtgctttccgtgaacaccaacgcgagatggaagaaaggaggatacaagagttgatccaggatggtttacagaacttgcggatgatgaagagacaaaccgtcatcagtcagtwctatcaaatggacaagctggttgttgaaggtcagaagacgggaaagcaaactggaaaggaaggggatattgttcgtcaraaagatactggttgggattaattraaacmaaaratcacgaatgaataagcggttgacaccacagg

SEQ ID NO: 870 - DNA, 520 bp, Aspergillus oryzae
  modified_base (42)..(42): n is a, c, g, or t
  modified_base (56)..(56): n is a, c, g, or t
  modified_base (83)..(83): n is a, c, g, or t
  modified_base (97)..(97): n is a, c, g, or t
  modified_base (146)..(146): n is a, c, g, or t
  modified_base (159)..(159): n is a, c, g, or t
  modified_base (168)..(168): n is a, c, g, or t
  modified_base (286)..(286): n is a, c, g, or t
  modified_base (295)..(295): n is a, c, g, or t
  modified_base (318)..(318): n is a, c, g, or t
  modified_base (332)..(332): n is a, c, g, or t
  modified_base (336)..(336): n is a, c, g, or t
  modified_base (379)..(379): n is a, c, g, or t
  modified_base (381)..(381): n is a, c, g, or t
  modified_base (388)..(388): n is a, c, g, or t
  modified_base (403)..(403): n is a, c, g, or t
  modified_base (407)..(408): n is a, c, g, or t
  modified_base (435)..(435): n is a, c, g, or t
  modified_base (440)..(440): n is a, c, g, or t
  modified_base (444)..(444): n is a, c, g, or t
  modified_base (447)..(447): n is a, c, g, or t
  modified_base (449)..(449): n is a, c, g, or t
  modified_base (463)..(463): n is a, c, g, or t
  modified_base (467)..(467): n is a, c, g, or t
  modified_base (469)..(469): n is a, c, g, or t
  modified_base (480)..(480): n is a, c, g, or t
  modified_base (502)..(502): n is a, c, g, or t
tttcccaattttttgttgtcgatagttttaacattcaccggntggtcatcgcgggngtgacctgtgccagtaaatttttttcngatgttttctatantaattctcgatacgcgaaggtgggaggtcttccgctggttgagctgaancacctcgagcttnaattcttantactaaatgattttcgactctcaataccagttgaagaattggaagcatatggaaccatgcttgtcgaattttatgcacgggagattgttgctcaacaacagcaacagcagcagatagnatctcaaanaggggtgcctcgccgcgttcggntcatctaagggganggancctcaatcggatgcgatgtatatgcggtcttacgagaagcgtngncccgatnagccggaaattcganagannccaacgccaccgtaattcttgagtgangaaanattnaangntccccccctcttanaagnanggtttagcgantcttattcgataggatgatgtnatttgtggctttaagtat

SEQ ID NO: 871 - DNA, 456 bp, Aspergillus oryzae
  modified_base (322)..(322): n is a, c, g, or t
gaggatctctatactttcctctctacaactctcctttcccccttctgtaccttcgtsttatacgtcatctcttgttscccatcatgagacgcatcctcrgyctttccctgctgccaytactagcagcggcctcccccgttgctgtcgactccataccacaacgcgaggcggctccacatgtgcgttgtcgtgtcctcacaatgccatatacgtaggtgtccagactcttacatatgtacgtactctacaacgaagtcgatgtgtccgctgaaagcggctgtctcgcgtgcatcacacctgggatgtcatgggacatccacgnatctctgtatgcactcggacgacatcgcactctcgaagcaagctgcctctcctttttatggstttacagatgawtgtacscttttaacccttcgkgtgctcgaaggawacacccttgcggactactctgyscgg

SEQ ID NO: 872 - DNA, 402 bp, Aspergillus oryzae
aggatgggagcgcggccatgcagtaaagcaatgcggaactgattaagcgccgccactgagtcccagcaggagattgtccgcgaaggccggggtagcccaccgagaacggcgttctacaagaagaataatcgttggacagagggactaatctcggccgccaaggctgttgctacttccaccaacactcttatcgagacggccgacggggtcatttctggtcgtaactctccggaacaactgatcgtggccagtaacgacgtggccgctagtacggcacagttggtggcggccagtcgcgtcaaagcatcgttcatgagchagacccaagatcgcttagaggcagctagtaaagcagttggtgcggcatgtcgggctctggtccgtcaggtacaggaaatcatt

SEQ ID NO: 873 - DNA, 289 bp, Aspergillus oryzae
  modified_base (217)..(217): n is a, c, g, or t
  modified_base (219)..(219): n is a, c, g, or t
  modified_base (251)..(251): n is a, c, g, or t
  modified_base (253)..(253): n is a, c, g, or t
cggccgagctcctcagcatcaagagcctgttcggtgacgacttgcgcggcgacaagaggttcctccaggaaatcaccaaagcgatggaggacatcgcccgggacggcatcctgaagacgcttcccaagtacattgactaagcgccactacacggcgctcttggcttaatatatacggtatacctgggtctctgatatttacgttttctttgtatgtntnatacgggaagggttttacaagaaaagtgcgananagagatagataatgatagatacaacttttaattcat

SEQ ID NO: 874 - DNA, 496 bp, Aspergillus oryzae
cggcacgaggcacgcgaccagcacaaacagcacttcgacgctggaccaagtttttgattcagctggttgattaccctcttgtcgaatcgacgcgatatcgtcaaacgggttacgctctcttcagaaccagttcagtcgcggaccccgaccagacaagcataaccatgagtttccaaccagtcaacccccgccctttcttgcaaactagggtcggtacggagatggtcattcgtcttaagtggggccagaccgagtwcaagggcaagctggagagcatcgactcatacatgaacgtgctgttgcgggacacggaagagttcattgatggaaagaacacaggaactcttggacttgtgctttttaggtgttacaacattctctggatgggatcggcagacaacgtcgaaatkacggatctggggctgcggtagaraaaggttcgaccagacgtygttcacgaaacaccatgcgagggcgaaatgcatataccagcttt

SEQ ID NO: 875 - DNA, 727 bp, Aspergillus oryzae
  modified_base (290)..(290): n is a, c, g, or t
tccgtcaagatgaagctcaacatctcttacccggccaatgggtcgcagaagatcatcgaggttgacgatgagcgcaactccgtcccttcatggagaagcgcatgggaaccgaagttgtcggcgactccctcggtgatgagttcaagggttaccttttcaagatcaccggtggtaacgacaagcaaggtttccccatgaagcagggtgttctccttcccacccgtacccgtctcctcctcgccgatggccacagctgctaccgcccccgccgcaccggtgagcgtaasgcnaagtctgtccgtggtgccatcaccggtttcgatctcgccgtcctggccctgagcatcgtcaagcagggtgagggtgagctgcccggtctcaccgacactgtcgtccccaagagactcggccccaagcgtgccaccaagatccgccgtttcttcggtctcgacaagaaggacgacgtccgcaagttcgtcatccgccgtaccgtcaccaaggagggcaagcccgagtacaccaaggcccccaagatccagcgtctggttaccccccagcgtctccagcgcaassttcacaggatcgccatcaagcgccgscgctctgaggctgctcgcgaggctgctaacgactacsctaagctccttgccaaccgtgtccacgaggagaaggccaagcgtgatgagctccgcaagcggagggcctcttctatgaggaagtaaatgca

SEQ ID NO: 876 - DNA, 745 bp, Aspergillus oryzae
  modified_base (534)..(534): n is a, c, g, or t
atagcttccctccgtctggatttagacatcaatcagatacgcatctctacgccgaccrttagcgtcctctgcraagcggsccakggctggtctcaccggtcysacacccctcacgagcgtacgcagcgtcggaaggaacaatgacggcgatgacaacgasgcaaacgaggtttratgaactccaacataaagcatacaagagtgcgccagcgttaatcacgagggtctacmaaggattgccgagtaaggcwsttgcstcgcccttcrsgmagtatgaatcccgcgccagatgccgaamtacgtgtgtattgccgcgmcgctatctccgagtaacactctttggaaaatcccattgtgacccaagtgtcactcgamagagccaacctatsgtccccgatcacttttgaaaaaggsgccagtgcaagcaagctttgaatggactgacccatctaccgggccctcgaaaaragaatcwatgaatgcgsgctwtctttgatgtgkctgtscgccgctcyctccagacatgaagcagtncaccaaccagaaccgtcgaacagcraatatgccgcgccatcgtctaakgatcttgattcttctctccgatgcaggcgatattgagaaagatcttcgcacgcctgtctcaggcagwtcgtattcgctgtcgawtctcaacttcatcttctgaagtcgamgcgcatgcactgacaagtctccgattctgctgcttgctggaactcctagcact

SEQ ID NO: 877 - DNA, 877 bp, Aspergillus oryzae
  modified_base (480)..(480): n is a, c, g, or t
cggcagagggtttcccatcgctgtcattcgccgttcccgttatcttcagcactcctaaaggagtagttctatgatagccgcctacgacaaaccactgtacagtgtaccccgttcctttgggttgagcactagtttgctccacagagaatacatactccgtactggaaaggctctgtccgctggagtgcagtggtgactcaaaagaagtcccggtggagccagcccttaccaaccttttcctcacctagaacctttcgactttctgcacctcacgacgacttgctcttcgacctagcctcaccctcaactattggactgtcaaggtccaaacatggcctttgaggacgggtttaacgtcacgccaaagacagtgggaaaagaagcaatggccaacgatgaggcctttcaggtcaatgctcccactccatcgtccgatttgaaggacgtggactgcgagaagcatggcgctactcgcgagtngaacccagtaccggatctaaagcgccactcaaaagccgacatctgcaaatgattgccattggtggtacaattggtacaggtcttttcatcagtagtggcaccgcatcggtacagcagggccggtagggctttgattgcatatctcttcgtcggctctatcgtgtactccgtcatgcaggccctgggtgaaatagcaagttatctgccaatccaaggagcgttcacgtcctacgcagctcgattgatcgaccccagtcttggttttgccatgggttggatctattggttttcctgggctagtacctttgcgctagagttaactgcgacagggttgattatacagttttgggacaaggatatcaacatcgccattttcatcgcagtgttctgggtcgtt

SEQ ID NO: 878 - DNA, 251 bp, Aspergillus oryzae
  modified_base (56)..(56): n is a, c, g, or t
  modified_base (155)..(155): n is a, c, g, or t
  modified_base (215)..(215): n is a, c, g, or t
gggttagtacaatgccttggggcagaggtgtagtgagaaaaatggtgttgagagtnaagctgagaagaagatgaaaggacaatatcgccctgtgtctgtcgctaaaacagaccagccaggcgaacgattcatgccatggaagggatcaatgagtnatgatttatctggtcacgttggtgcctaaccctaaccagggttatgtatttgactgcgtncagaacgaatgacgaatgaggcttcttcgattagct

SEQ ID NO: 879 - DNA, 976 bp, Aspergillus oryzae
cggcacgagggcctattccgccgaagaaaggtttcggagaactcctctcgacaagccaaaccattccgatatgttgagttctgccaaaaccaaaccagcgccagtctttgcgagcaccaggctcgtaaagtccgagttgactgctgctttctcttttcaaagacccaatggggacagcttgacgatcgagattccggtctaatgtacctggatctgacctttcatcaacccagtgagtgtaaactggccaatgcgacaatcaccatgaccttcaatcacaccaatgagcagcgaggaggcctcaaggatagcgtggaagtcaccgaattcttcggtcctcagatgttgagcggagaaaaaaaagagcgacacatcagcaaatgcttctacatgaatccaaagttcggcgctgcgaatgcatcgtttgaaggtgtgggtggatcacgaacatcggacgccactctttcctcaagatggaaattcacaggatcgcgattcaccgtgaatgacccattgtcgcgccggtcaaatcgtgcctatcgtcaacttgtctggcatcttgaggaaaatgacctcgagagacaggctattcacaatccagtcatccatactgctcttgccttccatcatcagtccaaaccattctacctcgatttagaaatcaaggcaaaactgcacagttggcatcatcggttcaagcaacatcttgtctatcctcctcctagtcaggtctcacgcacgcgggcgaagatcgatcctggtgtggagacagacccgttctttgcaaagactgcgaggracctcaatagatcaatgatagaggcaaatctgcatcctgttactgaagtttccgatcctaaacccaccatggagctcccagaccagaaggacgaatcgactctgtctctaccaggtcatgatcttctagcattagcccagcaactcacaggacaacgagttatactgccaaagcaga

SEQ ID NO: 880 - DNA, 256 bp, Aspergillus oryzae
aattcggcgcgaggccggtgtttccgcggcccgggatgtaatgatcctgttgcggtctagatggctgtggcgctggtaacaggacatttttaacccccccggttccttcttgttcatattctcctacatgggtcgttcagttattgtgttcgttttcagcatacgatggtgagctcacagcgcgggcctggctgccaaatcctgtagcgatagccaacattagtgactagggcatgtaataagactttgtagattt

SEQ ID NO: 881 - DNA, 960 bp, Aspergillus oryzae
gaggtggatgtaattttcgcaatgctcgaacatcggctttataccccgagtcatgaaaccatcgaaacataacccccaattccttaaacgcccacatcaacaatcgagtaaggaacccgtaagtaagagggacatccttcccagtgaccctcttgaagatcctcgccatttcatcatatgatagctcatcgcctgtcaaagaaagagctctatacttgtactcatccgggtgcaaaaatgcttgcgcaccaaagaacccaatatccgtgacagatatcagctgtaatggcttcccgcgaagaacgatcttccaactagtcgtgaacacggatccaaagaaatcaggcgtgaagttgttgaggaatgccacggggcgtaagatcacccattgcatatctgttcccttggatcggttgataaggtggtgctcgatgttgtgtttgttaatgaagtgggggacgggagttgggttatccgatggacgcatcaccaccgcgatcgaccgacgtatatacgaagaacttcacattgttgttgagagctgcgtcgacaagtgctttgtcttgtctttcttcggaatcctccttgaagagtcctgggacaggtgtctatgtttaaaagtgtgagtgatatgcttcatggttttggaatggctgaggttggtaatttaagccaagccatacctgtacgctgaacacaccctagatagactacgtrtgaccttttgggcttgcctgaagatatcctccgggtgatcgagattgccttccaccagtttgatcttcgacgacttcttgagtagcttttgagcactggtttgactgggcatctccggttaccgcaagaatctcgaaatccgcgtcctggctgaggaggttattgaatacactgcctccttgtttcccggtagcaccggtaattagaagcgtcctcgacatttcttcaacttgtgatatgata

SEQ ID NO: 882 - DNA, 852 bp, Aspergillus oryzae
aggggcactgatgcagggacaccaagagctcaaacccccgttcacatcttgatacgagacaatgttcgacgtcgccgcaatatgtgaccccgtccaattcctaccatggttccccacagtctacctctccatattcgggtggacggggcggtaggaatgggcagcagcctccgcacactggtcgttctcctccgtacagacagccacccactggtccacagagccagttttatcaagggcaaagccaatttcatccctctgcgaaccatattcccacaggccctcgtggaggccattcaggttatcgcggaaattatcagaaccaaggaggcggccgtagattctctgcttcaggttcccaaaactacagcaatgcaccctccccacgtggccggggtagttttactagttttcaatggagtggtcccggatcacggaatcgagggcctcatagcccacatacatcacatgggcagacgtcacaaactcccccacctccaacaacttcagaaaatcaagcacctatgggtcttgaccagggtgatatcactatcagacctagcggccaagatcgcccgatgggtgaggaaaagccagagtcggagatcgacgatgcccagaaaatgccacctacgaatatagggcagcctgatacctctgcgactccaaataagggtggcaaaatcagttttgcattcaaagcgaagacaactccagcccctgctccgaaacccgttcccgatctggcacaaagaatgctggcccgagaaccacctccccgggttgccgagcctcctcgtaataggattggcgaatggtccgcctcccaaattcaagsctgaaccacgcttt

SEQ ID NO: 883 - DNA, 464 bp, Aspergillus oryzae
  modified_base (61)..(61): n is a, c, g, or t
  modified_base (239)..(239): n is a, c, g, or t
cggcacgaggcgatgcacttaatgagatacgaggaggtgcaatgcgttggttacgctagtntaatggtaacatgacgagggatattcgcgctgttatttcgggctttgatctgtttcagtctgcgatttaacagcgactgatcctctgctgtgacaatacacagcttgtcttgtggttctgttgtggctttctgtttgtttggctgatttgatttatgcttgatacaatcgcgtctgtncggaccccggcctttgttttgttttcagttctgattcttcactgtttctgattctcttgttcatgtttttgatttgttcaaggcttggggccgggcagaagtgcgcatctctgctttgtgttttccgtcaccgtgcatagacgctgtatgtatatgctacagcaagattctacttatccagtctgagcctgtattcattgaagtgtagccagctgtcgaatgagc

SEQ ID NO: 884 - DNA, 794 bp, Aspergillus oryzae
aattcggaacgaggttcgactctccaacaactccagtattgggggcaaagatgaaggagcccaccgaagagcaaataataaccccaggcgacaatgaaaacgcgccctctactaatgaacaggtcggccctactcgtgaagagctggaaacgcttcctcgaatcgctgacaagatcccctacacgatattcatggtagtaattgccgaagcggccgagagattcacctttcgctccataacaggaccactgcagaattacgttcagaaccctctacacgatgaccgtcttcccggtgcccttggcaagggacaagcaactgctacggccatcgggtacttctttcaatgttggtgttttctgatgccgatcttaggagctgtcatagcagattgttatctgggtcgtgtgaaaactatccttcttggaagcatcacggcgacaatcggcactttaattctcttcctcacctctttgcccgtgtccttggagaatggagccggatggcctggactattggttgccttgataattattggattgggtgcgggtggaatcaaaagcaatgtcgggcctctcgtggccgaccartamacgggcaagaagcccgtggtcaagatcacagccgacaaccgtcgtgtgattttagacccggatgtcactgttcaaaccatctacagtcgctattattggctcattaacatcggctcttgcgcgggtctcattgcgccgtgggtggaacgtaaggttgggttctgggcgacatttttaataccgctgtgcatctacggatgt

SEQ ID NO: 885 - DNA, 232 bp, Aspergillus oryzae
aattcggcacgaggggagcctcaacgatacccttcttggggaaaatctgcaagatttaatcaaggaacgcttgacgaaggccagacctgtacacccaagcgaatgtttgtactctcatctttgttttcttggcattgaatatgtaacattgaagttttgttgactcgttaaattcatgtaaaatatgctctattctattagaactttttattgcacattatcccatccgctg

SEQ ID NO: 886 - DNA, 925 bp, Aspergillus oryzae
cgaggcgacacaactcgacaagaagggccaagccgccgacgccatcaagacactcttcctcggtaaggaaggcatccacaactccaacggcgacttcaccgccgcgctcggaagcatctacaacctcttccagagctacggcgtcgacggcggcgaagaaagtctctcccagctctgcagctacctcgacaaaggcgccagcccaacggcatcgcccggaaaatcggagtcaaggaactgaccgagaagttcgccgcctggcccccgcttctgtacctcatcaaccagtggggcagccaggtcggtaacggcgactccaactgcaagggccagaacaattccaccgagaccgtctgtgagctgggcgggcagttcaccgaccccgacaccatcagctggacctggcagtactgcaccgaatggggctatctccaggccgacaacgtgggccctcactccctactctccaagtaccagtccctggagtaccagcagtccctttgctaccgacagttccccggcgcaaaggagagtggcctgctccccgagcacccggaggcgaacgagacgaacgccgaaacaggcggatggaccatccgtccttccaatgtcttctggagcgcgggcgagttcgatccctggcggacgttgacgcccttgtcgaatgagacattcgcgccgaaggcgtgccagatctccaccaatatccccaagtgtggtgtcgagacacctgagaatgtgctcttcggctatgtcattccgagggcggacatttgctttgactatgacttgagttacaagccggctgataagtcgcggaagttgttcagtcttgccttgaagaagtggctcccgtgctggcggtcggagcatgctcctaagggtgtacagaggaagtggatgtaagttgaagactggagataca

SEQ ID NO: 887 - DNA, 731 bp, Aspergillus oryzae
ccaggcggggccccaagccctgcgccccgaagtggaagcatggggcccggtggtggaatgtcaatgcctcctcaacagtcaatgggtgctaccaccccagttgcgccgacgccgggtccccctccacctcctcccagcggtgcgatgtcccagcagaatttgaaccagatagtcatagactacttggccaagaagggctatagccgtactgaggcaatgcttcgcatggaatcggcgaatcaagagatagatggtcgccccttacctcctcttggagaagatgcacgtcccaagtacagacttggtttcgacctactcaaagtctgggttgaagacaacctggatctatataagccggagcttagacgcgttctttggccgctctttgtttattctttcctcaatatggtcacgtctttctaccctcaagacgcgaasaaattcttcgatattaacaagaatctctttctgcctgaacacactgaagatgtccgtgctttagagccaatcgctcttccagagcatgttcaagataattcgactgccaagctgtatcgtgggaacaaatatcgcattgttctaagcaacccggcgttctcgaacctcatgcaattccttgagagcaagcaaaakgagggtkgttcagtcatgtctgccattctgagcagctactgtactatcatcactaaggracgtgccgtcgatgatagattcagcttcgccgccatgct

SEQ ID NO: 888 - DNA, 700 bp, Aspergillus oryzae
aattcgggacgaggatcacaatattctcgagttcagtcaagggatacacgtcgtatgtgctctcatcgttgcgattataatccacatccttgtggactgcatgcacctcctcgactccgctgttctcccgcgcatcgagaacctcacagaaaatgctggtgcaaggttgctggtcttcgggcagcaccttgcgacgcagcagagcattacagaaagtcgactttcctgcattaaggtcacccgtgatcagaaccttgcttgagagacgcaatagaggccttttccaacgaatgtaccaattccacctgagacagagcacccagcttcaagtctagtttcaaaatagaaaattcttgcgctatctgcggggtcatcaatctcggctctggcgctggccgacgctccgcagctgcacttgactccgcagcagccaggtcgccgctatttgatactgtagctgctcgtctaataggtccaggtttaaaatcaccctgttgaatatccccatcgtcgaagaatgactgtgcttggcgcaaggcgggtctgtctgagggataatccggagcatctcgtaccgacgggtagtgggcaggccactgacggttcatatcctggaggtccttcaaggtctcgagagtccgtgtaatagcgcgtccgagtttcgtcctgttggagttgctataaagagggttagaacttt

SEQ ID NO: 889 - DNA, 911 bp, Aspergillus oryzae
aaactacttaccgtcgccatggctcccaaggttgctatcgtttactactccatgtacggccacatcgcccacctggctgaggccgaaaagaagggtattgaatctgctggcggccaggccgacatctaccagattgctgagaccctgcccaaggaggtcctggataagatgcacgctcctgacaagaaggatcaccccattgccaacccggaaaagctcaaggaatacgacgctgtgctgttcggtatccctactcgttatggtaacttccctgcacagtggaaggctttctgggaccacactggcggcatctgggccaccggtggctactggggcaagtatgccggtctgttcgtctccactggtaccctgggtggtggccaggagtccaccgccattgctgccatgagcactcttgcccaccacggcttcatctacgttcctctcggctacaagaccatgtttgcccagttgtccaacctccaggagatccacggtggtagcgcctggggtgctggtacttttgctggtgccgacggttcccgccagcccactgctctcgagctcgagatcgctgagggccagggcaaggctttctacgagcacgttgctcgtgtcaacttcgcttgactgcatggcagtgatgaagccaagcctcagtcgcagcctatcgctgcatcacaacaaccacagcaacaacaaaaagaacaaattacaaagacagaagcttccaacgctgcgcagaatggccagcagaacgaacagggtgcacaaggggcaaagaaggagaagggtgaggggccttgtggtcttcctaagtgtgtaatttcctgatcggctccattggatacccacttgatctttgttttttttttcgttctttttgttgtttattccaatggcgttttgtr

SEQ ID NO: 890 - DNA, 861 bp, Aspergillus oryzae
aaacaaaagtgcgcgatcttgtcacacgaacaactgacgtattgaaacgascaagttctggaccggatgatatcggctcacgttattctcggctgctggaactcctgtkgaggcccaaggctgcgacaattgcctccccggctggaacacatcagagcagtgatttccaggtgcagagtagcactataccccatcgcttgcctgagcaaagtaattatatgcatattcagcccagcgaacgatttctcgtggttggatcttgaagcartyggggactacgtctcgggagaccaattacccggagcgaacacattggcgttcgattcgttccagaaccccgatccgtatcagacarggcaggaccgttcccaagcctggcagccaaattggcctggagatatgaccaacctcctgttctagttgtctaagtcatggttattcaggattggaaccsaaaggtatttttcctttattgagaaaaagcgagccatccacatagaagatcgaaatggaaccaaaactgaacgtactgtcattgttccaatgttgtttgtcccccacgttactggtgcggggctgatgagaatgtggggttttraccagaagccgatcgcgatgtgtccgtccctcactcggactattctccgacccgctggaatattatgcgccggacgaaggagctccgcataacctcttcctgtcgtacttgtaccgaagccaggaaacacatacttggacgtcgtcaacacaatggagcracaaaatgacatcagtsgccgattggtcctgattactggagcktctggaggtattggggcagcttgtgctcgccagctagctgcgaaaggtgtccatcttgcc

SEQ ID NO: 891 - DNA, 711 bp, Aspergillus oryzae
  modified_base (51)..(51): n is a, c, g, or t
tctgttttcacaatggagggcgctgacattgttgagtcgccgcgtaatgcnaaggttgacaatacttccaccacagaagaagctactctccccccgtccgccggaacacctgcggctatctccgaaagtgacgctcaagcattgaaggaggccgaagttgggattaccgagtttgttagcccagagaatgcaggattctctggcattttgaagaagagatataccgatttcctggtcaatgagatcgttccctcgggcgaagtgctgcatttaaacacccttgctggacctcagtcggaacagaacaacaatgacactgcgaataagacggaaacgccagcagacaacaagcagcagggagatgccgaagctgcggttgcgagcgacgccacacccaccacggagacacctgcagtcgaatttcaaatttcagatgaggacaaggcgctgttggattcctattttggcgccgatcacgctaagaaaatcgtatcgctgtatagacgcgcccagtctaatgagaaagcccgcccaagtgaactgggtagactttcaaccgttgttgtaamcgaccgcgamctgcgcatcaagatgcaccaggcgatccgtcgcatcttcaattcgcagatggagtcttccacggatgctgaaggcttaatgaccatttcggtcgctgcaaacccgaaccaagcgcaaggcgcaggggtgctc

SEQ ID NO: 892 - DNA, 972 bp, Aspergillus oryzae
gggtttctccatcctccctccccccttcttcctcgtttgacttcgacattgtttcaggaaactataagtgtcttctactctcttatttaccacttcttccatcccgcgcaaaatttccatccaaccttcttcacaaccaccctacaattaaagccagccgtttaccgccatgtccgttgtttctctccttggggttaagatccagaacaaccccgcccctttcctcgctccctatcaattcgaaatcacttttgaatgtcttgagcagctgcaaaaagacttggaatggaaactcacctacgtcggttcggcgacatcgtccgaatatgaccaagagcttgactcgcttttcgtcggtcccatccctgttggcgtcaacaagttcatttttgaagccgaagcaccggaccttaagcggattcccacgtccgaaattcttggcgtcactgtcattcttctcacctgtagctacgatggtagagaattcgttcgtgttggttactacgtgaacaatgaatacgactcggaggatctcagcgcagagcctcctgcaaagccaatcatcgagcggatccgtcgaaacatccttgcggagaagccaagagtgactagattcgcaatcaaatgggactcggaagaatctgcacccgccgaatatcccccggatcagccagaagctgatattctggaagatgacagtkctgcctacggtgctgaagaggcggastttgaagccgccctagtaagagaacttgcggatgcagagagagatgtaaagagtgaagatcatgagatggagggcgccgagccgccatcaaggaggaagaagaagaagatatttctgacgctgaaagtgaagatattgaagatgaaagcgacgacgatgaggaggatctcgacgaagaagaggctggtgatggcgatgaggacgtygagatgggtgacgactccgaacagaaagacgatggcccc

SEQ ID NO: 893 - DNA, 569 bp, Aspergillus oryzae
  modified_base (324)..(324): n is a, c, g, or t
aattcggcacgaggcaaagcaccattggcctggcaaaccttctccttgatatttgggatcagaagatgccactgctgccaccagrgcctgagattgagcttgggatgtcgatgctaacgttagcgtcgcccgagaagcaaaattcagcagcgagaaaagccgacaacaaggctacaaatggacaatcatccgctgaaacaccggactcccagcacaatcaagtgccacatgctatccagaacgtggaacctaaacttctcaatcgcatcgccgctcgtgaccgagcttacggtctgctttcggccctgaccaaacgcggcagtncttgggacaattctgaagcttggtatacactctccagagcgtacgaagccgagggaaatactaagaaattgaaggaggtgttgtggtggtgcgttgagctcgaggaccgacggccaatccggcactggtctaacctcggttctggtgtatatgttctataaatagcgagggattactttcttgtatttaaccttgttgaaagagcagttctttcatcttgcacttaataagatacctccctgtta

SEQ ID NO: 894 - DNA, 538 bp, Aspergillus oryzae
tttacacaagcwatctccctcagcacgcgcggagagggaactcttgagaaagaagaaccgatacaagaatccgttgacggaaagaaacgttgacacgttcgtaacagagcagcagttcaccgaagcctgttatcccgtatgaacgcatagcaacgagtttgcattgthtyccgcctgtgctttkagcgacctkcgcgtatttgacaacctttccacttgatycgaccgacacttcccgcctttacttttcgatcccttacctagcctctttgtttggcaacmaagccatactygcacccaactgrgacctcctaccccacagagtkhgctaytcgaatcaamcggtttgttttacgcgtttagggaactggggaaatktytttgggggcatttcctcttyagaaagttttcggtttgaraaaatgcatgtgtgttaaagaactttaagggggtttatgttyccggtkggagttcmaaatyytattctttggcaacaaacgtycatatttgcacttgggcgccaaagtyaatgggtgct

SEQ ID NO: 895 - DNA, 761 bp, Aspergillus oryzae
acgaggctcarttagatccggtcaaagattccccccagaatgcagcttactaagtccctcctggtattcgcgctttacatgtttggcactcagcacgttctagctgtgcctgtcaatcccgagcctgatgctacgagcgtcgaaaatgttgcccttaaaacaggcagcggtgatagccagagcgatcccatcaaggcggacttggaggtcaaaggccaaagtgctttgcctttcgacgtcgactgctgggctatcctgtgcaagggcgccccgaatgttctgcagcgcgtgaataaaaagacgaaaaatagtaatcgcgatcggagcggtgcgaacaaagggcctttcaaagatcctcagaaatggggcatcaaagcccttccacctaagaatccatcctggagcgcacaagacttcaaatcacccgaagaatacgcatttgcgttttcccttcaaggcggaaccaatgccatcctagcgcccgttaacctcgcttctcagaactcccaaggcggcgtcttgaacggtttctactcggcgaacaaagtagcacaatttgatcctagcaagccccaacagacaaagggaacatggtttcagatcactaagttcacaggtgcagctggtccttactgcaaggctctggggagttatgataagagtgtgtscsawaagaacaagaatattgcaggggactggggcttcgacccggcgaaatgggcatatcagtatgatgagaagaataacaagttcaactatgt

SEQ ID NO: 896 - DNA, 536 bp, Aspergillus oryzae
agggataaaaaaaagcgcgcaagtatagcggaaatcatgaatcatccgtggatgaacaaaggatacagtggtcctcctgaaaactatcttccacaccgtgaaccatatgcagcttccgttggaacaagaagttatcgagaaaatgacgggctttgattttggctcgccagaatacatcaccgcgcagttaccaagatcttagaatccgaagattataagcatgccgtaagaacaagtatacgtgagcacccggcgccgaatcacagcgagaaaaagcgtggcatgttcgacttctacaagcggcgaaactcgacgagccgagacaccctctctgccccttctgcagaggctgttcaactgggaaatgatcctttgaatgcatacagccccctgttgtctgtttattaccttgttaaggagaagcttgagaaagaacgggccgagaaaagtcctggggctcttggtgttccacactcagccggagacgctatgctccagatgcccgacctcccagctccggaagcagcagggggtta

SEQ ID NO: 897 - DNA, 509 bp, Aspergillus oryzae
aattcggcacgaggcttttctctccaagtcaaagcctctgacggacctttctcatcagaaagaaaaaaagcataactcatcacctctttgaccatggaccagctcaacagcaagcaagaaatcaacgacgccatcgcaaagcacgggtccttcgtcctaatgttcacggccgtgtggagtgacgtcggcaatataaccaagcgcaattatgagagaatcggtgccaaacaccctaccgtgtacatggcctgggttagcaccgatgaccatcccgagctggccgaggaatggggttttactgctattccgtctactgttgcatataagaatggtaccaaggtcgactacttcgtcggaccccaatacttggacgagcaggtcgaggagtttatcaagaagacgctctaagcgggtggaggccatgtcgtggcagtttcatgatttcttttcgtggtagcaagttatttttatgtagatagatggaagttaatgagacggatgatttgtgt

SEQ ID NO: 898 - DNA, 939 bp, Aspergillus oryzae
acgagggtccgaaaccgctgctatgagcaaccttagattatgttttccaccaatggatggtcaagtgaattgcatgcattcaaagctgatgttactcttccactcgggatacgttcgaattgtggtccccactgccaacttgactccatatgactggggtgaaataggtggtcttatggaaaatagtgttttttattattgatctaccaaaaaggaccgataaagactctgggtttactcgaacaggcttctaccacgagttgacttactttttaaaagctagcactctacacgagaatatcatcgctaaactgaccgattatgacttcagtagaaccgcgcatattgcatttgtccacactattggtggctcgcatatgggagattcgtggcggcgtacagggtactgcggcttaggacgtgcagtgaactctcttggtttgcgaacatccaaacctctcaacatcgattttgtcacgtcatccgttggctccttgacggacgagttcttgaggtccatatatcttgcatgccaaggcgacgatggatcgacggaatacgtccttcgcaccgcaaaatcctttcctgtccggagccgcagcaaccctacacagctcattaacaagtctacggccgaagagtggaaagatagatttagagtctacttcccctcagagacaacagttaatgacacaaaaggtggaccacaatccgcagggacgatttgctttcaatcaaggtggtatacgggccctaaatttcctcgtcatgttctgcgtgactgtgtaagtcagaggctaggsctactgatgcataataaaatcctctacgtaaggccagatgacccagcgacgctacctgataactctcaatgccgagcctgggcttatgtgggaagtgcgaatctttcagagagcgcatggggccgcctcgttcarg

SEQ ID NO: 899 - DNA, 812 bp, Aspergillus oryzae
gagggtgcactgacctgagcatgcctgcgcttctgggttatttcatgaccatgatctataacccgaataatgttgcgctagaggctagtcctctgaccactgtggcggagatggaggtcggggagcagctgtgtcatttgtttgggtataatactgatccttcgaggaaggatgtgccgactggttggggccatgttacttgtggtgggactgtggccaatcttgaggcgatctgggtgtctaggaatctgaagttttacccgttggctcttcggaaagccatgagttagactgttgttgtagatggaagcgagaagaagggaccgttgagtttcgtggctgataggtttgtagttaccacctgtaaaggtgagaggaagctgtttacggatatgtctacgtgggaactgctcaatttgagacccaagacggtgctggatctgccgcagaattgcatgaacagttcggtatctcacccaagtttgtggaatctgctttgcagaatttcaacatacagtcgacgggtaaagacgctttggaaagagaattcgaggtcaagcaaccgatcaagtgtttcctttctaatactagacactactcttggcccaagggcggasaataactggcctcggttcggatgcgtttgagggtattgaggtcgatgacgccgcgcgtatcaacctcgacgtgctttaggagcgcctccaacgatgtcttgatgagggccaggcggtttatgcagtagtggcaatcattggctcaactgaagaaggggccgttgatcggctaagtgctattttagctatgcgtca

SEQ ID NO: 900 - DNA, 769 bp, Aspergillus oryzae
cggcacgagggatacttcctgccgtctcttcgacattcgtgcagatcgtgaactcaacatttaccagagcgaccaaatattgtgtggcatcacttccgttgctttctccgtctctggaagattgcttttcgctggttatgacgattttgagtgcaaggtgtgggatgttctccgaggcgacaaagttggctctcttagcggtcacgagaaccgggtcagctgtcttggagtcagcaatgacggcattagtctgtgtacaggctcttgggattctctgctcaaggtctgggcctggtagaagccgagaaatccgaagaaaaaaagcaaagataccctgtctctgtcttgccatgtccttttccgatattttcacaacataatcttgcagcaataggtcaaacatccgccgttgtacgataatcttatttaccgaggagcagtattgtcgccttacttccataatatgtgtattatgtgggaatgctggcgaagtcatcaagaagggaacgacgaactatcaagggcagactatcagggtggttgggcatttgaatcgaaccctgtcgcatcgcacgacacataatcatccaaaaacagcaacaaaattacactattcgatgacttacgtggtggtcttaataatgccgccgatcgacaggccactggggattgttgcaggagacaccgcgtggagatgcctctcagcaaaagttgtttagcttcaacccatcctccgtagcattggagatctgccttgatttcttttttt

SEQ ID NO: 901 - DNA, 850 bp, Aspergillus oryzae
  modified_base (361)..(361): n is a, c, g, or t
  modified_base (419)..(419): n is a, c, g, or t
  modified_base (421)..(421): n is a, c, g, or t
  modified_base (430)..(430): n is a, c, g, or t
acgaggcgacccgtcttttctcttcttcaacattttcgtcagcctccatccagccccgacagttagcctcaatcgataaataagtccagctctttcaaaaaaagcaataatggctactttccaggatcgtgctcagcacgctattgctcagcttgacaaggagctttccaagtaccctgtcctcaacaaccttgagcgtcaaacctccgtccccaaggtctacgtgatccttggtctggtcggtgtttacaccttcctggttttcttcaacattgccggtgaattccttgttaacctggccggcttcatcatccctggctactactctctcaacgcattgttcaccgctggcaaggccgangacacacagtggttgacgtactgggttgtttacgccttcttcgccgtcgttgagagtncngtctatgcnccttactggttccccttctactatatcttcaagttcggcctcgttctctggatggctcttccccagaccaacggtgcccaagttgtcttccactctttcattcagcccgtctttkgccgcttcttcgctggcggaaacacctcggccaacctccgcgcccaggctgatgctgctaccaaggcccagttaatagactgttcaaggtgagaaggcattcgcggtgtgttcygcgttgccatgagccagggcggtctcagttttttggtacttgaaaataaagaaaccagttaagattcgctggcgaggraaaaagtkttaggtgagawgacacttcgacctgagttagamggttttgggtcattctagctgttttggtattttgtcatgattagtagaattgctttgttttgcgcggtgggt

SEQ ID NO: 902 - DNA, 275 bp, Aspergillus oryzae
gcacgagggtcatcttcatacattgaccgagccggaagccgcctcttgatccggccctcttccgccataccctcgatatcaggccattatacattgatagacatgtataagagttgaagtttctaacaatcagtctattgtgctaagcaaaattctaagagaaaaatccccgttacaggatattctttttgtcacacattacaccatgcgctatactcccgaggtctcactcgacgaatatggggtgtcactccagaatggcttcctccctcatt

SEQ ID NO: 903 - DNA, 807 bp, Aspergillus oryzae
aattcggtacgaggccggctgccaacgagaaaaagcgacgtccaatacttggagagtttcggcacagatcggtgtcatcttatacaacccagatgaaccaaggactggatggatgcagtcatcttgccatcaattcaatccacacaatcttgactggggctggactagtttccatggtccgtgggaccagatccaccgccggcagcggggccagcgtcaggcactactccgcaatgataccttagcgtttgatgcctatatccgtatcattgacgatcctacacgctcattatggtggcatgctagtgattcggaacctacctgggatagtctagggctcactggctaccgcccgcttggagattccgtcatcaaccacagtgccgaggtcgcgggattagccacatggttacacattgcacctttctgcaagatcattcaaaatgccaatatcgtggaacatcacggcaactgtgacgtcaaacctaagccgctctgtgatgcattgcagaggttcctctggcagctacgttcccgtaaaaattctctccagtatgtggacaccgacattattacatctacgctgcgcaatctgcacgagtactccggagatgtatgtgagttctgggaacgcttgcgacgtaccctggagttggaacttgcaggtacgagtgcagtgaaagacttagcagcgctgttcgacagcccaactcctgatctgcttctacaggagactcaaggatcggatgtggtcaacactatcccaaaggattacaattcccgtatctgcgtgcctgccgaccaggt

SEQ ID NO: 904 - DNA, 772 bp, Aspergillus oryzae
  modified_base (102)..(102): n is a, c, g, or t
  modified_base (107)..(108): n is a, c, g, or t
  modified_base (442)..(442): n is a, c, g, or t
  modified_base (446)..(446): n is a, c, g, or t
attgacagaattaccttacaaaatgtccacagtcggtcccatctgaagactcccttccttcggctcatgctgcttccacacaggctccgtccagcatgcgcngtggnnaacaaagtccactgtgtcgctccagcaaaaaggacagctagcgaacaagccagaagctgatccacgttacctcgccatagctttacatcatgcgcaccgtattcaggcccaaaaggatacggaatctcttatcttggatcgtattctcgaactcgtcacgtttccgtcttcaccttcagcagatcctgcttctccgttacccgaagatgcccaggctttcaaatcagctttgataccattccagccagctgactacgataatttgatccaagagcggaatattgagggtctctgtggttacggtttatgttctcgcgagcaccgtaaggacgantctngtggggcttatcgcataacgtggggtgccaaagggagttgccctggtggccggggccgggatatgaacatagttcctcgcgaaaagcttgagatgtggtgttcggatgagtgtkcygaaagagctttgtacatacgggtacaattagccgaggagccagthtgggaaasgcgtgccgatgacgcccggggcaagaatctcctcttgcttgaggaaggaagagcaaccacgcgaggagggaaaggtaaggcgagaagctctgccacggtaagggaggttactggtcaattggacaatttagatatgagccgaactccaggttcgagc

SEQ ID NO: 905 - DNA, 382 bp, Aspergillus oryzae
  modified_base (97)..(97): n is a, c, g, or t
  modified_base (114)..(114): n is a, c, g, or t
  modified_base (171)..(171): n is a, c, g, or t
  modified_base (205)..(205): n is a, c, g, or t
aattcggcacgaggctattctctgatctagtgcgcccgtatttagaagcttgacgatttgaactccgcttggggtatacagatgacctgatgctgtntgcgatcaacgcgcccntcggggctggcgtaattatcttttgggtcgactgaatagcgttcttggaaagcaganactctgtacatcacatccgtgccttttgtgatanagcttcccctcttgcattcgagggtatggtccgacgattccacgatagaatttcatgattagatcaatgtaaaacgaatcaataacgaaaacctacggttggatacactatatctgtctgtatggcattggataactacacttactcacgataaatcgaattttccttaaccctttt

SEQ ID NO: 906 - DNA, 557 bp, Aspergillus oryzae
  modified_base (283)..(283): n is a, c, g, or t
gctctgataacctccgcctttaccctggagaaaccatcaaacactcacaacgcccatcgatccgaagaccctaccactccacccaaactccttcccggaacaacacaacaaaacaacgtcaaaatgaacatcccaggaatgaccaccggcatggcccccgcagcgcaaccgcagagccggatttcctggagccggagccggaatgcagggcatgagcgagcaggaacaggccatggtgaaagcgatgcacgcagctatggaatcttgtcccgtgaagactgtnatctccggtaccatgggattcggtcttggtggtgtgtttggattgtttatggctagtatgtcttacgactcaaccttcaccccgcaaggaaaagccatcatggacctcccctggcgcgaacaagtccgccgcggtttcaaagacatgggttcccgctcttggtcgtcggccaagaacttcggtatcgtgggtgccttgtactcgggtacggaatgctgcgtcgagggattgcgcgccaagaacgatctctcgaatagtgttatctcgggttgta

SEQ ID NO: 907 - DNA, 557 bp, Aspergillus oryzae
  modified_base (368)..(368): n is a, c, g, or t
gatgattataaaatccatcaactgccattggcgcgtattaagaaggtcatgaaagctgatccagaggtgaaaatgatttcagccgaggcaccaatcctctttgctaaaggttgtgatatattcattaccgagctgactatgcgagcttggatacatgccgaggacaacaagcggcgcactctgcagagatcagatattgccgctgccctctctaaatccgacatgttcgattttctcattgacatagttccccgtgaggaggccacgtcgcacgcaaagcgatctagtcaggcggcaggtgcaccgtcgggggcccctgggcctacaggcgctgcaggacaacttccgccatcccagcacggagtagncacccgtcacatcacatggcaccccccgactacagtttgggccagcatggtcttcaagaccaggaatatcgtcaaccagctatgtacgcgggacctgtgcaatcggatccgactgcagcatatggtcagccgcaatctcaaatgtttgaaggaatgtatgccgcttacccgcacttaccgccacagcag

SEQ ID NO: 908 - DNA, 563 bp, Aspergillus oryzae
cggcacgaggcgtacggttttcgcatgatggtcgctatatcgtgtcgagggactaccttactgttaaaatctgggatgtcaacatggagcgccaaccagtgaagacgattcccatccacgagcatttgcggccacgcctgtgtgacacttatgagaatgacagtatcttcgataagttcgaagtggtcttctctggagatgcggagaatgtcatgactggaagttacaacaacaactttatgatctaccctaccgacccagccaaggagaccgagattgtgttgcaggcggataaatcggcgttcaaagcaaagaaggttggcgtaccaacgccgatgaacaagggtgccaatggcaagaagggaaatacccgagctggaagccctggtggtcctggcagccggatgaagaaggagacggacgcagatcagatcgactttaacaagaagatcttacacatgagctggcatccttatgaggatagtattgctattgctgctactaacaacctttttgttttctccgcattgtaagtacgctacaggatggttcatattcataag

SEQ ID NO: 909 - DNA, 616 bp, Aspergillus oryzae
  modified_base (110)..(110): n is a, c, g, or t
aattcggcacgaggaaagaggttctttatttattttctctctctttttttggtttggcattttcgtctctyttcgaagcgagtttagatggctcacatctcgattgcgtngcgacgtcaacggattgacattaagtcatcatcatatcataagtttcgctgcagaagtccgtgttggttgtgaattaatgattcagcaggacccacgtctcctttttaccctgggctttctttcaaatttattggtcaaatatatagggcgacgccagagttaggggcgctcggggtcccggagatgtggctggaggcagggacggatggacgcatgacgctcgtccatagtttttgggtacggagtttattgagatcgcaataatgacccagggttatcattggacaaatggtattctgcccattagcaacgggctgtttggccggtttcaaatctgcctctagtggtttttctcccgggcaagaatagggagggatttcttttcttactacgaacgggctgggataaaccgtcaacgggtctgcaatgtatagattacacagggcgatcatctcccgtcgttcaccgtgtcttttaacgtcatcatggctagtggtacggtcac

SEQ ID NO: 910 - DNA, 548 bp, Aspergillus oryzae
  modified_base (468)..(468): n is a, c, g, or t
aattcggcacgaggtgcttccgccctcaagatgcctccaataacatcgtccttgtggattcgcgactgttagagcgacacccgcggactcctgcgagaagcctgtgagttacttcactaagagtggtgtccctggaatcattgtgggagttttattcctgatcgcggtcggagtctgctgctacttcctttatcgcaacaagaagagagacgctgcagaagccaaggcggctcacaagtggaatcaaggcgatctataaaccgcgttcttttgccagcttcccccgacgaatctccgaataatccagccttacatcctaatacccctgttcctaccacaccacgtcgttttccattcggtgaataagagttactacgcgaagggattccagcgttgctgagcatcgctgtcagtgattgagagtccatatatcggattaatacgcgagcgcgttgctacgagtgagancaccgaccgccgcctgttacacgctaggaatagctgccacataattcagtgatcttacttcgactggcacacaatgctgt

SEQ ID NO: 911 - DNA, 571 bp, Aspergillus oryzae
cgttaatttcttcagagatttataatcgctatcgagcgccttcagcgatcatcaaaccgacaagaggaagcggcaacctcgatacgctcggastgctmygggcagccttscagccgcgcgacccagggcagactgcactactacstcggactctgccaccrgcaccacygtcgcaccttcggsgackgycacgcaccggcyccccacacagaccagsgcaacasaagaagcagaggcaaccagaactcgtrccscayggccggatrmgtcgargcsccctrccccaasgactctcaggcaaacgacacmaamactygsgaacgcmgcsygcccmcagggcagtctgcaccccaccagcacagctgagcrmgacgccgmmtgmcaraamgcctgctacagmarmgactactwccctagacacagccamgggcaactctggagcctccaakacctcygccagcawctctagacagccaccascaccagagtastgcgcaacgcgacagcgtcttccgacargttccagcraatgcgamcrgmacccgttctkcgggcgcaaggcttctggcac

SEQ ID NO: 912 - DNA, 696 bp, Aspergillus oryzae
aagtcaacttccctttctttgttgctcttcatacagcatttattatgctctgcaattccccctcatttcctcctcttgtcttatcgcaatccactaccttatgccaattctcttttctgctcctatcttatctctttttccttatcttttgagcgaagctgtcgggttgcgctccgaatactttaaacctcacatcttccgtgctcggttggcatcgcaatcgccaagatggggctgaacgaggagaaaaccacaaagcttgaaccttccacctcgggtgagggcggtagtattcatgtcggggagagcatggggaccctgcatcgccggcttggtaaccgtcaaatccagctcatcgccgctggtggctcgatcggcacggccctgttcattagcattggcggtggtctcgctaagggtggccctggcagcctgttcattgcctacacgctttattcctgcattctcggactggttaataactcgatcgctgaaatgaatacgtatatkccggtgtcaggaggctttatccgtcttgctggctactgggtggacgacgctcttggattcctcgccggttggaatttcttcttctatgaagctttcctgattccatttgagatcacggcacttagtatggtaatgtycttctggaatgaaaccgttacggagcctggccctacggcagggatctgt

SEQ ID NO: 913 - DNA, 830 bp, Aspergillus oryzae
  modified_base (111)..(111): n is a, c, g, or t
cggcacgaggataaatcactcggcacaatgggtttcaccgacttcgtttctgaggctggcctcactgttgccaacaactggttcgccaccagaagccacgttattggcgangctccttcccaggccgatgtcgtgacctttaaggccttctctggcgcccctgacgctgagaagtaccctcacgttgcccgttggtacaagcacatcgcttcctacgaggctgagttcggctccctccctggtgatgcctctaaggcctacaccacctacggccccgaggccactgagctccccaccaaccctaaggacaagcccgccgacgaggatgacgacatggacctcttcggcagtgacgacgaggaggaggaccctgaggttgccaggaagcatgcagagaatcttgctgcgtacaaggcgaagaaggaggctaagggccctaagcccgctgccaagtccattgtcactctcgatgtcaagccttgggatgacgagaccaaccttgaggagatggaggccaacgtccgtgcaatcgagaaggacggccttgtctggagtgcctctaagtgggttcctattggcttcggtattaagaagctccagatcaaccttgtcgttgaggacgagaaggtctcccttgatgagctccaagaacagatccaggaggacgaggaccacgtccagtccactgatatcgctgctatkcagaagctgtwaatgaaacgtttatgaagggaatggtgtgatgaaagatttttcatgtgattgaacggaaaccaaagtcatgaacttaacaaataactagagctcgatcggcattgttcgattgtttt

SEQ ID NO: 914 - DNA, 713 bp, Aspergillus oryzae
gtgccggagttcttcttatcgccggagccgctctttacttcgtcaggcagcgtaagaagggacgtctcgaatacgcccttgatgacgccaagtggaacactgaacgaaatgagatgaacaatctgcaaaccacgtggaaagcaagcgaatggggaaacaaaggttatcaacctgtgaactagccaaaacttcgtcagagatacctagggatacgacaacactatccctgcgttgatgatgaaaacgaaacaaagaatgcttttcggatgtcttctgctacgccacctgcacaaggatctgttatgttgcgtccttgcacgtcgcagcagaggtcgagcgaaatgatctcgcgccggctttgctggccaaagttgcgtgggttggttttcaatctcggggttttggcgtcgttttggtagagcatattgggctcatgatttgcctcacaatcctcttccctattcttccaatttatgtctatatatataccatttactaactttttgtattgtgtttacaactggacactttctttgattgtatataccaatctgcattgtatatccaatttcgcagcctcctctacttttcccattagatggtgtatggcatctatagccaagctttcaaactcaccgcctatgctctcccatatgtttctgttggataaccacatctttgccaatccagagctgataggcgttctttgactg

SEQ ID NO: 915 - DNA, 717 bp, Aspergillus oryzae
  modified_base (421)..(421): n is a, c, g, or t
  modified_base (425)..(425): n is a, c, g, or t
caggcttcttgataatgtttccctcagaaccaacgacaacacgaaatagcaacatcgcacttattcccaaagaatacgcccaccagggagatctagaagccataatcacacgatacagaacccttcgcctaagaggcctgaaagagaacccagactccttctcatctaagtacgaggacgaagttgatctcccatacgagaaatggctagctcgagttaccaacccacaagcgcgttcctttgtcgcttatgacgcccaggggaacaacaacatggaatctttagcgctccttttgagttgagaatggttgggtacagtcaccatagtagggcctaggttgctgcctgaagataacgaggctctgtcaaaagcaccatgggatatgtttcttccgctagaagagcgggagctgtctgaganaganactcgtgatgcgactttggtgtatatgcttgggggcatgttcgttctcgagacgggaagacgaaaggggaacggtcgtcggctgattgaacgggctgttagttaagcacggacggaagctatttaggtgggggcaagtygtgtcttagtggtgtctgtygcggaacgaaagaatgatgctgcgcgacggttgtdtgagaattgctcgtttgatgtgtgggatgatgagcttgtattgcagatcccacggcaccaggagtgtgttgccatggttttggatcttaggctgaagg

SEQ ID NO: 916 - DNA, 878 bp, Aspergillus oryzae
aattcggcacgaggcgcatggtgtagtgcgatccctctctcgcagccatgggccccttatctggaaagcttatggagccgctcctgttcctgctgttacccgtcagtgtataggaacaccgcctcgctcgtggactgggagtaaaagatacatttcagtctatggctatacacaatcaaaagcacttgtgtattcacgatatggtgaacccaaagatgttctacgcctccacaagcattctatctcccctccgcacggatcccaagttactcttcgcctccttgcagcgcctctaaaccccgccgacgtgaaccagatccagggggtgtatccgagcaaaccgccattccagacaacccttggtacccaggatccatgcgcagtgggtggaaatgaaggtgcctttgaagtaattgcgactggatctaatgtcaagaacctcagcaaaggtgattgggtcgtcatgaagcagacaggacagggcacctggcgcacacacgctcagatggatgagtcgcagctgatcaaaattgagaataaagatggcctatcaccgctccagattagcacagtcagcgtcaatccagtcacagcttaccgcatgatcaaggacttttgtgaatgggactggatgcggagtggggaggaatggctgattcagaacggagcaaacagtggtgttggtcgcgctgccattcaactcgcccgagaatggggtattaagacgatcaatgtcatccgggagaggaagacgccggaggatacggaagtcctgaaggctgagcttcatgaactaggcgccactgcagtagtcacagaagcggagttgctttcaggagatttcaagaacgtggtgagcggcctcactcgcaacggaa

SEQ ID NO: 917 - DNA, 307 bp, Aspergillus oryzae
  modified_base (108)..(108): n is a, c, g, or t
cgagggtttgtttcagcggaggaaatccgtggagggttctatcggcagccgtatgagctccaagggctgaacagcacgttctggacgggcgccacttgggcgtcagantactcgaccttgctgtgggggtatacggatgaggttctcgatcagatggcttcttcctaaattgctatcaatgctatcaatggtagctgtgtaccgtgcaattctatagtggcgctcgcacttcgatagttgtcaagtacggtctcgcacaaacgcggtgaattagagtttaaggcttcaatggaattggatccacctg

SEQ ID NO: 918 - DNA, 846 bp, Aspergillus oryzae
  modified_base (452)..(452): n is a, c, g, or t
  modified_base (454)..(454): n is a, c, g, or t
  modified_base (483)..(483): n is a, c, g, or t
  modified_base (489)..(489): n is a, c, g, or t
  modified_base (491)..(491): n is a, c, g, or t
aattcgghacgaggcgggaagtattattggaacctggttgagtgatcctctccaagagggcaattatgggaggcgcccagcactgttcatttcagccgttttttgtgctgcttgtgtacttggtaccgctcgctgtgtgacatggcagcagcttcttgcttgtcgagtgatactcggtattgggatcggcgcgaaggcgtcaatcgcccccgttttttccgcagaggcagcggttaaccatctgcgcggacggttgttgatgatgtggcagttgttcgatacttttggtgtctttcttggcttcgctgcaattggattgtcgatcgccaatggagggtgcttctagggacagcgtctattcccgctcttatcctcctcttcctcgtctttctttgtcccgaatccccgcggtttcttatccgtagaggagattataccggggcattcgttancntccgacagctacgaggcacagacatccangctgcnanatacctttattatatccatagtcaactacaagtcgaaacggagatgtttgatgggaagagaccacagaactggtatagtgaagagatataccaaaagaagggtccgagagacccgtttcctcaagcggattggaaagcttttcagccatccacgcaaccaaagggcatgtgtggctgcgtttttggtaatggcgtcacaacaactgtgtggtatcaacgttctctcgttttactcttctcgactcttcggtaaaaccacgcgggagaaaacactggatacaaatggttcccagcaacgtgcggatgtagtttggcttaactttggattcggcttggcgaacttcctcttcactat

SEQ ID NO: 919 - DNA, 944 bp, Aspergillus oryzae
acgaggcgcgatcacagagtccatctacatctggaactttttacagtcctaagcatctactttgattcatcgttgaacgaaccggatcatacacaatgcgtaccgcccaattactcgctctctccggcctcatgctcatgagcaacgtcgccatgggcgccgagctggaccacgacgatgtacccaatcgctgctgggatgtctgcggtccggtggtaggaattgcgcacaaatgcgacaacatgcacgacagtaccgcgccgagatgaattgtatctgcgactggaagcaggcaccatccctgatccctctctgcgaggcctgtatcgcgcagtatcgcagcgaacgcaacaacagggaccacgatgatgatgacgacgatgctgaccgtaacccccaccacaacgatgcctacgacatcctcacctcttgctccctctcaacaaccagctacaacccgaccgccgcagcttccgccgttagctccgcaagcgccaatgccaccgatgcaacccctaccgcaacttcatcgggcatctccgactccacgaatggtggctcctcgggtaactctaacagtaattcggcaagcaacaccaactccgcggttagcgcccagaacactggcaatgcggcgtctgcgtattccagtcccaaggctgcttccttggctgctgttgtcggactaggctttcttgcctggctgtgaacatctcatgacctgatgacattacgagattggatatggtccaggggggagagagcsgaggaataatatgggaaatcgattcacttgatcgtatggagatgggagaatgagatatatgattacgtttcatgccactcatatatatacccagctggtgatgagttatgtttactcgaatatgccctgttgttttaacttatcatgtggtatatattgaatcactcctttgatttga

SEQ ID NO: 920 - DNA, 900 bp, Aspergillus oryzae
acaatcatcgtacaacttccattagtccacgaatcggagatctacggttcttaatatcaatccctgaagccaagacatcgtcagtgtcttgtcagatccaccatgaccaccttagcgcagtccttctcctctcggagcgccgacattgcagttgtggttcccaagagacagacccccctgtcccctaatctcagcatcacctatcaacagctgcatgctcatgtggccgagttccaagctaaattggctaagctgggcgttggtcacggaggtgcggtgtccttggcgctggcaaactcgtacgaattcatcgtcgggtttctaggcgcgtcctggcagcgggcgatcgccgctccactaaatcccgcttataagcaggaggagttcgagttctatatcgatgaccttagttcgacgttagtgctgattcctaaggggtcgtatgcgcagaatggccccgccgtgcgttctggaagaaaatacaatgctgcgattgcggagtgctactggaatggcacagaggtggttttagatgtgaaggaacaaggcaaattggcgggtagcgcgggtgtgactgtcggacaggcccagccggacgatgttgctcttgtgcttcatacaagtggcacgaccggcaggcccaaagctgttccactcacccacaagaatctcaccacgaccatgaggaatatccgggatacgtacaagctaacgccaaaggatcgtacatatttggtgatgcctcttttccatgtccatggcctcctagcagcattcctggcgcctctatactctggaggatccgtcattgtacctccaaagttctcggcccatgaattctggtcagacttcgtagcctacaacgcgaactggtacacagctgtgcctactatccacaat

SEQ ID NO: 921 - DNA, 580 bp, Aspergillus oryzae
tccagttgaaccaacctcctcgacttcttccggaagtttgtacagaggacagttccttacggggcttttgacttgaatctctttttcttcgaaaagttcgccgtttagctttgcctttcaaaggcgcaaccccgccaaaatgtcgttaacgaactgccgtttttacgaggagaagtacccggaggtcgacagctatgtcatggtcaatgtcaagcagatcgccgaaatgggcgcatatgtgaagcttctcgaatacgataacatcgacggaatgatcctgctttccgaactttcgcgcagacgtattcgtagtattcagaagcttatccgtatcggtcgcaatgaagtcgtcatcgtgctccgtgttgacaaggagaagggatatattgatctttccaagcgacgagtctccccagaagatgttatcaaatgtgaggagagatataacaagagcaaggcggtgcactcaatcatgcgtcatgtcgcagaggccactcagactcccctcgagactctataccagaacattgcatggcctctgaaccggaaatacggccactctcatgatgcttttaagatc

SEQ ID NO: 922 - DNA, 832 bp, Aspergillus oryzae
aattcggcacgaggagagcttcttatgggagacatccccgaccgtgcgatcttccgtcagcctgctctggaacgtgccatgcacccttacttcttgcttgttcaagccgtgagtgtaggtgacctggatggctttttgagcattgtaaatacgcacagtacgacattccgtaagatggcacgtacaccctcatcctgcgcttgagacaaaacgttataaagaccggaatccggatgatgtcgctgtcttattctcgcatctccctgcgggacatttgcctccgcctggggctggacagtgaggaatcagcggagtacatcgttgccaaagcgatccgggacgtgtgatagaggccactctggaccatgagcgaggatttatgaagagtaaggaagttggagatatttatgcgactagagaacctggcgaggcattccacgaacgcattagagcttgcttgartctccacgacgagagcgtcaaggctatgagatttcccatgaaccagcatcgcctggaactgaagagtgcacaagaggcccgggaacgcgaacgggaactggccaaggagatccaggatggtgatatggatgatgaggatgctggcgccgatttcgacgccatctaatggttacgaaaactatcacacggcgatgtataatcctgccatgtgttgggactggggccaaatggccgggttgggtggatttcaagtattgtgtttatctgcaaatctgttgtttcgggtgcgtaggaggggaatgtgcaggattgagctttgccggtgtgatgttccctgtctcctatatccttaccaaacaatttcttttgt

SEQ ID NO: 923 - DNA, 552 bp, Aspergillus oryzae
ctgctcttgaactttttccacgctgttgatgaagaaactggtgaagcaaacggtgtttcgattgatatcttgaagtcgcccaagtatcacgagattcaatctctgaactttttctactttscacccaccgagaatcttattcgcacctctgagagaatggcctcagcaaccatatctcggcagcaggccaatagaaaccgagcgtccgcgccggcccatcttggttctggaggatcgggcggattcctcggcgttcctggtgctcggcgagctaagagcatcatgctctcgcggaaccttggcacaatgaagaagatgaaggaggaaaaatggcgcgaastcaggccgaaccaaatgatgacatgatcttgcgaatccttcgtatgaggccagaagctgctggctacctgcgcgatcgaagtcgtcagaaggagcgactcgcagctgccgcggctgcgatgccattgtgaaacaaagcctgatggctggtggggggaggatggcgggaactctggggcgacgatgactgctatgaggacgtatattgttttt

SEQ ID NO: 924 - DNA, 950 bp, Aspergillus oryzae
  modified_base (4)..(4): n is a, c, g, or t
  modified_base (17)..(17): n is a, c, g, or t
cggnacgagggctcgancattcgaatccaaattcccgccaaactcttcggcacgtccagtgggacaagccaattcgcctcaagtattgggtagaggcacttcatcgtcgctcactgtttccggaaccccagtccaagatgaagttctcccatagtatccaattcaatgcggttcccgaatggagctcgtactatcttgcgtacagcaacctcaagaaattgatctactctttggaacaacaagtccgtaaagccggtgggcaagctcaagctgatgtcgagtcggctcctttgctagacagtaccccgaataccgattcgatatttcggaaagctctagatgcagagctagagaaaatatgcactttctatcaggacaaagagctagagatccttaaggaagttgaagacgtgattagagatgcggaggagtatgcttcggaggccgatgggatcaatgtggatccaatgagcgagcatatgaccaagacaaggacgatgagttccggctctcggcggcgttctggaaatgggtatcacgatttcccactaaatccggatcggcgccgtagcagtgttaccgagtccgctgtggatgatgatgatgamgaaraaratagtgacgacgaacatctgtcggtacacagcggcagacgtctatctcacggcgccgggtctactaatcctgatgatggtcgtacagactacatgggcgaatctggctatatgggagawtcgaggggctggagatctaacagggcccaagttgagcatttcggtgacccgaagtcctagacctgtacaattctgggctttcactgaagaaacgggcagtggacgcatacgtctctctttgtgggctgaagtcgtacattcagttgaataaaaccggtttctcaaaggctttgaagaagtacgataaaattctcgaccgcagcttgcgacgggagt

SEQ ID NO: 925 - DNA, 885 bp, Aspergillus oryzae
  modified_base (6)..(6): n is a, c, g, or t
cggcandggctctgttgccctcgtcattgtgtcaaccatagttccaatactgtctctaatgtcgattattctccggttccaagcacgccgaataggacggttaaaattagcagccgatgactggtggatcttggcagggtggcttcttacttttgctttgagccttactatttggatttttggcagtatcactggtatctcgaaatacaaaatcagtgtgacgacggggatccaaagatccttccaatgcgttttcatctgcagtgccatcctccaagttagcctatctgccgtgaagatctcgatcttgctattctataaacgaacattttccatccccaagttccaaatcgctacatgcattgccattaccatagttggatgctggggaattaccttcttcctcctgattctcttagaaggtgatccgatcagcagagcatggactggaaagggccactttagattcgatcaagtcgcaatggagttcgcgcaatccgccaccagtatcgcattaaatgtcgtcgtcttgctgtttccgctccccatgctttggttcctacccatgtctccccacagggtgtgggatctcattctcgtctacgtgctaggtgccctatgttgtgctgctgctattattcggctggttctgctccatgcttctatagccaaagaggctaccgacctatccgtagtccatatccactccaaacagcttgtcttcatgatcatcgagaccaactgttctatcatagccgcctgtctcccatgctacggcgccctcctccgcgggggacaatcactcgcgtcgattgtccgatccttccttgtcatccatggccgggccagctctcggtccggttccagcttttctagccttcatag

SEQ ID NO: 926 - DNA, 660 bp, Aspergillus oryzae
cgaggaacccaactgtcttccctctagatattctttccggcttccattacaccttcttaatccggaaccctcgacagagtatccccagtctctaccaatgctctatcccaccgaagtcccacatcaccgggtggaacgggttcaaagcgaccgatgcgggctacgcggastacgtattctgtttgactatcttgtgcaggttcagatcattggtcccggaaccgggaacgatatctgcattgttgatgccgatgatctcttggcggatcccgaggggatcgttgaagagtactgctgttctgttgggatcccttacgaccctcggtccttgcactggggagcagaaaaagatcaacagcgagctcgtgatatcttccagaactggatcccgttccatgatgcagcactgaagagtacttcactcaatccccagcctccgcgagttacaacccttgaagatgacattgccgaatggaccgagaagtttggggccgaggccgccatgctcatccaccagaatgtcgaggacaatatggaagactacctgtacctgaaacaattcgccatcaaaacctgatcagtaaagattcctcctgttagccagatacatacacgatgacaagtcaagctctttccaatcaatcaacctaacaccttcac

SEQ ID NO: 927 - DNA, 479 bp, Aspergillus oryzae
  modified_base (25)..(25): n is a, c, g, or t
  modified_base (28)..(28): n is a, c, g, or t
  modified_base (55)..(55): n is a, c, g, or t
  modified_base (59)..(59): n is a, c, g, or t
  modified_base (62)..(62): n is a, c, g, or t
  modified_base (73)..(73): n is a, c, g, or t
  modified_base (81)..(81): n is a, c, g, or t
  modified_base (83)..(83): n is a, c, g, or t
  modified_base (86)..(86): n is a, c, g, or t
  modified_base (92)..(92): n is a, c, g, or t
  modified_base (97)..(97): n is a, c, g, or t
  modified_base (112)..(112): n is a, c, g, or t
  modified_base (118)..(118): n is a, c, g, or t
  modified_base (130)..(130): n is a, c, g, or t
  modified_base (139)..(139): n is a, c, g, or t
  modified_base (141)..(141): n is a, c, g, or t
  modified_base (144)..(144): n is a, c, g, or t
  modified_base (148)..(148): n is a, c, g, or t
  modified_base (151)..(151): n is a, c, g, or t
  modified_base (163)..(163): n is a, c, g, or t
  modified_base (168)..(168): n is a, c, g, or t
  modified_base (172)..(172): n is a, c, g, or t
  modified_base (213)..(213): n is a, c, g, or t
  modified_base (237)..(237): n is a, c, g, or t
  modified_base (249)..(249): n is a, c, g, or t
  modified_base (269)..(269): n is a, c, g, or t
  modified_base (311)..(311): n is a, c, g, or t
  modified_base (475)..(475): n is a, c, g, or t
ttccttcttcttcctctttcctctnatngactcccatctcagcctctttgttctnactnctnaccaggacttncatgaatngnctnaaactngtttnattcgggcgggcctnggcatnggcacaccaccngacgagatntnccngttnctnggttcgagaaknacggngctngtcgaagaagctatcgtcgttaaaggatcgtgacacttggncgcaktcgcggatttcggattcgnccgcttcagctnctgaggttgacgccgaagcngcggcgcatgaaatgaacaaccaggattttgacggccgtaynatccgcktcgacaaagccatttaacgagcccctcgcaacgwtggcggcttccaatgccgtggcgggtacaaccagcgcggaggaaacgktggaggtaacggaggatakgggggcggwtytcgtggaggwtakggtgacggcgattggcgcagaagcgtatgtgnaatc

SEQ ID NO: 928 - DNA, 604 bp, Aspergillus oryzae
  modified_base (299)..(299): n is a, c, g, or t
  modified_base (312)..(312): n is a, c, g, or t
  modified_base (333)..(333): n is a, c, g, or t
  modified_base (371)..(371): n is a, c, g, or t
  modified_base (376)..(376): n is a, c, g, or t
  modified_base (387)..(387): n is a, c, g, or t
  modified_base (401)..(401): n is a, c, g, or t
ttaaaagagaaggtggacaacttgagatacgaggttgacgagtggaagaccaagtacaagcagtccaaatcagaagccaataccgctcagaataccctgcagaaggaaataacaacactacgagatgccaaccggaccctacagttaaaattacgtgacatcgaagtcgcgaacgatgactatgagcgccaggcccgtcatacgacttcatccctggaggatttggagtcgaaatacaacatggccattgagagaagcgtattgctagaagaggagatcaaatcggagaaaaggaacgngagaatctgcgcnttgagaaccagcatcttcgtnctgaattgtctgagctgaaggtcgaaagcgagattgtncaggngagactccggntatgcggaatcccncggtggccgamgcargaagccarcwcccttgcaccgcactccatccacamcaaaaaatccggaaattttcgaccgttctccaggaccgtcgamtgtttaawctcctatatttgctacaccacctatgaaracgtcamtaawagctgcgaatgcaaccccgccgtcgccgccgatatccgratcatccaccaatatgcgcaaat

SEQ ID NO: 929 - DNA, 559 bp, Aspergillus oryzae
  modified_base (58)..(58): n is a, c, g, or t
  modified_base (60)..(60): n is a, c, g, or t
  modified_base (212)..(212): n is a, c, g, or t
  modified_base (232)..(232): n is a, c, g, or t
  modified_base (239)..(239): n is a, c, g, or t
  modified_base (246)..(246): n is a, c, g, or t
  modified_base (271)..(271): n is a, c, g, or t
  modified_base (297)..(297): n is a, c, g, or t
  modified_base (302)..(302): n is a, c, g, or t
  modified_base (364)..(364): n is a, c, g, or t
  modified_base (389)..(389): n is a, c, g, or t
  modified_base (396)..(396): n is a, c, g, or t
  modified_base (408)..(408): n is a, c, g, or t
  modified_base (430)..(430): n is a, c, g, or t
  modified_base (451)..(451): n is a, c, g, or t
ccatattacaagatgatgctcagagaagtaaaacctaagaatccgcgcacgcgcgcananttctcaaggcaaaagaaccccagctcattgaaggagccaagcgcacactgttactgcacggttcgaaatgcccgacaccgctccacacggtccttaaaactctccactccctgacccggccaaactcgatcctgttccacaagaagaatganaatatccacccgttcgaganttcaganagccttnagttcttggccgacaagaacgactnccgtatggtggtgttcggcagcagtnataanaagaggccgaattgcgtwamttatcgctcgggttttcaatgccaagctgctcgatatgtgtnaattaatgttgcttcccagtccggntggagancagattccttcnatgaacaaccttaccatgaatnttggaatggattacggccgcngttgcttttctccggaaccccctgggatgatcctacgtcgtcggcgcatgttatgctgaagagcatgtttatggatatgttcaagggcgaaactaccgataagatttt

SEQ ID NO: 930 - DNA, 759 bp, Aspergillus oryzae
  modified_base (29)..(29): n is a, c, g, or t
  modified_base (349)..(349): n is a, c, g, or t
  modified_base (360)..(360): n is a, c, g, or t
  modified_base (408)..(408): n is a, c, g, or t
  modified_base (421)..(421): n is a, c, g, or t
  modified_base (427)..(427): n is a, c, g, or t
  modified_base (488)..(488): n is a, c, g, or t
  modified_base (507)..(507): n is a, c, g, or t
  modified_base (543)..(543): n is a, c, g, or t
  modified_base (550)..(550): n is a, c, g, or t
  modified_base (577)..(577): n is a, c, g, or t
  modified_base (580)..(580): n is a, c, g, or t
ccataacttgaacgaaacgacagacagtnatttctcccgaggtgcattgttattctttgcgatcttgttgaatgctttcgccagcgccctcgagatgcttactctatggcaacaacggccaatcgtcgaaaaacacgataaatatgcgctttaccacccatcagccgaagcaattagctccctgattgttgatctcccggctaaggcaccggtctccatagtatttaatttgattctttactttatgacgaacttgcgtcggacacccgggcatttctttgtattctatctgttctccgtgacaacaacattaactatgtccaacgtgttccgctggatagctgcagtntctcggtcgtnggcgcaagcagaagtacctgcttcaatcttcatgatgatactgatganctacacgggcttnactatnccggtccgggatatgcacccttggtttcgatggctcaattacatcaatccaatcgcatatncctttgaatccctcatgancaatgaattcgccggccgcaaattccattgtgcgangtacgtnccgtccggtccaggatatgacaatgcnccnctcgactcaaagatttgttccggaaagggtgccgtggcaggccaggattatatagacggtgatcgctatctcgaggtggccttcgaatactatccctcgcacctatggcgtaactttggcatccttctggggttcctgttcttttcgctggtggcctacattgtcgccagttagcctgt

SEQ ID NO: 931 - DNA, 778 bp, Aspergillus oryzae
  modified_base (109)..(109): n is a, c, g, or t
  modified_base (145)..(145): n is a, c, g, or t
  modified_base (172)..(172): n is a, c, g, or t
  modified_base (391)..(391): n is a, c, g, or t
  modified_base (417)..(417): n is a, c, g, or t
  modified_base (419)..(419): n is a, c, g, or t
  modified_base (421)..(421): n is a, c, g, or t
  modified_base (435)..(435): n is a, c, g, or t
  modified_base (495)..(495): n is a, c, g, or t
caacttcactccacattgttagacatctgagagcctagtctgctagggctgctttacatttccaccttcggttcctacaagatgcttgatatcgctgatttcgtcagtnaccgtggtggaaacccaaacaaggtcaaggagagtnagcggaaacgattcgctccagagagtntcgtcgatgaaattcttacactatatgaggaagcccgccgagcacggtacgaggtcatgcagataggctctcagctcaacggacttcaaaaagaaattggaaagaaaaaaaagaacaaggaagaygccagttcccttcttgaagagaaagctgcgcttgaacaacgcaagatagatgccgaagacctagctcttcaaaaggaaaagcaaagagacagcnaacttcgaacaattggtaattatgtncntnactcggtccctgtnagccataacgaagacgakaatgtagtggttaagacatgggtrcccgagaatgtyactgtngagaagcgcgactgcctttctcatcawgaagttctcactcgccttgacggctacgaccccgaacgtggtgttaagattgtyggccaccgtggatactgcktgactggktatgggcttttcttgaattttgcgcaaatcaactacggcctggaattcctttggggraagggttacaagccgaaccagccgcctcaattcatgtdgaaggacawgatggcaaaaacagcccagcttgagcaatttgacgaggacttatataaggdaacagaaagtgagggcaagt

SEQ ID NO: 932 - DNA, 734 bp, Aspergillus oryzae
atcgcggtctgcttctagaccgaactcctttatagcctccaactccggctacaaccttgctactggtgctgtcgctgaacccccggtcacgcagaacggtaaatttcatgaggagttcgatgtcgccagccaacgtggttccgtcgtcttcgagggcccgtcatccgccgccgtacagcgttccgcatctcagatgtccaactcccgctccgcgacacccacgcgatccggtactttgaaaaagaagtcctccctcagcaagagaggcagtatgcgacgcagcgggagtaagaagagcctgcgcgcgggaagtgtgaggagtctagtcctaggcgataaggagaagtatagcgtcgacggcgccgaagatcagaacagcgcattctacatccctgttcctacgaatggaaacccgacggaagttttagcagatcgctttcaagcttggcgtaaggtcctaaaggatctcattgtgttctttaaagaactccagaaatcctacgaaactcgatccaaactattcatgtcggcatcgaatataatcaacaattcagcgttacctcccacttttctcaaatccggcggccttgctgatgcgaccgatattctgcgtaatttccataaacaggcatatcaggaagcgagcaaggctgctgaggtggaaaacgagttggtcgctcagctaatgggactccgaaacgacctgcaaaagaaaaccaaggagatcaggagtc

SEQ ID NO: 933 - DNA, 763 bp, Aspergillus oryzae
  modified_base (415)..(415): n is a, c, g, or t
  modified_base (439)..(439): n is a, c, g, or t
aattcgcgcacgaggcggaagtgaaccgctcactggatattgatctcgaggcccggcgcttgagacagttgacgccactcttgtctcgtcgctcatgcaaataccttcatcttaggatagcacctctctcgacaactcgagtatcgatgaaatgctcttccaagcagagatgatcacctacctagcacttatatatcttcaccaccctcgttcgagtatgcgctttgcttctttccacgctcgcacgtggtgcacccggctccgaatttgcaacaacaacccgccgcctacagagctggacctgcattcgcaaaagttcctgcgtgcggcggatatgttatccaacctcgtcactctgccgagtacaatcaagtccaggactcctttctttacatgtgccctcgcaatgtgtgtnattgtacacacggcagcgtgcctnatcatgtcgacccctgacaaggtcgagtcgctcaaggcacgaatacaattgagcatcgggggtctgaatatgctgggcaagtcctggccgctggcaaagatggtgagacagcagatggtgaatatgtatcaagaggtcggactgcgctgaatgtcgctgtctcttctgcgaaatattcctgagtyactctttcgcctacgggggacggctgatcgcctttcatggcaccttcaaagtatacgtctaattaatcgccggattgtaaaaggcgtaatgatgccgagcctggagcgcgggagatatcctgaaggtcgtcgaggttga

SEQ ID NO: 934 - DNA, 320 bp, Aspergillus oryzae
  modified_base (73)..(73): n is a, c, g, or t
  modified_base (224)..(224): n is a, c, g, or t
  modified_base (283)..(283): n is a, c, g, or t
cttccttggccaaattgctcacaatcgcagaaaatggccttcgagacaactccaacagctcggttttgatgtntcagggaatgcgatgggcgtcttgttccctcatcatttgggtcactacgtaggactggacgtccatgattgccccggttattctcgagggtataatttgaaggcgggacaatgcattactgtggagcccggtatctacgtcccggacagtnaccgatggccggaaaagttccggggcattggaatccgtattgaagaaagcgtgtgcctnggggacgacagtctattgtgtgaactaccgaggcagt

SEQ ID NO: 935 - DNA, 870 bp, Aspergillus oryzae
aattcggcacgaggctttggggccgatagcaccagcaagcctgtttttttttacgagttagttcgctggggattgctgattgtcatttacccactcagcaaaaatgtctgcaactcagttactcaatcccaaggccgagtcgaggcggagggcggaagcttgaaggtcaacattagtgctggtgaaggtctccaggatgttcttaaatctaacctgggcccctccgggacattgaagatgttggtggacggtgccggcggaatcaaattgactaaggatggaaatgtgctattgcgagagatgcaaatccaaaatcccaccgccgtcatgattgcccgggctgcgacagcacaggatgatatcactggtgatggaacaacttctgtggtgttgttggtgggagaacttctgaagcaggcagaccgttatatttccgaagattgcaccctagagtaatcacagatggatatgagatcgcgaagaacgaggctcttaagttcctcgatcaattcaagatcgagcgtgcaatcgaccgtgagctgttgctgtctgtcgctcggacttcgctcagtacgaaactgaacagtgcacttgccgagaagcttacccccgacattgtcgatgccgttctcgctatccacagagctcccgagaagccagatctgcacatggttgaaatcatgaccatgcaacaccgcacatcttccgacactcaactcatccgtggtcttgccctggatcacggtgcaaggcatcctgatatgcctaagagggttgaaaatgctttcatcctcaccttgaacgtcagtctgggagtatgagaagtcagagatcaactccggtttctactactcttctgctgaacaaaga

SEQ ID NO: 936 - DNA, 564 bp, Aspergillus oryzae
tcagcaaactactaagcctgctttgtccgccaacagagggcagacatctgcctgcattgatcttcccccttctgtctttattaatccttcggttgaaacatgtcgaatatgatctcgtccacctttgctccaaccttgactcgtagaaccaccggcaagtcgagcataggccccgagaccacacttggttctcttcccccaccgccaaccaccccaggggggggctcattcccgcgccacacgacgccscccccatctaccagcatattcctgacatggctacgaagcgaatatcaacttctggcattacttgacgcaagcacacgaacgccgcccttactggttcaatactgtacaattttctcgggctgatatcggccgaattccttacttcgaagcccgcaagctttctcgccgtgcgataaattaccttctcttgggcttatcacttccgccaattctagacgtcagcycgactcctgtggaatatctgcgggcactcaatgcacttttgattgaatccgaagcatttcascaagtgcaccctcctgatggaagctcctc

SEQ ID NO: 937 - DNA, 909 bp, Aspergillus oryzae
  modified_base (85)..(85): n is a, c, g, or t
  modified_base (125)..(125): n is a, c, g, or t
taattcggcacgaggcccctgtctagtttcttaattgtcctacatatcccgtcctgctggggcagacagaaaaggacaatagccnccatgattgccgagctcctgacgcccactggcgcacgtantgtgctgaccgccgccgtaatcgtctactatatcctgccgtacctgcagctatggcgcttacgcgatatcccgtcgcccggtttcgccgccttctctaacctgtggctgatgctgcagtaccggaagggcaaccgcttcgtcaccgtcgacaacgctcataagaaatatggcaaactcgtgcgcattgcacccagacatgtctccattgccgacgacgaggctattcaggcgatctacggacacggaaatggtttccttaaggctgacttctacgatgccttcgtctccatccgccgcggtctcttcaacactcgcgaccgtgccgaacacactcgtaagcgcaagaccgtcagccacaccttctccatgaaatccatcggtcaattcgaacaatacatccacggcaatgctgagctcttcgtgaaacaatggaaccgtatcgccgatacccaaagtaaccccaagaccggctatgcgaccatcgacgccctgaactggttcaactacctcgccttcgatatcatcggtgacctcgccttcgggcccccttcggcatgctcgagaagggccaggatatcgctgaaatgcgcaagagcccgaacgacaagcccagctatgtgcaggccgttgaggtcctgaaccgccgtggtgaagtttctgctaccctgggtgcctgtcccagtctcattccctgggcaaaatatatccccgatcgcttcttcagagatggactcgaggctgtggagaatctggctggtattgcagttgcgcgggtgaatgaac

SEQ ID NO: 938 - DNA, 781 bp, Aspergillus oryzae
  modified_base (3)..(3): n is a, c, g, or t
  modified_base (54)..(54): n is a, c, g, or t
aantgcctagctatggtcccgtactgtgcaagcttggtatcctcattttcggbnaattttacgtccttccctcggcagctgctcctagctggcggtggatgggatggtaaaggcatcagtcccgaggcccatcagagtcttacaacattcacacgtgggctcgaggcattcctcggaacgaaccataccaatgtcgacgtgtcgcagcgatggcttgacacacaatctcccaccacaccaagcctggaggagatgcttaacctaacctatgccacacttacttctgtggatcagttcaaccacctagccgtccctctctttgctaactataaagcagtacaccgcggtcgtcagcctttcattaaccctggcccattagcgcgttggcagtggggccaggccaatggcggaaacacctcgtacgaggtggtctctgcgcaacatgactactttccggagctggtgggagaagtccggatatggtcagtccgatgatgcctcctgctccaagtcgctctttgttagtgtgtactcggtcggcacaactgactaccgtaaccaatactacgatgcgcccaccacaccaccactgggattctcgatcggacgcatcgcggtattaggtggcgcacctsaggttgttgttcctgttggagagtctccatacaacagttctatctcgttgcagaccgagtatttgccggtcagtgttgcgctgcaaatggcgcgaggatgtgaccatgttctggcttccttggtcgctggcctcgagaagaagggg

SEQ ID NO: 939 - DNA, 860 bp, Aspergillus oryzae
  modified_base (237)..(237): n is a, c, g, or t
  modified_base (239)..(239): n is a, c, g, or t
aattcggacgaggagcagaaccgtgctctattcctcatagtataatcattcgttggtattgagcgcagttgtatcatcatggcttcagcgcgcggtccgagatggcagcaattcttacaggaattggtgatggttgccggcacttcggcatctgcctacttcctcattcgatacctcctatctcgtcttgatttcgacccggaaagccaaaagaaagaagagcaacgacgtaagtgncntgctattctacggagactcgatggaggagaagagtctgatgaagattcaccacgtagagaaggcaagcggggacggagacaaaagcgtggagaccttgccctgacccaatacgaacaagcgatcgcaatggatgttgttgccccagacgacattcccgtatcattcgaggatattggcggcttggatgagatcattgaggagctgaaagagtctgttatctacccactaaccatgcctcatctctattcatctacgtcttcactacttacagccccgtcgggtgttctgctgtatggtcctcctgggtgcggaaagactatgcttgccaaagcgcttgctcatgagagtggagcatgtttcattaacctacacatatcaactctgacggagaagtggtacggtgattcgaataagttggtcaatgcagtcttctccctagccaggaagctgcagccttccattgtcttcattgacgagatagacgctgtccttggcactaggcggagtggggaacacgaggcaagtggtatggttaaggcagaattcatgacccattgggatggccttacctccgcgaactcgtcgggtgaaccccagcgggttgttgttatgggtgcaac

SEQ ID NO: 940 - DNA, 351 bp, Aspergillus oryzae
  modified_base (36)..(36): n is a, c, g, or t
  modified_base (76)..(76): n is a, c, g, or t
  modified_base (107)..(107): n is a, c, g, or t
  modified_base (126)..(126): n is a, c, g, or t
  modified_base (132)..(132): n is a, c, g, or t
  modified_base (142)..(142): n is a, c, g, or t
  modified_base (148)..(148): n is a, c, g, or t
  modified_base (184)..(184): n is a, c, g, or t
  modified_base (188)..(188): n is a, c, g, or t
  modified_base (201)..(201): n is a, c, g, or t
  modified_base (224)..(224): n is a, c, g, or t
  modified_base (272)..(272): n is a, c, g, or t
  modified_base (299)..(299): n is a, c, g, or t
  modified_base (323)..(323): n is a, c, g, or t
  modified_base (336)..(336): n is a, c, g, or t
aattcggcacagggctctcgcccagcgacgactgcnaggtgtacgtgccaacttctctgacggcatcaaagtagcncgggagaattagagggacccggaatggacanaaaaacgagtwwrttcgtngaaggnaaaagctgangctgtncattccgacgaataccgacggcgcgacgaagaagtntacntatgacgacgatnactgaacttgttgcaggggaaanttggtcatgtccaccttttgtttactttcttcttcgtacttggctatnggggggataatttgttttaatgcggtnacgacttttcgcgaaaattgcttncagaacttgggtnaggtttgtttgctta

SEQ ID NO: 941 - DNA, 771 bp, Aspergillus oryzae
  modified_base (109)..(109): n is a, c, g, or t
  modified_base (328)..(328): n is a, c, g, or t
  modified_base (386)..(386): n is a, c, g, or t
gggatctcaggtactcacgaaaactcagcttcattgagctcgacagcggataatagtctgccggctatggaghgaagactcgagacacgcttacttcatgaagcaagcnttgttgatgggagadaaagctcttgagaaagwtdaaactccggttggatgtgtcttagtgtatgacaaccaaatagtcagttctggaatgaacgacacaaacaggtcgatgaatggtacaagacatgcagagtttattgctctcgagcggatgctcaggaattatcccaagtccttacttcgttcaacaaaactctatgtcacggtcgaaccatgcgtnatgtgtgcttctgctttgagacagttccgaatacaggctgtgtattttggctgcagtnatgaacgttttggaggcacgggaagcattctctcactacacaccgatttctcaatagacccaccttacccagtctatggtgggttgttcagtaaagaagccgtaatgctacttcgaaggttttatattcaagagaacgagaaagcacccaagcctcgccccaagaaaaacagagagctaaatacaagatttgaggatgacgcctgagggctacaactttaaggccttaagaggcaacaggactcggaaggccatcgaaatcactatggggatgccaccggcactgtggaaaaacctatcactaccatgtggtttagaggtaaaatgagaaagttctcgtatgcctatgttatccacatcaaacctaaaagaataaatataccaga

SEQ ID NO: 942 - DNA, 547 bp, Aspergillus oryzae
  modified_base (221)..(221): n is a, c, g, or t
aacatcctagtctctccgagcaagcagtacgaaagctcacttatctttctctaggcaagaataaaggaaacttagacccagtgtccccattagggtgttgctcaaccggtgcctgagtgttagctactgcgggcttcccattatgttcagctctaattactacgaggatgatccgatggatggcgtcttcagctcctccatgctccgccatggaggagcancccgccgtttcgacgagtattaccgctgttaccccgtcgccatgatgcctggccctgagagagagaacgtcaaccacggcggtaaagtcatcatgccacccagtgcgttggacaagttaactcggctacatatcacatatcctatgctcttcgaactgcataatggtgcacgagaaaggttgactcacgcgggtgtattggagtttatcgctgaagaggggaaaatttatttgcctttttggctcatgcagaccctcctcctcgaaccaggcgaccyagtacaggtcaaatcgaccgatcttcctccgggccagttcatcaagctt

SEQ ID NO: 943 - DNA, 825 bp, Aspergillus oryzae
caaggaatatgacatcaaggdbagcaatgtggagctgatcggatccgatcttgaccaccgcgtcaagtataattcggcagccacggagccggcctggaacaacggtcagatcggacaggaggccgggctgtggatctggcggattgagaacttcgaagtggtgccctggcccaagaaccgggccggcgagttctacgacggggacagttacatcgtgctgcactcctacaaagtcggcgatgaaaaattgggccacgatatctttttctggctcggcagcaaaacaacccaagacgaggcgggcactgcggcgtacaagaccgttgagctggatgaattcctgcacggagcggctacccagcatcgtgaaattcagcaacagccatcggaggatttcgtgtctctgttccgtcgcatcaccatccggtccggtggtgtggcttcaggatttaaccacgtggaggaagaggaacccaaggaggtgacgactttgcttcgtgttttcaagcacccaggcgccggccggattgactcgatcattgtctacgaggtggaacctacttggcagagcctcgacgacaaagatgtctttgtcttggacaagggcgacaagatctgggtttggcaggggaagacctgcagccccatggaaaaggccaaggccgctcaastygtgaacgacatgacgctggcgaaacacgtcgatgtggaggttttatctcaactggagtcgcggtcaaagatcttcgtcgacctgttaggcggcaaggaggtggaccagctgtctttccaggctccacgtcctgtgtcattctccaagcgatc

SEQ ID NO: 944 - DNA, 502 bp, Aspergillus oryzae
  modified_base (53)..(53): n is a, c, g, or t
  modified_base (240)..(240): n is a, c, g, or t
  modified_base (434)..(434): n is a, c, g, or t
  modified_base (447)..(447): n is a, c, g, or t
tcacgccagcagatcccgaggcaagacgggctcaactcagtgtactactgagncctggcttgttgcagaacgtctcccagaaattgcaagaagggggtatagtttgcgacaagagagacccgggtgtcgtccgcgttgcccctactccactgtacaacactttcaccgacgtatggaagttcgtgagtaatttcaaggctgcactggacgaaccagaactgaagaattgaattgtgcctngatataaccacaaaatcagtgacagtgtggtgaaggtcacgtaccccacagcaaaggctagtccgaaatgcgcgccagagtttgctgagatatgacgagcacggagcacgatgtggtgatatcaacatcaacctccgccagtagtatttggtctcttggccgccttctgcttgcctgttcccaagtcaactgtnatataagagagcnattaggctatataacgaccaaacataatgaatgaatgcataagacagacaactga

SEQ ID NO: 945 - DNA, 455 bp, Aspergillus oryzae
  modified_base (201)..(201): n is a, c, g, or t
  modified_base (321)..(321): n is a, c, g, or t
  modified_base (363)..(363): n is a, c, g, or t
  modified_base (380)..(380): n is a, c, g, or t
  modified_base (386)..(388): n is a, c, g, or t
  modified_base (390)..(390): n is a, c, g, or t
  modified_base (421)..(421): n is a, c, g, or t
  modified_base (425)..(425): n is a, c, g, or t
  modified_base (429)..(429): n is a, c, g, or t
  modified_base (435)..(435): n is a, c, g, or t
  modified_base (449)..(449): n is a, c, g, or t
gagaactttaatgtggaaggtcgtggcagccttcagagccggaagtcacttggatatatccccatccatgattccaacaccactgccaagggacttcgcactcgcagtatatcaagaaccgttgaatatgcatatgatgacttctgtattgcacagatggcaaagtccatgggccatgatggcgactataaaaagtatatnaagcgtgccaccaactgggaaaatgttttcaagcctaaccagacatcttcttggcgtggttctaatttcaccggatttcttcagccccgaaatgcggatggtacttgggcatatcagganccgatgttctgcggcccatacctgcaacccgatgcgtgcctnatggatgagaatgcganggagannnangcasgcscagccgccyggctttatacattcnacgncccncagganatggccaagttgantagggc

SEQ ID NO: 946 - DNA, 741 bp, Aspergillus oryzae
aattcggcacgagggtcagaggcagaaaacacaaaagactactatttccaccttcatgctctttgagtttagactccgaacttattcgatcggtttccagccaaaatgaggtttctttgtctacatggcattggaagtaattcccagacgtttgaacagcaaacagcggccattcgatacgagcttggcacccaacatacctatgattttgtcgaaggggcactgccctgggagthgtccatcaaaaatgtcaccaaaacggatgaggcaacattcacattttgtgaccctgaacagccgcattcatgccgacaggtgctcgcgacaatgagggatacatcaatgaggagggccctttcgacggaattattgggttcagcttgggagcaaccatggcactttcgtggttggtgaattggtatcagaccaagcaggcgaatgggtctgaggttgcgccatttaaagtggctgtctttttctcaaatgccagacagccattcgatcacgatgcacttgcgatggaccgcattgcatatttggattctgtccaaatgggtaaagtgattbacakacctactgcccatatctggggatcggcggacccacaggctgaagaagcacaacgagctgtgaacttttgtgattcggaaagaagatccatcttcgtgcatgaaaaaggccatgaaattcctagttcagtggaggacacagtatccatagcgaaagtgatccatcgggcca

SEQ ID NO: 947 - DNA, 890 bp, Aspergillus oryzae
  modified_base (416)..(416): n is a, c, g, or t
gaggccccgaatccgatgttgggttctctcctacttcttgcccccttggcgggagctgccgtgattgggtcacgagcggacacccagcagtgccctggatacaaggcatccaatgtccaggaaaatgatcggtctttgacggccgacttgaccctcgcaggaaaaccctgcaacacctatggcaccgatctgcataacctcaagcttctggtagaataccaaactgatgagcgtcttcatgttaagatatatgacgccgaagaacgtgtataccaggtacctgaaaaggtgacccctcgagtagacagtggcgatggttctagtaaagactccgcacttaaatttgaatacgaggaagagcccttttcgtttaccgtgaaaagagatgatgaagtattgttcgacagctctgcggnagaaccttatctttcagtcacaatatctgaagcttcgtacctggctcccggagaacccatatttgtatggtctaggagagcataccgaccccttacgcctttctactaccaactacacacgtaccttctggaatcgtgacgcctatggtacttctgcaaatagcaatttgtatggcactcatcctgtgtactacgaccatcgcggtgaatccggaactcacggtgttttcttgctgaactccaatggaatggacgttttcattgacaagacggcagacggcaagcaataccttgagtataacgctctgggtggcatttttgacttttacttcttcactggctcgaatccaaaagaggccagtatagagtattctaagatcgtcggccttcctgctatgcagagttactggacttttggattgcatcaatgccgatacggctaccgtgatgtctatcaggttgcggaagtagtct

SEQ ID NO: 948 - DNA, 784 bp, Aspergillus oryzae
  modified_base (155)..(155): n is a, c, g, or t
  modified_base (507)..(507): n is a, c, g, or t
  modified_base (520)..(520): n is a, c, g, or t
atttcgttatttttattacttcggccttcttaatactccagactcgcactctttcgtcgacccatctcggtcgggggcaaggtttccgttgctattgttgtcatgagctgctgatattctgtcattgacgttcgatcgcaagctttgacaaccanataactgaaacgctgtcgcactcgctacggtttttccttcgcctgcctgcttcagactcttttaacgatttcttgcgaacacctgatctaccttcaggagcacctatcccaccccacccgccaattattgaagttgaacacatcggaacaagcctttggcctagtatcctgatttccttgccagttcttccctttctccgtttctcacgtgggtttaagtttcagcgccatgtttttcctcaaggaagagaccaaggtcatcacgttgcatccgtcctattttgggcctaatgtgcgagaatatcttataaaccggctaaacgaggaggaggaaggacggtgtacgggagancacttcgtgattngtgtgatggacatggtagatattggagaaggtcgggttctacctagcagcgggcaagcsgagtacacaattaaataccgagctattatttggaagccgttccgtggagagaccgtcgatgccatcgttacgtctgttaagcccaccggaatcttcacattggcgggtccgctatcagttttcattgcgcgcaaaaacattccttccgacatcaagtgggaaccaaatacagtgcctcctcaatacacagatcacgcggaccagg

SEQ ID NO: 949 - DNA, 627 bp, Aspergillus oryzae
  modified_base (383)..(383): n is a, c, g, or t
aattcggcacgagggggacaccgctctgctgtttatccggaaactcaagctcctcgcccgtaccaaattcatcatcctcgtcctcctcttcgtcagagctctcctcttccgaggatgaagacgaaaagcctccatcacgcgcaggatcgtaagtgccactggccttatcggccttcctcagttctttgaggacttcatcatcgtvagcgacgctcatgtgtccctcatcttcctcgtccccctcaagccggtagaatctctccaactgcttcttcgtatcatcgcgggcgagcttccgtccgtatcggtcgactgcggcattccgagagaagtccttgtcgtgcagcatgtgcgcgaaacgcttgttgagtttcacatgtgtntgccgtttactgggtagacgataacgaggatctgtttggatattggcgaaacgaggatcggctattatttaaaggcagaattgttagttatagctatttcggcatggaagagacaaggagcgcatactaatgacagagtcggcttgctgtttggcgccgccgctctttttgcttttcttttggtctggcattgtgatggtatgttataagataagaaaacaaatgaaaaggttatcaggaggtt

SEQ ID NO: 950 - DNA, 704 bp, Aspergillus oryzae
  modified_base (200)..(200): n is a, c, g, or t
cgaaggtaactggactaagatccaagcctttgtgatctaccccgagaacttcgacaagagcaagtyctaccctcttctctataatattcacggtggacctcagagctcgtggctcgactcctggagcacccgctggaaccccaaggtcttcgccgaccagggatacgtagtcgtcgcacccaacccaaccggaagcagtngcttcggcgatgccctccaggacgccatccaaaaccaatggggaggctacccctacgaagacctcgtcaaaggctgggaatacgtcaacgagaacttcgacttcattgacaccgacaacggtgtcgccgccggtgccagctacggtggcttcatgacgcrccctcgcgcgctcccaggcagcaatctggagaccgcaagttcaaggccctggtcagccacgacggcacattcgtcgcagatgctaaggtctcaaccgaagaactgtggttcatgcaacacgagttcaacggcacattctgggataaccgcgaaaactaccgtcgctgggacccctctgcccccgaacggatcctcaaattcagcacccccatgctcatcatccacagcgatctggactaccgtctccccgtctcagagggtctttctctcttcaacatcctccaggaacgcggtgtccctagtcgattccttaacttccccgatgagaaccactgggtccaaaa

SEQ ID NO: 951 - DNA, 729 bp, Aspergillus oryzae
gacgaacaaaatcacaatgcaagtccttctcctcggcggccacggcaaagttgccctccatttaaccccacttcttctcaaccgtggctggaatgtcaccagcgtgatccgcaatccagagcatgagaatgagattctcgcgcgaggcaaaggcacaaagggcaaactgaacatcctcctttccagtctagatgacatcaagagtgatgaagacgcaaagaagatcatcgacactgtgtctccggattatgtagtatggtcagccggtgccggcggtaaaggtggccccgaacggacgtttgccattgacgaacgcgccgcaaaacacttcatctctgcgtcgtttgcttccccccgtgtgaccaaattcctcctcgtctcgctggcttggtagtcggcgggtccggcctagctggatgtctgatgagggctgggaggctatccagaacgtattctacaatgttctccccgcgtatgcaaagcgaagtgcaaggcggacgagtacctgactgcgtttgcggctcggcgtaasmgagccagggcctcgcccttccaggccatttgtctgcgtccaggtactctgactgatgagccggcccccggaaaggtgcagtttggtaagacggaagggcgaggcaatgtgaccagggaggatgtggctattgtggcggatcggttgcttgctcgttctgatacaaacggttggtatgatttgatcaacggcgatga

SEQ ID NO: 952 - DNA, 848 bp, Aspergillus oryzae
acgagggccactggtaaagactccatattccacaacccggtgagccatgtatggaaaagtttatccggacctgatcttgggtgaactttgctggtcggagacatatcatcgtgtcgctcttcttacaatccatgagacgtctttgatccatccagttcacagctaagcaatatgctgcggagtcatccagctgggcgctggcatgccttccgacaagcgtgtgctccaaaatgtcgcccttattcgggcctccatcagcttcaaccccataatccaccaccatggagacctgtctctgctttggatgagtgggtcgaacgcgacatccgacctataagtttacggcaattgaccttttttgggcggactttaacagaatctcgacttatcagttcggctaattatgtgcgaacggagcttccaactaggcttgcccatcgcctgcgagatattcaaagactgccatacgttgtcgtagcaaaccctcatctgtctctcgtatatgagctctactataaagcctttgaacgatttcgaacgattccggagattaaaacactcgatgacaacgataagttttgcgatatcctacgaaagacactgcaggaacacctcgtggtcattccaaggttggcaatgggtgttttggagtgccgtgcttygctaccggcggacgtgctggatcaatttatgaacactttgcttcgcgcgagaatctcccgccgagtcatagcggacaaacacctggcgttaacggaaactttcaactccccttggcactttcctggctcccaggatcgcacggatgttaatgcggactacgttggggaagtcttcctgaagtgcaa

SEQ ID NO: 953 - DNA, 812 bp, Aspergillus oryzae
  modified_base (232)..(232): n is a, c, g, or t
aattcggcacgaggctttatgaaaactatcgtaccgagaagctcagtaagagcgttgacggtgccactcctacccaagattcgtcgatgaacccagaagacctagcatcccagtccgtccgcctgaaggaggaacaactccgtcgtgaggaggagaaactccgcgagatcgaactccgggtgcagcgtgagattgctgagaagcgccaggaattgttggctcgtgagacagnctgagggagatcgaggctcgtatggcacgcgagttcagcagccaggacgtcgccaatggtgatgcttaattcaaacttgtcaaagactagtcttacgttgcgcgtttggcaccaaccgtgtcgacgtaatggaatttatggcgcggcggttgtactcaatggggttaatattgattttcttattcacgttaataacttcgtttgaaagggagggaagggaaaatgcaacgctccgttaatcgcgatgactggcgccattcttccctttcctacaaagagggattcggacaagagacgacgaaaattgctgcagttccccacctacttttccagctctcattgatttcttctctgtcttcatccattcggctggggccttgcctcgtttcgcagcccgtgtttgtgatgctcggggtcaaagatagcatcttttaatcgttgacagttgtcactggatcacctgcataacttccttccttttgccatcttatatatttctcttttttatctcttccaccctttgtttctttttgactcttatcatcaatgacacctgtcccaatctcagcagcgcacaaga

SEQ ID NO: 954 - DNA, 583 bp, Aspergillus oryzae
gaacgcgccaaaaggrtaaccataccgycgttggatgggccgcctgggctggaatcctagccgttctgtggattggggcatttatcattgccgaagtgattccattcttttccgatctgctttcgatcatgagcgcactgtttgattcatttttcgggttcatcttctggggtgtcgcctacctccggatgcgtcgtgaagactacggaccgaatttctacaagaatcggggaatccggggctggattggctttattgtcaatgtcggcttgattttcgtcggccttttcttcctagcssccgcggamcctatgcagctgttgacagcgtagtcctaaattatcaagctggaacagtgggtagtcctttctcctgcgccgataacggattgtaatgagtrtacgttgtttgatctaaatttccattctttgcgggttgatcacaagtgtgtgtcttccgacgtgtacgaccctggaggttttcaaaggaccgtgagaggacttcttttaatgttatggtttgggctcgcaacattctctgcatgactacctattcgtgttattatggtaatgaaagatatcat

SEQ ID NO: 955 - DNA, 532 bp, Aspergillus oryzae
aattgggaagagggtcaactgtcccatgcggggsttcgcccctggcagcgtgacggctacatgaacgtgcacggcaactacggcgccaaccccaactacccatccaccttccgtccctacgagtacaagcccgtcaaggctagccaggagcacgagaagtggtctggctccgtcgttaccgagcagctccccgtcacatcggaagactacgtccaggccaacggtctctggcaggtcctgggccgccagcccggccagcaggacgccctcgtccacaacatctccgtccacctgtgtaacgctcacgagcgcgtccgcaaggccacctacgagatgttcacccgtgtcaacaaggacctcggtgcccgcctcgagaaggctaccgagaagaacgccactcacgccaagtctgctcgtttgtaatccaagaatcatcccgcttttgtactattcatctagcaactcagtttgatttaaaatattattagcatgaattaacgaaccaaatgataaactattttttctatctttg

SEQ ID NO: 956 - DNA, 844 bp, Aspergillus oryzae
aacgcgcmaagacgaagacgaagaagagaagagagacasagaaaaggcaacaacttgcttccatactcattactatcattacgaacaatatcctgtccagtgtcgttcatcacactcaacaactctcctttccattatattttactctcattctcttttcccttatttgattctttctttctttcttcctttcttgatctttgctcgataattatcgtttcatacgcagtcctctgagccttctgaactgcggagaatttgagattctctatccgatcgacctttttgatatttgctttttaccatcggaagatcaccttcacactttatactttatttgcttgttcccgctctatttgcttctttcctctagcatcgatagacgtcgacgcagaaacttccgcaatccgctgttgaccattgaccattgaataccggttcgtctgttaagaaagcccatcacgaggacaagagacgagtagatagcaaagacgaagtgatcctagggcaggtgatctgggcataattttttgcttctaatctcgcccgagatggaaacagccgagcctgtktcctatgaattccccggtcatacaatcggcgctgttgccgccggtcggatgatgacctccaatcttggtcataactttcccttctatgcaaccccagcagcgtcattcccactgccatttcaccagtcatcctcgaccgcctatggatttggccatgcactcaatcatcaccaccataaccaccatcaacccagctatcctcagttcttcgtggccagccacgaatcgatcaactctcagcccatgcggttatcgtcagagccaccacctgt

SEQ ID NO: 957 - DNA, 712 bp, Aspergillus oryzae
  modified_base (322)..(322): n is a, c, g, or t
  modified_base (324)..(324): n is a, c, g, or t
  modified_base (372)..(372): n is a, c, g, or t
  modified_base (374)..(374): n is a, c, g, or t
  modified_base (391)..(391): n is a, c, g, or t
attcgaaagtgggtatattgcccaaggaggcgatatcggaagccgggtatcaagatttctggcagtagaccatgacagctgtaaagcggttcatttgaacttctgtgcgatacgacacccccaaagggagtacctgaggagagcctcactgcctccgagaagaaaggactcggacgaagacaggaattcctgacctcgggcctcgcatatgcttttgagcatgccactagaccaagtaccatcgggcatatcctctcttcaagccctcttgctttgctcgcatggatcggagagaaattcctcacctgggtagacgagcctntnccctcccagacgattctggagtatgtcactctgtattggctgactgananttttcctcgagggattnacccttatcgagaggaacttcccatatccccggaagggaatcccctgcggtacattcataaaccacttgggttttcctatttccctgttgaacttttccccgtgccccagagctgggttgagacgacggggaatttggtcttttggagggaacaccaacggggagggcatttcgcggctcttgagaaacctaaggagttaaaggctgamttggcggagtttgtggagcagawttggagtagtatataaatggggaagtttttcggtagtatcgattatttatctctatcggcggaaatttcaatctacccatttatgagtt

SEQ ID NO: 958 - DNA, 869 bp, Aspergillus oryzae
atggctatgcctaggtgttctctctttctcttcgctgttcgcggcatastcacggacctccgccgagtgcgagatctgacggagattaagcatgtcgagaaggaagataagatgatcagtgaaggcacggaggmygccctcaaactggacacattactcaagctctctgagagcacaagttacgacctccgggcagctgctttgcgtatcatcgctgaaagatctacaaagggagaaacgcgagacttgcttctgagggaccttgctagcacagacacagagagacgaagcaaagcccttagtgcgatgtactttttagtatctaatcgctcactttctcggacttccgtatgtgctagactgaaagatccgcttacatacaacgctcttgtcgactgtctctgcaatttcctcaacgaacataccgaagagacctccaccacagtatcacccattttacctaaaactagacctctcggggagaagaaggcgcttggtatactgaatctggttcttccagaaaatgtgcccgcagctctgggaggctggtatcgtcagtygttggctgtcaaaatatccgtttccctgcgcgctttcggagccgtcgcgccggcaagatgtagtgatactcatgaagacctggtggtctgatgatactcttatgagttcaatatttagcacactctcttctcattcagatggcacgaagcaattacgcaaatatggtctgatgggtagcatgatttaagaaaacgaccaggatgatgacgacagttacatatggatggtagatggcgatgatactgcaggctcaggtcgagttccggggaggcgctttcgggaacggagtcctgaagagcaggctgtta

SEQ ID NO: 959 - DNA, 776 bp, Aspergillus oryzae
  modified_base (161)..(161): n is a, c, g, or t
tccctcgcagccaattgcaagcattggaggccgccgaccaaaaacaaagtccgaaagtctctaagaatatgggcaagcgggctcaacaaaaacaggcccaacagcctgcctttaccttgcccgaatctatggtgaccgccaatggtgtaccttttgctgtnatgagcttcttagaggtcgccgaaacaatatctcaaatgcaattgctattccaatactcccagcagaacccccaactttcagcccctgaggcgctgcgtaacctcgttaatagcctgccgactcaaacgccaactcccgggtttatgccagcbccgatgaatccagctatgcagcctgggcagaacccgcgaggccccaacatgaatgtacccaaccagtttgcctctccagccatggcgcacctwggtctgccgggcgcccaagggtcacctcatctgggcggttcggcccatccaagcccggcgcaaagccaccttgctggccctccaggtatggtgccacagggtcaaatgcaacctaatgttggccagggcacgagcgccagtyctagcccgaatgttagtyataaacgacgccgggcaagtacggtcaagatggaaaacgatgacggcgctccggaggttaacggcaccgctcccccgggaccaaagacggtaaaagccagcycacgtgtgggtggtaaaagacagacaggcactgctaattagaggagttattgcaatgggctttgttcgcacttttttcttttttcttttcttttctttttttttttt

SEQ ID NO: 960 - DNA, 803 bp, Aspergillus oryzae
  modified_base (77)..(77): n is a, c, g, or t
  modified_base (112)..(112): n is a, c, g, or t
agtmgscamvggggatcatcttgcatgccttgactcagggtcaggaagcaacgctgagataataatggacgagaccnagtatgttgcdcatgagcccaggtagacgtgacantacaggggcctattgacatcgagaacccattgagtggtattcctcgagatcaactccttcgcgatgtcgaagatatgcacaggagtacgaactgcacgatattcttcctctcctgaagaagggagccctggtggcccagagaccaaaccagtacgatgacatcccagagttgagccctgaggatcgtcagtatttgcgacaagagacaaccaatcgctggaaacacccttgggcactctattacaccatcattctcaattctatcgccgctgccattcaaggatgggatcagacaggatccaacggcgccaaccttacttttgcgcattaattcggtatcccacaggatccgcccgactgcacatctcctgcagaatgtagtcgcaaccagtggattgtcggcgccattaactccgtgccttacatgacgatcgcgattattgctggctggatatctgatcctttgaaccattggcttggtcgcaagtkggtbatctttattgctgcagtgttcagcttgatcgctcccatcgcctgtgcattgactcagtcgtggggtcagcbaatggcctgtcgtgtcccacttggcatcggaatgggtctgaaggaagtcacggttccagtcctttccgctgaaaacgcccctgaacgcatggagactcccactattgcgactgcgaaacagttctct

SEQ ID NO: 961 - DNA, 893 bp, Aspergillus oryzae
ggaggatcttttgcgacttgaaaacggaaaacctatgcttgacagggaccctgcagacatcagcaagagaggaatcggggaaggactggctgcaggggctggtcaaacgtggtagtcttggggatcgtttcaagtacatctctcggaacagaaggccgaccatggtcgactattacgttcgatagtccaaagagcacagaagatggccgcagtctggctgaagaggaagcctcgactaatagcacaaaggcggaaattagttggggtgacgctgagactgagtcagtaacagagctagatatgtacgaccgtttccttgcggacattgaagctcgtgagccggagtatttcaaggatgcacacgaaagccctctcctgcgccttcttcttgaagatagatacagaaccccagataacagagtatcatcacggaaagcaaactgggttgaagatacagaaagcagcctagaccaggtgtctggcgaacaccagaagactgtttcagagacagactcaaaaccgtccaccaatacctctcctgtggagaccaaccactcggtggcggagaacaaacactacgtcatatccaccaaaacttcaacagagcgtatccggcttcctgatggatcgattcagacaaagaccctaaagactcagcagttcgcagatggccgggaagagagcaatgaatctatcgaggtggtcaatcctctgcaggtcaatcgggaacccactaatccggagggagcyccgtctgatgaaaaaccgagcggctggttctggaagggtgaataggtcgagagatcttagattttcatcattcctttcctctgattatgctttctttcacactactctcctttactcacccgccttttattccttttctatgt

SEQ ID NO: 962 - DNA, 442 bp, Aspergillus oryzae
  modified_base (134)..(134): n is a, c, g, or t
  modified_base (244)..(244): n is a, c, g, or t
caaatgtaatgcgcttggtaaaggtatgctttgcactgcctcgaccacggagcacgcttaaagagcttagcatcaaaaaagcatgttatccctggaagctagaacctgagagatccgcccttcaacaagcagcnaatcaattaatgttctatgaattcccaactctaggacaacggttgtcagatagcctgtgactctaggagattcgctgcattatgctttctgctaagcctgagcttgagtnttgagagagcacagcatatattataaaaggttctgataggattatagatacgacgagacttagtacgtaggttcgcgatakctatttggtcatctaaacctctctwagcctattgagcacttccacgtatagatgcttgatagctagatatagcattacatcagttcctttggctatacttttacccttgatatatgt

SEQ ID NO: 963 - DNA, 828 bp, Aspergillus oryzae
gttcacgatggaaaagatgagatcattggcagagacgaagcaaagtcggacacctgatcaacagcaggtacttcgaactgagatcctcactgcgatccaggagaagtgggtccccagcaacattgtgctggactacttccaaaagacgtaccccaacttctcggacttctggctcttccgccgtcaattcgcataccaatatgcggccatcgccttcatgacctacgtgatgcatatgggcaaccgctatcccaacaagatcatgatttctaggacgacgggtgacatttggagctctgagctgatcccagccatcaaccctgctaaggccttcttctacaacccggaacaggtgcctttccgtttgacgcccaatattcagacattgatgggacccatcgccactgaaggtctatttgcttgtgcactgatggcaattgcccgatgccttacggagccccgtcatgagcttgagcagcaactaagcattttcgtccgagamgaaatgatgttctgggctacagcacagcatcggggcgttctaccagtwccgcagcttcgtgatttggtatataacaacagcgatatcatcgtcaaccgggctgtcagccttgccagttctccggagggcaatctgccagccaaccaaactactatcgacctgatctccaaggctgttaaccctcagcatctagcaacctgcgatgctttgtggatgccgtacctctagtcgggggctttgtgtttttttgcttctttggtgtattattttctcgtgtttgcttggcgttttcatttactcggcggattgtggaggattgcctatgg

SEQ ID NO: 964 - DNA, 754 bp, Aspergillus oryzae
tgataccctctccactcaacgtgaatgtcaactgtctagggctggccctttttttccctaccccccttctcatcgaactactttatcagccacgaggagactcctcggtctaccctactgcctaccaactggcctttgaaaagcctgtcctgtcctttcgaatcttgttcaactaccatccacacagttttatctcacgcttatacattcgttttacatataaaactactggcatcgtggccgctggctggctaaagcgtctgaaatgcgtacaacatttgtattcattgcctgtataacggcatactcttttgcggcaccggcattcttcgacaatgcatacaacttctcaaacgacctatctgagtacctkgggagagttagccagchtatcgagcactccaaggacatactcaacacggccacgtgcgaaacatccagcgttgaactgccggcacaggcgtacgggttaccctctccctcagatcagaagcttctatacgtcgcacttgggcgcggtacacagaactatacctgtgcgacaccatcttcaaactcgacgcctgtygctattggcgctgttgcmaacctctacaacgctacttgcatcgcaggaagcttctcggatatgattaacatgctaccgaatatagcatacaggatacccatgccaagcagtgaatccgatcgccttccaccggcaaaccttgatctgatggggccaccacttctttgacggctcaacccccgtgtt

SEQ ID NO: 965 - DNA, 444 bp, Aspergillus oryzae
  modified_base (64)..(64): n is a, c, g, or t
  modified_base (83)..(83): n is a, c, g, or t
  modified_base (129)..(129): n is a, c, g, or t
  modified_base (253)..(253): n is a, c, g, or t
  modified_base (283)..(283): n is a, c, g, or t
acagaaacaggccgtcacaccatctcaacggggagatgctgttgacgggcttctgaagcttatnaacacggcggataaacgtnaagctgcaaatacttggactggctgattttgacttctgacgatganatgaccgtcccgtctgcttagattgtatactatatttccataaccctgtacacaggactagatgcactagccatctaggataccgagggcatcccgacgcgtctactgacccatgacgtgctcncttcatccactgtctccacagacaggagcnaggaagcattaccggaactccgaactactgtatgacgagttccttgatgcctctccccattgcctgcaagcaatggtaattagtcaatgataccacatactatttgacgagtttattgatggcacgctcgcatgtrtcaaggcttccatagcacatagagt

SEQ ID NO: 966 - DNA, 437 bp, Aspergillus oryzae
aattcggcacgaggttcgactttacaaataaaaatcatccctttcctgcctacttcactcctgaacgtcatgaaggctgctgtagtaccgtttcttgcgttcattgtcgcctgtgcagcgaatactgtgctctctcagcggcaggaccagtgttctgctatcgccgagcaatgcaatgcgaaggaaacagaatgtcgagcgcagacgtagatactttatgccctgtcgatgttgctcgattttgtccttgctatcatgttgccaaggactgcataaaggatgccgggtgctaatagttgtatacccagtattctgaggaagctgcaactggcatggttatattcaatggggcttagaacagagtaagacgacgctttctacctatcgaaagattatatagcgtctgccaatacgtataaaatatactctctatatcg

SEQ ID NO: 967 - DNA, 786 bp, Aspergillus oryzae
  modified_base (85)..(85): n is a, c, g, or t
  modified_base (101)..(101): n is a, c, g, or t
  modified_base (113)..(113): n is a, c, g, or t
ggttccaaggttctcctcctgggctcgggtttcgttaccaagcccaccgttgaggttctgagcaaggccgatgttcacgtcactntcgcctgccgtacccncgaaagcgcccnaaagcttgctgagggtttcaagaacaccacggccattgccttagatgtcaacgatgccgacgctctcgacaaggccctcgagcaggtcgaccttgctatctccttgatcccttacaccttccacgccctttttatcaagtccgctatccgcaccaagaagcatgttgttactacttcttacgtctctcccgcaatgctcgagttggacgaagagtgcaagaaggccggtatcacagtcatgaacgagatttgcttggaccctggtattgaccacttgtacgccgtcaagactattgacgaggttcatagggaaggtggtaaaatcacctccttcctctcctactgtggtggtctccccgcccctkaatgctccgacaaccctctgggctacaagttctcctggtctagccgtggtgtccttctcgctctccgtaacgccgccaagttctacaaggacggccaggaagtcagcstcgccggtcccgaccttatggctaccgccaagccctactacatctaccctggcttcgccttcgtcgcgtaccccaaccgtgactcgactccctacagcgagcgctacaacatccccgaagccaagaccatcgtccgttgtactctccgctatcagggcttccctgagaagatcaaggtgctggtcgacatcggcttcctg

SEQ ID NO: 968 - DNA, 866 bp, Aspergillus oryzae
  modified_base (120)..(120): n is a, c, g, or t
  modified_base (158)..(158): n is a, c, g, or t
  modified_base (181)..(181): n is a, c, g, or t
  modified_base (229)..(229): n is a, c, g, or t
  modified_base (310)..(310): n is a, c, g, or t
cacgagggctcttcccccctgtttcttttagttgctggcgggactttttctttttctccaaccccataatcaatctttcaccgatttttcttgtcaccctcttaacccacttcgccccanattcaactgtccgtcatctaaagtccattgtgtgcatnattgcccgagcggatcgtgtatnaactgtttctcagagaccacgtccgttgccattgcacccgttgccgtngattccgctaacggatcttatcatcgccgctgtcttctattgccgacgcaaccgcatcaaccgccatcatgtccgtgaaantccaggataagttccaagaccaggtcacgcaacaggtcaccgagcagatcaagggccaaatccagggacagtttcaggaggaggctgcgaagtcaattcgccaagacacaaaggaattggtgcacaaggtcggcgaacgcttgamcggcggaaaccctcagaatggctatatggctatgtacctgcgttascgcagaagaaccctctgcgcacgaagatgttgacgtcgggtgtkctttccgcatctyaagaatacttggcctcgtggatcgcgaattaagttagccggaatggacactacttcagcgctcgcgttcccaaaatgctcctctacggcatgtttgtcgctgccccattgggccactttcttgtgggcatcctccaaaagctctttgccggccgcacaagccttaaggccaagatcctccagattctctttagcaatctcatcatctcccccatccaaaacgcggtgtaccttttgtcgatggccgttattactggcgcgcgccccttccatcaggttcgcgcaaccgttcgcgccggtttcatgccc

SEQ ID NO: 969 - DNA, 901 bp, Aspergillus oryzae
  modified_base (292)..(292): n is a, c, g, or t
  modified_base (453)..(453): n is a, c, g, or t
dgcaatcctttcccaaagcatcagcaactgtttcaaaagggtctaagtracgtaccttatagtctggctatggtgtctcaaagactatcgtggacgggtctcctatggcacagtgggctcccgagaatcagaattgaggacaggaagctgtgggacatactcttagcgaacgatctgtgtagcagtgccctgcctgaaaccaattattcgagacaattggtcatcgaaagttccaacagcgcttctcaaaaatgagcggtttcaataaggagcagaaaatcgcctttgagtncctgagacatttgtgcggtggtttcgccttcatttacggcccacccgacaccgggaagatgttctggcttctaagaaccctgtctatcttcctgcaccacccaaattccgagactggcaagcgtcaccagatactcagcaccgcgtcgtcgaacaacgtgntcgatagcgcggcatagcagatgaatgagaaagccactgggcggttgaagacatgtgactttgcaatactcatatatctgctccataatactcgtgattcaggggcgcgtcctatgatttatgccttaactacactcacagcctttcggatacctctgaaagaaccgctagaccacatgacgatgcaggkctggctctttgagctgtcaagcaagaacgtcacccatgccsmccccycmsacgggcatgcaggtgtggacttagtgtgttawaaggatcactgttgtyaccttcaaaatcctcgaggctcttcctggatgaaggatcttggggttgatggaagaaaatatgagtttgcttttatcaacttacgatatcagcyatatgcgaattcctattcgctttcgcgacaacttaagccatcagtatattagcccgcmatcaccta

SEQ ID NO: 970 - DNA, 604 bp, Aspergillus oryzae
  modified_base (221)..(221): n is a, c, g, or t
ttttacttctgccacactcgctacttccctctcggggtttgtctcatcgttgtgcgcctttgcctcgtcattcgttcacttgtcatacataccctctgctttggaacttcctgtggaagcatctccgtccgatcctttgattctttgtactagttttttccagcgagagagatatagaaaatgccttcgatgtacactcgtcttttcgctgcgctttggtncttgcgaccactgcaaatgccgtcaccaccatcgaagtgaagggcaaggactttgtcaacagcaagaccggtgatcgtttccagatcctgggtgtcgattaccaacccggcggttcttccggcttcacgaaggacaaggaccctcttagcgacaaggacgcatgcttgcgtgatgccgctctcatgcagcgcttgggtgtgaacaccatccgtgtctacaacttgtcgcccagccttaaccatgacgactgtgcttccattttcaacgctgccggcatctacatgatcctggatgtcaattcccctctgtacggcagctacattgaccgtaccgctcccaagagcagctacaacgccgtctactacgaacaggtcttcggtgt

SEQ ID NO: 971 - DNA, 991 bp, Aspergillus oryzae
  modified_base (167)..(167): n is a, c, g, or t
  modified_base (170)..(170): n is a, c, g, or t
  modified_base (279)..(279): n is a, c, g, or t
  modified_base (321)..(321): n is a, c, g, or t
  modified_base (377)..(377): n is a, c, g, or t
  modified_base (489)..(489): n is a, c, g, or t
  modified_base (498)..(498): n is a, c, g, or t
aattcggcacgaggccacaccctcctccatccctctctccttcaacacaatccccagtccatcataatcaaaccaactccaaaatggtcacaccccagcaatacccctggaaacccaccacccccgaagcgaaatctggcaatctctccccccagccatcagcagcngtncagccgccaacctcacccccgaagaaatcaccagtctaaacctcgacccgagctccccaaacgcaaccgaacttgtcctcctcgaacaagcccttaccaaaaagctgcngtgcctcgaaaacgctgcaaaacccactcctctctatgaganagaccaccccacctggcagagcttgaaatccgctctcttccacatcaatcgcagtnccggcgacctcgagaaacaagaaagtcttttacttgagcaagtaaatcatcccggaccgaaggagaaggatctagctgctttgcagaatctggctggactttatgaggaganaggagagtncaagaaagcggagaaacttgcccgttagaagattccggcgctccgggaacatcctatcttggggagtwatagtccgcagttcttgggtctttgaggatcttgattwaggatttggcggggcaggggaagattggtgaggcggaggaggttatcagggaggcggaggagagtattgagaacttggcggagggtcagtttgcggaacatcagcaggaggagagggatgcgctcsagaaaattgttgctgggttgaagaagttagggatttgtggtattgattcaggtcattggcaaggattactttgctgttgagggaagagatcgtaaatwtgggtttgtttttctgttcccagcgaaacatactttaagcagggctctattcgacttttactttggcttttgtttctattgtgatccatcgcctgttgcagttcaaactagaacgactaccatgaaatataagttatggctaaaagcctttctctagatggcc

SEQ ID NO: 972 - DNA, 804 bp, Aspergillus oryzae
  modified_base (299)..(299): n is a, c, g, or t
  modified_base (356)..(356): n is a, c, g, or t
  modified_base (448)..(448): n is a, c, g, or t
aattcggcacgaggatcaaaatggtcaaatcgactcaaatagccaggcttgaaggcctcatgctggctgcgtcagtagatgatgaacaggcagaagtggagcactcgcgagatcaagacacaagccaagatgattttccgccggttgagtcgcaattccgcaccgcaggctagcattgagtctggccaatataacttacactatcttatccaagatgatatctgcttcctctgtatatgcgaccgttcttacccgcgcaagcatgccttcacctacctcgcagatctcgcaaccgagtntactaccacttactcctctgcgcagtaccagtctcccaccctgcgaccatatgcctntgtagaatttgatacatttatccaacgcaccaagaagctgtaccaagatagtagcgcttcgcaaaaccttgaccgactaaatgacgagcttngggacgtgacgaaagttatgacaaaaaacatcgaggacctcctatatcgaggtgatagcctggaacggatgggcgaattatcggggcgtctgcgagaggatagcaagaaatacagacgagccgcagtgcgcmtcaattgggagccggtgataaaacagtatggtccaattgctggtgtcgggctcctctttctattcctcawttggttgcgcttcttctaattccttccccaagcaactgcttacggaggcccgctcatatgaatgtatgcatagttaatcttcttgatggttgccggactccatccaccctgataaattcaaaaactgccaatattttatgacttacgagcttaa

SEQ ID NO: 973 - DNA, 549 bp, Aspergillus oryzae
tctgtatcgtccttggaatcgtgatcgcttactggatcacctatggtaccagatttatggctggagagtggtcctggagacttcccttcctgctgcaaatggttcccggctttgttctcatcggaggcgtcgcgattctccccttctcccccagatggctagcctctaaggaccggtatgaggaagcgctccaaagtctctcgaaactgcggcggctacctactaccgacaagcgtgtccgccagaattcctggatattcaagcagaagttcgcttccaccaagaaatgaacgccgaaaagcaccctaatctccagggtggcggactcaaggacgccttccttctcgaaatggcctcttgggcggattgtttcaagcccggatgctggaagagaactcatattggtgttggactcatgtttttccaacagtttgtcggtattaacgcgttgatttactactctcccactctattcgaaaccatgggcttggactacgacatgcagctcttaatgtccggaatcctcaacgtcacacaattagtcggagt

SEQ ID NO: 974 - DNA, 850 bp, Aspergillus oryzae
  modified_base (278)..(278): n is a, c, g, or t
  modified_base (439)..(439): n is a, c, g, or t
aattacaatgggtaattggaaaatacaagtgaaggaatcgatttmaaaggataatgtattgggtaaataagatctggcctagccaagtattatgctggagaacccagggttaatttgggacatttcagcccttccttgcaaaacagtctgaaacgagtgattgagcaaagctatcaagcggaagccgatgaaaaaccttcagctgatgacatcagtcgtgcttacgacattctgtctaaatacctcgccgcatacctgatgggccagtcgtcagagancagtgtaacccactgggttgtgtcccagttccctcgtcatcaaacccagccattgcagtggattttccacaacaagatacctgtcgatgaagccattgcagcgctcttgaaaaaccacgatcagtcgcaaactcccgaagctaggtatcacgccgagagtntgaatagggctcgcgggttgttcgcttcgttgctagagattacaacagtggacaatatcaatatattcggcaatgctttacggcaatcgaattggggtctactcgagatgacacatgtcagttaccatctcaagaaacttagacaagccggcactttcgacgacgcattagtgtcaggtttttataaggtgttcaacgcggaccgtacgtggatyatacacgacttcacaaagtattggggaagggttgatatggtcaagttctcccaagaatataagamacctgatttggcattgaatatcatcaaggcaatccsasaagcaggtgttgtgcgttatgggctctaccgtgccccgttttgagacttccagattgctggaaacccccgagcggtgtcactgttgtttaact

SEQ ID NO: 975 - DNA, 527 bp, Aspergillus oryzae
acgagggtctatatctactgagccttatccttcactgtgtctagttaccagactctctccaacacacatccgtactctgcagcatccacattctcgcaactgcaatcctaccgactattccagacggaacatcttcaaacaacataatgccttgctaccacgagatgtcgccattctctcaagtccctggtcgcaaggagcgaagggactcagtcagctctctggcatcagtctcatctaccatggaggacgattccttggttcatcggccatccatgtcctacgtgaatgtgcctgacagctctctccacggcctctccggccgcgtcagaaccaatgggtacctgtatatctgctgcaattgccatgatgggcccaagctatacaacaaccaacctcgatgtgttatgtgccaacacgttgtctgctcggattgtcagcatgtgaagtaatgatctggaacatttcgatcgcttgagtgttcaacttactatacatttaatgtcgagacgggatcttacgacagc

SEQ ID NO: 976 - DNA, 886 bp, Aspergillus oryzae
  modified_base (442)..(442): n is a, c, g, or t
aattcggcacgagggttcttcaagtcattcctttctttgtagtcattcttttctagcaaacctgcttgaggcaggttctcacttattcgttccttacgttcaaacgtcattcagccatcaatctgtgattgatccttacattcctttccgtctgcccagttaaagatgttccgatcagccctgttcctcctcctcgctcccttggcgctcagccacacaaccttcaccactctctacgtagacgaagtaaccagggtgatggcacctgtgtccgtatgaaccgtgatgccaacaccgtcacataccccatcgagcccttgaccagcaaggatatcgcctgcggcaaggatggtgaaaaagccgtctcccgggtgtgccccgcgaaagccaactccctcctgaccttcgaattccgcgcatgggccgacggcgccaagcsggnttccatcgacatcagttacaagggtccctgcgccgtgtacatgaagaaggttgacgatgcgacagccgataacaacgctgcgggcgacggatggttcaagatctggcacacgggctacgatgagagcaccgagaagtggtgcacggagaaactgatcgacaataacgggttcctgtctgtgcgggtaccctccgatattgaacagggctattacttagtcaggacggagctcctggcgctgcatgctgcctctgagacgccggctgatccccagttctatgtcaactgtgcccagatctttgtgcagggtggtggtagtgcgaacctgaagactgttagcattgggtgagggtttttactcattggagagcccgggcgtkaagtacaatatctatgagaagcccctgcagctaccctatccgatccccggggccggctgtctat

SEQ ID NO: 977 - DNA, 509 bp, Aspergillus oryzae
cgtatctagctatgactactcctatggtggtatacaacaacatctcatgaagaaggcatgagaacatccgttcgcgcatccgacccatcgaggcgatctctcccttattgcacaagatgccaaacaatcctgagccaccgtatcccatgtttttatgatgccttcctgaagcccgtcagtatttataaaccaaacttactcaggtgaagggtttaacatccggagatcaatgggagaggaccttgggaactcgtcacagtcagtagttggcttttgaatatatacgtgccttgctcagttctttcctttatatgcaccttctagaggcaactctagccaaaacagctggccttggaagcgttcatacgaggaatagattcattgactggcggaggtgcgcgataactgaagtaatcgaagcgcattgttctataaagtacttcttcatttactgtacctgacttctaattttatttatactcaaaacaagccaagttcattcagtgttc

SEQ ID NO: 978 - DNA, 754 bp, Aspergillus oryzae
  modified_base (342)..(342): n is a, c, g, or t
  modified_base (374)..(374): n is a, c, g, or t
acgaggggcttccggacgtggcatgtaatggtgcaattgactttgaggatgtatccgctggtcacagcttcaacgaagcgcccatcctgaaagacattacgttatccataaaaccagggcaaaagatcgcagtctgcgggccttccggtagtggaaagacctccttaattatggcccttctgggtatggttgaaatcaagcaaggccgggtgcttctggatggcaacgacctgtcaagtgagcggcaagctcttcgaggaaacattaatgtcataccccaggatcctctattccttcctgggaccgcgaggttcaaccttgacccacaccagcgcgctagtnatgagaaaatcgcagacgctgtgaaagcagtngggttatggagtcgcttttgcgcgaaaggaggcttggatgccgatttcgttccctccgactggtcggttggccagaagcagctgtttgcgcttgctcggaccctggtgcataaggctcctattttgctcttggatgaggcgactagcagcgtcgattgggaaacggagacgatcatgcaggacattatagacagagagtttgcttcccaaactgttattgctgtctgtcatcgcttccggttcatcgatcggtttgaccgtgtggcggtgatacagcagggtgaacttgttgaatatgatgagccaacagctctgctggaaagggatacgcagtttaggaggctctttcgcgctttgcaggaatcgtcggccattggagc

SEQ ID NO: 979 - DNA, 809 bp, Aspergillus oryzae
  modified_base (297)..(297): n is a, c, g, or t
  modified_base (312)..(312): n is a, c, g, or t
  modified_base (425)..(425): n is a, c, g, or t
  modified_base (459)..(459): n is a, c, g, or t
gtcgggtgccggaggacaacaatcctcccctggatcaataatttcgtcggtatctggttcaccgcgttattcgtcattttgtcgctggttttgcttatctcggtcggagtaaagaaggatctatctttccagcccgcgtccttcgtcttcggcaaatggataaaccagaccggctggagcgatggtgtagtgtggtttacgggactggtccaggccgcgtacggtttgacagctttcgacgcggtcattcacatggtggaagaaatccctgcaccccgcaagaacgcccctagagtnatttggttggctgtnctgcttggtgccgtcaccggttttatcttcatggttgtctgtctattctgtatccaggatgtcgataaggtggtcgactcacccagcggactacctttcattgaattgatgcncgagacgatcggattgaaaggcggcgcgacattnatcgcattatttatctttaacggcctgggacaaggcatcggtatcctaaccaccgcatctcgcttgacatggggatttgcgcgcgamggcgggttaccctggagcggctacctcagccacgtggaccccgtgtggagagtkcccscgcggtcactctggttccagggcgttctaatcgctttggtcggaatcctgtatcttttcgcaaataccgtgctcgaagccattctcagtgtgagcccaatcgccctcaccatctcctacggcatgcccatcgccgctctgctcgtcgtcggacgggataaactgccaccgggccaattcaatcttgggcgatggggcgagcctct

SEQ ID NO: 980 - DNA, 712 bp, Aspergillus oryzae
gcggtgcggaagggaagaaggtcctcaagcgctttgaagatcgtaatgtgatacacaaccgctcatgctgatggcacaattcgtctctgggatgtaggccatgatgagatcgagaacggggatgtcatccaggtggatttggcgcgtgccgttggccgtgttagtaatgttgaagttactgaaatggccctaagtgggtcaacaggtgagctgtcggttggcctcaggagtcgtgaggtcgtgatattccgttggggcagcaatggaagttttggccacgaagagcccgccggcgctaacgaaggaccggggaagttgactaaggtcgctcacaggactgatcctgggttgaagcagggacttcttccccttacccttttggatatgcaacaaggatcagtcactgcgctgaaacatagccaagttggatttgtcgctgctggcttcgaaggtggcagtctggtgatcatcgacttgcgcggaccagctgtgattcatacagcgcgattgtccgaactcacaaaacctagcaagcggasaggtttcttgagacaccgatcgtctgatgatgccccaccagaatggccaacaagcattgaatttggtgtattgactttggagggcgaagattattcgagcatttgctgctttgtaggcaccaatcggggaaattttgcaacctttaagatccttccaacggataacgggggtt

SEQ ID NO: 981 - DNA, 635 bp, Aspergillus oryzae
ggcaaggagttccccaccatccttggccgtctcgaggcttgcttgcacatggacgtttctcgtcttcaggacaatgccactggctgtctcagccgcatgatccttaagcaccgtgacagcgttcccctcaaggacgtcctgcctgcccttatcaagctcctccccttgaagaacgactacgaggagaacgaccccttgtaccgcatgatctgtcagctgtacaagtgggaagaccccaccatccgcgagcttacccctcaattcctgcccatcttccagtctgtcctctgcggcgacgaggatcagctcgaggacgagcgccgcgccgagctcgtcgagcttgtcaagtggctgaaccagatgcagcccggtgctgctccttgggctgagcagctgtaaatgctcaccagacatgatggcttgacgactcaacaaatatttaatggatagactggttaacaaaatggttttatggttgacagatagaagatacccctccggagcgcatcagggtcggccctgtttatgcgtgatgatgtgacgaagacggatagaaaagtcatgtattcgtttcgcgatgatttatgaatcaaatgttgtaaatattcaatgtttataacctgaactttgctgtg

SEQ ID NO: 982 - DNA, 831 bp, Aspergillus oryzae
  modified_base (261)..(261): n is a, c, g, or t
gagcaggtattctccggcatccaggagacaactgatgacctgatcaagaaatggactacgggatcccggcaacgtatcaatgtgacgaacgacttggatcgatgcaaccatgccgcaaacatgctttgcttcttcgatcagcgggtacatatcatggagggtcctgaacctgcggtcatcaaagccatgggctgtgctaccaatgaggcgatgcaccgacctttccgtctcaggatagttaactggctgttccacagcgtnaatggaacgcatggatcaagactatgcgagactatggaaaggatatcgttgagactcgcagggcgaacccaaccgacaaaaaggacatgctctatgcgttgctagaaggcaaagacccggagaccggcaagggtttgaccgacagccaggtgctggatgagatcatcaatatcttcattggtagtgccacagcacccaacctaatcgctttcgcaatgtactatctggcgaacaacccagacgcggctgccaaggctcgcgaggagctggacgctgtggtcggtggaccttctgtcaggattgaacatgagcatcttgctcgcctcccctacaccgaagtsctttgcgagaatccttccgactatctggcgtcgcccccggcttcaatatcgaacctatccctgagaatgagggcccggtcctgctcgccggtggtgagtacgaattcccaagggccaggccctgatcgccatcctagcggccgttaatcgtgatccggccgtcttcgaagaccccgaagcgttcaagcccgagcgtatggtcggtgagaattttgaccgactcccgaag

SEQ ID NO: 983 - DNA, 809 bp, Aspergillus oryzae
aattcggcacgaggcctcccgccgatgcccaagaaggcagcgcaaatcctgcattctcacaacgagaagacattaaatatttactcagcctacgtcacaacatatatcaaccagcacatcaaagacgcagactgctttctacctttaaccaactgcaaatgcggaggcgatacgtccgccaaggatatcaacccatcaatgccattcctccctcccacacaagttacttccgccttcgtcgccctatccggtcaccgcgatagatggaacagtatccccgagctttgcaaaaatgtccgaagtggcgtatggctcgagcaagccgttgttccttacgttggactataccctaaggaaggaaaactccccttgaacgcgtacttactcgacttcttcaagcatggcaacgtgcatgccctcgagaaggacaacagggtccgcaagggtgacatttggtttgttctaaacgacttttctctcgttttggctaccatcgttactagtcttgagaacttcctcaaactatcccctaacactgacccggatctattagatataatgggtagcggcgacgcccatgaagaagaactagatataagcttcgcaaaagaaaaagtctccgagcccgaaaataaacctctcaagtcaagcaaaaataagacaaaaggacttccaaaacaaccttctccgtccatgccggtcaaagtcaaaaagcctaaagtggccgagagctgggaagacgagtgagttacgatgagccgaacccagaggagaaggaagaaaccaccacagaccttgcccaagagact

SEQ ID NO: 984 - DNA, 658 bp, Aspergillus oryzae
aagtataccgactcgctgctgaagaagggatccaaggctgctgaggagtccgagctggaggagatgctagtccagattatgacggtcttcaaatatattgaagataaggatgtcttccagaaattttactccaagatgcttgchaagcsattgghgcatgtcagctcggtgtccgatgatgcggagactagtatgatcagcaagctcaaggaagcctgcsgtttcgagtacaccaataagttgcagcgcatgttccaagatatccagatctcgaaggatcttaacgccagcyacaaagactggcaagacaaggtacttgatgacgacgatcggaggaagctggtggatgcacactttcagattctgggaactgggttctggcctcttcaagctccgtcgacagacttccttgcgccaccggaaattgtcaagacagctgagcgattccaaaacttctactttgacaagcataatggtcggaagctgacatggctttggcagctatgcaaaggtgaaatcaaaactaactacatcaaaaacacaaaggtaccttatactttccaagtttcaaccttccagatgggcattctctctccttttcaatgagaccgataccttgacgtacgaggacattcaaaaagctaccactcttgctcct

SEQ ID NO: 985 - DNA, 688 bp, Aspergillus oryzae
  modified_base (222)..(222): n is a, c, g, or t
  modified_base (478)..(478): n is a, c, g, or t
  modified_base (525)..(525): n is a, c, g, or t
cgagggcttggatttcaaaggccaataaacgaccagctacagcgcccacatccgcgttgcatcgactttgttatgtggccagttctccgtgcgaacctagtcaagactttccacaaatacgacctcaaattagtgttcgccgcgtttacatgcagtctcagaatccggtggccctggggcaaatctttcttggagcctgacgtgacgaattcattgcgagtncataaagaattctatgataccttcaccaaaattgagggatggggtctatccgatgagtttcaaacccaatacccggagctgttggtcggtatggatattggaactctcaattattccatctttgacccaatgcctgcttcttgaacaaaacattctgtacactcctgtatgcctatcaatgcaccatgacgagcagtactaccgtagttctaacaccgccaagccggctacataaaactcttttccgacgtgctcnccctctagtccccaaataaaatcatctcgagcacctgagagtacgtngcgtcatccaattacaacttgcttgtggggtggtggggacacaggcgagthagcggtcacctcaccaggggtaatttatactgaaatctagaatttaaaatagcggtcaatgtttttggaaccagattagtcggtaatccgaatatttagaccattaattagt

SEQ ID NO: 986 - DNA, 537 bp, Aspergillus oryzae
ggatcaacttcttcatccttacctcttcaaacaaccgtcattcatatcctctttaacagtcgcttaatcccccttcattcgccatgagcttccaccagtctgccgaggatatcgagatcaaagataaccacatcctcttcgcacgtctcagaaacgaggacggagacctaaaggacgccgagatcaacctcgatgagttcctcggaaatgacgacggacacttccagtggggcggcgagaacttctcccacacggccgatgatgtccattttgcgatcgaaggagacgacgaagtgccagttctacgtgcagtcctgctcaatggcgagggagagcccgttgagagcaatgtaaatctttctgagcgaatcaacaatgacgacggtgcctttgtcttcgcgtgatgtctgtctaatgagttgaataacgatacatgtacactggagggaggtagttcaattgacgattctcaagccatcctctgtggaaacgatatctagtgagataataaagcatgccattaaggcctgacgatgt

SEQ ID NO: 987 - DNA, 631 bp, Aspergillus oryzae
  modified_base (193)..(193): n is a, c, g, or t
  modified_base (341)..(341): n is a, c, g, or t
  modified_base (407)..(407): n is a, c, g, or t
  modified_base (433)..(433): n is a, c, g, or t
  modified_base (491)..(491): n is a, c, g, or t
  modified_base (530)..(530): n is a, c, g, or t
  modified_base (552)..(552): n is a, c, g, or t
  modified_base (554)..(554): n is a, c, g, or t
  modified_base (560)..(560): n is a, c, g, or t
  modified_base (571)..(571): n is a, c, g, or t
aattcggcacgaggcgtggtgtcactgctgagataggtatcgactgatgtcgcaatactcggcttgctagaatgtgtgggagacatggcgttccaagatgatgtagcctatgtgtggtgtttcaattgagggccgtgggcgtgtacaaacccagatatatacaaagtaagagacatatgtacatgcatgagtncaccaggcaaagaaaaaaaaatgaaaaaagcatgagaatgacaacgcattaaataagacccgtactgcgaacgggatcttacgggagacgtccaacatgctggtcagcaaaactacccctcatgctttgatacttgtaagatgccgtnagcagattgaaatttgtgggtcgactagccagcgattgtattagctgcgcaagtggcaagtgccantggcatggctgaggtcgaagagcganccatttcgcggcctggcaggggcaactatagggaaacaaagaggccacgcaggcagtngaaccggggtctctccatcgaatctaacctgagcgaatngcatgggagaccgactcatgcntntcaatncaaccagctantcatggactaaaacccgtctgcccccattaccgctctggccgttggggttccggtgcagc

SEQ ID NO: 988 - DNA, 732 bp, Aspergillus oryzae
  modified_base (267)..(267): n is a, c, g, or t
  modified_base (312)..(312): n is a, c, g, or t
  modified_base (444)..(444): n is a, c, g, or t
tggacgtataactacggaacctttttgtccggtgccgcgttcatgtacaactacaccaatggtgacgagaagtggttgaagcgcgtcaatggcttgttagaaagcaccttcgccaccttcttcccgtccacctacggcggtaatgtgctgtctgaggtggcctgcgagcctatcatgagctgcgatcgtaaccaactgggcttcaagggatatacggctatgtggctggcccataccgccatcttggttccctctaccgcggasaanttactcccaagttgcaaggctctgcagaagcaatcgcgaasagtnctcgggtgagtctgagaatctctgtggtgaaacatggggcaaagacacttgggatggtatgaagggcctggaagttcaaatggccgcattgggtggaattacttcgaacctgatgctcttggagagcaagtngccacagaccatcgatacaaatcccgacgcagctgaacatcacatcgataataacgaaaacagcagccaagaccccaccaaggcgaacggttktgagatagcagatcgggccggagcctggatcttgactgttatgatcgccgccggtgcgatcggcgccgtggggtggttaatcaagacgcaataagggctcgggttagctttttattttcatgtwcagatcgtcgcgctcaaactggtcaggtgggacatacctttgcattcagaaatagctttcgtacattatgt

SEQ ID NO: 989 - DNA, 408 bp, Aspergillus oryzae
  modified_base (156)..(156): n is a, c, g, or t
  modified_base (290)..(290): n is a, c, g, or t
tatcgataagctctgatatcgacttcggcacgayggcaatcctattgtccagggtggatcttgcccaggccaccccgtttgctgtrcaggaaataatttcaatggtctcctagcccttggctgtacacccgtcacgttatctacatgaaaacagtnaaaagaaagcaaaggcaggcacgtttcagttagtatttcgatctggttgggggagagggaggccaaaatgtctcggacgaaaattgattacaagtgtacgttgagcagaaatgttcaaggtggtgatgaccgtntagaaacatgtcttatgatgcgatgtggcctcgcgagcggttgttgatttgttattacttcaatctcaggcaaccaggtagcagatgtccagctaatggcattagacgattatctaca

SEQ ID NO: 990 - DNA, 719 bp, Aspergillus oryzae
gagccatttctggccagctgcatgatcagctcgctctctttctttcctcgtacaatcccgccaccgcctacgtctacaggttagagacttagaatacaacccgtctgatcggaagcccagccttccatccctccaggtctctcccctctcctcccccttcactggggtgtggggactggatcaaagcctcacctatagccatcaagattgagataattcgtcgaactttcaaaatccagtcgaagatcttctggacaagtcaaatcagaccctcccggggatcacgttatccccttaaacctcacatgctgattccctgatccatctcgacgttatatgcagcgtactccattcattgagtgccttccatcttgcctcaccgggagatcatcaatctgaggatagatgaaaagaggctaccaccgccgcctgcagtgttagctgatatagttcgcagaacacaaaatctagactgaaaccatagaaagtctcgaactgacttgataatggattcgagacccggacaccccgaaagtctttctcgtttcggaacacacgattgaacttccgtggattggttttcatggtgcatatggagtacgctctctgcctcgagaagggcctagtgccaatagatgagacccatgcgttatgatatcattgcgccccgtcagatcaaattccagacgtccttatgatggcaaactcaagttaacagc

SEQ ID NO: 991 - DNA, 576 bp, Aspergillus oryzae
  modified_base (40)..(40): n is a, c, g, or t
  modified_base (44)..(44): n is a, c, g, or t
  modified_base (56)..(56): n is a, c, g, or t
  modified_base (125)..(125): n is a, c, g, or t
  modified_base (129)..(129): n is a, c, g, or t
  modified_base (134)..(134): n is a, c, g, or t
  modified_base (186)..(186): n is a, c, g, or t
  modified_base (188)..(188): n is a, c, g, or t
  modified_base (199)..(199): n is a, c, g, or t
  modified_base (217)..(217): n is a, c, g, or t
  modified_base (229)..(229): n is a, c, g, or t
  modified_base (237)..(237): n is a, c, g, or t
  modified_base (258)..(258): n is a, c, g, or t
  modified_base (263)..(263): n is a, c, g, or t
  modified_base (268)..(268): n is a, c, g, or t
  modified_base (287)..(287): n is a, c, g, or t
  modified_base (290)..(290): n is a, c, g, or t
  modified_base (301)..(301): n is a, c, g, or t
  modified_base (310)..(310): n is a, c, g, or t
  modified_base (344)..(344): n is a, c, g, or t
  modified_base (358)..(358): n is a, c, g, or t
  modified_base (360)..(360): n is a, c, g, or t
  modified_base (366)..(366): n is a, c, g, or t
  modified_base (369)..(369): n is a, c, g, or t
ttcctcctgaccagcagcgtctcattttcgccggccaagncagnctcgaagatggnccgcacttwrtccgattacaacatccarcaaagagtctacattgcacttggtcctccgctcttcgtggntggntatgncagcatcttcgttaagacgtctcactggtcaagtactatcactttggtaagntngtaaaggctcnggacactatsatacaasntcaagctcaaanatccaagnacaagtgggttattcccccanaccrncaasntcttatcttttckggcarncrnctrgrggakgnasgcasgcnctcagactacaatattcatargttrtaacacctnacacttgggtcctncntctccntgntggaaactaakgtctggttkgattttctgctatggttactcaactgggtggggtggcctgrcakgggstgggsttggttctrggcctttatcatatcattcaacaacatacttctttctstccccattatctrcaatccttctctacaatgaataacaagccattgtktgggktttaktgtkctgcgcattcaaaaaaaaaaaaaaa

SEQ ID NO: 992 - DNA, 705 bp, Aspergillus oryzae
  modified_base (121)..(121): n is a, c, g, or t
gcggacattctcggtattgaatacatgtggtcttccgattccgacaccatcgtctttacagattccgtgcgccgtaccgttgagacgatcgccggagatccaacggccggtggaggcagtnccggattggtagtgcacaatgaagatgattcaatgacgacgaaacttggaagcgcagtctactggtgcgagctgtacatgacaagatcgacttctgcatcctcgggcacgagcgactgccagagtggtccaagtaccgcgttccgggtgtccgcattgccctcaattctatacccctggtacacacagacagtcttcggtcgtcgaatgattatcaatgaagaccgccatctaacaacaaaccttctcttgcgcggctggacggtcacatacgcctccgacacattaacagccactgatactccaacgacattyagccgatggctcctccaacaagtccgttggggtcgagcaacgcatatcgaaagcttccaacagccaagagtctatctcctcaatcaccctgtcttcttctgggccgctatgaagaaagaggtcggcccgctcctcgtcttcctctgtgtgctctactacctcgtcaccggccaacgcttcgcctacttctcctctaacgacgctttcctccgtgtagcctacacaatcggctacaactggctgcgtaacccagaccgcggtccgcgcaat

SEQ ID NO: 993 - DNA, 515 bp, Aspergillus oryzae
  modified_base (14)..(14): n is a, c, g, or t
  modified_base (89)..(89): n is a, c, g, or t
  modified_base (444)..(444): n is a, c, g, or t
  modified_base (487)..(487): n is a, c, g, or t
vaattcggcacgangttggaaacactccacaaccatgtaacgatgatcaaaatgaatcccctgggcattgatctccaacgatgcgacsntcatgagcatgccccasvggccgavcgtggccttgtctggtacgagatcaccgataaggcatcttatctgccatttgatctactgtcaggacaggtcaaatataaagcttgttttaaggatcttccaatgggtctacagactgtcatctacgctcccttggggctaaggacacagaataagtggactctagaggaccagtaggatgaatttcaattaagagaggatgttagtatggaatgcaacatgttcatggccccgttcgtaaagggaacaattaaggcctcacacggtcctttggtagaccggctgatcattgaagccaagtcaccagaaagagatctagagtcgactgtnggggcctaggtagaaagtcggtcaggtccggcggctgtccaantcaacaacacaagaaagcaactttgacc

SEQ ID NO: 994 - DNA, 582 bp, Aspergillus oryzae
  modified_base (30)..(30): n is a, c, g, or t
  modified_base (436)..(436): n is a, c, g, or t
atattctcaaggcggcaaagtcytcatcgnatgttatcgctgttcataagawatacacacttcaatccaccggcatctggkagcgtgttcgccgctttctttcgattgatcccaatcgctcaacaggtgttccattgaacgcccaatatcgtctaccgacccccggagctctccctcctctttcctatgacgatccggttaccgttccggctggtgatattgccgacaacccttattggaagcgtgatattcggaggagttaccctaagcttagcactgtgagccaagcagattctgtcggtcttctcaccgtagcagccaggcagcaccaaaggatgatattctacagattggtgaagcaggagaaaagcaacttatctctatcaagcagcagggagaagaacgcggtctggctggcctttttgagaaggataanaagggcattcagggtgtcttaaaggccaatggtttgccgccgaagccttgcaatatgaacccgtgagttccaagtatcagcttgatcatgaccatggctaccccaatgcatatccctgccgcacatttgtttgatgatgcattaaa

SEQ ID NO: 995 - DNA, 629 bp, Aspergillus oryzae
cgtgcaagcgatcatgccgacctaatccgtcgcatcggcgcgcagagcactgttctgctgaagaacaagggtgccttgcccttgagccgcaaggaaaagctggtcgcccttctgggagaggatgcgggttccaactcgtggggcgctaacggctgtgatgaccgtggttgcgataacggtacccttsccatggcctggggtagcggtactgcgaatttcccatacctcgtgacaccagagcaggcgattcagaacgaagtcttcagggccgtggtaatgtcttcgccgtgaccgacagttgggcgctcgacaagatcgctgcggctgcccgccaggccagcgtatctctcgtgttcgtcaactccgactcaggagaaggctatcttagtgtggatggaaatgagggcgatcgtaacaacatcactctgtggaagaacggcgacaatgtggtcaagaccgcagcgaataactgtaacaacaccgttgtcatcatccactccgtcggaccagttttgatcgatgaatggtatgaacaccccaatgtcactggtattctctgggctggtctgccaggccaggagtctggtaactccattgccgatgtgctgtacggtcgtgtcaaccctggc

SEQ ID NO: 996 - DNA, 583 bp, Aspergillus oryzae
cacgagggtgttctttccactcgaattgcccactctcagcttctctcatcaccaacctcttctttctatcgtatcctccgacctcaactccccatccaaatcgtcactatgtctggcatgacccctatctccgccgccggtgcttgtcctcctgctggcccctactcccaagccgtccgtgccaatggccagatcttcgtctccggtcagatccccgctgacgcctctggaaatcttgtcaccggaaacattggcgacctgacccaggcttgctgcaataatatcaaggctattatcgatgctgctggctccagcgttgacaagatcgtcaaggtcaatgtttttcttactgatatggcgaacttcgctgagatgaacgccacatatgagaagtttttcactcataagcccgctcgtagctgtgtcgctgttgcccagctccccaagggcgtgcctgtagagatcgagtgcattgctctggcctaaaccaaaaatgtttttattttacatggcatacaatcaaaaggcaatcagatgtgattagtgttgaaccgggctcggcctactacgaccctggatgatt

SEQ ID NO: 997 - DNA, 599 bp, Aspergillus oryzae
tcaccttttacgaatccctcgcctcgacaactaggwgcattcggcgtaataatgtataacaacaggaggaagtagaggtctmaaaacwstrcgagccttccaggtsyttccgcgagagggggctctgcgctggagatggaggagggttgaagctctctctacactaatttgtgcagctacgatggtgttgaaatcagggatcatttgctcttgaccgastacatgmagattcttaaacccggtctagtttcatgaatggtgtcggttgttatgctgataagctgtgtgtcctgcaagggtcactgtccgccaccattsacgcggcctgcacmaagctcggctcagtgattgcagcgggccgctcacaayggtaagaatctcatggcttttckcatmgttgctaaagatttcgagayyatccgacatcatgagcgaccmggwgccccctcctatcgtcgccagttgtatgcctagtatgtcaasctgaggtctcctcgtataagacaggtactctgatagtgtggattctagtaggtgatcgctccgtagctcagccgttgtatgtgtctccttccgtcgtcgtgaattagtttattgca

SEQ ID NO: 998 - DNA, 716 bp, Aspergillus oryzae
aatatggccacccgcaattcgtctgcagcaaggtgaaaatacagtccaatcgttcattgcagccgcgaaccttggcgcatcttatgtcgaattcgatgtacagctgaccaaggatcatgttccggttatttaccacgattttctcgtcagtgaaacaggaattgacgcgcctctccatactctcacattggcagcaatttcttacacgctgggtgacagattgctcgtctcgccgatccggctccccatcgcaggcgcttgatgctctaggaaaggatgcaatcacttatgcgcctcgtcaacgctcaatgtctgtcggtggttctgaatatgacccttcggaactaaacgagaagatcaagcacactcgtgatttcaagaagaaaggctttaaaggaaatactcgasgcaatcacatccaggcaccatttgccacactggaagagctttttaagaagcttcccaaatctgtcggattcaatattgaactgaaatatcccatgctccatgaaagtgaggaagaggagatggatacttacgcggtggaactgaactctttcgtggatacagttcttacccaggcgtacgaattaggtcaaggscgcaacatgatcttctcgagtttcaaccctgacatctgcctcttgctttccttcaaacagccctctatcccggctgctcttcttgacggattctggagcctcccctgtcggtga

SEQ ID NO: 999 - DNA, 341 bp, Aspergillus oryzae
aagtcggcaacaggctttcgcagtctgagatgggacctcaatgacttggatccccatgatgtctcctgcggaaactgggggttgtsggcattcagagggaagagatacgaggcgacgttcaagggttaaatgaagagttatctttcgcctgtacgtgtacctgacgtctggcttgtacatctagtggctattctatcagcgttgtttgattagggttgaaggaacaagagttcccaatctatgcccttattcagcgtttatggttctatttccataatatccttgtactattgtctatatgttatctattactgtgctaaatagaattatttctttcggtg

SEQ ID NO: 1000 - DNA, 584 bp, Aspergillus oryzae
  modified_base (14)..(14): n is a, c, g, or t
  modified_base (114)..(114): n is a, c, g, or t
  modified_base (116)..(116): n is a, c, g, or t
  modified_base (374)..(374): n is a, c, g, or t
cagagacagaaganataacashsgtcccagagactcgtacactcgcgaccgtcccaatgacgccggagcaggagacacgaacaaagcaaaggaacttgaagaagagcgcaasgnanagctagcagagatgttgaacaatgcagatgaaatggaagacactcgtcgccaacggattgccgatgttacggctatggaagagaagaaacgtgaggaagacgagaaacagcgctcagaaaagggtagatttgtcgcaggtcttcatcgtcagctccaggaagataatctggatgatcgaatcaagcgcagtcgtggtgggcttgctcggatggaggactaacatcgaatttcgtctgttttaagtttccgagagagtncttaggactgcctattccttattttgcatccagcgttcttgacggtcctttctggcgttgttatctagggtttttcattgcttcatttcatacgatattctcccatgggttgcgtccattgtgatgttttcagtggacagtatgatatcccttaaaatgtcaataaacaggaacactattctgcagggcattttactattttgcgcgggc

SEQ ID NO: 1001 - DNA, 837 bp, Aspergillus oryzae
ttaaacatacggtgattcctgtcactgtagactttcttcacatgttctctgcttgatacgaccttggatgaccgagtgtcaacagcaactgtcaccatgaagaaaatctacaatgtctactttctctgtggctttgcatcttggtggtggtttgttcggttttgatatctcgtctatgagtggcgttctgggtactgcagcgtataccaactatttccaagtgggtagcggtcaatataagcagggcagtatcacctgtgcgatgcctttcggctctctcgtcggtgcactgtgctctagctttattgccgatcgctattcgcgtgtcagggcgatccagttctcttccattctgtggatcattggctcaatctttatgtgtgcatcgaacgggatccctcttttagtcgtcggtcgtgtcatcgcaggtggttgcgtcggtatcgcatctgcgatggtccccgtctatcaggccgagatagcaccaaaagaaattcgaggacgagttatatcactgcaacaatgggctatcacatggggtatcttgattcaatattttattcaatatggcgcgacmacatcgacggcggcccaaacaaccccacgcagagtactgctgctttccgcattccttggggtattcaaattgtacccggcgtcattctcttctttggcatgttcctcttccccaagtctccccgttggctcgccagcaaggaccgttgggaggaagctctgcaggtgctatcgaagctacacggtcaaggagacgtcaaccaacccaaggtcctcgccgaatataaggaaatccaggaagctctggcgttagagcgggac

SEQ ID NO: 1002 - DNA, 981 bp, Aspergillus oryzae
agggcagagatcactctcgagcaattcgagcaatgggctattgatcggttaaggattctggccgaaatcgaggcctgttcttatagaaacaaatcgcccgccgagacagaagcacatattacaccactcctccagaagtatctcccactatcctcaaacacttcctcgtcgctgggtgcgaccgaccaacgcttgaaaaatgaacgacagaaagatcactactcgcatttcattcttcgtctggccttctccgctacggaggacctccgtcggcgattcgcgcgagcagaaactatgcttttcaggttccggttccaaaaagatgattcaagagagagacgtgcttttatagagagtctcaatctcgattgggagcctgttagtgatgaggagaggcgcgagctttccgagcatcttgtgaatgcgacaccggggttgcgccgtgttgacgaggaatcttggtataaggttgactgggagagagttccggagttggtggagaggcggtctgtcttcttatatagagggaaagcgtatgtgccaggaagggagcagttgagcatgattattgctgaattcacggctcggctagagcgttctttggagctcacgagtcgagccctaccacgtttggacgaagatgatcgtctcacacccattctgaatcacttgtctaagaactttggaagtgccgagtccgtatactccgagggagaaggatttgtcgatggcgctccaatcaccgcgcaaaatatcgatcagctttcccaacatttcccgctctgcatgcgcagtctacatatgtcactgcgcaagaacaaccatctaaagcactacggccgacttcaatataccctgtttctgaaaggaattggcttatcactagaggagtgtatccttttctggcgtcaatcattcaaaggatttactgacgatgaattcaattcccggtacaagtacaatatccgccacgcctatkgg

SEQ ID NO: 1003 - DNA, 783 bp, Aspergillus oryzae
  modified_base (375)..(375): n is a, c, g, or t
gatggtgaggcaccattgcgttggtgtcgccgtctctgaaggcacagatcctactggaccctatgtacctadcgagacacctctgtcttgccgtctggaccaaggtggctcaattgatccggcgggcttcctggacaaggatggcagccgctatgtggtattcaaagttgatgggaacagcattggaaatggtggcgactgcaacaatgacatccctcctcttaaatcgactcctattcttatgcagaaagttgcggatgatggcttcactccggttggtgatgctatccagattcttgaccgtgatgacagtgatgggccgctagtcgaggcccccaacctgattctacacggggatacatactttctcttctnctccacgcattgctacaccgaccccaagtacgacgttcgttatgcgacctcaaagtctatcaccgggccctatgtcaagaatggtgagaaattactcaaatctggtgattatggtcttacttctcctgggggtggtactgtctgtggttgcggagatcggatgttgttccatggcttctgtcgaaacaacacacggtgtacatatgctgccgatatctccatatcagaccagcaggtgactctcctatgaccgaagtaagatacccccttttgcgttgtatctattttggaggagttattggattttggtttcactacatatcactgcacatgaccggcccattattcctacattatgtaattagcacttgactcagcccatatacataaatattcttcgctctcctc

SEQ ID NO: 1004 - DNA, 535 bp, Aspergillus oryzae
aattcggcacgagggcaagtctggcgctcttagtgctatccgcgccggcattcacgtcatcggttacgttggcagctaccctggtbatgagaagaaggtcgaaatggcgactcctcaaggagtttggcgccgaagtcatcatgaaggactggtcagagttccaggactgtctctctcaaatcgaacggcttgagcaggctagtcaacccacccgccaccgcctctcttgaatgtcgacacgaagtaatgacagcaagcgcatttggtcgccattgaacatgggcagctatcttcgattacaattaatttctctttccggctattatattcaattcactcgatcggcttaaccgttcgcagggcctgtcctttgcaagggctcggccatttcccttcttaacccagattatttcacacaatagtcggatccatgcctctgacattattcaactttatccatagacaggtttcatggacagagatacacagtgagggagtycacagactgtgggcatacaatagattacgttctcca

SEQ ID NO: 1005 - DNA, 835 bp, Aspergillus oryzae
  modified_base (333)..(333): n is a, c, g, or t
agcgatacaaagctctgaggaaactatctgcttgcgcgtaccccatgagcgaggggkcgctgtctctgaaggtgcggtcgagactcgtaagccggatggcttcactcggtgttacacgctccaaccctccggcgcatttgatttggtcatgccggagcaggaagccacaacccatgttcctctagatgagcctgtcttgcgtgcggaacggacgatcgttggccacggcgtgaacggggtggcatgcgtatcatctttgataatccctctgatacggacgcggttgatttcatgtattttgagaccctcccgtggttcttgcgtccgtatgtncacacactacaagcgcacgatcactgggcgtgatgggatccgtcgacaagttcccacctcacagctcatcaaggaaaccttctaccgcccagcgattgacagagaacgcggcacacagctagaactagctttatccgtcccggctgcctctactgtgacacttacatatgacttcgagaaggccattttacgatacaccgagtaccccccggacgccaaccgtggtttcaacgttgccccggcggtgattaagctcggtggacatgaaaacccgatctacatgcgcacaaccagccttcttttgccgctacccacgccggattttagtatgccgtacaatgtgattatccttaccagcacggttatcgctctagcgttcggaagcatcttcaacctcttagtccgtcgcttcgtctccgccgaagaggcagccgcactcacatcacagacattaaagggccgcctggcaggcaaggtcgtagcaatacgggatcggataaaa

SEQ ID NO: 1006 - DNA, 891 bp, Aspergillus oryzae
cgcccaatcactgcactccctagtgatcctgtgggccgtgatgtctctcagtccgttccgccagatatgcgcyatggaaacctcatgcaactctcgccagcaaaggcatgcaccacgtagcgccttcttacgccctcaacctagcccaccgcaacatcgtgctcagggaaggccactcacccctatcgaggatcccgaagatttaaggaagagaagcccacgtataggattccacaaccccagctcctcagatacctctctctcctcggacccagatgtgaccaaaagtgggtatatgaaaaagcggaaacaggctcgattccttcgtcatgaatggcaagatgcgcactttaccttgcgtggaactaatttggctatgcacaaggatgagcttgctgccattcgcaactcccaggctctggattcgatcgacgtcgatgatttcgccgttgcttgctcatcactagctacaagctccaaattgaccgccgcattcaaacggtcagtcctacgcagcgggaacaacatcagcaaagataatgcagccttcgccttttccctgattccttcgacaaaggaaaatgagaaaaaggcattgtttgggaatagtaatgttaagagccatcattttgcggtcaaaactcgagatgaacgcattgactggatgcgagagctgatgcttgccaaggccctcaagaagggtaaagaaggaggtgcctcgatgcaagtaaatgggaatttcatctaaactccctcgtctcaaactacacctggcttttatcatctccctttttccattcagatttcagtccttcttcagattgcacgacaggccccaccagattgtcctacctgtaatttctaaaaccatatcgcatatgtggctttgaa

SEQ ID NO: 1007 - DNA, 541 bp, Aspergillus oryzae
gcggagatcccatatacactacgcaacgttctatctctttgggaccgcctgctactcaaaaatgtatctctcccagataatctccatctctttcctcgcggccctcgccggtgctgctgcgacaccttccaaccttgaagcacgccaggagagctcatgcagccaggcacagtccgcgctcaagcaaacatctcagcactacaaatcgttggccgaccaatggaatggaagcgcaaagagggcgatacaacaacttctttctcagttaaatgcagaaactgccaatattgcggatatctgtgccaagctcgccgaggcggagaaaagtgcacatgaatcttactccggtgctgaatccgacttgagttataaattctcgtaaagcggtggcattcaggttcaagaatatggatggctactagaaggtccacagaagataaatagcaagtctaatatgcgaagaactcaaggcttccagcaaccgtctgaagagaatatgtatcgtatgttcactattctatataacataatattatttcac

SEQ ID NO: 1008 - DNA, 254 bp, Aspergillus oryzae
aattcggcacgagggggacgtttcggctcaggactggaccgtcactccttaccccaagacgatctacgttggaaactcctcacggaaactgccgctccaggcctcgctgcctaaggcccagtaaggggcaagtctgattgtacagagcatttcgagatttatgatgtacatgtttatgaatgacctagggtagggtaatacttagtagggttagttctaattcttggagtcaagtattgactcactgggccgac

SEQ ID NO: 1009 - DNA, 898 bp, Aspergillus oryzae
cgaagtaatggttgcttgctctgtgtgcaagtcgtgtgaagtgtgacgaggggctccctggatgcgcgagatgcgcgaaatacggaagaccctgccccggatacgaccgaggcttcaagttcgtcgcggggaagccgtatcgctccaaacggcgtccggggtcgaaaacagcggtggatgacacgcatctcgtagacatcagttcaggaaaggccagtcaggctatgcagcaattcctcgctcggagggccagtccattgtggttgagatctgcagacacgaatgtaatgcagagtcttgatatcttaattgatcatgcactctttattctcaaaagagaaatgctttctcacatctactgattggcaatctgtgatgaaacaacaattcgactctactttccccgccgtcatctttgcccaagtcgaagagctctttgcttactacaccaccataccgtgcttcatccaccaattcttcgacctcagacaagccgatccaacgcatgaaaaaacgcagttgaaggcatctaagcttctaaacgatgccctcgacatgcaaaacaaattgtccacttggtatgacaagttcagtcaaacagcgcctcttccaacagaagtcctttcatcaatgggcgacaccttgtatccaatagtgtactcgttcacagatgtcgataccgcaacgatcttcgccgcgtattattcgtacatggtgattatccatgcgattctaggggcgtgtcactaccccggcgaacatgcggctatggttgtgtactaccgagaccagatctgcatgtccgttgaattcaacgctcaaggaatgttaggtccctctcgactgggatttcctttgctcgtggttaatgagtttgcggaccctccgatgaagctgt

SEQ ID NO: 1010 - DNA, 709 bp, Aspergillus oryzae
  modified_base (550)..(550): n is a, c, g, or t
cggtgacggtgcggcctactccatccctaactccgagacaaccaatgtcgcctctgtccckctccaccaagtaatcgccactctcctgcaccttatgcatacccgagtccacaacatccacaactgcctcctactccacatacaccctacggtgctcctcagtactaccatcctccacctcctcaccatcctacatatccttactccccccagccacatataccctatcagcacaacgcctcgtggaactggaatgctggagcttggccccctccacagcaaaactcgagttctaagagtggacctctgggttggatatcctcgctagcttcccaggcccagaagtacggcgagcgcatctcggagcacgctgcgcagtatggggatcagatcagtgcacaagcctcccattatggccgacaggtagaagagcacgcgatggcgcatggccgatggatagaggaacaggccagtctccaaggacgaaaggtggaaagatgtcttcactggtcttgtcagccgacctcgcaacgaatggcctgcgactgangctcggggccaagtctaatatccgaacgcgtataaatatcctttatactccggccacccacgccgtcgagcctactaaacctgttgagcccgctaccacactacccgtccaacgtatccgtagattatccactggttcggcatcctccgactcgtcgtt

SEQ ID NO: 1011 - DNA, 736 bp, Aspergillus oryzae
  modified_base (10)..(10): n is a, c, g, or t
  modified_base (12)..(12): n is a, c, g, or t
  modified_base (36)..(36): n is a, c, g, or t
  modified_base (38)..(38): n is a, c, g, or t
  modified_base (46)..(46): n is a, c, g, or t
  modified_base (48)..(48): n is a, c, g, or t
  modified_base (57)..(57): n is a, c, g, or t
  modified_base (84)..(84): n is a, c, g, or t
  modified_base (103)..(103): n is a, c, g, or t
  modified_base (108)..(108): n is a, c, g, or t
  modified_base (111)..(111): n is a, c, g, or t
  modified_base (139)..(139): n is a, c, g, or t
  modified_base (141)..(141): n is a, c, g, or t
  modified_base (156)..(156): n is a, c, g, or t
  modified_base (165)..(165): n is a, c, g, or t
  modified_base (168)..(168): n is a, c, g, or t
  modified_base (177)..(177): n is a, c, g, or t
  modified_base (181)..(181): n is a, c, g, or t
  modified_base (217)..(217): n is a, c, g, or t
  modified_base (234)..(234): n is a, c, g, or t
  modified_base (255)..(255): n is a, c, g, or t
  modified_base (297)..(297): n is a, c, g, or t
  modified_base (336)..(337): n is a, c, g, or t
  modified_base (352)..(352): n is a, c, g, or t
  modified_base (354)..(354): n is a, c, g, or t
  modified_base (358)..(358): n is a, c, g, or t
  modified_base (381)..(381): n is a, c, g, or t
  modified_base (385)..(385): n is a, c, g, or t
  modified_base (391)..(391): n is a, c, g, or t
  modified_base (402)..(402): n is a, c, g, or t
  modified_base (411)..(411): n is a, c, g, or t
  modified_base (466)..(466): n is a, c, g, or t
  modified_base (475)..(475): n is a, c, g, or t
  modified_base (507)..(507): n is a, c, g, or t
  modified_base (516)..(517): n is a, c, g, or t
  modified_base (529)..(530): n is a, c, g, or t
  modified_base (534)..(535): n is a, c, g, or t
  modified_base (562)..(562): n is a, c, g, or t
  modified_base (567)..(567): n is a, c, g, or t
  modified_base (580)..(580): n is a, c, g, or t
  modified_base (585)..(585): n is a, c, g, or t
cggggggtcncntggttgtttagtttttattcttcncngccgccangntgtctgctngccagagcgacaagtccgtbbtcggcntgcccgggttcgttgtcgncttcntgntgggtggtgtttccgccgctgtctcccngnccgctgccgcccccntcgggcgtntcnggctcctcntccngaaccagggtgagatgcttcgcgccggtcgtctcgnccgcgagttcaccggtntcctggactgcttccgtcgtnctgccgcctctgggggtgttgcctctctctggcgtggtaacnctgccaacgtcatccgttacttccccacccaggctcttnnctttgccttccgtgncncctnccagtccctgttcgcctacgagntggnccgtgntggatacgccnagtggatgntgggtaaccttgcctccggtggtgctgctggtgccccttcccttctcttcgtctnctctcttgncttcgcccgttcccgtcttgccaacgatgctnagtccgccnngggtggtggtgnncgtnngttcaccggtctcgttgatgtctacgnggggnctcttgcttctgntggtnttgctggtctctccgtggtttcggtccccctgttcttggtattgttgtctcccgtggtctgtwcttcggcatgtwcgactccctctagcctgttgtcctggttggtcctcttgggggtaacttccttgmtwcattmcttctcggatggacw

SEQ ID NO: 1012 - DNA, 505 bp, Aspergillus oryzae
acgaggacggaatccaatgatgaaagtgcacaaaaagaatcagatgagcctgcatctcaagacctaaatgccaatcttcccgaagaccccgcggaggacgacgacgaactcgagcgggagatgatggctgctttcgaggatggcgactatgacgccaaagcggaagaggacattgcggccggaaacggttgatctgtttcttttatgttagtttctgctcgacttctccttcacctgttcatattggggcgttgaggtgtatgtgacgatgccgtagctgcttgcgggcagcactatgttgctgttgttgataccatttggtatcccagattggctaaggtttattatgctttctcattccgttgcaattggtgcgatgcaatgatggcatagcgatggcgttgggtacctgactcacatctgattgactgtctgataagttgttcatagttctgtctctatagtatcaaggacaaaaaaaggaatctcaaattttggatatcaa

SEQ ID NO: 1013 - DNA, 789 bp, Aspergillus oryzae
aattcgbcacgagggccagcaacgacactaaagtggcgcccgaagcactgatctcgaaattcgagatcggtaggctgctcagacaagatcagagcggccgtcgcattgctctcctgggaacaatcgaagggaaacaaggcattctcatagccgaacgagcggccttcgctaccgaatctctcgaggtattgaaagcgttccactcagcaatcacccgtgtaaacaacctgggtgataatgacatctaccgctggtacctagcgtcgtctggtgtcgacagttagggccatcaatctaccgacctcaaactgaacctcatctggccatgtaccgagcagcatatcaagaagtactccgatcaggttctgcgcatggtgaccgaaacacctgagatttaccgggactatatccggccgtatatgagtgccaagcgggaagagggccggttgaactgggtgtttaacattcttgaaggccgaacggaacaggaagatgttattcttcgcgaccagggtcacggtcccgaggacgggttcctgatgcttccggatcttaactgggatcggaaaacgatgggctcgttacatctgctggctcttgtgcagcggagggatatctggagcttacgcgatttgaagaagaaacatatcccttggttgaagtatctgcgtcacggtgtgttagagggtacggcaaatatgtatccggatttggatcaggatcagctcaagctttatgtgcactatcaaccgacatattatcacttccacgttcacattgtcaatgtca

SEQ ID NO: 1014 - DNA, 631 bp, Aspergillus oryzae
  modified_base (59)..(60): n is a, c, g, or t
  modified_base (114)..(114): n is a, c, g, or t
  modified_base (328)..(328): n is a, c, g, or t
caaagccctctccctcctggccctbacccccctggcagccgccgtgggcaacgcagtgnntcaagaactcctgcgaccaccccgtctacgtctggtccgtcggtggctccgttngtcccaagcagaccgtcgaaccaggcaagtcctacagcgagcccttccgccacgacgatgcctccggcggcgtctccctgaagatcaccaccgtcgacaacggtctctacaacggcagttcccagctgaactacgcctacacgcttgacaacgccggcgtgtggtacgacatgtccgatgtcttcggtgaccctttctctggcagcgcagtggntcatcaagccatccgacacctcctgtccttctatctgctggccacagggcgtttcacccggcggtagcaggtgaaggtttgccagagtaattcggatgaggtcttggagctttgtgccgaggagtgttagggtattgtatgaggttgaatgaatcaattcgtcacggttaacaaccttatgctatgtttatgtctgggtcatgggattgggttacttaatgaatactggaaactatgtgataatgatgaacctctgtatgtaaaaagaattttagcaaataaaacttggctctatgccttcct

SEQ ID NO: 1015 - DNA, 647 bp, Aspergillus oryzae
  modified_base (458)..(458): n is a, c, g, or t
  modified_base (512)..(512): n is a, c, g, or t
  modified_base (532)..(532): n is a, c, g, or t
aattcggcacgaggcaagcatttcctttataaagacacttgaacactcttcgaatttgcaactaccttgaagtctctttttaagcctaagcctattatcgaatcatttactcgagttctcgacgaatattttagctttcagaaaaatgtctgccagcccatctccttccgctggtggcgatasaagacaaatgaacaggtccactttcgattttgtcgcgaatgctcgaacttgctttacccgaaagaagaccgcgtcaacaaccgtttgatgtttacgtgtcgaacctgccatgtcggcgagcccgcaagctcatactgcgtctatcaaaacaagcttaacagccaagtcggagacacagctggtgtgactcaggatgtgggatctgatcctacgcttcctcggtccaacaagctctgcccgagctgcggtgaagccgaagcggtctttttccagtntcagcagcgttctgcagaaaccggaatgaaactgtactatgtctgctgtgcgtncggtaacgtcttcgtatganttggaacgtcttttgtcaccatcgtgttttcgatacccatttgtggtccttttcagcatggttatggagttacggcgatgttcgagtwataaaaaaaaagaagtttttttaaggt

SEQ ID NO: 1016 - DNA, 767 bp, Aspergillus oryzae
aattcggaacgaggtcacacccataaaatgtttctaacccacatttctggaaccctcgttctttttctgctaatcatagcaacgaccctcgcaaccctaaccagatacaccatccccatcccagcagaaaccctaatcctagaaacccgccagcagctcaacgacatggcagccgcatactcaatggggacactggatgatcgaaacggcgggtattacctcctagaccacgatggtgaaattctagccgtggcagcagatggcctatgcgaagagctcgacaattcgatggcatcggcaagaagagtctacgagcaacattcacgcttcgatttatatagcggagaggtccaggaggttacccttcagagccatgatgcacagttacggagaagtggggagaactcttgttcgcaccctcgttgttatacgcatgcgctgtgtgaaacttatagtgattgctttgtgtgctcttctagtcatcattggtgttactgatgttggggttttgtcttggatggggcttgctcgcttatgctattaacatatactcaagcctttacaatgtacttgtgtgttatgcagtctctacattcttctgttctgggttttcttttggccatgtaagacgcaktgctgtgagccacatgaggtgaagttagggagtacaactgccgctgtggatagtcttagttattgttatattccgcgtcaactccgtagacactcatcttctcgttgtgaataaattagatgacctctcgttt

SEQ ID NO: 1017 - DNA, 815 bp, Aspergillus oryzae
cacgagggtaaccttaactactagttcactggcggcccgaattatcctgtgcacttgcaggtaactaccttgtctcctaaccacaggtttctttggaatgggctgttgagttgccagttcccttctccaagatgacgtcgcgtcttgttctggtcattggtgacctctttatccctgatagagctccggatcttccagctaagtttcggaaactcttaacgccaaacaagatcggccagatcctctgtctgggcaatctgaccgaccgaagtacatttgaattcctccgtggtatcgctcccgatctgcaattggtcaagggtgatttcgatgtcgactctcccaacctacccctctcaaaagtggtgacccacggaagcctccgtattggtcttacacatggccacaccatcatcccgccgggtgacgccgaagccctgcttattgccgcacgccagatggatgttgatatactactatggggtggtgcgcaccgcttcgatgcctttgagatggagggaagattctttatcacccccggaagtgcaaggggcgctttgagcactgggtattggcccgaagagaggaaccaacacctagcttttgtctcatggacattcaaggtgacgtacttgtgttgtatgtctaccaactcaagacggacgccaatggtgttgaaaccgtcgcggtcgaaaaggtctccttccgcaagaacaccgttcaatcatgagttaacgcctcgtaatatttgcttgtatatatgtcatagaaacagccacgatcatgacctcctaattgtatgtgacttgaaattt

SEQ ID NO: 1018 - DNA, 598 bp, Aspergillus oryzae
gacgcccatctccaatttactccgatgcctatttttgmtycctttcgtgcacactcaaccgacaaaatctcttccggcaaaaaggataagcwcsacccgcaaatcarstccgtcgrtatgacggrsgmcatscagcaagaagctgtcgaagttgcgawcgrsggcmatsgacgcaacgtaccacattgagaaggmcattgcccactacatcargcgagartttgactcrcgccaaggagctmcatggcattgtgctcgcyaggagagcgagatttcggcacagctcttgtctcacacacgagacgaaacacttcatctacttctacctcsgacactgcgccattctcckcttcaagacccaataaactcgccctgacatacatggttgcgraataaaaagaggmccgactccttgggcgattgcgcgcctyractgccaatkgggacttaccgccataaaatagacgccggcgagcgtactctatcttamaactcgcygacacgatargacatkgcccctkatcagcagcgtgcatgscaaagcagcgcacawtcttccctctcgcttcvgcggtattgtattacgatttcggactct

SEQ ID NO: 1019 - DNA, 758 bp, Aspergillus oryzae
  modified_base (65)..(65): n is a, c, g, or t
catgatggtatatttcaaagtttggcacccactgtttccctttctgcatgggccaaccttcctgnaagcaatggaactgctctattccgatcaccgcaaaagtcattctattccaccatcaccagaccaccgaaatacatgctggacggtgatctttcagtgcgtgttcaatttagctagccatttgaggcctgatctgcgccttccgtcagagtctcgcattgagtcctcgagcaatatgcagtccttgctcagtactcttactttcagaaacgatctctcatctttacaggcactactagcatcccagttatatttggtaaccaaaatgtcgcttcgaacagcatcgacggtaggcggttgcatgctacgatcgatgatgcatgcaggtctccatcgctgtccattccgatatagggagctctcatcgcatgatcggcagttacgcaagaggatcttctggtgtgcatacgctattgaccggtatctaagccaggctcttggccttcctcttggcatacaagattctgatatcgacgtctgcgccccaggggccgacgaaatccatttccctggatcacatagagcacacggcctcagaatggggttgtctacttgcaacctcaatgatagagcatcttctgtaccagagagaagtgccgatgcaatacagctaccggctgagcaatctgctagccatgaatcccatcaaaatacgcccagtgactccgagccactccaaaacaaaagagaaatca

SEQ ID NO: 1020 - DNA, 695 bp, Aspergillus oryzae
  modified_base (53)..(53): n is a, c, g, or t
ttcgtgaagtctgcagctgttagcttgagggaaccactaccaaaaaaaaaagnygaagggggaggaggaggbgggaagaaaggttaagataagcgttaccttgtagaagagtacggatcttgcggatttcgcccgattgtacccggtcggatatgcccttcagcagccgctcggcctcaccagctttcatcgtacccgctggcaacatctggagagtagactggaaccaagccccggcctcctgtggcatcaagtcgaacagtgacatcatcacaccagacgcatccgggaaacattctgcggggaacgagaacaacattcctgttaggagtcgctgcgaaagcacttgtccctgagacgcaatcaactgtttgactgcctcgcgaatytccggaggattcatatacggatccccatccgaggtggtgaaatcggacactgcgggcttttcgaaagcgaastaaacaggtcatggtaataatgtaatgtggcaataagagggtcgatctgctgcaaagtaagggcgctcagggctgcggagaagatcggcacagagagggaggaggtgatgcactctttggggtagtaccggacagcatccgaagaaagacgatagaagtcctcaatcactgtaacggatgattaagatcagcaactggggagatataattatgatagaaaaagagcaggttcgt

SEQ ID NO: 1021 - DNA, 922 bp, Aspergillus oryzae
aattcggcacgaggatcgccattcccaatatcattcgtcaaggccgttgtacactcgttgcaacaatccagatgtacaaaatcctygctctgaattgcttgatcagtgcctacagtctgagcgttatctacctcgatggaattaagttcggtgacggtcaggtgaccatcagcggcatggtgatgagtgtctgcttcctttcaatttcacgcgcaaagtccgtggaaggtttgtccaaagaacgccctcagcctaacattttcaatgtatatatcattggctcggtgcttgggcagtttgcgatccacattgtgactctgatctatctgtcgaactacgtctattcaattgaaccgaggaaatccgacatcgacttggagggagagttcgagccatccctactcaacagcgccatttacctgcttcaactcatccaacagatctctaccttctctatcaactaccaaggccgtcctttcagagagtctatccgcgagaacaaggccatgtactggggtttggtgggagcatcggctatggccttctcttgcgctactgagttcattcccgagctcaacgaaaagctgcgcctcgtcccgttcagcacagagttcaaggtcacgttgactgtcctgatgatcttcgactacgccggttgctggattattgagaatgtactgaagacgctgttcagtgatttccgcccgaagacatcgccgtgcgccgtccggaccagctcaagcgggaaaccgctcgtaaagccaaggaggagctggagaagctgtctgcgcaagaagcgcagaggaaagtttaaattaattaatcttctctagatctttttagggggtatggtgtttagatatactactgttgctgtgagcggatagaagtctatgcttttggcgtgtatgagagagtatca

SEQ ID NO: 1022 - DNA, 902 bp, Aspergillus oryzae
tcagagcacatcaagcattgctttacaacatctttgagcccggttcaaaatggaagtacataacgccatcgtkcagagaatctctacatgtgtgaaacaattttataatgacaaaaccccatttggcatatatcatggctcaacgaactcgacccgcgcttcaacgaaacttcgttcgaacactgtcgacacaggaagccttaaccgagtactcatgattgaccaagagaaaaaggttgctttagtagagccaaatgttcctatggatatgcttgtccaggcaacacttccatggcgactgattccacctgtcgttatggaatttcccggcataacggccggtggcggattcgccggaacaggtggagaaagcagttcctaccgacacagcttttttgatagaactgtcaactggatcgagattgtggttggaaacggcgatattatcactgcctctgcaacggagaactctgatctctttttcggggctgcatgttcattcgggacccttggtataaccactctccttgagatacagctgctagagctccctatagagccagcagtagaattgacgtattttccaatttcaatgggcgtcgatgaggctgtgcgaaaaattgagcatctgacgccggacccaacataccagtacttagacggcatcatgttcaccaaggaaaggggggttatttgtgccgggtcaattacaagcgctacagaccactgctctcgacgaatgcaaacatttactcgcccttccgacccttggttttacatgcacgctgaagagagggcctccacttccgctgccgaagaggctggccccgcaaaagaccttattccgattgctgactatctgtttcgatatgacagaggcgggttctgggttggtaaatatg

SEQ ID NO: 1023 - DNA, 658 bp, Aspergillus oryzae
  modified_base (44)..(44): n is a, c, g, or t
  modified_base (53)..(53): n is a, c, g, or t
  modified_base (148)..(148): n is a, c, g, or t
  modified_base (456)..(456): n is a, c, g, or t
  modified_base (470)..(470): n is a, c, g, or t
  modified_base (489)..(489): n is a, c, g, or t
  modified_base (498)..(498): n is a, c, g, or t
  modified_base (521)..(521): n is a, c, g, or t
gagggcctcgcgttgtgctaccaaatgaccctcacgcgaacctngcatcctwnttccagtcattactgcttgggggcgcactgbgcaaagaagcbgrcggtcaaggcctgggctctatatttacaactgaaaagctttcttgagaacnccttaactatggacgattacgayaacatcagcattggtcttctgaaagccggtagaccgaatcttgctatcgcagtgttcaaagatatgatggtgacagggcaagacccagcaaacgattcgacctcactctataaagcagccgtcggtcttgttggtcatcttcaggcatcgagtatytcggmmcaggatgtgaacaaggtatcgctttcgacgctaacggtcctacctcggaggttccagaaccggttcttctatgccagctggatgaagaagctcattggaatgggtgaagttgactctgccgcnctggtaattgagtngatgtacgaacgaggagtnaagcccggnattcaaagcacctcaatggattnatagccgcttggttacgtgatggcaatcccgacgcgcgarawaaarccgaacgactggggtggtctatggttcaacagcggattgacagtatttgggcgcggaccaattcaacaggaagctctccgaaattgaccgt

SEQ ID NO: 1024 - DNA, 946 bp, Aspergillus oryzae
cggcacgaggggaaatactcgcctcagcctctgctttcacagggttcgtcaatcttacgtgcttacgtttacgtatctacatstgaagcgattcccatttwacgtcacgcgactataattcgttcgactgtttcacacgatcactgccccacagagagtctgacacaatggccacaccaccatcgtacaccaagactacccacaccgccacatatgctggcatcaacccaactcagccgggcctgtccacggcgggcaaggttgtgctgatcactggcgcatcaggcggcatcggccgagccacagcctcatccttcgctgcatcgggtccccgagccctcatcctcctcggtcgacgcgccgacgcgctggcagaaacagccacgattgttcgcaccagtcacgcagaggtgacgattcaaactcacgaggctgagctgtgcgatgctgcgagcgtacgcaatgccatgaacaaggtggctgcggagtttggcggcatcgacatcctcgtccattgtgccggcgtcctggcccccgtcgtgcctcttctggaagcggatccggctacctttctggacggctacaagaccaccgttgtcggtacactggtaacggcgcaggctgtcgtcctggcaaacaggaccgtcagtgccagcgaggacaagccagtcacctttatcaatctcaccacggccggcatcctgttccccccattccccggcatgggagcctacgtgagcrgcaagatggccgccgtcaagctcttacagtcctttgccaccgagaatccgcaagtgcgtattcacaatgtgcatcctggactcctcagaacggccatgtcggccaagctggcagagacgatccaattgccatatgcctatgatgacatcactcttcccgccgatttccttgtctggattgcctctcccgaagcggagtttctcaa

SEQ ID NO: 1025 - DNA, 936 bp, Aspergillus oryzae
cgaggcttgaacctcccgcctattctcagtctttgtatctttattcctctccatattttatcatcacttctttcatcctccttccacattcaccatggccgactctttgactgaagaacaggtctccgagtacaaggaggccttctccctattcgacaaggacggtgatggccagatcaccaccaaggagttgggcactgtcatgcgctctctgggccaaaacccctctgagtcggaactccaggacatgattaacgaggttgacgccgacaacaatggcaccattgacttccctgagttcctgacgatgatggcgagaaagatgaaggataccgactctgaggaggagatccgggaggctttcaaggttttcgaccgcgataacaacggcttcatctccgctgccgaattgcgtcacgtcatgacctccatcggcgagaagcttaccgatgacgaattgatgagatgatccgcgaggcggatcaggatggtgacggccggattgactacaacgagtttgtccagctcatgatgcaaaaataagcgctaccttcctgtatatcccgccaattgatagcgaaaatgagtgagagtaaagaatcatattcatcctgtctcattcccgcttctgctattgctttgtagtctactgagtccgacatccgctgtcgatggcagtcggccgtgcgtaccgttttaagcgttgccttttttgcgggatgaatgcagttggatggatttagacggagccagacgaattgagatgatgaggtggaatctagaaaacaccgaatgtctcttgttttggcatgaccactttttggcttgcaatttcctataccgttttccttttgcccttctctcctacctactattgacgtttatcatacaccccattcaggttcctgatttctgggcttaggctctttcatcccc

SEQ ID NO: 1026 - DNA, 732 bp, Aspergillus oryzae
  modified_base (101)..(101): n is a, c, g, or t
  modified_base (504)..(504): n is a, c, g, or t
ctttcgatccaaaagcaggtggcggcttcactctttcagcatgttcacctcgctgtccattcgttctcctttaccagcccrgtaccattgtgtcctgcgancccgtctcttcagaccgcccgaccgacctgatacattccctctttttgtcttgaataaactacgacttttacaagawagttaccctggttattgtwatattcttctccttccagtaaaacacttggctggaaagttgatacgacctggatccctattgaattatacttcttcacctgtcttgtcgatacgaatagctttacagtatatacctttcgaaaaccgaaaccgagaaccgtatcctaccggaaaacttgactattcaaaaatgatgcacctgttcaagagactcgtcgcccgtgacgatgaaaaaagcaacgatgatagacttactccggccatgatcgatcttttgatcgctcttctagttctcgtcctagtcggtatcgccctggttggtgcccntcttgttttgcgccgcaagcgccaaaatcggaaacgatctgaactcccggtccataacggtcagtgcacgactcatcatcgcagcctcacgatttctgcgccgccatatgccaagaccgagtccgttcttgtctacgatgagaagaagagactcatggagaactcgtcaagccccccacccagcccagttccagagatccgcattacgttccccgaggaagaggatga

SEQ ID NO: 1027 - DNA, 650 bp, Aspergillus oryzae
aattcggcacgaggtgacgatggtgatgatgataaaagagccagcactgctgtaaagggcagcccatctgccagcggatcgggcadtgccaacaatgccaccaatggcagccagacttcacagtcgaaaccggagtctacagcctaggacgctgcatctaaaatgagtttcctgctgtctccattgatgaatgtaccatgttgcctatggactgagcctgaataaaaaagctcacatgaagttatcattatgagacttcctgttgccttcgcttctactctgatttctttttcttctttttttactatctatatacttcatctctttcttcccatttcctttatttccctctacatttgggcctaccatttcctggtggtgttcacccttgctgctatcttagccacttggtctgtattgtatgattccgaatggcacattaggaaggcgatgcacgtttcccactttgtgcttttgtatctatttcattttctaaacgttcctgttttcttacatttgtatgccctgcgacaacccatccgttctcatctctcgtagtcttttaactcttgatgattgaaggtagcaacaacagaaaatggcaaactaggttaagtaagatacttgaatgaaatagtagttttcgagtt

SEQ ID NO: 1028 - DNA, 872 bp, Aspergillus oryzae
ctgtgatctcatatgcaaatgggatactttcaatggcgcccyttctctgcacacacatggcggctgcctgattcgcctgctgtaccgcagctcgatcaaagcgtcaaagtcctcgagaggctgtcccgtggcagcgtacctcgcaaattcagccgaaaagtagcccacaaaggtatctccagcggcggtggtgtccaccacattcttaacacgcacgccgcgaacagagccgttccgaccggtggccgttgagaagaacacccccttcgcaccgagcgtgatcaaaacaatgggaatcttagccacctggtggaacagtggagccaacagctccggttgcagatcggcttcggtttgagatcccaccgggaaatcaggaattgattccgccatctggatagtctccgtttcattcatgatcaagacagctgtgccggacaatgcagccaggggaataccatccggatacacgggtgcaatattcaagacgacattcgtcggattctcgctcttattataatgctgcatcagaccaatcacagttgacctcggaatttctccctgcagaaccacgacctgcgggggagcaggacactgtgtctggacaacggaaaggagcttatcgacatcattcattccatcatggtttgctcccggtaccacgacaatgcggttctccccttgctcgccttcctccacgatgatagtcgccgagcctgtttggcagtctgatctttgctcgattcccgtggtatccacccctgacttttctaatgctggctgtaataacgtcggataatatggatcattcgcaccgactgcaccaatcatacgcacagccacatccttgctgggttctggaggtaaaagct

SEQ ID NO: 1029 - DNA, 803 bp, Aspergillus oryzae
aggcactcgtcatgagtctcgacaaactccccaatgaaatcctttgtcttctccccttctacatcgataacatcgagacgtttaccaacgcagcatcatcatgtcgccgactccgtgattgtttatacacagcactccccaacaccatactgcggctagccgccgcctcggcccctacattcttttctccccacccgcatttcctcgtcgctgccacagcccgccaagtcagtgactgggcattaggggatgaaactcgcacattagccctccgcgaagcttccaaggtggaatcgacagcctctatgaattctgcctccaacatgcaggcctaacattagaagacattcgaagaacacatctagcccggttctccatcattaaccccctctcggacaagatcgacaagatggccggtagacagtggttcgccacgccaaacttctggaatggcggggtgagcgaaccctacaccatctacacggaggcagagcgcgccaccttccaaatgatcayatacggggagttgtttgggcggagtatggacgccttcttacagccggaaaagaatctcccctatttcgatatacgaacacggatcgactacttcacctattgtctcccagattgggtttgttctagttatcccgggtttgcaaggttggcgaccggtccgtatgcgccgcacctggaaaggccgagcgaaggagaccaagtagccttgcatcatatcctgcattgtggtcgatggcgacgcatgtgggctgctgccattcggtcggttctgggaggtgacgatgctt

SEQ ID NO: 1030 - DNA, 786 bp, Aspergillus oryzae
  modified_base (30)..(30): n is a, c, g, or t
gctctttcgcctgccgctcaattatatctnacccaaccaaccgctagagtgcctgcattcggcacattggcwgcatctgcatcgggtaaacctaccgctgacagcctgggcacattacctagtattagaggaaccggaagtkataattccgttgtgtcttctcacgggccaagctctttagatagcaaggaacgtgaaaagctacataaaagaggaagtgctggtgccasattggctgggaaggtagcctctttaggtattgatcgataaagcttcattggtattatgcacttgctcttcgctctgctctgcttcacttccacagtgatttgccatttaatgataattatacttaatgaagctcaagtggacatgacatgatgtgaggactcgggtttggacgatttatgtatctgtttggaggccaattcaatcagcttccacatgtttcgwtttatttgcattcattgacatgttgtctctcttgttcctccattttattgttaatattctctttcatcttacgattgactccgtgtcttcttttcttacttccctccttttctacattgtgttccgtttctcatggattgacttttgttcctttgcattccctaatgccgagggcttaatttgcacacattttataccattcaacacttttgggtctcctctctccctcccccccttttttctttttgtgtgtstcggggtgtgggtgaaatctggttgtttttattgcaagcgtatccgaggaagagtgtcccattatgataggattagagc

SEQ ID NO: 1031 - DNA, 209 bp, Aspergillus oryzae
  modified_base (23)..(23): n is a, c, g, or t
  modified_base (83)..(83): n is a, c, g, or t
aattcggcagaggcagtgccgtnatggatgagaatttcatgctcggcatggggattcccgtcggagaccttcgtcgccagatncddtgcctagaactagtggcwggttgcctcagcgtgcggagaaatgggtttgtgatgcctagttttatggcgtattggattgtttgtgcctcgtatatagtaatgccacawaatttttttcggttt

SEQ ID NO: 1032 - DNA, 604 bp, Aspergillus oryzae
aattcggcacgaggcctcaattcgcttttgggataccctctttttgtatactatccttttttaaaccttttcagtcttttagactttactacacacattcacaatgggcaaggacgctggttttgctcctggtgactctgccaagggtgccaagctcttccagactcgctgcgctcagtgccacactgtcgagaaggacggtgccaacaaggtcggccccaagctccacggtctctttggccgtcagaccggttccgttgatggctatgcctacaccgatgccaacaagcaggccggtgtcacttgggatgagaacactctgtactcctacctcgagaaccccaagaagtacatccccggtaccaagatggccttcggtggtctcaagaaggctaaggagaggaacgacctcatcacttacctcaaggagagcactgcttaaatgctccattttacgtgaataaaatactttctccttcccagttcaagcggcttgtcgcatcggatctgatacgtccccagaccctcggcagtttgacggacagggcatgtaatattactcaataccttgtttacttgcaatagatgtgatttttcctttgtg

SEQ ID NO: 1033 - DNA, 632 bp, Aspergillus oryzae
  modified_base (164)..(164): n is a, c, g, or t
gcgatggttcagaaccaaccgaggtccacggaccaccgacaagcacaacaccatcaacaaccaaggagagttctgcagcctcttcgaccgccacaaccaccaccacgcccacaccaactgccacagtctccacggaggttctggatttctcccgaatcgcagtnctctacatcttcgagaaaactggtacgcttgatgcggccatgctctcggaagagaagattgaaacatacctcactggtccatacccgagctcaaaggacaaatacactatcgatctcaccaactcaggcgtcaacggaaactataccttgaactttgagcgcgtttcaaattacgtcacccacgcgggaatgttgtgggtggaaagtagcgcggtatcttgttataatgtatttatttcatctatttgttcttcataagatgaggcatattgtcgtcttttgtgggtgtctttctgtacagtgcattattcccattttgttttcttggttttctttgtgattttcgctgggtgcaagggatcatacccggttgatttctggttggactggattagagagagtagctaggtatatatccccactatatgctatgctataaacgactgaatatatatctttgtctcgtca

SEQ ID NO: 1034 - DNA, 379 bp, Aspergillus oryzae
  modified_base (191)..(191): n is a, c, g, or t
aattcggcacgcaggaaacaagaccattagcgaatacaacacgatatcctccgccaatggtgctgcgattctccggtttgcctccatgttcctccgccggctcctttcccgcgtcctctccctcctcctgccgctggcgatasaagcagcctttacctctatttctatcctgtctttcatggctgcgcgtntccgctccccagggatgatcacacagggctcctttcgaattcgtttaccagtgcgctccgccaacacttttcaccgcaatcggcagagaaccccgctatcttcagacttctggtcctagcggatccccagctagaaggcgacagcactctcccgaaacccgaagatgaactttctgctcggattcaac

SEQ ID NO: 1035 - DNA, 785 bp, Aspergillus oryzae
aggctggaactttcaacccaatgatcgtcaatgatctgtttaaggagcaatcccaaccatggcagagaattgcgactgctcacgtcacaaaggtctgggatgctaccaaaacatttatttgcgcggccgttgcggaagttagtgatatggcaaccttgggagcgttgttgaaggacgttgtcgagccagctctcagtgatctcttgcacagcatggaggcaaggttgactgaattgctagagccgcatcaagctggacacgcgattacttataatcactcctttaccgaggatctacagaaggctcgtcgtgatataatggaggaccggttctcccacgttttaactgatttcttcggcgtaccccaaattacaacatcaaccaatacctactacaacaactacgacaaccccccgcaacaagaccccttcgacgatgactgttactacaacaccaacaagaagagaaacaagaacagagactttaaccttcgtaaacttttagactcgctgctcgaatccactgaaaccgatatgatctgctacgccgcccgggaagctctcgattgtacacttgcatactacaaagttgcactcaagcggttcaycsmtggtgtcgcaactgacgtggtcgaaactacccttacgaagtctctcaatcaactgctttcaccaatagtagtacaccatatgtctgatacatcggtctcgcgtattgcaggggaatcgaaggaaaatcgcgacttacgcgaacaactttccaaaaagctcgagattctagaaagt

SEQ ID NO: 1036 - DNA, 465 bp, Aspergillus oryzae
  modified_base (73)..(73): n is a, c, g, or t
  modified_base (265)..(265): n is a, c, g, or t
agatttacgttagtttgacctccgttgcctccgtctccctacgtgataccaccgtcgttccctccctagatanaatatgtcctaccagcagccttaccagcagccacctcctccccagggatactdccctbccccgggcggccaatatcctcctccccagcccatgcagtaccagcaacccccaccccaggaggagaagaaggaccgtggttgtctgaccgcctgtttgatggccatgtgctgttgtttcctgtgtgaggwgacntgcgawtkttgtattgagtgtgtcgagtgcttgtgttgtgggtgttagcgatggaatctggtttttaattgtcattcttttgttttcttacgcgaatattttcgacgtgatggtttgatgtttaccttcttaatgctctgcagctttctttatttacctatacatttccatgttaccaatatattgatcatgtgactttc

SEQ ID NO: 1037 - DNA, 705 bp, Aspergillus oryzae
ggccccgaaattatgcggtccgcttagaggtggattcggcatctttagttccttagatcagaccacagctctcttccccgaccttcttcttttctacttgtgtactgtgttccattcttctacctctttccttcttcttttgtttgttctagttaccaccccctctgttggaatacgctgcgagtatcggcgtcttccaactttaaaattgatttgtggttgacaccaccatcggtgaagatcagggggtgattcttattcttcttcgccccattttgcctgccttctcttcgttccccatcccaccttactcggacacctggttggaatctcgccctcccccatagcgaascaacatggcgcaactcgacactctcgatttggttgtcctggtggcgcttttggtgggtagcgttgcctacttcaccaaaggcacctactgggctgtcgccaaagatccttatgcctcttccggtccagcgatgaatggcgccgccaaggcaggaaagactagagatatcttggagaaaatggaagaaactggcaagaattgcgtcattttctacggttcccagactggaactgcagaggactacgcctcgagattggccaaggaaggatctcagagattcggtctcaaaactatggttgctgatttggaagattacgactacgaaaacttggacaaattccccgaagacaagg

SEQ ID NO: 1038 - DNA, 400 bp, Aspergillus oryzae
aattcggcacgaggccatggccatgactggcttttaccggacgatgatcagacctcgtacccatcgccccttgagcatgctcaagtatgatcccgttgtgaagaagaaggtgctattcctagaagcgacaaagggcggaagagcgaaataatcatgtcctttcaacgccttcacacgatcttccgcgcatacgcagctgagatagaaatgatgactgcttcgaccttcaggcggtgtcgggcagcaaagtttacgagacaaccttcactgggtacggcctaccgagttgtcggatgtcactcagtctgttatcgaacgataaaccatgtacattagacaacatcagtgcggataatacttggaattttgtcatactccgggatgttgccgtgctgtatat

SEQ ID NO: 1039 - DNA, 404 bp, Aspergillus oryzae
caggatttgtttgctggaggtgaaaagtctggattagctgtacaaaaccccgcatgatatcaagaagaagatcatcgaaaaagcaaaacggtctcaggtcccagcatctgatagctccgaaccccgacggtctttcttcacaggtcccgctcgtactctcggtggcgatgacacccccagtcgggtcattgatgttccaaacgaacctgccgcgcgactaccacagcgtgttcagcggacactacacttctgggctgatgggttctccgtggacgacggtgatctttaccactctgacgacccccgaaacgcggaaattcttgatggtattcgccagggtcgcgctccgctttccatcatgaatgtgcagccgggtcaggaggtcgatgtggagatcaaacagc

SEQ ID NO: 1040 - DNA, 526 bp, Aspergillus oryzae
aggcgacggaagcgctggccgttcattgatccgttaaccccagggcggctcggcttgccttacttatcccctcaattaacacggcgcggcgagtacgacgcttcctatatcccctcagagtcttaaccccccgtcccccctgggtcgtgttgcccgatctctgccgccatctttggacggcgtaaatagcctctccctttcttccgaggcccctctgcctctttaagatacatggcaggcgtgcaactgcaacaacccaccatgaccgactatcgattgccgctccatcagccaccacctgctcggaagccggttcctgggatgcatgctggttatccattccagtcctatgatgcgcacctcatcaagcaacagctctctcacccatcctctcgcctcacaaatcgggggccggcatgcctttcggcacaaatgcgctcgcccctataatgcgctccagcaaacaaaccgtactcccaamtaccccctttcgccctcatccatacccatgcacactcctacctcc

SEQ ID NO: 1041 - DNA, 833 bp, Aspergillus oryzae
  modified_base (147)..(147): n is a, c, g, or t
aattcggcacsagggtttgcttcggcaccgcccttcttccatttcgttcttcactccttcgttctcttttgacattcctctctattattctccggtcgtcgacctaccgtttgattgaccttgtcctccgtctcttgcaattgagtntggagcttgtgtatgtcccggtgacattcaactacgccttgctggtggagaggaacccaattccgttagctgcagtctgtcgttcataactatcagaacctacttgctttcacggtagcttatatctgcaacttgttaaagctcattaccaattcctgcctcacaatgctgctcccgcggctctcttctctgcagtgtcttgctggcctggcgactatgccagtggccaatgcttacgacggcgacgagaacatcaagagcatcccacttcgcactcacagtctcgctccgccatacctggattcagacttccaaagccgctggttcgattttggtggtgacacgataatccgcgcagacaaatacatccgtcttacggccgatcgaccctcgcagcagggctggatcttctcccgtgttccccttactgcgacaaactgggagatcgaggtcgaattcaagattcatggaaatggtaatctgcacggcgatggctttgccatgtggctcaccaagcagcgcgccacgcaaggtcccgtctttggatcaacggataacttcgagggtctcggtatctttttcgacacatacaagaacaaccgtcccggcacctcgttcccttacgtcatggctatgatgggcgacggacagaccagctacgaccaggcgcacgacggcaaggccaa

SEQ ID NO: 1042 - DNA, 697 bp, Aspergillus oryzae
gacaaggagaacaccatcagacaaaatgtcggacggagaagagactgtttccaaccccgttgttgccgccgatgaggtcgaggtcagcgccgacgccggcgcggtggccagatgtcggtcctcgacgccctcaagggtgtcctccgcatctccctgatccacgacggtcttgcccgtggtctccgtgaggccgccaaggtcttgaccgccgcaaggtcacatgtgtgtcctcaacgagggctgtgaggaggaagcctacaagaagcttgthattgccctgtgctccgagcacaagatccctctcatcaaggttcccgatggaaagatgcttggtgaatgggtcggtctttgccagcttgaccgtgagggtaacgctcgcaaggttgtaaactgctcttgcgtcgttgtcaaggactggrgtgaggagtcccaggagcgctctgtcctcctcaactacttccagactgagcagtaaattcgctctttggaggtagggtagggattgtggggtcatgataggctaattcgggttcgattgatggaatggttgtgtttgtgggtttcttttttctgttttcgggagaggtcttccctatgtctcatcactgttctgttgattggggttgagttgcctgtctttggaccatgatctctattttttttttttatcctagtataggccaatggcatgtacgat

SEQ ID NO: 1043 - DNA, 659 bp, Aspergillus oryzae
aggcttattattagaagcttccaacattacttctcactacacttctcttcctatcagtttgtcgttccacataatacttgttggatttccactcgagaaagaaagcagtgattgcccttgtcttgtgacaaacgaaactagtaaagaccatgacgtccatcggtactggttacgatctttctaattcggtcttctcgccagatggccgcaactttcaggtggaatatgcagctaaagcggttgaraatggcggaacagccattggtataaggtgcaaggacggcgtcgtgctagctgttgagaagatcattactagcaagctcctaaagccgggtgcaaataagagaatagcaacagtcgatcgacacgttggtattgtctctgccggtctagttccagacggtcgacactttgtttcccgtgctagagatgaggctgcttcatggagaagcgtatacaagggccctatccctgtgtctgctctgtcgaatcgtttgggcagctacgtacaagcttataccctctactccagtgtacggccttttggtgtgaccgctatcgtgggcggctgggattctgaagccgagcttgccgtcgatggtcaagtcggcagttggcctaaatcaggctctgggggtaaggttgatggggctagggct

SEQ ID NO: 1044 - DNA, 719 bp, Aspergillus oryzae
ggatctactttctacttatattcacatacaaacaaatcagtactctatacctccttccagttccagaacttcagatatggataccaaacacgaatccaaagagtatgcaaccagcatccacagcgttgcatccacaacaaccacactactagacacatcaaagggcagcttcctcgaaggcaagcgatttcgtgtcgaagcaaagggtatccgtgcactccgcccacccatgcccatgagacagaatgaaatccccatctacaccgccgacggctccctagcatatacagctaccaaagcaaaggccatgtcgagtcacaccatcctcgcttcccccaaacacggagacctcttctccattgattttaaaccaggttgctgtccctggatccgctttttgaatcccatcgaaggggacgtcatcccggagattgccttggaggggaaattgaccacccgggccatgtcatttacacctccggagggggggtgtaaatgggaatggaagtactcgataattgactctccgagtgggggtaagcttaaggctttgtgtttggagaagayasatgggtcagaatgtggaaaagctacacggatcgcctatcttctccgaagtccagatacgcgtgcgacaggttcgtcttgttgttccgctgggaatgggggtcaacttgtaattagtccggatgttgacctaagcatggtggaggaagctc

SEQ ID NO: 1045 - DNA, 225 bp, Aspergillus oryzae
gcttggtgggttttacccgtccctaccatgagcatgatattcatgaatactcgcgtgccawtacatggtatcsgtgatatttgccttctatttccaaaacgtgggcagaaattacgtcggcagtaatatggcaggtggcctaggttgcaagacgacaatcgtgataggtctcttttgtgtgtaatgcggatgactgcaagaaaaataaattgattcactcgatgc

SEQ ID NO: 1046 - DNA, 645 bp, Aspergillus oryzae
aattcggccgaggcaccattcggtggctgcagctctcctgcagaagaatcactgaagtgggcagggaatcagagcatcgatcgataaccttctcttttctctctcgaagggcgaaaaaaggataaaggacaggaggaaagatactgcggtggtgcccgagaaactgagtttcccgacaatattaccggaccttctgtcaagagctactatctcgagacatatatttttttttttggcgtacttgacttattccatcgttcccttgatctgcgtastcaaactaacgccacttgcgtytacttcatcatggctggtacaagaaactatgatttcctgatcaaacttctgttgattggtgattccggagtgggaaaatcatgttgtttgttacgattcagcgaagattcatttactccatccttcatcacgaccattggaattgacttcaagattcgtacaatcgaacttgacggaaagcgtgtaaagcttcaaatatgggatacggctggacaggagcgctttagaacgattacaacggcttactatagaggggcaatgggtatacttctggtctatgatgtcacggatgaaaggtcatttcaaaacatccgcacatggttctcaaacgtcgagcaccatgcaagt

SEQ ID NO: 1047 - DNA, 845 bp, Aspergillus oryzae
gattaccaagtacaagcagggtaccctgggatatagtggacgactataacctagcgacctggttacgcggatttcaatcaaagcgtgaaggcctatttaaactggacatgtttatatcagaaatacggctatatgtgaccaagtacgcaagttacatgtttgagctgggcagaggctcgatcgatagaaccgacactgttacctgtctgacagaaaatgaactcaaatatctaccgctatgggctggggggaatgatgatggaacgggaggggtcttcatggaccaagatatccccatcttagaaacagggggtttctctacaccaggtccagacgttcacttaggtagtacagcgtcaacggccgattcattctcgatcatcggcactggagaaatagagagtactgtccaaggcgcgtcccacgagaccactgatggttatggaacagatgtcatgtctatacaatcaatgactgttagttctcagatagaaaagggtagagacagcagttacgaggagccagcatcacttgaaggctacgaaacggttgacgacagttctttcttgttgaactcatcggccgatggcgacgacgagttttcctttgactgttagagcgatggcagtgacactgtcgttatgcacacattgagccagtttgatcccttgagtsattttgaggaaatggatttgaacgaggcttgtcccagtyctccgcccgcggaaagataaaacaacacaacttacgaataaactcgaggacaatatacagaagtattccgtgaagcagttacgatcgattttcataagttatgagaacaatgaggattttttttcttaccg

SEQ ID NO: 1048 - DNA, 724 bp, Aspergillus oryzae
aggcctccatccattttttatttcttgacttgtatactcatatctcttatctaacctaccccgcatcaccatggctgcccccgcagacatcaccatcaaggacctcagtggagagtggacgatggacaaatccctctccaaccccactgagcccattctggccctgcaagaatgggctggatgaagcgtaaggctctcaacattgcaaccgtcaccctcagcgtccaccaatacgcggacgaaaaggaccccaaggtcctgcacgtcaacatcgaccaaacagtcaccggagtatccccggcacaaccgaacaccgtattaccgactgggaaggacgggagcacgatgaccacgtcttcgggaaggtcagaggtcaatcccgcttgatccggggctcgaagggcgacgatggaaaattccgccctaacgtggaaatcgctaccaagaccgatgacgaggatgtgaagaagttcctgaagggcgagattctggctgatggaaaggatactgagggcttcgttgctgacaacgtcggtgaagagtatggtgagggcgagagtctcttcctccagagctttgtgcagaacctggacagcaccggcggctggactgctgaacaaatctgggcttcgaagtgatcgatggaaagcgctactacactcgccgtgtcgtcgttgccaaggacggcaaatatgaaaaggcccgttttgtgtacaccttcatc

SEQ ID NO: 1049 - DNA, 724 bp, Aspergillus oryzae
gaggattttggtgacggttttcttgtctcattcgcagcactacgtggatgctgtccccaatacatcttctatctcgccggacttgccttcgttcaattgccactgcgattgatcaacctcggttcccggttttcctccagcaacagtcactctccactccattttcgtcgtctctagtctactcaaaggctttaaagttccccagaccaacctcaactcgactcatttcttgttcattttcacgtctatatacaacatctgtgaacgaccttgccaaaatgagttcccttaccccctaccagcgcaaacacaaggtcacggtgatcggctcaggaaactggggcaccgctattgccaagattgtcgctgaaaataccgctagcaaccctgccatcttcgaaaaggatgttcaaatgtgggtttttgaagagaacgtggaagttccaaagacctcccctcactataacccatcttcgcccttatgccagggtccccagaagttaacagagataatcaataagacacatgagaatgtcaagtatttgccaggaatcaaccttcctacaaatttgcacgccaatccctcattggaggactccgttaaggacagcactatccttgttttcaatttgcctcatcagttcattatcaagacttgtgagcagatcaagggcaagattctgccatatgcgcgtggtatttcttgcatcaagggtgtcgatgt

SEQ ID NO: 1050 - DNA, 718 bp, Aspergillus oryzae
gaggttttccaaagcaaataccaattgcaccattgcggagtcgttggaacgtattcgccccattgtagagttggccaaaacaaaaaacattagggtccgaggatatgtttccgtcgccctgggctgtccgtatgawggccctgatgttccaccgtcaaaggtggctgacatcacggccacactgcttgagatgggtgccgacgaatgtcagtagctgacaccacgggtatgggaacagccccacgtacgatggagctcctacaagcgctcaaagcggcaggaatcgcgaacaacgacctcgctctgcatttccatgatacatatggacaggccctggttaataccgtcgtgggactggagcatggtattcggattttcgacagtagtgtgggcagactcggtggctgcccctactccaagggcgccactggcaatatctcgacagaagacctggtccacacgctccatagccttggaatgcacacgggaatcaatcttgaggagatggctaagatcggcggttggatcagcggcgaactggatcggttcaacgaaagtagagccgggaaagccacccttgcaaggattcaagaatgaggaccggtattccgcagaaaggacccgaatatcttcatcgactaagcatgtgtctgagaaattgtcatcttttgtcgtgctgtaaaacacacgctgcaaattgcggggtttcaagctctgc

SEQ ID NO: 1051 - DNA, 721 bp, Aspergillus oryzae
aattcggcacgaggagataaatgagatacttcaggcgctgttaaacatgtcttcttctaaaccctctcttactacccaggaactccagacccttgcctccaaggcgatcgctgctaaagctacggcctcactgcccgtactctaaattccgcgtcggggcatgtattctcacccagtctggtgagtacatcgttggcgccaatgtcgaaaacgcatcctatcctgtcggcacctgcgcagaacgagtggccttcggtactgctgttgtcgctggatatcatgacttcaaagctgttgctgtcgctaccgatagtaaccccccagcctccccgtgcggcatgtgtagacagttcatgaacgaatttacgactccctctttccccatttacatgtatggctctgaaggaacctacactatcaagacaatgcgcgagcttctccccgactcgtttggaccggagatttctcaaaggaaagggtacagtcttcgtagttacggcgatttatctccctccaagttctttaggttttcccctgaaggctactctgttatgttgccttttaagaggtttgcatataacggcactgttgtagagagtctctgtcactattgttaagggaagaaaccagtttgcgtggacctacataatggccacctcatgtcgtattaaaatttaggtcaaattatcatggtcgaccaagaagctcttttcgccataag

SEQ ID NO: 1052 - DNA, 919 bp, Aspergillus oryzae
  modified_base (147)..(147): n is a, c, g, or t
gtttccttcaccctcgccttctttgtttccctctccatgtgcctcggactttccttcgtcgcggtggactgggtcgtcattgcaaataagctgaagcgaaacgtagtcctcgaagccgtactcagggagacaagggctggaggccgnagctctccagggtggaaaggcacaatccagtcagggttgccggcacattccttgttggtgtagacacccagaccgcggcactgctcgaagctcttcttgttgagcgcagttacagtgaaggatcrrraagaccttctttggcttggagtcgatggtcgagtgctcctcgaggttgtttccaggcagtcttccaacatggcaattgtcgtggccatgaacctcgacttcgacaacgcttacgctgttgccatagacggctggggcgagagcgagagaggcagcmaagagctttattgcgcttgttagccatcgcaccatcgaacaggtcaatgttagtgttacttaccgtagagaaatgcattttgttgtttgcagatataataagagtcgaagtcgaagatgtggttgaagatgtatttatgtattccaagaacgcgccttttgtccatggcaatagcagcctccatttttcttagcctgtctcccctcctatggaatgaaggagctgaactggttatcccggatatacattggcacccttgtctgggcttctactggaatgtgtcctgaatatttagtccttgactgagctggaactatctcccctggcacctgtcgatcattaacttttgcttgacacaacggccctggctgtcattccgcgttgatgaactcaagcaaggatcgtggtccccctatgcaagggcacgcgtcttgtcaaaccccgtcaaaactcctgtcaacataaacaatccatggatatggttaacag

SEQ ID NO: 1053 - DNA, 990 bp, Aspergillus oryzae
aggcttgaatcgagattctactccagattcattatccgagtccgtgcgtctccagcaggagaaggagtactggsaacgggaactggatgtgatgatggtcttccgctatattcgcaatcgcttcagtcaacgaggcagtaacgccgatacttaccagccccctgcacgccggcccccgcaagatgcatcccgacgcgccgcgattatccgccagcaccacccgctggtggcacgagcacactcccgttctcaggcgcaagttcgacgtcagtcccagcactccaccaatcaatccggcccaacgggtatctcatcccctattctgcgccacatttccgccgtcccagttctagctgcggtcagagcgcgaactgtctgctatctccagccgccgaacccttactggttccagccgtaactattgggacattggcggcagtgtagacagtggaagtgctattgcccccgtcggggggttgggtcttggggggatgtctaaccatccgctgtccatcccggctgcatttaccatttacgacttgtggcaatatcaagaagcttccccaattcaacccatctatattgcatgctggccatcaatgcttaacttaatcatgctgcgtcgttttccgagcaggagtttctcggatgttgtcatgattaatgatagccataccttgctttgttgggcttggctgtctgtctctttttgttgctctgttttcctcggtgttcattttcttttccttccatatacatactgctctaaatcatctcacatatcatcctcggtaatgcatcagtgtggtttctatgcatttttcttacatatcacgaggaacggcaaaggcttagacatatatatcaaccggaacaggtgcatgtcaacggtgtacagtatgtaaaggggcgactcggtctggggttatatatacatcggatggtgactgtctatattctctctcgatacacatcaatcacatatcgcat

SEQ ID NO: 1054 - DNA, 524 bp, Aspergillus oryzae
  modified_base (13)..(13): n is a, c, g, or t
  modified_base (18)..(18): n is a, c, g, or t
  modified_base (56)..(56): n is a, c, g, or t
  modified_base (62)..(62): n is a, c, g, or t
  modified_base (79)..(79): n is a, c, g, or t
  modified_base (88)..(89): n is a, c, g, or t
  modified_base (93)..(93): n is a, c, g, or t
  modified_base (119)..(119): n is a, c, g, or t
  modified_base (122)..(122): n is a, c, g, or t
  modified_base (129)..(130): n is a, c, g, or t
  modified_base (135)..(135): n is a, c, g, or t
  modified_base (138)..(139): n is a, c, g, or t
  modified_base (144)..(144): n is a, c, g, or t
  modified_base (147)..(147): n is a, c, g, or t
  modified_base (149)..(150): n is a, c, g, or t
  modified_base (222)..(222): n is a, c, g, or t
  modified_base (226)..(226): n is a, c, g, or t
  modified_base (228)..(228): n is a, c, g, or t
  modified_base (233)..(233): n is a, c, g, or t
  modified_base (235)..(235): n is a, c, g, or t
  modified_base (237)..(238): n is a, c, g, or t
  modified_base (240)..(240): n is a, c, g, or t
  modified_base (281)..(281): n is a, c, g, or t
  modified_base (445)..(445): n is a, c, g, or t
tctcttcctcttncgtcncagtatccgtctcattgcccactacgctcgatcacaancgsctncctrcccctctctacanacasccttnncacnatatcacctasttgctccctgccctncanaaggctnnatcgnaannccgtntcnanntcaacatctaatcttttatatatccttattaatttcttaccttttcattttctctatatstttacactcgtncaantncccantntnngnagtactcctaatcgtcataaaagtcccggtcatgtgtcttnacggtgtscagttatcattccctttcgcttgcatttctttccaktctgtatactcatgtttattttcaccctcacgaatctcctacttgcgcgcatcttgccattgactasctgcakaccccttcgatccaatttctatcccaacccccacaaaaaccgcacanaccctgcttttaggaacacttgasagatttaccagcagcccttcatcttacagatcccaaatgcgctttataaattttc

SEQ ID NO: 1055 - DNA, 557 bp, Aspergillus oryzae
cagtggcccggagcagcggagcaagctacgtggccgcgagcacacacgcgaagctgcgacagwagcgtggcgcccctccaagaagcggcagcgggggcgkktgagcaagccgacaaggctggcktttgggakgagagcgcgcgccgaaakgaagaagaagagggagcgcgtctgtgagggagttgaggagcgtaacagtccggacgcggaccccgagggtggcgatgttgttctcgcaaacatgtctgcagtgaagcggccggaaggttacccaggcccgccgcagggggcgagccgcccccgcgacggcaagcgtggcgggggccgcaggcaggagggtggcgtggcggccaggcctccaaccgagttctacactgacgccaattcccacattgcggaggattatctccggtttgccgtatgcaagaatgawgatgttttggagaccgccaaggagaggctgcgcggtctgaagaagtatattgtacagtgaagttaacactcagtgcaaaagctttttgttgagccgtagaacagagaaccataatggcatgagc

SEQ ID NO: 1056 - DNA, 940 bp, Aspergillus oryzae
ggatctccttcttcccttctttcttcctctgcacccgtccttgctctgggagttctgttcgggcagacttacttcaaccatcaattgactctgtttctgtattttcttatttacctctcttatccaagatgcaaagagctctttcctccaggacatctgtcctttccgccgcttctaagcgcgctcccttctacagatcctctggcttcaacctccagcagcaacggtttgcccacaaggagctcaaattcggcgtcgaagcccgtgcccagctccttaagggtgttgacactcttgctaaggctgttacttccactcttggtcccaagggtcgcaatgtcctgattgacactccttacggctctcccaagatcaccaaggacggtgtgaccgttgccaaggccgttcagcttcaggacaagttcgagaaccttggtgctcgtctcctccaggatgttgcctccaagaccaacgaactcgccggtgacggtaccaccaccgctacctgccttgcccgtgccatcttctccgaaaccgtcaagaacgttgccgctggctgcaaccccatggatctgcgccgtggtatccaggctgctgtcgaggctgctgtcgactacctgcagcagaacaagcgtgacatcaccaccggcgaggagattgctcaggtcgctaccatctccgctaacggcgacacccacgttggtaagctcatctccactgctatggagagagtcggcaaggagggtgttatcaccgttaaggagggcaagacccttgaggatgaacttgaggtcactgagggtatgcgtttcgaccgcggttacacctccccttacttcatcaccgataccaagtcccagaaggtcgagttcgagaagcccttgatcctcctttccgagaagaagatctccgctgttcaggatatcattcccgcccttga

SEQ ID NO: 1057 - DNA, 896 bp, Aspergillus oryzae
gaggcggtaataagacagcgctgtgtgatacttgtggcagcaggttaaacaagcttactaactgaaaacaccatgtcaaccgccgaaagcctactcgaactcgcccgaaacgcacgagcagaatgcaacaccggccagcgcaaattcagcaccgcacttcccgccctagacgcactggtgtcggagctggaagtgtataaatctgtcatgcgcaacccgtgaacagtgaaacgcctgaccaacctggaaagtcatctgacgccgtgtgcgggggctttaaacgtgctcctgataatccggcgtaagtatcggagcgagatgtcggcgttcgagcgcgcaaagtggaagacaaccgacggggagaagtttacagatacagtcaaccggctacagaatgcgacgaatcttctacggggtacgctgcggatgacgcgtgaagtccagctccaccgcatggcggagacgaatcccaaaatggccaaggaagaagccagagagactacggcggagacaatgaaggcgaacgcgaaacctgacacttgccggaatggtgccggatgtcgtgtcatagagtgtaagtatagccatcctgatgcggaccctgtcggtatggggctggttgcaccaattccaactgtcgatttcgccatccgaaatcgcgactatgccgcaacggagccggctgtaggaagctgggatgtacattcgcccacccggaggcacccgactgccggtatggagttggctgcacgaatactctctgctcgttcaagcaccccagcgtccctgcttgtcgggatggtgccaattgcatggtggacaaatgtaaattcttccatcccgaagtcaaaccgtgccggtttggaacacggtgcaccaacaagaactgtactttt

SEQ ID NO: 1058 - DNA, 443 bp, Aspergillus oryzae
cgaggcgtggtgctttagttgcaatgtctcctgggatatgtcgcaatacacctaaacaacgtgctgtatttgaccawgagctttaggatggtaacgatgacgtgacaaaaccatagtacattacggtgctgaaagaatgtattgaggagggagcatttaataggccccatatcatataggaaatgtgggttcgtcaggtgcccgacgttgcagaagtgtcgcaagattcaaggttcttagggaccatggcggccttgacattgactagcaagcccttaggcatgtcgcgcttcagatacatatggaagctctcttgagctactagcagctactcaggatacaacgaggtataagagtggagtgatgaattcatgtaaagagatgtactgtacagagtaatgggtttgtccatttggacccaaattcagccactcattgccttt

SEQ ID NO: 1059 - DNA, 630 bp, Aspergillus oryzae
  modified_base (26)..(27): n is a, c, g, or t
attctagatcccactaaccaaaccgnnbcagatcctgacggagrbtcccaaatggcctcttctcccgaatcctcccacatgcactccgaagattccccagtcggatcccgtacccccacgaacatgcgtacgccacctcccagttcccaggcacctcagagctctctccgcctggatcgcagacacaatcagtatcagctgacgtcggagggctcgccggactggggaatactaatacgtctggagggtcggcggagatgacatccgctcagcagcagcaaccgggggcatcgtggatgaacaaacgggcggaggaggaataccaccgggcaatggaatatgtgattgatcaggactttaacctagatgagttcggggacccatttgatgatagggatatggaggagaaattattctagggatatgggttacaggtgaacatggtgttcatggtgcttttgtgttctttggtgcttctttgcttgggagatttgagtgtgattcctggtttgagacatgaatgatttatgagatatgattgtcgactttgtgggggttcccaaggatatacttggaatgggatgggcgatcgaatctaaagcgttttaccatccatagatgtctactaga

SEQ ID NO: 1060 - DNA, 711 bp, Aspergillus oryzae
ggggccgctggggcctgactatgctcagaatatcgcggcggatatgaagaaggtacttagaaaatggagggacgggggaggaaaaaatgaggagattttggtgtactagttgctttgtcggggagagattatctgatgccttgctttttgccagttcgaatctctcaaacacaaattcaagggccaatacgtatcaaggatatttaaagtaccatcgttgtacagctcgagttacgacaataatcgatatcggggggaacttacatctaggccttcacatggcctcgtttcgtctatcagatcggaccaacatattttggctactagctctggagggtgccgacctgctttggatcaacaagaaaggccagaatttggcgcatcttctcatgcatcacagggcatcccatgaggagattcttaacgtcttgtttgacactggtgtggatccagcagtcacagatcttgactgcagaaccttggcgcatcatggagcaattcatggcgtgttcaccaaggaccttttaaagttccttgagtatagaggtgtcttagacttacacacacgagactcgatcggcaagactccactcaactacgcggaagaagaggttaaccgagagtttcctgaagatatcttttcaatccatcgccaacgcggcgaattagaaaatagttaatattcatagataaatatattaactttataat

SEQ ID NO: 1061 - DNA, 864 bp, Aspergillus oryzae
aggcttcagtacctgctggcaatctgctcgcgcattatctggtgtttcttgccttctgccagcacgactggagcagtgtcaacttttctgcccggtagagaccactccactgtgggcattgttcttgcatctacttatacatatagccatcagtctacccattttgcgcgtcaatacaacttgaacaggcaccatgtctgacaagcttaccagaattgctattgtcaacagtgacaaatgcaaaccgaagaaatgtcgccaggaatgtaaaaagtcttgccccgtcgtccgtacgggtaagctttgtatcgaagtcactcccgaatcgaagatcgccttcatctccgagcgvtctgtatcggttgcggtatctgtcctaagaaatgtcctttcggtgcgattcatattatcaacttgcccaccaacctggaaacccaggtcacccaccgttactccgcgaacagtttcaagcttcaccgacttcccatgccccgtcccggacaggtccttggtctcgtcggcacaaacggtatcggaaacccccccsctctgaagattcttagcggcaagctgaagcctaaccttggacgttatgacaaccctcctgactgggaagagatcttgaagtatttccgtggttccgaactgcagaactattttaccaaagtgctggaagatgacctgaaggccgttgtgaagcctcagtatgtcgaccagatccctagagcagtgaagggtccagtccagaacgttggcgacctcatcaaagctcgtgctcaaatggacaacatggagcatattcttgatgtacttgagcttcgccaagttcgaggacgtgacattggtcatctttctggaggagag

SEQ ID NO: 1062 - DNA, 817 bp, Aspergillus oryzae
  modified_base (40)..(40): n is a, c, g, or t
  modified_base (65)..(65): n is a, c, g, or t
  modified_base (128)..(128): n is a, c, g, or t
gtggtctcactcacccaccctcgcggctctcccctctgcnbctttccatcgctggtcattactcncttgaccttacggtccgacctcataaagttctctcgtgctgttcgcccggccgtcagggccgntagtgctgttgtcacccgcactgctcctcccaatgccgccaacttcgcgactttgcgtgaaatcgagggccgtctcaagtccattaagaacattgaaaagatcaccaacactatgaaggtcatcgcttctacccgtcttacccgcgctcagaaggccatggatgagtctcgcacctacggtcagacctccaacaccgttttcgagaaggccgagaccaagcccctcgaggacaagaagactttgctcgtcgtcgccagctccgacaagggtctttgcggtggtatccactccggtctgagcaaggctactcgccgtatccttcaggaacacgccgacgccgacatcgtggttcttggtgagaaggccaaggctcagctctccagaaccaaccccaacgctatcgtcctgagcttcgccaacgtctgcaaggacattcccaccttcgctgatgcccaggccgttgccgaccagattgctctgctgcccgccgactacgccagcgtcaagatcatctacaacaagtggctcaacgcccagagctacgagcccaccactgttgaggcttactccgaggaggccatcaccaagtccgccaacatctcctctttcgagattgacgaccaggctcttgccaacctccgcgaatatgcccttgccaacagccttttctgggctatggctgaaggcc

SEQ ID NO: 1063 - DNA, 730 bp, Aspergillus oryzae
  modified_base (404)..(404): n is a, c, g, or t
gggtcagatgggaacttcggtatctgaggacgacctctccatggatatcaccccctcaactactatgggatckcttctgagttcgcgaaaccgagcgagaggcccagctcccgctgttcgactccaatcgcaacacagcmaatctcgatattggaattcaaaaggaaacgacgccgtgaagacgatttcgacccgaatctgttcaagcgaagggcggtgtctccgagtatgagcgtccaaagtagtacagtgatgcctaattcacctgctgtgagggatacgggcaccagcatttggggtccacccaaagccaacatcggctctcttttccctgaccagccgagcactgaaagtgcacccggaacccatccacacctaaacatgcaggtcatttgaagcgagtnggtctgcaagggatgactgaaacgaacgatggactcatgaatatgagcatcgagtgatggttgacattcttgacattcaggcgttcttctccacgagccgggctcgcttcttcttaccactactttaatagtcttacctcaacatgtctttcatttctgtgtcacttttagcgtggagccgttttatacgttggacaggttggacattgccttggattattccgtatatggcgttcagcgggagccttgtggttgagtaacaataacatcttactagtatcgcttcatcttcatttgatgcatcgatatcacaaatagcacctaat

SEQ ID NO: 1064 - DNA, 906 bp, Aspergillus oryzae
gagggcgacttttgattctctcctctgtttgttcccattctcattcccctccctcaagcttcctcgcgtcgttgcaacatttccgcggcggtggatcgccccacgttagagtcagacgtcatacatctttgcggctcaaggattctgctacctatgggagtaaccagcgtgcgaagagaaaaggtcacgacaattacctattccacagtactgaaagcaatataccagtcgtctgaaaagcacatctctcaccatgttcgcgggcaaacgcttgagcaaggagctcctcaagatgaaagagcatctgccccctggtatatcaatagccaaatcggagaatcttgaagagtggcagatggatattcgagtcttggacgagaatccgctttatcaaaatcaggtctatcgactcaaattcacgttctcgtcgaagtatccaatagagccgccggaagtccagttcatcgagctgcctagcacgtctgagacccctcgcccgatcccgatccacccgcacatatacagcaacggaatcatatgcctggacctcctcagttcagccggctggtcacctgtacaaacggttgagagcgtctgcatgagcattcagagcatgctgaccgcaaatacacgtgacgaacgacctccaggcgacasgacttcgtctcgtacaaccgacgccggccccgcgacatcaacttcttttacgatgatgacaacgtataaccgagtgcgaggacattgtcaagtgcgactcagcgtcaatattgaacaccatgctttcatcctctcaagcaatggtccccatgcaagtctgctcttgcagtttctagggccaatctaccctcctccggccgctggtcttttacaatcacccaagattatccaagggctaccgattgctga

SEQ ID NO: 1065 - DNA, 590 bp, Aspergillus oryzae
agggctggatcccctccgtatcccctacccgggatgcccatcgccgcactcccacagaaagccaggcgcttttagaagaagactgtgatagatacggtacagtttaaatgattaactagactcagtgtcgtgtgatcatctagaacttcctgttttttgtttcttacacttgcttacccttctcgaccctgcgttaagcagatacgatttctttttatgacttcatgacgatctttttggcctgagggttttttgctgtctgccgtcgttgaatattctcggggttcaataggttcattctccatcgttcggcgccttcgctttatttgttcttttatatatcactggacgttattggattcaaggctgggctgggctgggcttaaggctgaggttggagatacctctaggtggttatcatagcaacagaagatggcataaggtcacaaaccatcattcagtcggcgtaccggattcattatattttctggcctccaggattcactgcgaggtgtttggttacggatagatatttgcatacggggtgcatatttagcatatacatagggcactcgaatactctttgactt

SEQ ID NO: 1066 - DNA, 679 bp, Aspergillus oryzae
acgaggctcccgactttactttctcgtcaccaccgccctctctttttcttttacctaattcccaggcaattgcgcctttctttcacttcctctttaaccgacataatgttccgttccgctgttgtccgctctttgagggcctccgtgcctcgtgccgtcaggccccggctaccttccagatccgcagcgctcctgccgctcaattcgctcctcgctttgccttccagggcgttcgtctctactccgctcctgccggtcttaacaaggaggaagctgagggacggatagtcaaccttctgaagaactttgacaaggtttccgatgccagcaagatcaacggctcttctcacttcgcaaacgaccttggacttgacagcttggataccgttgaggttgttatggccattgaggaggaattcagcattgagatccccgacaaggatgccgatgccatccacagtgttgacaaggctgttgagtacatccttgctcagcccgatgcccactaaattatgtaatacgaagatctgaatgattttgcgggttagatagaaaagaaggggatggtggcgtgcatctacatggggtctcagcgtggaaacgctacttgtatgctgatacatgccggtgttgtttcaccctattatatcgtgtatatcatcttaaatgcagtttgatt

SEQ ID NO: 1067 - DNA, 914 bp, Aspergillus oryzae
tcacggtgggcctctgtgtcgcgcgatcgctcttttgtccgggcgcagctgcccatggattcccacgcatgggaaagtcgcgcctatggacctggatcacttggcagaaaccgacacgattcgatctcccccgatatgctaaagccggctacgagcaattcaacaaagcattgggtaagcctttcctcacgaaagtattcggccacgactacgtggttctgccgtccaagtacttcgatgatatcaagcgagcgagcccacagagcttgagcttcttccaagctctgagcgatggcctgaatatggaggcttcagtcggccatctctacgctagcacgacggagattgacgtggttgtcaagcatttgaatccccgacttacccaactgacaccattgctctgcgatgaggcggaatatgccatcgagagggaagtaggagctctacccgactggaaaaagttcaatgtttccaacctcatcgccgccatcgtgcaccggactaccaaccgcatcctcgtgggaaaagaactctgtcggaacgaagaataccttgcgattaccaccaaattctcacgatcgctattcatcagcggtatcttctggaactttgtccggctgggtccgttacgtaaactagtcgcttggttgaccatcggacttcatctgagggaccgtaatgccgctgcaaaggtcctcctgccccatgttcttgctagacgacaggagaaggaagccggcgtcgacgtggccaccaagtaccccgatgcgctgcaatcgmccattgatacggctccgtcctttcccggcgacgatgagcccttacatcaagtctaccatatgttgcatctgacctttgcagcgagcagtgcgtcaggtgttggcgtcacgtagccctgctcaatgtgctggcgt

SEQ ID NO: 1068 - DNA, 1010 bp, Aspergillus oryzae
gagggttactgtttcggtaagaaagtgatcatgaatttcttgcaacggcatgacttcgacttggtttgccgagcccacatggtagtcgaggacggttatgagttctaccaggatcgcattttagtcacagtattctctgcccccaactactgtggagagtttgataactggggagcaattatgtcagtctcggacgaactcctctgcagtttcgagttgttgaaaccgttggattctaccgcgctgaagaatcacatcaagccggaataagcggaatagcatgctcaacagtcctcctgcaattgtatcagcccaaagttattagacgacctggtgattccttgccaagaagtcggcatccaccatatgtcaccaccgaagcgatctgggcttgggctcaattgacgtcaagctcgctgtttcagtcacagcgtagtccgtctgaattgattgggcaaacacatcatgaaaataggtcctgcgccggactcccgtcaatgtgtgcatccctcgggtgctagctttctgggactccttatttgcaacgcagcaatgccggctcccaaccaaacgccgttttgtttgccattggtaagcttggcggatcaggacccgacctccatcattactagggcctttgatgcgatttgcccgccccgtgggatactcatccaaattgacttcatcgcaagttctacaccgatttagcgagctatgctctgacttcgctacgtatacggtcctagctatctcttaacgcatataatgaatagacaaggtgtgcggggragctaattttctgtcacctgtgaaaactcacttgagagccaaaggcgataggggttttgtgtatattgaccaacttttcttttcgataattctatgtcgacgagacawagttttacgtgtcatgatatcttttttggtttcctcttatcttctctcgttttggttgcagattcatatgatggcggttcccattatcattgcttctattcatattgcttcgg

SEQ ID NO: 1069 - DNA, 707 bp, Aspergillus oryzae
gaggcttaattaaagcagaaccctccttttgtctgattctcctacccgttctctaactaggcaaaacaaaacatgtaccgccagtccttcgctccgccgccagcacagtcacctccgcttcatcatccagttcctcagcatgtttccaccgtccctatgatgcgctctcctccccctccgacatcccagcagtctcagacgtctggctatggtaacaacccatatcagcccgctccggcgcaaggcggtagtgggacctacgcccctggatttggaggtttcatcaacgatcccacggcgcaaatgggatttcaggtcgggaagaccgctatgatggccgggcaagaatatatggaacagaatctaaaccgctacgtttccattcccgccttgaaacactatttcaatgtgtccaactcctatgtattgaataaactcgccctggtgctctttccttggagacacaaaccatggtctcgccagcagagccgtgtcacggcggcatccacaggccccaatggtcagatctcccatcagcaatactcgaccatgttcctgccccctcgcgatgacctgaactcccccgatatgtatattccggtcatggctctcgtcacatatatcctcctatcggcaatgctggcagggttcagaggcaacttccaccccgagcttcttggttcgatcacgacaacagctattgcagt

SEQ ID NO: 1070 - DNA, 819 bp, Aspergillus oryzae
  modified_base (352)..(352): n is a, c, g, or t
aattcggcacaggcatacatatttgtacagaacgtttctcggttgtctcccgtatatacacatctattcccactagatccataatccacctttcattgaacatgagtgggccattccaaaacatctaccatctccgccgggtagcagacaccgcggcaaaggcgtgctacgtctgccacaagccctcgagcagcgtcatgatcacgcctgacaacaaggatttcttctacgtttgtcctattcatctaaaggatcggcatttctgctctcctatcgttgacacagaggccgaggaaaagaagaagaaagaagaggcattagccaaagaaatcgagaaagtaaagaaggagtncgaggagagacaaaaaaagaaaaaagacaagtcgaaagagaagaaacccgacgaagagtcaaagaaggaagaaaaatcatccaacaccgacaaacaggagggcaatgacgagaaggaacgagacgataagattgaatccctcaagaagtcagcacagtccacgtcgacgtcggatgacgggcctcgtattttcgcattgcataaaaatttctatcagatgcgcatcgacagactgcgtaatctcgaggctgccaagagaaatcgtcagcgcctgcaggatccctccttttttccgtctgtcccgtctggagggctctgatgaggtcaaagttacggggtggtttgcctcgtccgaacggattaggatgttaatagcgaagtgaagtgtccattcgtcagctcgtttaaacggggatctcgacgtcataaaattwaagcgcggcaatacgacgatcatattagagcgt

SEQ ID NO: 1071 - DNA, 870 bp, Aspergillus oryzae
attgttgcaatcaatgttctgcttacctactggaccgacaaggtccctgctgctgcagttgttgtgatagtcatggccatctttgggtaaggacctcacaagttgcttagacctacgaaaatgcgtatgacactgattaggatattgaacgtcctcaccgttcgctacttcggcgttgctgagtcctacttatcgttcttcaagatattcttgatgctgggcttgtttctatacacgatcgtcaccatggtgggcggcaatccccatcgtgatgctattggattccgatactggaacgacccagttcgtactcactttcaattttgctcgctcacgtcaggtagttaactaatcactgggctttgattgtggacgtgtagggggcatttgtctcacatctggtgcccggagacactggccgctttcttgggatcctgagctgcatgatccaaggcgcattcacaatagtagggccagaatttatatccatggcggctggtgagtctgagcgacttcggagagtcatgcggaaagcattcgcatcatttggttggcgccttatgtttttcttctgtatgggagcactctgtgttgggattgtgatcccgtccaacgaccctacgttggcggccatgctggacggtacaaagcagggcagggggaccggcgccgcgtctccctatgtcatttccatgaaccacttcggcatccaagtcctaccggacattgtcaatgtgcwaatcatgacctctgtcctgtccgccggaaacaacgtcgtattttccgcctcgcggacgctatacggcatgtctttagagaacaaggcgccgaaatgggtttccaaaacgaaccgagcaggattgccataca

SEQ ID NO: 1072 - DNA, 370 bp, Aspergillus oryzae
  modified_base (59)..(60): n is a, c, g, or t
gatgctgtgccgatccccaacgcgtattcgagtccaatgtcgcccacgttccctcgtgnnkcccgttaatgattttgacgtttaaatagcactaatcaatgattagaatgtgtatatgcgcctgcacacaaaggcatggaatgcaaagattgacgcaatgtactttttctcgatgactatcttattgcccgttcccttgttttcaaatggctgcttggtattcgattttctcgaaagtttcaatcgatatattatctcatgagattgtgtgtgtgcgtgcggtgtgttctcctatcactagataacgcactgtatgcatctatttgccacatcgatatgaatcgaaggaacaatattgtgatacttcata

SEQ ID NO: 1073 - DNA, 568 bp, Aspergillus oryzae
  modified_base (143)..(143): n is a, c, g, or t
aattcggcagaggggccactgctactgcggggacaacgacttcgaccgggtcgaagtgcgctgctcagaacatcgtgaatgattgtaaagaacgaatgatgggccaattgaaagcttgcggagtaaacgagtggaagtgcctntgtgagcagcagggcaacgttgttacatgctacaacaactgccctggttctgcggagagcggccctgaaaagcaaaagcaacaagtctactgcaacgcacaaaagctctcccctcgtcgtcaacaacgattgcctcttcgacggcttcggcgacggaagcgaagaagaccagttcctctactgccacttcgactagtacgtctacgggtgctgctgctcttcctacggcggcattcggggctgtcgaggggggcttgatgctgggtgttgtgctgggtgttttggggctgtaattgttccagcttgagttgagagacttatgataatacataatagtaatcactgatgtgtatgctgcattgatggaagggcagtggtttaatgtatgtctaatatgctatgaattaaatcgatgtcattataat

SEQ ID NO: 1074 - DNA, 840 bp, Aspergillus oryzae
  modified_base (10)..(10): n is a, c, g, or t
  modified_base (79)..(79): n is a, c, g, or t
aattcggcanagggagaacttttggtacaaccgcaagaatggcttcggaaactcgcgttgaaactgacgcctttggsangattgaggtccctgccgacaagtactggggtgcccagacccagcgttccctgggtaactttgacatcaaccagcctcaggaccgtatgcctgagggtgttgtcaaggctttcggtatcctgaagggtgctgctgctaccgtgaacatgaagtttggcctwaaccccaagattggtgaggctattcagaaggctgccgccgaggttgccgagggcaagctcatggaccacttccctcttgtcgtttggcagactggttccggcacccagtccaacatgaactccaacgaggtcatctcgaaccgtgccatcgagatcttgggtggcaagatgggatctaagaagcctgtgcaccccaacgaccacgtcaacatgtctgcttcctccaacgactctttccctactgctatgcacatcgctgctgttttggagctcgagggaactttgctgccttccctcaagagccttcgcgatgctctccaggtgaaggtggagaactttgagaagatcatcaagatcggtcgtacccatctgcaggatgctactcctcttactcttggtcaggagttctccggctacgttgcccagcttgatcgcaacattgagcgcgttcagaactctcttccccacctccgctatcttgctcagggtggaactgctgtcggtactggtctgaacaccttcaagggctttgatgaagccattkccgccgaggtcaccaagatgactggcaccgaattcaagacgcccccaacaagttcga

SEQ ID NO: 1075 - DNA, 970 bp, Aspergillus oryzae
agggtctttcttttctcctccacgtcaaccggaagaagttataaaatggatacaacagatctcctctatttaaacgacgcttctttacgagaatggacaactacggtcctctcctgtcagccgatatcgcaattgacagagaatgaaaagagtcttgcaaagacagttgcgccagaaagcttcgctctcaccactcgcgaaacggtgttctacccacaaggcggaggccaacccagcgatacaggcgtgattactctcgcagacaaaagtaacggttccactttcaaggttctgcttgtccgaaaaaccttagatggcactgttctccacctcggggagttcaccgaccagccctgttttacggacggccagttagtctcgcaggctatcgactgggcaaaacgagactatcactctcggctccatacagcgggtcatatcattggtctagctatgcgacttctggcccctgtgcttggggaaaggaagaaggtcaaggcgaatcatgcaccggggcaggcctgtatggagttcgagggtttgctgtatactgagcataagtcagttattgaggataaggtgaacgaattagtaggcatgaaacttcctgtcactactgagtggtgggatgaagatcgcattcagaatgctgacctgaatatggtggagggcttgcaattggggaagaatggacaggcgagaatcgcaatgattggagawattgatgccaatccgtgtggtggaacgcatgtagaacataccggttttgacaggtttcattaccattcggaagattgccaggcaaaagggggtcagcaaactatcgtatgaagtgcctgtttcgatgtgaaaaaattcattatttagtttcatagcgctgagttcagagagggacttcatgtwcatatcagttacagcgttaaaatacctcgactttgactgttgagagaaatgttgttagttattctta

SEQ ID NO: 1076 - DNA, 963 bp, Aspergillus oryzae
gaggggctgctgtcagtgttgcggctgttcctttcaccagtcaggacgatgagactttcctcgttgtgggaacagcgaaagacatgaatgtcaaccctccgtcatccgccggagttacatccatatttacaggttccaagaagatggaagagagctcgagttcatccacaagaccaaggtcgaagaacctccactcgctcttcttggtttccaaggtcgcctggttgctggtattggcccaatgctccggatctatgacttgggaatgaaacaacttctcaggaaatgtaatgcccaagtagttccgaagacaattgtgggcctccagacgcaaggcagcaggatcgtcgttagtgacgttcgtgagagtgttacgtatgttgtgtacaagtatcaggaaaatgttttgattccgtttgtggacgactctgtttctcgctggacaacatccacaacgatggttgattatgagaccactgctggtggtgacaagtttggtaatatatggatgctgcggtgtcctaagaagatatccgaacaggctgatgaggatggatcaggcgcacatttgatccacgaacgtgtttatctccacggtacgcccaaccgtctggagctgatgatccatgtttacactcaagacattccgaccaccttgcacaagactcagcttgtagccggtgggcgagacatcctcgtctggtccggtttccacggtactattggaatgctggtgccttttgtcagccgagaggacgtcgacttcttccaaaacctggagatgcaattggcagcacagaaccctcctcttgctggacgggaccatctcatttaccggagttactatgcacctgtcaaaggcgtcattgacggtgacttatgtgagacgtatttcttattacctaatgacacgaagatgatgattgccgcggaacttgaccgttcagtgcgagaaattgaacg

SEQ ID NO: 1077 - DNA, 791 bp, Aspergillus oryzae
gaggcaacaacccgcgacaaggaaaggcagcaccagcagcacagcccgctatccgtcgctcgtctgcaaaaatggctgctatcaacaagatcgccctcaactcgccctcgaggcagaacccctccgagctggagaacgcgatcgccggcgctctcttcgacttggagagcaacacacaggacctgaaggccacccttcgtcctctgcagttcgtctctgcccgtgaggttgaggtcggccacggcaagaaggctgtcatcatcttcgtccctgtccctctcctccagggcttccacaagatccagcagcgcctgacccgtgagctcgagaagaagttctccgaccgccacgtcctcttcgttgctcagcgccgcatcctgcccaagcccaagcgctctgtcaactcccgcaccaaccagaagcagaagcgtccccgttcccgcactctgactgctgtccacgacgccatcctcggcgacctggtctaccccgttgagatcgtcggcaagcgcatccgcaccaaggaggacggcagcaagaccctcaaggtcatcctggatgagaaggagcgtggtggtgttgaccaccgtctcgatgcctacggcgaggtctaccgccgtttgaccggccgcaacgtcgtcttcgagttcccccagagcagcgcctctgacttctagatgccaaattttctcccttatgtccttttaaagtcttctatatttttcctgtgattaggccaatgagagaaaaataagtctgggattttcgagaacaagaacgcgggcttacgt

SEQ ID NO: 1078 - DNA, 723 bp, Aspergillus oryzae
aaatgcctccgggcccggtggtgagacgattgctcaaacggccggcttcaccagcccgaagtacgaytcgccatcttcccagggcgcccagtatgccagaagtcccgatggcctaggcaacgcggcttacccagccggaaagtttccaaagcattgtcttcatctgctcgctatggatcatccgtgcatattttgttcttgtcatgctggcatttgctcgccagtctctacgtctttatatcgctgtgcctcgtcacactcagctcccaactcatagccggaacacttccatcgccagtgtggctagcgtcgctgatatcgataaggagccgttctcgccttacactcctgatggtcaaggttggaagggaaaacttggtcgcgctatgattagcgttggtcgcaattattggttaggcgaggatgaggatggtaactggatggatactatcggacggcggttccgtgctcgccgcgagagcaccgagcttcccggtccccyccccccasaacggagacgtcgatctggaacgggccctccacaaccttctcagtcggctgtccaggcggctgccttacaacaacccacttatgaggtaccgggtatgaacgtcaaaatgcaggactggagcgaaactaggtaagcagaagcgaccggaagtcatcgatccgctacaggtcatccattcaagttcagatccttccttatagaaggaattgcgt

SEQ ID NO: 1079 - DNA, 320 bp, Aspergillus oryzae
  modified_base (86)..(86): n is a, c, g, or t
aattcggctgaggcccatccccgtcagcttccctgtcgcccccaccgacaccaagggcttcaccaccgaacagtacggcagtgacncactcaccgtctgggtgcagctgtcgggctcccccgtcactttctccctctcgacccctattcccttgtaaatggattgaacgatattgaattatggaagggctttgaaggattcctggaccataatatctaatgttattaatgggtttcgtgtagcgatttcgaataggggaagagatgaatgaaatgttaggtacatacatacataactacattgcatacatactacataaa

SEQ ID NO: 1080 - DNA, 698 bp, Aspergillus oryzae
  modified_base (337)..(337): n is a, c, g, or t
gggctgtctttcctctcttgttcaattcccactggccgactctcctttaccctcatatttctttgaggctctgtgctgggattcaatcggtgttgattgtttactcgccagttctccttttcatgtatccactacgtcattaatcttccccctatcactatagtcgacgcgcgtaattttttttttacaatccttggaaccttcaattttatctacaattgacgtctgtaatcattgttgtttgtttattttttgtttaaaaaaatccattgcattgatacaatccgtggcattcgttaacctgcagtgtatatgagcgatgccggtgtatcgacangttccacgatccctgccaatattctcttcgggccgttttagcctgtcgasvccattgagagccaatggagtagctccatataagtcgggaatgcatttctcgcaaggttcctamcaagctgccccaaatcccctggaacaagatgcaggagatgacggagcccgatccaacggcaacgactcagagccaaatttcagatctactattctaaaaatgatggagacggctgccaccacttttgcttctattgccgtcctaggtgccgcgggctactcgtaccaccggtactacaagtatctgattttggaaaagatggaaaatgcctttaagccgggcgatccagcactcgaagttgcaggtg

SEQ ID NO: 1081 - DNA, 830 bp, Aspergillus oryzae
gaggctggattccgaattagaggaaaggctttcccggatgtcagtagaagagaaccccagtaccgcggcacagtgaggtataaagcatctctatcggcgagaaggttctagccaaggtatatctacacgacaaagaaagaatgcgcattgggatggacagtttatccaggaagcgtataaggctcttcactttcaccgggctcctgtgcgtgttgaattttaggataggcggcacttgtgagatctacgagtggctgttccggcatattcgttggaattgtagcctccactggttgctcaactgtgggtgattcttgcgattgagccggggctgcagacgggatggtcgtgcgaactaaagcatcgcttcgctttcgagcgtttgcaatcagctgcttgaagtcgctttcatgggtggtcgaccatgcggttgcatcaaagtctttacgcataacggagccagcagactcagcagagggatgtgcactaccgccctgtgtgcgttcccagacacccaattcatgtaataattcacgcttggactttggcgttttggagtcgcagttagcgttccataagttcatccactcggtgtgacgtctttgcagtaggggccgtgggcccagtttcggtattcccaaatctttaagctttttccggagcacattgtcttttaataaagaatagtttattgtggggagtctctcgggcgctttgttcagtgttcgcgaacaggccgacatgggctgcaatgagctatgactcgggttagtacatttagagtatagaaaatccatctagaccttacccaaatgatatctttttcggcg

SEQ ID NO: 1082 - DNA, 763 bp, Aspergillus oryzae
tctgtaacacatcggtcggggaactgacaattgaccttcacacacaatgtcttccaacaagatttggcttcgtgctgaaaccaagcccgctgaggctcggtctgctttgaccccaactactgccaaggctcttatggatgctggctatgaagtgactgtcgaacgctctacacagcgaatcttcgatgatgaggaattcgcaaagattggtgccccactagttgaggagggatcctgggccaaggatgctccaaaggatgcatacgttttgggtctcaaggaactgcccgaagatgattttcctcttgagcacgtccatattacctttgcccactgctacaagcaacaggggggctgggagaaggttctcagacggtggcctcgtggaggcggaaccctgttggatttggaattcctcactgatgaagtcgggcggagagttgctgctttcgggtggtccgctggctatgcggttccgcattggctgttaagaactgggcctggcaattgactcatcctgagggcgaacctttgcccggtgaggttccgtacgcaaaccaggatctcctgacccagtccgtgaaagagtccctggaagctggcaagaagcaatccggccggtcccccaagattcttgtcatcggagctcttggacgttgtggtaacggtgccgtacaacttgccaaggatgttggcatccccgaatctgatatcatccggtgggatatcgaggagacaaagaaaggcggtcctttccaggaga

SEQ ID NO: 1083 - DNA, 672 bp, Aspergillus oryzae
  modified_base (78)..(78): n is a, c, g, or t
  modified_base (264)..(264): n is a, c, g, or t
  modified_base (317)..(317): n is a, c, g, or t
ttgtgcgggcgcagacctgaaagagcgagttaacatgaccaagcaggagaccaatggattcttgtccaagctgcgcgntacattccgtgatcttgccgggctacctgtacccacaatctctgctgtgtcttctatggcgctgggaggtggcctagaactcgccttatgcatctacgtgtgtttggctcatctagcattgtcggattgcccgagaccagactagctattatccctggggcgggaggcacataccgcctcccgggnattgttggggtgaaccgcgcccgagacctcatcctaactgggcgacgtgtgtngggccccgaatcgtactttatggggctctgcgatcggctcgtcgaaatattacctgaagaggagcaaaaggagggcgcacgcgtgagaaagtgctacgggagagtatcaaactggccatggacatctgcgaaggtggacccatcgctatcaagcaggcacttcaggccgtgaatgacttccagaagggcgaggtggcagaaaatgaggcttatgacggcgtggttgagacggaagatcgctttgaggctttgcgggcgtttgcagaaaagaggaagcctgctttccgggggcgatgaatttgtcaagtgcccacgtggcaaatgtaaaaaatgaaatgtttcccgttacttgagg

SEQ ID NO: 1084 - DNA, 809 bp, Aspergillus oryzae
acgaggacaagaccttgctcgctaccagaatgccatccaaaagtgagattacagagtttcaaatgccgggcgctgtcgaaatcatctcaacccggccgcaaaagttgattgagatcgtggagccggacccaacatggccggagtcgtttgcgattattgcacgccggattgccgatgcccttggtaatcgacttctctcaatcgagcacgttgggtcaaccagtgtaccagggttaccagccaaagcggtcatcgatgttgacgtactcgtagctgaccccacggcggaagactcctacgtgccagcccttgaggctgcgggttttcagttcttgcttcgcgagcctggctggtatgagcatcgcctcttcggtttcaacgaaccatacgcgaatatccatgtatttggtccgaacagcgcggaacacgttcgtcatcgactgttccgtgactggttgcgcaaccatgaggacgatcgccaaaggtatgtcgataccaaacggcaggccgctgcgcttagtcgattggcgggggagaccgtgaacgagtattccgaccgcaagcaatctgtgatccatgaaatcctccagaaagctttcaaggagcacgggtacctgaatgagcaaaactccgacaagtaaggggatagatcattagatgggttgttatttcactgtggaaagcaacgaacgatgaggttgattggagcgcaacccgtctcttcggtctcgtttggctggtacacatgttcatatacatcgaagactagggaactatattttcaattgaatcgcgtttgggtaatctcg

SEQ ID NO: 1085 - DNA, 1015 bp, Aspergillus oryzae
gaggtggtgttgtaaaccatgcgtcgcggaggtagaccgagtttaaggcaaggtctagatcgtgaggtttatcaggtggtgcacaaaataattgaggaccaagccgaaaatgataagattcgcctttcggtagcgaccatttatgactccattaaaaagtcaaattctagtttgaaccgaaagccgaagagaatcctagaagacagtatcgaacgggttgtggaggtaataaaaacagatttgcttggggaggatgatgatgagtctgtaaacggagattttgaaggcttggaagaacaacaactgccccctgctacggaatccaatagcctgaataagagcattgtaggcatgtggaacaacacatcttcaacaccctctaaggcgcctgagaccaatggcgcaggagcagcaacccctgcgcctaagtcaagcaagagacgacaacatggaggcgactcccattcttccaagcgccgtaagcgagagcgcgatcgatcgatctccgcctacacatgtcagccttacagatttgggtggattagacgatgtggtccaagagcttggagatcttgtcatcctacccatgactcgcccacaagtttatatsyccycgaatgtacagcctccccgaggtgtattgctacatggtccaccaggatgcggaaaaactatgattgcaaatgcgtttgcggcggagttgggtgttccattcatttcaatatcagcaccctccattgtctctggtatgtcaggagagtctgaaaaggcgctacgagaatattttgaggaagccaagaggatagcaccttgccttattttcatcgatgaaatagacgccatcactccaaagagagaaagtgcacagagggaaatggaaaagaggattgttgcccagcttctgacatgcatggacgacttggcactggagaaaaccgatggaaaacccgtgattgtccttgccgctacgaatagaccggacagtctggacgccgccttgcgtagaggagggaga

SEQ ID NO: 1086 - DNA, 1084 bp, Aspergillus oryzae
cgagggggccaggtcactgaggttgagcgtatttgccgtgagagcaactactacaaccccgaaaaggtgaagaacttcctaaaggaggccaagttgacggaacagctcccactgatcattgtctgcgatcgattcaactttatccacgacctcgttctctatctctaccagaaccagcagtacaagtctattgaggtctacgtacagcgtgtcaacccttcccgtgctccggcagtggttggagggttactggacgttgattgcgaagagagcattatcaagaaccttctctctacggtagatccagccgttatcccgattgatgagcttgtcaacgaggtggagagtcggaataggctcaagctgctcttgcctttcctcgaggctactctcgccaccggtaatcagcaacaggctgtgtacaatgctcttgcgaagatctatatcgatagcaataacgaccccgagaagttcctcaaggagaacgatatgtatgacacactgactgtcggcaagtactgtgagaagcgcgacccgaacctggcctatatcgcgtataggaaaggtcaaaatgacttggagctcatcaacatcaccaacgagaacgccatgtatcgtgcccaggcacgctacctcgttgagagggctgatccggaaatctggtccttcgtcttgagtgaaaacaatgttcaccgtagtccatggttgaccaggtcatcgcaactgcagtgcctgaatcgacggaacctgacaaggtgtctgttgctgttaaggccttccttgaagccgacctgcctggcgagcttatcgagctgctagagaagattatccttgagccatcacctttcagtgacaatggcagcttgcagaacctgcttatgctcaccgctgccaaggctgacaagggccgcctgatggactatattcatcagctcaacgaattcaaaaaaaawgaaattgcggaaatgtgtatctcggttggcttgtatgaggaggctttcgaaatttacaagaaggtcaacaactacattgccgccgtcaatgtccttgttgagaacattgttagcattgatcgtgcccaaga

SEQ ID NO: 1087 - DNA, 986 bp, Aspergillus oryzae
acgaggcttttccacactctttatatctttcactggggctttacttcatatagtcgtcttagacaacatactgatcaccgttttcgtgctgtcttctcagattgtctcattttgataccaattccacccctgaaattaccccgccatggcccctcctaaggtcttttctctcgaaggcaaaggcctcaaactggacaccgctgaggatgtcgaagcccatattaagcctctggtcgaaagcaccgattacactgaaatccgccttggtggcaatacttttggcgtgacagcctgtgagcgcttgggtgccgccttttccacccagaagaacctggaagtcgctgaacttgccgacatcttcacctcgcgtctgattgaggaaatccccatcgctttgactcaccttttgaaggcgctccttgagatcccgactcttcacaccgtcaacctttccgacaatgccttcggcaagcgaacctcgaagccccttgtcgacttcctctctacccacgttcctttgcgccatctgattttgaacaataatggtatgggccctgatgcaggtgtggagattgctggagcgctggaggagctcgcaaagcgtaaggatgaggcccgcaaggcaggaaaggaggtccctcagttagagagcattgtctgtggtcggaaccgactggagaatggaagtatgaaagcatgggcacgtgcatatgaggtgcacgctgcaggaatgcgctcggtgaagatgacacagaacggaattcgtcaggagggtatctccagcctgttgagggagggtcttcgccacgccagcaaccttgaagtccttgacttgcaggataacaccttcaccattatgggctccactgctctctctgaggtgcttccaggctggacttccctgcgcgactccggtgtcggtgactgtttgctctccgctcgtggtggtgtcaaggttgcgcaacttttggctggtgccaagaacg

SEQ ID NO: 1088 - DNA, 934 bp, Aspergillus oryzae
ggaggcccagctccgctataccactttgggaatctcattaggtcacctgttcagatgtctcgatgtggatgatatcagtatacatgtgcgatattttcgatgacctaaggaaactcgcgaattaggtgtctctagcgcacggttgcttgtctatagtgtttctttgtgccgatagaatcgggttgattcggcctttacaagagctccgaacacttggatgacacatacatccctgattatcatcgggtcttctttatgatgacaacgatttcagtcacgactgcttaaaagtctcgaaccctttattaattaactttttccggccatttgtcattgccatggctgccaattattgggcgtcgactcaacgtcgacattggttgtttacgaaagaaagattggcagacattcgggagtcttttagagagagagataaggccgcgcattcgcagtttcctctgccggatcagaggctgctaaacatctacttcagccaacaactcataaaacttgggaagaggatgtcaactagacaacaagcactcgctacggctcaagtatacatcaaacggttttatactaagaacgagataagacataccaacccgtatctggtagtcaccactgcattctatctcgcctgttagatggaagaatgtcctcaacatatccggtttgtggtcgcagaggcccgaaacttttggcccgaattcattgctccggatgtgtcaaagctaggcgaatgcgagttcgctttgatatccgaaatgaactcacagctcatcgttcatcatccatatcggactttatccgagctccaaccggagctatcgcttacatcagatgaagtagccctggcatggtccgtcatcaatgatcattatcttaccgatctaccattactatacccacctcatgtgattgcggtcatggc

SEQ ID NO: 1089 - DNA, 978 bp, Aspergillus oryzae
cacgaggtaaacttccaccatcgtcatcaccagtcatagtggtactcatataatttggactcgatttcccatctcatcgtgatccgatcccgagcagtttgacaaatcctcgcaatcatgaagttcttatcaactgccgcagcgcttctcgtctgcctcgcccccgtttccaccacagctcgaagcctcgacttcttcaagtcatcccaatcccctatccaagcacaagccaaatccgtcccaggaaacaaccctctggagtattgtaatgacccgtcgggcgatatcctagatatcaaacaggtggacttgtcacctaacccacctcttcctggcaaaactcttgccatcacggcctcgggcaccttgcgtgaaaagatcgaggatggtgcttatgtgcttttggaggtcaaatatggcttgatcactcttgtcaggcagacagccgatctctgtgaacagctcgtcaacgtagaacttaaatgtcctctgggaccaggtgacatgacattgaccaagcaggtcgatttgccaaaacagattcctccgggcaaatacactgttcaagccgatgtcttcaatagtgatggtgagcatatcacttgcctgaaggcccttaacattgaatttaagggtcccttctgagaggttggcaatatgtacgccctgcacttagatatcgatatgctcaacctaggttgaacatgccgtttccctaaacacgaacctcgacatgtacccaaatcagctctgtgtcttcctttctttgcaatcgcatgattcatgattttttcgacttcattcgctatgtcttgtacggcgtttcggagcatccgctcgatactaccgctttctttatcaagtgcgggtatatttatatctgtcgtttcgcatcgcttagcttcatctgtatcatcagcccaggtagagctctaatgtccatacgcatggtttatttgaatcaaacatcccattctt

SEQ ID NO: 1090 - DNA, 642 bp, Aspergillus oryzae
aattcggcacgaggctatatccataagtctgaggaggatatgaaaaagctggacaagaactgggaaaagagaaagaaggagaaggaagagcggaagaggcagcagaaggagaatatcgaaaagaagaaggcagaccmggccaaggcccgggctgaaggcaaggaaattgaggatgatgatgacgaggaaatggatgtggatgacgacgaggatgactggctcagtgatgattttggtgaagaagaagaaggcgcggasaacaaggaggagagggtgatgacgaatccatggaggagtaaagggagcgtcgctcttggtttcttaatttttctcacgaaaagcaacatctcgcgctatatcatgtcccaaggcacgagaaactatatggaggccccagacccgccttcgctgctgtcttccggtgtcgttcgtgtgcacgaatctgctggccaagccagcaaccatatccactcggctggattagcgacatatagattgccctgacttccggctttgctaccagaagccctcgagtatttttaacaggaattgcaaggagaccgggttggagggtgttggaatagactatcatttaggtgaccagattataccctttgttgaaaagcaataaaaagtaattgg

SEQ ID NO: 1091 - DNA, 838 bp, Aspergillus oryzae
  modified_base (505)..(505): n is a, c, g, or t
gctgaggtcacgtgcccgtagacttgcttgagctgcgctagtccggaaaaggatgctggcatggatgacgtcagacggtcctcatcgtcggctgcccacttgagggagcagcacaagtcgcatctctcgggtcgagacccgcctcgtagcttgtcatctttcaattatccctttttcctgacaccctatcatccaattggaccctccatctttaaattgaatcgttacttgactcacaatggccgcgactaggacttcgacgcgccaagctgcacagaaggcgaaagaagccatatcagccggtcccgacacgaagagcaagggtggagcgggcgcaaagcgtaaggaagccgcgcataaaggtcccgagccgaagaggagcaagaaggatgacaagaaggctgcgcgggatgaagacaagaaggtggaggagcgaaaggaagatgcggaaaagcatgtaaaggaaaagaaggaggagcatggtgaacaagaagcagagggaganaaggctcagccggttgaggagcaagtagagggagagaaggctcagtcgaatgagaaaccagaagtggaagagaagggtcaacagaatgaggagccagcggagggcaagaaggaagagcctggagaagagcaagcagtggggccaaaagaagaacagaaagatgagccagttgaggaaagcaaggaagagcacgggaattacaaaaaagattcacaggratcaaagactgaacaggcaaaatctgccgacgaccaagagaagcccgctgcggatggggtcgaatctgggatccaaaaatcgaaggaaaaaaagggagccggttccttcgaatat

SEQ ID NO: 1092 - DNA, 748 bp, Aspergillus oryzae
acgaggtccacctctcatctcttgtcttttcaattttccccatccccacatcatctactgaaggtatccttgaacagtctgcatttactttttcttctcttactttttcttattactactacattctcaagagatcagcatctgaccggccgtctcgtggcgtttggaacgcatccccagagatttgactagtcccctactttctcaagtttctttcttttttttatttatttaatatttctctgatttaaattaaacatttattctttttatttccttttagtttaattattttttcctcgtcttttttttttctctcckgtctgacctcccttaccttattatgaggggsccctcagccccaaaggctgcatgcattccgggactattagcctactggccctgactgtgacttaattataaccctccacctcttataatcctttcaactcctcttgttcctgtcaaaatattcgtcaaaacaaaacagcccaattcccctcccttgccgttttctcgtattccccacgggcggacattcttcatctcgttcctcgtttcttcctccacccggggcggaggctcgagggtattttgggagtctgcatctctaggcttggctattagtactgctatatacctgcatctctcctctgccttcccctctttcccccgtttacctttcgatacataacccgagaagacttcctcttgttgtcattcgacccttacccactgccttattacg

SEQ ID NO: 1093 - DNA, 801 bp, Aspergillus oryzae
cgagggatcccaacagttctattactcattacaaacccaaatcacacagaaactctcatcatgcgctctcgctccaatcactgtcggtcttgcagcatgtgccaatctggtgtctggtatggctttcacggctcctgcccgatgcttgacgatgaaagacacggctgagaaactggacgttaatcgttggattgatctgtggctggaaactacctgcaaacgctgtcagtcgcccaagctgtcggattatcgaactttgcgggaaagccacgtcgctccctttgtgaaggattgctctgactctatgggcacttctcacctttcctccaactaccttgccctcgctgatagcctcttggacctggccaaaagcaaatgcgaggtaaccgacgaaaccgacttgtgcgaggatcctgatcaattgaagacagtagccaagtgcgttcaaagcaacgcctggtctttcgtcctgggcaacgtcggtaatttcctgtccatcctgttggcagacccctgcggcagacaaatggacttcattgcaaacccggacactctggaccgcaccattcgttcccacttggccaactacgagaaaacttgcccaaagaatagcaaatcgctcggccagtgaaaatcccgaatcaaactgtgcttcattccaatttgagcagccgtgtttaccttccttcaacttccccttgtgcgtggtttagttatctcggggctccgtgtacttgcccggctctgcaacttgacttaatagttcagtttaatataagggtgctgcttatgattgtcccg

SEQ ID NO: 1094 - DNA, 999 bp, Aspergillus oryzae
cgagggaagtatacctcgatttaactcaaccagcaagcaagatatacaacacactaataaatcggaaacaacacccacacgaataagaaaatatagaaaggggaaaaaaaaagtcaacatggctacccaccgcttcgaccccaatttcaccgacaatgtcgtcaacgccatgggccccaagaccaaccctcggttccgcaagctcatgaccagcctaatccgccatgtccacgacttcgcgcgcgagaacgaggtcaccgttgacgagtggatggctggtgtccagttgatgaactgggccggtcaaatgagcgacgacaagcggaatgagggacagctagtttgcgacgtgatcgggttggaatccctcgtcgacgaaatcaccttcaaactcgccgaagaggccgaagacgctcccaccgcaactgctatcctgggcccattcttccgcgccgataccccctaccgcaagaacggcgataacatcgtcaagggggtcccggatggcgagatggctttcatgcatggtcgcgttatcgattttaccaccaagaagccactcgtgggcgccaccgtggaagtgtggcaagcggcgacgaatgggttgtacgaacagcaggatccgaaccaggaggaatttaacctccgcggaaagttcaagacggatgaggagggccggtacaacttctactgtttgaggcccacgccgtatcctgttcctgatgatggaccggcagggaagctgctcaagctaatggatagacatccgttcagaccggctcatattcatatcattgctactcacgacggctacaagcccctcaccacgcagatctttgacagcaaagaccagtacctgaccaacgactctgtcttcgccgttaaggactcgttgattgtagattttgttccccgcgaggtgatcctcaagctggtcttgagctgaactatgatgtgaagttggtgccggcacgtcgaatagcaccaatgatgtataaa

SEQ ID NO: 1095 - DNA, 580 bp, Aspergillus oryzae
ggcacgaggtgaaagtccttgcctctattctgcgcaatgatgaaaagattctgcgccctgatactgtagacgagatgttcaaggatcagttatccgccgcctccaaggagatgttgaatgcaacactgtccattccagagataaacaattttcttggtgggacacgttaggctgcagaagacttgggggctcggtggtttactcgtcttggaagatcatacaaccggtcagaaggctggaagtcttcggtgggctggcttgccgaatctcttctggtggattgatcgcaaggttgggttgtgtggtttttatgcgagtcagctggtgcccactggggatccgaagagcgttgagtggtctactgtgtttatccaggatatgtatgagagggtggaggggtttggcgctcaagtgtgaattgtaggctagtttgcgtgtgtgttaactctttaggttgtttaattggtatggatactaacacaaactgcaaaatctgtcagtgcctaggcagaacaacacacgcctgcctagcaaattgaccgatctctgtgttgtatccggataaacaataccttgtgtt

SEQ ID NO: 1096 - DNA, 1050 bp, Aspergillus oryzae
acgagggagaaagccgggggggtgccgctgcagctgctggggcggcggctttggggtacgaccaaggtgatgagcacgcccgattgaccaggaatgcggaggacgaccagatgatgctccttactcgtaagatgatcgagatcaggaacatacttcaagccgttggccagtcaaacacgctcacattgccatcgattgttgtcattggttcgcagtcttcgggcaaaagctccgttctcgaagccatcgtcggacatgaatttcttcccaaaggctcgaatatggttacccggcggccgatcgaacttactttagttaatactccccacgcacaagcagaatatggagaatttccggccctcggtctaggaaagataaccgacttttcttcgatccaacgcaccttgaccgaccttaatttggcagtccctgagagggattgtgtcagtgacgacccgattcaacttaccatctattctcctaatgtccccgatctttccctcattgatctcccaggctatatccaggtgtccggccaaggtcaacctccgcagttgaagcaaaagatctctgatctatgtgacaagtacatccaagcgccaaatgtcatcttagccatatctgcggcagatgtcgmtcttgctaattcgacagcattgagagcaagtcgcagggtagaccctaggggtgaaaggacgatcggtgtcatcacaaagatggatcttgtcgacccggaacgtggctacagcattcttactgataagaaataccctcttcgcctaggctacgtgggtgtagtctcacgaatccctcagacgaccgctctattttcctctcgaggaagtggcaacatcacgagcgcgatcatcaagaatgaaaatgcttatttctcttctcatccatccgagtttggacctcagtcagaggtatcggttggcgttggaacgttgcgaaccaagcttatgcatgttcttgaacagacgatggcatctagcctagcgggtactagggacgctatcagccaggaactggaagaagcgacgtacgagt

SEQ ID NO: 1097 - DNA, 640 bp, Aspergillus oryzae
catggtccgttcatcgtcacatggagcatgaagaaggtgcttgctggacgcaaggatccctacacgatcaagcggtcctctgaagaggtcatggcagacaacttccgatttggttctgacaagaacgtcattgtcgctttgccgaacgaggtcaacatggtcgcaaagagagctctccagaagcccactcgcgaaagtattgcagggccccccgtcaccccaagccgtcggagcacgcggtggggcagccgtttgggacgagatgatattgtcaactcgccatactaaacgtcctgacccgttctctagtcaagtgactttgacttatttcattgcctcggtttttccttttcttgtacactgcataccccttttgtctttcttttgcttttctttttctctttacagcttttttttcttttaataatttctagacccttgtgttctcgcaccgcttctatgatatactcgtgcaatttccggtacgatatgctatggatgatcttcctcctagcggcgatatggcagcttacgaatgagatggaaatggtggagctgaatcatggtgttgcattttcgagataaatctccagtaatacttgagtacgaattatgaatttcaggtgaagtactgagtgct

SEQ ID NO: 1098 - DNA, 528 bp, Aspergillus oryzae
aattcggcacgaggctttattattgtgcgtagtgataataaagtagacccaataaactaactacctgatgtaaactaaagccagtccaaaccgcccatccaagcgaccatgaccatcaaggcaggttctagccaaagccaggtagaagcaaccgtcgccaaccagacagcattatccgggtcatcggtgatatttcgatgaatccagttcagtgttttcagaagaagtatcagtataagtbggagtgctgactcgagggcagtcatttgagctttgacaaagaagtatgacggagcaggctttagttgcgcgtagcttatttaggggcacatatgttgtgcatgtyacagggacagctctctgggcagtcgttgtgtccggtgcagatgttatgacatctgttgaggactctgaactccttgggagttgcagagctggtatcccgggtgacagctactgcgttggccatgccgagaagggcagaaagggtgaggatgctgaacagattcattgtgccgagaccaatgt

SEQ ID NO: 1099 - DNA, 658 bp, Aspergillus oryzae
acgagggcggatcatcggcacagacggcatcttgattcccaacggaaccatccttggtgtcgactcgtacgacggagcaccagacttcaccactggaaagcttgtgggccaggacattgagaaagcagaagggctgtgtggaacgggctgcacgggctatgacaactgcttcattgtcgatcgagacaatgcatatggcccagccaactctattgtcccagttgttcgtatgaactccagcacaaccgggatcagtttagaagtggcttcaaaccaacaagctgttcaaatctacacctgcgataacatgaagggcaccattgccgtcaagccgtcccaggccaagcggaacaaggaagaaggtatcgagggcgcaaagagcgtcaaccagtatgggtgcgtcgttatcgagaccgaagttggattgatggaatcaataaccccgagtggggtcaactgtcagaccaaatctattcccccaccggagctccagcagtcaactgggccacgtataagtttggcacagtctaatctagccacgccgcaaatttggttatttaatgttctgacggctctacttgttgggcggttctcaacctcatcgtgttgtatgtacatttactactgtctggtaaataatgtgatcgatgtttataat

SEQ ID NO: 1100 - DNA, 923 bp, Aspergillus oryzae
cgaggaaaaaacatccgtcggctctttaattgcttctcttctcgacacaacctttttactcggttccttcaattctcagtcccctcatcggaacgagtaacggtcgacaatcatctgcaacgcatttccctccaagtgatcattgcttctctccccctcccccgcctttcggaatcatgtccaccccatcggcattgcccgtcaatgcgggcgatccccaaccgaacgactctgcgcccgctaccaccccagcagaaaatgtaaagacggmgacgacgagcgcaacgcctgccccagagacaccagcgcagtctgcagataagccacaagcgcascccagcaaccgaaacaagcaattgacgatgatgatgacgacgacgaatcgcgacctggatgaattggatgatgtgctcgatgacttcaacaagccgaaaccggcccccgcccccgcccctgcccctagcgcttcatctcaacctgcgattgcgccagaagccaacgcactctcgacgaagaaaccttcatgaaattgcttgagaaagacatggcgaacatgatgggccacgctgccaaggagtccgggacatcggacgacaagggcttcgaagacaccatcaaccagggcgcggacgccttcacgaagcaactggaggagagcgggattccgcccggtgacttcatcaagcagctcctggcggatgtgatggctgaagaagagggtggagatgccaccgctaaagccgcagagctgcaccatctaccggcagtkctgggtcttcatctggtggagctggagctagggcgccgccgcctgagtcgtttaatgatgctatccagcagacgatgaaccgtatgaaggagtccggagacaaagctacggcggcagcgtcagaagatgatccgaacgatctcatggcgcastg

SEQ ID NO: 1101 - DNA, 777 bp, Aspergillus oryzae
  modified_base (44)..(44): n is a, c, g, or t
tcgtctgcgggagatgcggatggcacgctcaaaacgcaagtgcnctggaagccagcatcaccaccatgtacsgcaaaatgccttcttgtcgatcggtctgcagacctcgatagcgatcgctcttcacaaattgcccgagggcttcatcacctatgctaccaaccatgctagcccaaaacttggtctgaccgtttttcttgcccttttcatccacaatatcagcgaaggctttgccatggcactgcctctttatctagcccttcagtcacgcggcaaagcgattttctggtccagccttctgggcggtgtcagccaaccggccggtgcaggtctcgcagtcctttggatctggggcgctggacgaaccggtagccccggggacgatgctgactcgtcctgggccgtgtacggaggcatgtttgccgctacggcaggggtcatgacctccgtggccctgcagttgttcagcgagggcttgggactgacgcacaaccgggggatgtcaatcggctttscmcccccsgaatgggtataatgggcctcagctttgccctgactgcataattgtcatgattcactaggcgtttatttggtataccttggcgcttgagtttgagttactataaacaccacgcatctccatagacaaaaagggaagccaaagcgataaagcatctaggagttaagcctttttcatgaatgcgcaacgagtgaagattctgattttgggttttatgagaaatgtctttacctattcacttaatttaaagtgttgct

SEQ ID NO: 1102 - DNA, 930 bp, Aspergillus oryzae
  modified_base (14)..(14): n is a, c, g, or t
aattccgcaccaanggccttttatacatttccttatctgtggtacccaacttcttttcagatgataatatagttatcacccaacgaycagttgtattatttattysttactgcctccgcctcgtgctcttcgcaagcttctttccaacacttgggtttcctggccatgtcacattgattthhyagtcgacctatgtctatttatggcctgtgcgacgtcagccagacgaattccaaagggctttcctgctgtgactatatcacaatataggttcaagcgtcctctgtcctgtgagctgcgacgccgacatacgtaacagctagtaaagggcagtctctaaaaaaacaagccagccgttgatatacctgaataacaaaccccaaacccctcttcaggagcgattcggggtaccctgctgtctccgtaaatcgttcattacaacatgagtctggatcgtcaggaatcggttcgtcacgatgaatcgaagacttcaagggacaataccttggccaagttaacccagttgccaccgagttcggcttcgatcaaggaagcgtcttcgggaaatagcagcaaatttgttggtaaactcaagggcagaatcgcggaacctgtcgtggcagctttcgttgctgggsgcgtacagggtgcggtatccagaaccatcgtgtaaccacttgaacgtctaaaaatcctgcttcaaatacaaagtgttggcagggaagagtataggctatctatatggaaggctcttgtaaagatcggcaaagaggagggatggagagggtttatgcggggcaatggtaccaattgcattcgaataatcccttattctgcggttcaatttggaagttacaatttttacaaaaggtttgcagaaccaactccagatgctgagttgtcaccagtacgcgggctcatttgcggagg

SEQ ID NO: 1103 - DNA, 328 bp, Aspergillus oryzae
aattcggcacgaggcttgggagtcattctctgttggaccggaacagctgtgctttgatgtgctcgggtcatgtcaacggtgtcagatggtctgcgttgacccatatactggcacccgtcgagaggagccttattcaacactggtgaagacgaggaagatcaacagcaagatcgtgtttgggagacacacttctctatctaacatggagctttcgcagggtgctggcaaacctaaatcttgcactgttatggtaggggacgttgtgacaccgcagattgcttgaactagtcgtacgtgaataatcaatgcatcacccttaaagccttgg

SEQ ID NO: 1104 - DNA, 1059 bp, Aspergillus oryzae
ggtcaggctttggcagcctgggagaaccatgctagatcctgggattcgactatgggtgatgacgggaacgacwacttctcagtcctcgaattgcctgccctgaaaagaatgatcagtggacagaagcggaatcgagccttggacctcgcaacgggaaatggcttggttgcgcgatggcttgctgaagaaggattctctgtggtggcaacggacggcgcaagagccatgctagagcatgcaaaggcgcgaacaactctctggtatgaggaaggaaggttagacaaggagcgaaagatctcatttgaacttcttgatgtgaccaacaaggatcattgggcgcaatttactagcagtgataaccttctgaaagacggatttgacgtggttgtgatgaacatgggaattatggacgtccatgaccttgagccattagcagcatccttaacgtcccttctgaagcaagacggatgtttcgttgccactgtgcttcaccctctattcttcacgagcggtgcaaggcgccaaatcacagtccatgaggatcccgcgactggccaacgcataatagatcggtccatcctcttgagtcaatatcagaatgttgccccggcccggcaactcttattttccaatgatagcgagcataagccaccgctctcattccacaggtccttccaagatctgtttgccccattctttcgggcaggcctcatccttgatgctctggaggaggtgaacttcgatgataccttctgtgagccctcgcgtgaatacgccgctagaaatttcaccgaattcccaaagatactcgcttttagactgagattggggcctatgcataggagttagacctcgtgaatggattccaaacgttgttcagtcccagtgactgttatacaagccaaatcatccagccggcggcctccattcataaaaggagtttttcattttccagattggcctgacagctatgtattgctagtaatattaaagaacggacaaccacaagaggatgttatttgtcacagattttttagtgcagcaatcgattattcattt

SEQ ID NO: 1105 - DNA, 340 bp, Aspergillus oryzae
aaggattccgccaagaaatcatccagtattagcggcggatataagccgtttggtcctggtgatcttaacggtaagcagtcggagaatagcacctcctcgtcgtccgacaaggataaggagaatgctgcccctgcttggagacccagccttgctatctgtgccgcggctacagttatcagcttccttctttagattgttttcttttacggttttttaacgaccaaatgtgtccaacatttttgagttttgtgcatgatgatacctatatactacgatgaatattctgtgaacttacctttagacaatttaaaaattgtacatatacaatatttgcctatat

SEQ ID NO: 1106 - DNA, 277 bp, Aspergillus oryzae
acgaggtggatgtcgacgtccgctctaccgatggygccggtattaacgcyccasgatcatcgcgtaccttgggagcaytakaggtcctgttcgcagatgtacggtatctggcgtttcgggtggaaaactraatatcgcgatgcggcaagcgagtacgtgaatatctcgcactctgcggcttcatagggtgctcattttgcacaactcacttggaagatctataaaagcaacgatttaaaycatagttctatttaatccatgtattctcctttgtctt

SEQ ID NO: 1107 - DNA, 931 bp, Aspergillus oryzae
acgaggcgctcctacttttcgcctctgatatttcttcccctaccggcacgcctatggtgtacgcatgggaaaagagggttgaacatactttacaaaatgtcgccgtggtcctattcactccttcgtcatgaagcaaatattactctcaggatattgaacgagtctcgtgatgataacttcgacaaagtcttcatttataaagtgaacgaacctatgcttaggtttgatcgactcatcacactgccaatttctgagtcaggcactgttcttcgaaccattcataatcacaatgccatttatgaggttctcaagaaagcattgggcgacagagtgaatcttatttacctgttcagccatggcgccgaaccttggtctgtggaaagaaaattctcgcgcaaagcagcgagtgcagccattcatgttgggctcaacttgaatcctgaaaatgctatgcgagtcgttgatcatggcccattcgccgaacagaaagaagaagctgaaacttttcggtctttctggggggaaaaggccgagttaagacgtttcagagacggtactattcgagagagcttagtctggtctgaccagccgccctctccctctatagtatatcaacttttggtgtacatcctccgtcgtcatttcaattatgaagaagatgagatcggttatatcggcgacgaattcgatgaaaaactgcgcaatagcgggaatggaatattcttgtattccaaccctgcattccagttggtcactgatgcttttaactctttggagaggtcttttcaaagaatggatgaagtgccgttgactgttaggcagctggctttggctagcccccttagtcgatactccgctcttcgtgtccagagtgcttctggcctcattcgcgatccggtggatattgttctccagttcgaaagttcctcga

SEQ ID NO: 1108 - DNA, 888 bp, Aspergillus oryzae
tcctccattttttcttactghatcgtcttacgtatattttctacgytttatattttcatactctataattcactttatctactctaatagtatcaaataccataacccttccggataacacagttttaaggacctttgccttcttcttttcgtgaacataacacccaccaaccacgctactattttcccaatggcagctcctcgctctacttctttgcgcgcccttcgcgtgctctctcaacagcatgctgctacaccctgcctccgccggggcctgcacatcaccggggtcaattctgcacagcctgtcaacgtttcggatcgtacgtctttgtacgcgactcgcagcttggcagacctccagagagagtgctcccagaggaaactgggagccagcggcagccagaatgagctcgttgagcgccttgccaaccatgactttcttcaatcccgtgctttcagcattgccatgagaagaatcaatggcagctctagmagcagawaaatctgtttccacccgccaattcaacacatctcgcgcctcgaaggccgtcaatgactcatccactgtggattttgcatacctaccgtccatggacgagattsatgcccctactcgccccgccgatactcgcattccgatcctttccgatgtctacaccaactacaactcgagccagccctcgaaccctcccatgaagccccaggtacacactgtgtccgggggcggggccgatatcgcagtcagccccatggccgaagttgttgacaacacctcggtggatatcgacccattctcgctaaccgaggcggttggaaaatcccgcttcggcgaagaggtctggaagtcccagaacggctccaaggaacccggtgttgtaaaggagc

SEQ ID NO: 1109 - DNA, 762 bp, Aspergillus oryzae
aattcggcacgagggctgttagaaacaaagctatcgagcagattctcacggacggcccagtccagtctccagtcgaactgggtaacggttcaggtgctggctttggtgcgacatacaagaaacggcagcgtaccaatcatccagtgcaacggtgttcatgtttctgaggctgagatcatcgggaaaagccagtcggcacagtcgactttagactccacgtactccagtgtctcatcgtatcatgaagatctggacatgttggagggatttgagtttgaccctgaccttgatatgccccctgaagagccagcagagccaaagcctgcacatttgacgtccaatggctgtcttgaggagaccaacagtgacccttggaatgctgtgtgtgtcgtaggcttgcgggtctactccaaagatccgcagttgtcactcgaggtagtccgttccgtgtctaagagagatacgggtgccgcgctcgatatggacgatcccctgaagagtgcttcctttagtcgactggaagccaactaattctataatcttgaacacgtctcggttaatcaaaattaggggcttttctctggcgtcttagcgactgataacaatagtgttttacaagtacaagcatcatggggatagaatataattattgcatgtcatgaaaccaggcgttcaactccgtagacccaagcacaacttcttaaaacccgttaaaacaaatgtagcacaaaagaggcccagcgaaaggctcgaatagcaaaa

SEQ ID NO: 1110 - DNA, 1007 bp, Aspergillus oryzae
gggagtataaaccacacgatgaccgagtaagcatctggacggagctacggaggacggtacgggccatctttcactgctttcttccaggagcagaatgagaagattgccaacgstccattgacatcgacgatgctcactatattcacctggacaccctcggaattatcaatggctgcgtcgatctcctggtgcagtcgccatcatatccccagatagcatacaacaatacctatggcattgaggctatcaacaaaactgtatatgatatggcgatggaggcttggagcaagcccggaggctgcaaggatcagatcatcgaatgtcgtcggttggctgcagagggagaccccgaaatgtacggcaacaatgagaccgtcaacaaggtctgtgcgaaagcaaacaactactgcagcaaccaagtagaaggcccatattcactgtactctggacgaggctattacgacatctcgcatttcgaccccgatcctttcccccctccgtactactttggtttcttaaaccagcactgggtccaaggagccctcggggttccggttaatttcaccgaatctgttgatagcgtctacaatggcttttccgcaacaggtgactacccacgctccgatgtacgcgggtacctggaggatatcgcatacgtgcttgactctggcatcaaagttgccctagtgtatggcgatcgggattacgcatgcccctggaacggaggagaagaagtgagcytgaaggtggagtactcggatgccgccaagttccgctctgcggtttacgcccctctgaagaccaatgcctcatatgtaggtggcttggtgcgacagtwcggaaacttctcgttcactcgcgttttcgaagcgggtcatgaggtgccggcatatcagcctgaaacggcgtatgagatcttccaccgagcattgttcaacagagacattgcgacgggcaaggtctcaatcgccaagaacaacacctactccactcacgggcccccttca

SEQ ID NO: 1111 - DNA, 943 bp, Aspergillus oryzae
aattcggccgaggcgcccaccgcagatggagaagttatttccaacctcgatttacttggttctagagtagagaaacaactcaaagatgagacaccacctgtccagccgctgttccacagaaaacctccatcgcccgcagaatccgacgaaactagtttgtcgagatatgaattgaacttgaagttgatgctcgcaggagttggttcgaggaactttggacccgacggctttcccccccacccggccaaacactgaggcagagggcatgggagggcctcaggataccctctcacaagcctctctgcggagcgccaaaccgacttgggctcggacccgttcagccacagagcaaccccgacaacgcatcaacgtcttcatggctggcggtgcaacgtatggcgaactcggttcctgctacgaggtctcccaagcattcaacaaggatgttttccttgcgacgtcgcatatgctaagtcctggtttgttcttaaaacagctcggggacctcagtgccgacagaaggcgcctagacatcccagccgaacggccaaagccaacggccccagcccatttgtttgaaaaagatcccccaccgcagcctcagccagtccccaagaaggctccagccccgaagctcaaccctccggcgcctccttcggcagcaatgggcgccatgtccctaggatccaatggtgcagcacctkcaccaagcagcgcaaagccacataaggagaagaaagaaaagaagccccatcacttctttaggcggtcatagtgccttcactttctctcagaacctcttcaaggataataacattctccttgactaccgacggctatagcgttttgaagtctatacctatgtttttctactacagcgtctgttaaacaatctctcgggttttattttgagccccgaagcgccaaggccctaaatggatag

SEQ ID NO: 1112 - DNA, 338 bp, Aspergillus oryzae
  modified_base (58)..(58): n is a, c, g, or t
  modified_base (67)..(67): n is a, c, g, or t
  modified_base (277)..(277): n is a, c, g, or t
aattcgrcacgaggcaagaacataacacatacaaggaaaatgggccgctacacacgtnaagagattnacttttggagggaaaaattcagggagattaacaccaacggtaccgttatatcgaaccctatgagctcattgcagctgcgaaagaacagggttttgagatgagcgacgatgaagccaaggaatggattgaagaactggatgggaattacgatggcaaagtctcatttagcgagttccttacagcgtttggagaattgaagagcaagcagtnatatcggatcccgttctgataacagatttccacacaagctttactgtttagaaccaagcag

SEQ ID NO: 1113 - DNA, 593 bp, Aspergillus oryzae
  modified_base (525)..(525): n is a, c, g, or t
gcgtcattttgccctattctagcaccgcccattgtctctggataatgggggatttacccgctcggagtacctagtagaagggagaaagaaaagagggcgttcgttgataggccccgtcttcgactcttatcaacaactgccatctgtcagtccctttgcctatgtgagacctgtgatggatccgctgaaacatcgattggaggggaatagtttagtagtcggctgttgtcagtttcactaagccgttgggttgaatgccagttattgcttggcatctgtatagcaggcattccgtccgtccatggtctagcgcggcattggacgggcgatagcgaggtttcgcatcggatctaagcacattccgattcgatagcattctgagggtgttcggagtcttggaacaatgctgggaccgggatatgacatgtacgataacgaacaatgaacggaaatggcaaaagagccaagagactatccaagaaggaggggtagaacaaggcaagttcgagcagaaagaagacagcnagggttcgacaaagcgaascttttcaaactagtcaaaaacgctcattggaggtgctttggttcttata

SEQ ID NO: 1114 - DNA, 855 bp, Aspergillus oryzae
  modified_base (834)..(834): n is a, c, g, or t
ggcgcaaatcatcgtacgatttatatatcgtctcaggtagatatgttgattcaagagtctttccacgatgtgccaaccaaggcagatgggaatggaaccatgcgcatctatgtattccatcccactatccctggatatcctaaggcccgattccctggcgtagtggtattcagtgagatctatcaagtgactgggcctgtttcacggtttgctaggcaaatcgctggtcaaggatatatttgtgctgctccctctacttatcacgaattcaccggtccagagccattggaatacaatgccgaggacacggataaagggaacaaatggaaagtcagcaagaaattagctgcgtacgatgaggacgcatcactgtgtgtcgactatctcttgtcactgcccacatgcactggtcgtgtgggcgcgacgggtatgtgccttggtggccatcttgcgtatcgctgtgcgttagatagtcgagtaaaggcggcagtgtgttactttgcaacagacatccacagcaagacccttgctgccggtaaaaacgatgatagcttagctagagcagaggatatcaaaggagaattgataatgatcttcggaaaaaacgataaccatgtccccccggaaggaagagacctaattcgtaaaacacttcaagacaagggggtcttgtttagcttttacgaggtggcttgggctcaacacgcttttattcgtgatgaactgagcaaggggcgatatgaccccgccatcaccaaggtttgtttcgagatgctactcgagctgtttggacggactctgaaactggactgggtgagcacgatggccgggaanttggagatcgaggatgtgtgt

SEQ ID NO: 1115 - DNA, 862 bp, Aspergillus oryzae
gatcttgcttctctctgctctgaggctgccatgcaacagattcgtgagaagatggatttgatcgatctggacgaggataccattgatgctgaggtgctcgactctcttggtgtcaccatggagaacttccgttacgcccttggcgtctctaacccctccgcgcttcggaagtggctgttgtcgaggtgcccaacgttcggtgggaggacattggtggtctcgaggaggtcaagcgcgagctcatcgagagcgtgcagtaccccgtggaccaccccgagaagtaccaaaagttcggtctttcaccttctcgaggtgtgctgttctacggtcctcctggtactggtaagaccatgcttgccaaggctgtcgctaatgagtgcgctgccaacttcatctccgtcaagggccctgaactgctctttatgtggtttggtgagtctgagagcmacatccgggatatcttcgacaaggcccgtgctgccgctccttgtgtcgtcttcctggatgagttggattcgatcgccaagtctcgtggtggctctgttggcgatgctggtggtgcctctgaccgtgtcgtcaaccagctcctgaccgaaatggacggcatgacctccaagaagaatgtcttcgtcatcggtgccacaaacagacccgagcagcttgatgctgcccttgtccgtcctggtcgtctggacactcttgtctacgttcccctgcccgaccaggcttctcgtgagggtatcctcaaggcccagctgcgcaagacccctgtcgcacccgatgtcgacttgcccttcattgccagcaagacccacgggttctctggtgctgatcttggattcgttactcaacgtgctgttaa

SEQ ID NO: 1116 - DNA, 963 bp, Aspergillus oryzae
cacgaggattggctgccgtcgaagccttgcactcgttgtatagcagatccaacatrgatatggagagtttccaacctcttgtacatctgatgtacgagaccgagtctctagacattatgcagaaattataccaatggtcaatcgtgggacctgacgacattgacgatacccgatacatgatctcaaagaagctgtccgaaatgctgtcgtacatcgcagggttcttggaggagaaggggttttctctagagagcgctcatggcatgaatttgcctttcttctttcacttgacaataagtgttattcagcatcagagtttgatggtctcgatccccgtcctccacgtgtggtccaaactgttagcttctgaaagaataggaaacactgatctggttaccggcttgattccttcgctactagagatctgcactcaacggctggtccgttgggaggccctaccaacggattctgatgatcccacagtagcatttttaaatgacgatatcgacactgtcccggaaagacatgcttttgtgggcaattaccgcagatactgctcgtcaattatcgaaacgatcgtccagaagcggccacaggaagccatcccccatatcctgtcaggcgttgatactaatttgaacaacctctacaatggagttgagcctttcaacgcaaaatctttctcaaagagctcaattcccctgatgcgcgccgatacacagtttgccgtcgtagaagcaactcttaaggggtataacaaatgggtgtccgcccacggcaaaatgccccagcaagatgagcaaaaacgcatagtcctggagggtatcctggagaaatgggctttctcattaatgcagcggastttcgaggacccgattctcaagcagagagtcatcaaacttattgttgatatctcatcaaaggccctcgacaagacccctagctttgcgcttaaagtcctcg

SEQ ID NO: 1117 - DNA, 900 bp, Aspergillus oryzae
  modified_base (292)..(292): n is a, c, g, or t
  modified_base (436)..(436): n is a, c, g, or t
  modified_base (558)..(558): n is a, c, g, or t
atgcgcttgattttcccattcggcacttgggtgaaagagcgatcaacaacagcggaataccctgagtactatctctcggtgcctgtggaccattbgccavaatgactcgcgctatgcaccgcacagcgacgaccatttcgacctgcgatactggttcgacgcccaatactacaaggaagggggcccggtgtttgtgatcgccgccggagaaaccgacgcgaccgaccggttccctttcttatcgcagggcattgtcaccgaactggcttctgcatataacggcattggagtnattctggagcatcgctattacggcaaaagttacccggtagccaatctgacgacggagaatattcgatttctgtcaacggaccaggcattggccgattatgcctactttgcttccaacgtcgtttttcccgggctagagcatgtnaatctcacatctaaaacgactccctggatcgcctatggtggatcgtatgccggcgcctttgtcgccttcctgcgcaastctaccccgacgtctactggggtgctgtctcttcttcgggtgtnaccgaagcgatcatcgatttttggcaatactacgagccgattcgcaaatttggcccgtccgattgcatctggtcgacccaaacattcatcgacgtcgtagacgcatcttaatcgaccatgccgacaacaaaacgctgggccagcaactgaaaacttcactgggggtcagtccggacaaggatgacgtctcgttcgtttcacttctttcttccggccttgatagtwtccaatcacgcaatggatcatatcgtagcactctcgagctatgcgaacatcacagctcagacttgtgtatccgacacgagcgtaagccacatcaggactatcgagtggcggatataa

SEQ ID NO: 1118 - DNA, 319 bp, Aspergillus oryzae
tatcgataagcttgatatcggtacgcwactgggggttcggcgacgcwcgctgtcgaaattctgaaggcgaagggwgtaccagaggaccgtattctattcctcaaccttatcgcaagcccttcaggagttgcagactttgcggaacsttccctaagctcagggtcgtaactgcttttattgaccaaggcttggatgagaaaaagtacattatccctggacttggtgattttggtgatcgatactatacgctgtgacacccaatcaccgaagtgaggtcctagtttagtattgcttatgaagtattacggagttttccttg

SEQ ID NO: 1119 - DNA, 898 bp, Aspergillus oryzae
gcttaagtctggggcaaatgtcattttcactactaagggtatcgatgacatggtcctgaagctgtttgttgagaggggagccatggccgttcgccgctgcaagaaagaggatctccgacgcattgccaaggcttccggtgcgacactggtcagcacgctctctgatctcaacggagatgagaaattcgaggcctcgtacctcggccatgcggaggaagttgtgcaggagcggatatccgatgatgaatgtatccttgtcaagggtaccaaggttcacacctcagcttctatcatccttcgtggggccaatgacttcagcttggacgagatggagcgttcggttcacgactccctgtgtgctgtcaagcgaaccctcgagagcggtagcatcgttcccggaggtggtgctgtcgagacagcccttcatatttacctcgaagaattcgcggtcacagtaggctctcgggagcagcttgccatcggtgaatttgctcagtcccttctgattgttccaaagaccttggctgtaaacgctgctaaggactcgtccgaacttgttgcccagcttcgtgtccgccacgctctatcccaacgtgtgcaggatggtgacgccaatgaggaggagaaggccatcgctaagaagaagacataccggaactacggtctcgacctaacgaagggtcgtgtgcatgataccctcaaggctggcgtgttggagcccagtatggcaaaaatcaagcagcttaagagtgccgtcgaggcctgcattgctatcatgcgtatcgatacatgatcaagctggaccagagtgaggagatgacgacatgcactatttacttagtgttgcatcattacgtttcgcatgagtctagagtgagagaaagtatatagatgatat

SEQ ID NO: 1120 - DNA, 857 bp, Aspergillus oryzae
ggctcccgaatcgggttagcctcccgagtagtctcgacgtcaccagccgtctctcctgttgcaacatccaactccactgctcttctcacacttggatcacagggggaagagaaggcaggaaaagaggttcaaccagaaaaaagtcccatctaccgttccttgggtcagtttgacctaggtatacgattttcgtccttcccgtacacaggccctgtgtccggtccggttgcagttccttcccctcgtactctcgtcgcccttccgtcgcatcccgttgcgcccactggtacacgtcacttctgcgcaaagcgaaccttcaaagataccgcatcatccattttcagacgatctcgcccaaactttttttctttctgatttctctgttatcctttcgtctcgttcgcttgcatctagcttcccatacaaaccgtagctatgcatcgcacctattccatgcgccaatcgcgcatgcccaccgcatcgcagattgagaatccgcctccgccgttgtccacgaccaagacaaaccgatggattgggaaaggcggcttcggccatgccttccgtaagaatgccgccggcgcattcggacccgatcttgcaaggaagctctcccagctcgttaagatggagaagaatgtcatgcgcagtgraaaatggtagccaaggagcgtatggagaccgctcaacaactgtccatctggggtgagaactgtgacgaagatgtgtccgacatcacggacaagatcggcgtgttgctctatgaaatcggagagttggaagacctctatgtcgacgtatgatcagtacgtgtcacatcagagcatcgcacatgagctcgtcagccagcgagacgc

SEQ ID NO: 1121 - DNA, 841 bp, Aspergillus oryzae
ggcacaggctcggtggctggtggcttggctgtgcagaaggccgcgtcagaccgcatcgtcaatgttgggctggagctcggtggcaaagacccagcttatgttcgggacgatgtggatgcagcgtgggccgcggaggaggtcgtcgacggagctattttcaacagtggacagagctgctgtgcgattgagcgggtctacgttcacaagaacatctacaataccttcgttgaggaagtcaagaaggtcctaagcaagtatcgtgtcggagatccgtttgacaagcaaacacagatcggacctgttgtttcaaagcgagcgaaggacacgattcaggcccatgtagccgatgcgatccagaagggtgccaaggatgaaactccagcgaatgagacatttgaaaaccctcctgcggagggcaactacgtcaaacctacgcttctgacgggcgtgaaccatgacatgattgtcatgacggaggagacctttggtcctgtcatccctgttatgaaggttgacagcgatgaggaagctattaagctgatgaacagcagcgagtttggactgactgccagtgtctggaccaaggatgtggctaaggctgaggaactagttgagcaggtggaggcgggaactgtcttcattaaccgatctgactatcctagtccggatctcgcatggaccggctggaagaattcgggacggggcgtaactctgagcagatttggatttgagcaatttgtcaagctcaagagccaccacatcaaggcttaccctaaataagtgggtactttagttgcatgatacgaagtaatgatcgttatagtagatagactcatggtca

SEQ ID NO: 1122 - DNA, 952 bp, Aspergillus oryzae
acgaggctggaaactagcccgttacgtgtacggacgtcgcagtcatgaagcctgggctgctcttgccttgaccgtcctcagcccctggcaatggttctgttccacccggacattatccaattgcctcgaaaccacaattacaattgtcgcgctgaatctatggccctgggaatggtcgtcggaatccacgccaacagttcaaccgaggaggaacacgcgctccactactagagatacggggctagataacaccggtgatggagctgtcgttgtcaggctgcgcaagtgtctcactcttgctgcattggcgtgtatcctgcgaccaacaaacatcctgatctggatgggcttagctggtgtcgcatggtttcggagcgcttggcgggagcggacgatcctctgtcgcgaagttctgctttgtggggtttctgtcctcaccggatcggtcgttctagatcgcctttactacggactttggacgtttccgccactaaaattcctgtactttaacatagcccagtctctggcagtctactatgggaggaatgactggcactattatgcgacccaaggctatccccttctgcttacgaccgcactgccttttaccctggtcggcctatatcgtacactgtcccagtcccagtcaaccataaacactcggaacgtgtcggtgcaaactcagttggcagctatttgtctattaatgccgctggtgctgtcgctcatttcccataaggaagtgcggtttatttacccattgctgccctccctgcatgtcttgacggccccgcccctagtggatttctttctcccggctgtctctcgttctaacggggcatatatgcccagacggctgtctcttgtctttttgttgctggtcaacatcaccgttgcgatctacacatctgtataccacgcatctgggaccctcaacgttctctcgtaccty

SEQ ID NO: 1123 - DNA, 581 bp, Aspergillus oryzae
gagttatgtctctcaaagagcccaccttgaaaatgtccaagtcgcacgccgacagccgatcgaggatcctccttactgattcaccttatgatattcataggaaagttagggctgccctaactgactcagacgcaagcataacttatgatcctgtccgccggccgggcgtttctaatcttatagaaattctaagccatctcgacggaagatcctgcgacgacttatctttggaatacaaatcggcgagccttcgggctcttaaagaagacctggcaggtcgaatctctgatcacctgcaaggaataagagagcggtactattcgctcatggaagacaactctggttatctggatactgtcacagagcagggtgcccaggctgcacgtgccaatgccgatgtgactatgaaacagattagaaaagccatggggctgtgagggctattcatcattactaccagggcattcatgactatacatggcctttgctattccaaatgaacagcgaatggtcccgatcaaggcgatagcgccagctttttgcgtgtacgtacctatcatgtatttatactgtactataat

SEQ ID NO: 1124 - DNA, 826 bp, Aspergillus oryzae
gcatactcagcaacttccactgactttacacgtctggtagtcgccaattgtcctgtcttggtttcttgtccttctcgtcgttgaaaaccccaccatcatcatttcgaccaattcattgctcttctgccgccatgtctggtgttagcaaagcctgttgctctatccctcccattgtccccaagggctaccaggccaagggtgaatacaagaccatcaatggcttgaagacatacgtcactggtccggaaaatgcctccaaggctatcctagtcatctacgacatcttcggtttcttcgaccagaccatccagggagccgacattctcgccactgccaatgagcaaaagtaccgggtcttcatgcccgactttttcgaaggcgagcccgccgacattacctggttccctccccagaacgatgaccacaagcagaaactcggcaatttcttccagaccaaggccgcgcccccaagcaccctctctaagatcccagatgttgtctccgaagccaacaagctcgcccccaacggcgagttcgggtcctggtcgatcctgggctactgctggggtggaaagatcaccgccctggcctcgggcaaggacaacaagatcttcaaggccgccgtgcagtgccaccccgctatgcttgccccagaagatgcgaagtcggtctcaatccccatggccgtgctcgcgtccaaggatgagaacccgaagaatgttcaggacttcggctccaacctgaagaaggagaactacgttgagactttctccactcagatccacggctggatggcagcccgttcgaacctcgaggacgctgaagt

SEQ ID NO: 1125 - DNA, 938 bp, Aspergillus oryzae
tatcgataagcttgatatcgaatgabbyacgaggcaaacaaccccctaaatccactcttcgcaccaattattgcccacccttcccctgggaaatctagttgvttccttcgagccgcccccccacatcctgcgcgaaacgccgtgaggtgcaaaggaggggaaaagtgactctttattggtagggcgcaatcatggctgatagtgatcggaagcgcccgcagccgacgatccccaatcgcaacttgcatgcgatgctggttctccctctcaacggtcaaagagccattccaatcagaataatggcgttggcgacgagagttacgagcggcgcgtattctcgctagccctgcgtgacaacgcccaaaaggcacatgctcgtcccgacaaaattgatgacgacagttacgatgacgattacacctcatcctccgggagttatagtgatgaggacgacgttgttgacgatgacgaagatgcccaagatcgtgatgtaaaaagtgacaatggttccgatcactctttaccgcgcatacctgctccacaaaaacctcagatacatcgtatcgagaaaaatcccgatctcctctcccgattgtctgcgtttctcccacaaatgaaaagtgccaatgataaactacagcaagagatagaggctgggaggggaaaggatttgaggttggatgaggtggatgatgaagctgatggtcaatttattgaaatgaatcttggcctaggcgtcctcgaagagaaacgccccgccgacgggtcgcccctagtgcaaagagcgagggttcggacgaaggccctgcatacagctacgcagaatcacatcctaatgcgccatccgaatcgaacgttttggaaacactgatgggcaacaaagatactacatcgtcgaaaaagccaacaattgaggaaatgaacgaataagagccagg

SEQ ID NO: 1126 - DNA, 416 bp, Aspergillus oryzae
aattcggcacgaggaaccacttctatatccttcatctactttgacaccmtttcgcggatcaccaccttccttgcctcacctacttccgttttctgaccgttctcccgtcgcttctccgtccattattcaccacggcgagaatgtccagaccaccaacgcctcagccgctgtggagaaaatcgctgactacatcatcaaccctcaccagtagacggcggtgtggaaatgcaatgaatgtgtttycttaacttgcggaaaaggaccgtgtctgctttgaatcgatttactggcgggtcctcttcatttctactattactccctaccccttttattcctgtaatatgttcgccgttcgatattgagcatcgttcgtagatatgtgccaaaggtcctgatctagtacgcaaaaagatttc

SEQ ID NO: 1127 - DNA, 757 bp, Aspergillus oryzae
aattcggcacaggattcagcggccgcttttttttttttttttttttttttttttttttaacaaacccccccaattccccccccaaagggtaattacgattttccccccggctttaaaacccccgaaaaaatccccaaactgtgccccccttttscaaccccaggaaraggcaaktacccgggggggtcggtggstgaccmcccccsgggggtrcgcmaawaaaagacsgmaawaamcyttmccamagccckggttttcccccctttyccaaaaaarkttttgggggggggcctaaawaccaargggggyyymrgtgagaccaaggggggtccccttctgggggtccggggaaarrrgggdwwycsgcggggttaaaaaagggaaagggggggccgaaccccccccmamcccccccaaaaaagttttttccscggggcccttttcccaaaaaaattttccggggbggggmaaattccttttttttcccaaatggggcgccattcctttgcattgttgagccattggcccttgttcgggcgggttttgacgtcgccgtacaggtctctaatgtacaccccgtcckgggggttgagggggaggttgccctcgcatttttcgtcaagaaaaagcgggattttaccatagtggaggtccatgtcgtggggtttggcggataaattccgtcggcgcgggagcttagggtgtcgccattgggtgcggtgagggtgtagcatttaccagatttaaccccggaagt

SEQ ID NO: 1128 - DNA, 943 bp, Aspergillus oryzae
acgaggactaccccattttatccaagatgataatttggatgaagagggtccgatatacgggaatttcaagctgtccttacaggcaatgatttgccatagaggcaactctgttgactcaggacattacattgctattgtcaggggcaccagtgctggtgctcccccgactagctctcatagctcggagacagctttttcggacactccccaatattggatgcgattcgatgacctggccgcggagtgtgactttagttgatatcgaacgagctctgaagcacgagtcgccgtatcttctattttaccaaatcctgccggtcaatgaagatgccgcggcagtaaacctcccagacacggcgccttcatctgaaatgtcggatgatgttcaggaattagatacttcagcaatagcccagaagttaagcacctcgggcagtgatcttcctgagagttgccgtgctgagggactccgctcgaacaggccgagctttgagatcaccgctccggatgatacagaattcctaacactggaaccaaatcacagaaaacatagtgtggccttctccgacgcattgaagtcaaatgcctctggagggcttcaggtacgaactgttccaccgacgtcaccgaggcttgccccgaaagacgatgatagagggaggaactcctttttcgttctctcggcatacctcaagaaaccggagaagcacgccgggcagccgtgcaggaagccaaacgagcgaaacagaattagtgctacattttcacgttttactggtagacgcagcagggataaagtcaatagcgatggcttctcgactgaggacgatgagtttgccgttgagaatatgccaccaggcgagggggctatgtcaacaagcagtgaaagcaacgagaaaagccctacacgcggaaaggaaaagcaccaagaataaagggaagt

SEQ ID NO: 1129 - DNA, 819 bp, Aspergillus oryzae
ggctcggttccccaacttggtcggaggttcgccgttacactgattgcgtgaacctaagcccgccgtcctcgatgggtgcagaggcaacagaatcgtttgcggacatggcgaaatccctggatggttcggtagtgatgcagtcgcctacgcctccagctgaggaggcatcttttgtgacaaatcgaaatcgctctcaattcgttagagattacatcttttggctgaccgacaagtcgattcggccccagttcgaggcttttgcacagggcttctacacctgtttggatcgctcggccttgtccatattcacgccagaggcactgaaaactgtggtggaaggaatccaagagattaatatggatgagctggaacatcatgcacgttacgaaggaggtttcggcccaagccatcgcacaatccgggatttctggagtattgcacgacggttctctgtggagaaaaaggcgcactgttggagtttgtaactgccagtgaccgggttccggttaacgggattgcgagcattatgtttgttatccaaaagaacggagtgggtgatgctcgccttcccaccagtttaacctgttttggtcggcttcttttaccagaatattcatcgaggagtgtcttggaagacaagctcaataaagccttggagaacgctcggggattcggcgctgcataatgcggcactatttttgggattgacatggtacattgtccgacatataagcacacaatacccctacgttatatttctgtatagtatatattcaagtattacatccaatagtgataagtgccatactggcattatct

SEQ ID NO: 1130 - DNA, 636 bp, Aspergillus oryzae
  modified_base (103)..(103): n is a, c, g, or t
gcagacatttcccatccatcttcctttttaaaacaaaacggatcgataattcgaccatgtctgaacacaagtacatatttactgtcaccatgagctgtggcgnttgctctggggccgtagaacgagtactgaagaagttgccaggtgtcaaatcttacgatgtcagtctggattctcaaactgccaccgtcgtgacggaaccatctgtatcgtatgagactgtgttggttactattcagaaaactgggaagacggtcacggccggagaagcagatgggcaaaccatggctgtgtgaatgaaactctttgcgacaggtggccacactttcaaagaattcgggtcaatgaatcgatggatagcaagcaggcatatattgctactaaggcaggaaattctctaatctagcctcttttaagataatcatgacagagctgcgcctagaacctctgctcacaatcaaacctttccccatatttctttccggaaggcgaatgcaagtggtttatcttcggctaagggtaccgaacattctcaatactcgagtgcagacatgtttttcattatggccgtagtagattatcacgatgtcaattggcacacatctgggtattatgcttatgatatcacatgtatgt

SEQ ID NO: 1131 - DNA, 918 bp, Aspergillus oryzae
gaaaacccacctggctggctcaggctccttgctggtaaaggagcactttchtgcgttgacaatcatacatgtcaagtccaccggttttcacagcgatacttgtccgtatgtgcgttaagcgggcttcctccgttgtatagggagccttcttttacatgagtggacgacttcatatcactcaccctagccgccttgttttgaaactcctcacacttattgaccctcattccagccattctacccaacacatcttccattaaggatagagataagccggccatgtctgtctcaacgtttacttcgatagccactgtggcgattactaccacaagtttcatcagcggcgtttccgctggcaacctggactttgtttctagcactctcgcaacaccaatgtcgactccaacttctcaaactattcctttccccctggcaggcccagatccaagcggagataacgatgacaccggggagtgcaggctattaggtcctttctctcttctggtgcaagtcgctctcggagcgttggcacttctatcccttgtctataagaggtggagggaaagacctcagcgacctttaaaagtgtgggcgttcgatgtttctaagcaggtcttcggatcggctatgctacatctggcgaatctgctcatgtctatgttctcggccggtcaattagagatcacgagcgagtacaaaccgaacccatgttctttctatatactgaacctagggatcgatactactctcgggataccgatactcattttcatcctccacattctgaaccgtctggctctttacacaccgcttgcagatccccccggagtctattaagtctggaaactacggtcgtccgccacgagcgaaatgggtggttcaaacagtctatgaaatactttgtgggacttttgggaa

SEQ ID NO: 1132 - DNA, 875 bp, Aspergillus oryzae
  modified_base (99)..(99): n is a, c, g, or t
aattcgggacgaggaaccgctgctcagagttgccgacagcctttgccggtcataccacatgacagacggccaaagtatgtagaaagttgcaagcacgtnctatgtgacgactgtacttggggcagcagcactcatccagacccagaggagaggcgtcactgtccactatgtgaatctcttaggggggcacgttatcgtggccatatacctggcgcgtcaaatcaaagaaaccgagacgatgcagattttctgaacgcggacggttattcatccaagatgagggcgcttatacccgatgtgcagagagatataaggacaaccaagagtatcattttctcatgctggacacggacccttgacctgatcgccaagcatctgaaagcttcacgtatagaatttgagcgcattgacggcaaaacatcaacatctcagcgccaaaagatacttgacagatttgatggcaccaggacagttcccgtgttgatcatgacaacaggcacaggagccttcgggctgaacctacaatccgtcaatcgggtattcatcgtcgagccgcaatggaatcctagtgttgagagccaggctattgcacgcgcaattcgcctcggtcaggagcagcaagtyctagttacccgctaccgtgttgagaacagtattgaagaggccatgtgctctcaacaaacgcacaaattgaagatcagccagagggacttcaaaaaggacctggaagcatctcctactggtgatgaaggagcctctgaccagccttcagatatacagtaaaaccagtyctgtggtgacgatgtttcagcccactgccttccagcttcgaagcaaattgttagccgggcacgttcgacggagttacgtgcgtc

SEQ ID NO: 1133 - DNA, 833 bp, Aspergillus oryzae
  modified_base (416)..(416): n is a, c, g, or t
acgaggcaagccttcatgtggagcgcgccataaagtgctttcccaggtctcttcctacgttccctccgcatttccacctttcatctcgtcataaccgtcgaagtctatgttgcagcctctcgcccggtcgcgatttcttcgaccgccctcagcgccaacgagtcacttcgccccgacctttggtgtttttgtttctactgcgcgaccacaatcgaactcgcaggcctttgtcggatacctgcataaggggcttgcatcatggcatctaacgccgccatgctgttggacccacgggcccacagaaaacagctacaaaacgatggctcccaggattcaggccactcgaattcttccgctgcgccggcaggtacggcttcagcggcacatcgtcttctcaacccgcagcgtcgacagcnctccaataaaggtagcccgaagtcgagatcgcgaccacagtcggtttcctcacgcggtgggaatagtgcaagagcatccccacaacgtagcgatacgcgtgaacctgatgtggatgtggtatttacaagcgcgcaggaggaaatcagtgacgggaagcggagttccgatcatgtcgatgaagtgcgccatgggaacctcatcgaggatatgtatggtgtggaaagacggctaaaccaaccgtacaagaagataaagacggagaaagacttggctcagagcgggaaaagggcgatatttgcgtygactgggaccaccgggttgggtgaatgggtgaagaatggtgaagagaagtcgaattcctccacaccaattaccccaaacgtcgttgacttaacgattgattcatccgctggagc

SEQ ID NO: 1134 - DNA, 856 bp, Aspergillus oryzae
aattctgcacgaggatttcacctcacaatgggtctcatcaagggagtctgaagctcaccacctatggagggctcgcctcggcgggcgccttcttctacaccacgcgcaatgacgtcttcgtgcccatgtcgcccacggatcccatcttccagtccgccgcctaccgcaagttcaatcccgaacaaaacccaaccacccacgacctctgcgtgcgcaaagtacctctgtccgacattaacccgaccttattagagaagaagggcaagctggccgaagccttctgtgctggagtctggagcggctggggatatgccttccaacgtgcctacctcgcccggaaataccaaggtcccgagaccgcgaaccacctctgggaacggccagaactgaaggcctccacttacgatgtcggcaccctcattaccgaccacttcgaggttattgagaagacccccgagcggattgtagtccgctgcggtgacagcccccgtaaacaggacgtccgcgaatyagacggcctcttcgaaatgtcggccgtygttaagcccgaggaaggagttgcggagtttgctctcaagagctgtttctacaaaggaaaagggaaggctgacagccagccgatgccgccgcatattctctggctgcataagcagtataccaagttgtgggctgagacggctatccgcaatgttctccgccagttatgatttccgatcagtggagcgtgtttgtatgttaccattgttctgccgtcactctgtacataatacccgattgcgtggatggaaagcgaattatacctgcctcttgagggggcttctttgcatagtttcggaaataaagatctgggccctgt

SEQ ID NO: 1135 - DNA, 798 bp, Aspergillus oryzae
gggtctgccgaggaatcttcgaaaggccatgaagtatttcaaacagatcacaaagcgctattggaataaggatggttctgtgaacccaaaccatccgcttggaattgagaaactagcatcgaaagcagcgggccatatagggctgatgtatctccgtggtgaaggtgtagagcaaaattttgccactgctctcacttggttcaggcgtggagtgacaaatggggattcgctctgtcaacatcagatgggactgatgtatcttcacggatatggcgtgcagcaggacgctttcagggctgcatcgtttttcaagtcggcatctgaacaagatttccccgccgcagaaacaagactgggtgctttgtttttggaccaaggagatgtcccaacggctacccgatattttgagctagctgcccgctggggctggatggaagccttctattacctggcagaattgtccaataatggtattggtagggaacggcattgtggaatggctgcatcatactataaaatggttgcagagcgagccgaggtgatacattcatcattcgatgaggcgaacaccgcatatgagaatggtgacaaagaaagggccctcgttgcagccatgatggccgcggacaaggttacgagcacgcgcaatctaacgtggcattcttgctcgatgagcagcgctctttgatgtcctttgatcgcatcctaccgggtgctaagaaacctcgaccgtctctacttcggaatgctgcgttggcccttatctattggacacgttccgcaaacagacaacatcga

SEQ ID NO: 1136 - DNA, 828 bp, Aspergillus oryzae
ggcagtgatgtaggcttcaaccggcgccgcggtcgcccaccagtgtgggttccttggcgtctgtgcttttcccattgctggacccgacgatgataatctctttcacgctccttcagacgaaactggtatgcctgctccatttcccttccacccccatggagctttgtacccaaggcttctgcttgagtaacatccattaagcggggtcgatgccgattaatggggtgaataattggaagtgatgatcgacgaagatcgtttggagtcaatccaaaccggaaacagacatcacgcacgggttcgacttggtagtcgggtcggagaaaattgcatttataacaggaacgggtcagtgtcgggaaataaagaagaggcccgaaatcagtacatgttctgcaccagggatagcagaactcagcaaaaagccaaccgattgggaaatatgaagagcacttgatcatatccattacccgtagcgtatcagatgccaaggccctcaataaagagtacgcaggaagcgattcgactaaacgccttcctatcctactgactcgacgcaacatccctagactgggtagatcgagatcgagaaagattaagtggaggatttcgagtggaagctgatcaagcaggggtgtatacctcagattgattcttgaatccttgttcggtggagctttgtacaaagtcacatctgtactgagctggaaatcaagggtttccctgtacggtctctggcaccgtaatgctctgcctgaagccatgttggtattcgagtggatttgatatcatgaaccgaaatgcatgatagaataaacaaaacgctgt

SEQ ID NO: 1137 - DNA, 530 bp, Aspergillus oryzae
  modified_base (210)..(210): n is a, c, g, or t
  modified_base (257)..(257): n is a, c, g, or t
  modified_base (260)..(260): n is a, c, g, or t
  modified_base (297)..(297): n is a, c, g, or t
  modified_base (312)..(312): n is a, c, g, or t
  modified_base (325)..(325): n is a, c, g, or t
  modified_base (354)..(356): n is a, c, g, or t
  modified_base (365)..(365): n is a, c, g, or t
  modified_base (368)..(368): n is a, c, g, or t
  modified_base (370)..(370): n is a, c, g, or t
  modified_base (374)..(374): n is a, c, g, or t
  modified_base (378)..(378): n is a, c, g, or t
  modified_base (402)..(402): n is a, c, g, or t
  modified_base (411)..(411): n is a, c, g, or t
  modified_base (441)..(441): n is a, c, g, or t
  modified_base (461)..(461): n is a, c, g, or t
  modified_base (479)..(479): n is a, c, g, or t
  modified_base (508)..(508): n is a, c, g, or t
gdggatggtatagataagattgatattgaattggggaagagggttgctcataattttaataggacacacttttatttaacaccaaatagaaagatgaaaatgttcggatttttttggttcaagttttccaaggaggaggaaacctcccagcagcgtacctggaaccccaacaccctcaccatggagcagcctactagccctggggctccnaaccagagaggtgtactgagaactgaagaaggaaagatgaaatgagnttngtggtggtggtggggtggcgtttgctgtggaatttgngccggtttggcttgnttagagtgctgtnagaactggtggtaaagtgttggacggacnnnattttgganatnanctgngggnggtaatgatgtttacgtgaccgantttggtgtnaatgttaaagatacccagagttctagactngctatgttgaatgttaatgntcgctatggattagatgngatgtaagaaggcctacggggcataatgnactaaggttgaactggtgttcg

SEQ ID NO: 1138 - DNA, 803 bp, Aspergillus oryzae
aattcggctcgagggcgatcagttctctgagactgtcttatttaggagctctgtcgaaaagtttgagcagctaaaagcgctcgtctattaggcccatgtttcccccggtaatccacaaatcgtgcgaagtgcgcattctggagaggtcttatggagaggcatggcagtctgtccggcgcatggtcattagctcttgggtagccgtgctggctccgtggtgcatcgagttatttatccccatgagccgtgtccaagtctgtcgcggcactcattctggacacatcttcgtgaaatggtcacatacctcccaacaaacgtcgaccaacacacacggaaattaccaccctttgtattcttacgtatacgatgacaatagccctaacatcgggctcggactacaattccggtctcaaaagcaggtggaagattttgaaaaggccattctcagcatgtgttcccaatcgagcttttcctgggatcagcctaccagctctggatatgtctatgacgttgtagatccctcaggggaccaaaagcaatacaaggccattctgctcatccaatcgcgtttgacttggaaatactgcagcctctactatgtttaccgagatacagattatgtatacgaccacagaactctacgtgtccggtttccccgcctattctacaccgactatatttcgtcacatgtcgacaggttatacccagccgaccgtccagtatcattctcccattgcgagaagaaggtcggaaatatgacagcmgactttgacgaggaaccgctgttgcgtacttttatgagc

SEQ ID NO: 1139 - DNA, 439 bp, Aspergillus oryzae
  modified_base (274)..(274): n is a, c, g, or t
aattcggcacgagggccttcaacacacgctcctcgactcgatcaatcgcaaccacagcgagagaatcaatcattcgcaatggattccgccaaggcccccgttaagctcgtgaaggtgacccgcgtcctcggccgtaccggctctcgcggtggtgtgacccaggtccgtgtcgagttcatggatgaccagagccgttccatcatccgtaacgtcaagggccccgtccgtgtcgacgacatcctctgcttgctcgaatccgaacgtgaggtcagangtctgcgctaaaaatatgcaaaagcgacaaggggtcggattggttcttcgggaggagtacactggggaattattgcgttggcttatggcggcaaccattcggacattgattttcatgtgttaagagcccagcaatggaattcgcatcaggaatggatccagactt

SEQ ID NO: 1140 - DNA, 647 bp, Aspergillus oryzae
  modified_base (183)..(183): n is a, c, g, or t
tctataccatttccggaatcttcctcgcaatcgctccataacaacaaatcgaaaagatggcctccaccaactacaaagaagcgttctccctcttcgataagcgcggctccggcaaggtctccctggagtccctcggtgacctcctgcgcgcatgcggccagaatcccaccctcgtawdddddngccgaactggagaacggccttggcggagacttcgacttcgaatctttcgtgaaggttctcaaccgtccaaacggcttccgcgatcctggtgaggccgaggaatactgccgcggattccaggtgttcgataaggatatgaccgggtttatcggagtaggtcagcttcgatacattctgacgaacttgggcgagaagatgttggacgaggaggtcgatgagctgctcaaggcggttgataccagctcgggtgagagtaactacactgacctcgttcgcaccattctggccaactgatgattgatacacgataccctatgttctatgacattatgagaatcgctcgaggggcggagttgggctaagtatcagttcgtttgtattgtatatcgggttcatatgakatggatagcaatagcaatgatagcgtagatatttgcacaaattcaccagtgcatatacgcttt

SEQ ID NO: 1141 - DNA, 668 bp, Aspergillus oryzae
aattcggcacgaggcttatccatagaacctacaggtttctcgttgacactccgtcaccatgcctttcactgcttctgatatctgcaagatcctcttcgcgatcatcctccctcccttgggtgttttccttgagcggggatgcggtgctgatctcctcatcaatatctgtttgaccatcctgggttggatccctggtatcattcacgctctgtacgtgtttcccttgcattgaaactgcataccacggtctactaatctggttcgcaggtacatcatattcaagtactagacagctctctgcatctctgtagccatgcccgtgttggttcacatcgcccggtcgaaaaactgcatcgtttcgcggtcaatagcgtgagataccaacttttaagatcgaactcgcgaccatgatgctgtcagcaatgttccgcggtgctccggcccaagccaccctaatgcaaccccactacttggcaaccacccgtgtatccatttttcaactgcgacggcgctaagcggtctggaacgctgcttgctcgctgcgatggcgttttggattgttccgaactccctttgttctcatgttactcatgttctgttttttgtttcgcttcggatgataccagctcatttgcgatactgggcttcgactttgctctattgtcagt

SEQ ID NO: 1142 - DNA, 1010 bp, Aspergillus oryzae
aattcggcrchaggcttccttacagatcagggcatttttccccctctaaagtccttccacattccwgccactccgtttcacacacccccctccttccaatcttaattcctttgtcactccgacattcgtcccttttagactcgacaagatgagagaagttattagkttgaacgttggtcaggctggttgccagatcgccaattcttgctgggagctctactgtcttgagcacggcatccagcccgatggttacttgaccgaggakacgcaagaaggaagaccctgaccatggtttcagcaccttcttctccgaaactggccagggcaagtatgttcctcgtaccatctacgccgatctggagcccaatgttgtcgatgaggtccgcactggcacctaccgtacccttttccaccccgagaacatgatcaccggcaaggaggatgcctcgaacaactatgcccgtggtcactacaccgttggcaaggagatgatcgaccaggtcctcgacaaggttcgccgtgtggccgacaactgcgctggtctccagggcttcctcgtcttccactctttcggtggtggtactggttccggtttcggtgctctcctgatggagcgtctgtctgtggactacggcaagaagtccaagctggagttctgcgtctaccctgccccccagaatgccacctccgtcgttgagccctacaactccatcctgactacccacaccacccttgagcactccgactgcagtttcatggttgacaacgaagccatctacgacatctgccgccgcaaccttggcatcgagcgtyccagctatgagaacctgaaccgcctgattgctcaggttgtctcctccatcaccgcctccctgcgtttcgatggttccctgaacgtggatctcaacgagttccagaccaacctggttccctaccccgtattcacttccctctcgttgcctatgctcccgtcatctccgcggccaaggcctcccacgaggccaactccg

SEQ ID NO: 1143 - DNA, 499 bp, Aspergillus oryzae
aattcggcactaggatcccgatcaagttcgacagcgctgcggaggctgccggactcagcgaggaggagcgggcgcaastgcccgacaactggccgccgaaatccccaccgagaaggaaggattgtggaactgggaagtcaagtgggagttcgtggacgaaaatgtggtcagcgaacaactcaagcccttcgtggagaagaagattgtcgaatacctgggtgttcaggaacagatgttggtggatgtggtggaagagcatgttcgaaagcatggacctccccaagaactggtggagcagctggaggaggctctcgacgaggaggcagaagttttggtgcggaagctgtggcgaatgattatcttcttctccgaaagcgagaagagaggcttgtctggttaggacacctttggaagctgggcgaaaaccagatcataccggttcagtcaagtctagggaggtcagcactcctgtttcacgacaccaatccattattacatg

SEQ ID NO: 1144 - DNA, 553 bp, Aspergillus oryzae
  modified_base (37)..(37): n is a, c, g, or t
gggcagtatccgattgaaacgcacgagtgccggacanttgttgcccgaactttaagcaagagcctggatactcgacgtaacagttctaattctaagaaaggtccagcaacaccgtcacaacgtggcaacgattcaacaactgatcttgcccgacaagctgacgccgactcgacaactgcaactgcaggctcacagccacgggaggcagcccctacttcagaagagggcttggaacaaacgcaaagcgctcttggattggggcagcagcgacagactggtggtgtgaggtctcctctgtcttcgcggtttgactattcaggcgccgtatcaccatcccgatcaaccccaagcgggcggcaggctgctcgataccgaccatgggagaaactgtggtctgtggactatcgtttggagggcggaagcgataagcaagcagaaccaaagaagttacgatactcaaccccgttggaaacaccacggtacttatctgggaaaatacaaaacagtgattattgaaatagacgctgatatgttcataaaatgagaggctttc

SEQ ID NO: 1145 - DNA, 520 bp, Aspergillus oryzae
  modified_base (295)..(295): n is a, c, g, or t
  modified_base (298)..(298): n is a, c, g, or t
tcggcacgaggcagcggcctttttttttttttttttttttttttttttkgggaaaaaaaatttcctytycmaadtccwawaaaggrraaattttttcccgagmataagggaaggggtgwaaaaascaaggttrattaaaatttyttragggrgggggkaacacccaycyccgtaaaattaaaraawaaaaaattccacraagkmattwwttwaccgrsscaaaaaaawaccckgggagaaagaaaacccsggggggccsgggggtattcytyktaattttgggattgggggaaanaancytaaaaaaattsgggraaaaaacmaaaamrawwammaccsmaktkgrgtttaagggggkssccyttcsgrktwatgcaawagsgcycggaggggraaaggcwaggggggtaaytwatggaaaaaarsaatrrgggrrrggkkytscaaaaggaccgaaaaaaccaaaaaaamagggataaccmaactaacctgggggggcttttaaaaagggattcctcgt

SEQ ID NO: 1146 - DNA, 601 bp, Aspergillus oryzae
aattcggcacgagggattcattgtctacggacacgacgactcaccgattgttcccctcatgctttacaaccccgccaagatgccagccttttctcacgaaatgctacggcgtaagatctccgtcgtcgtcgtaacctacccggcaaccccgttagaactttctcgcgcacgattctgtgtgtccgctgcgcacaccaaggacgatctcgaccgcatcctgcgggtctgcgatgagataggagatgctctggaactgaagtactcgaccggtgttgcgggcggtttgagggaccctccgtccgacaaagacctcaagggaggtaagaagacgattgagcctcctcgctggaatatcgaagaagtcatcgagagaggcactcgagacgccaaattgcccctgtattgaagaacatgacacagccagggacgctgtttactacttcttcacatctcacctcgatgctgtaacgaaagccagacatttttctcttctaccaggaaatctccgttgatatatgtataatacgctgcgattaacgagcacaagacatatagtattataataataatggtaatcaacatcattctaatgtcaaaaaaa

SEQ ID NO: 1147 - DNA, 753 bp, Aspergillus oryzae
atatcgaattcggyacgaggcttcgctatcggctccaaaacgttttgatcttccaaaatatccacatccacagtaaatcgttcaccatgggccttacaatccacaccgtcggaacctccaccctccaccgtcagccgaacgcgccgtcatttacctcgacgtttccagcgacggaagtgaccagtctacagtatctcaagacgtgactcgcacctccaaccgccttcaatccctcctgaaagaaatcgcgccgaagcaggactccggcgaccccacccccgaagctcccgttacattctggagcatgagctccattagcaccggcagttatctgccttgggatcacgacaagcaggaacacagagcacgagtctacaccgcccggaccaacttcgaggtcaaattccgggacttcagcaaactgggcgagttcgtgtcggacgtggcgaaggaccctcttgtttcggtgcgggacgtcgactggcagttgacggatgatacaaagcagcagctgggacaggaatgcaggaagctagcggtctgggacgcgctcgccaaggctaaggattatgctggtgcgctgaacatgagttatcttcgacccgttgagatcgatgatctgagggacacgtttctccagggatatatgcttccgctcggagggcacctgcatttgctgagtccgggggtgagcaggcgttgaattttgtgccgcagagttgcgaaatgagtctcgtagatcctgagtgagtg

SEQ ID NO: 1148 - DNA, 693 bp, Aspergillus oryzae
  modified_base (47)..(47): n is a, c, g, or t
ggcacgaggcgtgaacgttcttctcttcctgatcttccagatcgccntggaaccgtggcgccggaagaggctagtcaagggtttcgaagagaaggtcatcgaagccattgagaaggagaaggccatgcaccacgttgagatcctggctcctgtcaatgccgctcaagagattcccgccgcaccctccgcagactcatccgcccctgtcgtcgcagctgtaccatccccagccgctgaagaaacagcatccaacgcaatttcaaccgaagtactagatgtcccagactcagcgactcccgcacccgacacaacaacaacacccaatagccagaactctctgaacgacctcctcgaatccgccaaattacaactctcgcgcttcccccctcctacctccgttgaatcctggcgtcagtatatcagcgatcttttcagcgatcgctacctagtcatcacccaacgggacctgtcgtccctcgctctccagagcgcggctgctggtgcagctatcatgggtctagtgattgctcttatccggccgcggtgaaatgaccgcgtgtaagcatgccaggctagatgagccattgtaattagcgtgtcattaatttgtttaaatgctgtgtatcatgtggtatagatattcgcatagagcatttgtgtaacatagtcttgaatgaatgattacctgttgcc

SEQ ID NO: 1149 - DNA, 789 bp, Aspergillus oryzae
  modified_base (312)..(312): n is a, c, g, or t
ttcgctggagctcgtattcgttatcatgagctcaaatacgttcacggatcttctttactataccactgacactgattatcttgcagctgctcttttcttcgtatgcggattcatcatcctgagtctgtggttagtgaacttgttagttgctgtcatcacacatactttccaagtcatcagagaagagagtaaacggagcgctttcgctgttcagaagctggacaatgtcgaaaaagaaaaccttgatcagcgcaagagaagcacgctcaaacgcttctatgataagactgagtggctctgggtttgtgtcancactttcgatctagttgtccaagcactaagaacttccactatgtcccctggtcgagaaaacctcatcaacaatacggaaaccatcgtgacacttattcttctagccgaaatcatcatgcgtttcgcctctgaattggcgcaaaattccacaagaagcgtcgtaactggggttgatctgggggctcgtgatcatcacctgtatcatccagcttccgcccattagggactcgggacgaacatacactgttctaaccatgtttcagattcttcgggtatatcgcgtggtgctggcgattcctatcaccagggatctcattacagttgtcttccggaacactgtcggtttgctaaacctgatcggtttcttgttcatgatcacatttattgcctctatttttgcaactcagctttttcgaggctcaatccctgaagatgaagacgttgatatcaatttcaacaacatatataactcgtttc

SEQ ID NO: 1150 - DNA, 503 bp, Aspergillus oryzae
aattcggcacgaggggcggctccttaagtcatgaccggcatatcggtatcaaccgcaataccaacccagccgccgaggatgatgacccagatgccaaccaacggctgatgcaggcgatcctcgacacggttgaacaccacgcgcgggccgcagccgcgcgaaagagggcggacaaccgatgactgagcgtgaacgcgagcaagaacgagaccgagaccggaaactggtgaaagcttagtttcttctttctcttttcttcctgttttagccttgcatttttgtgggaaattcatgtcatgtagcatgggctgtggggtttataagggtgttatctattgtgtccatgctttgtactacttgagcgttttagcggatatcctagtggtttagttcctctcgtgttgggcatattgcatatatgaacagattggcatgattctttggataacacagcatttactatataatatatcagagctctggcaggttttgcaagggctata

SEQ ID NO: 1151 - DNA, 696 bp, Aspergillus oryzae
aattcggcacgagggaatcgcaagcatcagctcaatatctttcaatttcactataactctttatcattgagtcagtatcaacaacatgaaggccccttactttatcgcttttcttgccgccgccgtctcgggcagaatgctttcattggacttcctaagaaagaccaggagatcactgcaggagagaatctagttgttcaggttcagcgcccgaactctttaactggttccgaggagatgggtgtcgcaattggcgtggcatcctgccccgaaagaccctgcatggctccgaaagacacactgggcactctgctctataacgggcccttcaagcccgagtaccacgatagctcgcctccttatcagaacttcaccgtgacgatcccagactccatagccaagggagacgcacagatcaacgtcgcccatgtggcaattgtcggggcgagcgcatggccatatttagacctgctcaatcagactgtttgttgttgcttagattttgtgtggaggttgtctgcttgttcctgcttgtataggctcttcgcgggactggcgagttgtatattcattcattaattttctttggatttaatttcgtggcttttattttgggattgtcggtcttgattattgtgatttgaaatttgcggagaatccgttagctataagatcgcctattattaatctatgtgt

SEQ ID NO: 1152 - DNA, 901 bp, Aspergillus oryzae
aattcggbtgagggagtctcctcattctcagctggttaccttaccattgacgctcgtttgactcttttgatccaaatcacagcgatcatgtctctccaagacgtgtaccagaaattcctttctgaccccaggtctgcttccctggcttccgatgttacgctgatctatatcacaacgaccaccagggtcgatggcgctgaggccgtggtcaagcacctcgctagacaggatcatgtcctcaaaagaaagtcccagcaggtgattgatacggtcgagggcttgaactccctgtctctagacgtggacactacagtggaatttgtctctggcggcggaccgtatctccccgcgctggacgataacttcttgtctgaccgcattgcgaccttccccacggttcacatcgttcgtttcaactctcagaaccagattcaacaggtcaaagtctattgggagccaggcgtcgcttttgaaacaggtcgaggtgatcggctcgcgcagtcgcggtttggcccatccgtgatgcgaaagatcagactagattgatcaaggccgccgcctcctccgccccggcggatgatgccccagcgcctgtgcccgcgaacaagcccgaagagaatggcgacgcacacaacaaagtcgtctctcctaagagacgcatcaaggacccctacgcggcagagtctctggaggaacttctctctcccggcaaggaccgagcggaacccgtgcgtgcccctcgtgccccggcatccgctaagcctccccagcgcgatctggcagagctctttggaaatcatgatgatctcgaaattcctgaaccatccccttccagggccacgcccgtaggctcccaaggtcggtgcgggtaagaactaccgggcttcacgcatctttgatg

SEQ ID NO: 1153 - DNA, 684 bp, Aspergillus oryzae
  modified_base (478)..(478): n is a, c, g, or t
aattcggcacgaggacaacatgtgcctttgtgatgtcccccatgaccttcctgtggttggaaggtctggaatcagcacttccaggtcatactagcgaggagcccgccgccaccaagtcaacgaccgaaaaggcggataagttcaaacaaaagaagttaaatgtgaaaaacacggtggcaaaggttgtgatcgaccaagtcgtcggtggcgcctgggctaccgtcctttttagtttgaccatgggactgctgcgtgggcaagagtatgatgttcttatggaccagattcgcaaagatttctggcccctcctgatcgcgggatttaagctatggccattggtttcaatcctgaattttactgtcgtcccagcagataagagactcttggttggtagtatattcggtgtcgtctgggctgtttacttgagcttgatgtctgggtaactgggcgacggcgctggggcgctttgccgtgaganccgacgcaattgtgtatactagtcgggcgaagtgggtatcttactttttggggaaatggctggggatgaccagataaataaaatgtgttgggtgggaacccagtttgcgmactagagaattgggggcaggaaaagacgtaaataggtgtaaagggggccgaggcgggggtttgattgagtgatcattgatggaacagccgacaaac

SEQ ID NO: 1154 - DNA, 681 bp, Aspergillus oryzae
aattcggcacgaggcgatccatagccagttactttcacacgcctttctgcgtttttactggcagtgtttttcaacccttcgctcagttgcgattatcgggtctcacgcacacgttgacccctctcccgacaccatgcccgaggaggagccgtccctgaatatatcctcgttgctgacgctcgccgtcgtgtcgtttttcgtcatccgatggttcctcaagcgtgacggcgatggaagtgatggaagcggtcgcagccgtgcgcgcggagtcatcgacccagcacaagtggaacaaatatcccagatgttccctcagctaagcacacgcgacatcatgtgggacttgcagcgcaatggtggcaacgtcgcagcaaccaccgaacgcatcctgacaggccgaggactggagacaccgccaccttccttccaacctcaggtcgccatccctcaggccagcgcgccagcacaaaactgcccgccgcctcccgcgggttcggaaatcgcgaaggtcagggacctgattttcgcgggtacaacctttagcgggtaaaagtcgccaccgagggcgctgagaccacccagtcgtctccttcgtctggctggtcacagaacaaggaggaacgtcagcgtatactccagaaacggaggggatgatatgattctggcggcgaggaagcgaat

SEQ ID NO: 1155 - DNA, 400 bp, Aspergillus oryzae
aattcggcacgagggtagattggagctcatctcggcggaggatcgaaggatcagcctgatagtcttctttggtgtcctgcaaaggtgttaatatactgacctttcactaggcaatgtaatttgattcaaggggagaggtgcggtatatcgcaatcaaaacgttgggacttggatatagcctttgtgggtkgttaaggaaggaagaacaacgtgaggcgtagtcagactatcatacaggtaccccgctttgagcttgaatgcagcatttgcccgggttggctcatatgggcttagaccatgctgtgccgtcctgcaattcagattggttgacgtgttgcaattgaagcacctcttatatagcaatgcaatgcactgcggtaacacaagcttaggtgcatgt

SEQ ID NO: 1156 - DNA, 962 bp, Aspergillus oryzae
aattcgggacgaggcttctttgtggtttatgttctcgattctttctcttacagttcaattagtcccagtgtactgcgagtggtgaatacaaagtcatcccttcgttcactttgtgtcagcccgctctatcccccgaagaaatacatacatcatggggttcgacgagcaactcactccgcagatgacaagattgagggccatgtcgattcgcaatcgaccgaccttccccagctgaggaataccacagaacgcaagcttatggctaaaatcgattggcacattatgccctgtctctgtgttatgtatcttctcgcattcttggatcgcgtgaatatcagtaacgcagcagtccttggcctacaagaagacttgaatatagtcgacgggacgaactacaatactgcactgactatattcttcgttccatatatcattttcgaaattccatccaatatcctgcttaagaagttgagaccccacgtatggttgacgggatgtatgtttctattccggtctggttacaatctgtcaaggcctagtctccaattggggcgggctgatgacaactcggtggtttctgggaatgtttgagacaggcatgttccctggttgtttctatctcttgggaatgtggtataaacggagcgaggcacagaagaggttcagtttcttctttagttcaaccacacttgcgggcgccttcggtggcttgctggctagcgggcttggaaagatggatggtactcgtggctaccgaggctggcgctgggtctttatcatcgaaggcctgatcacttgtgtcgtctcgcttgcctggttctttattattcctgatttccccgaagacgtcaaatggctcaccgatgaagagcgccaattcatccgggcaaaactagccagagactcggggagcgcgggttatgatgctaagataggctggcgcgacgtattggaggtcttca

SEQ ID NO: 1157 - DNA, 907 bp, Aspergillus oryzae
aggctcccccagcattctttttgttaaggttattgcgtctaccgccactcatctccccgctctctcgcgtgggtggatgtattgatatagacaaattaagagattcttccatcgcgacaatgggagagtcgcctccattcctttatggcaccccttcagcgtacagatttgatggaccgacggatcgccctttcaacccaaaggctgtgacacaggcgagctggactcgtccaccgtccaagcccaaaccaaaagggccactggtgaatttcaatcggcatccggactcttattgtaatatccccagtggcaagtccaaatggaccccaatgcacccaaacactaagaatagggtgatctacgggcgaaaggtacagcttgggctgcgcattctccagctgattggagctcttgggtctcttttttgtgccattgttatbaagaatgctgctgcggcccttatatggattgtccgtgtcggaccggctgtggcaattttacacactctttatggtatctatcacctctgtcgctcaattacacgacctgctggaactcaagccagcyacatgttattttgcgggaccttcgacctcggcttggtccctttttacgtgtttgcggcatatttaggcttcaaccaatacactgacaatgcataccattggagtwctttgctcagtcccgactttgaggtctcaaccaagattgcccaggccacattcctgctgagtgtyataaatggcggattgcatgcaatttctttgggcatttcgatcttcttgggtctcattttccgcaaaattacccgtcttcccccagatctgaacccattggaagataacttgacagcccgtcctcacaaacgaaacaagttcgagattaccaagaagcatactagcagccc

SEQ ID NO: 1158 - DNA, 851 bp, Aspergillus oryzae
aattcggcacgaggctatggagaaccctgcgtggtaacttgtacatgaatcagtcggagattcccgaggctatcattgaccctacgaccaacgaggagtctcacaagaacgtgtttgtcattttcgcccacggaaagaacatcattgcgaaaatcaggaaaatatccgaatcccttggtgcttcactgtacggcgttgacgagaacagtgagctgagacgtgatcagatccatgaggtgaacacacgcttgagtgatgtgggtaacgtcttgcgcaacaccaagaatacactcgatgcggaacttacacagattgcccgctcgcttgcggcctggatgatcatcgtcaggaaagaaaaggctgtctatgatacactcaacagattctcctacgatcaagcgagaaaaacgctaattgcggaggcctggtgtccaacaaactcgctgccattgatcaagtcaacgttgcaagatgtgaacgatcgtgctggcttaagtgtgcctactattgtcaatcagatccgaactaacaagacaccccctacctatgtgcggacgaacaagttcacagaggcctttcaaaccattgtcaatgcgtatggtatcccgaagtactcggaagccaaccctggattgtacacgatcgtcaccttcccattcctgtttgccgtcatgtttggtgactttggtcacggtgctctcatgactttgtgtgctgctgcgatgattttctgggagaggaagctcagaagacaagttagatgactgacctacatggcattctatggcgttatatcatgctaatgatgggtcttttctctatgtacactggtctatatacatgatatctct

SEQ ID NO: 1159 - DNA, 512 bp, Aspergillus oryzae
aattcggcacgaggccgacacgtgcagaaagcgtattcgaaggatctgaaggaagaccgaatagactgaacaggccttcctcatgtccgatatgaaatgaaccgttgatgctagtttcgctgcattctcgacttagcatttgatctttcttgtctttcgaggtccgcacagttactgcgcaggaccgtggtctctggcgttgcggtcggtatattctcgttttactcgacacctccgcctcgggtgtctcacgccttgttcttgtatttttctccgcgtgcattttcttcctcgaggctggagtggagtcactgcatatgtgtgccgtttcttttcctatggccttctactactactattattattttcacgagtactcgatttaattggggtgggatccttttttgcagaggccgctgcaggatacaatcaccttgcttcttatacccttggtcgacggtaaggggaacaaattataaaaatcagataatctgatgaatgtaaactttgtc

SEQ ID NO: 1160 - DNA, 860 bp, Aspergillus oryzae
aattcggcacgaggatcgcaaccattagaggcgtcgatgcgtccgtggcagggtttgctctcagtttcgctttacaaatgtctgaggtcgtcgcttgggtgctgtcggagtacgccgagatcgagctggacttcaatgccgttgaacgcatcgtagaatacacgcagatcgaaactgagcatcaagatggcatggatgctccagccgaatggcccacgaaaggcgagattgaggcaaatgacctcgtcgttggctacgcaccagaattaccaccggttctacgggggttgagcttcttaataaaatctaacgagcacgtcggcatcgtcggacgtactggttctggcaaatcgtcattgacactcgcgcttctgcgcttcctcgaggtacggtccggatctttacacattgatggaatggatatctctagactgagactcagcgccctccgctcgaagatagcaattatcccacaggacccggtgatcttctcggggaccctccgatcggtcctcgatccgtttgatcagtacacagactctgagctccttgccgctttagcgaaagtccatctcagaccctctatggacgatgaagagaactcagagcttgaaggaacagatgaagattgtaacaatgccgccttatctctttcctcgccaatctccgagcgaggcaagaacttgtcccagggccaacgtcaattagtgtgtctagctcaggccttgctatcccgcccgaagatcctcataatggacgaagcgacctcttcattgatatgagcacggatgcgctgatcagcagactattcgtcaagaattccgtgactctactctcatggtcatttgcccaccgactgt

SEQ ID NO: 1161 - DNA, 712 bp, Aspergillus oryzae
aattcggcacgaggcaacaacttacagacatgtccctctggagcgcctaccgttctttgtcgccaaaaacaagggccctcttcggagtcgmgcgtgatggcttgggcgtcgattggcctctgggttttaccggaagtagaaggcgccatgggcatggctccaacaaagcaagagcaggaagagttggatcgtaagatggcgattcggatctcgcgggtggataaggatggtcactgaagaagggtcttagtgtgatggcggagggggcttagagtttatttgcagtcggcctcttcttctctgacgaatgcctagattgttgtcggccgagtcaacttcatcgtgtgaccgtgggatcaagtcaaagctccggaacagtcggcgggagcagacgcccattgggaatggaaatgacgggaagtcagcaacggccggacgcaaggaggggcgaggagaaggttgggtaaatacaaaagaagaaggacttttaggatactcaagcaaggcgcctctataccgtacctcttgttcatcgcgtgttgtgggctgtcagaagtttgtttggcgcaacacaacatccggcgaccgtttcgtgaaamcgagatacaatgcatggaatgttggggtgagacaaagaggcgggctggcaagacggggaggccgtagtatagctggacactggctcagatcgtacgaatggaattcatgttaa

SEQ ID NO: 1162 - DNA, 386 bp, Aspergillus oryzae
attatgatcaataaaagcacgacacaataaaaatgggaaaaagaatctagaacatagcctcgctacamcgwcktgsaaatatcggtgatatcccccgttgcacatacgagaaagycscaagcctagcgmctmaaktattttctmtttacgacgctgatgggctaaggatktsggmtkctgaaataacccgakgggtatcgcgtgagtaaatgtggcccatgcagattcgtacagcagactctcgactgtcgcagtcgactctatctmgcggagcgakyawggcgccggcctgtgtagaragtgtccasttstgtaagctgtaamgtagaaawtgaagggaggaatgwaaaaggakgatattatggtcgataatatatggctgagca

SEQ ID NO: 1163 - DNA, 741 bp, Aspergillus oryzae
tcggcacgagggtttgtactcaatggtggtcttatcattggaacttgtgatggagccaacatcgaaatcactcgcgagatcggcgaacagaacattttcctttttggaaatctagctgaagatgtcgaggaactacgtcaccgtcactactacggtgactttcaactcgaccctcagcttgccaaggtgttcgatgccatccgaagtggcacgttcgggaatcctggcgacttctctgcgcttattgcatccattgcagagcatggtgactactatcttgtatccgacgattttaactcgtatgtaaccactcaaaatatggttgacgaggcattccggaaccaagacgagtggatagtcaagtccattactagtgttgcacgcatgggctttttctccacggaccgtgtcatcaacgaatatgcggatggaatctggaatgtagagcctctcgctgtgaaagactgatcgagtggtacgctcaatccagacatagctacagttttgtcttttgcttcccccatgcttccagcatatttcggttttgagattcaagtttctaatgcacctaaaccgcgagccgtgaattgcatcagttctagtaaatattatcgaacacgtagttttcaggatgagaatggcgacaacacagtttctacatacaaattgttaccattattcgacggttagctgcatacttgcatcagcacagtatgatttatattcttactttcttattac

SEQ ID NO: 1164 - DNA, 634 bp, Aspergillus oryzae
taagcttgatatcgaggaattgattgttttgtttctccaagataatccaattgtatccaaagaaaacaaagggaaattcggaaaagaaagagagtcctaagacattatgagtatttaagccgtgctgattttgaaatccatatactccgctggccggtatttgttacattctttttctgaaatttaagccaacaacaactgcaaagaagcatccaaagcatgaatctcaagctcactacctggaaaagcggcctggggctgctttctttcctcttcctaaccccaactgtcgtcgctcattcatgggtcgaacagctcatggttatcgcaccgaatggcacctttgtcggctctccagggtattcaagagggaacgtacttcgctctgaccctggatacagcgactctaagatgcaaatttggtcccagacggtcgcaatgagctactcccaactgaatttgctgtgtaagaacactcaacagaagctagtwcagtccgaaggaagcccaaagactgcaggcaagcgctgggcgctgcmaattgccctccggtaccaggaaaacggccatgtcaaaaagccggggaatcagctggggaagcctgaaaatcgtgggaaagtatacgtatacggaa

SEQ ID NO: 1165 - DNA, 735 bp, Aspergillus oryzae
aattcggcacgaggcgttcctatcagtccgttcgtctgttccattgtagtgtggttgactgcttgattgattctgaacccaatactgtatctggattgggtcatccaatctctcagagttgttttcttttcctactagccccaagtgtttgttttctctgctccccgattttaaattttccatcgagcctggtttgtctgtgtcttttatctcccaatccccactattaaccccaccttgtcgtgcccttcgtcaggcgcagaagcactcctccattcatcattcattgtctttcatccttcaccaaccagaccctcgccggtgtcacttcttcccttttctgcatttacgtactgcagccccgtccgcttctcgtctctcactcctccactcaccgtctgccagagcgacgctgcagcgcgcttttctcctcttgactcctcttcgctcttcctctctttttccattctttgacccacgcacgccgtcttcatccactctccatccgactgccaccatttccaccacccatagtgttcctaccaaattagcttaacagccgacgcttactagtggttttttcttccctgtcgatttttttttttcgatggatacattgcatgcgaaggacgactgccacatcgcacccactgctcatcgttgacatacagcaatttagacgcgccgccatcgaactattacttgattgatctgcaggctctgctccatctctga

SEQ ID NO: 1166 - DNA, 787 bp, Aspergillus oryzae
aattcggcacgaggtggtagagtatgttgacgccgaagaagaggagacgatcatgatttccatgacaccggaagacctggaaatttccaaacagcttcaggctggctacgcccttcctgaagaagagctcgatcccaacaagcgcgtccgctctatactgagccagaaggcacatacttggacacactgtgagattcatcctagtatgattctcggagtttgtgctagtatcattccattccctgatcacaatcaatcgccccgtaacacataccagtctgctatgggtaaacaagctatgggtgtgttcttgacgaacttcgatcagcgtatggagacgatggcgaatattctctactaccctcagaagccactagcgacaacacggtcaatggagttcctgcgattccgtgaattgccagccggtcagaacgccatcgttgccattgcttgctattccggttacaaccaggaagattcagttgttatgaaccaaagcagtattgatcgtggtcttttccgcagtcttttctaccgtacttacacggacagcgagaagatggttggtttgacggttgttgaacgctttgagaagccaatgcgacaggatacgattggcatgagaaagggtacttatgataaactggacgaagatggtatcattgctcctggcgtacgtgtctctggtgaggatattatttattgggtaaaacggcccctctagctcccgacgcggaggagctcgggcagagaaccaaagccatacaaactggacgtttcacgccct

SEQ ID NO: 1167 - DNA, 318 bp, Aspergillus oryzae
  modified_base (117)..(117): n is a, c, g, or t
  modified_base (201)..(201): n is a, c, g, or t
aattcggcacgagggctgactggattcccgcccaccacattaaccgccctgaggcccggaaggtgaagggtaacacccgatccaagagccgtgcttaaaggagtcagcggcagcgcnttttgtggaaatatagagggaagagtggggcctcgtttattttggaccttgtatggttattacaccaatattcttgtgagagtntaccaacaagcttgggaccaaagatcgctgaaaatgtgattggtcgcaagccactgccatcgcagattggggcgtgtatatttattcacgacaattgaaattagtaattctagcttc

SEQ ID NO: 1168 - DNA, 792 bp, Aspergillus oryzae
cgaggatctaggcgtatattaatcgatgatatccgagattttaggctaagcccttcgactcggaatcagaatatgacctgaattgattagagagatatggcttcccaacgagctttatttacggcgagccgcacgcagaccttgacctacttgctagccgtctgcccgttttcaattgcttttctagtttatatcaactcctccatctcgtttgtggtcacagaattgattggactgcacgatggcgaaggagatgccgtcggaaccctcgggtttgcagatgaattacttgcgctggtagcttgcccactgtggggggtgctttcggaccgcataggtgtccgccatgtatgtgtggctggctatggcatcatagccgtcgcattggttgtatttgtccaggccaagaatgtttacccgcaacttcttctgggacggttgttatttagtattggtggttctgcggtctcaaccatggtgacggcagttcttccaactgtgacgggaaactccgacgaacaagaatctaccgagacagcagacacgcaaaatggttccaaccatgaagcatcatctcaagcccaatcagacggcgaasgaaacacgccttcctctcgattggctggattcgtaggaatgtgcgctggctgcggcgcccttgtatctctcgttatattcctcccacttcccgccaaattccagacactcggcttatcaccatcagaagctattcagtgcagctactacgtagttgctgtagtggctctcctggtcagtatatggtgtctattc

SEQ ID NO: 1169 - DNA, 834 bp, Aspergillus oryzae
aattcggcacgaggattagctttgtcggagagggcctctatgctgcctggagagatatcaacataccatcgggagagctagaaagatatccaatagtttctcttcgtataactcacttacatttcatccttgtctccgagggtagcgctcactggtctctatccagaccatcatcacctccagccttgatcttcaagtccgacgatgggctgttgttgcagcagatcaaaatcgagtagctcaccaagccctacatctccgccaaacgaaatggaagacgtcaggccaacgttacaaagcctaatagcggaaagtgacgctctactagaggagaacagatgggtcgaggcgcgcggaaagctggaccaggccgtacagctctcagagcagcagcaaggacccgaccacgaggatacgctagaaacaaaagcaattctggcctacaatctccgcaagcacggcgagtatcaggaagccgagcagatagaccgtgaagtgcatgctacccgcctgagagtctctggaccggatcacaccgagactgctaggcattgaataatattgcgctggatttgaaaggtcttgctaggttcgatgaggcgtttcatctcgaggagcaagctttggacatatttatgaaagtggagggggaggattccgagcgactcagacgagtatgaataattttggcgaatagctatcaccagcagtgtcggtttggtgatgctgccaggttgcatgagaagacgctcgagctccgggtaaagacacttggtcgagaccactttgaaaaaatcatggctatggatctgcttggtgttgactgtcgcgagt

SEQ ID NO: 1170 - DNA, 811 bp, Aspergillus oryzae
  modified_base (720)..(720): n is a, c, g, or t
agaggtagagcgggagcaatcagctactggtttccaggagctcatcaagcctcgcattttcaagcgtgtcatcttgggtatgagcttgcagatgtggtcgcagctgtgtggaatgaacgtgatgatgtactacattgtctatatcatgcagagcacaggcgctggatcgccacttctaaccgcatcaattcaatacattcttaacacggctctgaccctacctgccattatctacctggataaatttggccgacgcccagcaatcttaattggattcttcctccaggctattttcctttacctggagggtggactgcaaggaggatttggggcgcccaaccctcataccgatcccaagctcgatgctatttcgtggacggtggccgaccaccccgccgtggggasaggcgattatcgcattgtcgtatctgttcgtgtgctccttcgcgacgaccatcggccccgactytcatgggacctatcccgctgagatctatcctgcgaaagtccgcgctaaagcagtytcgctcgctacggcctcgaactggatttggaactgtctcctggccctcttcgttccaccgttgctctggtcgatcaattggaagatgtacatgattttcgctgccttcaacaccgcagccttcatccacatgttcctaacggctcccgaaaaaaaaggttacacgctggaggagatggacgatgtctttgacagtngacttccagcatggcgcaagctcgagaggaagagtcgtatggaagagctggagaaaaaaatcatcgaaggaaatctcaaagattactcctg

SEQ ID NO: 1171 - DNA, 600 bp, Aspergillus oryzae
aattcggcacgaggaatggattcgaagatttccatgtctcgtggccgccaccggatccagatcgtattcctctgccacccagagacgtcagcgatggtgttgccttcactggcgccgaacgtccagctatgatgtccaggcatttaaacaaagaaaggcagaggaccttagacgccaagcggggttggaaatcgagcgccgtaagcgtttccatcaacggctggcggaaaattcagaggatgagtcgcaacaatccgatggtcccaatgaaaagggatccgactatggtgaagaaggttggagaaactcagaaggtgaacggctacgtgatttcggcgtcgacgaagatattgaattctatgacgaagaagaccttcctctgggcgtactgatccaacggagagcccaggctgccctcaaggagctgaaatgagagtaccaatgcgccaaatccatcggaactttggtcatttgcgattctagccggagccacttgagcagatacattacttagcatagcatagcaacaacagcaactatagattagcattagttattcacttagttggcgtccagagtgacgacagttactctatatat

SEQ ID NO: 1172 - DNA, 869 bp, Aspergillus oryzae
cgaggctcaacagaaaagttcctagagctgcactcctcaactctttgataccgggcccttccacctgccagatatacctctcgcccgcccttccatcctctctcctctctttgtcgcatcccgggccctttcattgtatcatactcacagcattcaggcaccatggtcgccagtgctgtcaggatgcgcactcccagcgccatgctcatcaaaggcgcctcctccctgaggaggccgcagttatgcacagattcaaggatgctgttcaaccccaattgcccgccttcgctgccctttcccgctactatgcctccaagtccttcccccctcacactatcattagcatgcctgctttgtcgccaacaatgcttgctggaaacatcggtgcctggcagaagaagcccggcgattccctgcagcccggagatgttttggtcgagattgcagaccgataaggcacagatggatttcgagttccaagaagaaggtgtcttggctaaagttctgaaggaaactggtgagaaggaggttgctgtcggctcccctatcgccgtcctcgttgaagagggcactgatgtttcgtcgttcgagtcgttcaccgctgaggatgccggtggtgacaagggtgctgccccagctcaggagagcaaggaagaatccaagggtgctgctgatgctgctcccgcttctacaccggctcccgagcctgctgctcaggagcccgagacctcgggtgagaagcttcagcccagtctcgaccgtgagcatactatcagccctgctgccaaggctcttgctctggagaagggtgtgccaatcaaggcccttaagggsactggccgaggcggtcagatcaccaaggaggatgt

SEQ ID NO: 1173 - DNA, 523 bp, Aspergillus oryzae
  modified_base (344)..(344): n is a, c, g, or t
aattcggcacgagggtcgtttgcccactgctagtcctctgtactccacactttcggttattccccagatataccttgtatctgtaactacgcgacctttgttcgcaggtcggccaggattagttatgatcatcccttgttggaccccgtccttaacgccgcccctgaaaccgcgtcgttcttacctggaagggactggtgcagacatggatatagaccatcctctttcacacatgtcactctgacagcattccgggttcctgaataaattatcaagaggagttgtcatgttggagccccggattgtcatcattccacccctgcacatttggtatgcgaaaaagntcgaggccagagggggtcgaagcatttgtcataagaggaaccactttttaagtgcgtagttgaattgcaccgccgcattgggcaagctaaaacactcgaggggggaaaaagtttgtttactttttctttattttccctggtcgtatgtattttagcggtcgaaattaacccctcatagt

SEQ ID NO: 1174 - DNA, 701 bp, Aspergillus oryzae
aattcggcacgaggctattacaccaaccatctcatttacatcactctgcacctcacaccatctacgtctatctcgttgatgtacctagtactcatagtaaaccgacctagttgtatccattaactgattcgatccatcaatatgcgctccaagttcaaggacgagcacccctttgagaagcgcaaggcagaagccgagcgtatccgtcagaaatacgctgatcgcattccagtaatctgtgagaaagtcgagaagtcggacatcgccactattgataagaagaagtatcttgttcctgcagaccttaccgtcgggcagttcgtctatgttatccgcaagcgcatcaaactgtctcccgagaaggctatcttcatcttcgtcgacgaggtgctaccaccaacagctgcacttatgagcagcatctacgaagaacacaaggatgaagatggctttctttatatcacgtattccgggggaaaacacctttcggcgatctttaagctctgataagcagttctcccaagatatgtaactgcttcgccgtcagtatgtgttttgttttagggccgggtgtgtgaccagccactccggtatgaggcgaatgagctggttagaccttgcggcgattcttcatgtgtgcaggcgttaatatcaggttttccgtattcctttatgacctctatggcaaagactttatcact

SEQ ID NO: 1175 - DNA, 714 bp, Aspergillus oryzae
  modified_base (462)..(462): n is a, c, g, or t
  modified_base (481)..(481): n is a, c, g, or t
  modified_base (485)..(485): n is a, c, g, or t
  modified_base (490)..(490): n is a, c, g, or t
cgtcgctgcgctgtgctctcgcattcggctcgaggccaagacccgcttttcaattcatcccagaaggatcggaaagggccattacgttgtgtttacgattgcttcagtgtatttgttttatcttacgccacctccactcacccataccgtaaatcccccagctccgctgccttggggaagaacgcgacctcgcgacaactagaatttttttcaacactttctgttccgttactatccaacaagatgtctcacgaggaggatctcattgactactccgatgaggagcttcagaccactgatgccgcagctaccactgctgctcccgccgcaaatggcgacgcgccaaaaagggcgacctaacggtttctggtggccgtcccgacaagaagggaagctatgtcggtattcactcgaccggtttccgcgactttttactgaagggagaactcttacgtgccatcnccgattgctgtttcgaacntccntcggnggtccagcaagtttgcattccgaccgctaattctcaaatgtcgatagtwcttttgccaaggcdaaagtctgggtctcggaaaagaccgcccgtctatcgtctttgacccaccccttcaccaagctgggagcctgtmccccgggaggagtagctctagtctttggtcgatgtagccaacacccagtaaagtgaggctttacccagaattaaagaacagaaatata

SEQ ID NO: 1176 - DNA, 877 bp, Aspergillus oryzae
  modified_base (482)..(482): n is a, c, g, or t
aattcggcacgaggtgacgatgacgtctccgaggtcactgagatggctgcaggcgtgtcgttgaactcatctgccgatcgctcgactcagagcatgccgccttccccaactcgcaatggtcatcttcagcagtcgccccacagaacccgttctgatccgaagatcgctacaatcagcggcgatgcccccgaggcgaaattgaccaacaaagagaagtacctacagctcttcaagctcagggaagaggacggcgagtatatccaagacgtcactgagatgacccgggtccccatcatcctgaagaccgatttgtccaagagccctccttgtcttactatccgctctgtgaacccctacgctctgtagaagcccaagactcaacatggcgccgtcgaacaagagtttgcatacttacgaaagccgattttggcctggttggcagacctatcgcaacggtcgtatattgatatacattggctgtnatacagtaccatcgtattttgctaccgccagagtgtcaaaccgattggaccgttgtggatccctcctcttttcttctgggtaatattgctttaattagtctagcgtgttagtttgttatctccattataatggctatgagcctcccaaacttgcaggaatatttcactgcaccggttgctgtgtgtagtatatatcagtcacagcattactcatgggggaagtatactattcctcgcgcgaggaaccaatccaagagccaaaggttcccgacaatagggatcggggggtcgaatgttacgagataggggtcttcattattattagtatggatcgaaaagtcgatcgtgagcttcaaggaaaaatttgactatacgttttagatgtatacttgatt

SEQ ID NO: 1177 - DNA, 789 bp, Aspergillus oryzae
  modified_base (267)..(267): n is a, c, g, or t
gaattcggcacgaggataagctcggactatatctcgcacaactgcaagaaccatgagattctcgatcctcgctctgttcgccttggcctcggctgccttggcccaggagagtaccagtcaggatccgggtccgtcccccactgcatctgtcgggtgtgagccgcacggagaccactggcactgcgatggtcccgcatcaacatcagagaccgccaccccagcagttccaagcccaaccgaatctgtaggctgcgagccgcacggcgnccactggcattgcgacggccccgcctcgaccaccgcctcggccacaactacgggcacgcaatcacacacggatgaggccgatgccaccgcaactccaactaagcccagtccaactgagtcggttggttgtgagcctcacggcgaccattggcactgtgacggccctgctgagacgggggcctcgacatcgggtggcagcagctcgactggcagcagcacaagcactgctgcagctgcttcaggtaccggatcgactgaggacaatgcggccggggacgtgggtgttcgacttggcgttgcggtcgggttggcgctgggagttgcggcattgcaactttgaggtggcatcgttgatatcggacaatgtatattccactcttgtcargagagtgtgccgggtctataatgtatttactaaaattggtttggatttgattagggaaatttttgattagggttgcctgatcatatgattaaatactccggatccgagtggtctgtccgtcagaccattcgggatgt

SEQ ID NO: 1178 - DNA, 952 bp, Aspergillus oryzae
aatactgttctcctgaatgagcccccgtacctcactgttaccgccgacgaagcggccttctcctcggaaatcaccttctctggctatctgtactacgacttttgggccttcaagttgcggcaactgtacttcgacatcgacgccggcttttccgccgatgtggctcttagcgcgcacctcgccgcctcctacaacaagtccttcacgtacaacccctcggatctcacctacacgcttgtcaatatccccggcatcgtgcagcttggtcctggtgtagctttcggcctagagatggatttcagcgcctcagccgacgtagatatagccgcagctgtctatttccatgccaaatggcaatgtgcatgttgacattctgaacagcgtgaatactgtggcgactggatggacgccaacgtaccacccatatgccaatatctccgcgcaagccaacgtccaggctgatgctagcgccaccgtgcacggtcgaagatgggcgctggagctttcctcgggaggggctcattggatctttagccagtgggattaaaccgcaaaaaccggggaatttgccaaacacgktttgtggctcgyatgccaaaactcgsacacargagcatgcwtacaaaatgcctacackgtgtgcacaaatttctacgggcaacggggagtyccccacgggatgtgkcacgggcgggagggtaatccatagcgggtrgatgggggttagctttgaaaatcgggacttttatttttcaagtctttgatggctttttgtggactaggtcatgggagcaccmactctgggtaaaatacggggggattcccacttatggggactttcttgctaccaaatttttaaagatcccgcagagaaacaaagaaaggcacatcccactgtgattctggacgtgccctttgaaactgtcccactcatttgaaaactattataatg

SEQ ID NO: 1179 - DNA, 592 bp, Aspergillus oryzae
aattcggcacgaggctcctccgtcgctgacgcatacctcatctactgcggcatcttctttcagcagcaatgcttctgagagctacctgagcgagccggcccatcgtccattgcctccacgccgcaaatcctatttctcgggtagtgctaatggtgcgaagggtgttgagctagttgtccctcacatggaggttcgtgttggggactctactgttgacatgaatgggggatccatttttccagcaagcagtgggctttggggggaccacaatgacaagtgccccgccatcaggatctcgggcactgtacccctccatacgcctgtacgcccgcagtaagaatccctgtgggttgctggattgctgctgtctttaatggggcttaagtgacgtgattgtcattgtaagcgcgcgtggatctggtgttacgggacgaagttggatgatagttatctttcttttgggtttgaaagttgcgtatggttttcaaggagtcaacggatctccaaagaagcgaggaacatgacgttacgggacaatggacatggtagttctatctttgcattcagaattcagcgaatcacaccgaatagt

SEQ ID NO: 1180 - DNA, 746 bp, Aspergillus oryzae
aattcggcacgaggcaggaaggactagagcgaccttcttttatctgtttagcaagaccccaacggcctgagagaggcccgttcccgcaatacaatcatgtccaccgcagtgtccaccgccgtggcatgcattcagcttgcagcactcttctgctaccagccgcagcggcagtagtcacgattcccatcaaaaccaccttcatcccgcagacctttacttgcaatcctacgatccgctatatcaccccaatcctcattcctactctccgcagtcgtccctagattcacaattcaaaccgtccggtgatgagttcaccggcctcgagtcttgggatacttgggctacgctcgatgccggttatcagccatcgatagccaattcgacttctctctatccgacacccgccatagaatccctgcctactcctgttaataatgatcttacttcaatcctggaacttaatgactgccaagaattcctccaatgccttgacgctggtttgacatgtcctgaagattactgtcctgagcccgctaccacttttccgcctccgcctgtaaccgcaacaatgacatcatcccccagctcatcgtctccttccagcgactctgttcctactccatcagtttctggtgttgcaaaatctactagcgcttctcgcattgagaagcgccacaggaacaccctggctgctcgtcggtatcgccaaagggaggtgggatcagatgaagagtctggaagaggaa

SEQ ID NO: 1181 - DNA, 779 bp, Aspergillus oryzae
aattcggcacgaggcttggctctctgcaccagttagcaggacttgggaaatcaaccctctcatcaacgctcctggcacaaacggaggccccacctacaactacctgaccccgatgtcatactccgtccaagacccgtctcattaagcccggacatttataatacgttatcccctttccaatcgcattgcacggcgttttcggttttgtgtgttcgagtttaccctttctgatatccattatcgtcactccttttctaagccgcggcgctgggtcaattatcatgtcttacgtgctgggactattgtgagttggcttcagcgttttttgtttgatgatcattcgtatgatccgatgtctctccttttcaatattcttcatgtcttaatgccccatcttttcgtcatttaaaacctgttgacatgacgcatcttagacgatctgttgtccgttccctttagcatttgcattatatatggggcattggggatttcactcctttccggcagttgtacaattattttggcatagcatggcgctgctgtccttccttttggtttcgcaggtctgggtatttgggattctggtgggatggcgaaggaaaagtgtgcaatgtgttctgtttcaatttccgatgcactgtggttcacttgtgctcaaggcacactgagactccaggcagacttttgtgttcttttacttatttgggtcgacctcgatcggggagaatccactatatatgcatagctttggcgtctgtgaataccgctatcttgatttg

SEQ ID NO: 1182 - DNA, 743 bp, Aspergillus oryzae
aattcggcacgagggaatggcaccatggggacttaccacctttgctctcatcactgcaacaatcagcgttctcatcaaacctaccggacacccaacgtttcgtgaaaatgtaaagcgcaacgtattactcttctctccatcccagtctgcattactcgtcgcagtgatgctccttgatcttgtgagctggagactcttaaacctcgttgaaatacatgccggcttagcgatttcctgtcattattacttcacgtcggattcttccggtctcgagcgcaagttgtggtggcgtttgacgcggcgcgcgttcctcattggaggcacagtgccgctgtacgtgaccctgctcaagtccgagaattctccatggatgaagatcttggcgatgccattagtcgccgattctatattgatcgaactgttgtcattgttctgggacacttcggaagcagatttggggttcaatcgagactggcctcatcgtacgctcgttgtgaaaactgctaatccgcccacccgcaaacatgagaacaagggagacgcagatcaaaatacgaaaacagtagaggacaaagatacaccgtcgtctaatgttaccgcagatggcctttgcgatcgggtatatgggctctggtcgccgaccgctgaggtagatgacaaaaaagatctacaatcattgcctccaaatgattccaatttggaaaggattttctccccacgcacgtgccccgcttggaaagtgt

SEQ ID NO: 1183 - DNA, 952 bp, Aspergillus oryzae
aattcggcacgagggttctattaatagtgctttactggtgaacatcatgtctcagcccaacccctacattctggcctgcgacaacccgtccgcggtgctgactctcctgcgttccgacccatccatcgcctcgaaccaagatgagcacggatactccctcctgcacgccgcggcatcctacaaccacattgaccttctgcgcgccctggtcaaggaattcaacgtcaacgtgaacctgctcgacgaagatgccgaaacctgtctgttcgtgaccgagaccgtggagattgccaaatgtctcgtcgaggagttgggcgtcgactacaaccacaagaacgatgagggcttcaccgctcaagagtccatcgagaccgacgggtcgttccccgaggttgctgcctatctccgccaagtcatgggtctgccccctgctccggctcaggaccaggtcacggactctttgaaccccgccccgccattgccatccaacatcaaggtgaacctggggcacggtatcggagcaggaggcaaatgctggtatggaccaggtggacccggagttcaagcggagaattgatgaattggcggcccgggaggacttccagagtgaggcgacgcaggctcaacttcgggagctggttatggaggccattcggggatccaatgttgatactcaggatcgggaggtccggcgcagaatggactaagccagacagaagcaagttcttattaatggcaaggctgctcgatgcctccggttatcgtttatttggtcggataccgactctctagatacgctgtgaaggaccggttgaatctttgagtggctgaactactgctctgtcctgattctgagaattggacatggtcacggatatccgggggatatccacccgaaaagtacgatatgcaggaagtgaaaaacttcctcttatcgctgttggtgctgtgg

SEQ ID NO: 1184 - DNA, 480 bp, Aspergillus oryzae
aattcggcacgaggtgagttggtttcaatcttcttgcgactgttggaatattatgagggtattttgttcctcacgaccaatcgtgccgaaagcattgatccggctttcgagtcgcgtattcatgtgtcggttcggtaccctgacctcgatgccaagtcacggcgccagatctggacacaattcctgggcgcgaatggcgggttcttgtcggaacagctggactatcttgcccaggtgaagctaaatggtcgacagatcaagaacgtgctgaagacggcgcatcttctggcgcgcgagcaggatcatgagattggatatgatcatgttcggacggttttggacttgcgggcaccaagtaatgcgaatttgatggatgagactgattaactcaggccacccttgggtgcaatccagagattccaataacacaaggaatcctattttgtgaattaatatctctaatgcaagtatattgctaac

SEQ ID NO: 1185 - DNA, 697 bp, Aspergillus oryzae
aattcggcacgaggggcaacgaaagcaatcatttccaggcggagaaggcccagacgatcgaccatgggactggccactctgggtcctctggagagaaaaatggagatcgagctttatcgccatcgaatgagattacgtctcctcgtcagggcagcacttgcctcatggagccgtgatccagcaacagttttctaacaggggctgatcggccgtggatcccaaataggagaatttcgttggcttgggactcttggtcagtggcgttgaagcctccatacttatggcgcttgtgatattggttcccattgcgcaattgacaatgctgttccccaatcatgcaacattgatcggataccgagacgagacaatatctgctaggggggttgcatttgcaactagcattgacacaccactcattcccaagaagaattacccaggtcgtgcaaagggacgcaaacggagacgcgtgggaaacattcctttgggagaggatcccctggacttgagggtatgcggcggggcccacgggatgatgacgacggctgcaggcaaatcgcttggcatcatttccttttcatccgtttttggttcattcatactatactgatgggtctttgacttttttttttttacccttttttttttaacctctccttccctgtcaataggttgmatatttctcacgccatggaacatg

SEQ ID NO: 1186 - DNA, 926 bp, Aspergillus oryzae
aattcggcacgaggagcatttcccctccctctctcttctcagtgcgaccgccatctgatctaacgttctttcgaatcccttgactttctggtgtcagcggaaggcgtttcatgagaggaggccattcttttgctgacacggaaaacggtgatctgtcgactctattgaccatctaattcggagtttagacgggcgaagctgagaatagataactctccccttcacactttcgggtccttctgctatttggaatcgccggacgcgtctattatgttctaaagattatccaacgctattttcgtgcaagacttcagtggtgtcacatcccttcaaccaccatcgacctcccttttaccaccaacccggttatgagcatgccagttgtgctggccgctgctcctctattatcgctgcgcgtctgagcctactcggtcatccctacggagacagctctacttcaataatccttggcttccaaatggcggacccttggggaatgaggtcgacattccgaccatgtctggttctattggcgatgttgtcaacaattctgcaaccgggcctcgctcagatctgttctttctgggatggtggatgtgttgatccctatgcccagacagcagtttccttcgatttttctcctctcttcttggacgatcttacactatattacgcatatgacgccaactctcggggtaagggtaacgaaccgatgactaaagctagtttttggatgggatatgcagcacatcatgttgatagctcagctatcaccacaaatcgcacattggaggttggcttgcgtgtggggaactgacaggtaccccttccggggggactaatggatgcgacggtgtttggggaccgcaatgctcgatgaatctcaaggagaccttcaaggaagcaatctatcaactctccgccaa

SEQ ID NO: 1187 - DNA, 669 bp, Aspergillus oryzae
aattcggcacgaggggaacacccaccggtgtcaatgagcaggtaagcacagtacgaaagatcgtttcttccagtgcgggccaatcctttgagtttgcccgcaacgacgaggagatgcgagactatggagtgcccgaaaacaagctctctggagcgtaatgtctatgaggcgaggcccggaagaccaggtttggactactgatgtggcagtacccatgagtaaactgcccagcatcatcgaagccacgaaacaagacatgactcaaagtcgactgttggcaggaatttgtggtcacgttggggatggtaattttcacgccatcattctattcaatgacaatgagagaaaaactgcggaagctgttgttcaccggatggtgaagcgagcagtagagatggaagggactgttacaggtgaacatggtgttggactcattaaacgtgattacctcgaacatgaactgggcgagtctacggtggatgcgatgcggcggctaaaactagcgtttgacccgctttgtttacttaattgcgacaaaatcgttcgagttgagcaaccgatgccagaagaggttaaggcatggtgattgtgcgttggacactacaagctggggaccggcaggggcgaacgacccgtgtaacagttctgggttgtcaccattctacctgc

SEQ ID NO: 1188 - DNA, 711 bp, Aspergillus oryzae
aattcggcacgaggacccacatcgccactgttggaaaggcgatgagctctcgcgaggaggttagctatcctatcctccgccagcatgatgttgattatgtgctggtagtgttcggcggtttgttgggttactctggtgatgacatcaataagtttctctggatggttagaattgccgaacgtactggcccgatgaggtcaaggagcgggactacttcacggcacggggcgaataccgtgttgatgatgaggctacccccgcgatgcgcaacagcttaatgtacaaaatgtcctactacaactataacgctctcttccagcagggtcaagccatggaccgcgtccgaggctctcgactgcccgctgaagggccacagctttccaccctcgaagaagcgtttaccagcgagaactggatcatccgtatctacaaggtcaaggaccttgacaacttgggccgtgaccataacagcgccacagcctttgagcggggccacaagcggaacccgctaccaagaggaaaggaccccgtgttctgcgaaccgagtaaaggtggagtctgtgattccgcccatctttggtttgtggcctcgtaagggacaggtggatccttctctctgtttagcatgtttctcaattccatgtttttgtatctgaacaccgtttcaaagcgacaatgtagacgattagaaaatgcatgtgatttaaacat

SEQ ID NO: 1189 - DNA, 906 bp, Aspergillus oryzae
aattcggcacgagggattccatcccccagctggacagggtgatcgactttcatcgctggttatttagtggagacctatcccactgacgtcggtacatattcccatatatttttactgggttagcgttgtgggtttcttgtcctacttgcctcccttcttttgcccttgacctctcctttgcgtcatactggctggatcccgccgagcgaatcttgccttcgccttcgatccttttctactccgattatctattagtttttggttcaattagcttcaccatgttctccgcgtcgcgtcgaaaaattctggatggactcaaccggagatacatctatggccgtttggtaagtgttaaaaacacccagggcttttctacaaacacctattatatacaacccttatcgctttttgcgcaaatcactcatagtaacccttcgttaacctcttgcatatagcccttgctccacagcataatttttctcatcgaaatggcggttgcgatgcggttggcggccaaattcaactcctactatgcggagaagccggtattgactactatggtaaccaacgcggtcctcggtggagtcgcggatacagttgcgcactgactcacggccttcaaagctcgaccgggccgaccgaattatgatcctggtgatctcatctcaatcgaaattcatgacctcgataaggagaagccaccagctcttggggagctgggacacgcgagacacttgcctccgccttttgatttcgagcgactgacacgatttatgtcatatggtttcttcatggcaccgatccagttcaagtggttcggatttctatctcgggcattccctcttaccaagaaaaacccgaccattccggccttgaagcgagtggctgtagatcagtttctcttcg

SEQ ID NO: 1190 - DNA, 878 bp, Aspergillus oryzae
  modified_base (117)..(117): n is a, c, g, or t
gctccaagtcccagttctctgcgggtgaggcttcaatgaataggtaccaattctctccttgcactcccaaggccttcgcaaccgtgcacccagacgtttcgcaggtggaggagagtnaaatccgaggctggatgcccacccaggtagcacactggatgcatatcgccggatatgatgactacgttattgagaagtttatggtcaacgacatcaccggctctgttctgctaagtctccaaatcgatgatctcaaggaactcggaatcaaatcatttggcaaacgtcatcagttaatgtcatccattaaccatttacgcacgactatgcggaaaaccccagacctagaactacctatcgaccataggcgctcgtatgcagtgtccgtatctccgacgggagaagtgctttccagggaagccgttggcctggacggtagtcggcaggttgtggcaggggaagctgtctccattgtcggtattgagcaggttcttcctaagccccataagtgctccaagggagaaaactgtcccaagtatagaaagcgccascgcagcggaggaragctcgctgcggaattccctgacgctgtkctcctgccaggaggttcaatgctcacaggaaatcctggaaacccagacacggcaaagaacctcctgcgtcctacatccgatgctgggccttcgatcgtcgcttcgtcagacatctttgggccagcccaagagactcctagactctgtgaagaagcgctaaacgaggttcagaaactcgatccacaggaaagtattaggcaatttctaaattaccagcacgtggagtcgtgcgaccctggatctgaactagcaccagagccagccccagatcccgaacagcccgcagaa

SEQ ID NO: 1191 - DNA, 881 bp, Aspergillus oryzae
aggcaagctatcatcaacacggaaaagatactttaggmgccgtttctgtgagtcacataagataacaatttgtcagctggaaaagcatcaaggacatataaggatgcgacatcgcccctgttaatggagccattcatgaatcagagagaatctcattgagcatcggccctcaacacacgcaggacaatcttcccacaatctccgcagaacttttcaatatgtcctcaaatccagaaattgaatatggttttactccggtaatctcttccgcaagagccctcctgtctgcggcgaacatccactccagcgcctttcatttctgtagccgataatcccatccccaaaactgccttggcgcacgcatcgatctctatgcgcgcaccaactgcctgagcccacatacaatcattctctgcgggtctatcactacggcctcgcgattaagcggcatgtgttcccttcctggtctttcacggatgagacctactttctctgctgcttgctacatgacatcgggtccacagaagagaatctgaacaagacgaaattaagttttgagttctatgggggcctcctagcattaggcgttcttcaggacggtactgggcctttcggaaatgcagttgctccccgtgaccaggcggagagtgtcgctgaagccattatccggcaccaggatctgtgtgaagaaggcaagattactgcagtgggtcaattgctgcaactggccactatatttggtaagtcttaactcataacagtgttgccgcttccgtccgggtaacttacacttgacctacacagataacactggtgcttacgccgacctcgtccatccgtcgaccattgacgaggtgtcacggcgttacccgcgtaacaat

SEQ ID NO: 1192 - DNA, 842 bp, Aspergillus oryzae
rattcctcacgaggcttattttccctcgtactctgtacctacattctcttccattcatgcatgattaaattacttctgaggaaaccmaaatggaaaccaaaatgtcatatgggatttctagactcaagtcgagtccgtatcgacttccgaaaatccatacttggtcaataattccccctccgccccgttccaagtccgaccctgtaaatgccgcagacagagctgcttcccctcctccgggtagctaccscsvacaggcccatttatgccactggccctccttcatctgctgtctcgcctgctgaccaaccttatcctcaataaactccccccgccgcatcgtcagccgattcgggaacacccgcgagagataatgttccgtcgacgcaatatgaggtttatcaaaccagaaatacagcggcgtcaacggcacagtcacctccggatgcgatgggggaacaaaatcccgcgtgagaacgccagttaaagcccgcraggccgggaattccaccacacaaggctgcgtasataaggagagcatgcgcaccgagggaaacgatacgtatttaaccggcacggctgggatctgcgtrcgaacgctccatgacctccagtaacggtgttaacggaatatcggcgacgagcgcccagtcatgttgctggacccagacgtacggggtctcacagacccgcaggcccgagcgcacggccagcccgaaccccagacgcgctgcaggctcgatgaaggtcacttgcttgtcgtccgtctgggtkatggacagatcgaccacgttgctgaggtcgttgagaccgaattcggcccggtcctgccattcttgcgt

SEQ ID NO: 1193 - DNA, 675 bp, Aspergillus oryzae
ggcacgaggaaagtacatcaagtcgagctccataactcccccgacttcgcacatgtctgccgcttccgtcgtcctggcgccccggactattatccatggcgttcccacggccaacccgtaacaatrtacctcgccgtaggggctgtctgtttactctcattgttgckgacggagcagcgttgtggcatggcttccaagcgtccctatttttatcagcctatttagcggtatgtacatgcaaaccacgtgatatcactgtatctctataaagcaatggatactaacagactatacaacagcctctatgtttcttgtcactatggttcgtcattaaaacgtatcgttctggaggctggcagaacatcaggtgggagctcgaagatctatcaaacatcatcgaggtgaaggagaagatccgaaagttggacgagcttaaggatcgtgccacggccagggatggtgctcaacagaagcctggatgggggaatctttggggggtgatctgaggttttttccttacagctatgtaggcctatgtgtttctgggcgggttctggtccaaaatccaagacctaccccgacccagacagatttagattagcctgacccacagattccccagactatatctaactagatttactataactaattaaacggttactttatctactt

SEQ ID NO: 1194 - DNA, 937 bp, Aspergillus oryzae
aattcggcacgaggctacctcggtcatcgattcttcatcccccacacccggtggttcttccacagaactgtttgaatcgctcttctacgactccgatcaattgaagatacacgttaagaaatgttcagacgcttggtaactgttgttccccgggttggcaccgtggtgtcgcctcgcattaccccggccctttccggcattcaaagccagcccgttctccgggcccctgcgacaaagagaagctatcacgagaaagtgttagatcactataacaacccccgtaatgttggcagtttcaacaagaacgatgccgatgttgccactggtcttgttggcgcccccgcttgcgtgatgtcatgaagcttcagattcgtgttgacaaggatacgaatgtgatcagcgatgtcaggttcaagacatttggctgtggcagcgccatcgctagttcgagttacctgacagagttggtgcgcggtatgactctcgaggaggccggaaaaattaagaatactgaaattgcccgtgaactttgcttgccgcccgtgaagttgcactgctcgatgcttgctgaggacgccatcaagtccgcgatttccaactactacaccaagaaccctaacgctcgtacaaccaaccttggaggtaccggtgcctctatccctaacgtcaaggtcgagattgagaagtccgagggtgccgctgctactgcttaacaaattaataagcacaacaaccaaactacaaaaaaagaaaaatcgaaaccaacaaaaaattcaagttgataccagatgagattccctgagcagttttacggtttattagcgggaggttgaaaataccttttagaatggaatagcgtgcctggacagttcgttttattccggcaacagactgcattggatacagtcttttactgcaargttttttttctcttcac

SEQ ID NO: 1195 - DNA, 935 bp, Aspergillus oryzae
  modified_base (332)..(332): n is a, c, g, or t
  modified_base (334)..(339): n is a, c, g, or t
aattcggcacgaggggagaatcggctgcagtgatcgcgatcaatataaggtctataatgtcgtccgatacagatacaggcgcagagtctagacctactggtctgctagatgcaatcaagcgtcttgaggcagttgctttcgtgccctctaagcaacgtgataaggatagcaggagaactggctaaaacgattgctacgcacgcgtatgagggcggtctttcccagatcgcgcttgagcgtttggttaagattaccacgacacgcagtcaacttgaccaaggtacaatcactacacttattaagaatctgtttcctgtgtaaaattkttakdngnnnnnngtcacgcagattgtgggttgtctcggtccgaacaagaacaaaccatcacctgcgacacagtctttactcttgcgatggctgatcatggtacatrattttcttgctgataggtctcacttatccaagctttatgctgtgctttttaaccatctagacatgataagcctgcgcaaacctatatgtcatcttctttccctggtcacacggcgcaasatgttaagccatttaggatacaagcccttatggaactggtggttacttctggtggcgatgagagagagcttgttacattactcaaagtcttcaagaactactgccccgatatcattgttggggacctgggtgtatctgggaggaagggactgttcttcaagcatccagaccctgaatggtccagccatgtgaggcttctccaagacacaaatatggaaaggctacaggctactcagcccgcaaactttcaagtggtgcaccgtggaatatcaaaaaggagccaaatggaggttcttgtaccggatgtccagacttcacgtgtctcctatggccgcacatcattagaagaactccgtggtgttgaccactttgttgacaagctt

SEQ ID NO: 1196 - DNA, 908 bp, Aspergillus oryzae
  modified_base (753)..(753): n is a, c, g, or t
gaggcaacaatggccagatctcgtatcggtgtagccgcggttagccctctccgggatttcgctattcttccaggtctacgcaggygacggtgcaagggatccagctaatkcctkttgcacgtgatgtgcctaacaagtatcaacaattgcgacttcgtttggagatcgagcaagggaggctccttagttggggccatagctttggattattgcaggaagaatcggagaaggaggatacatcgaggatttcgatccccgaacaggtccggtatatggttcagggatacattgagccgctgtggcaaaaggtcctgcatttcacggcagaaaccccgggcttcgttcccagggacaagagagaagaaacaccgagcgtgcatcatggaggcatggcgcgacggtttcggctggaccgcatgtttgcgaaggccaggcagggaactattaaattcaaagaccgtgtcaattgggcttattggcagatggacaagttggaagatttggtggaatgtatgagacatgtcaatggtagtgtcatcgccctggccgaggtgaaaacgcagcaggagatccaggamaccgttaaagcgacgctgatgggcctgctcagtctacaggacactgttaatggactaaaggagctaattgtggctgtcgaggagaagcgccttgataaccggtcatcgcagagccgctgggtgaaccgaatgatctactcctaggtttagccaacctgaaaaaaatgcgactgcnaattggacacgacaagaatgacggtagcctccaatctgacttaaagatccaaccagagagagtctggcccatgaacaagatgaaatatccctcgcctcagcgtcaggatgccacgctggatggcaagaaagggtctgggtggaatacaaggacta

SEQ ID NO: 1197 - DNA, 812 bp, Aspergillus oryzae
aattcggcacgaggctcgtacattacaattcaaaatggcttccaagacctggtttgatggccttaagaggtccttcgccgatgttcccgttggcgcagacaactccatttctaccaccgagttcctcgaagcctccgaatccctcactactttgttcgatgtgctcggctccgtggctttcactcccgtcaagaacgacctacttggaaatgtcaagaaactcagagaccggcagctggctgccctgctgagtctgagactgttcagtctctttcagtgaacgaactgaagaccaagaagcacaccgcctctgaaggtctactctggcttgttaggggccttgacttcactgcccaagccctccgccgccacgtcgacaagaccggtgaggagcttgccagctccttccgtgaagcctacggtgttaccctcagcaagcaccacaatttcattgtgaaaaaggtcttcagtgtggccgtagtgctgctcctaataacaagaacttctacaagtccctcgcctctagtaccgacgatgtctccgccgagaccgaagcgaagatccaagagcagttgacccgcgaggtgaaggctctggagaaaatcgtttccattcttcagaagttccaggagcagcccgatgccaagtggtaaatctaaagatggccacagacactgttttccgttcatctacaacccatttctagtgcataaatttcaatcgcatgatgctccaaacatgtatataggtgactatgcatacctgatttcagaagcgagcaggacctctattcaggacacagttgctttacg

SEQ ID NO: 1198 - DNA, 768 bp, Aspergillus oryzae
aattcggcacgaggctttaagccaccccgtgatccactctttttctcccgctcagccctacgccttatttgatttaagaaggcggcgcgaaccattttatcttgtctttctcgctcagtcactgagtcgaatactctgcgcaaattaaccagttcaacgtatttcgaaataaccacacctttcaaaccccaagtcaaccactcaaccacccaaaaccgagaacagaaagaaagaaagaaacaaacagaatgtcccgcggcagcctcgtccccctcatcgtcctcgtggtcatcgtcaccatcctcgccgtaatcggctacatcacttattcgatcgtgcaagaagtaacccggaacacgaagtccaagatggagaagaagaatgtcctatggacaaaggacggcatgaaggtcggggtgaaggagataaataatgaggattatcaggatcggactcagagtgttctcgtgaatatgtggaatcatacttcgtttccggcttataagagtcggttgtggaatatgacgcagccggcggctgaggtgcagcaggctgagaagaggaagggtgattgatttccttacctttttctgtggtggttgggtttcgcatactttctggtgtttgttggcttaattatacatctcttgttattttatctcgttcatgctttctgttgtgatacctgtccttcggtgaaaatcgcctcagaatgattttactcttttatgatcttcgctcttgctagtttccaggttatttctattc

SEQ ID NO: 1199 - DNA, 838 bp, Aspergillus oryzae
  modified_base (12)..(12): n is a, c, g, or t
  modified_base (14)..(14): n is a, c, g, or t
  modified_base (48)..(48): n is a, c, g, or t
acccccctcaantnaaacaamtctgttacaccaaccgtttacctatmnctagtacatccatacatacattcaaaggaagaagaccttctctcgttcgcttcaaccctgctgcacttcatctcactacgtcttgtgtgcccaaaaccggttaccagcagtttagtacagcctgctcggtgcttctgacattctctcgacttgcctgtcagcaccttgattggctttggacaatctgcccttgtcgctgtgtgctttgccactacatctgtagttttccagctcaaacgcggccacgtcccattcagatagaggtgtctgttattccctcaacgtcggcttgaactatcctgtcgcagtgcatttgtttctggacctcgagcagatacaaattgccgccctattcgcgctcagtcgacactccatcgaaatctcgaggccttctctatgtttcatattgtctaccagtgtctccatctctgatcaagctttcttctcttgataagaaagcctctcagactcttagactactacctctttcctagctggcaccctaactttatctaaactttcctttaaaacatcatggttgtcagcgcatctgtttccggaacaggagccgtcaagcggccagcgtcttccatgcatgatgattatactggatgggagaccgctccagctatggatgtaactatgcgtacatcgttcaacctcccttacacctattatgcgatgatctatctcgacaacctcggaagacttaaggttcaagagtcttcgtctatccgggaaacaaacggaacagtctttacccctgacgtacaggataagttcttagaga

SEQ ID NO: 1200 - DNA, 930 bp, Aspergillus oryzae
attcggcacgaggcattggtgccgccgtggcagtggcattggcccgtgaaggctgccacgtagccctcgctgctcgccgggcggacgcctcgaatcagttaagggtcgaatgacagcttatggagtgcaaggtgattgcacgatcaaccgatgtgacgaatcagtggacaggtggaagctctgctgagcgctgcgaacgaagagctgggtcccgtcgacatcctcgtttcgtgtgcaggcgtgatgtactttaccatgatggcgaatgtgaagaccgatgagtgggatcgcacggtcgacgtcaactgcaagggcctcctgcactgtctctctgccactgtgccgggcatgctgtcccgtagccgcggccatattgttgccatttcttcggatgccggccgcaaagtcttccctggccttggtgtctactccgctagcaagttcttcgtcgaggctacactccaggccctgcggctggagacagcgggcaccggcttgcgcgtgaccagtatccagccgggraatacatcgaccccccytctcaacatgtctacggacgccgaagccgtgaagaaatacggcgagccatctggagctcagattctggacccagaggatatcgccaactcgattgtttacgctttgcgccaccgggaacatgtgtcggttaatgaagtcctcgttgagccccgggacgagccaatttaggttgggagcycctttctcccacgctttcgaatttgttctggattatttctattttagcgcttgcgaagtctttcacttttactgatatttcttttaattttccgcttttgttctttcacgccaacttatgaaaagctagacatgggatcttacgcggctatactggtatactcataatagatcaatgcctctatttgaactttattaaaaaaaaaaaaaaaa

SEQ ID NO: 1201 - DNA, 643 bp, Aspergillus oryzae
tcttttccttgttattttggccctttaactcaacttcaccatggccgacttcctacttttcgagggccctatgggctacggacttttcaaggtcgcccaccagggcgaagcgttggcaatcgcttgaaggaggtccaggagggtgttaacgatctttctaagtttggaaaaatggttgagttggctagttttctcccattcgagaacaacaagatggccttgagcgaaatcaacgacgtctcggagggtgtcgcctccgatactcttatttcctttctcgaattgaaccttcctaagcctaacaagaagaagaaggttgttctgggcgttctggacaaggctttggccggaagtatcaagtctgccttttctttcgttgactgcgaaaccggcgacaccagcgaggttgtccaagacatgctccgtggtatcaggcttcacgctactaagttgctgaagcagcttcgtgagggtgatatggacactgctcaacttggtcttggtcacgcttactcccgtgccaaggtcaagttctctgtccagcgtgacgataaccatatcatccaagctattgccatccttgaccagctcgacaaggccatcaacacattctctatgagggttcgggagtggtactcgtggc

SEQ ID NO: 1202 - DNA, 617 bp, Aspergillus oryzae
aattcggcacgaggtaacttcaacgggaacacggccttaatgatgtsgcagataacatcgaacaggccacatttgtttgaggacgacttacccgaaagtgcgaacacggaacgaaagatcttcgcagaatgggcatcttcagttccgttcgagaaaaaagcggatgattttcaaattcacaattcaaaagagttagacaccaagatagttcccttcttaaggggtattcattggtacagataccggggccgaaatatgcgccattccaccacagcaaaggcgatgcgtttatcattccaatcgagatacttggcaatagccccagcgcctcgggaaagcccctccaagaaggaaagcgactatatatgaaggtaaaccaagaagtaaagatcgaaccaaagttgcgcctacttttcatcttgctctagcggacagattgtacgaattattatgcgggaatagtggggatggaagaaccctcatgtggggtaggactttgtcggaaggtttgagacggcctagaaacatcacttgggaatgaagaacacagaggttgacgaggcaattgtgattgagctgaaacactggaaggacccctggaaaatagactgagctcg

SEQ ID NO: 1203 - DNA, 756 bp, Aspergillus oryzae
aattcggcacgaggcaacgacaaccgtacctgagccctttcacgatcccttttaggaggctctgtcaagatgactgtccagaaccacagtttggcctcttcccgccggaagtygcgcaaggcgcacttcaacgctggctccggcgagcgccgtgtcatcatgagcgcccctctgagcaaggaactccgtgagaagtacaatgtccgctctctccccatccgcaaggacgacgaggtcaccattgtccgtggaggccagaagggccgtgagggcaagatcaccagcgtttaccgtcttaagtgggttgtccacgtcgagcgtgtcgtccgcgagaagtccaacggccagagcgttcccctcggtatccacccctccaaggtcgtcatctccaagctccacctcgacaaggaccgtgagcagatcctggagcgcatcggaaagggccgtgaggtgccaaggccaagtctgcttagagggttttgtccggggtttaagttcatgttgcaatggcggtgacggcgctggagttctgaaagactcgccaatgcgagatccaacctcctatgatcaggatatatctgctggaatgaaaaacgaaaaaatctacttcctcggttcatggtctgcgccacggattttcaagccgtagtgttggactacttccccttcaagcgtatttagggataatctaccggcagcgactcaattgtcagagggccgttttcctttttttgttcaatgggtttcttgaccacg

SEQ ID NO: 1204 - DNA, 755 bp, Aspergillus oryzae
  modified_base (156)..(156): n is a, c, g, or t
aattcggcacgagggtatttgcggacactaccacggataacatttcaacaccagcatatggttcaccaggaaagcgttccgcgaaacgttcacggagtatgctagtggctcgaacagcggtgtgcttsctgatatcacgactatgagtgtgaacgnccgtatcggcttgccttcgttttcatcttcaagcaaaacgaaaggccttctctttcccgattcaccatcgaaggtccccgattccgggcgctttatagatgctactcatgatgattttttctctttccacctttttgatgagggccccggagaggtagatggtgttgatcttttacaggggtttcaaaaaatcggcagcggaagcaaagaagaaccgtcgaaacccagacagcatgtgcctaggccgcagctaaatcatcggagcaatatgtcactattctgagtccctaataggttctacccttctgaggaattgggtgttcaacatctttacactccaagaatatgatctccctcatcgaatctatgccgcggcttagcacataataatgctggtcttatttctggggatttggagtttgtgttcagcaggatttgctctttgggttgtttaaattttaggcggttgatatttttggagttctaggctgggttgaggcttggaattggttttgacttcaattgatgaccttgttatgaccttgacgatatttgctaagatgtacatgaaatgccatgttttacgagtctgattcttg

SEQ ID NO: 1205 - DNA, 888 bp, Aspergillus oryzae
aattcggcgcgaggctagcttgccttgacctatccactagccatgggagactttggcccaccggtgccaatacccgagacggaggtaattggtcttgcttcgtcatctttgacagatccagaagaggtctcggtactggtgacagggttcggtccattcaagaccaacctagtcaatgcctcgtatttgattgcctcatctctgccagagtcgcttgaccttccttcggcgaastctggatccgggcctacttctcgtcggatttcaattcatgtccatccatcgcccattcccgtcgcttactcaacagtgcggacaactattccaaccatcctagaggattacgccaagtcccatggaggtcgacgaccagacattgtactccatatgggaatagcggctacaagatcgtactactcgattgagaccaaggcgcatcgagattcttaccacttgtccgatatcaaaggcagaatcggttatgaagatggggagaaggtttggagggagcmgcagcycccgccagtactccaggctggtcctgcggcggattccacagacgtgtacggaaagttctccacccccagccgcccaatgacgactttctcaacacgtggaagtcgtttgtatctcctggagcagacgtccggatatccgaggacgctggacgctacctctgcgagttcatcttttatacaagtctggcccaggcgtttcaacaaggccagccccgaaacgtcgttttcttccatgtgcctggatcttgcgccgacgaggacatcgagagaggcacggatattgcagcgggattgatcaaagctcttgtaagatgttgggttagcgagcgggtatagagcggcatgcaggttgctggtatcgttttgcaaa

SEQ ID NO: 1206 - DNA, 848 bp, Aspergillus oryzae
gagcccaggcgcgaatggccctgagcattgaacatcagttgtctgcgcgcaccatccccggtgaggagacagaaaaagataaaatgatacgtggtgaactttaccggcccttcgatgttcatcttgtggaagagagagagcgctgtaaggccgcgctgtggcggttcaacagtgcctgcaatcccgtttctggactaagcaataaagaacaaaaccgccttttgaaagaaattttagtaccacctacttcagcagtgggttcaccctcgggtgtcacttcccctcgcccaacgggttccatcgggcaaggtgcggttgttgaagcgcccttccagtgccattacggatataacgttcatattggcgaggacgtgatgatatctgagagttgtttatttgtggatgattgtcctatcactattggtgcccacacgtggattggccccagggtgactattctcagttcaatggcccatgcaaatatgcaggagcgttaagggtctcaaagccgttatcagggacgacccgtgacgattgaagaagattgctacgtcggcgctggctgcacaatttaccctggtgttcgccttcgacgtggagcttatgtggcaccgggtgaagttgtcaaatccgatatcgtagcttatgggtttcagggtcttaaacctagctacatgtgagaacacattcatcgctccgcacttatatggagtkgcttgaatttgtggttgatactattgtctggggctgcaatttccgcagctgcaacttctgatcatgcaattaccactctcgtcagctttttgtaaactattcgttcactttcatttccttggcccgttttccca

SEQ ID NO: 1207 - DNA, 738 bp, Aspergillus oryzae
aattcggcacgaggggtcggggccgaggtcgtggaggaagagcagtcgctactacaactactcgcaaagcagccgccaccgcgaagaccacatcaacggcacccaaaaaaaacggcgcccgctaaaacgactagaggacggaaaaaagccatatcggacgatgaagatgaggaagatgatgtcatcatgctggacgatgacgacgaagatgaagcccctcccgcagctcaagcgctctctgatgttgatgaggacgatgattctcaatctctatttgttaagcaaccatcgacccgaagccgcaaagcagcgccctcgacggccagcacccagcgtcgtggacggaccgcgccatccccggcgccatcgtcgaatactataggaggaaccgctacgcgtaggtctgcaacgacacgaggcaaacaaacccagatgacgttggattttaccggttcccagattagtgctcgcgggagccagaccacttcgaggtcgacgaggctgggtcggaagactcgagctacgagtgtgctgagcgaggaaattgatgatgacagcgatgccttcgagtctgcgccasctccagaaggaggtagactccctcgccagcaggctagaaggaggagaatacatgtctttcattcgtgggcattttcggcaatttatgacatttgcattcatggcgttgtatgtacaatatgggataatttcaatcaatgccaagaaaagcgtcttccc

SEQ ID NO: 1208 - DNA, 714 bp, Aspergillus oryzae
aattcggcggaggctagattcttgtgtctcagattacatatcgttgccctgccctcatcccttttccgaccatctcgacctctttcacctctcgccgtctctatgctctcagttcattgtggctggttcttcgatggtaatattaatgacgtggcggaagggcgtttggcatctgatggaagagtcctcgcgcttcaaccagcagtgacctatttacaaagcatttaagactataaatgtttgaatatgccccatgggatacgtcgcaggacaaatgggtccatcggtcaaggagtttacgtggaagcagcctgtggctgtttgatttccttttcttttgttgttctctttcttttctgctgcttttgtttcttgtctgcgtacgttctgtgtcttatctgcaggggatcattcagatgtagcctcattggttggatttgtacttgtctataccttggccattgtgagcaaaaagccaaaacaaggagtggattgatcaactatgacccaatcccatgccccttagacgagatcgatgtgctttactgccgatcttgtcgcactcgccagtygggttgttgcaggatcgaagggagccagagaggcaacgtcttgtatcattccgttcctcgttaaatctactgtttgtttcaatatgtgtttgagcagcgagttgatcgtgtgggttcaagatagcattctttgatttgttgc

SEQ ID NO: 1209 - DNA, 671 bp, Aspergillus oryzae
aattcggaacgagggagagctactctccaccacgccgaggaagatcccaagtgaaagagtcgagagctagagagaacggctattcgcgcatctaacacttctcacccatcatggctgaaactgattctttccttcaccttgctcgccctctggcccgatggcagtggggtctgcaccgacaaccgcccctctgaatgttgtcattcatcctcaggctctcttctcgatccttgatcattccctccgtcgcaatgccgaccaggagcgtgtcatcggaaccctgctaggaaccaggtcagaggatggaactgaggtggaaattcgcactacttttgctgttggacacaccgagacgacggatcaggttgaggtcgacatggaataccagaagcaaatgcttgccttgcatctcaaggcaaacccgaagaagtgctggtcggttggtacgccacttcgtcggagttgaacaccttctccgctttgatccagaacttctacagcggccaaggtgatggaaccttccctcaccctgctgtccacttgactgtctctaccgaacctggcaaggatgttgaaacccgcgcctacatttccgctcctgtcggtgtgacggcagagagagccgccgacagcgctgcctttatccccgtcccctacgagatccgctacgg

SEQ ID NO: 1210 - DNA, 928 bp, Aspergillus oryzae
aattcggcacgaggtggacatgctgcatagcgagcacatttctagcttcttggtgtgcaacgctcaacatccagatcagcttgaaacactgcatcgtgtgactcagttgtacgtctcgatcgatgctagcaaccgtgaaagtttgcgcacgattgaccgccctcttcaccgagacttctgggagcgattccagcggtgcctggatatcctacgggaaaagcgtcacgtccagcgcactgtcttccgtctcaccttggtcaaaggatttaacgtcgacgatgaggtcattggctacgctgatttggtcgagaaagcattgccgtgcttcattgagatcaagggtgtgacctactgcggcactagcactagcgccggagcaggattaaccatgcaaaacgtccctttctatgaagagatccaggaattcgttgtctccttgaataaggagctcgagcgccgcgggttggactacggaattgctgccgagcatgctcacagttgttgtgtgctgcttgcctcgacgcggttccatgtgaatggcaaatggcattctcgcattgattacgatcgctttttcgaacttttggaaaaggagaaagccgatggtacgtcgttccgccctgaggactatatgagggagacggaagaatgggccttgtggggtaacggtggcttcgacccgaatgaccaacgtgttcacaagaagggcaaaaagaaggccctccaggctgcgaccgagtgatagagcagctttatcctacatatgaagctcaacccttcatcaagcgcctatctctgcggcaacggcgctaggcsgttaacgtggccactacttctcaaccttgtagggtacacaagatctacggagggaatagttgactaggacaaggctctgctttcttataagcgacctcctagacatgcctgt

SEQ ID NO: 1211 - DNA, 889 bp, Aspergillus oryzae
gaggcacatcctttgcatagacaccagtcatctttagaaaaagtcctgaacttctcaaaacctttctcattaccaccccaccaaagtcaatcggcagccaaccttcttcaggtcttaattcagtgttatggccccgaaaggagtgcacgaaaaggttacaagccagcggcacttattaaggccacatatgagcatgtggtagctaaggatacatttttaacgttctttttctcgtcgatatacgaaaatctatgttcacagcctgctgatttgattgattctgatattacgattgtcttgacgttcttcgataactttacgtcttggagtccagacgagaagaacaaagcaaagagcgcgatcgaagaattcgctgattacatcattgagaatttcctccttccgctccgagcttcatctgtcaagactccgcaaccgacgcctgcatcattatccgcaatacaaacatctacgccctccggcacaccataccgtgtatctatcttgcgaaaaagttgccttgtgcgttatcgctatcgttgcgtaatttctcgaaaatttgataagagcgaggctagaaaacgtttcgagcagtatggggaagattgcaaggacgatgaaggaatagaattgaaaaacgaatcaagtgaccgctttcagttcctggaagtggcccatattctaccacattgtcttacaacagtttcctctggagatgcagacctaagcgactcgaaaaagaatgtgcttcggattttagatatgtttgaccctggtgtcatccatctaattgatggtccgaagattgacagccccattwaacgcccttactttaacgctcgactatcatcgtatgttcggtgaatttcagatttatttcgaacccaca

SEQ ID NO: 1212 - DNA, 437 bp, Aspergillus oryzae
  modified_base (370)..(370): n is a, c, g, or t
ttcccctcaagttatgtctattactgcctttatttttccacggcaccctaactactatcatgatgtctcagcgatgaataagcaccaataataattttcgkaatagckttgctgcagatctcctgcaatcaaaggkcttgatccacttcttgattctccgcgacggkgccctcgtgtcagtgtaccaaatgtggaaacacaattgaatatgcatcaatacagcaatctttttgatcgcgactctccggaacgtctgaaggccgtggaatcttctgcagagtcgattaactcgcattcctcaaacacccgaacaaatggctcaacccttacgaacagtgactcaatgacaactgagtggtcttcggcagtnggtcacgcagccacgggcaaatccggtcgtgttatacataatctacaggaggatattgcccgcttga

SEQ ID NO: 1213 - DNA, 590 bp, Aspergillus oryzae
ccgcagacgagacatgtgtccggggacgtcgattgaaaccgtccatatgcagtgcttctgcaatcaacatgccagcaaagggttcaaatccgagaaaaaagctcagaagtcaaacggctcttcgattgatgagaagggctcgttcactccacggaggaaatggtatcagatctgcggcggacggtcacgaacgtactgaggtgtctcgatcttcccccctttacggtatcatatgcagatcaatggctggtttcttttagctttgcatcatcgaattctcatgtcggggttggggtttcaattttatttggggattgtttcatggatacattgggtccggtgtttggttaggtcttaggcgttacttcaggtgatgattgggggtgttttgtcctctttcttttctatatctctgaraaracctgtgtgtctcttgaatcaaacctgtcagaactacagamaatggtcggggtggccgactcgggtcaattgtagccggctaatgtgggtcagttgacatgtcttcttgagtcttcatattgagtgaataaatatagtaacacaaaagcctatcgttgctattgttttgg

SEQ ID NO: 1214 - DNA, 518 bp, Aspergillus oryzae
  modified_base (39)..(39): n is a, c, g, or t
  modified_base (58)..(58): n is a, c, g, or t
  modified_base (65)..(65): n is a, c, g, or t
  modified_base (72)..(72): n is a, c, g, or t
  modified_base (77)..(77): n is a, c, g, or t
aaktggggagaggggctatggcaagagcgcttggaagangagatttgtgtgaaggtgnatatagnagagatncttgntcgggagcgctatatcatgcagctatgtcgtgccttgatgcgttacggcgcgcccacccatcgtttagaagagtacatgaaaatgacagcgcgkgtgctggaggtcgaaggccaattcttgtatctcccgggatgcatgatcatgtccttcgatgatcccaccacccgcacggctgaggtcaagctcgtccgcatggtccagggcgtagatctaggtcgcctagcggagactcacaacgtgtataagaacgttgtccacgacctagtaggggttgaagaagctagccaggaactgacagcatcatgcagcgctctccgcgctttaacaagtggctcttggtccctgcatatgggctggctagtgtcgccgtgggtccattcgcatttgatgcccgaccgattgatatgcccatctgtttctttctaggatccctggtcgga

SEQ ID NO: 1215 - DNA, 789 bp, Aspergillus oryzae
aattgaatattctgagcatgtccaacgtcgaagaaagcaaatacgagcgttacttcgcccacgcctttattgcatggctcttcatcggatttgtcatgtataccgttacacgtgagagtattttctacatcaatttgcgacacgcctacgccctttccccagcctacgccagccggctttcgtctcggaccgtgctattcaccgctgttacgcaggactatctcaaccgtgacaagcttcgcaaaatgttcggtactgacaaagtgaagaatgtctggattactaccgatacgtccgaattggacgacaaagtaaaagaacgtgatgatgctgccatgaagctcgaggctgcggaaacgaagctcatcactctcgcgaacaaggcacgcctcaaggccatgaagaaacagggctatgttgaagaaggacccccgacccccagcgaagaacccagtgacgagtcgggctcagttgcggcccgctgggtcaaaccgtccgagagacccacgcacagactcaaattactcattggaaagaaggttgatacgatcaattgggcccgatccsccmycsmscgcctgaaccccgagatcgaggagttgcaggccaagcaccgagctggcgatgcaaagttggtttcgtcggtttttgtcgaattctatcatcaagcagatgctcagtctgcctatcagtctgtggctcacaacctgcctcttcacatggcaccgcgctacatcggcctggaacccactcaggttatctggtctaacctccgtattcggtggtggg

SEQ ID NO: 1216 - DNA, 876 bp, Aspergillus oryzae
ccggaccttcgggarggctgcwwttgcccggcctaccccggtcgcccgtcgcgttccctccaagatcaatgccttcccttcccttgccaggttggccagcactgaggccggcgctaccggcaaggttcaccaggtcattggtgccgtcgttgacgtgaagttcgagggtgagaagctccctgccattctcaacgccattgagaccgagaacaatggccagaagctcgtccttgaggtttctcaacacttgggtgagaacgtcgtccgtactattgctatggagggtaccaagggtttgactcgtggtgccgctgctcgcgacactggtgctcccatcaccatccctgtcggtcctggcacccttggccgtatcctcaacgtcactggtgaccccgtcgacgagcgtggtcccgtcaaggccaccaagtacgcccctatccacgccgaggctcccgagttcgttgagcagtccactgagggtgagattcttgtcactggtatcaaggtcgtcgacctgcttgccccctacgcccgtggtggtaagattggtctcttcggtggtgccggtgtcggtaagaccgtgttcattcaggagtkgattaacaacattgccaaggctcacggtggttactctgtcttcactggtgtcggtgagcgtacccgtgaggtaaacgatctgtaccacgaaatgcaggagactggtgtcattcagctcgagggtgaatctaaggtcgcccttgtcttcggtcagatgaacgagcccccaggtgcccgtgcacgtgtcgcccttaccggtctgamcatcgccgagtacttccgtgacgaggaaggtcaggatgtgctgctcttcattgacaacattttccgtttcaccca

SEQ ID NO: 1217 - DNA, 546 bp, Aspergillus oryzae
aggagaacgaagggtccaactgcctctcaatccccagcgtggcatagggcttgcaacacttacctatacgcgtaahggtcctgtaggagaagatcgaagattctacttccaagacgatcgcataatccctgcagagatggtttcccgtatgaacagaagtcaagagaccagaagccaggatttggaaggtatcagcagccaatgctcactgtctgacgacggggagtcacaggaagagcccacggaggcttgccactgttaccgggatactgagatcgacgagtcctctcacgtctttaatggagatatggttgatggcatgaaagctccacgggtgcggaasatcatatgcggggaggctcggtgaagggaaagagcaagctggttaatggtgaccttgatagacacacctttcttgcgtttttctgtcaagattaatacagcagtbtccgtttggcctcccgtggtagatcaggatatgttggttttgcttccactgatgcatttagctagtcctggtgactatatttcacctatggtgttaca

SEQ ID NO: 1218 - DNA, 239 bp, Aspergillus oryzae
aattcggcacgaggtgtaaacattgttgacaacagcgggtttggcttttatctactctctttaattaatcgatcatctagtcacgcatcccttcatcattccatttcgaaacatccaatgtatttttcctagcgttggttgtttctacctgctttctgttattcccagccatctcatggactatctttagtgccatactactttcacatcacatactcaatatatcctaatacgaagac

SEQ ID NO: 1219 - DNA, 760 bp, Aspergillus oryzae
ctcccttattttcaattctttcttcccgtggtgtttgttattagaacctacttgaagaccttctccggtacatatcaaagttcccttatcgctgtggggcgttcccttgttactgcttgcagaatcatcttcttgaagcgtgcgatacagctctcacgcatgtggatacaattgcatctcgaccgattttgtaaaggatgtgtcgttgatcgatcgtcgctcagactatctggatacactcagtcttagcattgggcctatatacttgtttccctacacttgacacacaattgacacaacccttgttcaaagcaccatggcgacagtcgtggtacagcaacagcagcagacactgcgccactccacccctcccccaacgggatttcgccagcactgagtctgaacagaaacccttcgccgattccaaacaagcatctgcccttctgtccggagggtcccaccccaatcataactcacaatgcatcgccacttcacaaggaagaagttacagaccagacatcttcccttctatatccaccagatagctacaaacagctgtcgagctcacccgcggtgtattcgatagatgcagtgactttagaagcagccctagaccattgggcttcccagccgctcccagaccctagcaaggttttcccatggttacacgggctccatcccgagaaccatctacagttggggtttttcacaaatcggaaacgctctcttcgtcggatccctagagtttggcgaggcatta

SEQ ID NO: 1220 - DNA, 700 bp, Aspergillus oryzae
  modified_base (45)..(45): n is a, c, g, or t
  modified_base (226)..(226): n is a, c, g, or t
tctcaaggacgagcgcatccgtagatcctggatttcaagcgagcnagatgataccgcatggggcaaacaatcctttgcgactattaccttactctccaaagcacgctttgcatcaactgctttagggccggtttggagggtagcgtatcccagtcactttgaccgtgatgcgctgtgctgcgatatttttgtttcatttgggagagagcggtctcccacgcgagtncggcttgttaatgtgcacctggactccctgcctatcaaaccttctcaccgcccccgacagatatccattatctcctccttcttgcgtasgcaggctgcgggctagttgccggcgactttaacccagttctcgaggaagacgccactctccttgaaagcaatggcttgacagatgtatggactgtccttcatcccgaagcacctggatatacgtgggggactgatggggaacaacctttccctccaaatcggatggacaagattctgattgtcggactaaaacctcctgatataaagacgctagagccacaaagattaagcatattggagggagcgcagaacccccccatggaccaccgcaaatccccgatttcacccatggaagacactccaccctggagcgatcacgccgcattgttatgcttgtttggtctcgttggggagtatataacattgttatgctgattcgggggtt

SEQ ID NO: 1221 - DNA, 993 bp, Aspergillus oryzae
gtgaatctactgtggccatcttcgacatgagcgcatacggaggtttagggcccatgacaaatgcggtcctttgggtggaggtcgtggtctttgctgtcttcgcagggctcaggctctatacgcgaaaacaccttctgaatgcggtcggccttgatgattatctagttgtacttgcgttgattcttcacatcctttacaccatttttgtcagcatcgcaacccactacggtctagggcgactgtttgctgatgtcggtgacccggttatctattccaaagccaccatgtatgaagtgttcagccaggtggctggtatcatggtcattggtgtaggtaaaggagccgttggcaccttccttcttcgaatcgtgcgaaacaaaattcagatttggtttatctggggatgtcttgggatcaccacttttatcactctgttcgccagcatcactgttgtggtacagtgctttccagtccagaagacttggaacccaactctagaaggaacgtgttggctcgacttttctaaagtgggttacacggttggttcgtggttcgtcgcggccgacttctccttcgcgattcttccatggttcatcatctgggatctcaacatgaagcaaaaggagaagatcaccgttgcctgcggtctcagccttggaatctttgctggagtatgtggcatcgttcgcactgtagccctgtccggcctgaatgcatctgagtacatctatgataccgtgccaatgctcatctggtccgcaaccgaaagttgcgtgacgatcatgtgctcgtccattcccgtcctccgtcctctctacgttcgcgttaggtacggcacgaaggatgaaggcagcyctggcaacacttcctacaaactgccattgtacggcagcggtcgcaagtacggcaaaatttcgaaatccggccttgacccttccgccgtcgaaacgatcggcggttcccttcgggcacctgctggagattatcacaaaa

SEQ ID NO: 1222 - DNA, 510 bp, Aspergillus oryzae
aaagcgtcggcgttaccaacggtggaaacggtccattatctttcatgkgcatacgaatgattggttctcttctgcggtcagctcaggatgttggctgtgctggaattctcgcattgtttacagagtttatggcatgcatcatacgctttcggttccccttgcgacctgtctcgtgtcatttttgktgtcttccatgatgtgctttgacgccattgtctccagtgtcttgtccagcatatttcgtgctttatttcggcgcasttcatggcgttcttgggtcggtgcaggtggccaatctcagtccatcgttatcttttgggccaacaaacttttgtgtgtttcttattttggactattttctatatttaactgctcgcatctcgagttaactgtgcatgccgatggtcatggttttgtttgtggcagtatgacttgacggttccatcgtcgaatccgttccggtttcatgacagaataggcgaaatataatttcttgatcatcaaatgatc

SEQ ID NO: 1223 - DNA, 846 bp, Aspergillus oryzae
aattcggsacgagggaggattcggagtatatcaagcaggagctagcagagatcgttgccaacaacgaatacgagatgcaagcgatgccccagggtggctacttcaccacctggctgaactgcttccgtggaagtctgttccaccccaacagcaacctccgccgtaccgtcctaggtacttctcttcagatgatgcagcaatggaccggtgtcaacttcgtgttctacttcggtaccacgttcttcacctccctcggaacaatttcgaatcccttcctgattagcatgatcaccaccatcgtcaatgtttgctcgactcccgtctcattctacaccatggagaaggttggacgtcgtcccctgctgttgtggggtgctctgggcatggttatctgccagtttattgtcgccattaccggtaccgtcgtcggtgacaagggcggcaacaacgctgcggtcagcgcggagatctctttcatctgcatttacatcttcttcttcgccagcacctggggtcctggcgcctgggttgtcatcggcgagatcttccctctgcccattcgttcgcgcggtgtggctctgtccactgcgtctaactggctttggaactgcatcatcgccgtcatcactccatacatggttgaccaggacaagggcgatctcaagtccaaggtgttcttcatctggggatccctctgcgcctgcgccttcctctacacctacttcctcatccccgagaccaagggactcaccctcgagcaggtcgacaagatgatggaggagaccacsccmcggacctctgccaagtggaagcctcacaccaccttcgccgccgacatgggactca

SEQ ID NO: 1224 - DNA, 405 bp, Aspergillus oryzae
  modified_base (119)..(119): n is a, c, g, or t
  modified_base (228)..(228): n is a, c, g, or t
aattgggdagaggacatgagmtgctacctccaagacctggcaaccagcagaatactggtagcaagggcgaaatgaccstgaagatgakgctgacgagacccgaccttcggacgaccgtnccaccacccagggtgacccactgaagctgccactggaggatagcggttcccatctatggggatcctgtgaggacgagcaagggttgatgaagaaaatgtggcgtaagtntcggaaacagaaatgctgagctttttgtcctttcataatttcttstttactcaatgattaatgattctttgaacttctcatcaaacagcacccattagtattgcttgtaaggctttccctagcagcccaatcagaaacaagatacagtactgtaccttccatacttgagaattcagc

SEQ ID NO: 1225 - DNA, 854 bp, Aspergillus oryzae
aattcggcacgagggttgctggcgggactttttctttttctccaaccccataatcaatctttcaccgatttttcttgtcaccctcttaacccacttcgccccatattcaactagaccacgtccgtcgccattgcacccgttgccgtcgattccgctaacggatcttatcatcgccgctgtcttctattgccgacgcaaccgcatcaaccgccatcatgtccgtgaaattccaggataagttccaagaccaggtcacgcaacaggtcaccgagcagatcaagggccaaatccagggacagtttcaggaggaggctgcgaagtcaattcgccaagacacaaaggaattggtgcacaaggtcggcgaacgcttgaccggcggaaaccctcagaatggctatatggctatgtacctgcgtcastgcagaagaaccctctgcgcacgaagatgttgacgtcgggtgtgctttccgcatctcaagaatacttggcctcgtggatcgcgaatgatgtcagccggaatggacactacttcagcgctcgcgttcccaaaatgctcctctacggcatgtttgtcgctgccccattgggccactttcttgtgggcatcctccaaaagctctttgccggccgcacaagcctgaaggccaagatcctccagattctctttagcaatctcatcatctcccccatccaaaacgcggtgtacctgtcgtcgatggccgtcattactggcgcgcgcaccttccatcaggttcgcgcaaccgtccgcgccggtttcatgcccgtcatgaaagtcagctggatcacttcccctctcgcactcgcgttcgcccagaagttcctccctgagcaca

SEQ ID NO: 1226 - DNA, 820 bp, Aspergillus oryzae
aattcggctgaggataatcgccagctgtttgttccacagctccttgcagtatactgtacctgcgcaccgcccaacgtacggatgagactacaatagtgatgtccgttgtcttttgttagccatgatgctgtttctactgaagacggcgatcaccgtcctcgcgctcctcgcaacctgcgtcctgctcccccgacttcccctggcggtcctccgctttgtccttcgtggtgtcggatgggttatccaaaaacgaacaaggtctcgtagagagtacattctctcacgagttagggctgaagatgaggaggcttcatctaagcgaggtagatcgtcttctggggctcatggagaggatgaggattgggagaagctcgactcgtctagttccggttcgggtacacctggcaataacaaggcccatgagagtgatgattggaatgggattatagggttctttcatccattctgcaacgccggaggaggaggagaacgtgttctttgggaagctgtgagggcaacgcagaagcgctggcccagagcgatttgcgctatatatacaggagaccacgaagtaaacaaaactgccatgctggagagagtccagaatcggttcaacattcaacttcatgccccgacagtggtgttactataccttactacccgtaaatatgttgtcagcagcatgtatccttacatgactctgctgggtcagtctttgggatccctggttgtcgcctatgatgcattcaatcttctggttccagacgtgttcgtcgataccatgggctatgctttcacactggccttctgcaagatgctt

SEQ ID NO: 1227 - DNA, 678 bp, Aspergillus oryzae
  modified_base (278)..(278): n is a, c, g, or t
gaggccgaagggaaggagaaacgaagaagctcgacaagaagacgttttccgagatgcgccagactgcattagtgagcattggtctcccttcaaccgagagaagacatcgcgaggacgtcgaccagtggatcgcattgataatgcaacaacactgggccaatggcaaggaatggttcgaaaacatcccgcagctggagaattggacggggatgatgcgtatctttcggacgaggacggcttcggcgaggatggagaaagagctaaaagcgctaagcgancaaaagacaacgaaatcgggtcgctcactggccaaacactcatccaggaagggccttctaccgggtcttggtaccatgatgcaggatcgtgttgattggttaagcgacgatcgcaaggaagattaccttgagtggaaggcagcagtcctggcgcgaattgagcagatccaaaaatctgcagcgcacattatcggcgccttacccgtttgatgaacacttctggataacgctttttgaggataggagttatcaagtcggctatcgttcttgctttcttattatcttagcgtattctggattgcttcattatcaatgcctccgttctacactatgtatcattagaccttactatttgtattatagagtctctatacccaacccaatcttaatgtcttatcta

SEQ ID NO: 1228 - DNA, 820 bp, Aspergillus oryzae
aggagcttctgcttcatcctggtgtattattctccactccaccaatcaaccgtcccttcatatcataccgacaagatgagcgttaccacagccgcgcccgtggaggccaaaaccgagccccagaagctaagcggcttgaacctgtattcgcgattcgcattcgccggagccgtctgctgttccgtcacccacggaggtctcacccccgtcgatgtcgtcaaaacccgtatccagctcgaccctgtcacctacaaccgcggcctcatcggtggcttccgccaggtcatccagaatgaaggcgccggcgcccttctaaccggtgccggtcctacattcgccgggtacttcctacagggtgcgctgaagttcggtggttatgagttcttcaaacagcagtcgatcaacactatcggctatgaaaatgccagaaacaaccgtatcgccgtctactgtgtttcgtcggcttttgcggagttcttcgctgatattgcgctctgtccgcttgaggcgacccgtattcgtttggtgtcggagccgacctttgctagtggccttgtttctgggttcgggaggattgctcgtcaggagggtcttgctgggttttattctggctttgggcctattctgttcaagcaggtcccgtataccatgtccaagtcccccctctacgaaaaggtcgccgagttcgcctacgccaacttcttcgataaggagaagactagcgacggcatgcagaccgccatcaatcttggttccggtctgattgccggtttcgccgccgccattgtctctcagcccgccgatactatgctttccaaga

SEQ ID NO: 1229 - DNA, 776 bp, Aspergillus oryzae
  modified_base (124)..(124): n is a, c, g, or t
  modified_base (205)..(205): n is a, c, g, or t
  modified_base (208)..(209): n is a, c, g, or t
attcggcacgagggtttcttttctcttgttttgttgttgagcaatattgagtgcgaattgtgttgtatatcccgttacagataacgtttatgttgtgacttgtacgttgaaccaaacaatatcntcacaatgacaatcccagatatcccaacacgccaacgagcsgccgttcgtcggggcacaggcgagtccgccacaacaaccntcnngaacattgacgtcccgcagcccggtccgggccagatcctggtaaagatcaactggactggactttgtggctcagacaagtctctcctgcatgatgattggaaggatttcggggtgaacatgctcccccagagccaaggaatcgcgggacacgaaggggcgggtgttgtcgtcgccgtcggsagggcatgcagaagcggtggaaggtcggtgatcgggcgggcatcaagtggatcgcgagttcctgtggagaatgcgagttttgcctcaatggggtcgatgaggtgcattgtgagaagcagattaacagtgggttttcagcgccggggacgttccaggaatactgccttgttgatgggaggtatacgtcaaagataccggatggagtttcagatgaggaggccggtccgatcatgtgcgggggcgttactgcttacacggcttgtaagagatcggccgtcaaatccggtcaatggcttgtgctccccggcgctggaggcggtctaggtcatctggctatccagtatgcgcgcgcaatgggcatgagggtcctcgctattgatggcgga

SEQ ID NO: 1230 - DNA, 433 bp, Aspergillus oryzae
  modified_base (171)..(171): n is a, c, g, or t
  modified_base (217)..(217): n is a, c, g, or t
  modified_base (219)..(219): n is a, c, g, or t
  modified_base (229)..(229): n is a, c, g, or t
  modified_base (256)..(256): n is a, c, g, or t
  modified_base (282)..(282): n is a, c, g, or t
  modified_base (305)..(305): n is a, c, g, or t
  modified_base (373)..(373): n is a, c, g, or t
  modified_base (384)..(384): n is a, c, g, or t
tgaggaagtcaggaatatgagaagattctgaaaataagtgacgatatatttactggaactcaccckagattgaaagtkccccagcagtttgtgcgcaaacccgcgtcggcaatccccctacctccactcaagcccaggtaaaaacgagtgaacggcctgggtcttttacanggaatgcacctcagaccgtttcagcgccttcaaaacctgtaagcgnantgagtaagantactggtgacggtttgtbtggcaagancgctccctcgcgtattgtaccgaaanatacttttgaaattgattttatnttcttgaccaaatsggatgatctagtcagagcagaactacagttacagcgtcaaagggtggaaaggangttgcgggaanaactcgagcagaagagacaagagttaaggcaaaaagcctctatacaaga

SEQ ID NO: 1231 - DNA, 752 bp, Aspergillus oryzae
aattcggcacgagggtgcggtaacaaaagtatatccatccaccatgtcagtcgaaattgctcagctccacagtgaggtcgaggctctcgtcgagaagttcgacgttctctctaagatcaaggaaatccaggaggcaggtgatgtccgttcatccgtccctgtgaccatctctgtcactaccgatgccaccatcagtctcctcgaggacaagtcaaccattggcgagtcgaccgaagccccgaagagcctctccaagggcgagaaatcttccttcaatatcacccagggcgatgaactcaagtacaccgtcactgctggtgagctcactagcgacttcaagatcgtctttgacgttgacaagagcgcacccaaactgaagctcagcgacgaactcgaggacgacaacgccccaatcggattcgagaccactaagaccgagaccaagactgaaatcgaaatcgaacgcgaggtcgaggttgagaaggaatggaccaagggcaagaagccagagaggaagaccagcaaggagactaagcacgaggcaaaggctggtgcacactccctccagcacgaggtcgagaccaagttcaagcaggagaaggataagagcgagacggaaaccgagactgagattgagattagcaacaagaaggtcgaggttgagtatgttatctactagcgcttagggtttcacgctactatcacattggtaaagcatagaagaagccatacaaatatatcgttcaaggatt

SEQ ID NO: 1232 - DNA, 994 bp, Aspergillus oryzae
  modified_base (155)..(155): n is a, c, g, or t
aattcggcacgagggtggagattacaaccccctgtatcaacatcgacacgaggccaacttctttggacgtggtcgactggcaggtttcggagacgatgtcgccgacaacgtggcgaagaagtatgcaagagccctggaggaccgcgaccacgaancgggaggtattcgggcccgagagatcctggaaatggagcgtcggcggagagaagagagcacccgcaaccagcttgacaagcactggagcgagaagaaactggagcacatgcgcgagcgcgactggcgcatcttcaaggaagacttcaacatcagtaccaagggtggaagtgtaccgaaccccatgcggtcgtgggatgagtctggtctccccaaacgtctcatggaactcgtcaacaaggttggctacaaggagcctacacctattcaacgtgctgctatccccattgccatgcagtctcgcgatctcatcggtgtcgccgtcaccggttccggtaagacggcctccttcctcctccccctgctagtctacatcgccgaactgcctcgtatcgacgagttcgaatggagaaagaacgatggcccctacgctatcgtccttgccccgacccgtgaattggcccagcaaatcgagatcgaggccaagaaattcacagaacctctcggcttcaacgtcgtcagtatagtcggaggccactctttcgaagagcaagcctacagtctccgcaacggcgcagaaatcatcatcgccacgccaggtcgtctagtcgactgcatcgaacgccgcatgctagtcctcagccaatgttgctacgtcatcatggacgaagcagaccgcatgatcgacctagggttcgaagacgtgcaaacaagatcctcgacgccctcccagtctccaatgaaaagcccgactccgaggaagccgagaactcaatggccatgagccaacacatcggcacaaaagaccgctaccgtcaaacaatgatgtacacagcgacaa

SEQ ID NO: 1233 - DNA, 751 bp, Aspergillus oryzae
  modified_base (419)..(419): n is a, c, g, or t
aattcggcacgaggcgaagagaagatccattgactcccagcctcccagccaaaatgaagatctctgctgctatttctactgccctcctggccgttagtgccgctgcgttcgacaagaaccaaccctggggcaagcgcgactacaactgtgttaacgtcttccaaggcatccccgacaactcgaccgttgctcccggcgctgagatcaacatcaagttcaaccgcaactccaagaactgcgagtctctgacccagtataagggagcgggttattctatctatctctacaacaaccctgttagaaaccttgacactatccatttcgacaaagaacttttcatcaagaaggatatccctgagcaggacggtgctgtcacgatcaccatcccgtctcaggagcagctcggcaccgttgcggangacagcgtttggtatcttcgtctctctactagcttgaacgatgctccccagatgcctactcttttcaatgctgctggacccttcgctattcgtgcttaaatgtccatggtagtcgtttgtttaatcgcgatggactattgacatggatggaaggctatcttgacatatacccttgtatcagcgtatctctcaccgtgaacacttgaccttccatatcatctttcattacctggagatgtacatgttaatatcctacgttttgggaccaggccgttgaacctttattctaatatttgtccatagcttaattgagtgtatacttaatttagatg

SEQ ID NO: 1234 - DNA, 784 bp, Aspergillus oryzae
aattcggcacgaggcaatcagctattcaagcaaagcatcactccttgagcttcactcctttacaataatttgcttcaaagcatctaaccagcccaacccaaccatcaaaatgaagttcttcgctgtcgctgctctcttcgccaccgccgccatggccgctcctggttccgctcctgtgcccggtgctgctgctgctgccggcaacgtaacgccccggttatcaaccagacccagcagaaggccttcacagacgcttgcagtgctaagggcaaccaccccgtctgctgcgaccagatcgacacctccaagaccacaactgtgaacgagggacttctcggtggcctcctcggtgagggcctgggtggcgttcttaacaaccttgttggtggcgagcctggcgcttgcagtggtcttgtttctgccctcaacaagcaatgccagaccagcatcggttgctgccagcagaacgccaagggcgacaactaccagagcggcctcctcaacctcaacctccaggctccttgccttctcagcaatggtctgtaatcgcctcgccatttggctacgaaatcccgcgcasatttggacataatgtcgctcttctggtcctcgccgctggaccaagatcgtcagcgttttcgcgaatttgtgcacaaatgatttgagatatatggcttgtttcgcctattctgtacactctagctgtttatctttgtggcatgcctatgcatcctagagtgcccatttgttaataattgaaattcaatatcactgtcattattat

SEQ ID NO: 1235 - DNA, 851 bp, Aspergillus oryzae
aattcggcacgaggctaccgcacaatgcttgacccacaagatttgaccagtgagaacccactctgggaaagcgatgagccctactttgattctttctactgcatctgggactccttcagggcacagcatccatttctcacaattgttgatcctgaggcacaatcaaggatggtacgcagtctcctcgacacatataagcacgaaggatggctaccagactgccgcatgagtctctgtaaaggctggacacaaggtggatcaaatgccgacgtcgtgctaaccgatgcgtatgtgaaaaatctcactgggatcgactgggacctagcgtacgaggccatggtaaatgacgctgagaatgagcccttagaatggtcgtatgagggaagaggaggcctgcaaagctggaaaagactcaactatataccttacctggactttgattacctgggctttggtactaattcccggagtatctcacgaacactggaatactcgtacaacgattactgtttatcgacggtcgccaaagcacttcagaaggacgactacactaagtatcgatccagagctggcaattggcaaaacttatacaaagctgaccaaacctctttgatcaatggcactgacactggtttcgtgggcttcttccaacccaagcatctaaatggaacgtggggctaccaagacccaattgccctgcagtgctcttgcctcatggtgttcactgacaagcaatccctctgagacttttgagtccagtgtatgggaataccaattctacgttccccatgacatggcgactctgatagaccttctcggtggcccagacatattcgtctccgattagactt

SEQ ID NO: 1236 - DNA, 525 bp, Aspergillus oryzae
aattcggcacgaggcagaaatacccgagtcttgatagctaattctccgttaattgatcaggtcacactggattaccatgggactcatctcacgtctggtgacgttcttcgggctcgtgctccttgcccatgcaggatactccgcacatgaacatacggtcttgtatagcaatgcccgtctctcggcgtctaccgctcttccgcagatatcgtcatcgaagctttagtatccctcgttctcgtttcagtgggcctagtgttgggcgcgcctaagttgaagccgattagctggagccaatgggctggggagatcgagaaggagggtggcggcagaaacccctaccggaggctggaggagaggtataacttctgggacgtgcgggccaagcggaaagaatttgcggattgggtcaagggtgagaatcctttgaatgagtkatggatggtttgctatcaaaagctgtcagggacgatacctttatttacagttgtctcggtcaagactaatgaataagtggctgcttct

SEQ ID NO: 1237 - DNA, 880 bp, Aspergillus oryzae
aattcggcacgaggctaaaccaacgtcatttcgatgtgccgtccacgacttatcgcactaggccgacagacggactctatcagtacaatatgtgttgacaatgggcaacacgaatagctcccataagatatccgctcaagatagagccattcttgatttgaaaatccagagggacaagctccgccaatatcgaaagcgtataacagacctcaccgatcgcgaaactgagatagcaaaggaatgcctggcccgggatgatcgcaaacgcgctctcctcgctttgcgccgcaagaaatatcaggagtcgctcctgatcaagtccgaaaaggagctcgaccaactagaacagctgattaaccaagttgaattctcgctcgtccagaaagatgttctctttgggttgcagcaaggcacgcaggtactacaggctatcaacaaagagatggggggtatcgaaggagttgaaaagctgatgggtgagacggaagaagcacgagcgtaccaagaggagatcagtcaaatgctctcggggaatctatccaaccaggatgaggatgaagttgaggatgagttggctgcattacagcgggaaacgcagagactgcagaacttaccacatgcgccaaaatcgaaactcccagaaaggtcaaacgagggagaaagccaggaaatacaatatcaaggtggcaaagccaaggcgcaacccgcaattccggcttaaaatatatgctattgcctccacgcttcttttacagattgcagtcatgtgaaatatcaaaagcattttctggcgtggatggaactgccggatttatgccattcagtacatccctagttatctgcatttccaattatagaatcaaaattgaattgggacagc

SEQ ID NO: 1238 - DNA, 624 bp, Aspergillus oryzae
  modified_base (247)..(247): n is a, c, g, or t
aattcggcacgagggatcaatcttatcgatccggtgatataagaagccactgaagtcttacatcaagcatcatgagcaaccagcagaacaacccccagtctcctcgccattggcacggtaacctgggcgatcgctatgagcaccacaacgtctgggtgagaggaggccctccccagccatacatggcccgacgtccttctgctgccgaagcagcaagtgccacggatgacagacgtgagtctgtctncatctagcatgtcttccggctctaacagccccccaactgctccgaacagaagacggtctagtcagggttcgtcactcttcgaaagtctgacaaaccagaagcggaactccacggatcctgcttcggccgcacgccgcgcgagttacaatgaccaggcgcasagggcggtttctttgcgaagtggtgggatgggtatactcgtggttcgaaataagccatggtcaagttcatgctgtgaaggaaggcagaatgaattactggatgggaatttactatgttgaacgtttatatgactgtatgctgaagagtttggcgcttgatcttgtatttattcgttcgtctacaagcatatcgtgttaattgaagtggatatatat

SEQ ID NO: 1239 - DNA, 987 bp, Aspergillus oryzae
aattcggcacgaggccgttaaatctctccttgtatttggttaccgactcgactccggctatcctcaagggccgtgatctgtgcacggtggtggaggaagctttgaaaggaggtgtcacgatagttcaatatagggacaagaaaagtgatacaggagagcagatacagacagctaagaagctgcatcagataacccagaagtatggggttccttactgatcaatgaccgtgtggatgttgctcttgccgctggtgttgagggtgtccatctcggtcaagatgacatggctattgaacaagcaaagcagcttcttcmtaaggatgctatcattggtatcactgctgcctcgatagaagaggctcagaaggccattgatgccggcgcagactacctcgggataggaaccatgtttgcaaccccaactaagaccaacaccaagcacatcatcggaacagccggtacacaggctatccttgatgctatctcggacacaggccgctctgtcgggaccgtctcaattggtggaattaatctttccaacgttcaacgagtcctttaccaatccagagctcccaggaaggaacttgatggagttgccatcgtcagtgccattatagccgcggacgacccgaagccgcagcagctgaattcgtraamgcattgccactcccccgccattcgtacgagccccagcagctcctcagatccgtgaagttgctgcgctacaggaggaggtgccgaagatcgttcaaaaggttgtacaagcgcatcctcttgtgcacaacatgatcaactttgttgttgctaatttcgttgctaatgttgctctgtcaatgggtgcttctcctatcatggctccgcatggggatgaggctgtggatctcgcgcagttcgacggcggcctagtcgtcaacatgggtaccttgactagcgagagctttcccaactacgtgaaggccatcaaggcttacaacgaacgcggtaacc

SEQ ID NO: 1240 - DNA, 751 bp, Aspergillus oryzae
acgaggtcttaaccacatccccgttctcaccagcctcatcggtactaccctcgaggtatgtattactcgcwcwattgaaccccttcttgcggcctctcagctagtctgggagagcaatcactatggaactctggccttttcaatccttgtggagtcgcaaccgaagaaaattgaaaagttttaccagagggtccaggtgatacgcttctctcatttcacggcacgggctgaagaacccttgatgaaaaattcttaaaggggcactctttacgctcgaagactactggtggctgacacgattctctttttgaaaattagatacctcttatcccgtctctcgatttgagaatctcgaatatcaaccgccaaaatggtcaagacttccgtcctcaacgatacgcttaacgcgatcaacaacgccgagaaggctggcaagcgccaggtcctcgtccgtccttcctccaaggtcatcgtcaagttcctgagcgtcatgcagaagcacggctacattggcgagttcgaggaggtcgatgaccaccsttccggcaagatcgttatccagctcaacggtcgtctcaamaagtgcggtgtcatcaacccccgctaccccgtccagctccgtgacctcgagaagtggaccacccagctccttccttctcgtcagttcggkttcgtcgtcctgaccacctccgctggtatcatggaccacgaggaggctcgtcgcaagcacgttgctggcaagctcctcggt

SEQ ID NO: 1241 - DNA, 714 bp, Aspergillus oryzae
aattgatttatcgcctaaaacctccagatacagccctagtggtaattttaattcgatcattctcaacatgtccaacggttcggccttcttcctcccacctgaaaaagcccaaggcctcgccaactaccctcatgcacgcattctccccacaaaccccacttctcgtaccatccacgtctctggtacatcatcgcgccgcggagatgggacttgggacggcgtaacggaacatgcggatggaacatggacgctggatattcgccaacagaccgcggcagttcttcgcaatattgacactattattcgcggcgcaacagacggcaaagggagcattaagaatgtggtcgatgcaacggtattcttgactgacctgaccggttgctatcaagggatgaatgaagaatggaacaaagtgtggccgaatcgcgaggatgcgccggcgaggacgacaattggtgtcaaggaattaccgaatccgaggttactggtggagatcaagtgtacggcaatctgtgaatggtgagcgaatttcgatgtagacttcagtctatattaccttggtacctcctcaaaatgctgggtggttcggctaaggcttagcaacgtctgttacctggttactcgatggctctgggattctggctgtkcagatagagaatcttctagattccatgtatatatctccaagaccgatgatcgaaaacattagttatg

SEQ ID NO: 1242 - DNA, 936 bp, Aspergillus oryzae
  modified_base (505)..(505): n is a, c, g, or t
mgggtatattgtggacgttcgggacggtccatggcgacgaatgtcgcaatggccgatcagtgactgatcttgaatgggccatgcagtatgtctgggatcgcattacaggaacagtggccactggccgcaaaactcgccatgatgggtgtgattggactcaggacagactgaaacgtccaacgaacttsaagatgcaccgctacatttctctcacattgcagttctgtcgcaacctcaaacagtttctctactgccggacattcggaaactcggaagatgcaactgaaaacccgagcacaaacgcgacaaagcgagacggctatattcccgctatttatcattgcgctattccagcatgcattatccacgccatttgcaaagaaagtgtgaaagtaccassgcgccaagcatccgtccctctgtccactamacgggaccaggggggcgccatggagcgcattgaaggaccctggggcggagkattggtgwaagaaagggtcaaagnggamggataaaccatcgcagcctttgkttggtttatgggggaatttgtattttcgbatgcacccctgwaggttacgggtttacaaaagaaaggaaggaccaaagcacccctccacmaagggccgcaaaaatgkaaaactcctctttgcgctcaccctttgctgggaagcattgstgaatggggagtcttatggggaacatttcgsagccagggctgktggcctggaaactaagaacatccccccggtggtacaaggtctggtccagggtscagtggscaaagctttccaaarggmattattctcccaaacttagggcaaaccccaggagggaagttatgcactcctgcctcctcccgccatttccttgcttggaaaagggtacttattcgggactttaacccggggccaaaacccccccgcaaccgccaaa

SEQ ID NO: 1243 - DNA, 509 bp, Aspergillus oryzae
  modified_base (14)..(15): n is a, c, g, or t
  modified_base (21)..(21): n is a, c, g, or t
  modified_base (70)..(70): n is a, c, g, or t
  modified_base (75)..(75): n is a, c, g, or t
  modified_base (79)..(79): n is a, c, g, or t
  modified_base (81)..(81): n is a, c, g, or t
  modified_base (84)..(84): n is a, c, g, or t
  modified_base (86)..(87): n is a, c, g, or t
  modified_base (94)..(94): n is a, c, g, or t
  modified_base (101)..(101): n is a, c, g, or t
  modified_base (108)..(108): n is a, c, g, or t
  modified_base (119)..(119): n is a, c, g, or t
  modified_base (147)..(147): n is a, c, g, or t
  modified_base (150)..(150): n is a, c, g, or t
  modified_base (161)..(161): n is a, c, g, or t
  modified_base (215)..(215): n is a, c, g, or t
  modified_base (305)..(305): n is a, c, g, or t
  modified_base (358)..(358): n is a, c, g, or t
  modified_base (457)..(457): n is a, c, g, or t
aattccccaccacnncacaancatcctcaacaaacaaccccttagccaacatgttccacgattcacctcnccacnttcntntcnannacaacanattcttngctcctnaactcaaacanactgacggtaactggcgtttcgcgccantanatctaaatgancatatcgcaaacgaaaatggccactttcaatggggtggaaggaacttctcccanactcccagaaacgttcacttcgggttcgagggcggtgcacatgtccctttgctccgcgccgaattgcccaccccggctggtacatggganccgcgcatgtcaaccttgacgaacgtgtcttcaataacaatggacactttganttccagtactaatttgatccctatatcatgatatcatttgacgaccattggaaggactccaaagtgtccttacggttcataaatacttgttgtatctantatagctcttccatatatccaatccctttcaacccaaaaaaaaaaaaaaaaa

SEQ ID NO: 1244 - DNA, 762 bp, Aspergillus oryzae
ggcattgcgacctgacctcaaccatgcggttgttgagttcgttgcaccgcaagagtacatggtgcgccccccgcagccactcgtctacctcttcttgatcgacgttagttatgcatctgtcaccaacggtctcttggctacgagtgctcggtgcatcaaagaaagtctcgaacgtatccctaatgcggaccgccggacgcgactgggtttcatagcggtcgactccagcctccactacttcagcatcccgcgcgatggctcagaaaactcggatccaaggatgctcgttgtcagcgatttggacgagccattcctccctatccctggtgacttgctagtaactctgagcgaatgccgtgaaaacattgaaacgttcctggataaattgcaggaaatgttccagaacacccaaaacaatggctgtgctatgggatcggcactgcgtgctggttacaagttgatcgcccctgttggaggcaagatgaccgttcttagctcctctcttcccaacattggacatggcgccctgactatgcgagaggacaagaaggttctgggcacagcaaggagagcggtcttytgcagaccgcaaacagcttytacaagagctttgctgtggagtgttcgaaggcccaggtctctgtagatatgttcctcttctcttctcagtaccaggatgtggcgtctctcagcaacctgcctagatatactggcggtcagacgtacttctatcctggatggaacgctgcacggggagaggat

SEQ ID NO: 1245 - DNA, 471 bp, Aspergillus oryzae
  modified_base (52)..(52): n is a, c, g, or t
  modified_base (95)..(95): n is a, c, g, or t
  modified_base (320)..(320): n is a, c, g, or t
  modified_base (347)..(347): n is a, c, g, or t
  modified_base (365)..(365): n is a, c, g, or t
  modified_base (375)..(375): n is a, c, g, or t
ctccccgttgacgtgtggtacattatgcttaacctccttcgcgaagaagtcnacccggatgattacgaggcacgatgaagaggaagaagaccctnatagcgcctgaaaacccaaaaatgtagcccgragacaaccttaccttcccgacctcatcaacctgagtagtacgtacacataggtttcgggttgtgcttgctcccatcatatttgccaaccttgaattaaacaatacggccaaaagcgcccggtcaatcactgcgatcggcaaggggaggcatactacgtgcgtcaagacgctgcggtacattgggatctgtganacaratcaacaaacctcgcccttggangaggtgtaccctccagangttgatcaanttctgtccaatctacacatgttcggcagtcttgacaaactcacgattaaattwccctttgacwacgagtctgacctgttgttcgagtaccttcaaa

SEQ ID NO: 1246 - DNA, 932 bp, Aspergillus oryzae
aattcggcacgaggaactcttcgttgcggagttagtaatagtcattttttgatttttatttttcaatttttgtgctcaccctatcatgcatatgatatcgctcaagatgacctgtccgacttcaaagtcaggggtagatacagacattcactcgactgtgggcagcgacacaagtgatgtgcaacatctagacctgaccacgaccaattcccatcatctctcgaaagagaggaccgttaatgtcttcttattggtggcttgcgtggtctttggggcagcgtcgttcctgtttggctttgacgacaagattatctcgccagttgcggcgctgcatccttttgtcgagaggtatcaaggacccaatccgagaactggtagatataccttaaccgcccacaaccagaacattgtattctcggtcccgctggtcggttcgattctcggaggtctcgcagcatcgcccatgaattttcgctttggccgaaaatggcccgtgttgatggcgtacgttatctccattagtggtggattgcttcaagtctttgcccccagcctggcggcgttcgtggctggacgattcataaatggcattgctatgggcatcgccaatggcaccgctcccttgtatctttcggaggtggttcccgcttctatgagaggtagaagtgtaacatcaattaatatcttgaacgtggcagcgggagttatcggaaccgttgtagtgtctgagactaaaaagcgagggggcagagagtcatacttgataccgttggccgtgcagtgtgctctacctgtgttactatttatttgcacgttacctcttcctgaaagcccacaatggcttgtcgctaagggtcgattggcacaggctcgtagcaacctgcgaaaactccgtggcctcagcgaagagcaggttgacgtcgagcttgaga

SEQ ID NO: 1247 - DNA, 968 bp, Aspergillus oryzae
gagggaccctcccctcttccaacaagctagcattccaggatgggtctatctccctcgggaaatcaccatcgccggcggagtcagtgctcacggctaccgggggcccttcacaggtaggcccggccgagcagagggacgataacccaagaaccaatgccgaccctgtcaactataaacgggaagaacagaaagccgccgaggacgcagatgtgtccgacctctcgtcgatcgccgagagctccgaggacgacctccaagatgatgaagagaccggtcttaccgcaaaacagagacgccagcgacggcggcgaagaaagcaacggagacagttggatgctcggatcgccggggtcaagggttcccagagtgatgtgttctcggttggattggcggatcgaaacgtgatgaggaggctgttggtcaacgcagggttgattctgatgtggtacttcttttcgttggcgatatcaatctacaataagtggatgttttccgaggatgatgtcgtctttccctttccgctattcaccaccagtctacacatgcttgtccagttctcactatcatccttcatcttatatatgattccttcgctgcgcccgcgggcgctttcgtcatcaccgtccggatcacctatgaggcagcaagatgggtccgagaatagtgtcgtatccaaagtattctatttcacacgtctcgttccttgcggtgcagcaacttcccttgacattggcctgggcaatatgtcgctaaaattcatctctctcacgttccttaccatgtgtaaatcatctgctctcgcattcgtcctactatttgctttcctcttccgcctagaaaccccgtcagccaagttgatcgtcatcattgctacaatgactatcggtgtcgtcatgatggtcgcaggtgagactgcttttaacgttgttggcttcctgctcgtcatcgcatccgctttcttctcgggc

SEQ ID NO: 1248 - DNA, 851 bp, Aspergillus oryzae
aaaacatttatcgcaaacaaccactgaaaatgcccaccgaaacatttaactatggcgaagagcacgcccttcaaacagtgactgtgactaccttatcagagacactcgacaaaaaattctggattatcttgatccatggcggcgcctggcgcgacccgaagatagacgccatcaacttctccaaccccgccatatccaagctcaccacttccccaaaatacgccgacgttctccctcacatcacagcattcgcatccatttcctaccgtctcagcccccatccggaccatccccaggaccagtcgagcactaatccccgagactaccgcggctccaaacacccagaccatatcaatgacgtgcaagcagccatagccttcctgcagcgcaaatatggcttcgaggaacggtatatactcgtcggccacagctgtggtgctatgttggcgtaccagtcggtgatgggccagtttaaagctggcatatcgcacggtccggtagctgtggcgggtttggcagggatatacgatttgaagaaattccgggatactcacaaggagataccggcgtatcaggagattgtggagggggcttttggggatgatgaggctgcgtgggatgctgtatctcctgccgtggtcaaaggggcggaaggtattgagggtgggtggactcatgggtctttcgcgattctggcgcactcgtctgatgattcgcttgtggatgagacgcaggatgaggctatggatgctgcccttatcggtgggtggtggaaactgcagtctgaggacaaactgagatgtgttacgcggatgcctctagaaggtgagcacgatgagtgctggggaaaa

SEQ ID NO: 1249 - DNA, 753 bp, Aspergillus oryzae
aattcggcacaggatcctcctgggtggctggcaggcaaagctaccaaattacgcgacgaaaagaatatggtcccagtgcaattcaacccgtgtgagacatttgaagccggcgaaggtgtggacatcacaacccttggatgcatcagcgaaacaggatctggttcgaaatattcaagttctcaaggacgaagtgcgcgagttgcaggaaaagatggacatggagagagccaatctacagcagctcggccatgattttgatgaatgtgaacgggaacggctcgaacttgagagggagaagtccgaaaaacaaacggctcttacaaactaccgggctatccccgaaagaattcgccagcaggaactccgactgagagacatccagaagatttttcaagatgtgaaaaccagggttcttgatattcgcagtcgacaggaccagctatcgattgagaaagctgaggcgacacttgaatacgctaacgcggtcgaacatcttcgagtactgcacgaggaactcatcaagttaaagatccgccatattgaggctttctccgacttagaaattttgaaggatcgtaatatagaacacagagacaggttggaagctaaaaataacgagctgaaagacgccatgcaggaagtgaaggccatgtcggtagccgtcaaagaaatgatgaagcaggcaaacaaggttgtacaactgtcggagcgtcacctgacttgggctgcccctgctcctcccagttttggtcg

SEQ ID NO: 1250 - DNA, 715 bp, Aspergillus oryzae
  modified_base (188)..(188): n is a, c, g, or t
  modified_base (367)..(367): n is a, c, g, or t
  modified_base (422)..(422): n is a, c, g, or t
  modified_base (463)..(463): n is a, c, g, or t
agggtcatcgtcatttagtccgcttctttccaccatggcgaaccccgtcgaccctgcgcagacttctcctccctccacttcaccaagccctgcgcccgcgacgcaacaatccaccgacatgtcctcccagcaacccccctcccaaccaccacagccgtccaacggcgcatccaaacccgccaagccanctaaacaacctaagtccaaagatgcccctccggccgcagcgagctccaggggaggaaaaactcagcccagctgaactgaagaaaaaagcgaaggccgaaaaggctgcccgcagagcgaaagagagagctgaaagagaagccagcggaggagcaggtgccggaccagggcccaacgcggnaccgcctaaaaagggctcgactggaggcggcgctggagggaaggaggctccgggncagccttacaagagtcaaagacatcgacgcggatytgctanaaaagccagcgctacggaacagaagaagaagcaggaggataagaatgtcgctgtctttggaaatttgtatggacagccgaggaggactactatcgctggtgccggaaaggaagtacaccctgctgtattggcgctgggtctgcagatgagggattatgtcgtgtgcggtagagctgctcgctgtgtggctacgttgcttgcgttcaagcgggtcatcgaggcttatacgacccccctgggtacctccctttc

SEQ ID NO: 1251 - DNA, 865 bp, Aspergillus oryzae
aattcggcacgaggatcatcactttccctcggacactctttctcccttgtcatctttgttggtaatactataaagcctctgtcgdgaaccccgatctactctctttaccgcccttcccctctctttccggatttcctttcctcgctcagctcgtcatgagctcgcagcgctatcaaagggtaaacgcccacgatgaagatgaagaaccgcaatcacaatcatcaatccctctccggggaacaccaaactccccccctccctcgtttcgctctcgttccacctctccatcatccagacgccttctccatgacgatcccctaaacaacgatgcggaccagacgctggccgacgcatttgatgacgagagcgactccgaagcggatgagccggatgaccgtcagcgactaatgcgggctcagccggaatcgcgaccagtggcagatagcagcagtgcgaccgctagttcctcatctggaatgggcaatgaacagcaacagtccagtgatccgcgtagtgggattcaaaggaggcagacaatcctaccgagtttcagcactggtagccgagtgatcagttcgacgaatgacggtgtctttgcgaacctggcggctaagcggagcgtggagagaaaactgaagaccttcctccgtcctatgaagaggcggctgctgatgctacccctccgtactgggagactacgattttggccccaggtatttcatccgacgaggtgtacgtggatgggttgccagtggggtccgtgttttcgtttgtctggaacgccatgatctccatgtccttccaactggtcggtttcctcctgacctaccttctccatactacgcatgcagcgaagaacggaagt

SEQ ID NO: 1252 - DNA, 852 bp, Aspergillus oryzae
aattcggcacgagggcaacatttgagaaagcgaataccactggaggcggtatttatgagacaaaagagcaggcgcttatgcaccttggatatacggataatggccatatgactacttattaccctgattcgccatccataacgaaagatgaaatcacagctatcggcgacctcatggaaaaaaaagggttaccattggaaaatacaagacttaagaagttgtcatccggtgactttgaattactaattgcctcgggtgttgcttctccccctgtaaggacagagatcttggtgaagtcgacgctttggacctggatggcaacctgacagggaagaagctgcgcctggtttttggcgatcatatagaggaaatggcaaaaatcgcccattcgattaagcaagcggggctcaatgcagcaaacgacaaccagaaacggatgttagatgcgtatgccttgtcgtttggtgccggttcaattgaagcgttcaaagaaagtcagcggatctgggtgaaggatcaaaagccgagtctggagaccaatatagggtttgtagagacttatagagacccgcatggagtgcgaggagaatgggaaggcttcgttgctttggttaacctagagcgtacccgagcattcggaaagcttgtggatagtgcagagagcatgattcccaagcttccatggggcgaagactttgaaaaggacaagttttcttagcccagatttcacttcgttggaagtctttgagctttcaatcttccggcatacctgctggcatcaatctcccaaattaatgacgatatccgtcaaaatctaggttcaagaacgtttctcttggaatgtgcttagcg

SEQ ID NO: 1253 - DNA, 706 bp, Aspergillus oryzae
  modified_base (456)..(456): n is a, c, g, or t
ttttaaccctcggatcatggtggcagccgctggacacaatgtcgcaaccctatsaktcgaacgatcgttatcatgcaaccgctcctggtgctgccgctagctaccatcacgcatctcactccagtagtgacctaggtgacggcgataatgtcccccgtccccgccgttcttctccgccgtccttcctgaactccttatccaatcctttgcgtgcccttcgcgaatctggagcacgactcgccgctcgtctcggtcgtccaacagatgggggagatgctcttgatgcagccggtcaccccgaacagtacggggcgatggaggatgtacgcttgctcgacatgatgccggacgggcgagtcccccgggactcataccagtcgaagctgcagaatactttggtctcggaagctcggtttctagtccggaaattgggcgtcggtgggaagcttccagggnatgccgacgtaccggacgagcgggatgtcaatcgtggtgtcttttcctaccttctgcagcatcaaatggatcagggtcatcatcgaaatgttagtcaaaccagcatatccacggtcgcatcccaagacgaaccttccccatcgggctccaataataagaagcgtcgcaagcaaaagtggtatgaggatgaggagggagatcggtccaagggcaaacgacccatgaaacagattcgattgaccaaacatat

SEQ ID NO: 1254 - DNA, 649 bp, Aspergillus oryzae
agaagcatggcgagcatagcaaactttgtcgtsttcacccgccgctcaagtbatcctagtttgggatgggaggataatcccccaaacactcctgtgtacacttacgttgcttctgccatcaatatcgccctttctatcctggaaagccctcatggacgccattatcttacccaacttgctctgataattgaccacsagatggatgaaaactcccacttccagggcaataaagatatcgcaaagcactgggttgatgtctttctagccaaggtgcgggcacagtttcccgtagtcatcgtggactttacaatgaacaacccgaacgagcttggatgccatccacgggggggatggatgggacacttgaaagacttcgatccgagaagccacatgatatgtatcaatggacagaggacggctgatatggtcgcctcagcctgcgggcaggacggccaaaacttccggaatttccagtttctcttcgccaccatgtttacgcatgaagtaggcgctcaccttctagtgacgttcctccgcaatggccgtgtgaatacaccccctactatcaccgttcaaggatacggttctcgtacggtaggggagtycggcaggttccttgaggcctatctctttggaggtacaactgagt

SEQ ID NO: 1255 - DNA, 872 bp, Aspergillus oryzae
aattcggcacgaggcatgttacactgccttcccgcttgccctgaatatcggcacggatatcgttcatctcccccggatcacgcgccttatccaccgccgcgactacctgacacgcttcacgcggcgcatcctcaacgatcacgaacagcatgacttccgcactcgctttgccctgcttggggccacgaacccgccgaacgaacgtcccctcccgagtgctacggagatggcccgctggctggccggtcgcttcgccgccaaggaagccgcacgcaaggccgcgccgaaacggagcggcgagcctgggggtggaaggatgtgatggtgcgagtcagcgagacagacagaggcagaccggaagtggtctatatggacggagagacggcccgcattgggaagctgtccatctcgcacgacggggactacgttgttgctacggttttggcggccggatgaggtcgatctctggggcgctcaattacagtacattctgtccgagagatcgcagtttggactagatgggatactagcttcgttcaaggggttcagactgcttgtcagatcggtggctacgcgtctcgtctactggcagcagggttgggcattgggactgaggacgaggtgccggtgcgtccatacgtggagtgctcgttgcgacacacccagcgacagtccagcagttcgctaggaagaatttcttcgaggttggcgagatgcttcagtcagagcaggcgcttggcatatctgcagcccgcatgtgtgctttgggcgggaatcgagccgaggtacattcctaccagggaacgacattacgacgtcttgtatggactgattagcagttcaacagagaacacaacaattcaacggggagg

SEQ ID NO: 1256 - DNA, 610 bp, Aspergillus oryzae
caaagctccccgagactgacttgattcactttgacaacgatgtcagttatactccgaagactcgtccacaatgaggcgatcgcgagaggaccccaaggagatttatggatggagggtgtacatgctcgcgctgttccgcctgctttggcggcatgcttttcggaatggagcccggyatcataggasgtgtccttacgatggatcctttccaagtgaaatatgggttaaagaaccttggcgatataggagaggccaatctctccgctaatattgtatccacattacaggcagggtgcttctttggcgccctcatcgcctccccagtagcagacaaatggggtcgaaagacgggttsatatccgcatcsttaattgctatcgttggcgttatcatgcaagtggcagcaagcgggcacctggaagctatgtacatcggacgtctaatcaacggtttcggtgtcggcttcgcttcgatgatcaatcctctctatgtctctgaaaacgccccaagagccatccgtggtggtctaacaggcctctaccaactgttcatcacaatgggaattatgctcgccttctggatcaactacggctcttccctccacaccccc

SEQ ID NO: 1257 - DNA, 795 bp, Aspergillus oryzae
  modified_base (535)..(535): n is a, c, g, or t
aattcggcacgaggcttgccgtctttattacctgcaagacgggtcattctttagcatagatcgtcgcgcctgtgggccgtctttctttcgtcagaaccactgtcattgtcccgccttatttagacgctcgcccgtctcaacmactctctttgagaaatctgattgcgcctcgcattcgtttcttgcagagctgctttcgctggtcgcattgacctgttcaggcaccatgtatttcaactacgctgcagctacactagctgcactactcccactatgctcagcccagacctactcggcatgcaaccctcttaaggaatctggttgcaagcccaacccgggtatgggttccaacttcaattcggacttcaccaccggcgatggagctctcggcggctggacaactaccgccggcaaggtcactactggtggccagggcgctgagtttactctggccaagaaaggcgatgcgcccacaattgacaccagcaattacttcctgtttggtaaggtcgaggttgtcatgaaggctgcgcgngaaccgtattgtcagcagcattgtcctagagtcggacgccctcgatgaggttgactgggaagccctcggtggtgacacactcaaattcagaccaattacttcggcaagggcgaactcgtctatgaccgtgcacttttgtgaacatggcttctccacaggctgattaccatacgtacaccatcgactggacaggaccagaccacctggtcgttgacggcaatgtcgtgcgtactctcaactacaacgacgccaaggggtgg

SEQ ID NO: 1258 - DNA, 257 bp, Aspergillus oryzae
aattcggcasaggggattcatttgttccccctaagaagagagaaaaaatcgtttgcagccaaagagacccgagtgacatcattttgagtccccgcccgaccctttggttaccggtcgttggaccgaatcaattccatccgatctgcacttctgatctcatttyctccggattatcgccagcaacttcttcccagttcccacgtctcctcccgacccaacaatcgcctttcttaagctttccaaattcttgttgcggg

SEQ ID NO: 1259 - DNA, 954 bp, Aspergillus oryzae
aattcggcacgaggcggactacgatcatatcgaggttggccgcgctcgaaacgtgagaggaagaacctcatccctaccaaccataatggactgtttgactctcgcgtgatgtcacggaatcatgcaacgttgcgtgtatgtttaaacaacaagacagtctatctcagtgacggcaactctatgcacggcacctgggtgaacggggaaaagatacgcgctggcgaggacactattgttaggagcsgcgatgaggtggtttttggaacasaggttgtycgyggccatgagacttttcctccacttaaagttcgctgtgaacaccagtggatagattctggtgacgaggttgtgttggatgtcagcaacaaccaccaaccaaagcgggcaactaatacgttctgcgttcccgacgatgacgacgattatggcaatgaagtgatttacgattcaatcccagccccagtagtgacggctgttgaaagtagctctgagtcagcagactcagatcctggcttggattcggacgacgactcagtcatggagatttcctccccaattacttccccgcctaaaggtggtgacatcgtcggatcacagcaaagtccgattgatatcgacagagagcaagctgaacagcctcttgcaaccccaagaatgactccaccctcagctgttgatgtcgcagaggagaccagcaacaaggttcaagaacaaacctcctatattcttcataacccggaaagtacaatagttctggattctggagaacagtcagttgccgaacctagtgactgggagagtgaagatgacgaccaacctggttccatggatgactcaatgtccgagtcacagtcggcatatgatgaggaagaatctgaccccgagaggttttccgtgagattaagctctgctccatacatggatatcagtcagggcatacaagaagacacggct

SEQ ID NO: 1260 - DNA, 935 bp, Aspergillus oryzae
aattcggcacgagggttcctattaactttcaaatccaaccccctccccaactacccaccatggcaatcaaagccgcccaaaacaaccaagccatctacttccgcaacctccacaccccaggccacccaattctcctcaccaacgtatacgacccagccacagcctctttaatcgcaaaccacccctccacaaaagcaatcgcgacggccagctacgccatcgcagcctcccaaggcatccctgatgacgccctaacactaccccaaaacctagccgccgttcgctccatagcagctaccctaaaacccaacaacccctcaggaaataaagtctcagatgaagttgcaacaaagcttcccctaacagtcgacatccaggacggctacgcagacgtggccgaaacgatcagggaaatcatcaatctgggcgcagtgggatgcaaccttgaagatctagacggtactacgggacagttacggcctttggcggaggccgtggcgcggattgaactggcggttcggactgctgcggactcgsgtgttcctgattttgtggtcaatgcgaggacggatgtcttggggctaaccccggtggcaaacctggaagtatccaggatgcgattgagagggggagggcctttttgagggctggggcttgtactgtgtttgtttggggtggagcgggtggaaggggagtgtcgagggaggagattaaggagttggttggggcttttcaggggaaattgaatgtgaagttggtgctgcgagatgggtttttgactgtaccagaggtgaaggagctgggggttgcgaggattagtttggggccagagctgtatcgagctgcgatgagtgggtttatggagaaggctgatgcgggtgttggcttcttatagttgagtactttatgacagatgttggtttagtgcagaatct

SEQ ID NO: 1261 - DNA, 617 bp, Aspergillus oryzae
aattcggcacgaggggaactcgcatacataataattgtattgttcctccatctagcgamgagcaggtatcatgcttaccagacaatccctcgtggccctacttgggggtctatctctcgccgccgctcagacatcctccgagcagaacccctcattagaggagatccaggcggcccaggctaccgttctgcctcattctcccgtctctaatgtcaagggccttgccttcaaccgttttgtgaatatctggttggaaaacacggactatgagtctgctgmaaatgatcctcatctttccaagctggccgagaagggtctccttctcactaactactgggcaatcacacatccttcggagcccaactactgcgcttctgctggaggtgataccttcggtatggataatgataacttcaaccaagttcctgccaatgtgtccaccattgccgatatgttcgacgtgaaaaacatcgcctggggcgagtaccaggagcacttgccttatcccggttaccagggcaaaaactactctaaccaagaaacgggcgccaatgactacgtccggaaacataatcccatggtcttctacgactctgttaccaaggatgctacccgtc

SEQ ID NO: 1262 - DNA, 764 bp, Aspergillus oryzae
  modified_base (86)..(86): n is a, c, g, or t
aattcggcacgagggtcactacccaccagccaacgtcccagcatagatgcttggatggccaataaggctggctcaccggcagkaanctgatctcacctgtcacatttcaattcttccgtaaatacttacaaccaccgaccagtagcatgtatgtttcaaatacatacatgcccattcactcctttgttacaatctgcctctttttatttttccttttttgcttatttcctttgttgtgacggcttccctttgtttttaacggtcattcagttttcccatgcacaaagaaaacacaaagaatgatcatttctggcgttcgagtccacaaggttggacacatgatcggataagcaggcgtacaggtaacaggtacaggatcagtatccacggaattcacaaggtatggcgtgggtcagggtttcataggaggggtgcgtggttatgttatggttatgcttttcctttgttcgaatttccttttgtctcgtctggcctgagtttcagtttcagtttcatcaatattccccttcgtctgtatcatattatatcccccctttttgttattcccctggcgttttcatttccatcaaagttcgagtccattttcatcttttcctatcgaaagctccggagacggtctttcggatgtgatgctttggctttggcttttacgcgatcaaattactagatcgattgttttgctttgcgcttcgttcaatgagtggttatgagttatacaagaaaactttaggttatgcgtgaga

SEQ ID NO: 1263 - DNA, 535 bp, Aspergillus oryzae
aattcggcacgaggagaagcgaccgagcaggccataaaaagagacaatctcttttcaaacacaactgtcatgcacgtattattagagaatgtcggcgaactacggagggagattgcggagtacctccgggctcgctggagcaagcagctgaacgttgacagaacggcgagtacattgacactcttgaataataatgggcatccattggaagaaactatcgcggctctggtccaccttgatatgctcgccttgtgcaaggataagttcgagaaggacttaattgctacccttttcgagcctatcttattacccgcaattgaaggacaaagctgtgacgtccaggttggagactcatcaatccgagtagaatcccagccatcgaaggcatcagtgcctgatgttttagaccgcctctccacagtcttgggcttcctacgccaacacgttccagcaacaatctcggactcattttcgagttcactcattccgacactctcgtcgaaggtcatatcgtgctggctatcttcctccatac

SEQ ID NO: 1264 - DNA, 613 bp, Aspergillus oryzae
aattcggaacgaggttctctcttccttcgccacatattaccttggttatatattctcttctccccttacatattcactcattttcctcacctaaactcaaaggatgccgcctaaaaagagcacgtccaaagcttctgcgaascatccaaaagcaccacaaatacaaataaggcttctgccacaaaaactgcagcaaaggaacggcctgcgaaagctagcgcatccaagtctaaaggcggcgatgcgcgcacaaagactactaaagctgcgcgcacaacagcccccaaacgtaaagctgaagctgttgaggagcctattcgcgaaatcaaaaaggcacgcgttgtcgaacctcgtgttacaaagcaaaagccgaaagtggttatcaaccatgccccgacgactcgacttaatgtttacgtttgtggtgaaggcagctcaggtgaacttggccttggaccggaaaggaatgccgtcgatgtaaagcggccacgtcttaatccttacctgtcagcagataaggttggtgtagtgcaggtcgctgttggtggtatgcattgcgtcgctctcacccatgataacaagatccttacctggggtgtgaatgaccaaggtg

SEQ ID NO: 1265 - DNA, 558 bp, Aspergillus oryzae
aattcggcacgaggtctatcacttatcgcaatcatgaaaccagcaaccgaccgcccattcgaggcttccaggtacgcatggcggaccgacacagatggcctcaccgcttccgaccccgccgctgaggctcgttttgaaaacgcaaaagaaagttacaaaaaaagccctccaagcgttcgaatcagcggataagaaagcccggaaccgttatcacaaacatgaagaagacgatgcttttggagaatgggcaatgcaatatgatcctgtttggtgttccctcaaggcggaggcgcaatcacagtgtgcagctttgtgtgacgccggttgggcggccttcggacaagcctatctggagaaaagcgaacagggaatgtcgaaagtgactcaagatgcacgctatgcgggttttgagccagagatcttctgagataagccatgggtttcatccgaattgagtattggagctacaattgagattatatctatacctatcaaggctatccggcgcctgaccctgttagtttcagtagctatctaatgactatctgtttttgatcc

SEQ ID NO: 1266 - DNA, 431 bp, Aspergillus oryzae
aattcggcacgagggtcgtggccaactggatcaccaccctgcccatcacattcgatgaggaggccgctccatatgcctactcattcctggctcaactcattgaccagcaaaaccccactgtcttgtccaacgtcgacaaggtgttcggatacattgtccaggctctcgaggcagagacattgcaaggacagacggccgcccgggtggccaactcggcgaasagttggtggctaccactggactcaacgcagaccagatcctggctggtgtgaacccggacaaccaggcggcggtgcggagttatttccagtagattgcgatgattgcaaggaatgtmtatgatatggattttgtcgatttactttttacgagcctatagcgtctacggactttagggatgtcattaaatgagattattgcagatacacact

SEQ ID NO: 1267 - DNA, 705 bp, Aspergillus oryzae
aattcggcacgaggatcctataccaatccgaatcaacgacctaacttgtcgcatggtcgcatgactgctgacggataatttattttttatcaatcctacgcgctggacccgcgccatccgctcatctctgtcaccagtggctatcgcgcccaacgaatcgccactcttcctcaaacgctatcgaccattgacggttcattccattagaaatggccaccgactacagcaagaagaccaatgccgagctagtggagattctgaagtctcgctccttgcctcacactggcaagaaggcggagatggttgcccgcctccaggaggatgacaacaacaaggctcagactgcagcgccggccgcaaaagccgataacgcagaggatgtgattgactgggaggatgacgatgtccctgctgcagatgctgccgcagcgaascatcgaccgaggctggtgccgccgcgatcgctgctggcggccagggcgctgtatctaacccgactgaagttccgaaccagcagcacsacaccaatcccgctaccacagacgatcttacggtagaatccaatggggatgctgcccccactgcacaagggggaacggaagcagcacctgccgaggccgctgagacgactgaggcagctccagctgaggagaagcgcgcgatatcatggccttccgttacgacatggagaggattgagaagcgt

SEQ ID NO: 1268 - DNA, 817 bp, Aspergillus oryzae
cccgcgaatccgagggcttaatccgaagcttcctttgtgacgcagagcaccgtgttggcaacgacggcggccaattcggtggtgccacacaaatcaagaaccatccgttcttccgtggtgttgtttgggagcagcttcgcaatattcgtgctccattcgaacctcgattgagctccaatattgacgtgtcatacttccctattgacgaaattcctcaggaagataccagtgctatccatcgtgctcaggcccgtgccatgcccgaggaacaggaggctgaaatgagccttccgtttatcggatacacatacaaggcattcaatgccttccagaacaactgagaatcgcactgatactcgagatgatcgatgtatgcaggatgagcgcctcggaaagccggtccgcgggcaggcttgcgcggaagtatttccagcggctcatctaagatctattctcgaaatatctttgttcatttgatttcatctagcgtctagcgcatttggcatttcatgtcattgataacgacctgtgcatcttccttactgtgtttgcatgtcgcaagacgacccccggctagttgcacaccgtgtctagccttaaagaactacaaacaagtgcattatttggttggaagttcagagcctgtgacacctacaagtgcggatcacgaatgactggctacttttgtttcctctagcatgatgcatcaatgcatttatcaggaaaaatacccaaagtacaacgttgtaccttttacatctcagactagtttgcatataaaatggttggtggtaatcccattaaatggactcggtaa

SEQ ID NO: 1269 - DNA, 766 bp, Aspergillus oryzae
aattcggccgagggaaggtttacgccgactacttgaagaaccacgatgctgccaataagaaacttcacaccctgcagaagaacccgaaagtggctatttggctcaaagaatgtcgggactgggcatcggatmtcacaacagcatgggatctagattcgttgctcgtcaagccagtacagcggatcttgaaatatccgctcctcttaagtgaactccttgaatcaacacctcaggatcatccagaccgtsctcgcgctcattaatgcacttgaagaggttacgaacatctctgttcgtataaacgagctgaagaaacgtgcasatgtcgtggggcaagtggttggccgaaagagaaaagagtctgatgttagggcaggcttgtcaaaggcatttggacgtcgcacagagaagttsaagcaacaggttggcatatccgatctggtcgaagaaaggaatacgatgctctgtctcagaggttcggagacaatttctttcaattgcaagttgtcatgcgggatgcggaggggtatacgcgtcacccacacggatccatagactgcttgggcgaaatcaccagcgctatagaagagtttatcaaagtcgccgccaactgcttaccatgaaattgaaggcaaatgcgatgagctgagggcggttgttcaaggtgtattgacagaggcactacccaaccatatcgctgtcgttcgtaagagcgtcattgacccaatggtcacattgcttaaacttcatgatggacacagagagt

SEQ ID NO: 1270 - DNA, 774 bp, Aspergillus oryzae
aattcggcacgagggaatgccaacacgttccgccagcaatttaacctcgaacccaacgacacttggaccgagatctcagagaacgtgcttctgctgcgccagaacaacgtaaccctcgagtacacttccatgaatggtacggccgtggtcaaacaggcggatgtcgtcctagtcacctacccactggcctacgagagcaactacacagccgaaatggctctttccgacctcgaatactacgcaaacaagcaatccgccgacggccccgcaatgacctgggccatcttctccatcgtagcgagcgacgtctccccatccggctgttcagcctggacctaccaccaatactcctacgatccctacaccagaggtcccttcttccagctgtctgaacaaatgctcgacaacgccagcatcaacggcggcacccaccccgcctacccattcctcacgggccacggcggcgccaaccaagtcgtgctattcggatacctcggcctgcgtctchtccccgaagaaggaatctacatmrmccccaacctacccccacaaatcccctacgtcaaataccgaaccttctactggcgcggctggcccatcgccgccgaatccaactacacccacaccaccatccgccgcgacacaaagaccgcccccctctccacccccgacgaacgcttccgmaacgccacaatccccgtgcacgtcggcagcgacgaagcggaaacccacaccctccaaccaaccggaagtcccctgatcattgagaaccgg

SEQ ID NO: 1271 - DNA, 848 bp, Aspergillus oryzae
tgtgcccctgcgcatcgagttcggccccggtgagtctgtcggccaattcgtcactgccgcccgtcgtgacatccccggcaaggacggcaagtccagcatccagatttccgaactctccaccgcagtccccgccctactcgagcagatccagaaggatctctacagccgcgcagaggagaccttccgcactcaccgcaagctgatcaccaactgggacgacttcaccccagccctcaacgacaagaacatctgtgtcatcccccactgtctcaccgaggaatgtgaggaccagatcaaggacatgagcgcccgcaaggcagaggaagactccggtgtccctgaagacgctaaagcccccagcatgggtgccaagtctctgtgtatccccttcgaacagcccgagggcatcgttgccggcgagaccaagtgtgtcaaccccaagtgcacccggcttgccgagaaatggtgcatgttcggccgctcctactaagcgcaatagatcatatcggtcttatctgcacaaatgtcaaatagcacctagcaagcgcattagatcagtcactatgagtttgatgacttatttcctttcaattcctttttcaaaattccaagtatctttttgttgtattgtctggcaaattgggacatcattgaagtaagaaagaaagacctaagaaaagagagaaagagacgtgcatatctcatgagagtttaggagcgggtgtggttaaaaattaaagatacctttgtgatttacagggggacgggggcggtgaacttacatatcatacagtggttttaagatattgaatgacttacgagttgatgtgattttgatcttctcgtta

SEQ ID NO: 1272 - DNA, 379 bp, Aspergillus oryzae
  modified_base (129)..(129): n is a, c, g, or t
aattcggcacgaggatccgcaacacctcccttccacagcgtacccgtgcccaggctcagttgcagctttcccagatgcacgcctacacccggcccactcagatcawkaaycgctgtgtggcgggtgganwtkctcgaagtgtgattcgcgacttcagaattgctagataccaattccgtcaacaggcactggctggtgaactacccggtgtgaagaaagccagttggtagtgtgtccatatactgcggattgtttttattatgttcatggctactgggtcagccgatttgcacgagggcgtttaattccatacttttttttttcttcgagaaagatgtacaatatatcaactgccgggtttcaatagacgatatgtgtt

SEQ ID NO: 1273 - DNA, 762 bp, Aspergillus oryzae
  modified_base (271)..(271): n is a, c, g, or t
atgcggtgaacggtgtctgaaacttatacgggttgatatccatgcatataccgaatgaagtggcgacattggtgctgggagaattctgctcttgcgaatttctaaagaaacgtcttgcgatagttgtgcagaacyyccccgttctcgtcgaccaccagaagagagttgtagtacgtctcctgctggctattcgaaccatctgcttggcttgtccccgcttcctcgacttcaggatacccaacgcacactttacattggtagcgtctagcgntgtcccgtgcccaagtggctgatgggcccttccccgcggactccagatatggcttgatagcctccagcgaagggaagttataaccttttcatagaacatcaacatcgacatccataaagaaagattaacacaaaacataccagtcaaagctaactcaggcaatatcagaatctccggtttcaaaacgtcgacaccaatccctacacctcctagcactttgccattctgcagcaattcattggcccgtctgatgttgccttctacatcccccagtatcggggcaaactgtaaggtggcaatcctcatttccctgtgctgctggtcgtctatacgcagaacagggaatggtgcggaatggtactttgacgggcgtctcctttgggtactaaaagcagcggaatgaatcgcagagagcggatggtgaatacaaacggccgaacctgttggccgaaaccagtaaggagagaatatatttgctttggaacagcaat

SEQ ID NO: 1274 - DNA, 879 bp, Aspergillus oryzae
cgataaggtgttcaagcaggttgttgacgctgcggatgttgtgctgtatgtgcttgatgctcgcgatccggaggcacccggtccaaggatgtggagcgtgagattatggcggcggctggtggaaacaagagaatgatcctcatcctcaacaagatcgatcttatccctccgccggtgctgaagaactggctggtccacttgcgccgatacttccccaccctgcccttgaaggcttctaatggcaccgccaacgctcacagcttcgaccacaagcagttgaccgtcaagggtacatcagagacgcttttcaaggctctcaagtcctacgcgcacagcaagaacctgaagcggtccatctccgtcggtgtgatcggttaccccaacgtcggaaagtcctctgtcatcaatgccctcactgcccgtctcaacaagggctccagcaacgcatgccccaccggtgccgaggccggtgtcaccactaacctgcgggaggtgaagctggacaacaagcttaagctgatcgactcccccggtatcgtgttccctaatgctgagaagaagaagtccaagaagaagcaggtggaggagcgtgcgcgcctcgtcctcctgaacgccatccccccgaaacagatcgaggacccggtcccggccgtgtccctgctcctcaagcgtctgtccacttccgaggacctcaagtcgaagctgttgcaactatatggcatccccgctcttttcaacgctggcgaccagactcacgacttcctgattcacgttgcccgcaaacgcggtcgtctgggtaagcacggtgtgcccaacatcgaggccgcagccatgaccgtgatcaatgactggagggacggacggatccaaggatgggtc

SEQ ID NO: 1275 - DNA, 513 bp, Aspergillus oryzae
aattcggcacgaggggcgcatcaaagtcgacaacggcgtcaccttgttccgcgtggaggtcaaagatctccatggcaactgggttgaacggacaatccgtttggatgatcacattggcaacactgatggtaatccaccatactcctccccagtgcctagatatacacacaatacatagatggctcacacaaaggatgcacaggctggttcatctggggcggaaagaacttcacccaatccgccagggatatccgcttggaggatactgagtggggtcccaagctggtcgccgtgatgcgctcgaacgacggtggcgaccgtggtttacagggaatgttgttgggcgataagatcgagaacaggaacggagagcttcacttcaccggtccttgattgatgtggcagggctgtcatcgatccatgaggaaattttgattcttgtgaatgttatatcttgaaatacatatgataacccttttttttttcatctccttttcttctccaaagttttcg

SEQ ID NO: 1276 - DNA, 532 bp, Aspergillus oryzae
atgttctgctggctctaccaaagcgagaataatatcacttgaatagggggcgaaaataccactctcgcgtgttctttttaacacgccgcctcctacttactccacatcatgacattcccactgacttattccattctttccttgattccggtcaacgtctcttgaacttacgccggcgggttccacagcmaattgaaagtcgttctacggcctttccgcgcggaacgttaaggacgttccccacgaactgttccattcgatttgccccccagtggttcggtggttcctattcaggagagagccgttaaaaaaattaaaataaaaaaaagagaaaaaagaaaatctcgcagattggccaccggggtctagtggccttatatctgcctagaacgcgctctggtgtctttcacacccaaccctatgtccccatccgagcggcattgatataccacactgtggcctgccaccaatcaaggctacaacattgaatgctgggagagacaatagtccttacaagtcaccgcgtctgatt

SEQ ID NO: 1277 - DNA, 677 bp, Aspergillus oryzae
  modified_base (225)..(225): n is a, c, g, or t
  modified_base (261)..(261): n is a, c, g, or t
aattcggcacgagggtgtgaactccaacgacttggtcgcatggaaatccgcacctgtacaattgcccctcacatcccaactgactcatctgtacatctataaaataacccattttagtcgcgcaagacttgtcatcaccatgccaccgaagacaggaggaggtcgcaaggtaatcgccgcatcgcgagcaaaggcggacggtgccggaaaagaaagcgcastgcnaaaagggtccccttcgactcgaggacgcaagtcgcntggaggtgccagagcggggaagcgaccggctggtgcatcgaggaaatcagatgtccaacctggcgatcctacccctcagggccgccatcgccgttacagaccgggcactgttgccctcaaagaaatccgcaaataccaacgttcttatgacctccttatacgaaagctcccattcgcaagacttgtkcgcgaagttgcattggatctactccccgcagatgtaggatccgaattgcgctggcagtcgcaagccatcatggcgctgcaggaggccgcggaagcctttcttgttcatctattcgaggacacgaacctgtgtgctctacacgcgaagaggtggactatcatgcagaaagatatccagcttgctcggagaatccgtggcgcttggggtggataggctgacgcgcatttgt

SEQ ID NO: 1278 - DNA, 385 bp, Aspergillus oryzae
aattcggcacgagggttccatataggttcccagtctatcctatttcttgcttgtdtgcgattgattgtdttattcaggcgtgggctagggatgatttgctatggtgttcttgtttttctggcctgcgtatcggcgttgcttgtcctttgtagcttttgcaggcagcttcttcctattttccattctgttatcttatgatttacccggtttatgagggctaggaacgggctcgatgtcattttcagtttggtcatcagggcatatgcgctttaccgggccactcatggaccaggatgacttatgtttgtgatgtattctccgtgggttatctagaacattactgatacagttttgatatgagttgtcaactaaaaattttttcccc

SEQ ID NO: 1279 - DNA, 781 bp, Aspergillus oryzae
tcaacaaagcggaactcatttctgggctcatcatagaacggtccctccaacaaggtccctgcgatatcgatgtacggctaatggttgaaaagtgagaatgaatccaatatttacgtctctccacccgtggcaataccgcgcaaggtgtttaaattcctacctcagtgaccgtccatttctggaacgctgacatgatgataatccgattaagaaaactaattagcccaggaggccgtgcttttgatttcggtaactgaacggtaccacactgaaggcgctgaatctggacccggggcaagaaaacgagccgacagtaaccaaagatagatggctactatcaataacctcgtgggaacgtgggctgtccgggctgtgcgttgtgaccggtgagaaggccaaaaggggatgagggtcgattcaatagtctgaccagattctttgagggactaacttatccagtgtcgtggccgtgggcgccaagacattcaccccacatgactgatcgatgggaattcttactctcactaaggtcagctccgtttctgatacgcataaatcatcctatcagcgggtcgcccccggsagccctagtattggtgccaatggtactactacgggtccatgacgctggatttcatacaccgctttcctcggcatagtgtccgatgacgaggtttgtttactctcaagcgaaagtacctttttacgaactagtcccagaaattgctccttcaggagttggtggctcttttcagtatatggtaaggtatcactgacgcat

SEQ ID NO: 1280 - DNA, 660 bp, Aspergillus oryzae
  modified_base (298)..(298): n is a, c, g, or t
agcaaatcaatctgttgcccatacacccaggaaaaatccaagagaacacaatacccactctttagaatggccgaagtagtgcaatctggccctgttgaagcacaggcccgccatgttgtctattgcggggtttgcacactgcctccggagtactgtgagtttggtgggacagcgaagaaatgcgaagaatggctgaaagagaaacaaccggaactgtaccaacgactccactctgaagaagccatcacgcgctaatttatcgacactttctatatctgcccaggacgcgtgcagcganaggacgctgctaagaaggaggcaaaagctgctctggcagaagcacgcgacgcagagcgcaaggcagcctccwaggttcaaatcaaacgtgttgaacggaacaaacgcaagcacgtcacagtmatcgcaggcttggaagtatatggtttagaaaataagaaggttgccaaggagcttggcaagaaatttgcaactggttcttcagtgacacgatctgctgcgggaaatgaagaaattacagtacaaggtgacgtgagcgatgatgtccaggactggttattggaggtctatgggaaggaaataccagaagcgaatattgaaatcattgaggacaagaaaaagaagggaagcagttagccacga

SEQ ID NO: 1281 - DNA, 843 bp, Aspergillus oryzae
tcttttactgctacattaatatcagtgatttcttatttaaaaacaggtacaccagagcatcccgtctcctttacactcagcgactgttatcactttccccgcaatatcaacagtcccccgcttttggtaataaacaggggtacaacttttatctcaggctctatcgatatcatgtcgggtaccactcatgaccctcgccttctctacagcgtcaacaacataactgctttccatatccagaatggcgaagaaaccgagctcactccatcggggcctcaaaccctttcccttctaatggttccgacaagtgcttctacacctcaaagctctcacgatgcaccagcagaagaagatttctatcttctatcttaatctccctccagagctagatctggcacttcccgcctctacacagatctatcaccmgccgccaaacagctatttgatcccccgctgggatttgggtccagatgcaggcgcgttcattcgcatacaatttccggctattgggagcggccctgataaggtatctcaggaagatgtggatacttttgagaccattctagcacaatgtaccgcatttctggagcgtgcagccccaccgaaagaacatgctccgtacaacccagcagactttgcgccaggtgcaggttatgtctcgtctacgagccctgatcagaaggaccctcatggacggatagtgctcgttgatgaagaagatggcagtgttgttggtgaaatggaagggtatgatgtggttgagaaacctggcgtgaagcccggctctaagaggcctgtggaggtagaacttcctacagaaggtgaaggtaacaaagtcagcgt

SEQ ID NO: 1282 - DNA, 602 bp, Aspergillus oryzae
gtccccacgaggaacgggagagagaacagcacagtttgttaccaagctaagtgctaagactctaatgccacagtgcctggcgacaacaatttccggcacagttgacatgccaaccacatctgcaccgagtttgtgaagcatgcggcattcggccctggtttcgtaactggtttgcttcagaatacgatgccttgcaatggtacaacctgagtacttacctgggtcctccaacgaaagcatacacaccttcatgcagccttcgctggctttctgcatgcatcacctcaccccaagctgcatgcacgtgacgtctaagttcgaggtcgtaggcatcggacagaggggggaaacgaggaccgaactcttcggcgttcggtcctcggastggatgagtgcctgccaaaccggctaagaaaatatgctaaatgtttatgttaaatggaatctgggggttgggaactagtgaaaggaacaaactcacatcattcaataatacgatgtcgccaaccgcatactctgaattcaacccccccgcagcattagtcactgttaaatatggttattagccaagtcgcatataccaaatgtattcaaacttacac

SEQ ID NO: 1283 - DNA, 810 bp, Aspergillus oryzae
aattcggcacgaggcttcttcaacccgccacccgacctgctccctttgccggtgttcgtatatcattgtctctctatagtccgttcttgagcggcttcttcttgtactagtcatctataatcctatatacgaccatttaatccgattcttgaatacagtccggctagtgagacactgttgcattgcgactaccgcccaggggtcgtccgttcattatcctctcaccaatctcctctgcctgagcccggcactttccgtcgctgataggcgcttctttccgactgactcagcmacctcatatttcaggcaccttttgtgttattcaccatggcggatgatcttgatgcgcgaactgctcgcgcttgcgggtgacgcctcagatgaggaggcgtcttcgccccccaggcagaaggatgcttctccttctgcatcccccccacaatcccctgaagaatcgtcaaccatgggtcgcaaaggaactgctaagcccgtccgtcggggtcgaaagtcacggaaagacgatgaggaagacggagaggtgtccgcggctgaatctcacaactctcttgactcggccagcatggttgaatcggagtcaggctctgattcggaggggtcagacgccggtgctgaagacgacgggcccatctttccttacgacaagctatattattcctccaaggacaaagaagaaatcatggcgatgccagaaattcaacgagagcaaattctctcccgaacgagcgcaacaggttgaccgccacaatcaagatctagccctaaggcgccttttggcttcccgtgagcgcg

SEQ ID NO: 1284 - DNA, 921 bp, Aspergillus oryzae
aattcggcacgaggaagaaattcgccggcttgagcggttgaacggaataggtgttttccccaagacggcatccggacggtcaagcgctgcaagtgccaccgcaatgaccccgccggagatagaccccgaaacccatgattctctggaagaggaagacgtattgcatgatctttcgctgttcaagagccctgtcatcattgtcgccttgactgccagcagtctgcaaagtgaccgacacgaagcattggctgcaggctgcaatgacttcttgaccaagcctgtgcgatttgaatggctggagcagaaggtaacggaatggggatgcatgcaggctctgattgattttgaaggctggcgcaaatggcgagggtatgcaaatgataaccagtcatcagcgacacccacacattcacaattggaaaatggacgtgtgacaaagaaatattctcctgccttgccggattcatctttcccagacacagcatcccagtttttgcatcttcccaaaccttcggatctcttgccagaagactcttctggcggggaagcacctgactctcccgcaagcccattgaccactgtgcctgttgaggagacttcgactcaccacgacgcgtctgcggatgccatctaagttgcaggaaatcacgtctattttgattttaggctctttcggttagccggtttcttttttgtcacaatacacgcatagttgatgttgcatgcgcttgttccgctatttgaggcttctatggatacccagcatagcccttgttgattccttctatagcactgttgttcgctggtttaaagggggcagcttcttcatctttcgtggtgtttacaggttattttcatgtttatatatctaccttcaggggcatgctcaagcacacgatcgagatttctcatgttctaaaa

SEQ ID NO: 1285 - DNA, 826 bp, Aspergillus oryzae
  modified_base (698)..(698): n is a, c, g, or t
aattcggcacgaggacaggtgcttgacctaggcaattattctggggtttttatttttatttaccagagagaactattacatcgttatgaggtcgcttttgtgggcttcgttgctttcgggcgtgttggctgggagggcgcttgtttcgccggatgagttccccgaggatattcagttggaagatctgctggaaggatcccaacagcttgaggacttcgcctatgcctaccccgagcgcaatcgcgtctttggtggtaaagcccacgacgacacggttaactatctctacgaggagctgaagaagactggctactatgatgtctacaagcagcctcaggtgcacctgtggagcaatgccgaccagacgctcaaggtgggcgatgaggaaatcgaggcgaagaccatgacctacagtcccagcgtcgaggtcaccgccgatgtagccgtcgtcaagaacctgggatgcagcgaggcggattacccatccgatgtcgaggcggattacccatccgatgtcgagggcaaggtcgccctgatcaagcgtggagaatgcccgttcggcgacaagtcggttctcgctgccaaagccaaggccgcggcttcgattgtctataacaatgtggccggatccatggcgggcacccttggcgcgcgcagagtgataagggaccgtattcggccatttgtcggtatcagcntggaggatgggccagaagctgatcaagcttgctgaggctggatcggtatctgtggatctgtgggtggatcgccgccctttcgtctgcgcgacaacgttatacgtcgtacggttctcctgcttactatc

SEQ ID NO: 1286 - DNA, 625 bp, Aspergillus oryzae
ggtactttccaactcaattgtaaaaggtaagttcgcggacaagaatgtccctcggccacttcaaaggatcattgttgctgaatcaggggccaatgatggccttggatatccttttctattttttgctatgtatctgctcaaatacacgggcatgggaggcgccgggatatagacggaggcgccgggaaagccatgggactgtggttctacgaaacctgggcttacacagtgatattaagcgttgtatatgggatcactgtcggctgggtttctagagaattgcttcactgggcagaagagaagcgctatgtcgaccgcgagagtttcctcgtctttgctatcgcccttgcactttttattgtgggtacctgcggcatgattggaacagacgaccttctggcttgctttgtagcaggtaatgtttttactcaggatgactggttccgcctcgaaacgatggacgattcactgcaaccaaccattgatatgcttttgaatttggccatctttatgtggttcggtgccgtctgcccatggtcctccttcctgaacaacaatattatcccaatctatcgcttgatcttcttgggagtcctgatccttctcgttcgccggatgccgatca

SEQ ID NO: 1287 - DNA, 854 bp, Aspergillus oryzae
aattcggmacgaggcgaaatgaggagacccactcccgctgcgactgcwgcatctgctgcgcctgccgagcctgccagagcctgccgacagagccggctgccgatgaacccacacagccggagactgagagtgctccgactgtggagtcccaggtggccgacgaagtacagtcgccaaggtggacgagaagcttgaccaggcggaagaaaaggccgaggaagaacagccagaggaacctgcacctcaggccaatggaaccgaggcccagaccagcgaggatgttcaagaacctgtcgccttagctgaatctgaagcctccaagacggaaaagcccgccgccccggagcctacgcctgccccaacaacacagaaggaaaatgtcgctccggcccaagagcctgctgtacccgccagagccgtaccaaagacctgggccaacattgcctccaagtcgggcgctactgctcctgttgtgcctgccattcccgttgctccggctaagcccgcacctgctaccagctccgcccagtcggtccctgctcctgctgctgcggctgccacacctactcctgctactgatagcactcctagccagcctccatccaatgatgggtctggctggcaaactgccggtcacgaccataagaagacccagcctcgtgcgagtgatgaccagaacgttatggcttatatcaaaaacgttactgataaggtcgvtgcaacattgctcaagcagacttgtccgcttggaagctcagcacttcgatgtgagcgtcagaagaactgtgcttttgttgagttcgctgaccctgccggctacgcgctgctgttgctgccaacccgcaccagatcgg

SEQ ID NO: 1288 - DNA, 740 bp, Aspergillus oryzae
  modified_base (148)..(148): n is a, c, g, or t
aattcggcacgaggatgactcaccgaatccctctctattcttcttaaatactcccttctcagtctcaattgcttgtatctcttttcatttcattccatttacttccatccgaatggcytctgtacgtgtggcctcgcggcgactgcsntcgcaaggaagctggtccctgcaattgagtbaccgcttcagcgacgattcgcatctgctgcgacaggcccaaatgtgaagactcaggcaaagacatctctacccaatcccgacccagctgccgattccgcaacaatggccttcgtagaagagcgagcgcccttcatggtccccacctacgttcgccctgcgccgatgatggttaaaggtcaaggatgctacttgtgggatatggagaacaggcggtaccttgatctcacagctggaattgccgtgaactcccttggtcactgtgatcccgaggtcgcacagattattgctgagcaggccgagacactcatccacgcctcgaacctttatcacaatgcatggaccggcgctctcagcaagttgttgatttcgaagacacgggagtctggcgccatgcgcgatgcatcccaggtgttcatttccaactcgggaacagaggcgaacgaggcggccatcaagttcgctcgtaaggtcggcagtctcttgacccatcgggcgcaaagcatgaatttgtttccttccacaactccttccacggtcgcacgatgggcgctctctccgct

SEQ ID NO: 1289 - DNA, 746 bp, Aspergillus oryzae
aattccgcacgagggctgcctttctagcctctctacctctacgcaaacccctcgtcttctttagtcacctttcttttcttctttccttcctcctctcttctattaccttttccatcttccctttgtgtaggagtgttctgagcgtatccctgtcacatcagaatcccgtagttttatacactctcaaactatcacttttcttttcttctcttctttattgcccgttgcttagacttatctctcaataatgagttcgggcattccaccatggcgtgtttctgcgtcaccaccgcaactgctcaaacatatcccacgcatgcgaccccagcgtacatccccgttcaagcacgccgtagccttgcccatacagccgtggcgagtcccaccccaaccccagcgtcgcagccgtcggatgccgaagccgctcgcaaacgagtagaatggccagccccagttcgcttgtatgtacaacgaatttktgctccggaacatcaaatgtcctcagttagcagagaggaaatggaatcgaagttaaaggccgtcattactgaggctgcagaraataacaagctggataagattgactgggcaagcctgccattaccccaggtcatggtccagaacgagcgcmamcggaatcctggccagccccaatgtgccggcttggagcgctgttgctactcagaagtatgagagctcctccgacgcctcgtcgaggaaaargaagtcggttgagtccaacgggg

SEQ ID NO: 1290 - DNA, 928 bp, Aspergillus oryzae
aattcggcacgaggggaagttatttgtcccgtgcaacacgcgagcctgttaactttgtcgctgccctcgacgctgcatggtcagatggcatagtaaatgacaagacggtctggatcgatatcgggccgcacccggtctgtacctcgttcgccaaaaatcattatgccaagggggcaacgcaagcctttgcatccctccgccgtggcgacgatacgctgtctacatttacaggaactcttgcagcactacactgcctgggtcatgctgttgcatggaatgagtattttgatctcagggagaatcccgctcgcctgcttcacctcgactcgtaccaatggaactacaagaattactggattcagtacgaggggtcgtggacgttagacaaagccaatgctggacaacgcaacaaggacaacagttcaacccccgtttcggctttcttcacctcttctgtacaacagatcatttcagaggaatatggcgagtccatgggagagatgaggggactaaccaacttgcatcatcccgacctacggggagcagcagatgggcataagctaaatgggaggagtgttgtaactggaagtatttgggccgatatcactctcaccgttggtgaacacttgtacaagcaaatggtaccaaaccccggtacacaccacacatggacgtgaaaaatatggaagtactcgaagcccaggtactgcacccagaggcatcacaagggtcggccccggcacaatatattcaaatcgaaggagtcttggatatgtcgcaaaagcaaacaacagtacggctatacacagcaagcccaaacgggactcgtaataccgacaaggcgtttgccacggcaactgtctgctacgaagacgcgcagacctggcaagaacagtggcagatgacttcacatctggttgctgcacga

SEQ ID NO: 1291 - DNA, 712 bp, Aspergillus oryzae
aattcggcacgaggcttcaacctcacattctgcatccttcaatctctttctcatccactcacatctctcccgtcaaaatgtctctcctccgtaacgtcaagggtcttgctccccttctcgaccgcgtcctggtccagcgcatcaagcccgagaccaagaccgcctccggtatcttcctccccgagagcagcgtcaaggagcagaacgaggccaaggtcctcgccgttggccctggtgccgtcgacaagaacggttctcgccttcccatgagcgttgctcccggtgaccacgtcttgatccctcagttcggtggtagcgccgtcaaggttggcgaggaagagtacacccttttccgggaccatgagctccttgccaagatcaaggagaactagatgattcatcttgttcttccgttttccgactggttggaataatccaatcggagtcttgtattatatcacgcaaatcatgagcttctgtcatgcactttaaataatttaaaaaagagccatctacgaagtgagggacaggtgtatgattctgttcctcgatctccgggctaatgttcccttttccttatcttgcatctgctatctaaagcgtgaaatgtgtcttggttcctttgcatactatgcgatgtactttagcaatcgttgtctcctgcgctgtctgcgggatgaacacgggtaatctgatacgaatgtctcctctc

SEQ ID NO: 1292 - DNA, 252 bp, Aspergillus oryzae
aattccgcacgaggcccttatccaggtgtaactggacaatcactgggaattgtacagtatggggggcctggctgcttacaaccgacctggtaatgtgtcgattatattaaattcgatctgatgtgttacgatcttgcagtgaagggttcatacttgttttgtcctggcgtaataagtatatcatttgtttcaaagatgtcgtccgttctgtcagccttagatgttgttatcatgaatcatgctagatttgta

SEQ ID NO: 1293 - DNA, 761 bp, Aspergillus oryzae
  modified_base (1)..(1): n is a, c, g, or t
nattcggcacgaggctctcaaccatcaccagcgtatgtcgggcaaggaattatcatggggccttctacctgcatgcatatgctattcggtgctgttctaggctggggtatcttgtccccctttgcgaaagctcgcggctgggctcctggtcctgtggacagctgggatgatggaagcaaggcctggattgtatgggtttctctggccattatgctcgctgactcgatcgttagccttggctggctagtgctcagaccagctgtaaagcatgcccccaaactgaaggccaagctcctctctagtcgtctttggcgtcgagtttcctctcggggctcagcggaatatcatccccatgactatatcagctactccgcattgagccctatctccgaagaatcctctataccaagccacctccctgctttgctggcaggaatgcaagctgaagccgctgatgaggaagacgcccctccatctcaacttatctccacaagaacagtgctcatcttgttgcccttgacactgatactgaacgttgtttgcatgcacttcgtctttggtgatgtcatgtctccattgctctccagccttgcaaccctgctggctgttctcttatctataatgggtgtscgcgctctcggcgagacagawttgaacccagtatctggggataagtaaattaacgcaactgcttttctctctcgcaacccccgcctcccacttttcccgacgcactgcattagtcacaaccttcttgctgg

SEQ ID NO: 1294 - DNA, 901 bp, Aspergillus oryzae
  modified_base (58)..(58): n is a, c, g, or t
  modified_base (77)..(77): n is a, c, g, or t
  modified_base (133)..(133): n is a, c, g, or t
  modified_base (138)..(138): n is a, c, g, or t
  modified_base (152)..(152): n is a, c, g, or t
  modified_base (156)..(156): n is a, c, g, or t
  modified_base (158)..(158): n is a, c, g, or t
  modified_base (192)..(192): n is a, c, g, or t
  modified_base (228)..(228): n is a, c, g, or t
  modified_base (240)..(240): n is a, c, g, or t
  modified_base (244)..(244): n is a, c, g, or t
  modified_base (267)..(268): n is a, c, g, or t
  modified_base (294)..(294): n is a, c, g, or t
  modified_base (307)..(307): n is a, c, g, or t
  modified_base (313)..(313): n is a, c, g, or t
  modified_base (321)..(321): n is a, c, g, or t
  modified_base (328)..(328): n is a, c, g, or t
  modified_base (339)..(339): n is a, c, g, or t
  modified_base (376)..(376): n is a, c, g, or t
  modified_base (381)..(381): n is a, c, g, or t
  modified_base (421)..(421): n is a, c, g, or t
  modified_base (457)..(457): n is a, c, g, or t
  modified_base (475)..(475): n is a, c, g, or t
aattcggaagagggtcttgttggatatttggtatacttcttctggttaatatttaagnatagtgcgcgatcaattgnatatcatcatgttgaaaggcgtctatctcggtgtaattggagttggaggtgtaggnaaagntttcctgagcaagnttgntngtatgccaaaadtcccaaagttcgtcttcttggngcgttcaagcaaaaacttcaagtttccgaaaccggnttatccdtctgnaatnaccgctgaagattggaaaarggnngttgagaacccttccttgataaaatngggtgttttttcngtggangaaattgntttttanttttgttttgngcccggtggttcaatttttgttgaaaaaaaaaggganttaancttcgttagtttttacccgtttttttccgaaaggaatttnaattgtaacccaaaaaagaagggttttttttccganttttttttgtggaagganattttcgttgytgccgcagagggaaaggcttttgtgtactatgagagcactgtcggcgcaggtttccccgtgatttccactttccgcgattttgttagcaytggcgatgaggtcaytcgyatcgaaggtgttttttccggcacattgttttttttattcaacattttcgcctttgtgtttgggctgtttggcgmaaagtggagagaggttgttgcgaaggcaaaggagttcggttaaattgagcccgatctctgttatgatytgaacggtatggatgtygcctgtaagytgattattttggcgtgtatcgccggtttggaggtctagttttttgatttgttccttattgagttgtttatttytaaggagctcgagttggtactctctaytgctgatggtatcaaggtttttatgacctgtttgccc

SEQ ID NO: 1295 - DNA, 851 bp, Aspergillus oryzae
aattcggcacgagggagaacttgatctcggccattgctggcttgacttattccttacctcgtaatgagcggtttaactctagtgatctggtgctttcgactgactccctctctcgctcctacccattatgccaggtcatggctgctctgtactcgaatgcctccgttgcactgaactctgtcgctggggaaagtgtcgacttcgcattggctaccgttggagtatctccgactgtagttattgcctcatctcgcaccatgtccgattaccacaacaaattcatggagccacactctggtatcatttcttccctggctcgctggtttgacgtgagaaagctagatgctggagtcatgccttctcatggcatgttcagtcaggttgccaacattggaccgatggctgaactttcactcgacaagcttcgcctcttgtgtatctcgcatcgtgcggacgccgatcccaatgttcgccttacctccggacagttgacggatttgaagatctttactggggctcgtgtggtctacgccttgactggtccaggcgtggccggcgctgtctctcagacgaacgtgttcgactataggcgttatcagggccagaaccacttcggagctcctttaagtagcgttgaaattgttctcaccggtgtttctgaagacaaggaaaacgagggacagwttactgtttccggccctgccgttgtycttgagaaaaccaccctgacggcgcaaggccgcatccgtgacgataacacattagagttgtgctaaatcgcgttttcgcgcaacaacatctgatcttttttagcgttgacctcgcggctgcatgacttacgttaccggctg

SEQ ID NO: 1296 - DNA, 647 bp, Aspergillus oryzae
aattcggcacgaggcggacatttccctgttgtggtccatcccgtaacaatgcctccaagaccgatctcttgatgccaaaacccgagccagttttccttcccgatcgtcgctgggttccgatggcaggaggctcgcgggttgaggcatcgctattcgatcgagctcgacgatgtgtgcgtaggcgcasggcgaatctagctgagttggctgagaaagctcctcaggtccagcggaactacgggcgcttgagggttgggagagctgagaggacgagagaagttgatgggactggatcttgcgcagacttcgcatcgttcgcggcgatggtgaacccgccaaagcgccaggttaagttgagcctgagtgggttgggaggccatgttgggttgctgtcggtcttgtcgttttgtcgggtcggwaaaattcatagcttgtcacaagtactaagcatctttattacttggtggattgacgaagacgaacaaccaagtcaaaacggaccggggggagggtccatgaattaaaaaccccctatgagatctgttagtatagtttcgaagatcttttttctttttttttctttttcccttcttgacgggggcaggtggatgcggggacacgcgacgcgctgcaagcaataatttata

SEQ ID NO: 1297 - DNA, 936 bp, Aspergillus oryzae
aattcggcacgaggctacttgacgttacttacgacaacacaacatgatcctttccctatatttcggtttagctaccattactgcgagcttagcatcgcctgtatcccaacctcttcccacggccatcatcgattccggggtgattgtcggaacaacaacatgcctaccttcctctactgccgtcgtcagaaataccttggagttccattcggtgcgccacccgtccgcttcagccctcctgaaccggttgcacgctggtcgacgttctacaatgcaacacaatggggaacagcctgcatccaacagattggtcatagcggcaaggaactctttggcatgctagacctaccacctccggcaaatggagagggagaagactgcctgaatctcaatgtcttcaccccggaagctgcgtcggcgggatctaaggctgttcttgtttggttctatggagggtcgtacatgaatggtgctacgtctgtcaatctatatgacggcactagcttcgcagccaatcaggatgtcgtggtagttactgtgaattatcggactaacttctttggattccctggaggagacgttccggccacggagcgaaaccttggcttcctggaccaacgtctcgccctagattgggtgcagcgcaacatcgccgggctaggcggcgatccatctaaggtaaccatcttcggcgagacccggggaggtggtagtgtcgatgctctgatcacggctcccccagacccagttccatttcgtgcagcaattatgcagtccggccagagttccatcagtatgcccttaaatggcggacgaggaaatacgcggagtcgtggaagaagttggcagagtttgcagagtgcccttcggataatactctcgagtgtctccgggaggcacctgctcttgagctgaagcagttcgctgagaacgcca

SEQ ID NO: 1298 - DNA, 727 bp, Aspergillus oryzae
aattcggcacgaggggctacttgtctggatatcagctctgcaccgttgaacgggtccttaaaacacatcatgatttctcagaaggttgctcagcaatcgctgcggcggcttgccgtccagcagccctatgccatgcgctggtctttgatgaactccgcaacccccgctgctgtcgctatgggacgttttatgcagaccagacaagctgccactacctcgaacacctctgaccctaccaagatccttgcgcasagcgtctgaaccgtcccgtttcccctcacctttccatctaccgcccccagatcacttggatcggcagtagttttcaccgtattaccggattcgccctttctggttctctgtatctttacgcgactgcatacctcgcctcaccgttgcttggctggcatctggagtcggcctccgtggccgctgctttcgctgcccttcccattgttgccaaggtccttctcaagggttttatggctcttcctttcacctaccactgcttcaacggagtccgccacttggtctgggatcttggtaggggaatcaccaaccagcaggtcatcaagtctggttggactgtggtggggctgagcgtcctcagcgcccttgctctcgctttcctgtgattttcttgtgtcatacctattaagctgatcttgtttcactaaaactgttttctatgcattatatcttatacagtcaatccagactgattttt

SEQ ID NO: 1299 - DNA, 1030 bp, Aspergillus oryzae
aattcggcacgaggcctgattatacaacaatcctccttcatgactcacggcattctcagaagatacctataaagatacatcaccatcatctagagaacaccaacaccacaatcccttcaaaccacacccacaacacctccaacgcaaaaccacctaccccgcatcacaatatatcaaccaacaataccccccccaaaaaccgaaaaacaaaacaaaacacaaaaccagaaaaatgacaacatacaccccccgcgacttctacggtggcgcaatcaaaggtctaatcccgcagaactgggtcgacgcaagttacgtccgcgaaatcccctcccaccaagaagtctacctctcccgcacaaccctaacatcccaaatcaccgaaatcaaccaacgcgtcacagaccccgagacatcctctctcgatactctcataaacacacaactccaatcccagccactcaagccggacgcaaaagcagccctgtaccatgtccacgacctctgcgatgaggacgataagttggagatcgtgacggcgccgacacgggttattttgaggaaattcccggctggggttgtggggtatcggggtgttgtgagggttgtttctcctaaggcttcttctagggctggggctagggttgggtctggggttgggattgggggtgcggttgccgggtcgagtgctgagggggagttgactagtactgtgacgttgtggtatttggtggtgaggttggtggagcaggagacggatttggtggtgtttgttaatgtgccgagggaggagtttgagagggctggggatttgagggggttggaggcggaggaaaggttggctgaggggttgattgatggtttagtacaggagttggaggttgttgattggggtttattttgttaggttcttttcctggggggttatttgaggttgtctgggtgtgtatgattgagttatggatttgggaatattggttgggatttactgttcttgggggggttttatgggatctgcttgtttgcatggtgg

SEQ ID NO: 1300 - DNA, 538 bp, Aspergillus oryzae
  modified_base (410)..(410): n is a, c, g, or t
aattcggcacgaggcgaggagcttcatatttccaacccaaccacgccaatgagttaactgacccccaacgtgaccggctctctccaagctcgggtggatgaagcctgtgcggaccaagagaagggtatccctggggccgtggtggtcatggtgggcaaggatggtctggaatatttcgcccatgccagtggcaaacggggatatggttcgtctgagccgatgactctcgataatattttctggattgcctbctgcaccaaattcattacgggcattgcttgcatgcagcttgtggaacagggccttctctcattgggcgattctgctcaagtcgaaaccatttgcccccgagctgaagcgggtccaggtattgcaagacgatggaagtttggtcgataagagacaggggnttacattgcgaatgcttctcgctcataccgctggcttcgggtactcctttttcaacgaaaagttacgagactatagcaagccagttgggtacgatgagttttcgggaagttcttatgatatgctaaaa

SEQ ID NO: 1301 - DNA, 752 bp, Aspergillus oryzae
  modified_base (103)..(103): n is a, c, g, or t
aattcggcacgaggatccaacccaggtttttgcactccgccaacggattttcttgtgccaaatcctcttcacaatggctgctcaggctagcgaggatctgcanaagcttgacctaaacggccagggcggtgccgctaaagcggacgcccctaccgcgggtcaggcagaagccggagaggcagaggacgactcggatgatgacgctgatgaaggaaacgctgctcccgaagcggggccaacggagccgccaagaaaaagaagaagcgcaagtttaaaaaaaaaaaaaagggcggtgctaaggttcagagcgagcccccgcgggtccctctttctcagctcttcgccggcaagcagtaccctgagggcgagatcgtcgagtacaaagatgataatctgtaccgcacgaccaacgaagaaaagcgttatctcgaccgcatgaacaatgattttttgcaggagtatcgtcagggtgctgaggtgcaccgtcaggtccgtcagtatgcgcagaagactatcaagccgggscagaccttgacggagattgctgagggcatcgaggaatcagtgcgtgctttgactggccaccagggtcttgaggraggtgacaacctcaagggtggtatgggtttcccctgtggtctgagcatcaaccattgtgccgctcactacacacctaatgcgggcaacaagatggtgctgcagcagggagacgtgatgaaggtcgacttcggcgcgcacatcaacggccgcat

SEQ ID NO: 1302 - DNA, 1032 bp, Aspergillus oryzae
  modified_base (232)..(232): n is a, c, g, or t
aattcggcacgaggggccactccatggcaaacgctgctgctctagccagagtcccgtcgtcacagtcatacgcgccgcgaccctccctccctggtatccctagtatatggaatgtgggcctctcaccagaggttggcgatgcaacttctcccaggaccccaccaggtcttgggcaacacccgattcaacattccggtcattttatgccaggaagcatcagtagcccaagccntcacctacctcaggactcggctgtgaacgatctaatgcttcgtcagagtctaatgcaccaatcccagctgcaaaaccccctgaatggatccagctctatatcctcgtggataccctcgtcaaaccccacatcgcaccaccgtctttctggcttggggtgggacagcagaggaccactggatgctgcaastctccaccacccctgagtgcacccagccagaccattccaagtggcttggccaatgcctcgtgggcaaatgatgcgttcctcgctaacacgctctcctcaggcgcaggttaccccagctctgggtccggtggcagtcgcaagtccgctacccagtacggtgccattggtcaaacacctccctgcggacatggagggtgacaccgatctcttgatgatctgagtttggggaacaagtctccgagagtcttttgagaaaaaagcacacacgcaggaaacgcgggtgtaagctttggttacttggctccgatttgtgagcgtcggaagcccagcggcgagattatgcagcatctcccttcgctcccatccgttggtccagttcttagcattaatagcctgcttttcgtaagcaggcttatgcactgtcacattccccgcgtgggctcattggccgtgctgtcgttaggccgctggtamcaaagatacagtcatgttcactggagaggtattggtgaaattctgtattaaataagcgttctacaacatattgattgaaatcaaaaaggggaccatgtattaaaagttcatgcgttcgtggactcgtcttcaggtca

SEQ ID NO: 1303 - DNA, 897 bp, Aspergillus oryzae
  modified_base (277)..(277): n is a, c, g, or t
cccacctctccaatttctacccccaccattcccgcccttcgctccttttttctacacgccctcgtcctgcttgtgggcgttcttctcatcaccgtggctcctccgctccgcctctcgtcccccactttcagactctcctcagtattgggccaactccgtggctcacgactgaccacatctacagtatcccctacggcactgacgaacctccgtaaatccctcaccaccgcgagcatggctccagaacactaccgccgcccacctcaggccccgccgntcttcacagcaaccgctcagtcgatcgttgacgatgccaaacgcctcattgaggcatcccgcaaggtccaggatgaggttgtcgccaatgtgaagcctgagacggccacattcgattcagtgctcaagccgctggcccatgacgagaacaccatggcgctggaagcccacatcctcagcttctaccaggcagtctcgaccgaacagcagttgcgcgatgcttcgtccaaggccgaggcagagctggacgaattcttcatcgaaacagtcatgcgtgaggatgtcttcaagcttgtggatgccgtgctgaacaagaacgaaacccttgaccccgagtcgcgtcgcctcttagagaaggagcacaagagttacattcgcaatgggttgggtctccccgctggcccgaagcgggaccgcttcaaggagatcaagaagcgtctgagtcagatcagcattgagttccagaagaacttgaatgaagagaacgagggtctctggtttacccccgaagaactggacggtgtgccggaggatgtcctgtctggtttgaagaagggtgagggagagaacgcgggcaagctctggctgaccttcaagtatccggatcttttcccaactatg

SEQ ID NO: 1304 - DNA, 582 bp, Aspergillus oryzae
aattcggcacgagggtcgacaattgggatgagaatgccgtcgataactgggattcagacgacggtgtggattatccttccggtttgatcgcggaaggctcgaaaccttctgcccctgctgttaatggggacaagggagaggggaagaaacgaaatgactgattcgatctacattaggatctaaaatctaattgttatgaaatatacctcgtcattgttgcagggaaggccaactttcacgccatgccatccttaccaatgccaactctattcctcatgactgatctgtgtcaccgattcacccgtcatgttttacgccctcctacaagcaatatcagatcggtattgctatgttgttcagcttgtttgatgatttatctgcaggacataacactctttacgatcttactcgtgactatctttatatgtggatttgcggtccatcctcgtacattagggctcgactttttggcgtgttctttttatcagggacttccggcgttgtaaataaggtcaaaagctttgtgctttttagcatacggagcagaatatcgctgaaaataaatcctattatcttactctt

SEQ ID NO: 1305 - DNA, 655 bp, Aspergillus oryzae
aattcggcacgagggtcgtgcgtacccgacaagaggttgagaagctccgcccatatgccatggaaagtccagtcagtcttcaagcctctctgaccgagctgtcggagaacctactacgcgagaaggctcaaattgatgcaatggagaaaagggcgagagcgctccaaacttcgtcagacacgttcactgtcgtcagcaatgatgtccaggcttgcgtcaaacttctcgaagatatctcagtggagttgcaaaaggaggaggatgaagaatcacgagcatcccggaacaaggaagcgatctcggaaagaggcaatagcgtcagagaggtggagcagactgaaaaattgctacagcggcagctagcaaggtggaatgagaggattgaaactctgcggaagaacgcgcaagacaaggcagaggcggcccaggcccggatggaggaacttcgggaggttcagaaacagcttcgtgaagagcgcgcagaaaagcagcgtgatatggagagaaggaggattagaattgagcaaactgagaaaaagatggtggacctcaaggaaaacattgaaagcgagaatcagagtgcccatgatgaatatttgaggctggaatcgcatatcaaactttacataactgaaatggaaaagtgtatatgagt

SEQ ID NO: 1306 - DNA, 1021 bp, Aspergillus oryzae
aattcggcacgagggccctttgggctcgctcctcgctccttgctcttgtcaatgaatttactccagacataggaatacttcagaaacacactcatttttcccctccagattcaggatggctctgctgtctaagagggaaatcattgaatttaggcctattggcgacggattgaatgcattccgcgacgagttcgtatcgacttgcagaagttcgggtcttccttgctccgtccaatctgtacacgagcttgatcatgatggtacttattcttttaaggacaaatgactgcccttcccgcttcccgcgccttgccccctgtagttggcgcccacaaaaacctttttaatgatttatccaggttatgctcgagtatcaactccgacgaattcaacctggagcgacttctgcccttatcaatcgcggcattcaacagagaatttgatgaggtcatttgggataaactctacgcagcggcggcagaaaccacgcccccccacccaaggccgccaccgtacgtcgagcaaatgccgtattcctgttctacaagcatgatctcgaattcgcatgaacgtcgggatgacatagaccctgtgctgaagaaggaactaggctcaatatacacggatgtacctggatttgaggaggcattcttcggaggagttaaagatctggagaaagctggcactgctgtcttccatagattcattgagggggatgatcctctatacagggaaacagctggctggcgtgactggcctcaatctgcagaggaaaagcaggtcctggattggttagtcgcaaaggttgaaaggttttacgaaattgcaacagaaaatgtttctgccccgaaaaatcatcgcaaggttttaggttggccacatcagccacttcaaaggtctacccctgctcagaggctagatattagatttattctttctctagaatcagccgataaaagtacccgtcggccgcatatcctagtaattagtgaactgaagcgcaatcctaatatagacagag

SEQ ID NO: 1307 - DNA, 883 bp, Aspergillus oryzae
  modified_base (320)..(320): n is a, c, g, or t
attcggcacgaggctaaaaccgattttttatatgaaaagtccaccgcaaagtcgtttcctcgagagctgaagaatgtctctctacccttctccactggttcttccctgtttcgacgggtctcagtgaagaagaaccatttaccccgtgaacccagattctgcttctctgcgtcaggccggagcctttttctttggggcgttggaagtaattgggtggccaggtttgagacacccagtgcaggagcacagaagccaagcagtcatcgatacgatgtttccggcgtacaatacgttgccgccggagaccagcgctgcgcggntgatagccgctgttggagagcattacgagcttctggtattcaaagggcttggcctgagtgccgaagctcatttgccgatcgagatccacaatccatccctacctcctatccatatggttatgtctcgcgacgatcgatacgttgcatttaccctcaaaaatgaagttcgagtttacgaaattattgccggcggtattgtaagagtctcatttggggataccggagaccccagcgcatctctgtacgatatgactccggcgccaacgcacatagcctcgcccctaggaaatgacggtaccccagggcaagaagcgatcattgaaagaaagcttcaattctcggttgacgggaaatatttcgtcattgcgacacaccttaccgactgcaatgcctatgttgacgtgtgggacctgtccctcaaacggtgggatactgtccctggtaaatcacagtcgtttaggctttctcaccgaacgactaacaacaaagacctcacctgcgtgttttacgataatgttcaccacgcagctctttgcctgcctatttcgaaaaggattccccaa

SEQ ID NO: 1308 - DNA, 829 bp, Aspergillus oryzae
aattcggcacgaggacgaactccagaccttcggtggtcgggtcattgcttccaccgctacagcatcgagtctcgaggaggctgtccgcaagagctattctggcatttccacaattcactttgaagacatgttctaccgaaaagatatcgcgcaccgccttcaggcaaagagatgctgttgcatcccagaaggagtctctcacctatgcctctgccggtgtttctattgacgcwggcaatgacctcgtcaaccagattaagagctctgttgcccagaccaagcgtcctggtacagatgcggtgatcggtggcttcggaggcctcttttctcttgcwgcwgccaactctgcctaccaccctcactcccctacattgatcggagccatcgatggtgttgggaccaaactcaagatcgcacacaccgtgggagtccacgacacggtgggtattgaccttgtagccatgaacgtcaacgacctggtcgtccaaggcgcagagcccctattcttcctcgactgctattcttgtggwaaattggacgtcaacacggcctccgccttcgtcactggtgttgccaacggttgtgtgcaggccggatgtgctctcattggtggtgagactgccgaaatgcctggcctcttcattgacgacacctatgatgctgtgggtgctgccgtgggtgcgattaacactactggagacaatgctcgtactattcttccggaaacctccgctatgcaagatggtgatgttctcctcgccttggcttcctccggtcctcattcgaacgggtactctctcgtccggaagatcgtggaacgctctggatt

SEQ ID NO: 1309 - DNA, 538 bp, Aspergillus oryzae
aattcggcacgagggctttgtctctatacgcaagcatcacatccggagaagtacttcacttttgaatagcaccctcactcttcacatcttcacaatggctcccagacaacgcgtcgtttctgctcaccaggggaagagctttttgggtgccgcctacgatgaagtcactcatcccgagaacgccaccatcgtgagaagtgttcttgtcttcggtgccggtgtcgctttcctctacagctctctcagcgaactcctgctccctcctctgtgaacgggatatccgaacgcatccgtggctcgcagccatcactcggatataacttcgttgggagtcaggcgatttgttgaggtcgattcggaatagactcgaacctgctattctttttccttggttttacgtaatggatacctgtactatattgcatggattgtgcttttgtgggcatatatgtttttggatggactcgtgtggcgtgcattatcatctccgatatgtctgaaaagaacataaaaacccaatacgacatgacatcctttt

SEQ ID NO: 1310 - DNA, 854 bp, Aspergillus oryzae
  modified_base (398)..(398): n is a, c, g, or t
aattcggcacgagggttcaggttcaatgacggttgatcctgatattgaggaagcccacaaattgaagggttggtacgacgctcaaggccgggatggagtctttgcttcacatgcttcaatgcctggtgtagccgcatctactacaaaacttgaacaattcaagactgtcgcacaggtcaaagaggagcaattgggtatgtcagatgaggtggcctatttctcactgaaggcgactgttatctacatcaagcaagataccatgtgctatcctgcctgtctttctgaaggttgcaataaaaaagtaacagagcttgatcctggccaatggcggtgtgaacgttgcgataaaactcatccacgaccagagtatcgctatataatgctcattagcgttacgntcatactggacaactttatctcagctgtttcgatgaagtgggcaggtacatgatgggcacttccgcagatcagctcatggagatacgccagaacgatgacaaagcagccggagatattttccaggatgcaaattgccgaacttggaatttcagatgtcgggccaagattgacaattttggtgatcaacaacgcattcgttgtcagatagtaacggcgaaaccggttaattattctgaagaggcactgcgccttgcgaacatgatcgattcatatagtgtttcgtgatagatggctcactcggtactttggctggtggtggtagcccgtgcgtatttatcatagatcacacacagctagactgtgcctaggaaagtatacctttggctttcgggaggcgtgatcagaatctcttgtgctttacgacggagcttaatacatatcacatactgcttttt

SEQ ID NO: 1311 - DNA, 707 bp, Aspergillus oryzae
  modified_base (236)..(236): n is a, c, g, or t
aattcgacacgaggagatacccaaaaatcccaaattcaagagtcacacagactttgaacaaactcgtcacaagcacgtgatctcaaaagcgtcaagagacctagacagagaggcaaaaatgtccacaaagacccctatcacattaaccgtcgacgcaatcgacgacctcatttacgacgcccgcgccgggcgatctcgagggcctcaagtccgacctggcggccttgagcgcccancacagctgcccgcagcctggatcgtagcgtcggcgatcgactccgagcctgaagaggagggtggttcgggatcgtgccttttgcattttcctgcggcgaatgggaatgaggaaatcttgaacttcctcctgggagtgctcactcagggtgagactcagctggatcaggctcaggttgcggctgttattaaccaccgtaatcactcggggaacacggcgttgcactgggcggcgctgaatacgcatctggagtgcgtgaaagcgcttgttggggctggtgctgatatctccgttaagaatgatgctgggttagatgctgttttccttgctgagagggctgattggtcgactgaggagcagggcgagggagcaggaatgaggtcgaggttgaaatagaggctgaggctgaggcacagaaggttcaaggcgatgctggggaagatgtctaagggggagacaggtcgcggagtgg

SEQ ID NO: 1312 - DNA, 686 bp, Aspergillus oryzae
aattcggcacgaggccagttccttcccgacccctaccacaaccttcaatccttctccctactcctcatctgtccaccctccggcgattcgcataatggccccctccggaaagggctctcaagacgaagcccaccatggcgccgtcttctccgtctccggtcccgtcgtcgtggccgagaacatgatcggctgtgctatgtacgaattgtgtcgtgtcggaaaagatcagctcgtcggtgaagttatccgtctcgatggcgataaggccactattcaggtctacgaggaaactgatggtgtgacggtcggcgaccctgtcgagaggacgggtaaacccctagcggtggaactgggtcctggttttatggaaactatctacgacggtatccaatgccccctgawagctatctttcaccagtccaaaggaatctacatccccgtggtatcactgtaaacgcgctggatcgcgagaagaaatgggacttcacgcccggtcaatacaaagtgggcgaccacatcactggtggtgatgtctggggttccgtgttcgagaacagcttgttgaacgaccataagatccttctcccgccccgcgctcggggtaccattacccgtatcgcagaggctggaagctacacagtcgaggagaaacttttggagatcgaatttaacggcaagaagtccga

SEQ ID NO: 1313 - DNA, 738 bp, Aspergillus oryzae
aattcggcacgaggacttattactcttcacttgaagaataaaatcgagtcactgttgactggaactactgctatatctaccgagtactctatcaagattctttccaaactatacaaagcaaaccaaagaacaaccacaaacattcctctccatcaaccaactttcccaaagacctcctcttcaagagaaacaatggccttcaaatctcccaagtcaaccatcaccgtctcagacgacgcggcatcaacccactcctacctttccacaacaacaaccctaaagggcaccgacgccgaacccaccaagaagaaatggctctccctaaagaagacagagaagacgggcacctccacaccaaagaacaccgcacgtgccgagaaagcgctacactatgaggccatggctttttaccttgggcatcggtgaagctgcaagggagatacatcagatccggcaaggaaatgaggggattattgaacggagctaatgctggggatacatgacaactcaattgatgacgtaccgtaccctttctgcctggtgcaccttggggacttggcttggttttgtgcttttgttgggaaaaattggcgtttgggaaggagtgttagattgcatgatgcgctgtgtttacgattatgagcgctttgcttgagattcagttcttgttcatgttgtttaaaacatactacgtattggtatgtggtgatcggtttctctgtagagggccgagtgctt

SEQ ID NO: 1314 - DNA, 577 bp, Aspergillus oryzae
  modified_base (246)..(246): n is a, c, g, or t
aattcggcacgaggccctcatatggcgcgtcgcggggatttcagcaccttacggacaaagactctactcaatatcacaaaattcgatattatgagacaatcaccaggcgattttgctatggataaccaactgtgaccgtccgtgaggatgagagactcccagggctgcagataaagtttgcaacctctattaactatggcgtaccctatgttcgatgctctcatatgccaagaaaacccgcagtanttataacttctatagggtctataggataccttgggagtctatgacaagtgtggacctttatggggtgaatgtctccctggggctaagcgattgcaagttgttatacactattattgtttgtttgtttcattcatttaccctgacccttcatttagacaaccgatatgcaggctaccgcaactgtaaccatccttgtttgtcaattgacactgtaccacttcgtgcgaacgatcttaagaccttgtcacagccagtggtggccctactgggtccgcggctgcgaaggcgttgtttttatggtcctcataattccaccatggaagtcgaagct

SEQ ID NO: 1315 - DNA, 791 bp, Aspergillus oryzae
aattcggcacgaggggtcctcaacctcgccgagatgcgcaacccccgaaatcaagcaccttgaaacaactcgatttcaacaccgccatccgcgccccgaaatcctacctccgcactcgcgtctaccaagacggcgtcggcgaacaggtcgccgagctcctctctgagttcttcgtcctgtggaccaagcacatcgctttccccgaactctccgtccccatcgtggtctccctgaagcgctggctgaaacaggtcagcgcgcgttccggaggaaacaagaacgccaagattaaccagatgatcctcctcttggtccagaaggtcgaggccaacgcccgctggattgaagagcgcagaagcagcgtcacttataccccgcgcaaccgtgcggaagtggagaacttccttaaagatgtcgattgggaatcgaccccgctcggtgcattcgttaagtctcagcggaagatgcgtgaagagaaggctacccttcttgaagaggcgagacgtgaagaagagaaacggagagccgaggagaaggatgctgataaggaagatgtgacgatgggtggtttcagtgagggggatgagggaagcgatgatgctgaggatggtgaggatgcctcctctgatggtgaagaagaggaagaagaggaggaggaagatgaagatgaggtggagttcgaagaagaggaagattagatgatgcttttatctccttaacattgtactagtgatggcactatttcccccatatctggttctcgttgtagctatttaagacatgtttctttt

SEQ ID NO: 1316 - DNA, 972 bp, Aspergillus oryzae
aattcggcacgagggaaaatgtcacctgaagagctcgatgccctacttgcagcgccastctcgcaccaccacccggggtcacaccaaatttcgacaatccttcccgccacaatgactatgcctggggtatcacaacggtctgtatggtcgtcgccactctgtgcctctttctgcgctggtacgtccggatatggttggatagaagagtccgtatggaagatgttttgacgatcggtgcatatggagcctattggggtactgcatacgctgcctatggaatgatatatactcctggctactacgtccacacatgggaccttcgtaaccgagatcttatcaggccgctctatctcatcttagtttatggctgttgctactccgcaacgctcccactgatcaagacggccattttgctcgactggtgtcgggtatttgtctctgtgaaccgatcaaggagcttcttttggtggggatgcatggctgtgtcattcgttcaatgcctctggggcatcctatgcattctcctgctcaacttacagtgtcgcccacacagatccatctgggaattctacgttccaagcaaatgttactcgctcccagacgtaatgctctgctccgcgagtgtacaagtcatctccgatgtgtgcatgttcttgctgccgcagaagatgatctggagcctccacatgaactggcagaagaagatggggatttcaatcatatttggtgtcggtattctggcctcaatcgcagcctgtttccgcctagcccacacagtcaccttcgccaagtcaaccgacagcatgtacttcattgggccccttctattctgggcctgcgccgagatgacctgtggtttcttcatcttcagtgtgccctgcctatcgaagctagcgatggagtctgggctccggagcagattgtccagcgctctcggcctcagcggcaagaccatcagcggaccttctgatc

SEQ ID NO: 1317 - DNA, 809 bp, Aspergillus oryzae
  modified_base (249)..(249): n is a, c, g, or t
  modified_base (251)..(251): n is a, c, g, or t
aattcggcacgaggcgagaatacctcaaggctaaaagtccaaaagcttcatccaatttttctctagttcaaaatgatcaaatcaattgcctctatcgcccttctattctccacagcaatcgctgtcccaaccccaaccgagctcctacctcgggcctgcactactctagcccccgctgtcatcaatattctcgacgccgcaaatcccaacaccccctactctggccagcagtttaccctcgagcgcagntntctcccttggtcgataacaagatctccgtgttgaccttcaacaacattcccgccggcgccactggctgtcgactcgaaatcgaacttcctcccctgagcgacggccaaatcgctcccagcgacacccaggcagatgtctggtctgccgacccagtagacggcagctcgttccccacgtataaccatccgccacacaaaagagaaatggtcgcgacctacatcttccccaagggaccaaccacaaagtcgacccacaccgtattggcatctaacacttgctcgaccaccatgagctggttggtgcagttgagtgaatggcagagctcggctggaagtgtcaatttccagaactctgttgggaatggcgcggatatcggcttcatgttggtttacaactgttaaactatggttgttgacgatcccattgtgtgaccactggggtgtgggtactattgaccccttgtgctgctcagtgaacctatgcctttttccttgtacgcggccgttgtacacgctttctgtcgtctacttgtgtgcttttgtttggttgacaatagt

SEQ ID NO: 1318 - DNA, 901 bp, Aspergillus oryzae
aattcggcacgaggcaaacatcgagataaacgactaaagtttccaatcatgaaggcctcattcatttctaggctgctatccctgacagcatttgcgatctcctccaatctttcatatggcctgcctctctccgagagagatgtgaggctcttcgaggagcgctacatcaactcactagactactcgctcggtaatgacaccgtcaaattagtcggttacaagaacatcaagatccccgccgaagagttggacgatctgaacgaccactacaacaatcacccagaggtgtggaaaaatctgccaaactacttctacgatcaggggtctggcaccctacgtgcctatttcccagtcgacggagcgcttgttgagcatgacggccaatatcatgaggcgaactcattgggcgagttggagctcaccaaggttaacggcgacagttctgtgctgggccgaagacagaccgagtccattacgggtgttgaaggtaatatcatcaaagatggcattatctacctcgagaaggccgcgaagcgcacgctcagtatggtaaagtgctcgtctacgacttcggtgacaagattgttctcgaccatgatcatggcagctacaccaagcgagacgggaagaaatcctgcatgaaaaaccatggcggtccgaactgcagcgacaagttcaacattcacaataataagtgcaagaagagacatgacatctgcatggattacaacggatggttttcgaactgcaagaagaatggctcgacctggaggaacttccccggcagtgactgtgataaggcactaggccgtggtaagtgcgggaatgaggttatgtgagatgttcttggctgtttggggtgtgactcgaggtcggtatggaagggcgttagttatggtgc

SEQ ID NO: 1319 - DNA, 892 bp, Aspergillus oryzae
aattcggcacgagggagaaaaaaaggaaaaaggaaaaagaaaacattttttcttagttcacttcccacttctgtcttttcttctcgtgaactcatctcgacttcttaattgcactttgtaccgttgcattccggtccatcgtttacgatactgctatatatccagcgacccgcttgatatctgctatcattgagtcatcgagcctagatcgttgttcagatacaccgcccacagtcatacagcaattatgccagcaaccgtgaattaccgggtcgttgagccccatccttccgtttcgcgcccagctcttcatacagctcgcggcggcgcaggcaacatcatcagcctgaagaacaccaagaccaccccttcacagacggccaccggtcccccatccttgacacgtctggactctcacgtccctcccgtctacaagtccggccgtggcggtgctggaaacgtccacagcagcagtkagcgcgccatcttcagcttcgacgaggaactsacacgggaccttcgtcgcgccgctccagtctaccacgtcggccgcggtggtgccggaaatatggtctacagcgacaatggaagcaccctgagccgcaagttctccgccagtagcaatgccacgtcgagtagcacggggtcgaccagctctactcgggagaaggccctgcgcggcttagagaagggctggggcaagttgagaggaatggcatagagacgctttgcaagacacattcgcatacggcctgccgtcctttggttcgagcgttctcgcattcgcatttcgaacatgaaacatcacgacttacgaccacaccaaaaaaagtttttattttccacatctcttcaatctccttttccacttcaacttcatttgcgattctcg

SEQ ID NO: 1320 - DNA, 805 bp, Aspergillus oryzae
  modified_base (145)..(145): n is a, c, g, or t
cgggtcgagggttatgtccgactccttcaacctccctcttcgtcccttaacagagaagcgcgaacgtccaaaatccgcttcccgtggaaatcgctcagattaatgctcagctatggttcctttcacgatagtcaccagaggacanacactccgggccaagatcagaagccgacaaaaaacaaaaatccatggatatcgaaaaaaaggaaaacgacaacgcatctgccgataaagatacgaaggagcagtctagatcagctgtataagcgtcgggcaagccattacccaattcgccctccaggcccatatggaaaccatgttcgccctcgactttgtctcccttctgctctcgaagcaaacgcctcgtcaagccgaaatatccatgtctgcatacctgaaacaagttgcgcccctcggatcactaaattcggaaattgtcaatccaccaccaaagcccgagtccgcggctagagacaccaagaacgtttcgcgtgggtggaggctgcaaaattttaactccgcggcgagcaaactactcgactccgctactagactcgaagctgaagttgcaacggagaccaggtattgggatgaggtgctggcggtgaaggaaaaaggttggaaggtgtccaggttgcccagggaaagacaggcccttggggtacagtatggctttttagaagctactccaatcttccgcgaccggggcttagcggctctgcgacgaaccaacgacggaagcttgatactcgacaaaggtttaattccactcaaggcgcgaacagtgcgtgtgcgtgtgaagagt

SEQ ID NO: 1321 - DNA, 230 bp, Aspergillus oryzae
ggcacaggtgttatggtgcataatgtatctcaatggagtctaggaccaatataaaaagaatctctaatgtttacttgccatgagttgatcggggctaatcacggtttatcgttctttatctattgttccgaattgatgattcttccagaggctagatttggcacaggtgttatggtgcataatgtatctcaatggagtctaggaccaatatatacctcattatgatttcc

SEQ ID NO: 1322 - DNA, 819 bp, Aspergillus oryzae
aattcggcacgagggtatagtacaatgttggatattaaccgttgtccaagtaaacggcttattgtttgctgtgatggaacttggcaagactcaacagcagactcgagcaagcctgcttctaacgtgacgcgattcagcagagccttaagcgcaaatgctgtggtcgagagaaatggtcagaaacacgaaattccccagattgtttactatcagaagggtgtaggaactggcttgggagataaatactggggtggtatgtctgagcccttcgctttcctcctcctagaagaagttccgtccttttctttttcagttcttccacatggcctgttagccagtctaatattatctacaggcgtacaggactaggcctaagcgccaacgtccgcgcacatacggcttcctagtcgacaactataacgaaggcgacaagatctacttctttggcttctcacgcggcgcatacaccgcacgcgctgtagcaggtctagtctgccaatggggtctactaacacgacgaggaatggacaacttcccaaccgtgtacgaggatttctaccaaaagaaagccgacgattatacgcccgagcagcgacgagcactcggattccgagatcccctcccgcaatttactgtggagatcatcggggtttgggacacggtcgccttccaccagacctggttgggaggatggataggcgagaagctcgagttccggaatacgattctctccgagaatgttcggtatgcgtttcatgcgttggcgctcgatgaggagcgaatggcgtaccagcctacgttgtggaatcttccgaagaa

SEQ ID NO: 1323 - DNA, 426 bp, Aspergillus oryzae
aattcggcacgaggccaactttgcccttcttctcttagtccaagcgcccaatgccgagcgagcagcaaagggtaaacagcttgttgactcctggctgcgtgtgctccgctgccaaagccaaagcttccccatgatgaagcttggcttgacgcgactggacgccatgcactgggtgggacttgggcagacattcgttctacctcagcatgtgcaagaggtaattcaatcatcggggaactgattatcttcggccaattgttcctgcctcaggtgtaccatgagtatgaggtcggcaaccgtgtcggccatcggcatcgatgttgggaccagttctataagtataagaatgggctcctggacgaggggttttgtagatagcagataataaccgtagtcacaagcacacaatcaaactgtacatataat

SEQ ID NO: 1324 - DNA, 596 bp, Aspergillus oryzae
  modified_base (118)..(118): n is a, c, g, or t
  modified_base (130)..(130): n is a, c, g, or t
  modified_base (179)..(179): n is a, c, g, or t
  modified_base (197)..(197): n is a, c, g, or t
  modified_base (247)..(247): n is a, c, g, or t
  modified_base (275)..(275): n is a, c, g, or t
  modified_base (281)..(281): n is a, c, g, or t
ctctagctcatgcagtggctccgcatttagctcccaagcagcccaaattaccatcgcgttccatgcgcttttcttccttgtcttctgtgggctgttttgcttcgcgagcttcaaattnatccggagcaancagaaaggaagagctttacgacgatggttccctctcggtttctcgatcntcttcagtatcgttgcantcatccttaatatcgtactcctggctctaatacaatgcgacatcacatcnatcaccgtgtatcagcttgtcagccttntgccangctggctctccgccctggcatacttcctcctcattgccctgatcatggtcccaatctgcaaacgcctggttcagggtaacagaaaaatcgcaaaaatggtcaccatcgtccattccatctacgtcgtcgtgcttgggattatcctcctctgccatctggstatctacactcatctcgttgatgcatcgtatcgcggtaccttggttagtggtagcacattacgataccatcaaatcaaactagccacggcatatgccgtgctccgccgtaattggcatgctaatggcagctgcgaatatgcttttcgcgctgacc

SEQ ID NO: 1325 - DNA, 531 bp, Aspergillus oryzae
  modified_base (20)..(20): n is a, c, g, or t
  modified_base (292)..(292): n is a, c, g, or t
  modified_base (363)..(363): n is a, c, g, or t
  modified_base (380)..(380): n is a, c, g, or t
  modified_base (409)..(409): n is a, c, g, or t
  modified_base (439)..(439): n is a, c, g, or t
  modified_base (478)..(478): n is a, c, g, or t
  modified_base (505)..(505): n is a, c, g, or t
  modified_base (510)..(510): n is a, c, g, or t
aattcggmacgaggcttttncagcgctgttaccctttccacctctccattcccacccgagccacaacgacttaaaactcttccttcgtcccatgttgatggtgcatccatatcatacaaaaaaacacaaatctkctcaactccgcacctcgatacctacagcggctatgtccatcttccaccccgtgcagacgatgcgcatccccacccaagcaacctgttcttctactacgccaaatcggctgagaaacgtacaactccgttgacaatctacctcggtggtggtcctggancaagctccatgtcctccatggccactgaaggaggaccttgctccgtgaactcagattcgaatagtacatcngcgaatccctggtcctngacacgcgaatcggacatcctcttcatcnatcagccggttcaaactggattttcatatnatttacttacaaatgccacaattggctattccaaaagcnccatcactccaacagacttcgatgatnggagncccggtagcgaaccatacgtt

SEQ ID NO: 1326 - DNA, 834 bp, Aspergillus oryzae
  modified_base (376)..(376): n is a, c, g, or t
aattcggcacgaggtttcattgctccggaaattgatcatttgcagtcaaggcgcaattgtttcaacctctgttcccgaacgataacgcttgtctccacgttttatcttcccaattgtcatcatggctcgtctgagctacctgctcgtgagctgccttagcgtcgtgagcgctgcttccgcagtcgtcgatctagtccccaagaacttcgacaatgtcgtgctcaagtccggcaagcccgccctcgttgaattcttcgccccctggtgcggtcactgcaagaacctggcgcctgtgtacgaggagcttggacaagctttcgctcacgccgaagacaaagttaccatcggcaaggttgatgctgacgagcaccgcgantctcggcaagaagttcggtatccagggattccctactttgaaatggttcgatggcaagagtgacaagcctgtggactacaatggcggtcgtgatctggagagtctgtctagcttcgtgtcggaaaagacgggcatcaagcctcgtggccccaagcaggagcccagcgaggttgagatgctgactgattcctctttcaagactactatcggaggtgacaaggatgttctggttgctttcaccgccccttggtgtggacactgcaagaacctcgcccctacctgggagtccctcgctaaggacttcgtcctcgagcccaacgttgtgatcgccaaggttgatgctgaagctgagaacgccaaagccactgcccgggagcagggtgtcaccggatacccgaccatcaaattcttccccaagggctccaaggagggtattgcctactctggcgctcgctccg

SEQ ID NO: 1327 - DNA, 582 bp, Aspergillus oryzae
aattcggcacgaggctcagaaatgctcagcggcgagctagaatatcgcaagggtaactacgaggtcgcatttgcccaccttcggcaagcgattgagctggaagacgcgctcccctactcggacccgccgccatggatgcagcccgtgcgtcatgccttgggtggtctactgctagagcaaaaccgtgtcgaagaggcagagcaggtattccgagaggaccttgggcttgcgaaagattttccccgtcgcaaggcccggctgaataatgtctggggcttacatgggctgcatgagtgcctggtgcgcttgggcaagctcgaggaagctcttagcattcaggtccagcgcgatattgccgtcggttccgcagatgttcctattaccacctcatgctactgtcgcttatccgcggtgggaaaggcagagacatgctgttcttctcatatttgagcgtgtttttgtatcacagaattcgttccaaccaaggctattcgcaatccaatcatagctcagcacggtcattctgtccgtggcactttcgtagcgctatacttgcttttataatttcaggtttttatgatc

SEQ ID NO: 1328 - DNA, 823 bp, Aspergillus oryzae
aattcggcacgaggctctgtgccagaagctgcttctgccgttctacgacttgagcacctcgtcgatctggataagatacaagacttacagaaagatgcgaccgcctatacatcattactaaacgacatcaataaacaattcttaacgcactctgatcaggatgtgctcaccgaggctagtgtcgcttttcttcatgcaaagagctcagacgatatgcgggaagcgttagagaataagatttcggaattgtgggacgacatgatcgacacgctcagcacattagcccggaagaaggaagtactggagggcagatcaatacctgactctactctcaatcaacttacgaatactgtgatgagaatttccagtcttgccagtgtaaccgactgcacacagactctggaagcaacaccttcacggtcaaagggcaagagcaaagacactgccgagacacctttcaatatccttctgcatctgacggaacgtggtttacgcgaaaccgaagatgatgaagaatccgcaaaggcagagacagaacttgtgagcagcagcatacggacactgctcttctatttcatgtggaaggtccagtctttaactactgctttaagctctggaaatgcctctttcaataccgaatacttcgaagtcttaacaaagagccgggagttgtttgtttcgacacttgtcgccatcatgggggcgcgttctggcttggatgatatacgattctcggcaacaacaacactcttggacctacagaccctattcggcaccctccgatatgcgggacaaaaagccagtaacgacgaagacgtcattc

SEQ ID NO: 1329 - DNA, 764 bp, Aspergillus oryzae
  modified_base (8)..(8): n is a, c, g, or t
  modified_base (109)..(109): n is a, c, g, or t
  modified_base (189)..(189): n is a, c, g, or t
  modified_base (193)..(193): n is a, c, g, or t
tatgggtnactgtgtttattacattgctgagcactttgtcctacgggggaacttcatcaagcgcgataagtacaagcgcgataaaactgttgattggctgatgctgganggccgtctaggcgaagatgaggacctggtcgcggtgcagcggcctaagtacccctgcggtgactatgttcagcatcmttntgancctctaacctcgaagcccgtggagcccaaggcagtgcgcgggcacaaattgtgcgcacagtgcctgactggagtagcggtatcttgactgagcacagtatccagaacgcttacaaggagatcatcagcaaagctgaacactacgtctacattgagaatcaattcttcatcacggccactggagatcaacagaagcctgtactcaacacaattggacgcgcaatcgttgatgcttgcgtccgtgcttccagagaaggaagaaagttccgggggatcattgtgattccggccattcccggatttgcaggagatcttagacagcctgaagcaacaggcacccgggcgatcatggattaccagtataagtcgatcaatcgtggcgagcactcaatcttcggccaactcaggcatcatggsgtcgatcctgaacaacacatctttgttttcaatctgcgtgcatatgatcgtatcaacaaaacccctgctctggaagcacttgagaaagaagcgggtgtgacatasaatgacatscaacgtggaattgcggagaccatcatgagtgacagtgttca

SEQ ID NO: 1330 - DNA, 862 bp, Aspergillus oryzae
cgccattcggatctccttcatgatggcgtcggcatcctcgacctcatggctatcctccgtcttggccttctgcgccatcttgtgcctctcggtgcctgtcaacgccctctacttctatatcgatggacgtcagcccaaatgcttcttcgaggagcttcccaaggacacattggttgtcggaaccttctccacgcaggtcatcaaccagcaatcgaacacgtactccgttgatcccagcctgaagatgctcattaccgtcgacgagaccttcgacaacgatcaccgcgttgtctccaagcgtgatggccactccggtcgcttcaccttctccgccgctgatgccggccagcacaggatctgtgtgaccgccgatacgagtgccgcgaccggcggctggctgtcgggtgcccccgcgggtgctgtcaaggtgactctggacatggccatcggagagaccagcaagatcgagacggaagacaagggcaagatccaggacatcgtccagaaggtgaaggatctcaacggtcggctgcaagatatccggagagagcaggtgttccagcgggaacgtgaggccgaattccgtgatcagtctgaagctaccaactcccgtgtcgtccgatggaccctgattcaagtggctgtcctgtccgctgcctgcgcctggcaactgtcccacctccgctcgttcttcatcaagcagaagctgacataaggggtgagagtattgggggtggataagagggaaaagaggatgcaattgttgtccggcgtaccttgtatatggggttatatttgagatcactttttccttaaccgtctatctctttggttcgtccgaaacaaatcaatggaatttcat

SEQ ID NO: 1331 - DNA, 717 bp, Aspergillus oryzae
  modified_base (217)..(217): n is a, c, g, or t
atcttctgcactttctgatcgtgtcacaaccatgggagacctggctggccgatctcctctgtcgatcgttgcagcttgtatctatatggcctcgtatctgatggggcacggcaaaactgccaaagaaatcagtcaggtcgcccatgtcagcgacggaactatccgcggtgcctacaaacagctttacgcggagagagagcgcctgattgacccggantggatcaaggacggaaagggcgacttgaagaacctacccgccagttgaattggccttttatcctctccccacatagcgcttgggagtgaaaaattgcttcctattagatgatgccaagcccctaacaataccatgatacccaatcaaagaagaaatttaatataagaacgggaggcagaatggaaagagaccaatcccgtcctacccactgctcaccctaattgttctgctattctgatgtgattggacacgttcatacaatcgtgatgtttcctttgatccaagttgcaactcctagtagtatcaaaattgcaaaaccgtgtttgcctggtttgcgttaggtatgttacctacccttacagtggcccctttttcctctgtttttctccctgtcttcttcatattctgctcagcacttggtattgatgtcacatgagagtacccttatatatagcttttgtttcctggccaggaagaacacaaatgggataattgatcgg

SEQ ID NO: 1332 - DNA, 459 bp, Aspergillus oryzae
aattcggcacgaggcgacatttttggaacgagatctccgtttcctcgttttgcactgctcattatccatctaggaagtgagcacacggcgttatgtggcccatgcatgcattttcttttggtgttttttttcttgcttcttttggcgatatggatggtcggacccggtgtcaaaaatcaggatgagagcacgaaatccgtgtttctctacggctacgggatagggaaatggcgtcagtgcatgattgatggcacacacagacatggactacagtatattgtatctctgatctttattggtggggtgtctaaggggaaatgccggatgactttcagcttctatttttgcctgtattttatatatccagttgtgtcgatgatcttttcctttctttgtataatgattgctactacgagtgaatatttctattcagtttctaatgccaagcgtcaactgtat

SEQ ID NO: 1333 - DNA, 797 bp, Aspergillus oryzae
  modified_base (18)..(18): n is a, c, g, or t
  modified_base (54)..(54): n is a, c, g, or t
  modified_base (64)..(64): n is a, c, g, or t
  modified_base (172)..(172): n is a, c, g, or t
  modified_base (207)..(207): n is a, c, g, or t
  modified_base (212)..(212): n is a, c, g, or t
  modified_base (287)..(287): n is a, c, g, or t
  modified_base (302)..(302): n is a, c, g, or t
  modified_base (334)..(334): n is a, c, g, or t
gcatatactgctcctccnaagtcaactgtccatgcttcttctgacatttacagngccatctcgnaccccgcctcagacgcctctcagagaaccctagaaacatctttcaccatccgtccatgctctggacaagcatggattgtaccagctggacttgtctgtcgtctgactnctccaaagggcccccaagtgggtggtctggacatntgggntgcaaacaacccccgagggcgactgtgggcagcgcgcccccgtcaaattcatgcctctcacgtatccgttggagnccgtctttggtctanccttccatatctccggccgcttgttaccatcncgggtgattcacttggcggcggacagctccatgaagtgctcgatgcagagggtaagcggacaaagggcttcggaacgacgcaatggggaggacgagttcatgatcttctgggtacccgatgcgatccctatgtgaatctgctgatgggtggcgagtcattcgacttccattgccattcgaatcttacccgctctgtactcccatatggactgacggagcttgatgtgcacgacgttctaaatgtgttccaggttactggactggatgaagaagggaaatacttcatggraacttccccggcgaggccaggagaatatttcgagttctttgccggggttgatgttctgtgtgcactctcarcttgtcctggtggtgatttgtctaattggggttgggaggaaaagggcgagaacatgggagccactacccgtccgcttggggtagaagtgtacaarttgaatga

SEQ ID NO: 1334 - DNA, 898 bp, Aspergillus oryzae
caatttgaaggaaagtcacggccaaaatgcattggtacatatctgtgctggtttggttagcctttggaccactagcgatcttatgtataagcatccatgatttctcacccgagcaagtcgaccaaggcatcgctctccgacaagttgtcagtgaagccactgaaaatatcaagagagaaaggacaggaggctgtcggcccgaggacgcccaaatccgtaaagaatggcgtgastgacccaagaggaacgacagcagtttaccgacgctgttcggtgcctgcagagcattccaaccaccctggcagacgatctacgccagatttatcctggagtgcagacccgttatgacgaatttctggctacacacattaatctcaccagtgttatccatcagactgcggacttccttgcctggcatcgctactttatccacacgttcgagcaagatctcaaatcaaaatgccaatacaccggctccctcccttactgggattggggtttggacgcagagaaccctcacctctctgttctgttcaacggagacgagtacagcatgggatcgaacggtgcattcatcccgaacagggatccggcttactggcccgcaatccatgagtacatccccgtgggcacgggcggaggatgtgtttatgagggtcccttttcaaactacaccatcaacatgggtcccattgatggcgcgggccagaaagcagtgaattaccgcttcgagcatcatcctcactgtctcaaacgagacatcaacccaactgtcacacgggcgtccgtgacctttcgtcacatcacggagctgatcctctcatacgacaccattgagtggttccagggcgtgatgcagaaagaccctcgattctctgtaccatctgtgccgtacggg

SEQ ID NO: 1335 - DNA, 861 bp, Aspergillus oryzae
aattcggcacgaggcgaaaacctccagccattccactcgctgcatttctggagatttagcccttcactttctgtttcagtgtcgcatatggagactgcacctggtgatgcgcggtggttgttccgtgctgtggaacactgcggaagatttcaatcagtcgcgtacaatacccaaagacatgggtcaccataatgtcaatggccctggctgagtgtgatttctgggaagagtaaccgtttatgctctacatttctcatggaatagtgagatgcatatgggcctgccataagcagacagtcctcgcggtacaacttcacaaaacatatccagccactgctatgcgcaacccggaagaagccatgtcttttctgtcttgctttggaataccaccgttcccacccctgagactgatgcctctgggcttagatacatattattggcggattgattacgctcaacttgcgttgtaatttgttgactaacagtgccttcaaaaccgcagctagagcgccgcacttgttgacaggcacacagcatttctgtctacggtgaaggttatcgaccatcgaggatattctctttttttaccctacagtgagggcttgcgactgcaaaataatttcatcgattccgcccgaggccaatcaacacctgggatcattttcgcgcgacacacactttccaaagatcataccacaaggaaaaatggcggagacagcagatcctgcaggcacacccggcgagctgccaaaacaggccaccgagccaaccgatacgctggctgcaccgacgagcacctctgccgaatattctacgttttcagctgtaaacgtttctcttcctcctatagataaatgtcta

SEQ ID NO: 1336 - DNA, 699 bp, Aspergillus oryzae
aattcggcacgaggaacggaaataggcagagcgcggttatcttcacttagatatggccaaccagtctgaccttcaacagcaattccctgtcgaatcacaggctcaggaaacctctgaatatacactactacattacctcctccgcctcctcgaagtactggaaggacgcggagacaccctctctgcgagcgatagaagcaaggtcgatagaatccgtacaattgttgaagatgatgggtatatcggcgacgatagagatctccatgttgctgggttcatgacatttatcgctacgcagtcgtgccctgaaattgtgaaaggttcatgggaggagtacatgtccagcgaaattgggactcgaatacagactattgttgaagcaaggcgttgaatggaattgccaaccattctcggtctactctgtgatttacaactttactcgtcgcatggtcaagctggcatgatgtatttgacagcaggtgtgacagtttatttctttcccgcttgatcgctatgctgtacccatgtgccactaggagaactgccaggcgaccttttatacaaacccaggttgtgtcgcccctgtctatttaatctattgctttatttttctcttctctccccagctgtaatgcgttgatattgttaccgctatagagagctaactccatgtaatcccccactgtacggagagggaga

SEQ ID NO: 1337 - DNA, 1049 bp, Aspergillus oryzae
  modified_base (113)..(113): n is a, c, g, or t
aattcggcacgaggccctaatacttgctcaaaggctaagattccgaacaccagccataccatgtctgccttcgcctcatccctgcgcccaatgatgcgcaccgccaccgggangctctctccgcgcgttccttcagctcctcctcatcgcgctcagtagctcgtatgatcatcaccggccgtctggcggccgcmaccgcggtggagctccagcttttgttccctttagtgagggttaattgcgcgcttggcgtaatcatggtcatagcwgtatcctgtrtgaaattgttatabbbbbbmaattccacacaacaaacgagccggaagcataaagtgtaaagcctggggtgcctaatgagtgagckaactcacattaattgcgttgcgctcactgcccgctttccagtcgggaaacctgtcgtgccagctgcattaatgaatcggccaacgcgcggggagaggcggtttgcgtattgggcgctcttccgcttcctcgctcactgactcgctgcgctcggtcgttcggctgcggcgagcggtatcagctcactcaaaggcggtaatacggttatccacagaatcaggggataacgcaggaaagaacatgtgagcaaaaggccagcaaaaggccaggaaccgtaaaaaggccgcgttgctggcgtttttccataggctccgcccccctgacgagcatcacaaaaatcgacgctcaagtcagaggtggcgaaacccgacaggactataaagataccaggcgtttccccctggaagctccctcgtgcgccctcctgttccgaccctgccgcttaccggatacctgtccgcctttctcccttcgggaagcgtggcgctttctcatagctcacgctgtaggtatctcagttcggtgtaggtcgttcgctccaagctgggctgtgtgcacgaaccccccgttcagcccgaccgctgcgccttatccggtaactatcgtcttgagtccaacccggtaagacacgacttatcgccatgcacaccatgtaagattacaacgagtagtagcggctaaatctt

SEQ ID NO: 1338 - DNA, 1123 bp, Aspergillus oryzae
aattcggcacgaggcattatcgggacagttcctctcgtggggaggagaacgatcctacacagggactgctccgcggtgaccattctccgcggttgactcttggctaccactttgtcccgaagtcggtccctttgctatgcgagattacgatgaaacctaccgagatttgttcacggtgctccgcgattatccgggtatgatcctagagcgggagttctggtcgccatttgtacatcatcgtctgtaccgttgctcgatgggcggcatggccgaacccatgggaatcgctttggcctgtgtatcggcacatgccagttcagtcgagtcgagctatgggttcgtagatcgcatgattaacgaagaacgcgacaagctcgttcgcaacttccacaagcacgtcgacaccccagagacatgtctagccgcagtacacgcagttgccctggtaccagattctgggcctctttggagataatttcttgcccgcagctattgtccggcctcaagtcccgaagaagatcaatgacaagcgccgcgaggaaaatgagcgagcggccgagttgcacagttcctttttgatgaagatggctcgtcggctatacaagatgcatcaggaaaagctcttgacccaccacaacgacgagactgattggaaccggtggaaatatgctgaatctctccgtcggaacttcttctttgttaacatgataaacatcctcggggcaaaggcccgtttactcaatgaacagtactttgaaccccttggcgacgacatcgtcctccaactcccccttccagccacggagcatatgtggcgctgttgcgacgaagaggagtgggcgatactcgtgagcacgcaatgcgtcggccggccaacagtcctcctgtggcccgaacattgcgcgactgttagagcaagacaaggcagggaccttggatgcttctacgctgttgcccgttactcgactgattttcgcatgtkctaaggttgccccgaagtggattcccttggtgatttatgatttacggccgcaatatactagctttctttagttgtctcgaattttgcatcatggatatacacggtttcatctgtacacagatcgatgaatagggggggtgt

SEQ ID NO: 1339 - DNA, 495 bp, Aspergillus oryzae
aattcggcacgaggcacatttccataccactccvacatatcaatcasacagctcaatccacccagactacaccgaatccagcaatccaaaatcgcavctcctcctcctggccctcrccctcstcaccaccctcaccagggcaactgccacccctcgccaaaagtacgactcttctacctcctgacagagacctaccggtaatgcggggcattccgcgcaactggcacacttgacccccaagaataggtcgctvgtggtgaaaaacgtgcgaacgcaggcggagcgaaaacatccagcctcagtaaccattcatacatgcccccgcgtaggctgagcggcgcgaaatgttagctactttttgtggtctgggagggcgaggtgtctagggggtcgatgcaggtcgatgtgttttcgcgcgtacataagcctctattagcgcgggagtgcgtatktacgtcrtatatagtgamtgkggatsgctgcagtatgtgtaga

SEQ ID NO: 1340 - DNA, 593 bp, Aspergillus oryzae
ctcgtcatcctctgtgaacaagcacctccattttactatccaacatggacgataacaaccaagccaccactctgagcaatgatcctgccgttaacgcacccgataccgcgacattgggcagggacaagggcaaggctacgcaggatcctgctccaacggatacgagcatggacgaaggtgaaagcgatgagagtgaaaatgaagacattatggaagaagaagatgaggatggcggagatgacctcgcgccaatcgattcctctaacatcattagcgggcgaaggacacgtggaaagaccattgacttcgtagacgccgcgcaaaagctcaaggatgatgagggtgaggatgatgaagatgatgaggactttgaaccttgaagacaataacgacaacatgtgagactaaatgggattactttacggctcatacaatctccttgggaacaggggcaagtgatcggcgctgatttattggggtattgataattttctgttctgactcggatagttgacgcgtcaaccacaacttttttctctcttggtccttgtttattcttcagccgactgccaatattcttgagacagggcgta

SEQ ID NO: 1341 - DNA, 643 bp, Aspergillus oryzae
ggaagtcacaaatatagtcagaagaatcgagtcgcaaataggatctcggtcgggtgatatcccagagaaagatatcgaaatattctgcaaaaacgccgctcacatcaaggttattcgtggacgcagtatccctgaaattgatggagaagcacagactcttaaggccatccgcaacagtataagcatccctgactctcttattcctgtattcattgccttccaggccttggacaatgttgtgaccgacctccaagaacgaagaattccaagtggatcgattgacgacgaggtggcatggggcgctcagattgatcgtgtgctctctgcgctcacggccgacgaccaatctacaattgacgaggacgctcgagagcgcatttcggaagccatccaagaactacgccggacagaaggcggggaactgcataatatttcatcactcactggtggcttggtcgcccaggaggcactcaaggttatcacaaggcagtatgtaccgttggataacacgtgcatcttcgatggagtgcgaaccgtagcgagatgtatacgctgtgatgcggttgcgcaccggggactatgacagagtctctcttaaggagggcaactgtaatgaaatgaaattatgaattggtgtatcatc

SEQ ID NO: 1342 - DNA, 1022 bp, Aspergillus oryzae
cccgagggggtggctagttcagaacaagatgaagatatccaccacgcagacaatgatatgttaggtcaggatgtttcggattcagataactcaaacggcatgccgccattatgggggattgatctcgaggcattgcgacgcaccatcgtgataactcgattggggcctccaacgcaaatgaacctcttccaattttcacaccaggtgctgcgcggtcatatttacttaagtcatttacggaagcatcaaaggacaataatccagcatcagataagccgagccggaagcgtctctctcaaacagacgccgagaaagagacatgtttgagaaatctattgcggtctattgacttggtatgccagtcttgggctccgtttctcagcagagaggacttggatcgacgagcatgggcctggtatacacacgtcaggcctgctgtccaaagcggagtagcaggctggggagagaaaggtcgtgtaaagttatctgacattctcgcattgaggagacaaccgtgattgcagtccgagtgttcgagactttattgttaaacaattgcaagattgtcgcaccaatcaaaacggattccagcccatgaacctagaacamaracggacttcatgcttctgctccacatagcatcggatatcgcaggatccttgtccaccgaaattgacacgaccggtgttatccaacgtgtactgtgttctagaagctcggtatttggataaggcagccgtcgtgtgggtcaaccggtgtcgctatgagtggaatcttgtcacagacaccggttctgccacactgaagagtcaagactgctctcgccgatgagaatttaccgtctcattgataccgcaaaacgcttcctacatatggcgcgcgggcatatactactagcattcaaaatctgaccagaagatggtacaatatagtgggggtggrtgcacgtagcaatttctctgtctcagacaatacatgtaatattgcctctgttacacctcaggacttcatcgggtgcctgc

SEQ ID NO: 1343 - DNA, 831 bp, Aspergillus oryzae
aattcggcacgaggattttgcattatttttgccaacagggttcagttgttggatttcaatattgccgccgtggttgtcgaaaggattcagtctgcgcttgtcatcttctatactacacctggctggctctccactgtggaatctggattgctcttcagagttatccgcttcttctttcggacttaatcggtcgacttggattgagcctttacagccgcggaatactagcccgccgagtacctcggactcgtattggggtctacagagtccaagtgcactatccggcttcagtcaaggacaagacccagcagccagatctagtagcagctcaagttcctcttcatcgtttgaaaccacgccggtcattcttggtacaccgcttggttgtgaatccaactattcaaggccaggatacgaaaatcaaccgccctctggtctatccaagcagatccaagggaagctcccgacagaaacctcactaacaccgtgctttgagtcatctatccaagcacagctgaagaccgacttgatggcaatcatggcagataataacacacacagttatggctggcaaagccggccatcacatcctcttcatccttcctcgatggctatggaccaacaaccgtttccccaaccacagactctcccaccatcgactggataccatgtcggatatcatactccacaggccacaacgcagggcttttatcaaccgggaattccggcacctcagtatctatgctcgccacacccaggtatgcttcagagccgacagcatccccgaagttcttccattccatattccttccccggcagccacattgcagg

SEQ ID NO: 1344 - DNA, 1130 bp, Aspergillus oryzae
aattcggcacgagggactgggtcctgttctgaggttgaagattccttgcatattcccatgtccataatgtttgtcggtcaatgatatctgcttgttcattcatctcttcgcatataaattgaatctattgcttcttcaatactcccatcttgttatctatcgggcccttatctcattactgtcctaaacggaggaccggagaacgcttgaggaagtgcaaagcgagagaaggaggagaaagatcacaaataaataaagactaaagaaatctctgttggcgctttcgactcatcaacatgactgacacgccactggcatctttgtctttgacacatgtccattataatccgaacgacccgctctcctttttatcggcctggcttgccctagttccccaggcattatgcgtgacatatgtcactcttatctgggccacaagagagatggaggtgctattgatgttcgcaggccagatgggttgtgaagcattgaactttgtgctaaagcgaatcattcaagaggaaaggccgaaacaaatgcttggtaaaggctatggcatgccatcatcccacgcccaatttgtcgcctacttcgccgtctatctggggctgttccttatctttcggcataatcccgcgcaccctgagtcatcatttcacattctcatacggattgtacttgccatgggcttgagcgttggcgccagtgccgtggccatcagtcgtatatatctgaactaccacacgcctaaacaggttttggcaggctgtggtgctggtattgggtgtgcctttggttggtttcttatcacggcattcctccggacacacggctggattgactgggtactcgatttgaccgtatcgacgcagttgagactacgggatttggtggtaagtgaagatctagccgaggccggatggcaaaaaatgggaagcaaagcggaagttgaagcgtcgtgggcatattaatagtgatccccggtccccgaaaacagattgaacagtataggtacttgagccacgtatatttcgttccttaaactttggagagaaatgggcttacaacgtgttgatcgcgatgcccttggatccacttcttttggcatttcgtcaatatatatatacaca

SEQ ID NO: 1345 - DNA, 1154 bp, Aspergillus oryzae
aattcggcacgaggatccggttctacaatctccgtaactacgaccgtatcaatgtcagcggtccgctcgtgcaagccgagcagagaagtggtgtcgactatgaagatgctcgcaagcagcacgacgtcaatgtggttggacagggtggctatggtccaggagctcccgctcccgtagcgcattcgataccacggctcctttccagcaatatcagcagggtgctcgccaggttcctggtgccaagacagcctctggacgatggaacagtgtcagctcgtgctacatgcttaatggagaggatatccgtaacgtcccttgggatggccctcctgaggccgagattgacgcatttgtcactgaggaactctacgttcactcgaaggtcatgattgccgacgaccgcgtggttgtgtgcggttctgccaacttgaacgaccgatctcagcttggtgatcacgattctgagattgctattattattgaggactatactcctctggagtccaccatgaacggcaagccctggacagctagccgttttgcatcttccctacgtcgctacctgttccgcaagcaccttggtcttctaccgccacaggactacgagcgccccgatgctaatttcgagccggtcggtgtgcctaacgagttcaactttgacgctcctgagagccggcttgtggccgacccattggcggatactcttcataacctgtggaacagccgggcgcacacgaacactgaggtattccgcaaggtgttccactcagtcccagatgactgcgtacgcaactggtccacgtataaggaattctatggctacttcttcgacaaggcggacaagcaagcgtacggcgaagaaaaggattcgccaccctcccgttatcggtatggacacgttgtgcgcgatgacttcccgggcggtcctgagggcgttcgacaggtcaaggagctgctcagtaaggtcaagggcacgctggtggagatgccattgatgtycttgattgaagaggacgttgcgaagtcggggattggcattgaacgatatcacggagccgatttacacatgattctagctaatgtcgctgttttggtagtttgctggattcttgccattgagtytctaactaaatgaatttaaatttttttttttt

SEQ ID NO: 1346 - DNA, 1008 bp, Aspergillus oryzae
aattcggcacgaggatctctcctccttccatcagcccttacgatttcaatacacccttagctcaccgtcctatcaaccgacgtataccggccgttggttgtgcatcatcgcgagctacgttccacgttttcacgaagtcccactatactttcttcatcagccaatatggtcggtcacggcgcctcggggatgcttggtgaagatggtattcatgttgatatgaaccacctgaagagcggcgaggtcaacctaggtacctcgattatggctatcaacttcaaagatggtgttatattaggtgccgacagccgaacaacgacgggcgcttacattgccaatcgagtcacggacaaattgacgcaggttcatgatacgatctggtgctgtcgatcgggatctgctgcagacacgcaagccgtggcggacattgtctcctatcacctcaacatgtattcgattaccaacaatgaggcccctagcacccaggttgccgcgtcgctgtttcaggagctgtgctatgagaacaaggatatgctgagtgctggcatcatcatcgccggatatgatccccgacatggcggtcaggtatattcgataccgctgggcggatccctacacaagcagccttattccattggtggatctggttcgacctacatttacggctactgtgatgcgaactggaaagagaatatgacagaagaggagggcattaactttgttcggggagcattgcgagaggctatcaaatgggacggaagctcgggaggtgtgattcgactggtagtattgacggctaaaggagctcaaagacatctctacctacccgacacggactacaccgggccaggtttcaccaactgatggatataatcgtattgaatgatgatctggtcgactttcctttctattggactgcggttagctgtgaaccctccgatctgagtaacatgatagaggaaccattatgatcctgtgcgagggcattaatataccagctgtgagagc

SEQ ID NO: 1347 - DNA, 672 bp, Aspergillus oryzae
aattcggcacgagggaacaggagaccgacgccactggagaacctgccgagtctgccctgcttgaacaccatatggttgctgaagctgccgtggtcggtattgctgacgaactcactggccaagcggtcaatgcatttgtgtctctgaaggagggcaatgagacaaatgagcaggtccgtaaagaccttgtcatgcaggttcgcaagtcgattggaccattcgccgctcccaaggccgtctttgtcgttgatgacctccctaagactcgcagcggcaagatcatgcgacgtatcctgcggaagatcctgagcggtgaggaggacagtctgggtgatacttctaccctgtccgatccctcggtagtcgacaagatcatcgaaaccgttcacaccgcccggggcaaataggtggacgacgacatgacttatgaaaagaaagacaaaaatcaaagaaaaaaaaaagattgaaaacagcgatagtatgacatgatattcttaattcctttgcactggactgctgcagcgtttgtgaagggcagaattatcctcatgtgcgcgtatttcgctttggctttattctgtgattcccgtgttctgtcacttggagaagcgatgttattctgtttgatatatgtatcatgttccactttctcaagataaatatatatatccc

SEQ ID NO: 1348 - DNA, 769 bp, Aspergillus oryzae
  modified_base (326)..(326): n is a, c, g, or t
aattcggcacgaggctccttctgcaaagctcgcttgcgaatacgctcctcaatggtgccgcgagtaatcaggcgatacaccgtgacctgtcttgtctggccgagacggtgagcacgatccatagcttgagagtcaatggtagggttccagtccgaatcataaaagataaccgtgtctgctgcagtcaagttgataccaagaccaccagcacgagtagacaaaaggaagacgaagatctctggacgctgctggaagtctgccaccgtgtcgcgacggtcctccaatttcgtacttccatctaggcgacaatacttataattgcggtnggtcaagtactcttccattagatcaatcatgcgtgtcatttggaagtagagtagcacacggtgaccacctgccttgagctctcgcaagagctcgtctagcttagccaatttacccgaatctgtgacgaatcgacgcatagatggcacttcaatgtgcgtgtagcgtcccttgatggatattggctgcggtaacatcggcggaagggagtaaggaatagggtccagcttcttctcaaggatctgttgctcaagttgcttagaaggcgtgctgaacaaggcatgtcgaaccgaaacattgaagaggctatcattcatttcgctcagaggtgctcgactggaagaggagacggtaatcggaggcgcagacgctgcgggactgacacaaggctcgatgatgccgagacctttacgctcgaaggcggactgtgccacggtcgttaact

SEQ ID NO: 1349 - DNA, 824 bp, Aspergillus oryzae
aattcggcacgagggacagtgtgcttcactgctggatctatctgtctcccctcagaataaactgactcaaaacgggcttgatatctgttcataagtagtgttgatcttctgtgccttctcacgagataagcggcaccagcggtgtctatccgggtggagcaaggtgtctgatagtatcagaagatctgtcacagaaaactggcttttctaaaggacaaggacgcttggcttgctttacagtaaattcctttcgccttttgcccgtgatcctggaggtttcgagaacatggcaacccccgcccattgctattactgctttgagtgcctcgccgcctcgtataaaggtcaagaacacattagcctcacagccgtggaggagctatgggaacgatacgagcaatttaagaaagtttccgctctccaggacaacgatgagtcggtttctctgagggagagtgccagtcttggcctgcagtctggagatgacgatgatgacatagacgatgtatcctctaaacccaaaaacggccctcagggattgaagttacccaatatcaatcggctccagagtcagatcttgtcggactcgagctccgctaccacgccgtcgagtaattcctcgcactcaggcctatctagttccacccctactactaccatgaccactccaagctcacagtcgctgcagtctgatgcgagcggctggagacgtcaaagggaaaaagatcggcagtatccgttattcgtaacttggaacactctttccaagagcggccgtaagtcacttcgcggttgtatcggcactttcgaggcgcaggagcttg

SEQ ID NO: 1350 - DNA, 415 bp, Aspergillus oryzae
aattcggcacgaggattgaaaccaattatccaatacaatgcagcttcttccagcctttatcgctgctctcaccctgagctccggagttcttgcccaaggctggcatggatgtgccggagttcgaatgtcatggcgacgaggaatgccgtaatcagccagactgccagcagctagcccaccataatcccgacaagattcattgcggtcaagcgaaccatccttacgcttgttgggcttatacaaactgatgacgagggttgccatgcggacacattcatgttcaatgattaagacatgaacagaccacccagctggaagtcgctaagagaggtgaagagaagactgatgtatcttacgaactgtagttatctggcctcttcatgtgtggctttttgattccaatgtctaatttgtt

SEQ ID NO: 1351 - DNA, 698 bp, Aspergillus oryzae
aattcggcacgagggtgacttgctggcttacgcagccatggcgcttctcaatcaaatgaatatatcttacctcagtctcggatacgaacctcttacgatcctgggcgatgtgacgggcttaccatcggccattgagaagattacgcggtcgttataccgtcacaccttccaacgattaccgatagagggaaaaaggcatatcatgacaagttccgccccgacccgttcttggactcagagttatacttggtgtttccatcaggtgtccctggactgcgacatatgcttgccatggtccatatggccaatatcagcattcgcaagcttgttcgctccgaagcaaagtccgcctcgcataaagaaagccccagagatgaccgatgacgtacctcatcatcgacatgtttgcgtggtatatctcattaataattatctgaacttcatatgggattggtgttttggtttacagccgtcattttgttgattggggttacaaaaacatataagtatatagtgacacttccgttgatcgcgggttgtacatgcgtaataagcatcccaccgtgatttcttgtattatatatcataaccggcgttcgttggcctcgtttactcgagaataggcacattgtgattgaacattggattttggttagcgttgggtttcagtttcaataccacataattatcactccttt

SEQ ID NO: 1352 - DNA, 1029 bp, Aspergillus oryzae
  modified_base (509)..(509): n is a, c, g, or t
aattcggcacgaggctcgtctacaactccacgcaagccaaagccacccactgatcaatattgttattctactcaggttcctgtgcatgatgacgactcaccgaagcggtcccgcgcacgtcgccagtccacctccacgaggaccccgtcgaagcccaagcccacgacatcatccaagccgcctccgaagctacggaagaagatgcggcgaaagctggcattcccgcgggctactcgatcaagaactgggatcccaccgaaacccctatcattctcctgggaagtgtcttcgatgcgaactccctcggcaagtggatctacgactggacggtcttccatcacggtgcttcgactccgatggccgatgtcgcgggcgagttgtggttgttgttgatcaagttggcgggtaagatcaagagggccgatgagtgtttagaccggatcaagcagcctgagcaccaagaagtggtagaggactttttggagagtggtgagcgcctgtgggcsggntcttaagaaattgctgaaaacctgcgaacagttcatgtggaaagcggccaagcgagaaggtggtaagagtgtgtcgatgggccgcaacgcaggctgtgaatttgtcgagacgatatttggtcgcgaccgcgaattggagagcacggagaagttgatgaacagcgttcggctatggaacatgcgatttgacgccaactgcgaggacattcttcgacgaccgttggcatagtcctcgcaaccctttgcgatatatcaccgggcatcggcccaacaagaaaagtaaacttgattgattttgttcatttcaacttcaagagtcgggaatgaataatcggaactgcagggcaacatcagagctgctgtttgagcttcctcttcctcggcattttacgtttgatctgtcggattgcatttgcgcgcatttggtttggcctactgactggattgctcttcgctctcagttactcgttcaagggacattgccgctatcagcgcggatcattctgacacttatcttttt

SEQ ID NO: 1353 - DNA, 908 bp, Aspergillus oryzae
ccctacctttctccgcttcccacccaccctgaacccacacctcaagtgcaattttcagcctccttccgtggccatctgttcatgtgaacagcagccatgacatcgcgaaagacgcagcaagagatcgacaagaccttcaagaaggtcgccgaagtattcagtcgttcgagggcatctacgagaagatccgatccacgtcaaatccgacccaacgggataagcttgaggagaacttgaaacgggagatcaagaagctccaaaggtatcgcgaccaaatcaagtcatgggcatcaggcaatgaggtcaaagacaagggaccgctgctggagcagscccgagccatcgaaactgtgggctaacgattccccgacaaatcctgccctccaacggcttatcggacttgcgagtwgctaacacaggtgcagtgcatggagcagttcaaagcggtagaaaaggaaatgaagacgaaagcatactcgaaagagggcctttcggccgcatccagactcgatccgagagaaaaggaaaaggtggagacaagtgacttcttatcgagcatggtcgacgagttacaacaaaagattsaggccatggaggctgaggaagagacgctgcatatgcagatgaagaagggcaagaaggacgtcgccagggccaaccggttagcggatcttcagcggataacggaacgacataagtbgcatgtcaataagctggaactcttgctacgatcgctgcagawcggcaacgtggarggtaaaccaagtcttggacttgaaagaaagcataaagtactatgttgaagacgggcataatgtggactactctkggagaggatgagacgctttatgatgacctaaacctagatggtgagaytgaggcacagttcggcatgacgggtgaaaaca

SEQ ID NO: 1354 - DNA, 994 bp, Aspergillus oryzae
aattcggcacgagggacgacgtcacctaacgccttgtctttcccttgcactaagtgacggcaacaacatgtgacctgtttcctgagctttagaaaaggcccgtcctgttccacaaaccaacttgttcaaaagaacactcagatttgattgagttttactatcagctcagatcgcctccaacatcaatcagacctttatttgatttcgactgtagactaggctcctactcgcactttgacaccatgacgactcttcactgtgagtattgatgaccatcgtctcttattctctactgtkgaatgctaaccgacaatcactagatttacctccggtgaagccctctgctattgctctgggcacgtttttcacacacaccgcgtccytgggaatactggctcctgtcttcggtgacacttaccatcgtgcgcaggcagccaacacgaaagaggaattcatcaagtccaaagaggctgccggggctgccgcagcctggggaagctctttggtcggtagtgccatgcaaacttatggagtggctgctctgattaacgcaaccgggacgctgagttacaagggcgcggcgtatctgggaagtctgattttcatggctagctctgcaccaagtgtatgtgttaattatagtcttggttcacaaagaaggattgctgtgctgacatcagttgatagttcatcagccaaatttttaccgagaagcggcctctggatacagttgctgtaggtgcagtgagccgagtcttcgagacagtsgggcttagtttattccttacttggtggggtacgcgtacgaatcctttcgattaagtatacctctgttatgctttgaatatgatatttgcttgagaggctatccaactttgtggacacggttcataggcgtgctcagtacatgttctggtgctcatgctgtaatgtggaagaaaaggtacatggaaccaagtattttcaaactacaaaggaccgatgaaaagattgc

SEQ ID NO: 1355 - DNA, 905 bp, Aspergillus oryzae
aattaataccattcttaccacttactcaataccacagtatttttctaatctcttctgacaaccatgtccggaggtctagaaggtaaagtcgccatcataacaggctccggctcaggcttcggccacggcattgcaaagaaattcgtcgaagagggcgcgaaagttatagtcgcagagatatccaaagagaacggcgaaaaggtcgcagcagagctcaacagcaaattcgtctttgcagacgtaacaagccgagaatcctggcaaacattactccagacagctctggacacgtacggccagctggacattgtagttaaaaatgcgggggcaacctattccaataagcccacaggccaggtcacagacgccgactttgacctatgcatgaacgtcaatgtgaagtcgatctacctctcggcgaacgtcattgtaccgtatttcgaacagaataaccgtcccggatgttttgtccaggtttcttctaccgctgcgcttcggccgcgccccggcttgacctggtataatgcttccaaggcggcggttagtattgctaccaagacgatggctgttgagtatgggccaaagaagatccgattcaattgcgtttgtcctgttgttgggagtaccggaatgacacatctgtttcttggaaaaccagatacggaggaaaaccgggcagcatttgtatctacggtcccgttaggccgtcctagtaccccggcggatgttgccaatgcctgcagtttccttgctagtgatgaggcgcagtttatcaccggcgtggacctagaggtcgacggcggtcgctgtgtctagtgatcatctcctaagaaggtggtaggattaatatgtacataagccacgataaaacgtttctgaggaatccggctacttctcaaatacgt

SEQ ID NO: 1356 - DNA, 869 bp, Aspergillus oryzae
  modified_base (19)..(19): n is a, c, g, or t
  modified_base (384)..(384): n is a, c, g, or t
aattcsgcacgaggctgtncccgatctatggtgcsgactttggtagtgacagggatgagcctggcctgggtacggttgtatatatcaatgctggactcactccgcagctggttgagattggcaataactggacattctcctatgtggctcgctccgcttttgatagactacatgcttactcgctaagttctgtttacggccaagcagaccctaccggtgttctccatagtacgggggctatgtggtatcccgacccaaggttgaaccaaaccgactcagatatcaccctaatgatgctcacacaaaatgatgtttattatcgaacaccaagtgacgatccttggatagcagcccacgaaaagcttaacggaagcgacgtatatntgggggactacacagttagtttgctgggatgcatcgaccagtatcaattctgcaatcccaatctagagggcgawacggcctgcaccaaattgggaggtattaactcagttgctaaagatatggtcgatcgattcgtttactttaatttggaccaactcgcaacggtggaacggtttatgacgacaacccacctgcattctatgtaccaggctgtccaaggaaggggaggctcagcactagacatcggccaaaaactgtacaacggacaccagtactccgtacccgctaaccaatggcaaatagaagtctccaactggtttgccctttccctagccaaggcacaagcatggcctattgaatgggcgaccgaaccccagaactttgatgcccccaaagaaggcgaggactccccatggcaatacagcccgcccaccacgcccgaggscgaagcccaatgtagaaaccaactcgtacataactcggga

SEQ ID NO: 1357 - DNA, 718 bp, Aspergillus oryzae
aggctttcacccgcaaatttccgtgggaatctattgagaataagctccctcttatctggttatcaacttcggagtttcttcatttccatatccacatagcaatcatgtcgctcgcatctggagtttccatcaccgatgaatgcatcaacacgttcaacgacttgcgcatgaaaaagggcgacaagcttaagttcatcatcttcaagatcgccgacaataagaaggaggttgtcgttgatgaagcctccaccgatcaggactatgataactttcgcaagaagcttgaagatgccaaggacagcaacggcaagcctgccccccgttacgcagtctacgatgtcgaatacgaacttggtggcaatgaaggcaagaggagcaagatagtcttcatttcctgggtgcctgatggtgccccaactctctggtctatgatctatgctagcactcgggagaatctgaagaacgcactgaacatctccaactccatccacgccgacgacaagtccgaaattgaatggaagactattctgaacgaagccagcggcggtaaggctggtaaataagtaacggtaccggctgggcccgggccaggtgagcttgtgtgtgctggttattacactgcgccgttctgttccagttcgcgaagtgtctcgcaacgaaccaattcaatgacattctcctgcacaaattttagttcaatatgagatcgttacgactt

SEQ ID NO: 1358 - DNA, 233 bp, Aspergillus oryzae
gggctgtatgtgtccaatgcggacattgacactcagggcaaagctatacacgtgccttacagcatattaccgtcggctgttacctgctcaatgtttgtctcattggtctctttgccattgcaagcggtgctcgtcgaattgcgctcggccctctcattctcatgataatttctcttgttgtcatggtcatctaccacgtttctctgaactcggcgctggatcctctcatcaac

SEQ ID NO: 1359 - DNA, 322 bp, Aspergillus oryzae
tcggcacgagggacgaacattttttcagtggttctcagcgtggcttggacgcgaattcttggccctccccatatggatctgggccttctacggtggcgtaactgttacttggcgcaaccggcgattccgagtcggactcgacatgaaagttcgagagattggtagtgaaaagacaccccagcctaactccaaacaagccccagtcggtcaagggaactgaaagatagatacgtgggtcatagcacttcgaaggaacgagggacgaatgtacgaatatcactgaatgaaatcgttaaaaaaatataaagaacttttctatcca

SEQ ID NO: 1360 - DNA, 1010 bp, Aspergillus oryzae
ggggcagattcatcttgggcttcggcgtcgcgacctccgccacggccggtccggcttacgtctccgagatggcccatcccgcgtaccgaggtgcaatgacgggtctatacaacgtgttgtggttcggcggtggtattccgggaaccttcatcccgtggaggacggctgatatcgaggggacgatgagctggcggattccgatctggctgcagatgatcttttcgggactggtacttttgttctgctttaccgtgccagagtcgccccgttggctcatctcccaagacaagcacgaagccgcgctcaaggtgctagccgaataccacggagaaggcgatcgcaacgcgcccatcgtgcaactcgagtaccgggagatggtggaggatatttccatgaccggttcagacaagcgctggtgggattaccgggagctattcaacagtcgcgagacacgttatcgatccatgctcgttatctttatggccttcttcgggcagtggtccggcaacggccccgtctcctactactacccacagatgctccgtggcgcaggtatcgaaaacaataacacccgactcctcctgcaagacctacaaaacgtggtgcagtycatcggcgccgtgttcggtgcgctcatcaccgatcgtgtcggtcgtcggccccagctgctcctctcaaccggtatcatcgtcatcctcttcgccatcgtgctggcattgaacgcaaccaacgtcgtggacggtccagatggcgagcccatcgctaagagcggcatcacagcccgggctcaaatcgccatgatcttcatcttcgggttcgtgtatccggccggttggacgccgaatcaggctatgtacccggttgaatgtcttcgatatgaaagtcgtgctaagggaatgggcatgaataacttcttcgtcaacatcgsctccttctacaacaccttcgtaaccggaatcgccttctccggcgccggctggaaatactacttcctattcatattctgggac

SEQ ID NO: 1361 - DNA, 450 bp, Aspergillus oryzae
  modified_base (44)..(44): n is a, c, g, or t
tcgctaagcttgctatcgccttcsgcacgcggcaatcttcccanccccacgaagcgggcaattggcattggctatctggtctgtatgggtaatgcgggaggcattatcggcagtttcatctatcaggagaaagaggcgccccgttatcccaccggctacgaaactcctttgcctttgcgtcggcaggtttggtagcatgcctggtacttgagttctgtctctttaggttgaataaacagaaggcccagttaagcgaacagagatccgagaccggtatacggatgaggagttgaatgawatgggagagaaaagtcccctgttcaagtatacactgtgatcggggtttctgcgatgatcgtgcgggaagggatatatgcagcctagcctgctttagaatgtcttaggagatggtttttgtctactcattaatgaatattagctccttcttct

SEQ ID NO: 1362 - DNA, 850 bp, Aspergillus oryzae
  modified_base (451)..(451): n is a, c, g, or t
gaaggtaaatcattgtttcctcttgtatatacaccctcctccgatagacgatcttgagcacttttatctagagtgatgctttcgactttctgcgagcgacggcgcctgcgattcgatttttgcattttcacatttcagacgataccttgttttttattcttcggttagggaaaatacgtccttttgacctcgtgtcgttttggccgcgatgatgtatagaaagtgcggcgatctgccatattggcgcgcatttctttttggtccggagttttttcttggtgtcctttggcgactctgcaagatactcagcggtttgccatctatttctgatatccatggttggttttgggtgggtcggatttttttcatgcttttagggatctagaaaggtggaaacgatatacgtctgcattgattgggcctgtgaattgttcgggatgtcttgtgtgtntgtttgatcttatatttcgcatttgtgcctttaccaaatttttttcttattctttcatgtatatgggttggagatgggtgacatttctatgttgttgcttctggctaacggctgtgaaaatccatggactggatgtggagtttgtctcggggtctgtctggcagacatagaccggttttacttgaaaactatgttctttgtcgtgaatcgaccatcaaatttgcttcatttgttccacgttgactcgtttggatatttttgatatatctgggaactcccggagagtgatgcagtgtatgatcttgtgttccgttcgcttttgggcattccgtcattccatcccatttcctttgtctatatgtcttcttatcttaagctatgcgggtaatgcctaaacat

SEQ ID NO: 1363 - DNA, 970 bp, Aspergillus oryzae
  modified_base (115)..(118): n is a, c, g, or t
tggactcggatccaggtcccctcatcatctcctgcattcgcgacccccgcgcacccwttgcgaaaaaacaaatccaatcttcttcttacgaggacgtctatactgccaatttddnnnnvcccctccacccttcggcccgttgctttccgtacattcacccggaaacataacttgacgatttcatcatctgcactacagactctagctaccttcgtgggcaaaaattgcgggtcaggatggcgcgaagaaggccttgcagagcgagtattggacgaagtggctaaaagctggaaaaaggctggaggaggtgtcattgtcgaagaaggcaaaggtgcctctcttaaaacgattttgcaaaccgttgaagggaatatgagtgggggtagggttgttgctggcaagacccctacaacagatggcgtgtccttgagtacgtctcggaatagggagagcatgcaccccaatctacatttgtctccctctgtagcgtcgaccctaggagatggagaacacggggactcgaacctttcctctcacccgagaagttggatcaaggtagttgatgcatttgatattccacgtctaacatacaacgccgacaagaaatatttcgaggttgcaaagtcgaaggcttctctgtttccgcagccctctcataagactgccttgttccgggatcgttataatgtgattcaccagcgcttactacgaaatgaatcgtttcaactgtcactaggctcttctagcgtaccttcattatcccgatcctcatcgtcttttgctcctaataaatgctacaagcttactccagtcgcaaacctgctgggcaggagtggcacatcacatttgattcttggcatgctttcagtttccccaacgggtgatttgtcccttaccgacttgacagggagtatcgccttggaactgagtcatgcacggatgatacctgagaatggcgcttggttcgcgc

SEQ ID NO: 1364 - DNA, 916 bp, Aspergillus oryzae
cgaggaatttccttctcttttcttggcttctcgagtgccctttcactctgtcggttgttgtctgtcttgtttttctgttccactattgctgcacccctctgtatttcatttaatctcttaaatcttactatttaccattaacccttgggttttccgtggcctaccgcggagttggaggaagtactgcttatcgcgatgaattaagtctcttaatccagatagactcatgataaagccatcgactggctctatagtgtacctcagatactcacaatggcgactttagccgcctcaccgccatcgtcaccgtcctggcccaaacgacgtcctcgggcttgggctctccgatgtgaacgctactgctgcgcggcggcgtctttcttcccattagcattcgtctacggtttgacaacatgggcggtctatgtggaagccagtattggtataaggccgtcgcgaaattcttggatcggcctacccacttcgattatcggcatcgccctctatatttgtcttaacgcctcgtatagcgttgcggtgttcactgatcccggctcaccactatcgagcaacagacgacatgaatatagcgctctgccggttacggaactgccggagttcacttcatataccgtgaattccatgggaggatcccggttttgcaaaaaatgccagtgtcctaaaccggatcgggctcatcactgttcgacctgtaagcgatgtgttttgaagatggaccatcattgcccgtggctcgcgacgtgcgttgggctgcataactacaaggcctttctcctgtttcttatttatacatcgatattctgctgggttgatttcgcggtggcatcgagttggatctggaccgaggtactcaatgatacgcggtatatggacaccattttacccgtcaatgttg

SEQ ID NO: 1365 - DNA, 299 bp, Aspergillus oryzae
  modified_base (131)..(131): n is a, c, g, or t
gctttttttattcccttgtgcgaacaacaactctttacgccagggttgtctcaagcaatatcattcaattatgcggatttcccagatctgcaccgtgctctccacggtaacctcagccgtcgctgttggtnhmaatcccttgccggcgccgcgcgagatctcctggggttcctccggtcccaagtccatcgccggagagctgcagctgcgcaccgactctgactcggctgacgggattgtggccgatgcatggaatcgtgcatgggagaccatagtcgccttgcgatgggtccccgctg

SEQ ID NO: 1366 - DNA, 556 bp, Aspergillus oryzae
agcttgatatcgaattcsgcacgaggctattgtgtagcttccttgttctagactaaccgctatcattcttcctcccaacgttccattcagctgatcatgccggactttatctaccaaaataaccaccgactggcgtcataatagacagcggtactactaaactctacttccccactttaccgatacctggtgataatcatattccctgctttcactctatctcggcacatggtacagtacatacatactataacctgaaacttgtttcaccaatccacacacaaagtacggtaagtgcaaaggtacatggtgggggttgcgtttaactcaataatgcatgggtaagactgataggagcacatcatcgctcatgatcatccccgctcgccgactctgacgtcggtttgcagcgtcaccgtgaccgagatgaggggctcggttatcgaattaatctattgaatttcagcgtttttgaagtactagacttcattttcctatatagctcaaggactcagagtctctaatacaaaaaatagctaagtaatgtagataatac

SEQ ID NO: 1367 - DNA, 911 bp, Aspergillus oryzae
  modified_base (71)..(71): n is a, c, g, or t
  modified_base (73)..(73): n is a, c, g, or t
cacgaggctcggaaggcgaaattacctgtcatctctcacttttgctccctccccaccgaagaacgaagtgngnatgaccttgttcgaacaaggtcttatatcgctcgcttatagcctcattcgacaattaattgattacttgcctccggtgttggaaggccacgccgcgtgcaatctaaatacggaacgcttcagcgcgctaaatggcacgatgactagctggaaggaggtgctctcgctaattgacatgcttttgtacctggcccctcccgttctcgtttgcgtcattgacggcctcgatgtcctcggagattcctcgaccgatggaccgatccggtcctcgttcgaacgctttcgacccacacgagacatcagacggccccaacggcggatgggagccaaaatcaggatgtgctgctgaaggttctcttcaccgtcgctggacgaccgaacacactagtggagaccctttcggagaaccgtctgattctcagtgagtcgaatcaagtcagtcagttggcctcgaccgatggcgcgttgaatcctgatgtcgggattgtcatgatgaatgcatgaagcaaaaattgttgatctacgagcgagtatactgcattttttttctttcttcttttttccccctttcttcttctcccatcgttccatcttgcaaggttgtttgacttttcgggcgaaaattcgggtcattaatagaatttgcacgggatgggcttcctttgaatataacattgcttggaagagatatagcacagtcttcttcattgttcatctttgtcacggtgctcggatttctcatttcccgttactttgtttgcatgtggtccccttatttgtgctgttctgctggattcacgggggcatattgtgatgaattgttgcctttggccggctgt

SEQ ID NO: 1368 - DNA, 956 bp, Aspergillus oryzae
agggacggaaaacacccatacttaatttaccagcctcttggtgccctgtacagtacacacgcttgagctgtcaagatgagcatgtcgcgtgcgctatcccttcctctgcggagggtgtctgccacttccccaaccatgcgtttgtcaccctcagcgttcacagctactagagcattctcaagttcattacgacgtgatgatacgtgggggtttatcggattaggccaaatgggctacgccatggccaagaacttacgcgctaagatccccgcatccgacacactaatcatccgcgacataaacgagaacaccgccaaaagattcgtcgaagagacccaagaagctgtccggaacagtggagccaaggaagacacctcgaaggtgcttatcgcccaaaacgcgcgagaagtagcggaacaatcgacagtgatagtcaccagccttccggaacccgaacacgtcaaaaatgtcttctactgtatgctccgccacggcgaactcccggccctagaaaaggagcgcttgtttatcgacacctccacgatcgatccagcttcgtcccgagaaattgccaatgcaatccacacaacgcgccaagggcgattcgtcgacgccccgatgtcaggcggagttgtgggggcccgcgccggcacgctctcctttatgttcggggcttcatcgcagaccggcgagctcgttgaccgcgtccagtccgttttgatgctaatgggcaagaaggcctggcacatgggtaattcgggaacaggcgtttccgccaaattagccaacaattatctcctggccatcaacaacattgccactgccgaggtcatgaatctgggaatccgttgcggactcgaccccaaggtcctggccgatatgatcaatacatcgactggtcgctgctggccgatggagawcaataaaccggttccgggcgtggtcgagaccgcgca

SEQ ID NO: 1369 - DNA, 918 bp, Aspergillus oryzae
mgaggatttccagaaccgtgcaggatccaaattcggtggcggtggtgtcgcatcgcaatccgcgaccaacgcagaccgtcgcgagcgtcttcgcaagctcgctcttgagacgatcgacctggacaaggacccgtacttctttaagaaccatgtaggaagctttgagtgccgtctgtgtttgacggttcaccaaaacgatggctcttacctcgcccatacccaaggccgcaagcatcagacgaacctggctagacgtgccgcgagggagcagagagaaggaaagaatcaagatccgtcgacgctgccgggtgcgatgggcgttcaagttaagaagcagacaatcaagattggtcgaccgggttacaagatcacgaagatcagggatccattgacgcgacagctgggtttgctgtttcagctgcagtatcaggagattacaccgggtgttcagcctcgagtacggtttatgtcggcatttgagcagaaggttgatgaccccccagacaagaacttccagtatcttgtcgtagctgcggascatatcagacgtgtggtttcaagcttcaggctcgggagattgaccgcaggatgggtcgctactggacttggttcgacgaagatagcaaggaattctgggttcagatcatgttcaagaccgaacgagaggaaaggtttagtggtgtgccgggtctggcaccgatggaccccaaggtgtaaattgcctaaagtggtgtttacgcatgggtgtgcatgagaaggaaaagttgacgaaaatatctttccattcaacggaggtgcatagggcgtttgaggatctgttttttactgcagcyttatgtgattcaaattcatgttaccccagccattgtaatttggccgagagcaggccttccgatggcgtccattactatatcttaa

SEQ ID NO: 1370 - DNA, 981 bp, Aspergillus oryzae
tgggcgatttcctaagatctaatcgcgatctggaaatgaatgaggaaacccaacatcagtggaacagtataccttattgtctcatctcatatatttcgtcataatactttcagactatctcagcagactacctacctagaggaaacccctccatcaattattcaagatggcgaaagaaagtgaaaacccgttgaatccgatcaccccagggaagccgaaagatcaaccccaccgtcacatttccaatcagccagaatttgggaaaccctcaccgttagcggggggcgtcctcaaaaccatcaatccaatcaccctttcaacatccctaaacagaacaggcctcgaccagagcaccatagaccccaacagcagcagcgacaaggtgcaccctttcatggttaccggcctcctacgacaccaggtgttgcagtctcaactcccaggcgcgctgagcccttcgacccttttaagcccgttcgtccgtcggcctacaacaattcccggttttctcgccctgtcgataatgatgttgtctcaatcaaacgcccggaaaatttcacctttaacacaccacgggcccccaaaaccttcttcgcttcgaaagcatccgcgggttaaggtgtcaaacgcatcgaagaacctgcggaactttgtcgatttgactggcgagggcggcttcacgcccagctcccgatcacgcaatgttggtttcggatcgatggatgtgaacggttatgttgacacagctaaggcaaacgagaacatcaaagctcttctagagggagcctttgaagacgaagatgaaaagcaagattccagagcaaagaacaagaagaagaaaaaggataagaagaataagggtaaaagcaagaaggccgagaagcgaaataccgagaataaagaaagctccgaaatagatgatctagccgctcaattgcaaggggttactgttaatgagtccagcgcggacggcaatgatgc

SEQ ID NO: 1371 - DNA, 1035 bp, Aspergillus oryzae
ggctttacaaatatactaccttaaaccactacaatggaacaaccccagagtcttcgcgctctttttgctgctgcaaaatcagagaagtcagcattggaaagccgcttcgacactaacacagagcaataccgcaacgatgtcaatgccacaatagccaagctcgaggaatgcgcacggcttgttgcggtcctatcgttattcagctcgaacgaaccgctggaagatatcgcaactggggatttaccgtatctcacggtgtcataccatcttgcggasttctacagagatcgtacacctcagaccgcgtgtctagccttcgacgtgcacttgaacaatacgaaagatacctcacgcgcttggatgattacgagttactcaatgataaggataagaagctctatgaacggtatactgcgaacccagcgtccttttcgctgacgcctgtcaacgacgccgccgcccggagagaagtgaagataaataggtttagagaggaaaaggagctcaaacaaagacttcaggttaaatatactctattttgaggaattgtcatttttgctgacgtacctgaagtacctctccgataatcaaagccagctccagaccgacgacgaagatgttcgacagctctatattgcagagatcaaactgtatactcaccagacgtttcaatccttggaccttctttcacaagagctgtctatgctatcggccattcgcaactcggcaccagcccatgatcaaatccaacccgaagacactaggcgccggaaggacgctcaacagccggaatactctggacgactagatcctcccctttcccagcttctgcaaggaggcaaatttggaccgatattgagtkaggacgggaaaccaatgcagccatttacactacttgatcggcgcacacasctccagcaaggtgtcttccgatccggtcacaatttgcctactatgaccatcgacgaatatctcggaagaagagaagagaagaggcggcattattgaaggtggagagaagtctggtatacaaga

SEQ ID NO: 1372 - DNA, 424 bp, Aspergillus oryzae
catatggaagatgaggttgcgccgcgggctgaaccggggactcatgagcggaagatggagaaacgccgagaggtgctgctgcgaatcgagcttttgctgagtcccggcggggtgcttctcctgatggagcacccgaagacgaactgatgggttccgcggacaatgatctagatgctatcaagagggccagggcgacagagcagcggaagaagaacgagcgggaaatccgtaggaagaaatccttcgcgcacgcgctgcggasggggaagaaagattgcagcaatatcgccagaaggaggatgaaacgattgggtggcttaaggcgctggcaaagcagcggtttgggtgataacctgtgcttctttttgcagctcaaatttctactgtacagaaggatgtcttttcaaaccatatctactaccgt

SEQ ID NO: 1373 - DNA, 995 bp, Aspergillus oryzae
  modified_base (548)..(548): n is a, c, g, or t
ggagatattagtataaatatgggacacaagggcattcgcacagctctcaaagtcgatctcgacaagccagcctgggagcagcctgggttacataaccgatggcacccggatgttccctcctgcggtaagatcgccaacaatgaagtcgttaaaatcgaatgtctggactggaccggagacaaatcaaaaataatgactcggccgacgacgtcaagaatgtggacctgacgcagattcactatctatctggcccattcgacattgagactgccgagcctggagatgtccttctggtcgaaatccaagatgttcagcctttccaagaccagccttggggattctctggtgtgttccataagcagaatggtggaggctttttggacgagatttaccctgaatcagcaaaggcgatctgggacttcgagggcattttctgttcctctcgtcatatccctcatgtgcgtttcgcaggcctcatccatcccggtatcctaggatgtgcaccctccacagaggttctggcagagtggaatcgccgtgaagggagnttgatcgcagccaatacaaccagtcgcgaggttgcgaascacctgagcccaagagtgcacatgctgggagcgcggaagsamgtctcaaagaaaggattgccaaagaaggagctcggactattcctggtcgtcccgaacatggaggaaactgtgacatcaagaacctctcccgaggctcgaaagtgtatctaccggtccacgtccctggagcgaaattctccgtaggaccctgcacttctctcaaggtgacggagaaatctccttctgtggtgccatcgaaatggccgggatcattactctcaagttcaccgtgatgaagggcggcatggccaagttaggcatgaagtcgccaatcttccacccaggaccagttgagccacagtttggscctgggtcgatacctcaccttcgaggggttctccgtcgatgagaacgggaaacagcact

SEQ ID NO: 1374 - DNA, 963 bp, Aspergillus oryzae
cgcgaaatcctgcgcgcgcttgatcatcccacctcccacactctcccmcttgctctaaatttcaccccgtcgcatggtcattcctcgcgcatcatgtctgccgcattgccttatttacagaaactgcgcaagtcccaactgacggactgggcggaagctactgatcttcacaattatgaggaatacaataaaccggaacttgccacgctgttggatcaacatctccaagctaaccagtccatcttcgcgaaggatgcgcgactaacggattactaccgacgcctgtcgcaaaccccgcgcaaggggtcgccggtcaagagagacccccgcgtggaaatctcgccacttgcgaaagaaacaccgcggtcggtgctacggtcggcgcgtcgcagacagacgagagccttggaggaagaggtgaaggaagacgaggccaaggaagaggcgaatgaggaacccaaggaggaactcaaggaggaaccaagcgcggaacctaaagaggaggctgagcaactccaagaggaatccgacgcgtccccaccacctgtcttccagactcctgggccgtcgccgctgaactttcaatcggccttgcccgcatcgccggccctcatcgctgatgtggtcgaccgggagtccgtcgcgtggcgcaagaaggctagcgattggtggactggctcaggggtgccggatagcacgcatccttgcgctccttgctcagcagtgcgaaagccgtccagattctgacgttgctgctcgaagggtgttccatcatatacgaaattctgccgctgcgatttgtgtctaccatttcgatttgggcgattgagatctccatcaaggttcccgatgtctttgtcctcgtcgacagcgtattttgggccccgttctcgttgtggttgctgaccagcattctcctgccgctgaccgtcgcatacttcttcaacatcagcctgaacatca

SEQ ID NO: 1375 - DNA, 760 bp, Aspergillus oryzae
gagggttcattaagtttaacaggacatacttcatcttttgcttgaaccaaaaacttcatctataataccctctttatttcccaacgttccttttaccacataacaatgcagttcaagacgcttcccttccttattttggctgccacagccctcgctgcccctgaagcccagccaggggacacggacagcgcccagtcgtacattgaccagcttgaaagccttgctacccagacagatatgcccgaagcatgccaaccaatatgccttcgatcaacacgcctcccccttccatcatgtcggtgctcatgactgctgtccctgcctctctactccaggatatggggaacgccgcttctcgatcatcctttgccagtgagatcagtgccggccactatcccgactggtacaagagcctccccggcgatgtcaagacctacatctccactgcctaccaaaccgacgcgcaggccaccggtgcgcagaagaccggcgactccaccgccaccagtggacctaaggcgaccggcacttctggctctgactccaagtcttctacttcggaggctggtgctgcccctactggtgctgttgcagttggcttggccggtgctgctggtatccttggccttgctattgcgctgtgagattcaattttgcctgttctcattatccgcatccgaagaaaggaaaatgtctctttattatacaaatcgccttagatatatcccattcattatcatatcttaatgcattcttatgt

SEQ ID NO: 1376 - DNA, 641 bp, Aspergillus oryzae
  modified_base (92)..(92): n is a, c, g, or t
ggcacgaggtattgamggtcagcacctgaccaaggtcgaccgcagcgacgacatcatcaagcccaagactgttgggtacaagtcgcagmgcntatcaagaagcgccgtaccgaggagggctacaagatgacacagaaggaacttgccaccaagtgcaacaccactgtcaccgttgtccaggacttcgagaagggtaccgccacccccgaccagaaggtcctcagtgctatggagcgtgttctcaacatcaaactgagaggctcagacatcggaaaggagaagttccctaagaaaaagtaaattgacagggggtgagcccgcggctttttcttgacgggatggaatgctttttatgaaaccattctctttcttccttctctttcatgatgtccccggatgtcctttcggttgttacgttaatgcattttattgtgcaatgagatccccattactttctgctggtcggaagagcgttgacctggcattgagatgaattatatttttctttttctttttttttttcttcatataaaacactgcctcaataaatcgtgatgctcttgttttggtgcaagttggggtttttttatggtttatatctagataagatagaatgttacccagcagattgccaacgaaga

SEQ ID NO: 1377 - DNA, 960 bp, Aspergillus oryzae
ggattctaacactggaagtgtcatccttagcgatttaagttaagccaccgagatccccattgccctctaattaggcgccaccagcaaccttctggaccaacgtcccacttggggattcaggaacaatagccattatcccgttagactgcagccctcttgatcccaaggtctcgttttacccccggtttgcgtcgaatatcgccattttatctggaagtgatttccttcatcgtactttttggccgttgcgggtcccgaggccagaactatcttactggggtttcttattacttgatcagtactagacgtcattcttctttgccgtcatgactgaagtgtcgtcgactcgactttatctcgggaatcttccccgcaatgtcaccaagcaggatatcgaggaacattttagcacccatggctccggaaaaattacagagatcaagcttatgaacggtttcggattcattgaatacgaagatgcaatggatgctagagatgttgtaccagcgttccatggcagtgatttcaaaggcgaacgactcactgtacaattcgcgcgggggccacgtcgcaaggagaacttccctggcccaatggaccgtcctaatatgcctcgtccccgtcgcacggtctaccgtatgatggtttctggactcccggaaacaagttggcaggaccttaaagacttcgcacgtggagcgggtcttgatgtcgtttactcggaaaccggccgtgaacctggcagagggttcgttgaatttgagactgcgaacgatctgaagactgccattgagaagctcgatgggcgtgatttcaaaggctcccgagtgagttgcgtggcagatatccagcctgttgatgagcgccctttccgtgatccttaccggtctcggtcccctcgccggagttatccacccgtagatgagtacgaccggagattccctccacctcggggctaaa

SEQ ID NO: 1378 - DNA, 794 bp, Aspergillus oryzae
  modified_base (154)..(154): n is a, c, g, or t
acgaggccagaaagctccccggacacgttcaactatataaacacgtccggaacctgatatacaatacgcttcaagaagaacaaggacagggaacacaataaacctaaatgtccgactcaaaagccgctctcctctcgcaatccgaacccatcgnccccccaccagcctacgatgcaacagacaacaagccaccagcacgcacacccctcccccgcccaccaccgctctccctcccggtgctcaacgagctccgcagcaagcgagttatcctcgcctcccaatccccacgccgcagacaaatcatgtcccacctcggcctgcctaatctagagatcatcccgtccaacgcagaagaggatttccctaagacaatggagccatttgagtacgtgcttgccacggctacgaagaaggcgcaagcggtctacgaacaggagatcatgaatgaggagaagggcgagccggcgctgattctcgcggcggacaccatcgtcgtggattcggctactgggacgattcttgagaagccgcgctccgaggcgcasatctttgccatgttgaagtcgttacgggataaccgtgaccataaggtgtttacggccatggcggctatggcgccgttggttagtgcgcggcaccgggggtatgcgcttgagacggcgctggaggagacgagggtgcggtttgatggggaggttacggatgagctgatcttggcttatgtgcggactagggagggggcggataaggctggtgggtatgggttgcaggggttggggtcgatttttggtaga

SEQ ID NO: 1379 - DNA, 498 bp, Aspergillus oryzae
gaggcattccagcactccagactgttattatttgattattgacgcaacattggggacgatgagtatgaaggtatgacacgtgaagaggtgtgggggtggttattttctgatgtccaagagtcaaggttcaagacttaaacatgcagtacgagaactggatggcacgggtggtagtactgcacacgatgatttggacattaagaaagcacgtctctacgatcggtaactggcgacggaaaatggctagggtcgcttccggggaggtattgcgtcatgcgagattgtttcctttgtggtattttatgtttyctgttgctctcgctcctctcttgttatgtgaagaagactggacaacattcgaaggtcaccgggctgcaaggggacgctggacacctgaaacccaacggcgccggttgtcgtcaaggaggaacggttggggtttcttcgaatgcgcctgtcttgtattcgacatataattcaagttatttggtgctcctg

SEQ ID NO: 1380 - DNA, 468 bp, Aspergillus oryzae
agggagacactcgtccttgaactctacatgacaattgtcaatccctactggtggtagagcacaccgtwgaagtggcttatgtatgtacaaccctcccggccacgttgcgaggccagaatagtaacacagaaaataacggcacgttgagggttgcacaccctggggtaaccaagtcctgtgaacaaacggtctagactcggccgatcagtgatcccgtttgcattttgaagagatggtcatttgcgcaacagagattgagcaatgtgacggcctgatcctgaacagggattatgtcggcttgttgacctgatgggtgatattactgtagtagtagtggtggtggtggttgaacgggagtaacccttgtaatcgggataaaaggatctcggtttggtgcctaaggagatcgcgtatcgcgtatttgaaaggggcagattgggtgccaattactgttaaaggaaattgtac

SEQ ID NO: 1381 - DNA, 675 bp, Aspergillus oryzae
  modified_base (138)..(138): n is a, c, g, or t
  modified_base (260)..(260): n is a, c, g, or t
ggttatcgaatatcaagctcatttctgtcgtcgttgccgctcttgcagccaccagtgtacaggccggtgttttacagaaatggtgctccctgcctgctcagggctgctacatgctgaaacgtgccgccgatgccagtngagacgttcgacgttctgccgaggccctttctgaggccatgcctgatgcagaagccttggccaagtggtgtgccttgcctggtcagggatgcctcaaagctaagcgggctgctgaggctgtngaagaagccagacgttccgccgatgcccttgcggatgctatggcagaacttggagagtactagaagggtccctcccacgagcctyatctttctaaagatatgtgtggcaggagcattgtacatggcagaaatctatgcaggcttatggccgagtcactctttcaatgaactacttacggtcatcgttacttcgtcctttctggtgtttacatcgtttgagtccccttggcccagggcgcatgagtmagggaggctataaagggaatattacaaaaacagaaaaaagaaaggagtgggaagatggagaaaggggaggagacaagtgagaacagggccccatgatatgtgccccatgatatgggacagcagcwatatatgagctgttacagcaatcagttactatcgttatatctgt

SEQ ID NO: 1382 - DNA, 728 bp, Aspergillus oryzae
  modified_base (124)..(125): n is a, c, g, or t
agaatcttcgccggggcaatttcactgcaccacttgaacttggtattttacgaaattttgaatttgtctmagaacttcgacgcgcgagatattgtaagacaatttggtgacaatggtgcwagcnntttcgtcaagggtgcaccagaaagcgtcagagccatatgtcttccagatagtctgcctcaagactttgaagatctactgaaccagtacacccacaaaggctatcgtgtcattgcttgcgccgctagatacgaacagaagttgagctggatgaaagtgcaaaaaatgactcgtggagatgcagaaagtgatctggaattcataggcttcattatatttgaaaacaagctgaaaccgacaagtaccgagactattgctgaactgaaccaagcaggaatacggaccgtcatgtgcacaggagacaatatccttactgcaattagtgtcgcccgtgagtctggcatggtcagcaaaagtgagcaatgctttataccgcacattgtagaaggtcgtcctcatgatttggtagcttcactttgctgggagaatgtagataatccagcattgaagcttgatccaaacacactgatgccttccgtagcctcatcggatttggacttatctatacctgtaaatgtcttcaatatacataatttctcgcttgcggtcagcggagaagtatttagatgggttttggactttggcgatgagactatacttcaacg

SEQ ID NO: 1383 - DNA, 783 bp, Aspergillus oryzae
  modified_base (82)..(82): n is a, c, g, or t
  modified_base (360)..(360): n is a, c, g, or t
gcgctacatcgccgaactcgcagtccaacgagctactctcctcacccagaaggctctttaacgaaaaggccaagggtacgtnatcgaaagatgacaagtcgcccgtgaccatcggtgactttggtgcccaggctttgatcattcaggctatccgcaagaacttccmaaatgatgagattgtcgccgaagaagaggctagttccctccgtgagataaaacactgagtgccgaaatctggagactggttaaggatatcaagctggatgacagtgagagcgatgagatccttggaggacccttgccaagtgaagaagcaatgttggacattatcgatcagggcaagagcgcgggaggcgcganagggtcgcatctgggctttggaccctatcgacggtacgaagggattcctgcgtggtggccagtatgccgtctgtctcggcttgattgaggatggtgacgtcaaggtgggagcgattggctgccccaacctgcctgttaatgactccgatacgatgtctgcatcgatcggtgttgaccagcacagcggtgctgtaaacggagtccttttctcagctatcaagggcgccggatccatcagccggcccctgaagaatggcgctcttgccgagagcaagtctatctccatgcgtccggtaccaaacattgcgcaggctgtcttctgcgaaggagtggaggctgcccactcggctcagggtgataatgctgctgttgcccagcgccttggtattaccgcccccagcgtgcgactggattctcaggcca

SEQ ID NO: 1384 - DNA, 727 bp, Aspergillus oryzae
aattcggcagaggttccactttttgcgatagtcgctttcactctttagcttacctacctaccagtcgtcgcctatatactttatatctctgtaactttctactggaattttctccctaccctcatatttctcctagcttttatttcaaaatgggctggttctgggcagactctccatcgcagccaacacctgtggctccgagcccattggcatcctcgggcaccactccccccccagcatgtccaatgcacacgagcaactcgcctccggtgccatcctcagttcctgaaccacctactgcctgccccgtccggtctaaagattctcccttctatgctcccacctaagtcagatacgccattgccttctaaagcagaaaacaagtcaaccctatcaaagctgaaccctttgaactatatgttctcttccatctctcaggaacgagctcgaacaaaccgtcgatttgtcgctagagcgtgaaccttcctctataccccgcggagatacggatggcaattgggagtatccgtctccccccccaatgtacaatgctatgttgcgcaaaggtcacacggatacccctcaagatgcagtggaggcaatggttgcagtgcataactttttgaatgaaggcgcttgggaggaaattgttggatgggaacgtttattctcgaaaggtctaaaagaaggctgggcaaaatgtcgacgtggcgaggaaaacatcgca

SEQ ID NO: 1385 - DNA, 1024 bp, Aspergillus oryzae
aggctaccgggtgtcttcccctctaacttactccttctgaagtagccgatcttcccctccgaaccactgagagcggctataactaccttcgtcctcttctctctcttttccttttctctcgagctcctaagacattccccgaacataacctctcgagtctgcccaacatgtccggcgaacgtggctctacctgttggcggtgttgatcaacgccgtcaacttgtttctgcaggtgttcttcaccattatgtatagcgatctggaatgtgactacatcaaccctattgacctctgcaaccgtctcaacgcctacattatccccgaagccgccgtccatgccttccttaccttcttgttcgtaatcaatggctactggcttgcgatcttgttgaacctgcccctgttggcattcaatgccaagaagatttacgataacgcgcaccttttggatgcgaccgagatcttccgcaagctcaacgtacacaagaaggaatctttcatcaaactaggtttccaccttttgatgtttttcttctacttgtacagtatgatcgttgctttgatccgcgacgaatctcattgagttcgtgacgcgatggagcatgcgatgcgcggtggccgttctggccgaagtatcgcgtgatgcgctgtttcgtcttgcgataagtaaggctggatcgagcatgataatcctctccggcgcggtacctggacgcgcccatgtcgccaatatgggcctgcccattctagcgatctcggcgctccgcgggtatgccggagcatgcaatgggagatggacgaaatgtaggatatgcctatgacaaggaatctgacgacgggttggggtgatgatcaatcttttggtataacgacttagactgggatggtgaatgaaaaactgcatcgctgcgatcagttcaattgagatattttgcgtgtattgattttacgttgcgactgtattccttgatgtctgatgtgctgtatataccaccacctcaagcagtgtgccaatgaagagcgt

SEQ ID NO: 1386 - DNA, 800 bp, Aspergillus oryzae
  modified_base (69)..(69): n is a, c, g, or t
gaggcccattcaggctcaattttgagtacaacgccatgccttctgacaaggtggaaaagaagcgcaasngcttcgaacggccacgaacggccgagtaaaaagcccgccctcgaatttcaagatctacctcctctcgcggccagcgtggtcaacgatgatagtgaattggctccagtgatcataaccacccccggtgtgaacgtgccccaaaaccttcatttaaaaccatacctcaaggaccgagcagatggctctttatcaggtcgctccacacggaacaagggcattgtctcgtccgaactactcctgcagacttcggagcatccaaagatggatttcgtgggtcgcgaggccgaagacgacgccgattcgcagttaaagcattacatcgccgttgtggatcccgaaaagaaaagctggcagtttgttgaggtgcggaaggtgactcttcgtggagcagtgaggagaacaaaggctgctgcagatgaagaggaggaggttgagagtaaagatgaggagatgaaaacgatgcgcgctcaacgcacagaactcaccaatacattcggtactaagcagtcccgcaaagcagcgcagtccatggccgaaaatgcccaactctccaatgcccccgctggtgctgcctccgccgcagaatctgctattctttcgtccatgcccctcgactccgccaccgacattgctacgaagaccgctgcggtgcaggctcaagttcaagctaacaaaccactgcctcaagccaatctggcagcgtctcatccttccgatgtgtatccgattga

SEQ ID NO: 1387 - DNA, 804 bp, Aspergillus oryzae
aggtgaacataatatcatcataaaatgccttttgagaagcctattgttgttgttactggtgctacgggcggccagggcggctcagtgattgatgcattgctcgagtccggacgttatcaaattcgtgccgtccttcgcaatctcaccccagcgaaaactcagcctctacgtgaccgaggtgttgagattgtccatggtgatcttaatgatgaagccagcttggtggaggccttcagaggagcacatgcwatctttgccgtgaccgatttcttcgagccattcatgaaatacggtccacaggaggccgagaagcgtgagttagcccaggcaaagaacctggccaaggccgctgctgagactagcgggttatctcactacatctggtcaacccttccatcgtctgccacactgtcccagggaaaataccacacgccgcactttgaatcaaaggccagtkttgatgagtatatcctgaagcaattccctgatcttgcagccaagactacttttctctgggttgcttactacgcgtccaacttaacgttcccgcttttcactcccagtctgctcaaaaccagtggcaaatacgcctgggtgcaacggttggaccatctactccaattaccactattggagaccatcgaaagaatgtgggaatttttgtcgaggcggttcttagacagccagcgcttactcgcggaaggtatgttcatgcagaggtggaaacactcaccaacggagagctactcgagcgctggggaaaggtcaccggcaagccaacctcttatgtcccaagtacactag

SEQ ID NO: 1388 - DNA, 858 bp, Aspergillus oryzae
gggtttcgatcttcgtgaccagtgaccatcaagtatggcttccacctaccccgacggaatcttcgataatctaggcaaattctatgcctcagtggccatcgtatggatggtcgccctcctcgtcggctccgtcttcctcgtgcttcatcgccatgagcaatgcattcgcattcggaacctacctctcgccctgagcgcggtatcatgtcttcatatctactggattctttgcatgttggcatacaccatggccggtgcatacccctgcggtgtggaatactggatcatgagcatctatctgccattgggaatcgctctattccaagccaacagcatgcagctcctaagcgtttccggcattcaagagaagatgctccataccgcacaccacccgcagagagccagttatagtaccggttcaaaaggccccaatgaatacttgcgtcagtggaagcaaatgaacttggtccaccgaacggaagtggccattgccgtggggaatggcagtccaactgtgtctgtcgctctctatttacctcgcctctcggaagttccatggttttggcagcttctccgaacatggcagcctggcggagtgtcggcgaggccctgaatggattccctccattctatggcaactgttctggtcttggatatttgcgccatgcattctatggaagattcgcaagatccgtgagatccactactggagactacaaattacaatctgtgtcatcgccgctttaccgggttcgcccttgtggtttatcgcactgaattcgaccgccgagccttggataaccattaatcggtactgggtgccggctctctggtttgctcctggtattatcgcaatgg

SEQ ID NO: 1389 - DNA, 741 bp, Aspergillus oryzae
atacggactcgatatgtcgcttcamtctccggtgtacccgcgagagattgcccatttgcgcatcagtcgccagctgcccccgagggcactcccgtcgatgtgtctgacgcatgttcttatggagccgcttgcaagaacaggaagtgcaccggtcgccatccgtcgcccgccgttaagtcagcgcaccaagccgaagagctgtgcaagttcttccctcattgtgccaacccccactgccacttcaagcatccctcgatgcctctttgcaggaatggcgcagattgctcgaccgaaggtgcaagttcacgcatgttcagacaccttgcaagttcaatccttgtctcaacccctcgtgcccctacaagcacgccgagggccagaaaggagcattcgcggacaaggtgtggactgctgatggggcaagagaagcagcatgtgagcgagaggaaattcgtgtccgaggaggacggtgcagaggaactgatcaaacccggtggcgccgaagaggcttcccaaaacaaccaagagattgcgacataaccagaagagcgatctctatgatttcttttgatgatctcacagttaaaattccccatgtggtttaatatcatatcatgtattattttccgtgcggacgatgggtgactggtggcaagggcgtttgcttgaatttatctataggactggcagaaagaatatcaaactggctttgtaaatagatctggatatcaatcatatcat

SEQ ID NO: 1390 - DNA, 716 bp, Aspergillus oryzae
acgaggctactctcaatcaagcatcactgatccatcttctttctgcaccgttctgcaccactctacccttcagcccaccatgaagttccaatctctctgcatgtctctcttctgcgccgccacgctggcgctgcgcttcccgtcgagccttccgcggagtctgcgcctcagccctgcattcccgccgagttggcgaaggttctcacctctgtgccgaaagactcacccttgtattgtaagggtgattctcagcctgaaaagcgcgacggcgagccttccattgaggagtgcggggatgcgctgaaggcttacgatgccggggaagaagatgaagcatctgtcggggacctactggatgcttgtgaggcagcatacggaccgcctgggaataaaaagcgccaggcgaaagaaccatccatcctgagcggaaccgttggcagtgttatcggcgatgttagccgcgttgccgggcgttgattctggttcgcatagtcgaaaacgtcacatctctgttttgtggaatctgcctcgcgcttcgtatcaggattgaacggttaatggggtcttgtgttggtggtggttattgttcgtgtatwatttggtttgctttctgagagatttaccctgtatctcctgaaatctgttacagaaactcatacatatgctctatacaatgtctaacgcagataatggtaatcaaccactgcatcctcagt

SEQ ID NO: 1391 - DNA, 793 bp, Aspergillus oryzae
gtcctgctactcggcccttctagacccgataaccgcttctccacggagtcatgcaacaacacacttcgtccccggatcgaccaacgcttamcgacgcccaagttcactamatctttgagcccacgcccctrccgtcccaagacagccgccaccggggcgtctccaccggtacctccttcgagctttccaagtaccccatggcactgaagttgatgaccgaatccgaggaaaatgagaatagatccgtcagcaagctctctaccaaaaacgaacaaggatacaatgtcgccgtgggcgcggttcggcccaaaacttccctggtcgaatggattcttctggtggaggaaacgcactccgaagccttctcgccggtggtccgcctacggaagatcattctagcctgtgtattcgggacggcgggtttcattatcctagttgttcctctgctagcacactgggccgtcgcccctattcgcaggatgcgggaggccgcgcgaaaatccatcgaaccagaggtgccgccaaccccgtctgcaggctacgttgaacatataaccgatggacatggagacacggtacaggccatcgaggaacatatggatgagaagggcgcgcctgtgtcgtgggtcaaacgcctgcgacggccattggagcgattcaacagctctcacagctttggcgatcgtagggatcctcggtcctccttccacattccttcgagggtaaaagagcggagatcctgcgtgacggatgaactcacagagctgactagcactttcaacgaaatgtcgga

SEQ ID NO: 1392 - DNA, 1121 bp, Aspergillus oryzae
agggattctttctctcgcttttctgaccctcccgccccacctccacagcaacctctgcctgaaaagcctgatgccttgccacgcaatggcacagacgctacttctcctcttaagcgatccgatacagagaaaccgaagattggagccataagctcacctgtctctcgtgaatcaagtcaaatactgtcgctgattgaagctctgtcgtcagctaaaagagagctcgacagccagggtgctcgcgtgaaagagctagagagccttttacttgaagaacggaccgcacggcaatcggcagaagaaaaggccagaagtctcgagttgagggctaaggataatgacttcatcgcaaaccatactacttctgattctcataccatcaataatcaagagacatctgcagagcagttaagccctgaggagacgctagtaaatggggtgtcgcctgaacctagcttgaacgattctatcccagaggagaagtcggcagccacaaacaataatgatttgcagcagcgcctagaggcaatgatggaagagatggaagaaatgaggaagcaaatcacggtgtttagggaccgcgctgagaaggctgagagtgagacggttgagaccagaaagtcgttagcagagatgatagagactctaagacgagagcgtgaagagcgttctgaggcaaacgagtcgacggttcagacacaggatgctaccgatcactctagcccttctagcgctgatgaggcgaagaatcacccagtcgcagaaagtgagacggaaccagagtgcactggaacatcgcccttatctaaggaggccgaaatttccgatacgacgtttgcgacgcagccgcgcaagcatggatatcttgcagcactctagcccatacgcgtcgatgcttggggtcgttcttctaggtgtagggctaatggcctatctgaatggatggcagagaatggacaaatgattgattgtccttgtatttgttttaagcaaaggccccaagcttgctccacaaaagaacttcctgggctcgactttttggatcctttcacactctttggaccgttcgtttcattttcatttcctttcccacttcacttcgatctcgcatctgatatcat

SEQ ID NO: 1393 - DNA, 805 bp, Aspergillus oryzae
  modified_base (222)..(222): n is a, c, g, or t
gaggctccccgcccccctccctctttggcagtactttactatcacaatttctcctcgctcacgataatcactttctccaaacttccataatgtttcggaacaactatgataacgatgcggttaccttctccccgcagtcggatatttcaagtagaatatgcgcaagaagcagtaaaacagggatctgtcgtggtggggctggttaacaagacacatgcagtnctggtcggcctcaagcgaaatgccgaagagctctcatcgtaccagaagaagattatcgaaatcgactcccacatgggcatcgccatcgccggtcttgcatctgacgctcgtgtgctctccaactacatgaagcagcagtcgctcggctccagaatgacttatggccgtccaattcccgtggaccgcattgttactcagatcgcagaccgtgcccaacgaacaccagcattacggtaaacggccgtacgggtcggcctactcgtcgctggcgtcgacgaagctggtccccatctattcgagtaccagccatccggtatgattcatgaaatgctggcctgcgccatcggagctcgttcgcagatggcccggacttatttggagcggaacctggacaagattacaaacagcactcgtgatgagctcattacccatggcctccgggcactcaaggagactttgtctcaggataaagaactgactgttgataatacttctgtcggtgtggtgggtcttgctggggaggaaggaaaggggaagattgagagcttcaagctttatgaaggtcaacaactcgtgccgctgt

SEQ ID NO: 1394 - DNA, 835 bp, Aspergillus oryzae
ggggcttatattccacagagagctgcctttattcctttgtatttgacaccagccttgaatacctctacctaggcgaatacaagttcttgtagccatgagagcagtcgtttacactggaaaggacaccatctcggtggaggaacgtccgaagccatccctcctagaacccaccgacgccatcgtcaaggtccaacacaccaccatctgcggaacagatctgcatattctacaaggccacgttcagacatgcacacccggacgtatcctcggccacgaggcgttggaatcattgagtccttgggtaccggcgtcacacgcttttctgtcggacaacccgtcctgatctcctgcatcacgtcgtgtggctcctgcaatttctgccgcaagagaatgccctcacaatgtacatctggtggctggattctgggcaacaccatcgacggcascaggcagagttcgtaaggatcccccacgcatcgttctcgctgcatgcgcwaccaaacggcctcgatcctaaagtcgccgtcaccttatccgatgttcttccgactgcatacgamtcccgcattctgaacggtcagatccagcccgggtcaactgttgcwatcatcggcacgggtccaatcgggctgatggcgcttcagatggcacggaatctgttcgggccgtccatgaccgccgtagtcggcaggggacagcccagacttgacactgcaaaggagatgggcgcagatcatgcgatcagtgtgctcgggggccaggcggatgcgtgcgcctctgcgctcgcagtgacgagtaatcagggattcgacgtggtgatcgaagcagtggggac

SEQ ID NO: 1395 - DNA, 575 bp, Aspergillus oryzae
ttagctatgccggagacgatgttctttttctgctgctgctgaagatgcttatcttcggttcaaccgaaaagaaaccgggtttgcccgcaataaccctcggtagagcaaccattcgctctttatccttcgcgatgctgcttccagttacggtatcgtgtcgcctgctctctcgtatgagatcaagatcaccgtatagcgggtcccttcctttgtccaacccgtttccccggacatcccagttcctttgtctacgctgaggcggagttacctttttcgaaactagcgcttttcgcaattcaaaatgttagattatgacttcaattgagggagcagtgacgctttgtggcaatggagctgtcatataaaaccttataaacggttccatgacgggtcatgaagtcatacacagtggcattgtcagagtcaattgtctgatggggcgaatattacatcatcccaggttattccaaggcagatccccatcaagcaaaaaaaagtggactggctactgtatgtttgataacgtaccccacggagtagtatacaccatctycccsttaagataactgtatcta

SEQ ID NO: 1396 - DNA, 433 bp, Aspergillus oryzae
aattcggcatmgggcacgattttccggcctcgtgctcgtttgataccaaccatctgcccgatctatccattcatctctatcgattcaatatgcgtttcctcgctgttctcgctctcatggccagcgtcgctgtcgccagactgctgaagccaacattcagcaattatgtcagggtgttgaccgctcctgcaataacaacggcaccgccggggccaactcgtgctgcacacctctcaagtgtggaattgacaacaaatgctactcccccttttaaaccttgtgaataacgcatacaacgacaaccttgcttgcacagatacatgggacctatagaatggatgtgtatcgagatggagagctgcattgaattgaacagagccattacctttgtatttactatttaatacatgtcaatatataccttccttgacct

SEQ ID NO: 1397 - DNA, 739 bp, Aspergillus oryzae
  modified_base (428)..(428): n is a, c, g, or t
acgaggcactacctatttagcttcggctctctcacattcgagcccttcctgaatatccacttttgaaaacatatctggtctatcgcctaatactccaaacgcatcgttctctcacccccacccaccatgtcgaactcaacacaatcccacgataagcccgaagcttcacagcaaccccaacagcagaagccccccgtgttggaggaagacgatgaattcgaggatttccccgttgaagactggccacaagaagaaaccgaacaagcttctggatcagcaaacggcgctaatggtcacctttgggaagagagctgggatgacgatgatgccgctgaggacttctcgaagcagttgaaggaggaactgaaaaaggtcgaagcatcccgttagtatgcagagtggcatggtatcggttcggttcgcgagangaatgacagctcaatgaattaattgaccgtggaattacaaatatatcaagacgaaacgctatacataacctcacaactgggctaagctagatctcgatgctcgaagaatttattccaaatcttctttgacctgcactgtattgggattgaggatgtgcagttgaggagacaacctatgatgggatacttgacagcaggcctacagacgagaagaggcgacgacttgagtttttctcgccacgtattctataagtatctacaatttaattgtgaaacgattcaaagtccatcccacaccagattaaggcaat

SEQ ID NO: 1398 - DNA, 827 bp, Aspergillus oryzae
  modified_base (483)..(483): n is a, c, g, or t
ggggcgccggtactttgaaaacatcacccttgaaaccggcggtaaatctcccttggtcgtctttggcgacgcagacatttagcagcctgctcaatgggcgcacatcggcatcatgtacaatcaaggacaggtctgcacagcaacttctcgtatcttggtccacgaatcaatctatgacaagtttatcgagcttttcaagcaagaagtggcctcggtcagcaaagttggtgatcccttcgccgacgacaccttccagggccctcaggtcaccaaggcacagtacgaccgagtcctttcgtacatcgaggctggcaaatccgaagagcaactctcgtcgctggcggcgagccttacaagaacgtcggcgacggcaagggcttcttcatcgcgccaaccatcttcacgaacgtcaaggacaacatgcgtatyctatcgcgaggaggtcttcggcccgttcgtcgttatttccagctttgctgctgnaggatgaggccgtgacccgcgccaacgacacgacctacggactgggagcagccatcttcaccaaagatattgagcgggcgcaccggtggcctctgagatcgaagcgggcatggtctggattaacagcagcaacgacagcgacttccgcgttcccttcggtggcatcaagcagagcggtatcggccgtgagctcggcgaacgattgtgggaagcatactcgcaggtcaaggccattcacgtcaacctcggatccaagctgtaatgtaatgcatggcaagctcattgatgatgtgtaatgtttgtatataggatagtcagatgccaattggatcaaaaattactaa

SEQ ID NO: 1399 - DNA, 781 bp, Aspergillus oryzae
  modified_base (258)..(258): n is a, c, g, or t
cggtcagacaacataagggtcaacagcagggacatccagccaggaaatgaacgacttctgtcggaagtcattaacctgtggaatggggatgtcaatattgaggggatttgggacggcaatgataggctactcatatatcttattcggttggactacgcaacggccctcgaggtgctcttggctcgccacccgggcctcgaccttgagaccccagattccaaaggagacacgcctctcaaaatagccgccgctgcgggntaagcgtcacatcgttgagatgctcctcaatgccggtgcgaacattgacgccccgtccagaaggggtggtactccactcatgccagcatgcaggcacggccatgtctcaaccgtccgacttcttctagaccgtggagcgactgctcaagccattgcgaggatggctacacatgcttgcactatgctatttacagtgataatggggcgaacataatccaacttctcaatggaaaggtttccttttaatatccgccgttcccgcaccgatgaaactcctctgctctcattgattgtacggtatgatggcacagagtcttggtgggataagttcgggagacttttacaagggtccgcagacatcaatatggccgatatacaccgtttcacacctctgtcacgtgctgtagagcaaggtcactcacaattggcagccatactcctaagccagggagcaaagtatggcgaccgccccaagcctcgcaacttatcttctgatatgaccaaggtgctcaaaaatgcgcac

SEQ ID NO: 1400 - DNA, 299 bp, Aspergillus oryzae
  modified_base (97)..(97): n is a, c, g, or t
aattcggcacgaggcggggcttctgggtggtgcgaccgtcttgttgtgggtgctgttccgccatttggacaaatccaaagatgtcggcgggtgaganactgcggtaacctctggataggatagggcaatagctgcttattggttttaaccgtggtgaacatggagatgtcggtctaggtgtaaatcagggtggtgatgggtgcttggaagttgtcattatcggttctactactccatgaggataactcgcagatagtattgatatgagtcctatgaataaatactcgaatcctgctctg

SEQ ID NO: 1401 - DNA, 1072 bp, Aspergillus oryzae
ggcatggacgcaaacatgaacaacctcctcaaatggagtatccaaaactccactacccaacaatccgacgctcccaatgcctccaataatactgccgattcctctgcgcgcggtctcaccccagagatgctctcagctctcttcggcggtccctccgacgccgacctaatgaaagccgctatggaagcactacactccgatgaagttgaccttgagaacaaactgatcgcattcgacaacttcgaacaactcattgagtctatcgataacgcaaacaacctcgagcccctcggcctgtggacgccgctggttgaactccttcagcacgaggaagcagaaatgagacgcatggctgcctggtgtatcggaaccgctgtgcagaataacgagaaggctcaggataagctcgttgtcttcaacgctgttcctaagctggtcactatgtcgactacggattcgaaccccgctacgcgaagaaggctgtgtttgccctttcgtcagccgtgcgcaattaccagcccgctatggacgaactggtaaagcacctgcctgagggatattcccagggggagaaggtcgacgccggagacatggatgctgtggatgccattatggatagattgcgggcgcaccctgttccttcgtctgcttagggctcattcgtgcaaagggttgtatgaatgtccaatgccctgctctggcgcgtttttatactactggcgcggcgaggttacttgcacgtgcgattgtatgggctctcactcaagccagacgctttatccactgcgattgctgtcgctctcattcggtgactgcctgtcgaggatcctaacctgaaatgacgacgacgaatgccgcgttgccgtgataggctcccatcgatctatctctgggaatcatattccgcctcttcactccaaggctacgtttttatacgggctgggatcatctgtcatgtattcgtagccagacttggctcaggttacgcatggatgcgggaagactgtgtgcttcaatcgagccgcatattacaaagagaaatataaataatacaactctttacagctagctg

SEQ ID NO: 1402 - DNA, 625 bp, Aspergillus oryzae
aattcggcacgagggaaccgaactcgacaatccctatcaaggaagagaatgtggtgacctggtaccgcctgcatcctgcatcggcatgcaccactggcggtactaccggcaactccgagagtcagggccaggtcgagtacaagccgtcggagattgtccacgatcgcattatgtactcagcccttctcaactccacagctgatgtcacggtcagtatcggaaagaccaaggtgacagggagctgggataacacccccaaggatggaaagggtatctaccatggtagtgtgccattcacccagtctggagaggtgaaggtgagcmtatcacgaggcgataaggagatagctagtatctctggagagcatatcacatccgagtgtcctaaggaggagaaggggttccagaattataatgcgtgggttggcacttccggggcggatggaaccgtggcaccgtccactgccatgtgtgtattctcccttggaacggtcacctttattttggccagagagatgattatgttgtwatgccctttaatgttaattttaatatagcttaaggatgaacgaacacagtgggcgaactgtatcttgcgacaatcattgtccaagcatggccaccg

SEQ ID NO: 1403 - DNA, 904 bp, Aspergillus oryzae
ggttcagtgtatctagtcgcattgtaaaaggccaggacgtatctatagcatcctttcttctgccatttgcagtgctgaaccgtatagttggaggcactcaaaaagaaaaggaagatttgctttacgaactgacaagcgttttatctcacccacttccagactccactaaccatatatacgaagctatcctattatgcagtcagagcattttcgaaatcctcgactacctttcaagatggctacaaggcaagaaaaagcagctcaatagtcttaggagccacaactatcacgcaggccgctcccacagggaggcgtgcccggattcacgtttggatacagatgcatcccaagttaaggctgttgaatcgctgctagcttctataccacccgaggtcatttctaaaagggctgttgaatgtagatcattctcaagagcacttttccactgggaacaatatattcgtcagtctagtaacaaacagacagactctaagggtttcgaacctcttttccagcgtcttcaagatatctatagtcaaatcgatgagccagacggcattgagggcatatcaaatcacctgcacgcacttaacattgaccaacaggttcttgaacatcgcaaggccggaagatgggctactgcacaaagttggtatgagctacaactcgagaaggagcccaacaatgtcgatgcccaatggaaccttcttacatgtctcaaagaatcaggacaacaagatgccattcttacacgatttgagatcctccaaacgaccgacccgggctctaggtttgtcccgtttgcaatcgaggcatcatggatcacagggaaatgggagaagttgcgtaattaccttcagcttttactcacaacaaggaacaggagattttaacatcggggtcg

SEQ ID NO: 1404 - DNA, 329 bp, Aspergillus oryzae
aattcggckttggacaatttccaaattcaacgaaagacctgttgcgaggctggtccggttttcttttgtgatccacctagtctmtaattttccttcttacccgatgtttttactacacttttctttcccttggcgtcaccttttctacttgatacgttcactctttcaggataggggtatggaggtattcttacgtacagaggttgttctaccttcgtccttgccctagtcttgattttcccttgccaataatcctatgataattactcacccccgcattgtcccccatcttgtacggaatcagcatatcatacttctctttttgaatt

SEQ ID NO: 1405 - DNA, 675 bp, Aspergillus oryzae
gaggcaatgctgacaaggatgctttcgcccccaggcatttcgtgagcgagggccacaacattgccctctgccagagttttgctaagaacatgggtctctatggtgagcgtgtcggtgctttctcccttgtgtgtgagaacgccgaagagaagaagcgtgtggactctcaggtcaagattctcatccgccccttctactcgaacccccctatccacggtgcccgtgttgcctccaccatcatgaacgaccctgagctcaaccagcagtggttgggagaggtcaagggcatggccgaccgcatcattgagatgcgctccctgctccggaaaaacctggaggagctgggcagcaagcacgactggtcccacatcaccagcaagattggtatgtttgcctacactggtctcaagcccgagcagatggacgctcttgccaaggagcactccgtctacgccaccaaggatggccgtatctccgttgccggtatcacctctgacaatgtcaagagacttgccgagtctatcttcaaggtgaccggttaaagaaaggatgttgaggctggactttatccttaaaatacatagatctgccggggtgtggccctttgtattgatatccgacatgtttaatttagcatattcttacgagcattatattatggtctgaattctctgg

SEQ ID NO: 1406 - DNA, 832 bp, Aspergillus oryzae
aattctttctatcctttcctacacatcattcacaatgttcgctgctcgccagtctttcaacctcctccagaagcgcgccttctccgcctctgccagccaggcttccaaggttgccgttcttggtgccgctggtggcattggccagcctctctcccttctcctcaagctcaacccccgtgtttctgagcttgccctctacgatatccgcggtggccctggtgttgccgctgacctgagccacatcaacaccaacagcaccgtctctggctacgaggctaccccctctggcctccgtgatgctctcaagggctccgagatcgtcctcatccctgccggtgttcctcgcaagcccggcatgacccgtgacgacctgttcaacaccaacgcctccattgtccgcgaccttgctaaggccgccgccgaaggcttcccccgaggccaacatcctcgtcatctccaaccctgtcaactccaccgtccccatcgtctctgaggtcttcaagtccaagggtgtctacaaccccaagcgtctcttcggtgtcactacccttgacgttgtccgtgcctctcgcttcatctcccaggtccagaagaccgacccctccaacgaggccgtcactgtcgtcggtggtcactccggtgtgaccattgtccctcttctctcccagtccagccaccccagcattgagggtaagacccgcgatgagctcgtcaaccgcatccagttcggtggtgatgaggttgtcaaggccaaggatggtgctggctctgcaccctctccatggccatggctggtgctcgcatggctgagtccctcctgaaggccgcccag

SEQ ID NO: 1407 - DNA, 768 bp, Aspergillus oryzae
aattcggcacgagggaccaaaagagagcgtctcccgatattacactatcgagcatcgccattctgatattgcgatagattgtgcagagaatacccgtgtgcttggtatcgaggaaatacttttatggaggaactggcgcgtttcttacggacggctcactggcaacagacgggtcacaatacatatttctgtgatgatcccagattagagactttatgggttgatctggtcaaggagctgccagcctcactgaaaggctacggtctccaagcgtggaaattaaatggaacaacgaagatactagaaccagaaggttacatacaaccattgccttctattcctggcgaaacgacctcaactgataccaacgagccccgaatcttagggggacctaaattgacacctgaatcaggcccaatcgcttttacgagtgaagtcattctcaccggatcactttattttatagtagctctccccccaagaaaaagtaaatgatatgacgctttacatgacgtggcgggttgattgacgattttttgacttattgacaattcttcaacacctttcagttgttgaacaaattgcccatttccgactcttgtggaggttctggaataaattgtggataatttgaaaacatcatcatgtcaaggggagcgaattgagggtacgacgaaaatatagttgtgtcgatcgatgttggtggcacgaactgtggatggttcgacgggctcattgtgtctacaggcgaaggtggtacatataaaa

SEQ ID NO: 1408 - DNA, 774 bp, Aspergillus oryzae
acgagggtcaattgcggatctttgaaacgactccgaccatctggccgactattaagagaaacgactgacatggcaagacagcctggtccagaatccaagggtccgtgatttccctcgcaaccattgaccctgtgcggcctggcctgctttttactttccctccccaatccaaagagttatactttgcccgctccttgggaactcctatctcaactttacttgcacactcctaacccccttcgtacacctatattactatctatctatctattatactatccaacctcactgacaaaccgcccttaatgtctatttcagaagccaccacgacggagctccaatcatccctccgcgaactctccctcagtaacaatagtcccgtgaaggacatcgcccgcccggcggtgaaaactgcaacggccaaggcagcaactgccaagaagaaggcccctgttgttgccgattcatgggaagacgaggcggacgagtcggaaccggacattaactccccaggatgtgctagctcttcgctgtggccatccgtcaccaccgcagagggccccttagaccccccgcccactccgatttctccccagacttcccagacatggagctctgtgccggtgtatcctgatgttggcagtgcgtcgtctcggacatcgaattccaggtccccgtcccggaggccggagaagcagactgctgttgcggggaggatgattgcaggtgctttggggcttcgggccccgaagcggactgaggagcagcgtgcgt

SEQ ID NO: 1409 - DNA, 807 bp, Aspergillus oryzae
gggtcaactgctctgtccaaccaaaaccaacgatattcctcacaaacaactataactatgtcctctccacaagacggggcagtcccgccgcccgccgaagttatgtcaattgcatcgccgattaacctgcttctcctctccctcttcgccgttctggtgtacatgcaattccgaccaaaggcgcccgtaactcttcccaagggtcctgcgcccatcgtcttccggacgttcacccccaccactctgctcgaattcaacggtgtcgatggaaagcccgtctatctagctgtccgcggtcgtgtcttcgatgtatcccctggcaggaacttctacggaccgggtggcccctacgagaacttcgctggccgagacgcatcccgtggactggcctgccagagcttcgacgaggagatgcttactaaggacctgaaggctcctttggatgacctcaaggatcttgatgcggaagcattggaaaacctccagtcctgggaggagcgctttttggagaagtatttggtcgtgggaaaattggttgctgaaggcgatcccgaggccccgaaggcataattaccctgcgattgaacgcccatcatggatggtaccgcgtattgatgatggaatgcggggttgaagcttctacgaggttggatgtaccttgatggaaaattcaagatttggtgtttttaaaagcgatgcgagtggttttcttgtttgtttcgcatgagacatgattcgattgacgctcaaatgtgagccgcatatattgggatttttctaggtcatagtgaatgccatcttattata

SEQ ID NO: 1410 - DNA, 378 bp, Aspergillus oryzae
aggcgccctcaagaaggactacctccttccccagaacgttgtcgccaacgctgatctggccgtctcatcaactcttctgaaatccagtccgtcctccgtgctcccaagggcgaggctcgcaccaagcgcgccaacgttcagaagaagaaccctctccgcaacaagcaggttatgctccgtcttaacccctacgctgctgccttctctaaggagaagcttggccagaagggtgttgagagtgagaagcctgaggctccttccaaggagttcctcagcactcttcacgagaactaaaagggtgattcggttttgtgtttgatatgatttacttcggttaaaaggtagcacagcaaatgaatacggatttgcaatacccac

SEQ ID NO: 1411 - DNA, 826 bp, Aspergillus oryzae
aggtccctcctcaaccacgtcctcatcatggctggtgctgtccagaaaagtgcctggcatgccatccaggttactcttttctcgagctatgcaaatgtgttgctggtgtttgtcttcctgggtatttggtccggtgctcgaggatgggatccatcagctgtgttcatgttgaatttcttagctatctttcccctggcttctttgctttcctttgcaactgaagagttgtccaaaagtgtgggacagaccgtggggggattgatcaatgcgaccttcggaaatgctgtcgagatgatcgtgggaattactgccgtaactcaaggggagatcaacatcgttcaatcgagtatggttggcagtattctgtccggaactcttctggttttaggatgttgctttctaggtggaggatatggaaaggagacgctatccttcaacgtcgatgtcactcaaatcatgtcgtctctgatgatcgttgcctcgacctccctcatcatcccttccgctttatactcgactactctctgcgagctgcccgacggagacgattacatcctcaccctatcccatatcacttcgattttccttctcgttttttacttggtctatctttatttccaactgaaaagccacgctcatcttttcgctagcaccgaagaggaatcggacgaaaagcgcgaattagagcccctccccgctagcatcattctgatctttgcaacacttggagttaccgtctgttccgattacttggtggagggcgtggacgggtttgtggaggtatacggagtcagtcgggctttcctggggatgattgtcgtcccca

SEQ ID NO: 1412 - DNA, 438 bp, Aspergillus oryzae
gagggccatcatctcagtccacttgctcgtatcaagtcacacaagatgagctacatcactcgccgaggtctttcgaccctgatccctcccaagatcgcttctcctaacgcaattggcgctgccaaagatgctgcccgtatggaccgcgttgtgaacttctatgcccgccttccccgtggctcggctcctgaagttaagcctactggtctcattggccgctaccaggctcgttacttcggcaagaacccctctgctgctccccttgctcacgccatcggtggcattctcctcctcggctacagcatggagtactacttccacctccgtcaccacaagaaccacccccactaaattttctcgctatgatttgaggggcgcggaagattcgtgtatataccgctgacctagaatgaaggcaatgtagaacacattcaagcc

SEQ ID NO: 1413 - DNA, 393 bp, Aspergillus oryzae
  modified_base (25)..(25): n is a, c, g, or t
cgagggaagggtctcggaaagagcnagggctttggtttcgtctgcttcagcgccccgttgaagcctccaaggctgtcactgagatgaaccagagattggtcaacggcaagcctctttatgttgcccttgctcagcgcaaggccgtccgccgaagccagctggaggccagctttcaggctcgcaacactatcagacagcagcaggctgccgctgccgctggcatgccccagccctacatgcagcccgccgttttctacggacctggccagcagggcttcattcccggtcagcgcggtggcattgccttccctcctcaacccggtatggtgatggctggtatcccaggtggacgccccggtcagtaccctggtcctttccctggtcagcagggtg

SEQ ID NO: 1414 - DNA, 372 bp, Aspergillus oryzae
aattcggggcgaggctgcttcttagataattaccttaatagtaccaagcttctctatttctcttccttcaagcgatgaaagatcagaacactactgctccccaagtagacatccagcaaccacagcggacaagcattgagcattccctctcccatacaaccactacttcctcatccaactcttcctcaagccttccagaarggcccactacctcaactbddtctcaaacaaagtccaatcacctctccctgaaagcaggaagactcttcgtttcccgctctcgctctcggtccaaatcccccgctcctagcgacatcccaaccaccacacgcacgcgtcgctccgactcagagagcacctacatcctcaaac

SEQ ID NO: 1415 - DNA, 758 bp, Aspergillus oryzae
  modified_base (469)..(469): n is a, c, g, or t
aggcaactttttattccagatttgtgatattatttgtcgactttggctttcaactataaaaraacctcgcctttatcacctcggttgactatctgtgttgccgcatcgacccaatttcttcgtcgccaaattctcgaatcgagactacaatcgccgcaaagcccgggatttggcacggagagaactatataagacgattagattctttcttcgaacagcccccgacycataatcctttataaacaacaaaatgacccccccagccctgtcagcacgcggcgcctaccgtcagattctccgcgctacccgcattgccttccatgaggacactcgtgtactcctcgccgctcgtcaagaggcacgccgtcaattcgacgaacataagcgcgtaggcatcgatacacccatgcagatcaaccatgccatcgaagtggcaagcatcttgaagcacaacattgtgcaaggagtnaaacctgagggcgatgaagccgcaaagtgggaacttcgcattcacgatgatatcgagcgtggtgacaatgattcgattaagcatgcgggcaaggacatcaagattcacaaggcttgttcggcataagtktcgctgagtggaaacttcctacgaaggatggacatgataacaccagcatttttgcattgtattatagtatacccaacttttctctccttcggcgtcttttggggtatttcgattgaagatataaatgtaacaagagaaatagacacacataacaacgcct

SEQ ID NO: 1416 - DNA, 761 bp, Aspergillus oryzae
  modified_base (317)..(317): n is a, c, g, or t
  modified_base (323)..(323): n is a, c, g, or t
  modified_base (337)..(337): n is a, c, g, or t
aattcgggrcgagggttctttcgcctcgcgcccccgtcgaacgcctctcagcaacgaggtccgtcgtcgcaatttaatcactccccataccgaaatcccacccatctcaaccggcccagcacatgtctttctacgtcgcacccagccagcagcgcactcttcgcgcctgcatggtctgctccctcgtccaactgcacagcaaattcatgcgcgaaggctgccccaactgcgataacgtcctcggcctccgtggcaacaacgacgccatccaagaatgcacctcccaagtctttgaaggattggttaccctccgtgancccaanaccagctgggtagntcgctggcagcgactggacagttacgtgccgggaacatatgccgttaaggtgattggatcgctccccgatgagattatttcgagtttggaggattcgggtgtgaagtatattcctcgcgatggtagcactggtgaggaggaaacctgatcggtgtttttttctgtggttcgaggcgcgccttattamaatttttcccaggtctcctggctagaaagggtgggatggttctgttgtcggggatttcatagcgggctgttccttcccgttgcacgcacttgggagttagggatttcggtttacgttcgatatacgtctttgggtatgggctgctttgttattatgctggagttgtcccctttcttttgtcactcagcactacttgagaactcatttttgaagataaacagttggattttgttcgat

SEQ ID NO: 1417 - DNA, 798 bp, Aspergillus oryzae
  modified_base (93)..(93): n is a, c, g, or t
aattcggccgagggtgagctgcaggacagccgtagaatagaagttgagcagaagctggctgacctcgagcgggactatgagaaacttctggancgcaacttgggagaggaggacgtggaggagatccgggagagattagaaaaggtctatgtcacccggaaagacgccgaaatgcaggcagcctcggaacttcgcaaggggattgcgcacaaggttgaagacctcagcaagctgcgccagtctcttgccgactcgcagactcgcgtgtcgccgaacggggccgcgggcaagaacctgcagcaacagattgctgaatttgatgccatgaagaaatccctcatgcgcgatctgcaaaatcgctgtgagcgtgtcgtggaactggagatttctctbgccgacgcccgcgagctatacaacaacgtgttgcgctcttccaacaaccgcgctcagcagaagaagatggcattcttggagcgcaaccttgagcaattgacccatgtacagcggcacggataagaacagaacagcagcttgaagaaggaggttgctattgcagagaggaagctgatcgcccgaaacgagcgcatcgcaagcttggagagcctgctccaggagagccaggagaaattgacccaggctaatcatcgttttgaagctcaacttactgctgtcaaagagagactcgaggctgcgaacggggctctaccaggggtcttccgagtatggatagtggcggcaattttagttttggcggctcgagaatcgcgaaccgctccgtggcggcggcggaggatccga

SEQ ID NO: 1418 - DNA, 810 bp, Aspergillus oryzae
  modified_base (82)..(82): n is a, c, g, or t
acgaggctggtcacgatacaagctaccgtttggagagagtttgtgccaatattgctacggttgatttgaactctctcctttncaaatacgaggtggacattgctcgtataatccggacttataaaaaagacatactagagatcccccctgagttccgtactgaacagtcgaaggatattgcaagcgaatcttcatctgtatgggaccgcagagctagaagaagaaaaatgagaatggatgcctatttgtgggacgaagaaaaggggatgtacttcgactacgacacagctaagcaagagcgaacctcttatgagagcgccacaaccttctggacaatgtgggsaggtctcgccacccctcaccaagcgtcggagttggtcagcaaggccctaccaaagcttgaggcctacggtggtctgctttcaggtactgaagaatcgcgtggtattatcagtttagaccggccgaaccggcagtgggactttccctatggatgggccccgcagcagatgctggcatggacgggcctgctccgctacggctaccaggaggaagccgagcgactagcatacaagtggctatacatgatcaccaaagcttttgttgacttcaacggtgttgtcgtcgagaagtatgacgtcactcgacctattgacccgcatcgggtcgatgctgaatatggaaaccaaggtgtagatttcaagggtgcacctcgtgaagggttcggttgggtcaacgccagccttgtytatgggctggagatacttaacgctcaccagcgacgtgcccctggagccataactccatacg

SEQ ID NO: 1419 - DNA, 699 bp, Aspergillus oryzae
  modified_base (87)..(87): n is a, c, g, or t
  modified_base (207)..(207): n is a, c, g, or t
cctgctagtaattcttctagcaagcttgtcttcctgtgttatatcgaaagaagctctcaaactgtatcatgaccgatgaatacagtnacagtcctcagggctcaaccatcttcgagctgaacaatggaatgaaaatacccgcgctcggttttggtgctatgaaaaaaggcttagttttaccagaagaagagaaggactatgtccganagtctcatagtgcaagccattaaagctggctatcgcctaatcgacacgtctaaaatctacgccacggaggaccttgttggagaagccatcaaggagtcaggagtacctcggtctgagatcactgttttgacaaagctatctagtgatgatcaccatgatgtgcgcgcastttttgagagatcgcggcgcttgctcgatacctacattgatatttatatcatgcattggccgcaggatttacaaaagatgtgtcacgcccattggcaccggaggagagtccaacctatatagaggtctacaaggagatggagaaactcgtggggscggactgcagaggtattggggtcggcaaccttacacagaagacattggatatgttgctcaaagaaacggaaatcaagcctgtggtcaacgaaatcgagattcatcctgggraccccaatacgaaattggtcccatattgtctggaaagaggcatacgtccggtcgctt

SEQ ID NO: 1420 - DNA, 605 bp, Aspergillus oryzae
gagggaggccgatgacttctactatcacatcagccccctacctatgagcgatgacctacgaaacattcagagacaggcattcgcgggcatgatgtggacgtgcagtactaccatttcgtctgggatcaatgggcaaacggcgatcctgcgatgatcccgcctccccctggtaggaagcatgttcgaaaccagcagtggaaacacttatacatggacgacattctttcgatgcccgactcctgggagtatccgtttttcgctgcgtgggatactgcttttcactgcatccctctcgcgatgattgaccccgagtttgccaagaagcagctggatcttctcactcgagaatggtatatgcaccccaatggacagcttgctgcatatgaatggaactttggcgatgtaaaccctcccgttcacgcatgggccacgttccgagtcttcaagattgagcggaagatgtatggtcggcaggacttagattttctcgaacgggtgttccaaaagttgctcctcaacttcacgtggtgggtgaaccgtaaagactcagagggaagaatgttttcgagggaggcttcctcggcttggataacattgggttgttc

SEQ ID NO: 1421 - DNA, 610 bp, Aspergillus oryzae
cgaggcgcagaggaagaatggcgtgacgtactctccggtggactccaacagcgcatcgccatggcaaggctcttctaccatcgacccaagtttgccattctcgacgaatgcacttcatcggttactatggagatcgaacgggtcatgtacgagactgccaagaggctaggcacaaccctgatgaccgtatcccaccgccgcagcctctggaaatatcacaagaagattttgcagttcgacggccagggaggctacatcttcacaggactagactgggaacggagactgaaactagaagatgagaaagaagagcttgatcttcacctccgggctgttccagaattgcaaaggcgcatggctgaactgagtgcttcctaagcaaaccttcatctctttcatatacttttccatcttgttccaggaccattccgaatcacgcagtccataccctccccttccccatttttcccttctaccccttgagacatgatatatgaagcatgctttttctatgttgagcatttaagcgaatgtacaagtgtacgtttagtgacaattggcatcgttggccatgctgagatttctttcatagatacttgcagttcgcgct

SEQ ID NO: 1422 - DNA, 626 bp, Aspergillus oryzae
agggaagatgtggaggccgaacatatctgcactcgggtgtgtggccgcatgctgaaatgtgggcggcatacatgccccgagctctgtcataaaggaccctgcaacacttgtagagaggccatcttcgaggagatctcatgtaattgtggtcgatctgttttgtatccacctttaccttgtgggacccagccgccgccatgctctgcgccgtgcgaacgcccgaaatcgtgcggtcatccccagacaccacacaactgtcatacggatgaagaggagtgtcccaaatgcccctatctaaccgagaagatgtgcttgtgtggaaaacaaatattgaagaacgtaccctgttggctggcagatgcgcggtgtggccgtatctgtggcgaaacgcttaagtgtggctctcatacgtgccagaagaactgccatcgcccgggcgattgcgaagatactttgaagccttgccaacagccatgcggaaagaccaagacgatgtgcggtcatccatgcacggagccttgccacgcgccttatccatgccccgagaaaacgccctgttcttccatgatcacggtaaacatgtggttgcggacgcctccgccaaggcgtcgttgcaagcagcgaag

SEQ ID NO: 1423 - DNA, 710 bp, Aspergillus oryzae
  modified_base (382)..(382): n is a, c, g, or t
gaggatcttctgcaatccgtgtgtcacttaatttactaactctgcaacctgtcacgatccgtgggcagtatccggcagccatcgtctggatttactcttctccgcctgactatcgctgacgaacaactaactgcactcatttgattcgagtgtacccctgcaacatctccctttttaaccgttcggcaagccatcgcgtgtcgatagcaatcttacccctgtccttcgtctgtgcttccacattcttcccctctcaaaaaccccctcttgtatcctctttacagckgtgtctactcgttgtcgcctcgctgttgtcagctcggttcgctgctaaacaactgttgtggttgttctgttttatgaaagttgccttttctctgtnctgctagaagcatttatctcagtattttttattttgtctgcacagcatttagtttgcatacgagtaacaagcatgcttgcaccacgcattttacgaccggtgtcctcgctggtccggcctttgagctcctctgctactgcctaccgcgctccctccattcgtgacattacacccagctcagctgaggaatttgctgcgcgtcagaaggagthccgcgagaatttggaggtggctcgcaaaaagaaagtacagcaagagagtaagtctgtcgatgcctctgcctcatcatcccctgtgtcccgtgatcgcttccgagaggaacaacagc

SEQ ID NO: 1424 - DNA, 569 bp, Aspergillus oryzae
  modified_base (133)..(133): n is a, c, g, or t
  modified_base (135)..(135): n is a, c, g, or t
  modified_base (417)..(417): n is a, c, g, or t
  modified_base (436)..(436): n is a, c, g, or t
caacccatcatcatgtttaccctaacagagtacttcatcgctgcctgtgtctggctcgtcctctacaaggttggcaatttactgtggaatcgacatcactatttcaagcagcagaaggcccgcggctgcgggnanatcaagcattatcgccatcgagacccgatccttggactagacttcgtctacacgctttccaaggccttcaaggaacaccgctggctcccatggcaacaggagctcttcgcggcccagggcgtcaagaccttccaggccaactttctcgggtcgcgagccatctacacatccgagtccgagaacatgaaggccatgtcgaccacatactggcgcgagtttggcctggaaccgcttcgtcggggaagcggaccgccgaccctgttgctgggcccggagtcagtnctgttgacggaccgatgtnggatttcagtcccaatatcatcaagccctatttcacacgcgacggatactcaaacctcgcccgtctggaggtgtttgtgaatcgtctgctggacctggtgccgaccgatggttcgacctttgacatgcagccg

SEQ ID NO: 1425 - DNA, 592 bp, Aspergillus oryzae
gaggctagagcagcggggactagaagctcgccgcaacaacgaggttgtgatcggtaacgcattcgaagacctcgaagcacttatggcatcggcgaaacaaatcgtcacgctcgcggaaacgctggccagagagtccggcatgggcgatgagacttcgagcgaaaccagcgcggtcctttcggagtcggccgctgccctgggcatggttacgacaaaggatatgctgagctcaggatcggagaacttgtacctctcggagctatctcggaacctcgcagagtatctcaccgatgatacgaaaggtatcctgcagaaggaaggcgggatcataagccttatcgatctctgggccctcttcaatcgatcccgaaacggggtcgagctggtgagcactgctgatttccaaaaagcagccgagttgtggggaatcgttacgactaccagtccgtctacgccggttcaagagtggtctgctcgttgtccagcggtacgattggagcgacgagaaaaccatccagcagctgcaagactggctcctagaacttcaacagattccgccagctgaacctgcaccgtggggattggcgccagt

SEQ ID NO: 1426 - DNA, 638 bp, Aspergillus oryzae
  modified_base (77)..(77): n is a, c, g, or t
cgaggccattctactacttcttcaccttccacagaacaactcttcttttggagtaccagggcttagggaagtagcgnagtcactgttattccaacctttattgcgatatggtccgacataagaaagacaattactcccgcggaggcaagaaattttcctcgacaccccgcccacgcccagtgccccgcggcgacggcgagtcctccgamagacttccttttaaagcagcctgttgggatctggggcactgcgacccgaagcgatgctcgggcaagagattaatgcatctgggattgatgcgggagcwaggtattggacaaaagtatccaggtgtcgttgtttctccgaatgcgaagaaaatcatctcccccgcggaccgagacatactagaacaatatggcgccgcagtagtggaatgctcgtgggtaagactgaaagaagtgcctttctcgcgcataggaggaaagtgtgaaagacttctaccctatctcgttgcagccaacacagtcaactacggacggccatggcggttgaactgtgtcgaagccctggcggcctgtttctgtatttgcggacacgaagattgggctagagaggttcttaagcatttcagttacggcgaggctttcctcgatatc

SEQ ID NO: 1427 - DNA, 517 bp, Aspergillus oryzae
cgaggggctacacctccgagcaggccttgtatgcgtctcttggctatggcgctattcaggtcgtctccactatccctactctcttcctcatcgacaccaaagggcggcgaaccctgacgttggctaccttccccttgatgtgtatcttcttattggccggtgggttgtcgcttctgaaagatgatggtagcagaggggaacaaatcggaccagttgtcctatttgtttacctcttcacgatctgctattcgttgggtgaaggacccgttgctttccagtactctgccgaggtgtttcccaccattcagcgagagcaaggaatggcttgggctgtttgcatcaacaacacctttgcgggtgttctcagtctcaccttccctcggatgaggaccgtcatgactccaaccggcgcttttggtttctacgccggactcaaccttatcgcttggtttatgatattctgcttcgtcagggagaccaagcagttgactcttgaggagttggatcaggtgttttc

SEQ ID NO: 1428 - DNA, 319 bp, Aspergillus oryzae
  modified_base (44)..(44): n is a, c, g, or t
  modified_base (96)..(96): n is a, c, g, or t
aattcgtgcacgagggaaacaatcccggctcagtgtttcccgcnttaccaagaaagaatgggacttcatcctatggttagccaaggmaaaggagtnatcgtcatcgcgagggagagagcgcagaagaaaccagcgagtagaggaagatacgaaattcttttttcattttcatgtcatctcatatttctttttccccatttccaaagcgactctgggctgagtcctaaagctcgccacaggstttttgtttccttgtgtacaatgaaccgggttcttgtgtgttttgaggtgttyywwtaatgtgaatggtattttgaat

SEQ ID NO: 1429 - DNA, 798 bp, Aspergillus oryzae
  modified_base (267)..(267): n is a, c, g, or t
aattccccacgaggctgacctttgacgatacgaccgcaactgcccttgccagttatatccttgacgccagaagtcaattctttgcggatgccggaaccggtgccaagctacaaaataccactttcccactattccttgcccttctcgaaattcccatttccctggaaggcctttgggagagctcaacgtggcttcgcactcgaccagcttgtgtggaccgtttgtttgtcttcaaccagtattactgggatcaacgacggtcggggntcaatggctcgctctttgatcttatagaaagtggtcctgaatttgttccgggtccgtgaagcctccatcattccaatctttgtcaacgttgatgatctagtgttctgccctactccttggcctaaggcatccagaccaaattgcctccgctcataaatctctttatgcctttgacacgacatctattcttttccaacacagatctttcccagtaccgagaagctctccgactgtggctatacctatacgttgctgtcatagttccaattagcctttgaagaccaacctcacaaataatacgtcccttagtggataakggsggcaaataaatcgaccaaatgcccgcagcctaggttcctgccaacatcacatcgaccagctctcagtgccctaatagaccccgctgtcgctggaagagggcctgcatctgttcatgaggattcctccattcataaacccaatagtctcaaagcagagactatgatgaaacacatgatactatggtcatacgccctgcctgggtatgcacgc

SEQ ID NO: 1430 - DNA, 590 bp, Aspergillus oryzae
caccccctctttactccatttttatttccgctccgaattgcctttacattccctccagttcacagcctaatccagacccattatggcaaacsgcgccgccctccggactctcgtctcagagcttcacaacgctctcaaccggaaacagtttgatgctgccaacgacctccttagccgcgcaaagcacccctcctgctgcagaatgccctcatcccaacatcttcaacatcacctgagctgattgctctcscccgggaagtgttggagctcggcgctctgtcctccatccggcaaaccgacgcaccctctttcacacgatactaccagcagttgcaacctttctacgatctggagagggatagcgctaatgcaggaaaggtggacttcaagaccagccaacgcagcaagatcacgggcctataccttttgctgttgctgagcatgggcgacacaccagtttccacacagtcttggagggtctcgttgaggaggcgagtttgaaggggaagagcattgaggacgacccatgcattaaatacccagtggagctggagagaaacttgatggagggaagctatgataaggtgtgg

SEQ ID NO: 1431 - DNA, 422 bp, Aspergillus oryzae
  modified_base (137)..(137): n is a, c, g, or t
cgaggggggctggggcagatgagtggaggtgggtgcgaatcggggatggagctgcagataccgcctctcagtttcgttggtggttgacgcggaaggttgtgtgtgctggccacacggtcctccacaagtcacatgcnaacattccttgcttttggaaggtacaactgtgccgttcgctatggggaaggaaagacgggaaaacatcaaaatcaaagcaagagaggtatcatgacaatgcgagaacgaaacgtacccctatttcatcccgtatcgatggcagggcaagacaacatacggtgacgacagaagatgacaaatatccgggtggatgatcgacttgaggccacggctataatgaggccaaaaaagtgtcgttcgcaagaaggaagtcgtaacgatacctccagtggatggtatatttg

SEQ ID NO: 1432 - DNA, 1011 bp, Aspergillus oryzae
  modified_base (920)..(920): n is a, c, g, or t
cggcattatggggggggaaacaatcaatgagtatcatcccatatcaaaacttcgatcctcactcgaagacttcaccccattagtctttagaggcgttcgcgctgggcttcgatctcactgtccactagtgtaaacgcccggtccagctccatcgcgatctcaatatcatcaatatcccgtttgatcaatgaagcacattcgaagatcgcctttgcaaggctgccgcatcgtgtagcgaagtcgcgtgttcccggagccttgcgacgcttcgccagcattatctgcatcatacggtctgcgcaggggcagggacgttcgggatccgacgtacattcccaggaacagatgcacgatgagcgacaaacgcattttctctctttcatgtaatcgctcgggcgacgtcgctcgtccacgcgcctgacgactccgatgcctttaccttccatcttggctaaagccggctgacgatggtccttgacgagctcaccctcccaaagtcccggatcgacactgttgcggtcaatgaatggaagatcgaaaccactaaatgacagcacagcctccggttttggtatgaaagaaaggtatttctcagattgaactgtgaggatctcctccggcggtatctggtaaaggaacgtgtcgtggttccatttcgaacgaaattcagacgatgtgtcgctcacaatccccatagtgtatcggcggtatccgagtagatcgtcgaggaaaaagcctgtgccaatcgccctctccatggcgcggcggatgaattcatcttgatgaaatttgatgagatcctcattgacatggttacaaacggttggcgcttcgagtgtgtytttgcagtgcgcaagaattttcagcaaatgatcgggctctggaagasbctacgcatcttgcgggatgtgcgtggagtncaggttaagtagtgacagtcacgttgcgactccattatcagcctcgcatatacggaatataaaggctctccgtagcctcaataagatcagt

SEQ ID NO: 1433 - DNA, 980 bp, Aspergillus oryzae
ttatggcgggggatcaggtatatacatatccagaactgaacccatttttcaatcagaaaaattggtcagttatctgtacaaagacataacttcgtcacgttcatacacacaaatacgtcgccggtcacccggcccargtgtgtctcattgttgaaaatcgacatcaaacgacaaccgtacctacttaaagctcaccaggccagatgtcattggcaatatcccggacaagcttcagcttgttgaacatgccgtctcggtcaatggcattgccttctctgtgactagcgaascacactgtgggctaacaccgacctgcttcaacgccttctcaacggagatgttgttgccttccgcgatgaatttggcggcgtcgtaaacacgcttcttcatttcttccttgtcctcgagctgggggaacttgctggtcacgacacctagaatgacattcttgtgtgtgggaagttccttcagtggctcgaaaccaccggcacgaggggtgtcgtactcgaggtagtatgtatcgacattgagctccttgaacagcttggttgcaatacggtcatatccaccttcggagaagtgacggctaccgacgaagttaccacggcaaatgtgtacaccgacgtggaaatcggcgggacacttggagagcagatcgttgtacagcttgatgtacttctcaaatgtctcatcggctgtgatcacgtttaaggaatcttttttccagccctcaagcatcttgtcagagcagaagtctgtcggcattgtcagtcgacccttcgtaatccaccatagggacggttatgaaaggacgactcacaggcaaggttggggacatcaaactgaacattcctgcggccagcgtcatacaagatctgaagcycatcctgatacgccttggsggtatcgcaaagtactcgtcatcggaagcatacacgtcctttgggtaggccttgccctccttataccgcaagtgatay

SEQ ID NO: 1434 - DNA, 972 bp, Aspergillus oryzae
gcattatggcggggatcacacattttttacagggattgaaaaaagaggagcttaaatgctacataccaatcaaaccaaatgcgctcataagtgggtatatctctctactaggtacatacataccacatgcgacccctccaactcttacgttgccgccaactccataagccaccacccaacctcaacctgttgcataagcgccgtccctcggtgattcggcacgatatgagctccctagccagtaaaaagacgtcggtgcctcataaactgcgcaccgcagcagaaccccggcaaaatatcctgtacaatgtgcggctatcacatatcgaagaggtcaatcctaccgtacgactactacacttggccatccctccgcgggtgcaagctccagaggagcaaatcagagtgacgaagagtctgatgaacctcagccatttaccttcgctcctggtcaatggctagatgtgcatatcccgtctatatccgacgccgggggctttagtatcacctcaacaccagcagatgctgaagccctcccctctttacagcccacagcagagtcacttgccgtggaagatgaggaaacaggtctccctcccgtagacccaagaggcagagacccatacgtggaactagctgttcaaaaagcactctccaatcccgccagcgcctggctctggaaacccaaagatgaaatcctgggaaaggagccctgcatccgagtsggaggcagcttcgtctggcctcctccatccgggatagatctcgaaaaggtcaagaacgtattctcaatcgctggggggagtgggtatcaatcccttaatctccatcctttcacatttaaataamaatgccgacgaaaccccagcttcacaccacccttttaatattcactttctctattccactaaactcccagargcaaaaccccaggagggtggcaaatctcckgaktcatcttggataagatcc

SEQ ID NO: 1435 - DNA, 951 bp, Aspergillus oryzae
ttatggsggggggacgttaatcagactacatccacattaaaattatactgaactccattcccgtacaacaatctgatacttcattagttgccaatttttactgtttggtgctgctatcatggattcccagagccttttcgacgtcaagggcaaagtggtgctggtcaccggtggagccaagggaattggtcgcatgatctctgaaggatacgtagcgaacggtgccactgtttacatctcgtctcgtgatgccaaggcctgtgagaaagccgtaaacgagctcaatgcgctcggcaaaggaaaggctcacgccatccccgccgatttttacaaagaggaggatgttaagaaattagctgaggagcttggaaagcgtgagagcaagctgcatgttcttgtgaacaactccggatcgaactggggtgctccttacgatgaatatccttcctctgcttggactagggttctcactctgaacctccaccgagtcttcgatctgacgaggcttgttacccccctgctggagaaggcagctacttcgggcgacccagcccgcatcatcaacatcggtagcatcgatggtcttcgagtcccagcacttgagacgtttgcttatagtgctagtaaggccggcttgcatcatttgagccgagtccttgcaaaccaccttggtagaagaaacatcacatcaaattcactggcttgcgggccctttgagagtwagatgatggctgctacccttgaaacatatcgggagcagatcgaaggaaatatcccaactgggccgtattggtaccccccaagatgtggccggtgcttgcttattcctgagcagtcgcgctggctcgtatgttaatggagccactatcacactggatggtggtagcgctattgctgccaactgtaagatctaggcgagttgatgtagtacatatcaagaatattggttcc

SEQ ID NO: 1436 - DNA, 941 bp, Aspergillus oryzae
  modified_base (166)..(166): n is a, c, g, or t
tcggcattatggcgggggtccacgtctgagaaaacttttgcggaccaacatgactgttacaactactactcgccctaccatccttgtcattcacggggcatggcatcaccctgaattttatgccccgttctgcagggcgtttgaagacttgggctacgaagcagtntgtcctcgccttctaacctgcaacaatgatgtacccccgacgaagacattggcggatgacgtggcgctcatccgacagacggcacagtcgctcattgacgatgggaagtctgttgtcgcggtcatgcactcctatggcggaattgttggcactgatgccctagacggactggcgatcaaacgtctgatctacatgactgcttttataccccctagtggcaacagcctcgcgggtatgttcggcggccaattgcctcctttcataacaatcgatgatgaaaaggggatgttgactgtccctgacccagcgaccttttttttcaacgaccttcccgctgaggaagccgctgcatgggccaagaagctagtggtccacccaaaatccgcccagttcgacccgatctcaaacgaggcgtatcgcagcatccccgccacatacattgtgtgcgaacaagatgctgccctcattcccatggttcaggagatgatgatcggaaacgtgcggaaggtgggagtggatatagacgtcgagaggctaccagcgagccacagtccgttcctcagcatgccggaagagactgccaagctggtgctaaagattgcatcccaatgaacctaggaggtagcctaaccgcatggaacacggtatgcgagaagggttggcggggtctactcccaaggttcgaatagatcctgcttagtttgagacatttcgtgggtwgatacaacggcttgggggtgaggaatgggtccgatgtaaccaacggcatcccagg

SEQ ID NO: 1437 - DNA, 470 bp, Aspergillus oryzae
  modified_base (2)..(2): n is a, c, g, or t
  modified_base (431)..(431): n is a, c, g, or t
tnggccattatggsgggggggggggataacaaaattctctcaactaaaaacggaaaaattcttcgcactatmatctctttttctctttctaaaaattcctttgttctaaaaatccgccaaaatgcttcgtgtctctgcaaactctcatggcctgcctccttctggctaccgctgcacccaccgcycctraaaagagcaacgcttgtttctccatgtgtctgcaggaaaaacctgcttgtgcaartaatgaacgtccaactggctctaagggctgctggggttgctgcaaaaaaatcgaagcagtagcggcacctgtccagcgcgcgtaacgtctctccatgtgtaaacaggaaaagcctaattgtgcaagcgatgaaaaacccgctggctctgagggatgctggggctgctgcaaaaaaatcgagcaaatngtccctgtaaagaaggagaagtttctctccatgtttttg

SEQ ID NO: 1438 - DNA, 782 bp, Aspergillus oryzae
  modified_base (104)..(105): n is a, c, g, or t
ggcattatggcgggggaacatggacttcgagaacaaccgagtaccctgacggagtaacagttcatgcgaccacctaggtgttgacttgtttgataagcgccggnntacacagtcttttatccagtcaaaggctagatcgccaatttcttcatcctatcttgtttgactactctgtcagctgcactcgatgactactaggcgtgttgcaacccacgacctccgccaatcacatacctctacgagtatctcgcagtgaaacagtcttctgatgaatggttttatccatgatggttcaggatccctgtcatcgatcgacgttgttgggtagtattgctgttggatgcattgatggccttcgaccttcattgttccatgcctgactgaatgatgaccaaatcgagatggttttgacaaaagcaacatgccctcaacggcctttaagaagttcggaaaagaataccactgtattcccgaatgtgaaaaccacgcagtctggggtcacagctactacgacgtggaaatttgcctgatgatgcctgaaacactgcaacagtggttagttggattaatcctccactagcatccgctgcagaggaagaaaagcccttgaacgagtggatcgatgcatctgatgtgtcactcatggtgatcgctttgattcttcctcggcatawcccggccacagtaaggaactggcgtcgtgttcattgttcagtcttctgtaaactaacgttagaaaacaagttctgaatgagaacgctcctttttagcggtctttcagg

SEQ ID NO: 1439 - DNA, 883 bp, Aspergillus oryzae
cattatggggggggggggggtgctcaaacactccttgaagtttctccaagtgcaacaaccacccacaaggacccaaaaagaaatmatgtgggcttccgcaaaaaacttgcctctcccgttgccgcacggccatcgccatgcgatcaccgtttcttacctcccacgtatgatttaaaaaatctcgtccatgaaataaagtcctacctcggggattcctcgggaatcgattcatmaraaaaaaaccatgaaaacttgattgcgctggcgcagaagtatgtttaaaatccgaatgattggctggggttcttctaaaacgatccgagtaagaactaaacccgcaatgcmatcgaaaaaatmaaccgcagaggaaaaaattctgctgckggtatggaatccaggcaaaggctcccccatccacgaccatgcaaatgcccattgcatcatgaaggttttggctggggaattgaccgaaagggtctacaatcctccccatagcgaaggggaggagaaaagcccgctccagctcaaaaaccagaagggatatcaaacagatcaagtgaaaaaaatctgggaggaaattggcttaaatcgggttcataaccaagtcsgaataaagtggcagtttcccttcacatctatacccctcctaacgcsgccgattatggctaccatatcttcgatggggccactggaaaggccagttttgtatcgcaagcacatgctcattcgaatactgagaagcctgcttgtvaggcgtgacaaacaaacgtcctgaaatagttgtcgtcgaccgaccactatgtggagagggtcaggtaccctttttattgtcatttatctgtaagatttatccatggctcaaatatcccagcgttgctcttgt

SEQ ID NO: 1440 - DNA, 938 bp, Aspergillus oryzae
ggccattatgcgcggacacgcaccgcctttgatatcaatcaaccgtcactatcgatactactgagattagcttcagcgtgctgcccttggtctttgcatacgtctttctcttgtcttaccgtctctgcgaataatccactttcatttatacatttattaaccaagatggatttacctccactctccaaggaacaactttccgtagtgctcaaatctagtcgttcaccaaccgagctctacaatattttggtggagtacgagggcgaggcttatttaatgtcaacatctgatagcaatgtatcggagctcctcagtctattctactcgacctttttctttgcgcatcttctgacagatcaaatatatgaagctcgcgcgatgactcaacgaatgccacaagagctgtctcaaaatgatccgtcgctccagaattgtctgactctcttacgggctgtttggcagaggaactatgagtcaatctacaaaatcttaagagagctaccctggccagatttcctgcgtccggcggtagaaagctacgagacatattttcaagagaaaacattgaaagaagtcagccatgcctacgaagcgatacggcctgcaacagctgcaaactatctcggtctcgatactgctgcagcagaacagggcgaccccgcagtgatacagaaattcactgcagttgggtgggtatgggttgaaagcacaagactattacaccctaaaccaatccccaccgcaccagaaaaggacactcggttatacgatgaagtgagtaaaattatggcgttgattgggaagcacgggggctagaggtggacaattcggacacaatatcgcattagaaacccgggagatccgactggttgaacgaagagctgagatggctacgcaacaatagacctccaggtccgttgaatggcggaaacgtctga

SEQ ID NO: 1441 - DNA, 1077 bp, Aspergillus oryzae
tatggcggggaatgaacttcattcaatgcacacacatatattttgccgcattcctatctgctcattctgatctcatactgatgagtggcgtgaggatcattactgcttactacaactatcagcagatgccctggaatgcttttccctcactggaatgtaggtatcccttatcgaagcggggatcgcttcgatatcacaacaaataccagccggtaagccagcatcagattgctttgatttattcataaggcagatagtgtatcctatttataactgttctagactgtgattttggaagaacatcggcggacatcagcattacatacaaagcctcactataaggccgaacatgacccaaacttctcaggtatgtagaatgttagctatcggttctgaaccaaattagaagcgtaccgtttggcagcgtgtggtatccgggccgacggccattccacacaacggccaagcaaccgccagggagagacaaggagtcgatcgaagggtatatctagcgattgacgatcgctctgacaaattcaacttaatactttcttgacctgacgttattggcctcatatcctctaagttgatagttctcttcaccacggcttatacctgttcacagttcgaaaccatctaatttcgattgtttcaaatcaagaagcatggcgttgcttgccaaggcatcatccctagcttgcctgcttgttctggcctttctggctcttgcctctatcagccactcgcgccccgtcacggaaatctccagatctgggacgttgcatgcgcgcgatccggatccgagattgataccaggctccaatgatctagtcagtgatattctcgatagtataggattgcagaacttccagaaactcaacaattggaagcaaaatcaagccacggatgagagtwgcaacaccgcgcctaccaaaacacagcagaacaataccaccccaagtagcaaccataccgcaaagcagacgaccccaagcggactggcggaccctgcgggtgacccctccggttttgtgtcggggttattgcgattgctatcggataggttcaagcaagcgt

SEQ ID NO: 1442 - DNA, 1115 bp, Aspergillus oryzae
tatggcggggatatcgaaaatgttcagacggacgtgtgtcaatgccgggtggagattagcaaactacacgcgaccatcagtcaacttcgtaccgatttgatcactcttcagcatgaaacatcacgtcatctgaattcdgtcttcgaccgcttttccctgatcgagtctcgcatgaagcattcggaacgcgtcckyttcaactccttggcccacaccacccacgccccaatcaccccggtccccgttgttgaggacgatggcacgctgcaatgkccggaatatttccctcgtactgtctggcgcttctggtgcctgaagaagcgcagtcggatcaatcgcttggttcagttggccgaattctatcagcttggaggttaccaatactggggtcgaatgcaccagacagaggctatgtttgctagcgatagtgactccagcgactccagtgattacccgtccaatttgactcgtgctgaagcagttcgcttgtatcccgaggccgcacaccaggcactgctgctacattgggcctggtttattacaagattcggaacgaagttggagaagggccgaatacccatatctccacgtcccccgaagcggcagcaagaggacttgccatcggtgtcatcgggttcgaggccgaaaccggtgaagatggcacgtcgtcccaacaacacgtcgcctactgctttgcaccgactggtcactggaccgtcgctggagtcgaaatcgatagtttcggacgagtctgacaagcttggatggaatgcccactcagaagtatctgacgaggctatgagtaagctgcgaaacatcgtttccgaggaagtcggaaccctacttcgagctttagaacgtggtcgcatccgattgaagcctggtcgctctgagcgtgagaaaatgtctcccatcgaatccaaaaccagcatacgcaatggtcggtacggtggcgatggagcacaggacgatgatgcgcggacttttccgaacacggtcccaacagagatcctgtctctttcagataaaacggacaagacagaagaacatgaacctgaacttccggctaccgagtccgatgcgactagtccagagtgatactatcacgatttcgt

SEQ ID NO: 1443 - DNA, 1084 bp, Aspergillus oryzae
  modified_base (80)..(80): n is a, c, g, or t
ggggcggtaccgtggcaaaagacgtggtggaccacttccccagacttcgctttgcttgaggtacgccactaggsagagtncaagatgcttggccgatgatcggaagtggtgatcatagctaccatcgaggatgtccttcatggcgattcgtgccatgtggctgtcgtccaagccaaactttcacgaggattcgtatacatgctgctaaacgaaacttcccagaggcctgggaacatcctccatttgctattgcttggagtaacagcgttggggtttcttccccgcttaccctaagttggtcagtctccaccgaacgcggctttgcctcccatcggacccggccgacggcagtacaacctcgggccagataacattgtattgagtaatggaaagagtcaattgctcatagatcgacgttaaagacacagctcttgagggtccattttggatgcatgtgcattaccccagaaaaccaagaaatctcgcttcgtttaatgttccttggctcgccaaagcgtctcttgtcaaaacggtgacacccgagtcgtgtgacctaataaaaacgatcgcagtaaagccttagcgaaagagtgcaattgacacatgaaggcattgtccgaagcaacccgagccactgcaacctcgtgtataggagttctcctcgagcataactcgtactttatctgcatgcacggattagtccggagtccgccgatgcaacaccatctctactgcgttcgctttcgggtgtggaaaatcaaaatatcgaagtctgaaatggggggctatcatgttccttcatccctgtggaaaaagcaacgggacatctccatgcatcaaggagacgagtcaatgctcgtggacagggcggatgggccggaactggggaaagtggatcgcttatatatggttgcgcggtgaatacgcaacaacttttcctatctttggcaataaggtagtgttatcagcatcccatcggcaattgataacgcctcctgcggtcttaattggacatgttagacgctcttgtgtggtgattgawgctgcactgtcgccaagatcgtcaagcttttgctccactggg

SEQ ID NO: 1444 - DNA, 994 bp, Aspergillus oryzae
  modified_base (614)..(614): n is a, c, g, or t
gcgggccgcgattcggaggaggttgatgagttgtggagtgcaagaaaagtcgcgctgtggagtattctgcagatgaaacagcagccaacggatcatgtctggactaccgatgtagctgtgccaatgagcagactgcccgatatcatcgagcaaactagagaggagatttctgccagcgggttacttggaggcatagttggtcatgtaggtgacggcaacttccatgcaatgctcctctttaatgatgatcaacgccaggtagcagagagtgttgttcacaacatggttaagcgtgctgtggaaatggaggggactgtaactggggagcatggagtgggaatggtgaagagggactatctggagcatgaagtcgggaagacaacagtcgatactatgcgcagatttaaacaagctcttgaccctctttgcctgctcaattgtgataaggttgtgagagttcaagtcccaaagcagggagaagttcccgagtggtaagcgtcaaggatagcctaaaagaactggtatctaggctttgtagtacatgctggtactagtcacatatgagcgtgctgggtccctatgaggggcttgtcatgtctagcggacagtcagtnaatgcctgctgcctgcctgattgttgcctcgtcgaccttgccattttcgccgcgtttaacgtcacctactttcttcccctcttcccctctttccctcaaccaccttaacatcctttgttccaccttaaatctcctttgcagtacctctccactcttccttcactttcagtggctatatatgtkggtgccctagactgttatttactgtcacccgttggccaaaatgggaactagaggccttgtattcatccgttgccacggtagayacttcgtctactggaaccagtttgatagctatcctgaaggccttggggaagtcatcgtacaccagattcctgaaaatgatgaaaaatatcatggtaggctaagctagactgagt

SEQ ID NO: 1445 - DNA, 771 bp, Aspergillus oryzae
  modified_base (244)..(245): n is a, c, g, or t
ttatggcgcggaagcaacataatcatggccgagtactaccacccgagaaaacagcgaacataaatggacagaaaccacttgactctccttcgcatatgcgaacgaaaattggacgaggaatgctcccatcccgaccgtgacttgcgccttgtggtgggccatacacagatcctcaatgcactattatcggcgccgatcccgatctcaagccttgtggaccaacacgaagaatctgctgcgatanngctcggagctgaacttaaggctccacctgaaagccttccaatgaatacgttgggtctcctctctgccgatcggttggactacgaatgctgctaccatcctacgactgaagagtcttgctttgctgcagccctaattgacggatccacgtatgccaatacgcttggattttatggctcgcgatcctatcctgtttcggtctggacttttgtctgcgctaattataattatataacgcatcacttataattgatcaatcaccacctaccttgaggaagacccatttttggtccctggtgagttcgacgggctggcggatctagtattgagtggaggatctgaaggcatcatggatatattagacaccagcgatcaatgaaagtgtctgaatagtagtatttcccgctcttataggggtgacaacttgacaactcccatgctgccagaaaagggaggtggagctcgaagccgttctcgcccccagttccctaattagtacaaaaaataaatgaaacgaagatttggtcg

SEQ ID NO: 1446 - DNA, 927 bp, Aspergillus oryzae
  modified_base (371)..(371): n is a, c, g, or t
tcgggatctgacttacgggatttgacatggtaggggtgatatgaatgtagtgaggcaagcgctccatccattttcctttaacattaccatttcgcaaagccttgtcactacctgtcgacgaaaacaacaatatgtctgctaggtcatgccttggacactctatccctagcagcgcttattactcgttttgtcttatggcgtaaccgccctccgactctagcgcacggaagccaaggggctatgcctcatgcgacaaatacatacctagatacctatcgttaagcgcccaaggataggcactgttgtacggtatgtatcatgacagaagccagatgtttctaaagatatttcgctgcccaatcaaagatgtnaagatattagtctttaagcgcccggagatgccgctggagcatgaactctatgcgccgatcgatttcatagctttcctgaggcggaatggtaggaatacggggttcccaaggatctcgaagaatagcacatcgatcaagccacggcgtcaagacactacctagtggtcgtatttatagaaacgagaacgggaaaaaggctttataatgcgtctgcggctattcgataccctcgagccaacgtccgacgtgcatcttctttggagtccgctgtatttccacatccgattccgcgtcgtcaggcgcttcttcttcgtccgtgccttccaagtcaagccaagaatgctgatatatgggtctttcgctgcragggtaccctgtcaatcttaaccattcaaatataccacgtgtggctccttcggaaaggtcctccgagaagaaattatatctataatcgtcgagcaccgctgaggtcctattgggggaatgcatgtacggctttgttarggtattgggtctttgggttttccctaaatcttgaatgaactgtcgtttccaa

SEQ ID NO: 1447 - DNA, 959 bp, Aspergillus oryzae
ctcatcttcttaatccttctctcatcctacctggatctcaaccatacctactctgcaatacctaccaaagattgtgatcaccctcttgatcattccccatactcgtccctatcgcaactatgtcggccgaactcacaaaagtcgattctgccattgctggcttgtcaataactcctaagggggagaaagaggccgacaagacggcaaaaaagactcacaggcgccactcatctcagtcggagggcgtctggaacatcaaggacttggaggagaagaagatagagttgactcaccccattgaaacgcaaaagaccgggtggaagctcaacacttcaccgtcttcaatcgaggacaaggatatcctcaaactccatctcgtaaaccccccggtgaagaagattgacttgcatttcccgctggggttggaggtgactgctcgtaatctcaagggagtcacaatcaaggacgcgcttgacgctatccacaagcagttcaagaagaaggccgatgatcggaagtggtgatcatagctaccatcgaggatgtccttcatggcgattcgtgccatgtggctgtcgtccaagccaaactttcacgaggattcgtatacatgctgctaaacgaaacttcccagaggcctgggaacatcctccatttgctattgcttggagtaacagcgttggggtttcttccccgcttaccctaagttgacacagctcttgagggtccattttggatgcatgtgcattaccccagaaaaccaagaaatctcgcttcgtttaatgttccttggctcgccaaagcgtctcttgtcaaaacggtgacacccgagtcgtgtgacctaataaaaacgatcgcagttaagccttagcgaaagagtgcaattgacacatgaaggcattgtccgaagaacccgagcccactgcaacctcgtgtataggagttctcctcgagcataa

SEQ ID NO: 1448 - DNA, 957 bp, Aspergillus oryzae
  modified_base (140)..(140): n is a, c, g, or t
ctaccaaatctgaaactacaaaacgaaatcacttcacgcgatacaatcactactatggaaccaacggtccattcaatcttcgagaaacaaacatccacctggcagtatattgtggcactgcccggaaacgcgcgaagagntcattatcgacccggtactggactatagtcaggagcagctgacgatcaatacgacctccgccgatagccttctagatgtgatcaattcacacaactacaaagtagtccgcctcctcgagacccacgctcatgccgatcatcttaccgcagcttcttacctccaatcacgactacaggcgcagggtgccgacgttcctgtctgtataggacgaaggattcgccaggttcaagacaccttcgctaagcgatacggtgtccccgccgatgaactagacaatgcattcgaccatctactggaggacaatgagaccttcccgattggcaacctcacagcaaaagtcctacacttgccgggccatacccccgaccatgtgggctatctaattggtagtaatgtcttcacaggcgactctatattcaacccggatgttggtagtgctcgctgtgactttcccaacggagatgccgaggctttatatcaatccatgcaaaagctgctcgagcttccaggggagtttaaactgtacaccggacatgactatccgccatctacatcctcagtgagtcgagtgcccatgccttttgcgactgtgaacgagcaacgagagagaaacaaacacgtggcagggggccgagaggagttcgttacatggagggagaccagggactcggggctaagtgagccaagactacttcatcaggctttacagatcaatattcgcggaggaaagttgcctcggagccccgatggtagccggagattttcctgcaggttcctgttacattgccggagagctgggcttgattcatataatgg

SEQ ID NO: 1449 - DNA, 959 bp, Aspergillus oryzae
ggaattaatatttactatcattgacttgacactactaagtgcctccgaatcacttctgatacaccaccaaatcctcaattattacgcgagtdacttcaaaacatggctttcttctccaatttctccggcgactttgctcctttgttccatttacttgacgactatgatgtccatcaagcataccgcccaaggccaaggactacaactgttcgctccttcacacctcgatttgatgtctatgaactgaacaacaattaccatcttaatggagaactacctggcgttaaccaagccagtbtcgatattgagttcaccgatcctcatacgttggtcataaagggccgcgtggagcgcaagtacagcgacagacatccagtacctacgagcatgctgaagttcccaatgatgcttcttctgtcaagtcactccaaccaacagtcgaagatgaagatgaagaggcaaatgatgcagcatctgttggttcatcagcccaatcttcaaagcaggtggccctccaagagcagaccaaccacaaatattggatcaccgagcgcccggtcggcgaattccatcgagcctttacctttccgacgagagtagaccaagatacagtcaaggctactctgaaagatgggattctttcggtcattgtcccaaaggaacctgcccctacgtttaaaaaaattcgcgtcgagtaaattgccagctgttgggcctttacagtaccgatgatggggctcgtccgatttgacaccggactctctaatataactccattataaaacttggaagatgtctataggagactttgaagacggttgactgagtacgttgagttgccatgctacggttggtttgagcattaacgggtttgcgggtcatttggttttgtatttgggattctatgtatcctcgttgttgtatgacttgtattatagacaaattttatgacagtttaa

SEQ ID NO: 1450 - DNA, 710 bp, Aspergillus oryzae
ggcaacgcgcastgctcaatctaccggtctcctcttctctccccctacataccctttcgtgaaccttttccgctcccagaattaggcgagaattgtcattgctcggccaagttattcactatctaaacaaatgtcgggccccatgtccgttgtgaacggctctgcggtagtttccgcagagtcagactccaaatcacgataagaatccagaagagcttcctgagaaagatgcccccgccgttgtggatgccattcgctccctagccgactcggatgatgacagtcgcgtggcaactgaagatgaagtctgcgatcttctccatgttgtggacaagatccctgtccgactgtgggtggcatgcatcgcgggtatcttggaacgctttgtatggtatggggcgacggcccctctgcgtgcgtwaaaatcgtctccccgcaccttttatgattagggaccgtagctaaccatctccttagagaactacctgcaaaatgcccccggcggcgaggtacccggcgctttgggcctcggccaggcagctgcatccaatattgtgaacgcactgatcattgggtcctatattatgccagttccagcggctgtgctcgctgatagtttcttgggccgatacaagaccatgctctactctgccatgtaccgtgctacttctatttttatcccttcaccccacgtcctttatggtgctagt

SEQ ID NO: 1451 - DNA, 348 bp, Aspergillus oryzae
acaacattctctcatctacatacggaaacattcttcgcactatcatctctgtttctctttctaaacatttctttgttctatacatccgccaaaatgcttcgtgtctctgctatcttcatggccagcctccttctggctaccgctgcccccaccgctcctgagaagagcaacgcttgtctctccatgtgtctgcaggagagacctgcttgtgctagtgatgaacgtccaactggctctgagggctgctggggttgctgccagaaaatcgaagcagtagctgcacctgtccagcgcgcgtcatgtctctccatgtgtcaacaggagaagcctaattgtgctagcgatgag

SEQ ID NO: 1452 - DNA, 632 bp, Aspergillus oryzae
  modified_base (117)..(117): n is a, c, g, or t
taccggcggcgcgcacgctgcacactacaccattgcaatccgcacatccatagatctactaccacmatmttacacgcacagagaaggcatccctgatgttcagtggaaacagcagtnatcctccccactctccacaagaacagcatcctggcgtcgcctgcatgttaggaattagcctgacgtaatatcattacacagaatccccattcatatgcccatcgctcagttcgtcgcacaacgaaggaatggtgccatgaccttaatccttgtctgcaacctctgccaaaaggggatatcgcagtgactcggcttaacatgcatatgtatccaacagcgctcgatcgcttggtggaggccgacagaacatatactggatttggcgcagaatggctaatgaaaaagccaaatgtgaagcatctgcacatctctgcatataatcgccctaagcgtctcttttcgatactaggttcgtgtcagatttctgagagctcctcggccttgatgtcactcagaaaatagtatggaatgggatgtttttcgcctgacgtattcgaccaacctcaggtcattagtttctcttgatatatagcatagcacgcccaatataacaaggacagacgttctcatgacac

SEQ ID NO: 1453 - DNA, 987 bp, Aspergillus oryzae
gaatctcagcacatgtataggtttctacattatattatcatcggtcatcaagtcccagtccaggctccagaccggacatcgtggcatgaaaccaacccccgcaccagcgtctgccgtgagcatgaatatcatcatgtaacgagatgcgactggaattgagaggatccacggatatgccaggctaaaccgcaaacaggcagtttccccagactattgagggctggacttagcgacctttgtcagagaaaaatgacgctgacccagaaatgcctcatccactgacacgtccttgaaaattttttccattctccatctcagccccactgtcataaaacgctgactggtctaatccaccgacccggtcgaaccggtgagaataccggcctctttttggaagctgatccactggaggggaaaaaaactgatcaggaaaaaaatttgaactgccggaaaaaaagaaatctacgatccttccccggattttggccccaggcagccacgcttgcaggtcacactgtcacgcatcactcttgcatcttcgatcgcatcaaccacgggtcctgactctcggtctccgtcacgtacatctttcaggtaagtgagagtaccagatgcctaattccctaattcaggtgcccttgaccaaggaatttgtctcgctcatcgccgcctgacatggcgccccggagtcacttacctcgcccctcggtttgcctcggatgttttgcaccgaatggccgtcaaaccctagatcgtcacgccccgggtacttcccagctcgctgatactacacgacacgccgagtaggattcttcgccattctggagaattctgatgcctaccggatcgcctctggaaggataccgttacttcatctaggacctttcacggatacgtcatcaacatgttttctttatcttttctactggtgaatatagcaagcacacataacactgaatatgcaggtcatactgtagggaaaactcc

SEQ ID NO: 1454 - DNA, 1024 bp, Aspergillus oryzae
  modified_base (89)..(89): n is a, c, g, or t
  modified_base (91)..(91): n is a, c, g, or t
ggactattgctaatactactatcccactcgatttgcggtcgctcttcatacggcattgcttgtgtacggtatgagggcggcgctccgcntnccactgcgggcatccgattttgctcctgcgccggtcgcttcgatatacctcgtctgctccttggattcgccstttccagcgcgcatcgggcccctcgtctgttcacagatcggtttcaaactcagcacaagcctttagcaaagcccgccaactgcgcccacgagtaccattggtagcgttaagaccgcacacttcttattcaacaaagacctccaacttgtttggtgcggcggagaaggcgaacggcaatggcagaaaatcatcggggtcagaatggtcacggaggaaagtgatcacgtatacggtcgttgggggaactatagtcatcggagtggtggcattctcagacaatgctcagcatctctatcgtgctgcggcgagaacaggaagggtcgttggcacattggctgtgtgcatcaatgactaccgagtaaccctcaaccgagaaacatcctcacccgaagagcgaaacgaggaactccgagcatgtcacagacggtgcgcagagcggaccctgagggttctcgagaggaatggttccatttttattaagctggggcaacacctcagtagcatgggctacttgctgccattagagtggacgacaaccttcattccgctccaggataaatgccctatctcctcgatcgaatcaatcgaggaaatgttcatagccgacaccggctgtcgaatcgatgagctcttctcaagtttcgacccggagccaattggcgccgcttcccttgcccaagttcacatcggtatcctgaaggaaacgggtcagaaggtggcagttaaggtgcagcgtccagcattggcggaatgggtcccttggatctagcattgaccagatttaccttttccaccctgaagcgcttcttccctgagtacgatttggagtggctttcgaaggaaatggatctgtccttgcca

SEQ ID NO: 1455 - DNA, 958 bp, Aspergillus oryzae
  modified_base (153)..(153): n is a, c, g, or t
  modified_base (375)..(375): n is a, c, g, or t
gcgggctggtcttcattggactccatggaaggccatcgaggacatgggggataagagccagtctaagaaaatcatgacggcggcaggcgttccttgcgttcctggttaccacggtcagaatcaagatcccagcttcctcgaagccgaagcggnataagatcaaatatcctgtgctcatcaaggcaatcaagggaggtggcggaaagggaatgcgtatcgcccatagcaagtctgagttccaggctcaactgcaatctgcaaagtcagaagccatgaactcgttcggagatgaccatgtgttggtggagaagtacatcaccactccacggcacattgaagtccaagtgttcgcagacaaacatgggaacagcgtgnctttgggagaaagagactgcagtatacaaagacggcaccagaagattctcgaggtgtcacccgctcctcacttgcctgatgctacgaggaaagatctctgggcaaaggcacgggcggctgctgaggccgtagtattgaaggtgccggtaccgttgagtttatctttgataacgataccggggaattctttttcatggaaatgaacactagacttcaggttgagcatccggtgactgagatggtcactggccaggacctggtctactggcaactcaaagtggctgaaggcgctaagcttccattgacccaggaggaagtagaagctcacatggcgagccgtggacatgccatagaggcgagaatctatgcagagaaccccgatcagggattcatacctgattctggcacactgctgcacgttcgcactcctaccccctcagaagacgtcagaatagacgcaggcttcgtcgccggcgatgaagtttcagctcattacgatccaatgatttgccaaattgatcgtgagaggcaatacgcgagaggaggctctccgcaagcttgcgtctgcgttagaagagtacga

SEQ ID NO: 1456 - DNA, 377 bp, Aspergillus oryzae
  modified_base (286)..(286): n is a, c, g, or t
gaccactcgcctatttcccattactcactttttctcactttcttcactttcctactcattccctgatttttctacacagggtccccagcaacaacaacctagctcgtttctgtctatctcgagtgctatcgctgtcgatctacaatcaaaatgcctcactctacttgccctgcctgtgacgcccccatccctggtcaggccaagacctgtgtctcttgtggaaagacttgccctgtttaaggggtcatattgggtgttatgagggccggatgttgtcggtggagtntggtcagtggatatgcgtaaagacatatttgatgattgatgatgagatatgaattcgttgatgagtgaataatattgcctgtttattctgc

SEQ ID NO: 1457 - DNA, 599 bp, Aspergillus oryzae
ttgtttgttcctgcgccatctgtccttcaagcacgattgatgagtccgtcgtggtacttggtttctttctgcttttactcttgatttaagttcggcctgcgcttttcaatgcgccatggttgcgccactgtccccgaactctacgaagaggaagacctcttcgccgctgtcgatgcacgtactgaatcactacagaacttgcgggaattaggtccgccggactggtatatttggtcaaacaacccaagaccaacccaacccctcagaccggagtctatcaccatgtcacgggcattgatgcttcttcttccgctagcttagctgcctatgtaaatacgctaaccttctcccccctcgataagacgcacaaagtggtttcaggaatatactgctgctacaatgccttctcgcaccttgacatgcgcgtcgaagtcaaaattcccggtagtctcgagagcaactgcattgacgagcgcggggataaacgtgttgcaactgaagccctatggctagagacgtttctgtgtggagtcttgcgagcttatacctatgcggacgatggtagcggagattcgattcgaaagattgtcggagtgcgt

SEQ ID NO: 1458 - DNA, 744 bp, Aspergillus oryzae
gggggaaaacggactacggtgctggaatatctgtagcttgactcaagaccagttgcttcgtggcttcaagcctctgtcaggatggcccttcaccagttcgactacatctttgctctcggcaccatttttgccttcctagatgcttggaatattggcgccaatgatgttgccaactcttgggcgacctccgtctcatcgcgatctctgaagtattggcaggccatgattcttgcctccatcatggaattctgtgggagtattggagtgggcgcccgtgttgcagaaactatccggacgaaggttgtcgacgtcgatctctttaaggaggatccctctatgcttatgctggggatgttatgtgcggtcatgggctcctccatctaccttaccatagcgacgaaatttggaatgcctgtttcgaccacgcactccatcatgggtggtgtwattggaatgggtattgcgtcggttggggcgaatggtgtttcgtggtggggaggtaatatcaactctggtgttgttcaggtgttcctggcatgggtcattgccccctttatgtcgggtgcctttggtgccatcgtcttcctcatcaccaagtatggagtgatgctgcggasatttcttgtccggaatgctttcattgccattcctatctactttggcattacgtctgctctcctcaccatgcttattgtgtggaagggtgggtcgagccggattagcctcaatgacgcagagactgtt

SEQ ID NO: 1459 - DNA, 914 bp, Aspergillus oryzae
ggacactcatttgctaataatagcaacacttcatctcttccatagcctcttgacaaactccagcttgttatatattaaatagctctatccgcttctccgaagaaatagacgcaatacgcctttgtcacatttcgaacaaaatgttgaccaaatccctcttcgcaggcgcacctaggcctttccctttcatcggcagtggcccacgaggcccctgtcgtcgaaggcaacgagccccaaaccgtgtacgaagctgttctccaggacaaagacaacaccactgttcgaggaacgttcactacccatggtgctgaggatggaattgggattcaatttcgtgtcgctcttactggagttccaaaagatacatttttaaactatcacattcacgacaacccggtgccgaaagatggtaactgctatgccaccggtggacacctggatccttacaagcgcggtgaccagcctccttgcaatacaaccgtacctcagacatgtcaagtcggcgacataagcggaaaacatggacctgtctggactgccgatggcaacttcgaagtcttgtacagggacttcttcctttcgaatgtggaagacactatcgcctttttcggtaactgctcggtcgttgtccatctgcctgataacaaaaggatcaactgtggtaacttccacctggtgtccgatggggaggagaagaagaagaagaagaagaaggaagaggcgaaggaagaccagggttgttgataagacgtgcctttcttgctaatcatacgtctagctttgattctagttgggtatctcggtctcagctatggatggttgcttgtcagatcgctttacggtttaacttctcctgtgttgtcggtaaaaccaagtctaataataagtgataattcattggaatttcggattcg

SEQ ID NO: 1460 - DNA, 855 bp, Aspergillus oryzae
  modified_base (524)..(524): n is a, c, g, or t
gggaacgctggcagttcagctctactactacttaaagccgctttctcaccttttgtgacctggttttttttcgtaaccgtttctcatcgccgtcttctttggggacaccctgccgtgttttttgatcaaattctgttgtcaccgtgtcgttccgtgaagaatccctgcctttcgatcgcagaatagaagtcgtcaagacaaggtgggcccgtcaaagccgactcttcatcctttggccactcccgaaacgttgagcttcccttcggagctccgaccacgcacctactacacatgccttgacccggacaggccggacaaggagatcaagaaagaggatgaggatgacgagattaccatcacccctccaccagcatacacagagtttctcaacaccttcagtcctattttttccagccctgcaacctcccgtgagaacttctccaagtacatgctcgacaggcctcgtccttcacctacttcggctcctaccagttctacttctccttcattccccaaagggagtncaaagattcctcctccatattctgcctcgcgctcagtcggatcattgccttcgaagagtccggatcacactcgacgtttgcctctccccccgccttatgtctgcacatctatgacagactccccgcgcagtgcgcatcctcttcggtccccctttaccccatctgattacagactgcgggcattcgactccccagtyagtgagaacgggacgtcgttcagtgtgaggcatgtggtcacaacgaccattacccttaagcgggccccccagctcgagcccccgccgcaggaaaagcggagaaatatcgcacgtcggaatacatagttgcctga

SEQ ID NO: 1461 - DNA, 908 bp, Aspergillus oryzae
gctgacgggtagtaataaattacatcctaatgactccacaacagctttcgcagtccgggggcggctttcgctcgcgccgctcctatccctcactaaaccatgcctccctagctccactctaccatctcgattccctattgacgatgatgtcgagcaccaggattactttactccaagggctgaagattctgagtcctactacagcgctcatgatatccccgcaaagacttcgtatctttccagttactccgtccccggtaccccaggtctattgtctcactcccgcagcgggtccagggcccgacaccaccagcggagtaaaagttcgacccgcgcacacctgagcgataccaacctccaaggtcaagatgatgctcaaccacctcaccaccaagcgccgaagatgaagcgacactcatctcgtcatcacccgtcagactcagctagtcgtcgtgatgcagagtggatgcttcgcgctgggatcgcactagcttcctcgacccgagaagagaagggtcaaagttggctcgcgaaacgggagagttcgactagtctggttgacgaaggtaactatgacgtggaatcacctggtcactttaacaaagtgactaggaaatccagatccgggcggtcaaccccggcggcatctcggtcgcgcgttgtcagtagaagaggcagtcggcctgaccttatcatgactggtctcgagatgacttctgctagacagggtgacagtggcagtcttgaaagtcctgcgcttgatgtgcgacacttcgtcccggattttgtggacgagcgtatccgtgcagagatggcgattattcaacaggaggaatatacctccgactctgacgagtactctgactcggaggacgacattgacgagcaggagatgcagcgcttgaccc

SEQ ID NO: 1462 - DNA, 186 bp, Aspergillus oryzae
actgggcagataacttgagacatgcggcgtgtactgagatacgggcagctccttagtggggaatgmgatgggcgcgggagcttctttcgacgaggtcaatggacgattcacacaacaacatcaggaatgcgtcaacacagaagagcaatcttgtcggtgcgggcagggcctacatgcaaggatgaa

SEQ ID NO: 1463 - DNA, 996 bp, Aspergillus oryzae
gggtgtttgctgtcctatcgtgaatcgtatgccccggtgcttctacgacggaagactgagcgactgcgcaaagagaccggcaaccccaatcttcgctcagcccgtggcgacaccaagatcaccaaagagctgttcataaccgcactttcgcgacctatgaaacttctcttccgttcaccgattgtattcctgctctctctgttcgcagctgtcacgtacgggtatttatacctgatgttcaccactttgaccccgatcttcagaaacacctacggcttctcatcgggtctggccggcctcgcctacctgggcttcggtatcggaagtattctcggtctgggaatctgtggagtcgtttccaactgcatcgctgttagtcacaccgcacgcggctgtttcaaaccagagtcacgtcttaccccaatgctattcggaagttgggcaatcccagccggcttattctggtatggctggtcggcgcaagccatactcattggattgtgccgattcttggaacaggagtctttgcgatcgggcttatggtcgtgttcatggcgtcgaatacgtacctagtggactcatacttgaggcatgcggcatccgtcaccgctgctgccacggtactgcgttcgttaatcggcgcagtgctcccgctggctggtccatccatgtatgacgcgcttggcctgggatggggaaactcattgttagcatttattgcgctcgcgatgtgtgcctgtscgttgctgtcttggaagtatggagagtttattcggactcatccacggtttcagattgctctttgaggtgccctttcgagtttcaaaagttcccatatatatgtaatagattgcccggcatcctctcttatccaaagtcttcttcgtttcattttgttctttttcggttgttagtttcagagattcccctttctccagacaggttgagcgacaggagttaacatataaatgccaatccacagtattgatatattct

SEQ ID NO: 1464 - DNA, 692 bp, Aspergillus oryzae
gggggggggtaacactcagcattgcagaaaacgtgacacaatggaggccttcaatcwacacaacttcctttcttccctctacattcttttaccttttgttattctcgcgaacccagtccatgcggccccmwaycaaaatcgtattcttgaaaccggcagtactttcggtgctccggatccatatggcccatggcaaatgatccccagcattcccaccgaagacctggtctamatcaaaacwacmaamaccggaactgggaggdddddddtmaaatcgcctcgggttcatcgggattmaggactcgcagccttgaagtcggaacatcatttgtytctgaggataacggaacttggcaatwaattggtgcacacggtgacggcacacctsatcttgtttacatcaaaacwaggaataccggaaccggtagggkggaggtaaaaattgsgtccgcatmatcmaactatmagamacgtatyttggaaactggaaccactttttacccggaggataatggagtttggcagatggcagatttcgatcacgatggmaaactcgatytggtttatataaaaacccgtaatacgggcacagggaaggtcgaagtgcacgtggcttctggagcgtaaaactaccagaggcgaatccaggaggtcgggacgaaattttacccagaarataacggcgtctggca

SEQ ID NO: 1465 - DNA, 266 bp, Aspergillus oryzae
  modified_base (86)..(86): n is a, c, g, or t
ttatggcggggtgatagatargcggcactscacaagaaataggagtttaactsagagccaagtaaagagaagacgaatggtcgagntacgcgagatcacatataccagggcgtctactgtaaaaaaaaaaaaaaaaaaaaaaaaaaatacaacacatctgggccgtyggcggcgacatgctcccgagacaagtcaatctggatctgggaaagacctggagtgayggcgagcgaacaattctcgcasacacagtggctgtcatgcag

SEQ ID NO: 1466 - DNA, 781 bp, Aspergillus oryzae
ggcattatgggggggggctcgggcggcattgagggcggtgctgatttggttggtattattcaggtacagggacgaaagcgtactgtttcagatgatgttgctcttcgcatttctcaagttgtgaagtccacgaagcgacccgtcactcataccgcttcgacgactcaaggaacatcaaatgcaacctcggttgattactttgatcattccactaatgtcctacgccatcccaaccgagctctgctstgggtgtgttccagaatcagccattgtcgtacatcctagagcagcagcaaaagctggaactcgatgtggtccaattacacggttctgagccattggagtgggctaagttaataccggtgcctgtaatccgaaaatttggtcttgacgagactggaattgcacgaagagcctaccatactttgcccctacttgattctggagctggcggctcgggtgaattgcttgatcagtccggtgttcaaaccgttctggacagcgatgctggcctgcgtgttatcctggctggaggattggatcccacaaacgttgctgacacaatcaagaagctagggagctctggtcacaaggttgttggggtagatgtcagttctggtgtggagtcggatggcgtycaggatccgagtkaaatacatgcctttgtgcaggcagttagaggacttcaacagtwatccatagactttttggttctcagataccagcaacttgtcacagatccggacgatgatctttaatgagtttccttttgttttcgagt

SEQ ID NO: 1467 - DNA, 474 bp, Aspergillus oryzae
accgacgcaagccaccaaggaaaaaaaaaatgtccaccaaaaaggaattcatctgcctcgtccccgacaagccaggctcgctgcaaaagcgtctggaagtccgcaatcaacacctcgaaggtgtaaagcctttagtccagaatggctcgatcgtctgtggtggcggaacstggactctcaccccgcgcctggcgagacccctccctttaatgggagtgcgttgattgtcgtcgccgagaatgaggctgaggttaaggcgttgatcagtaacgatatttatacgcgcagtggtgtgtgggatgttgagaaggcgcagattattccgtttatgtgtgccgttagggttggggataaggctcttccttagatttattgggcattggattggattgagttggatttctgagaggcttcgtactactattttatttgcgtaggtaggtaggtatatttccaatacgaatgtgcgtttta

SEQ ID NO: 1468 - DNA, 553 bp, Aspergillus oryzae
  modified_base (39)..(39): n is a, c, g, or t
ggtgacaggcttggaggttccccatttccaggcgcgagntatcatgccaacaaggcgtgtcaagaggccttcaccaacgctttacggaatgagctgagtggcacggatatacgcgtgctcgcactgcgaccgggatgtgtcgcgacgaatttccattcgttgcgcgtgggtcatgacaaggagatgtatgattccttctttgaaggatatgagccactcgtggcgccagacattgcacaggcagccgtttatatgctccaacagccaccgaatctgtccgtaaaggcgttggatattgttccttcagcacaacgctcgttgaatgtgtttgaccgatcgtggaatgagcggagaaaagaccaatgaagagacgatggcagatgatggtcagattaaatttgcggagttatcggacgccaacacattgttggsycccactctttgcatgtacatagaattcctcgactgaagacaagataagatgacgagctagtaccggacgaacccgcgaacaaaaccatagcagtaaaaaaaaaataatttgttcaggaat

SEQ ID NO: 1469 - DNA, 275 bp, Aspergillus oryzae
agtggacggtgctatgttgagggtggttttgccggagttgaggaggagagggtatgagattgtgacggtttctgagttagttagggctggcgtggaggctgggacgatttctgggacgtgatggtcytctatgttcagttgttttttggttctttgaagcgttttgtctgggtatggtatatgttctctttccttttgtacatatcttttgtagaatacacctgcgtgttttggaagartacacttttggcaaataaacaaacaagcaattgaat

SEQ ID NO: 1470 - DNA, 398 bp, Aspergillus oryzae
gcgcgcgcggaagaacagatccgggcacaggagcagagagtgaamagatggtagccggactgtggagtagaaatgcgaagaaatgatgagaaaaacgaatctgatgatatatatgccaagatctctacccatttttatttgcttataatcaggttttccgtttttcgattgctccgttccgtgtcttatacagttttgtctcttgcttggcgggttttgctgctattgcttatgagggtggaaaggtctatatatgcccattgcttgagctctgataattgtttatgtcaatgcatggcaatgccttgattagttggtttgtaaagcatttgcggtatatatatttatatatggctgctgcgggagctctccataattttggaataaaatcaatgtat

SEQ ID NO: 1471 - DNA, 200 bp, Aspergillus oryzae
  modified_base (177)..(177): n is a, c, g, or t
aaacctaagaagtgttgtgggaagaatgttagattaacaccaacaaataaaattcagaaatgtactttagctgcaaattgatcatatgataaacctaataatttaggtattcagaaatatcaaccactaaataaagcaaaaacagcacccatagataatacatagtggaaatgagcnactacatagtaagtctttgttac

SEQ ID NO: 1472 - DNA, 600 bp, Aspergillus oryzae
  modified_base (505)..(505): n is a, c, g, or t
ggggcttccwacwcacagtcttctcatctcatcgctacactcctccattcctccgggctgttckggactcgattwtacatatgaagatcggtgacacatccatcaacgatgcwgctckcgttctttacgcgtcattgtcccttcccttgtggcggtcgctagatgctggcccttccgwgwaaggkaagcatctcctcggtctcgggcrccttctaytcacgccgcggggtgtgtggagaatggtcccagcaccttcccaacggatgatgaaccccgcgagtaggttgacaggaagtaagacagtctcgtgatatctacaatccctggtggtagcgcagctgcggtgtttagtgtgtgttcaatggagcaaaggtgtggttgttcgctttgggggacaaaaggctggagatttctggggtcctgagcaatggactatgtgctcatctctaggtacggctgatttttggcgtgcgtgtattgctgtcgggttgtgtgctccaggganaattgtggatttagagccaggcagttcgtttgtgacagattatatwatataccattttaagtgaacgacgagccggagtgaggtgtggatgkcgk

SEQ ID NO: 1473 - DNA, 418 bp, Aspergillus oryzae
  modified_base (147)..(147): n is a, c, g, or t
cggggctgcccgagcacacattcgatcgtaccccacatacttgatcgaagcacttgcgtgacctcacagcaggccgcaacgctccgacgagcatcatctactacgggctgtgggccaccttcacgcagcgtggactgctcagcaccnctctgtgggcgcgccatccccgtagtcttgatcacctctsgcggtcttgggactatgggtcgtyggctgcttccagckgccacgtggcgtagcataacggwagccgctgctgcgcagactatcggctatgtaagtgtcgatacacgatggtsaacgacatcgcctagcaggactcttgmcggatctgactacggccactsaatcttaatagtgcggagcgaaaagcgyccatcgcacctatatacatatcgagcgagcgaatggcactggg

SEQ ID NO: 1474 - DNA, 874 bp, Aspergillus oryzae
attatggggggggctgggcagagtttccattcctagaaacacgtcattacctccatgtataatattagcagcttacactgtactttctatttacttaactataatatttctgctatctatccctgacaacttgggagcctatttacgcgtcgccgttttatcatgcctgcctagtcaagagccaatcgaaaccaataccatttcactatctccgtacaacttatggatagcacaagctcaccagattataaggcgctttttctgagagaagccgagcggaggaaggaagcagaagaacgccagcggaaggcagaggaagaacgggaacaggagaaagaggagagaaggcgtgcagaagaggaacgagatcagggcagagaactaacgcggcacaccacctttctaggacttctccgtgactgccatatccttttctcgcttcctttacgagccgcatcgccgtctatatccacaacaggaaaaataccgcagccaacagggaaatactgcccgcgacgccttctaccttgggaagactgtkcagttaggcaacaggagatttaccggcctgtttgcacctatctggaacctgaagggaaggctgcggaacagcgattttcaccgcgccttgcstgggaggacttgggtaaacgatttgatgaaagaccaataagcagtgagcaggatctgcagagctatgaacgatttggtgtggagaactatgttcgtgatattattgtagctctgcaagataccagccgcttgagatgaatttgggctgggcgatggagttatgtttkagaatyatgcgaatgctcttgatcccgtcgaagctagccatctttaacgaaatgaattgtcgagttcctagcgt

SEQ ID NO: 1475 - DNA, 274 bp, Aspergillus oryzae
  modified_base (52)..(52): n is a, c, g, or t
attatggggggatcattactctcaagttcaccgtgatgaagggcggcatggncaagttagagcatgaagtmgcmaatcttccacccaggaccagattgagcaacagtttggccctggtcgatacctcaccttcgagggtttcccacgtcgatgagaacggaaaacagcactgcctcgatgaacccgttgcttatcgacagacgtgtctacgcgtratcgagtacctgsgtcggtatggstacagtgactatcagatttatttactactcagctg

SEQ ID NO: 1476 - DNA, 244 bp, Aspergillus oryzae
gggacaaacgtagttctctcacgwtgcttccttaagcttcccctagtctatattttaatattgtacttcaggatatctattctctctactgggaggttccwtatcaatatgaagatctctcgcccactgctgatttcgtcrgatagcttgatctttcgttctwtggccagcttcgatctgtggtgacttatcctatagasacccctccatctgtcatgagcacggacgtaatggaattcatcat

SEQ ID NO: 1477 - DNA, 476 bp, Aspergillus oryzae
aagcattatgggggggaatgtacttgcattattaagttatgtcatgcattctcatgtaaattggcgactacaaattggtttagtagatacgattcatgaatgagtaatctttcactttcttttttttttcttttccccacatgtggcwacaaattgcgggctgccttaaagmattgcttgatcagggttgtaattaaaaatgaagctgtaggaaagcaacaagtggcaagcaaaaagatggaaacgggacttggtgtcgatctggagcaatcggaccggaagcgggaacragcagttgtaaagctcgactgcgtgcttaaaaaaaatcgaaaaagggcctagccgaggmaagcacgggaggaacttggtttataaagctgaggaacattctttcatcggttctactcacctaaaaagtaaaagtggcaattggacaatctgcatraaccgtagcttcctcggacttggaggcttta

SEQ ID NO: 1478 - DNA, 766 bp, Aspergillus oryzae
  modified_base (84)..(84): n is a, c, g, or t
ggaattatggcggggggtgatggagagattgtcggaccatgaaaatcgccccagccaccagcggatcgggacgctgtcggagtnagtcgttgaaacgcaacttcttcagattcttccaggatctgatgtcacgatcttagaacccttggtctgtctattccgagggaccaaacttccttgatgaccatagaaataccgcgagaggcatcgatgtacaccatctaatgactttaacgcctctcgaatgattgattaagcgtgtgacgaataatgcctttcctttccttttttttcggtttgctgtgatccgataataacgactgaggatctgcgtctgcgactactgactcgcagttcgcaatgcattccttacgatgattgtcttttcctttgtttagtatttgtggagtctccgggggtcgccttacaggcgcgtgtaaatggtaccacggtttacggttatggtctctttgttctctaccctcagcaatattccttgcataactatggggaaaaccacctgatcaatcgggataaaaccaggaggttgggagagcagaagcagctcgggaggagaggccaccggtgttttgaccgactcattccttgatataccccgagacatgtttgattgagtccgcgtccattgtatcgcatggaaaagttcgtgtctcaaaagcgttattgagccatgcgtcacgtgtacataatatgcactatacccagcatcttcataatggactaatgtgggaagattcaaatttgt

SEQ ID NO: 1479 - DNA, 216 bp, Aspergillus oryzae
attatggcgggggagaagmggcaataarggaccgcatgccgtatttgaaggattragaagagtcaatggttcgctatggacgcatgcatggtctgtaatattctagtacaatgacctgtcaaataagtatacgagagtccaagagacgcacagtagcgtgggaccgatctgtcttatcagtagtctcccctcaccgtgtagatgaaccttttctct

SEQ ID NO: 1480 - DNA, 446 bp, Aspergillus oryzae
  modified_base (3)..(3): n is a, c, g, or t
  modified_base (28)..(28): n is a, c, g, or t
  modified_base (31)..(31): n is a, c, g, or t
  modified_base (40)..(40): n is a, c, g, or t
  modified_base (44)..(44): n is a, c, g, or t
ganagcaacgtgttaataaaaggtttgnaanaaccatggncgcncccatcgggtgcacctggtaggaagcatcccgctgcccaacaccgagcaagttttgwggydgatccccacagcgctgccaaaccgcctctactcgatcccagacggcgaaccaggcgtccggcaaaactatatcggctgggagctttcctgctttcccccggagacatggcgaccatttttgcccggcagcactgggctaccagccgaccaccccggctttactcaggattccgtggcgccatctcagtacgatggtgctgcactcgattcctataagcgattcgtggaactacgcgatcaaggaatcatcccaccgggagtacgctttcaagtctcgcttccgtcacccctagcccgaattcagggccacttgcgccctgaaatccacgcacagcttgaay

SEQ ID NO: 1481 - DNA, 990 bp, Aspergillus oryzae
  modified_base (833)..(833): n is a, c, g, or t
  modified_base (837)..(837): n is a, c, g, or t
  modified_base (911)..(911): n is a, c, g, or t
agttcgcgccaaactcgtcgaaaatatgctagtcttctagtgcaagggcatggcgagaattgtccatggcgaaacaagggctgcgatgctacgatccatcgcttggccttatccaaccccgatacagcaatctctggtctccggacacgctatttgaacatcgctaagatggccgatcagctaccatttcaagaaatcatccagacccctgagccatttgacctcgagaccataatcaagatactgccagatgattttgagagacttgaggagcataccgaaatagctgtgcctcaaacccctcaacgcgtcgatgaaaaccaactggcttccgcttcaaagtccgtctaatcgaggaatctcgattaatagaacggcttttgcgcttgccttctttgggtgggactccgtcgcagatggtgcggcaggtttggcaggctgcggtgcctgcttccggcgcctgggactctggatgtacaaaccgaagaacaacggtgatgtgtctgtttatgatgcactcgacgttgctaccgagcatatggagtactgcccatgggtcagcggcaaggctcaaagcggtaccggaaagtcatctgagaagtcagccgagctgcgcagtggatgggaactcttggctcaagcgaaaaaagtgaaacatcgccgacatataagatccacagtgtctgtggatagccgtgctgtttccgaaactccctctgcggatggtctagcggttgacgaagcaaacaatgaagccaaaaaggctagcgaccgcgaatggtgggcaaagctgcgacgaatgagacaagtactaaatgtcaagtcccccccgnaacnactgcgccataattttgatctcattgttcttgggtctgctccccccccccccgagcgtggcgttacaggcattngttatcacgcgttatgtctatttgttacagtaccttaacataccaccgcccccccttttttttttgctcaatacatctt

SEQ ID NO: 1482 - DNA, 687 bp, Aspergillus oryzae
  modified_base (182)..(182): n is a, c, g, or t
  modified_base (630)..(630): n is a, c, g, or t
aggccattatggcgggggatacggaagagcctgagaacgctgcgaattcaacgagctcctcaccgaggccgtccagtatggaaacaattacgtctagattatccgaatgacgagcgtggagggaacaagaagatgctggatgacattttctcgctggtggcgtatcctgatccgatgcagtnagtccacgggcattatttggaccctgcaggccgcattgctgttgcagaggaattgaattcggcaattttagtttcacttggcaaatcatcatcggctgctctggagcggctataccaacagacagaagtgctggtcaatgaaatcagtgaagaaggaggcgctggggcgtttattaatgtgcgacatgattttctactttgaatccttcaacagcatgtttgggactgattacttgattattctgtgaacgtggcacatgaagactggtagccttctctttgtctattttctttaaacactttttccttttcccggaatgtctattggtggccctgcgcgactcctctgtctttcctttcttatttcccggtcaggctgacctgatcgtcgtcctgagatacttttgagtttgctgtgttcatatacacagacctagataagtatgtngctacaagtacatacagtagtgagccatgactggtaataatttttcaatccaattcc

SEQ ID NO: 1483 - DNA, 464 bp, Aspergillus oryzae
gagcgcacctccaattttccaccgtcgtcaaccagactaacaaaccgccaaaatggagaacgaaaagggagagattgtcgatctctacgtgccccgcaagtgcagcgccaccaaccgcatcatcaaggccaacgaccacgcctccgtccagatctccatcggcaaggttgacgagaacggccgctacaccggcgagaaccagagctacgctctttgcggtttcatccgtgcccgcggtgagagcgatgactccctgaaccgcctcacccagcgtgatggatacatccgcaacgtctggactgcctcccgccagcggtaaatatggactatttaattggttaaggtgtgcggtgtgatttggtcgatggctggtataccagttccatgggtatatcggatatgatttaagataaatgaatgaagatatttcatacagaccagtcaaatcaatcaaaatcagttct

SEQ ID NO: 1484 - DNA, 1010 bp, Aspergillus oryzae
ggatgcggggtcaacttataaaagggggtttctatctttttgttttgttgtctacttggtaactacacaatggtcggaagattagctggtaaaaatgccatcgttaccggtgctgctggaggcatcggtctcgagactacaatcctcatgctccgcgaaggtgcctccgtcctcatgaccgatatcagcgagccgggtctccaaaaggcccttgcgaaagccaacgacgtggttcctcagcgcgacggcaaggtcgagtaccgcgtggtcgacgtatccaaggaatccgaagtcgaggcggcagtggcccatctagacgcctggggcggcctggacgtcatgttcaacaatgccggaatcatgcaccccaaggatggagactcagaggagacacctgaggcgatctgggatatgacgatgaacatcaatgtcaccgggcgtgtggtacggaagcaagcatgcagcgaagagcctccggaagcacggcaagaaaaagggtagcatcattaacacggcaagcatggttgcgcttgtgggcgctgccacccctcaattggcgtatactgctagcaagggtgccgtgttggccatgactagagagttggctattgtgcacgcccgggaggggktccggtttaactccttgtgtcctgctcctctcaacacaccacttttgcaagactggctgggtgatgataaggagaagcgtttccgtcgcgaggttcacttcccctcgggccgtttcggtgaagcgattgagcaggcccacgcagtcatcttcctggcgagcgacgagagcvgcttcgtgaacgccgctgactttgtcgtcgacggtggtcttactaaggcctatgtgactcctgagggccctgccactgaggcgcccaagaacctgggccaataggtataagcggaggtagaccgtcttttctgtygggacttcatgattgatgatgtactttatgaatatagccttttaatcaacgcttatgcaaatgagagccagattt

SEQ ID NO: 1485 - DNA, 309 bp, Aspergillus oryzae
  modified_base (8)..(8): n is a, c, g, or t
acgttcanttcaactcttactctgatcttggccattctgccgatccccaggaaattgaagatctggaaaaattccttcagcaggtcatccctgctgaaggtgaggtttccgccgggctatgactcagtggtccctcccgggtgtcgatcttggaaaagatgacatctagcattgtcttgggtatggtatgcttattggttgcagtgttgttctcgagatacaacttccgagatagaaacgacggttcaaagagatagcgttgagcatcagaaacctgtttgatacatatgttttattcatctattgtct

SEQ ID NO: 1486 - DNA, 305 bp, Aspergillus oryzae
  modified_base (3)..(3): n is a, c, g, or t
  modified_base (16)..(16): n is a, c, g, or t
ggnccattatggcggngggaagagatcagtctgtgccgccgtgggtgaacaaggagactttgctgaaacggtggtccaccgcggcgggaccatcctggcacccgaagagtatgattatccccaatgcttcacatgcgctaagtgaccctgatcaagcggaaccaagacgcattttggccgagagggtcattgcatatttggacgaagtggcgcaggaagtttagagctctgtactgaaaggatttcaagtataacatagtccgacttattgttgacaatgtccaagcactggctcatggttcttt

SEQ ID NO: 1487 - DNA, 264 bp, Aspergillus oryzae
  modified_base (10)..(10): n is a, c, g, or t
  modified_base (41)..(41): n is a, c, g, or t
  modified_base (99)..(99): n is a, c, g, or t
  modified_base (148)..(148): n is a, c, g, or t
attatggcgnggttccaccattcaccctgcattcaccgayngggtaagcacatgagccacayctagcagttgrccgacgcctacttgggcyaaccgctnatcaagcgtcgtactattgaacgaagtaaccagtccaacggagactctnagyatctccgcctgcgcgacgtacagctcacatattcagtcggtcatagagacaaatggagttacatacgcatcgcatgaatgactcgatgggcaacgtcactcgtcccgattgtc

SEQ ID NO: 1488 - DNA, 722 bp, Aspergillus oryzae
caacccaaacaaataaattaggcttcggtacaccacaccccaccagtcgatctacataccgtaattgagggctcttgtggaagaaatatttccgttatatatcattctattctagttcaaaagcgcgtctcattataaaatccattttccagtcactatgtctactccaatgtccgatggttccccggcgcaagaatccgagaaccctctcctccgcgcctcaaatccgatggtctctgacttagaacaagaggttctggatgaatattctagattactgggcaatgtaaataagctatctgaaaagcttgccgacctctccggtgatccctcgtcccttactctggatggcctccgacttcttgaacggaagacggcgacggtctgcacacttctgaaggccagtgtgtacagtattgtgctccagcagcaaattttcaacgagaatgaggagcaacaacagatggagcagcagcaaagtgatcaaatgcagtatcatgaccaggggtatgattatcaggatgaggatatgagctttgaggggcggtatgcttgatgttggtcacatgtttgattctgtgattattgtatgggtctttgttgttttcttttctcttgcatatataggtgtgggctgtgggtataccccttttgttttattgtgggttttggtaggcgtggtgttgggttttaagggttgaatgattatggaaccaggaact

SEQ ID NO: 1489 - DNA, 372 bp, Aspergillus oryzae
gtgttcggtcaagtcaggagatgttgcgaaggtacgactggggagacgggtagtggggcatacctcttgaattgggacggggaggttcgaccgagccgaaagattatggaggagtatcgggagcaacgggtgcctgagttggtttggaggcatacccaggatcttttggatcgggccgtttgtcggtgatttggccgttttctttccgtttatatctcaaagtgaagttttcggccgttacagaaacatggatgatcagcggaaaatgttagatcaagattggacgcggagtatgtattcaaacaaagaatgacctatccatactaccaatataaggccaagactcacgggcctgcagccgtgcatacaccc

SEQ ID NO: 1490 - DNA, 411 bp, Aspergillus oryzae
tttttggcgtgggggtcttctgtgttgcttaaggtgggtctgcagcaacagcagcagcaggctaaggaggttaaggaggagttgtcgcagcagttattctgttgtggttggctctttccttggctttgtgtctttggttgaagcgttatcgggggtcttcattgctttgcggggactgaaaagtcttttgttttgggcttatagattcttgtcctgwttttgttttgtgggtggcgcagggcgttgattgttgwttgttgttgttctctgctgggtggctcacatggtgctgcagcggctgtttgttcactggttgtactgtattctatgawtctcctctacwattgatgcctcgtcatgtctygtttactatgttagctcctggaatgtcaataatcctcttgtctgttt

SEQ ID NO: 1491 - DNA, 860 bp, Aspergillus oryzae
ggcattatggcgggcgatatcgaggatccaaacctagcttcggatagcgactgggcctcggcggatgaggggtcgctagatgtaactacattggcatcgagtgttctcaattacgagtacaagaatggccgacgatatcamhctaccgctcaggcgcatatttaatgccaaacgacgaggaggagcaggaccgcatggacctcctccatcacatatacaccctgattctcgatggcgagctgcatatggcgccgatcaagtcccatccagagcgagtcttggatttgggaacgggaaccgggatttgggcgatggattttgctgatcagtataaatccgcggaagtgttaggaaacgatctcagtcccattcaaccaagctggatccccccaaatctccaatttgaaatcgatgactacgaagcagactgggtctattcacggcccttcgactacatccccggtcgcgagctagcaggcgctgtcagtaacttcgaccgactcttccgacaagccttcaaccatctaaaacccggtggatacctcgagatgcagagcttccgcgtcgaagtattcgccgacgacaactccctcgaccgagcaccatataccacgaaaatgtgctcattgatccaagaagccagtgccaagttcggaaaaccgatggcgaatatggacgagtgggcggatagaatgatgaaagaggggtttgataatgtgacgtgcaaggttgtcaaagtacccattagtccgtggccgggggataasaagcagaaggagattgggaagtactttcaggcgcacagaatgcagggtattcagtcttatgttccggagttgttgcagagtatcttgaagtgg

SEQ ID NO: 1492 - DNA, 398 bp, Aspergillus oryzae
gcctcatttaaatccacatgctgctacaactaactcgacgcctctcctcaaggcttcaataggttctactccacctccgcagcaacaacttccttccagacccattatcctttagasaacgaatacagcgcaatgccaagggtaaagcgtagacctgagccgactcgcaaccgaagtatcctgcactagcgcaactacgmtatcccgcgtactttacctggccagaagcgcgaatatgcccttgtcggctggcatggcccatttaacaatttactgagcatatatttattacgatacttaggtagatgcatactatgggctctagatgctgtcatatcagaaaacgaaaccgagtggacacatccagggactacatgcgtgtcgatgtttttgaaagg

SEQ ID NO: 1493 - DNA, 541 bp, Aspergillus oryzae
ctctgtcgaggagcgaggcggtttcaascaagtttggactcagtcacacagthcagtgcttcaaactccactgccaactgggtaagtccttcagctcgaccttgtaatctgtttctttgtatgaccagtcgtcgcgtgtcattatggctgtcccbtggctgttcgtcggcaaactcgcagggcttatcgaggtcccgtccccggcttatcattgtttatttcargggttcctggcctcttggggttccccaaaaagcttyatttttctttccctctcgcattactttctttgttctatcttttgtttcttgtttatcgtatttttcttgttttctagaatgccattttttttggagccatttttccggatggtsgcgggcttaggcctcattgcggagaacggatgcttcgtgcgagaactgaasacggaggagtggttcaagccgacaaataaggcacagaccgacgcttgggaggaggscgtycgccaaattctcggtttttatcaagagcgggcagaaggcagtcggatcgaacaacg

SEQ ID NO: 1494 - DNA, 619 bp, Aspergillus oryzae
  modified_base (387)..(387): n is a, c, g, or t
  modified_base (401)..(401): n is a, c, g, or t
atgcaagctgcggaggtcctcaatatttgccagaaggccggcctgcccatcaatatggtttggtgtccgtttgaatcacattgcttgtggtttgttcttcaggtgaatcactcgaaacttgtggatatgggcaccaatatggaggaattctgccgcaaattagggcatgtcgtattcggttccaagccaggatggtttataccgaagatcttcttggtaaatgactacattgatccaaccaatctcccagatgtcatctgggctgaagcaacacgctgtgagcctggcaggcatgagtttattttcaacgaatattctaacatcccactcataccctatgtcacgcacggcttgccgtccaagaccggaatgaatgggaaagttgtnaaatgctgcatgtngcccaatgaatttacagaaaaaacgctgccatggaaagaaggatcttttcagggtgcctacccggaggatgtwaagaaaaaggtgcttgataactggacagcgtatggattccagtctctctaggtgacatagtgctactatttcccttgttagtcaaatctctcgtctgtygtaatagcaagtgtyagggacataccatcatatcgacatttcgctc

SEQ ID NO: 1495 - DNA, 204 bp, Aspergillus oryzae
  modified_base (56)..(56): n is a, c, g, or t
cctgtcgttactcggcttggaggaaatgcatgtagggaggtctgtcgtcagaggantgtcatggagggttgcctggtgtgcgaaggtgcaatctctcgttgcacgttgcgtactacgtcttccacatgttgtttctgaacttgtcctcacaacagtcgttctcagaataggatgtatgcaatgcgatatgcaatttgctgtaca

SEQ ID NO: 1496 - DNA, 706 bp, Aspergillus oryzae
  modified_base (82)..(82): n is a, c, g, or t
  modified_base (209)..(209): n is a, c, g, or t
  modified_base (239)..(239): n is a, c, g, or t
  modified_base (412)..(412): n is a, c, g, or t
caaagagggcacggagggacaggacttgttattgaaagacgaggttcttgaccggttctcgctctcaaagggacctcmtgangcgtcgcctcctaacagtcaccttagtttgctcgcaattgtggattgttggtcaaagcttggaattgtcccttatgaccatatgatttgttctacgcctctcttccgtctttggctgggagtcactnaatacctcttccgcagtcctgatctgcttnaggaggcattggatactgccgttgatgacaagacattccgctctgacgatttagaatttacatttgcggctcgggcatggtcagactgtgtttcatttggtgatttcgagtcctaccgcgatcggttcgagcggatccagggatactttgctcctcgtttccccgatgccgtnaaactaggcaatgaaatgatgaaaactgtccttgagaagacgaagagcaactrgaacctggagaaggagaraaaacgataaataataccatgatgcaaaagaagccaagggcgggaaatggatggatgagaatcttcacgatatcaacattctaggtttagcatgaaggccgadatggcatatttccttaagtdctactcagacatatggcatattgctgggtttttgaagatacaacagccggcaattacctagagtatgaaagcggccttcaagtgaaacccaaaactttcc

SEQ ID NO: 1497 - DNA, 522 bp, Aspergillus oryzae
gtgaagaagtatctgagtgataacatcgagcgagaacggaaagagatatcgactaatcgtcgtttgatttccagctatagcacagaaacggaaaacaaacggaaggagcttgaacaattaggtagcaaaccagttgttttccaagctcgccggtgtgcacttaagtcttgcggtggagtgctggaccttcctacggttcacttcctctgcaaacattctttccaccaacggtgtctgaacaaggtcgacgaagaagccgaatgcccggtctgtgctcctcagaattccactatcagagccatacgcaagagacaggtggagtcggcggatcagcatgagcttttcaaaggggagctccaacggtcgaaggatggcttcagcgtcatcagtgagttcttcggaaggggagtgatgcgacctcaaagcactatggcctgaagatatgtctacaatgcttgcatcatgataccttttgtatttagaattttatgtttacagacatatccaattccagtttacagg

SEQ ID NO: 1498 - DNA, 283 bp, Aspergillus oryzae
  modified_base (54)..(54): n is a, c, g, or t
gcattatggsggggaggaaactccattcctctgcaggggcggctcctgcagcangtaaaacaatgccttgttgtggcagacccggatattgaacaaagcgcggcgagtggagctacaagtgacttggcgcgaatatggaaccagtgccaaagaaatatctagcctatgatcatcttggctgtgttggacactaatgcattcttggggtgctgttggaacattggaaatggatataatcattgtattttaatagtcttgtataataacaaaccctggtatactg

SEQ ID NO: 1499 - DNA, 737 bp, Aspergillus oryzae
  modified_base (510)..(510): n is a, c, g, or t
cggaagtggaccgaccatcgaacttcattctttacgttcctgcgccgtcacagtctcccatggtcgtgaaggagagcagtgcaactagctggatcattccgcagtggggtggtgtcttccttttaaaccatcctctgtcgactgcagaccattcatccaatccaccacacctgtctcaggaggctcttcgtcccgcattcctaactttctcccatcaactcctcactcttctcggcgctcccgccacgccagcgtctcttcccttccgcctccaaaccctcatccggatccgtgctgccactctccttctctccgcctcgtcgacacatgggctcccttgcccgcctgaccgaatcccttccttccattcctatcccagctaatgtagcgacatccgtatcaacgactctgtcacatctcgcatccacatgtgagcatctccgcgaaggtcgtttccaagcggctctagcggacgctcgggtggccgagactgaagcagagcgcagttcntttgaaaagagcatggtgggccaggtttattttcccgatgaacataaggtggctgtttatctgcccttattgggcccggcccgcgtccctcttatcgtagggcttctaaaggaagttaagaggattgttactggtctcaaggccaaaaagcaacaaacctaggctttgccttgctatctaattgtataataacagagcctttctctttgaatatgagtctctcttat

SEQ ID NO: 1500 - DNA, 582 bp, Aspergillus oryzae
  modified_base (168)..(168): n is a, c, g, or t
acgacagcacttcagccaacgacagccgacgcctcgtcaaaacacccaaaatgtccaccaccgttcagaccggcaagaagcagcgctcggccatcgccgatgtcgtctcgcgcgagtacaccatcaacaagcacaagagattgcacggtgtttccttcaagaagcgtnctcctcgcgctatcaaggagatcaaggccttcactgagcgtgctatgggcaccaaggatgtccgcatcgaccctgccctgaacaagaaggtctgggaggccggtgtcaagggcgttcctttccgtctccgtgtccgcatctcccgcaagcgtaacgacgaggagaacgccaaggagaagctctactccatggtctacgccgtcaacgtcaaggagaccaagggtctccacaccgctgtcgtcgacgaggagtaaacggggaaaatctttttcatttccatattagatataccttttgttactctatgaaatgatggggtttctctctgtttttacgataccgtccgggtcgggtcttgctcggttgggttggaacatttaaattaaaaaaatcggaaaagtttctttccctgcc

SEQ ID NO: 1501 - DNA, 425 bp, Aspergillus oryzae
  modified_base (258)..(258): n is a, c, g, or t
cggcattatggcgggggtcggaatagggcatgtctctcctggctgagcgagaagaatcgcccgccgctgcgagtcctctggcagacacgaaacccgggccggacatatggctcagctgtcctcaacctcgtgcgtcactggacccgaacccactcatcatcgataccaatagcagcgggcgagtggacatggtcccaatggcgcgagaacttgtccgggaattcgatgcggaggctgtctgcgtcattagcaacgcgntgctcacgaaaaaagtcgtgtttcaactcgaggccagtggggtgcctgcttttgggcccatctttgactcttgatacttaggctggccgtggaagagtcgagccatgtaatccctattgtgtatttacttcgagcgtgcaaaataaagcttcatttatacctgatac

SEQ ID NO: 1502 - DNA, 319 bp, Aspergillus oryzae
gacatggtcgaatactataaccgaagtggcaagggtattcctatcgctcgtgctgccgaagtgaacttgcgaaacaaccacagccagtacatcttcacatggtacgggctgtgctttgcaacttcaatcatgttgtggatgatcgtacgtaaaaggcccaatgaggcgactcgtcgtgttcgtcaaaatgtgaattggtgatattcgttgacatcttttgtgtttgcgactatcggtggcgttcagtttgtttgttagaagtaccatgtatattgttcaagggggcattgacaatctcatgtcttgcagcagttccttc

SEQ ID NO: 1503 - DNA, 455 bp, Aspergillus oryzae
tcagtggttacccaatatgttccatctgtacgggccgcatgsaaaacgttgctgagcaatggccctacagcagttgagatccaagggcggtggattgcagatgccatcaagcagatggagcgtcaaggtattaagtacatcaatccgaccgcaaaggctgccaaagaatggaaggccaagatcaatgaactttcggacaagacactcttccctaccacgaagtccacctacatgggtggtagcatgcccggaaaggtctttgagcaggtcaactacgccggagggagtacccgtattccaaggagatccgagcagtccttcccaagtttaatggatttgatatcgtcaaacgctgaagtgggtggacatttggaggcaatgcttggtgttccactgtcccatgacctctaataacctttggtagcttgcaatccatgactgatcaggttttctgt

SEQ ID NO: 1504 - DNA, 302 bp, Aspergillus oryzae
cggcattatggggggaggcatagagaatggggggtgagagtaaacggcctcgacgaggcgcgtgaaattaaatttcatggcatgatcggtggagattccttattgtctttctttaagctcgacacttttccttgtttctctttatatgacgcatcgatgcattgttggacggtgttcaaatctttcttgcattgggataaccttctcggctcttgttggagtccatgtgtattctctacatatctttagcgtcttggacggataccagcttaacgtatgtggataatgatacactttaatcc

SEQ ID NO: 1505 - DNA, 344 bp, Aspergillus oryzae
ggagactacatgcacgagaagcaggatagtaggccctttgcaaatgggcaatggatctatctccgggatggatcgaatctgacggacctgttgaacaccgagttgaccttgaatatcccgagagatgtctacactgaggaacagtgacctgtttgctctgattacatcgtatgcgactaggatatatgaagatgcgcctatgttgcttggatcacgaatacatggagctgtggtggtcgtaggatatgaaagttctcttgactgaatcttggtggacaatacatttcggcatcgagtactacaccatatacttgttgcgcagacataatacaatatgcatattc

SEQ ID NO: 1506 - DNA, 785 bp, Aspergillus oryzae
atgacaatattgatgtcaaggggtgcacagataaaggaatcgccgtttccagtacacctgtcgctgttaaccatgctacagctgatgtgggcatctttttgatgatcggtgccttgcggcaggcctacgtgccgttgtctgctctccgggcgggtcagtggcaaggccaaactacattgggccgtgatccccaaggaaaggtgctaggaattctcgggatgggaggaatcggcagggaaatggccaaccgcgcaaaggccttcggaatgaagatccagtaccacaaccggtcccgactgtcgcctgagctcgagggagacgctacatacgtgtcgtttgatgaattgctggctagctcggatgtccttagtctgaacctcgctcttaatgcctctacccgtcatataattggcgagaaggaattccagaagatgaaggacggtattgtcattgttaataccgctcgtggtgcgctgattgacgaaaaggcactggtcgctgctttggattccggaaaggtcttgtccgctggtttggacgtctatgagaatgagcctgttgtagagcagggtttggtgaataaccccaaggtgatgctgttgccacacattggaaccatgacatatgagacacagaaggatatggagttgttggtgttgaacaacttgcgctcagcggtagagaagggaaagatgatcacgttggtccctgagcagaagaatgtgttctggatgtaggttggagattagattagatataattgatagaataaattgttaaagagc

SEQ ID NO: 1507 - DNA, 907 bp, Aspergillus oryzae
  modified_base (164)..(165): n is a, c, g, or t
acttatgggcgggggcgcgcttgatgtctacccgaacgaacctgctggaaatggggactacttcaatagcgaccttaacaactggacagcagatcttcgcagccttaagaacgtaatccttactcctcacatcggaggtagcaccgaagaagcacagcgtgcgnnttggtgtggaggtgggagatgctttagtgagatatgtcaacgaaggtacaactttgggtgccgtcaaccttcctgaagttgcccttcgttccttgaccatggatgaaccggaacatgctcgagtgatctacatccatcaaaacatccccggtgtcttacggaaagtgaacgagatcctcggagaccacaacgtcgacaagcaaatgaccgatagcagaggtgacgtgcgttaccagctacccacattcggataatatctcaacactgactacgaataggtggcctacctgatggctgatatcagcaacgttgataataccactatcaaagatctatacgagaggctcgaaagcctttcatcccggattatgacacggatattatactaaggatatctcggtgtatggaagcctcacactaagatcatctattggtagatttgatttcggtagaacccacccctcaacggctcaagtctaccgtctgctaaacaagaaagttattgattcttatgctactgccgcgctggtttctgattaaatgattgaaagctttaggttattgattttgtcaagtggcgcccggataatggaaatatcagctatgctgttcacattcgacgcatcatactgatgtctacggagaaatgtttgttcaacacttcggccttgttgcttttttttattctcttagtactttaagagtcctgctgaattgaaaacaggcaaacttgccttcaaat

SEQ ID NO: 1508 - DNA, 1097 bp, Aspergillus oryzae
ttatggggggggaactgttgaagaaggctgaggaattgctccgtttgggattgaagacgagtgacattgtccagggctatgagaaggcacagaactttgccctcaaggtgctagaagacctcgaagtcgatcgcctgcaggaacttcgctccaaagaagagctcagcaaggctcttcggacagtcgttgccagcaagcagtccggaacgaggatatcttagcctcgttggttgcggaaccgtgctcgctgtcctgcctaggaaccccgttaatttcaacgtcgacaacgttcgtgtagtgaagatcatgggtggtagcttggaacagtctcgtgtggtaaagggaatggtccttggcagagaacctgatggcaccatcaagaaggctaccaaggctaaggtcggcgtgttcagctgccccatcgacatttctcagaccgaaaccaagggcactgtgttgttgaagaccgcgaatgagatgctcaacttcaccaagggtgaggaggaacgcctcgagacggccattaaggagctctatgactccggtgttcgcgtcgttgtggccggttccaccgttggtgacctggccatgcactacctcaaccgcttcaacatccttgtgatcaaaatcctctccaagttcgaactccgcagactttgccgtgtcgtcggcgccactcctcttgctcgtctaggagcccctatgcccgacgagatgggcagcgtcgatgtcgttgagaccaccgaaatcggcggtgatcgtgtgaccgtcttccgtcagaggaggccaacgccgtgactcgcacagctaccattgttctgcgtggagcgacacaaaaccacttggacgatgtcgagcgtgccatcgatgatggtgtgaacgccgtcaaggccattaccaaggacccccgtctggttcccggcgcaggcgctactgaaatccagctcgtagagaagatttctgcattcgccgatcggmcccccggattgcctcaacatgccattcgtaagtacgctgaggctttcgaggtcattccccgcacccttgcggagtctgctggtctcgatgccaccgaggttctttctcgtctttacaca

SEQ ID NO: 1509 - DNA, 257 bp, Aspergillus oryzae
gcattatggsgggacttcctaatctttggtggtggtgtgacagacccaaggggattgcgggcatggtctgtacgcagatacttccatttgcagatgctcaagtgctggggctctggagcgacatggagtcgttggtgtacaaaggtcttgacttgtagctcagcttgtcgccatgctagtagggaaagttaattctctgtttttacacgggcaaagtaagcaaaaagataatatccctattcaaatatctgccctac

SEQ ID NO: 1510 - DNA, 427 bp, Aspergillus oryzae
cgcattatggcgggaaacgcttcttgagtctgagacgattgataaaatcttcgaggtacaggccagtggccggaccaggttatcggattgggtatcgagtggggacttggtttcggcattggcatgctaggtaccttggactggctgccatctggaaagttggccttctggggaggatggggaggttcatttgcgcttatggatcttgatcgtcaagtgacttttacttatgcgatgaataagatgggcatgagtatccttggtaatgagcggacgggggattatgtacgggctgcttatgcggcgttggaagggtataacgcgtgacagtggactatattttcgtttgtgtattgttttcgttaatgcatataattgtttatttgattactattcattccatttattaatattatggaatgtatgt

SEQ ID NO: 1511 - DNA, 318 bp, Aspergillus oryzae
  modified_base (142)..(143): n is a, c, g, or t
cgcattatggcggggaggtggtgcagtctggtattgatgcagtacagactggacgctggttccagcaaaatcctggcctggttcgcgcgttcgctaacgagctaggtgtgaaggtgcggatggctacacaaatcgactgganncttgagggtcgaggaaagaaggcaaagaaaagctcgttataaatctgtcagtaattgttagaaaatagatgctttagatcaggtcattcaaaccattcttcatgtgtctaaaccaacaagcacgaaccctcgagacaagaatcaaaggcaaataacagctatatggattgatcag

SEQ ID NO: 1512 - DNA, 461 bp, Aspergillus oryzae
  modified_base (125)..(125): n is a, c, g, or t
ggcattatggsgggcacaatatcaagaattcagacggatgtcaggagcgacgaggcaatgcattattaggccatcagcacgtgctacaatgcgacagtggtgagttgccacccgcggctacgcantcagagacactttcgctctatccccttcatccagcacaaatcaaggtgatgaagcaggagccaggaggaatcgattacctgtctttcgggatgctttgatgtctgcactctggtaagaactagtggataacctctagcgatgcatgcacggtattttcctgcgggtttttctggtggccaatcatctaatcagcactaccaccattgagttagaatctgactcagtaactgtcagtgatcttctaacggatgagtgactcggtagttcccttggattataatgtgttaaggtagctagtgtacatacgctactaatagtagactagtctatttttt

SEQ ID NO: 1513 - DNA, 236 bp, Aspergillus oryzae
cggcattatggggggggagagatcaagctgtgagtggaatttctcggcgagtgaascaagattagatatgactgcctgggacataatgttgcggaactttaaacttctaagcttttgacatacttctggcttttcttccctttcccggcattgtcttattacttgttacctgtggttctttggaagaccggcattctgatagatctatatcatgtagaccggataatgatgagcct

SEQ ID NO: 1514 - DNA, 498 bp, Aspergillus oryzae
ttatggcgggggacttgcggcggatcatctacatccgatggaacaaggmcatccaagtgcaaggcatcgaaaagccctactactcgccgcatgcagccactacggcatgtacatcggcatgggkggcgcgatcttctkgactctgaacaacggcttcacctgcttcttcccgtcggaataggtccgcgtmcacacttctctcaccgcctacattggtatctcccgccttcactctgtcttgtacagccgcgtacacacgcatctkgttgctggcagagatccatagggcatggcgaccgagtaagcaggtaggacttcgcgaaacaggcttgctaggtagcatttagtcggcggagaaatccgccccgacgcgaggagaaaagtagggagwagggaagcacgatcggccctctatccgagtggattgtcatctkcggtctcaaatcttkctaaatttkcgggtatttctaggttacgaaattggcatggccagtgtgc

SEQ ID NO: 1515 - DNA, 900 bp, Aspergillus oryzae
gcattatggcgggggaccgaggacttttaacgagattgaggggacaacacataagtaacctcgtgtgtctaaggccatcaaacaagcaacgcagaaagactgagggttcacaaatcggcgagactctgaactcccgacgatcacatatcattatggtagccatcaccgaccacaacgtcgtctacgcggacggcaaaaagatccactacctagcagcaggccctgcaaatggccctctggttctctttatccatggctggccaggcagcgcgatcacctggaagcgcaaatcgatgccttcgcatccgtggggttccgcgcgattgcccctgatatgcmaggctatgggcagtcgactgccgccgcgtggccgatgactactgtcaagaggccatcgtagagggcatgttagctttgctagccgacacaggccgcgatgcagcgatctgggtcggccacgactggggcgcaggcgttacatcctccgttgcgacgcaaaccccgaggtggttaaagcgttggtgaatatgtctgtgccgttccacactatcgagcgcggctggcagggcttccttccctatgtgaaccgcgagctctacccagcggacgaatacgagttcggccagtgggactatatgaagaactgggaggagaacttcgaaaaaaccgtcgaatggttcgacagtgacattgcaggaatgtgcaaagcttcattgcaaccatccacgcccccatctagccgttttgccccactgttcgccaccgtgcgcaagagcggatggatgggcggggcgccaaagcccccgagtgtggagatgacagggcctccggtgctccctgcggaggtcttcgactcttttgttcaggatatgcagagaaccggcttctgggccggatctg

SEQ ID NO: 1516 - DNA, 952 bp, Aspergillus oryzae
cggcattatgggggggggaatgaaccatttcaggatttgtcgggctaagaacaaaacactatatcttctggtgcttttctggttctatcaagttttgtttttgtctaatcttcatctgacccacctgtttcactcaaagatattagccgattgcctcatttcttttccaaacagcagtgcaggtttccgtatctttaccttaaccaacctgtttttatcccttgctcaacaacgactccacatacaagccactcatgagtgaagtcgaagcaagtgcgatacccgaggtctttgaatctcgcaagcgtaaaattcttgcaggactctccgtccccgatgcagagtacacagacctctcgcccaaagggtctgtcgatgagggtattcgggacctcatccatgaaattaatactcacccaggcttggttaccactagtagctgcgcggggcgtatcagtgtgttcctggagggacggaagaagcagccgaagccgcacgacgagcaaggaagacagtttgtagcctcggggggtaaaggtgctggaaaatggctgtatgtttctcacgatcctttgcaaggctatggtgcaccatgtggcagtaacagttctgaaagaggcgatcatcaagggaagtcgttgcatgagttgtttggaatggtccctggagatggcaaaccccccgggctgaacaaacaaggaaaagccccgcgtctcgtgcgcttccatttcgagcctctggtacgttagtccaatgctgcgttctttgtttcttcgaacaagttcgtctgtccccggcattgtttagtttacaacaaagcttgcgattctttgtatgcttgaacatatgtctcgctcttttattccccttaaggtcaaagcttagcctcgattgttgctggctatatactacccgtctgacgctgggatttgcaaatggactggtttaagca

SEQ ID NO: 1517 - DNA, 720 bp, Aspergillus oryzae
  modified_base (472)..(472): n is a, c, g, or t
gcgagaagcgctccgccttgaagctccaagatacccgcatcacaccgtcgaagatcgccgtgctggacaaccatgccgttctcgctttcgctggattgaacgccgatgctcgtatcctcatcgataaggctagactagaggcccagtcccaccgcttgaccgttgaagaccccgtcaccatcgaatacatcaccaaatatatcgccggtgtgcagcagcggtacacgcaaagtggaggtgttcggcccttcggtattagtaccttggttgtggggttcgatccgaatgataaggtgccgagattatatcagacggagccttcgggtatctattctgcttggaaggccaacgctatcggccgttctagcaagactgttcgggaattcctcgagcgcaaccacgaggatgatatggaccgtgagcagacgattcagcttaccatcaagtcgttgttggaggtcgtgcagaccgncgccaagaacatcgaggtggctattatgtcgcccgggcagacgatcgagatgctgccagaagatcagatcgaggcctacgttaagagtatagaaaccgagaagcaagaggaggctgcgaagaagaagacagcccggactagcaccacgacggcggccatcctaacacgaggtggtggcgagtccggcgacgcctaggagtaggctggtttagtgaattagagctacacgcctcttgttgacgtcctac

SEQ ID NO: 1518 - DNA, 661 bp, Aspergillus oryzae
gcattatgtcggggctggaacaaggcgtgggaggactcgccttcatgggcattgctgtgggtatgattgtcggaacaatctacacaattccagacaacagacgctacacgcgaacggtcaaaagacatggagggttcgcgcctccagagtcacgcctgccaccggtgatgctctctgcagtgtgtattcctgtcggtctcttttggttcgcatggaccaactccccgtccgttcattggatggccagtatagcagccggcgttcctttcggctgtgggatcgttcttctatacctaggcatcatgggctaccttatcgattcttatacaattttcgcggcgtctgtcttggcggctaatgcggttctgcgatctctgtttggagggattttcccgctcttcacggcgtacatgtatgaaggactggggattcattgggcctcctcaatccccgcctttcttacggtcgcatgtatgccttttccatttattttctaccgatacggggaagcgattcgcaagcgatgaaaawattctgcccagtcagaagtgtacgcgcgaaagttacaggtggcagcgcacagaagcgaaaagtagagtcggtaattggacatcatatagcgggggatttagaataataaccgagtatatggggctatcac

SEQ ID NO: 1519 - DNA, 629 bp, Aspergillus oryzae
  modified_base (252)..(252): n is a, c, g, or t
  modified_base (368)..(368): n is a, c, g, or t
acacttctcccttttcttgcctctatatccttacctagttgacaggtgatctcgaatcctcgattctatcctgtgtactagatccttcgttacacagatcattattaccatctatagaaaaactgagtctcctttgcaggtactcgattatcatgagccatggccgaaactgagactatctctacaaatccaaatcttcctcgtccaccttctatctcgtctgacaatacaatacactttgcatcttttchnhcgggccccggatctgaggatgacactcctcccttacacgcatcaaacgtcgccctgcggtggaacgggtcaaagactatgatctggagagtactggctaccttctggtgtgcctnagtcatggggtccaatgatgcggcatatggagcgataattccttacctcgaggtctcttacgataagagctatgctatcatttccctagtattcctgtcaccatttctgggctacactgtctccgccgttgtcagtaatctgatccaccagcgcttcggtcgtcgaggtgtggcgtttatcggcccagcatgtcacttgcttgcctttgccgtcatatcaagtaatcctccctttccggtgctggtgatcatgtatatctt

SEQ ID NO: 1520 - DNA, 611 bp, Aspergillus oryzae
ggcattatggcgggggctattgtcgctgtcggaaatgtctttgcttactatcaatctctttcggtagctgaatctataatggaagaatatactccggacgctatcgtcaaccgtgacgagcctgtccctgtaatctccgtggggaaacaaagggatgaagcaagagactctaaaccttctgctggacatcagcgatccacctcgggcgctggtcggtccttgcaagataagctattcgccaaactcttgcaacaagtgatcccggcagaagatgtcaacgatgactcagtggtcgtgggcgacaagcggcctatcgaccccaaaaggccggccttcagtctgcccctgatggctaataacttccgcagattcaatgcaagaattgggattgtattctcatttcaaacgcgcgtggagcgtttgctcacctggagaaagtcttcccatactttctcttttctcttcgtctactcttttgtctgcttagatcctcatcttcttgtaattatccccatcgcttctattttactgtttgtgatggtccccgccttccaggcacgccatcccccacctccgtcaacatcaacatccagtatcactccttacaattc

SEQ ID NO: 1521 - DNA, 380 bp, Aspergillus oryzae
gcattatggggggggcatggtagtaaccattgaaccgggcatctacttcaatagactcgccctattgaatgcgcagaaccagccattggcgaaatacattaacttcgatgaggctgagaagtacattcctattggcggcgtccgcattgaggacgacattttagttaccgctaaggggtacgagaacctgacgactgcaccaaagggtgaggaaatgttggagatcatccgtcgcgggatcgacaattcttaatctcattcgcatatactccaggtggagtcgtcactgtcattttgtggtttcaactcctgtactttcgggtcaatgatcttggataatttggagcagggcattctagactcgtaaaagacgaactatc

SEQ ID NO: 1522 - DNA, 669 bp, Aspergillus oryzae
gaatgggaggtaaaagctagactagaaatcgaccgccaagtgcagaacgaacttgagagacttcgcaagaggtttgagaccgaggttcaagatagggtggctattgaactagagaaacagaggaaaagtcaaaacgtcagagatgatgctgccctacgctcaagcgtttatggctcgcgatcgtctaccagtaatggagaagatacagactttccttccaccactgatatcagtcagttgtccatggagtcaccagtgaacaagccgttaagacgagagactcgcactcctttcaatcgctcaaaaacagtcgttgagtcgcccgtcgatgtgcagatggctgagccatctcccatctcaatcgcgtcactctccttgtccccgcgtcgtacctctgccacctcttctggtaagaacatcttcgcagaagcagagagacagcgggccaaatgggagcctactctagcgtactctgatgatgaagatgacacccctgatctgccttcacctaccaggcctaaagtcaaacccgatcctttcaaggctccgtctcggccccttcttcgccagaacacagcggcgctaatgcagaaactgagcacacaacctccactttttcccagtaatccttcaagattgccgcaagcatcaggatccggtcaaaacgag

SEQ ID NO: 1523 - DNA, 601 bp, Aspergillus oryzae
tcgtttcagcagaagcagcttgagaacgtcctcagaagatatattgtcgaatatgttacttgcaagamctgccgcagtcccgacaccgagctcaacaagggtgagaaccgtctgtacttcgttacctgcaactcctgcggatcccgtcgtwccgtcgccgctatcaagaccggtttccgtggccaagtcggacgcagaaagagacagggttaaatgtgatgtggcgtctttgggggagccatggtggcggtggttgtatttccttgcgactatcttttggcgatttatgattttcttcccccctttcgtataaagatttcttttttctctctcctatgtggatgatgatgacgacgttgagagtagtgctttatggaaaaggaactcaaaagtaactaagaagagacgaagtgaagacaattcggcatggcatgataagtatatggattggtatgactttttcatagtcttttctcttttatccysmcggctggacataaattatagtaggtgtttgcaattctgatgatgccgtggtgtgcgggtggtatgctcagcttcctagctgagcaaatacaatactacgatcgcctggcatttg

SEQ ID NO: 1524 - DNA, 171 bp, Aspergillus oryzae
acggaagcatggtatacgttctgggctgttgtgctcattggaggggtcggactgtttctctcatttgttcagactgttcttcaaatcatgcaggtgttgtatagcattccttagttctacaagcacctattagtttgacaagatactattgtaacacacagtgaaacatac

SEQ ID NO: 1525 - DNA, 778 bp, Aspergillus oryzae
aagacatacccatacattaagctggtacttgctactggaggtgtgccacgcactctccctgtggaaggcttcaatgacctaggcaacatcttcctcctgcgctttgtcaccgatgtacagtccatcctcaaggcagtaggcgagaagaacaaaaagatcgttgtcgtcggtagctcattcattggtatggaggtgggtaacgcactcgccaaagataacgatgtcaccattgtcggtcaagaaaaggcccctatggaacgcgtcttgggtagagagaggtcggccgaatcattcaaggaaatctggagaaggcgggtgtcaaattcaagctgcaggccggcgttgcgaaagctamaccttctagttcggactccagcaaggtcggcgcagtccatactcaacgacggcaccgtcctcggagccgacctcacmtcattctgggcgtcggtgtacgtccagctaccgacttccttaaraacaaccaggccattactctagagaatgacggttcaatcagaactgatgaacatttcgccgtccctggtctagacaaccatgtctttgccatcggtgacattgccacatacccttatcatgggccgggtacggatccaaagggcactctcaaaaaaaargracactggaacgttgcgcaaaacgccggccgcggcgtcgcccgcgccattgttcatagcctcgcaaactcagcctcatcgctacaatccctgaaaccgaagccttcatcccaattttctggtctgccgtgggggctcaattg

SEQ ID NO: 1526 - DNA, 1090 bp, Aspergillus oryzae
gggcagctatgcagagtatgccattgcctgggcgcacacgaccttccatctacccgaggaaaccagcttcgaagagggcgccacgattcctctcgctgcaatgacatctgcaatcggactttttcaggagttgaatttgcctcttccttggaatcctgcaaaggagtcgctacctctggttgtgtatggcggttcttcagctgtaggagctttcgcgataaaattggctcgtctctcaaacatccaccctatcatcgcagtggccggcaaaggcacctcgtacgtcgagactttgattgaccgctctaagggcgatacgatcattgactaccgtgaaggggatgaagcgattcgcaaaaacatcaaagctgctgccggtggcctgccaattcaccatgcatacgatgcggtctccgagaaggggaaaaaaagraacttaggcgcagtgcttactgcaccagcgaagatcaccgtcgtccttccaggaattgattctaaggaagttccagagggagtccagctgttaaggacaagtgttggatcagttcaccaatctgcagctgcaggacagacggtcggtaacatcgagtttggcgctgcattcttcgcctttttcggctggggattggcccagggttggttcacgggccatccccacgaggtgcgcawaaamggattggcaggacttgaagaagcattgcaagacttgcaggccggtaatgcttcagcaataaagtatgttgtgcgcatcgccgataccccaggactgtagggggtgcacgatttgacctcggcggaggcgttcgcagcatgagtattatctgcgttccggaacggttaaactgttaatactaacctatccaggttaaactgaaatacaaagaaagaataaatctattttaaaagggtgcagcatttggaatacctaggttagttaatattagtctacctaacttacagtttctcagctaaggcttgtgcccaatttcatattgtgtggcttttattaatataactgagagcatgtcacggtgtccgggcaggcacgcattccggttagcttgccgtagtcaattatatagtatgctgt

SEQ ID NO: 1527 - DNA, 730 bp, Aspergillus oryzae
gggggagacgactgatttatgccggaatttttggtggcctcggagtcgcggcaggaaaatggatggacaataaggtttctgcaccggtcgaacccgaaacgacagaggatgtcctaaaactggaggagattcgtcgagtatacgaaactgggctacctatcgtgcaggagctccgaaacaatccggactacttggaagcggacgtgtatgggaactattccgaggaggacaagaagcagaggtttacgtctggtccactgaaagggagtcggggattagcgctacagaaagtcttttggaacgacaaggagcggaaggccgttasmattgtctatctcgggaatggcctggaaggatggccgactgttgtccacggcggactcttgccactgtcattgatgagaatctaggccgtgtcgcaatccgccattttccagagcgtacaggggtcacagcaaaccttgagattaaatatcgcgctccggtatattcgggcaatttctataccttccactccagcatcgaccgagaacgtaccacggatcgcaaagcttacgtgacgggagaagtacgcgacccggttggaagactttgtattcaagcaactgccctcttcgttgttcctaaggagtataaacttgaggaaattggggaacggtactgagatgctggaatcatttaccgagggattagacgatatggtagggctttaaagcccagaggagccttt

SEQ ID NO: 1528 - DNA, 454 bp, Aspergillus oryzae
  modified_base (6)..(6): n is a, c, g, or t
  modified_base (75)..(75): n is a, c, g, or t
tggcgnccacgcttcgccacactctcggttccacctatacggtgagcgagastsgacagccggsccsaccgsggngacgacgacgcaatcgcactccaggctacgctagctgtcgcagtatcaactgcacatggcaacgtcatacacgagaagctgcgagacgggcagtggcgatcgcgcagaagaacatggttacctttgctgaagagagtttgaaattgttgagggatgtgcttgttgggaaggcaaatctatagacacttcctgtcgtttagtctttgaagacggatgggacaatattttcttttctttttttatcgcacggaactcgcgacccaagagtacgaattcaaacccgctttagggccttggatgctgatagcttgggtcttacctgtcgatagctactactctaatgtatgacatggattgactttcattctagcgtctttct

SEQ ID NO: 1529 - DNA, 1033 bp, Aspergillus oryzae
aactcctccgacgtcaccggtccattgtcctggtggcttacaacctatccttctgattcggtctttacggccgctctggaatttgtcctacttcgtctcaacaagctgactcatctctttgctttgctgcgactcggctggtcttcgtgtgwctcctttcccttttcgtaatactcaatagacttggcagttttccaccattcctgttctcactctcgtatacgcctttgaaccctatattcggcggtctctcgctttgctatacccaagatgtctgatgacgaagagtactatgatgaatacgacgaagatatcttctggattgaggaaccggaccccgagatcgctgatgacctcgccgcaaccgcagtctatagatgctctctatcttcgaggatccgtcactcgaggtagaagaatacttacagcgactgggacgaccaatccgacgattamtacgacgaagacccaaccgccgtacgccgccagcgagcaatgggcctctggcaacaaatacaatatcaaagaaatcaacgacatcctcaccgcgaagagaaactttcagccccagatggacccatacccaaagagaccctccccgagacaaaaaaaaaatcgtttcagggcacggtatggaaaacgccccacgacgacaatccaccccgcaaactgtacgaacccggtgatggagagaaggtagccctcctgaagaattggcgcgaggtattccggtcgtcgcatcctgcgattggacgggtaaggatgcggaaagttggctccgatatggcacctcctcgagtgccggtggtgactaagagggcggataccggttccgatgatacgtctactgcgtcgtcgttggacagccttcgcgagactgatgctggatctgatggtttctcgaaaactaccactccggctgagtcgtcgctctctccgccgttgacggtgcattcgcatagggtgatcaagtcagcttctgatttgccagttaattctaagatgctcgagcatgagtttcctattgaggcgc

SEQ ID NO: 1530 - DNA, 427 bp, Aspergillus oryzae
gatctggtgaatcgtggcacgttcggttatttcaatgttctcttcttgagtcaacaatgttatgtgggtaaatacatgagggttcaattgtgggaagcatagcatcagtggaagttcaattgtctggacatttgggtcgttgaatggcctgattcggctctttttttcttttcttattcatccggcgttgtgttttggcaggtaggggaacggcatcattgttcggcgcgatacggagagatgatttgcacaagagacgattatgaagctcctcgaattacacaagtagataccccgagtcgacgctcagtcccaacttcctccgacgctctccttcttgagttatttagcttcatatcatcatattttacacctaaacttatgtccttgctactttcaattaggtaattttatttttgtctctact

SEQ ID NO: 1531 - DNA, 895 bp, Aspergillus oryzae
tcggacattatggsgggggtctccttctcgacatttgtatctcttactattccaatacccagggattgctggaggaattgtcaacatgagtgcctttgcttcggagaacttgacctccgccctcctggtggttggcacagccattttcgctgtcttggtcggcgcgaagtttctcggtggtagtggtaaacccagaaaggtcctgaaccctaccgagttccagaactttgtcttgaaggagaagattgagatctctcacaacgtcgctatctatcgctttgccctgcctcgccccaccgacatcttgggtctgcccatcggtcaacacatctctctcgccgctaccattgaaggccagcccaaggaggttgtgcgctcttacacccccatctcctccgacaatgaggctggatactttgatctcctcgtcaaggcctaccctcagggtaacatttccaagtacctgaccaccctgaagatcggcgacaacatgaaggtgcgcggccccaagggtgccatggtgtacaccccgaacatgtgccgtcacattggtatgatcgccggagaaccggtatcacccccatgctgcagatcatcaaggccatcatccgcaaccgcccccgcaacggtggtaatgacaccacccaggtggacctgatctttgccaacgtcaaccccgaggatatcctgctgaaggaagaactggagcagctcgtcaaggaggatgacggcttccgtgtctactatgtacttaacaacccccctgagggctggaccggtggtgttggattcgttactcctgacatgatcaaggagcgcctccctgctccggcccaggacatcaagatcatgctgtgcggcccccctcccatgatcagcgccatgaagaaggcga

SEQ ID NO: 1532 - DNA, 213 bp, Aspergillus oryzae
cggchttatggcgggggaagtgatggaattaagtacagtgtcaagaaggctgacgatgttgtgtatgacctttctttgcggaacctgatcccgaaaggcagtcataacgcctagtttgtgaatgaacacaagaatacgtggatctatgcataatggcgattaatttataatctcatgacattagtctcatgatagtgggctggaagtgcccac

SEQ ID NO: 1533 - DNA, 959 bp, Aspergillus oryzae
  modified_base (133)..(133): n is a, c, g, or t
  modified_base (488)..(488): n is a, c, g, or t
  modified_base (490)..(490): n is a, c, g, or t
gcattatggggggaagtgatgaatcaagtacaagcgatagttgtctttcggtctacgcaggaaagcccagcttataattaaatcatattcgagcccagtatgtccggtcatcaccaccacgaccacggcagtnattgtcatggagatgatggacatgatcattcaaatgatatcaccccagcgctccaatccctcctctattcccaaattcagtttgattctatcgttacgctaaatgaaacaatccccaacgccggcgctgcgattgtccgaaaaacatgggctgaaagactgaatgaccagccggaacttgaaagcgatgcggacgaacaactgctgatgtatatcccctttactggtcaagtaaaggttcattctttactcatctacacggctccgacaccggccgccccgaagactttgaaattgttcaagaatcgtgacgatctagatttcgctactgcttcagagctgaagccgaaacagtngntggagattccgcagccggttccaggagccgatgtctacgatttgccattgaaccgtgctcagtggaatgctactacctccattaccttattctttgagggcaactggagcgatgggaatgaggatgtgaccaaggttggttatgttgggttcaaaggtcaatttatggccttgaacagggagcccatcagctttctctacgaagcagcagccaatcccagtgaccatgtcgcaattcaaggtgttactggcgtaggaggtaggattatgcccggtcagtgagtcatgtatacacattgtatacttcctagagaaccactgctacaagccagggaatttgtgccatacaggatgaccgactaatccaagagatatgcttccactgcaaattgccgtgaagggagcggtgcaatagagctttcggtatcagagtygggctggcaatgctgttccaattcaattttgattct

SEQ ID NO: 1534 - DNA, 942 bp, Aspergillus oryzae
  modified_base (456)..(456): n is a, c, g, or t
ggggggattataaaatgggaagtaagtcttcggactccatcgagctctcctcttctttaacagcttactcctgtcatcatcctatccaagatggcaaaatccagtcccgaacaccagtttgaagtccgggaaatccaaacaaaagaagaatacgcccggctggtcgacgtcctatggactgccaatttccagccctacaatcctatcttcacagccgtccatcccgtaacagggcacacagctgcggacagaaaagcagacaaagcacttgacactgaaatccgctgggccgctcacacgaagaatccagcgtcgcacttgatctacgttcttgatcgacacacaggccgggttgcaggtggatgcgaatggctcatcttccatgaaaatccttttccgcatggaccgcagaggatcccctgtacttggtacccggaaggctcggaaagagccganatacacgagtaccttcttgtctcaagtgtttttctatcgcatgtcctggctccaaagaccccatgccggcatcaatgccatgggcgtacatcccgattaccgtcggcgtggcgtaggccggctcctcatgcaatggggtcacgagcagatcgatgatttggggtacgagagcttcattgaagggagcccgatggggcggtggctgtacaaggaatttgagtatcgacgcgtggttagtttgcatgtggatctggagaaaagaaatccgagtgaggagtggtcgagattgttacatgagtgtcgtccaccggcgatattgttgctatggaggcccccgagaggaaactgggatgggaacgtgccggacggcccatgggcggttgaggacgggacatggaagtaggagtttcgttcgtgtggaagtgtcgcctctcttatcggtcctagataaaggtgaagcatcatcctctatatagctaccaattc

SEQ ID NO: 1535 - DNA, 981 bp, Aspergillus oryzae
ggggtatgatgcagacctggccgtccgtgtacccgaccagtcaacgataaggttccatccgacgcacccttcatcgtcggccagagagtgctggactctctgttccctagtgtgcagggtggtactgtttgtattcccggtgctttcggatgcggtaagactgtcatttctcagtctgtatccaagttctccaacagtgatatcatcgtctacgttggttgtggtgagcgtggtaacgagatggctgaagtgttgatggacttccccgagctttcgatcgaaatcgatggtcgcaaagagcctatcatgaagcgtacatgtcttatcgccaatacatccaacatgcctgtcgccgcgcgtgaggcctccatttacaccggtatcaccatcgccgagtacttccgtgaccagggtaagaacgtggctatgatggccgattccagttctcgttgggccgaggcgcttcgtgaactttccggtcgtctgggagagatgcctgcagaccagggtttccccgcctacctgggtgccaagctcgcttccttctacgaacgtgctggaaagagtgtggctctgggaagccctgagagaattggcagtgtcagtattgtcggtgccgtcagtccccctggtggtgatttctcagatcctgtcactactagtacccttggtatcgtccaggtgttctggggtctcgacaagaagctggcccagcgaaagcatttcccttccatcaacacttcgatgtcctacagcaagtacactaccgtcttggacaaattctacgagaagaactaccccgagttcccccgcctgcgtgaccagattcgtgagctgttgaccaagtccgaagaactggaccaggtcgtgcagctggtcggtaaggccgccctgggtgattctgataagatcgcattggatgtggctgccatggtgaaggatgatttccttcagcaaaacggatacagtgactacgatcag

SEQ ID NO: 1536 - DNA, 812 bp, Aspergillus oryzae
  modified_base (201)..(202): n is a, c, g, or t
cgggggacaccaatcctctcaccaccaagtcaacatccgtcgctcttgctcgtctcggtctgcgccaaatcccccgtcccgtacgagttaagcgtaccattctctctcctcgcaggcaacacccattcccgccccggtggagcagaacaccagagatacctcgaaccgcgaacagatacaattcacagaaccgaattttdnntacacgcttccacaatatcgggactaccaacccaatcaccgattaacctcacacaagaaaagaaagaaagaacaagaagacaccggctggtccctgtgtccgagtgcattgaccgtctactttatactctacaaayaattcacggaaccattagctgttcgaaatagaataaccaagatacaaaatggcgaacgggtggagtctaatcattggcctgatcgtcatcgctgtcgcgtccgtcgtcgcctgggtattcagtcctaagggcgagaaccagacgctttggcggagtacgctgattcttgcgtttgtgtcttgttatttgatgtgggcgattacgtttatggcgcagtggcatccgcttatctcgccgaagagggcagatattagacctgatcgggtacgcagtgatttcttttttcggttcttggttggggagctagagtatgttaggtctggtttggaaggtggttaatttgaggtggagtatgagtttttgtatagttatcttgtgtatgcttggtactacgtttctttttgttatgttgctgcattgatgttttctcagcggtgattcatagattctcatgaacaggatgagtcccccttt

SEQ ID NO: 1537 - DNA, 622 bp, Aspergillus oryzae
tgactgatgaggcggctcatgcgagttcgctgagctggctcagtatggagatcccgagggcgctctcgctcttttcggtggatggtcaggttatgacttgtcgaaatatgaggacaaccaggatttccgsttcgtggagcagcctgccatccgtagtatggtaaatcattgggctagtacagtaccagggactgagggcaagaaatgggacaagaaaactatctccgaatatctgattatgggaggaaatggggcgaaggttattggaagcgcgaagacagtcgcggatgaattggagcggtgggttgaagttggcgatgtggatgggttcaatctgagctatgcctcaatccctgagacctttgatgatattataaagtatttgatcccagagttgcaaaagcgagggatcttccacacggattatgccgtcaagggaggcacattccgcgagaacatgtatggggagaagggacaggcacgactgcctcaatctcacccaggggctaagtatgtctggcatgcaggagaggagaccccaaagtacgcgttagaaaagaacacatgaattggtgaaaatgcattatgcagtttaartagaaaagcacaatatcaagaaatt

SEQ ID NO: 1538 - DNA, 682 bp, Aspergillus oryzae
cacaacctagcagagccactgatcgtataccgtcatacctaatattcatgaatggtgaccttcgtgtcatataggccattaaggaatctcgatttgtttcggtgagcgtgttgacacctggaacatagacgatcatttttacaatgacgcgctctcacaaagtaaacgatcgtgaccactccgtacttcatgatggaatagctgtatcccaagagaatcttcctcgctactttgcaaaatctggccccgttgatgctgatccccggaagacaaaaaaagatggcgggggaaagggaaactggggccaaccgggcgacgaagttatgactataattgcaaactcacaaacgctcggcgctattccaatagtagcactcaaggattagcggattataaaaccaagtttgagacgattgagccagagcctgtgttcgaggaaagcttccatggtgtgcaaaatgaagaaagacctgtggatggaaacaaagtgctcaacgttgacggagccactagcctcggtaagacactggtatagcagggtcatggactgtgtcccatatgagcgctgggactgctgtaactattttcatcgaagcctgatagtgcgtgggagatttcaaactcgttgtcaacgagagcagataatgtattcagattgtcttatcttagtatgtcatggatg

SEQ ID NO: 1539 - DNA, 493 bp, Aspergillus oryzae
  modified_base (449)..(449): n is a, c, g, or t
ggcattatggcggggtgagcggctcactcgcaacggaagggagccgatccgacttgctctgaattgcgtgggcggtaggaacgccaccgcattggcgaagaccctcgctccaggctcccacctggtcacctacggtgcgatgtcaaagcagccggtttccttaccttctgggctattgatctttaagaatctcgtcttcgatggattctgggtgagcaaatggggggataagcatccccaactgaaagaggacaccatcaacgacgtgctaaagctgactcgagcgggcaaattcaaagacatccccgtggaggaaataaaatgggcatgggacacagacggtgcggcgctcacctctggtgtgcaggaaactttgagtggctatcgcagtggaaagggcctgctcaagtacgaaggcggagactgaaactttgcggtggtcgtgtgtnaaatgatgcttatgtctacttacaattgcgcagaacgattgagc

SEQ ID NO: 1540 - DNA, 869 bp, Aspergillus oryzae
ggcattatggcgggggatcgcatcccatcgcgaactcaccatcggtccataaattgtatatactgacgacgaaattatgtgctgacaactccagttcacttattcacctcaaaggacgcctttactccgtgttacaccctctactttccatatccgacacctccgaccatcatggcgattccaaccgccggtgtcatcgtcatcgtcattgtcgcctgtctggccgtcacgtcgctgggcgctgccatgtggaaacaagtctatcccaccgaccattcggcgcatcgatacaattattctcgtgaacaggagctatatatgcggtcggtgcgattgaaaaatgtggggggtcttcgacaagagtcgcgcacgaaggaacccacgccgagggatctcgaatcggctgtttataccgaagatggctcctcgcggttttgagtcgctttgacagtcgccctgtgtccactgtcatggtggaatgtattatgtgaatatgattatcgcttctgttgcggcgttggctggcgttgatttggatatatcctgggcttgaagatctgcaaaactcctttctttctttgtttttttctcgttgtacacttatggagctctttatcgggagggcactatttgctctgatatagagcaccttgccatgatgcaacatgtatttggctgtcccatcgatctcgacatgataaaactagttgggaatcacagatattaccagaatatttgtcttgggaaatgaatagacctgggcgaaacagcttttgcatgccatctgatcgccctggtagatatatccggaaacgataaactttatgtgccagattttgtcagccaagtttcaacgcgatggatatgtt

SEQ ID NO: 1541 - DNA, 383 bp, Aspergillus oryzae
  modified_base (12)..(12): n is a, c, g, or t
  modified_base (162)..(162): n is a, c, g, or t
attatggcgggnagacgagcgtcaagtatgggttctttaatatcttggccgatgaggatgtgaggcagggattgaaggagtttgcggattggccgacgttcccgcagttgtgggttggtggggagttggttggggggttggatattgtcaaggacgagattnaaaatgatccggatttcttgcgtgacactctgtcaacaaggctcccgttgcggcttgaatttatagaatacgggaaatagttttctttatgtcttgttttctatctgcctgcaaacacgatttgttagattataggacagcgatgccatcacgttttctatgttcagtgttccagcaccatgtctccctgcatgtctaattccttcgattcaacagcttaa

SEQ ID NO: 1542 - DNA, 374 bp, Aspergillus oryzae
  modified_base (240)..(240): n is a, c, g, or t
gcattatggcggggggaacttacggccgcatcgcaccccgcagcggcctcgcagcgaaacacttcatcgataccggagccggagtcattgatgccgattaccgtggtgaggtgaaggttctcctgttcaaccactccgaggtcgattttcccgtgaaggctggggatagggttgctcagcttattattgagaggatttatacccccgaggttatggttgtggaggagttggaggagagtnttcgttgtgcgggaggttttggaagcactggtactaactaatgatgatatgattgggtttgtatggggtgggtttttatcatatacatggcgttggatatatagaaaagaacttgcatttttcttttattaccg

SEQ ID NO: 1543 - DNA, 527 bp, Aspergillus oryzae
gaagcacactacatcaatatttggtggaaggctcattccagcccagacaaattcctttccgactatacataccagctttaagtctttcaattaccgttacatgacatacaatggcccttcaccctgtcgcgtcgctttatcgacgctccttaaaacttgctcttgactgggctgtgcacaggcagatttggcgcgggcaagcagtgtatatacgatcccttttcgatgcgaataagaatgtccgcgatccgcgtcaacagaaggtgctgcttcgggaaaccgaaaaactattagaaacttggaagcatccggacccctaccgagcacccactgccccaggaggtaacaaatatgagaggaatctacctgctcgccaattgccttatgcttcgggctcccactaaagggaggattcaagaatattgtgacaagtttacttggatttcagataggaaatggacattgcataacaacactacccatatagctatcagcgctcaaattcgagaaaagtatcgggtctgcat

SEQ ID NO: 1544 - DNA, 615 bp, Aspergillus oryzae
  modified_base (490)..(490): n is a, c, g, or t
ggccattatggggggggtatctatgtgggaatatctttgccgcagccgggatctatcctgcagtggctattgtgctctcttggccggctaacaacgtgtccgggcagacaaagcgcgcgattgccaacgccatgcagatttcaattgggaaccttggggctgttctaggcacacagctctatagaaccgagacgagccctcgttattatctaggccatggtttcgcattgggatacctcattgcgaacattatcgttgcaggcattctatggcaagttctcaggcgcgagaatatccggaaagcggaagtccgggaaagagagggtttacaagcgttaatgggtgatattggaaattccgaagtgaattccaaggagataaagaccctcggtggattttccagacatgaggcagcgtaatggtccctgattgattgctttgcttagtatcgcatcactcaagacttggtaaatgaagaatctcgagagtnatatgaatttttgcgacggtttatcttagcgttgatgcacgtggctgatccgcggcaattgagcggaacggtcgccctccttcaatcctttagtctcctagaccaacacatcggctatactccgt

SEQ ID NO: 1545 - DNA, 801 bp, Aspergillus oryzae
  modified_base (561)..(561): n is a, c, g, or t
attatggcgggggtagacccgccatacgtaaaccatgtctcaatcccactcgggtatcctccatgaatatgccccgagattaacggccttcgaatttaaccctggccccaaaaagcaacacagcctcctctttgtcggcggcctcaccgacggcctcttaaccgtcccctacgtctccgcactcgcaaaagccttcgaatccaccgaatggaccgtcttcaatgtacttctctcctcctcttacctcggctggggcgttgaaagtctcgataaagacgtcaccgagctcgtgcagtgtgtgaacttcgtccggggcctgaaaccccagggcaaggtcgttctcatgggccattcaaccggtggccaggacgtcctgcattatctgcactcgccgaatccgcttcccggacaggagaattctcggccggtgttggatggggctatcatgcaggctcccgtgtcggatcgggagcatatcttgcatttggcgcactcgaatcaggaggttcgcggggcgtatgagcagttggtgaatttcgcgagaatgcaagcgccacagtngctgctgccgctgaatcttaccgcggtggtcggatggccggataatacagggattagctgtcggagatttttgagtctcgcgagcccagagagtccagagaagcctgcggaggatgatttgtttagctccgatctgaaggaccagaggttgaaggagacgtttggagctattgcgaacgggggcttggtgaaggggaggttggcggcgttatattctgggaatgatgagtatgccctgcc

SEQ ID NO: 1546 - DNA, 990 bp, Aspergillus oryzae
  modified_base (245)..(245): n is a, c, g, or t
  modified_base (265)..(265): n is a, c, g, or t
attatggggggggggacttgagggggatttttttctcttcctgttcgtttgttttcttctccttttcttcctattctgttgtggctttacattccttatcggcaccccaaatcctcatcgcaatcaaccagccgaggcaaagggaacaacgaaaaatggtggattgctccccatcgaactggaggaacggttataatcttgctcttttggtgtcatttctccaggtgctctgtgtggaggctgtncccagcttccgacgagcgtncctctcccctcgctagctaagatgtttcctcgtcgattccgtcgcatcgctgtcatcacctctgtcctctgtctcttcctcctctaccacttctccggtctccgatcgagcttccacgctaccaccagtcacggccgccgtcggttcgaatgcccacccctcccgggcatggaagacgttctggttgtgttgaaaacaggtgtcaccgaggcattggacaaggtcccggtgcacttccagaccaccctgcgctgtgtcccgaattatgtgatattttccgacttcgaggaggagatcaacgagaattaaggtacacgatgccttccggaacatggatcccgacgtgaaagggaccgtccccgacttcagcatctataaccgcctcgtacaactgggtcgagcgggcctggaaactggtgatttcgccgacgaggccaactctgccatcggcaagccaaacaaccccggttggaaactagataaatggaagttcctgccgatggtccaggaaacgctccgctacaagggtgacgcaaaatggtacgtcttcatggaagcggacacgtattactcatgggggacgttgctcgagtggctctcgcactttgatgcgtccaagccgtggtacctcggcaccgagactcagatcgccgatgtcattttcgcccacgggggctcgggcttcgccatctcgaatccggccatgcagcgagttgcgaaggagt

SEQ ID NO: 1547 - DNA, 238 bp, Aspergillus oryzae
  modified_base (120)..(120): n is a, c, g, or t
gggatgcataagattgtaattaacaagggtgtagacaaatatccctcctataggaataggtgacatggcgagtgtgggctcagcaacatgtacccatggaagtgattgctacgtagtggnttggaccgataggtaaattccactccactgttggcgctaatgcaggatgcatccactggtttagtgctgacattttcaagttatgttataggaatgtttattaaacgcctccttcttc

SEQ ID NO: 1548 - DNA, 987 bp, Aspergillus oryzae
ggcattatgggggatcgatccggaaacctggaagactggacgtggtcgaccaattatcccaactatgaggatctgcgcaagtacttcgatcatgtggacaaggtcctcgatatcaaaaaggactgtgcattcaacagcgtggtcgtcggcgcgcacttccatacagtggaaggccgctggcacattcggactgcggatggaaggactgcacgcgcgaaatatttcatcatcgctgccggttttgcggcgaacgctacatccccgagtggccgggcatcgagaagttcaagggaattgtccaccactcgtccttttggccagatgagaaaatcgacgttcgtggcaagcgctgcgcgatcattggcactggcgcccctggtgtgcaagtgacccaggcctggggaccggaggctggggagctcaaggttttccagcgcacgccaaacctggcagtgcccatgcgcaagcgatctctcacggtggaagaacaagagggcgccaaggcgttctatcccgaacttttcaggtatcgcgagaaatgctttgcggggttcctgtacacctggtgtgagcgtggtgtatttgaagatagcgaagaggagcgagaacaatttttggaaaagctgtggagtgacggtggatttcggtattgggtggcgaattataaggactatctatatgacgccaaggcgaatcgcgtcgtctatgatttctggaggaagaaggtgcgtgacscattaaatgaccccaaggaccaagagctcctggcaccttcggagccaccacatccttggggagtgaagcgcccttgcttggaatatgactactatgagcagtttaaccggcccaatgtggatttggttgatatcaaagacaatagcattgtggacttcacggaaaagggcatcaagctgcaagatggaacagaatatgaattcgacgttgtgtgtatcgccactggatttgatatcacgaccgggggcatga

SEQ ID NO: 1549 - DNA, 667 bp, Aspergillus oryzae
ggtaaaattgaaaccaaacttaggagacagtagccagttgcacagtctaactacttcgagatgtcatactatgatattgactcaatcttaacagatgcccagaaattgccttgcacatttgagctcgaggtgccagggcttggcattttagagggcaatccgggcgacaatatcaaagctggtactcgcatcgacctaccactatggctaggtgaaatgctctctatcggagctcggttgggcacttctcgtttagtcacactagatatcccctcagcattatcagaacgggttatgaatgccttaaaagcagaccctcggaccgtcgatctgcgggcattagcgccgcatttctatagtctgagcgagcgagttttggaacttttcgaggaagaggagatggttgatgttcttattaatacatttaagaagcgcgctccagaaattgctgaccatgcccacaacccaaaaggtgctcttggcgacggcgttgagtttctgagagggttagatgaaacggaaaggcagttgttccgcgtggcccatgatagtgccaaggagacacggatatgggctggcgaggctaagaagaggtaataaggattaacatccaaatttaacagactgagctgtgctcgtcatatgagctatgtctattgttttgcca

SEQ ID NO: 1550 - DNA, 567 bp, Aspergillus oryzae
  modified_base (51)..(51): n is a, c, g, or t
aagcttactgctgtacttcgcccaadatgtcgactattcttcggacgctanggaacctgagggggattggtatcaaggactatggtcaccagatgcagtacatcggtgataccaaagccggtaccttgattggcgtcgaccgctacggcaacaagttttttgagaacattgaggaggagctccctctccggacacgatgggtcgactacaaggagaaggaatatgacccttcacagattgagcccggctggcacgcctggatctcctacatggtcgaccagcctcctaccgcggacaagatcatgcagactggtgtgcgcacttgggagttgtctgagcatcggcctatgctcacgctctcccgtgctgctttcaagacctacaataccgtcaagccgaagtactccgcttgggaccctgtggcggctccccgtaattagatgaggagcagccttccttgagctttaacttggttctgattgaccccaactgtaagaccattgttgggtgatgtgtaaataaagttgtcctattggtcgtttgattccatcaaagttgttccgtctg

SEQ ID NO: 1551 - DNA, 806 bp, Aspergillus oryzae
gggtaatggcgtgggcaccaggatggactgaccagtcgaccacagaccagaacatttacctacttaaaaagtgtgtcaatcattctagcagaccaaaatcattccaaccatcacaaaaccatccttcctgagacaacaccactagttcagccatggcttccaatgctcaatccttccgccaaaccattggcattcctcgttcgacagcctctgtcaaagactccactctgattatcatcgatgcgcaaaatgaatacgcctcgggccagctgaaggtcgaaggcgtggcggagagccgcaaagtcatcgccgacctactgtctcggtatcgcaacggtggcgacggctccaatatcgttcacgtggtccacgaaggccggccggtgctcctgtgttcactccgggcactgcgttasgaaagagttcgaggagctgacaccaaggcccggtgagaagatcgtaactaagaacttcccgagctctttcgctaagactgacctccacgattacttgatcggcttgggagacctgggcaagaagattgtcctagtcggatatatggcacatgtgtgtatttccactactgccagagctggcagtgaattgggctacgatgtggttattgtgaaggatgcggtgggcgatcgtcatatccctggtgttgaggccgagcaattggtggcggtagctctcaacgagttggccgatgcttttggaactgttgtttctgcggaggagattagctcttaggctattcttctcatatggattttgtatctagttgaaatgcaagatgtctcgattgt

SEQ ID NO: 1552 - DNA, 1055 bp, Aspergillus oryzae
  modified_base (290)..(290): n is a, c, g, or t
cattatggcgggggaagtacgtggaagctgcatacctagtgcaggggcctaagacgatatatacaataaaaatgttatctatcaccgagctgataatggacctggggttggcaatcgtcatcctgggggtctctcaccttctttggaactacctttcctcccctttgaaggcctttccagggccactctgggctagcttcaccaatctgtggcgtcttcaagatgtattcaaggggcgatgtgatataacacacaatcagctgcaccgcaagtatggaaccgcggtgcgnatgggtcccaaagttctcagtctttcagatccaagcgtcatccctcatgtcttcaattcgaagaacccatggatgaagagtgatatgtataatgtgaacgacgtgattgtctccggagtgcgcctcaagaacctcttctcgcatcaagatgaaaaatggcactcgacctacattcgaccggtgaaggggctctattccatgaccaaggttcaggacatggagcctggcgtggatgtaaccattaacctgttcatggataaactgcgggaacgatttgtcgaaaagggccagcyttgcgacatggcggactaccttaatttttttgcatgggatgttatgagtcaaatcactttctctcaaaacctgggcatcctagaagccgggtcggactaccaaggcttcctgggccgatcgaacaagagtctcgactactttgcctcgatctcccaaatgccgatcttagatttgcttctggacaagaaccccatcgttcgtctgggtccgcccacctttgtgtgggccaatatcttcagtcttgagcagctgcaaaaacgcctgagtggtgggactccaccgagtggccacacagacttcctcgataagttcctggagaccaagaagaagtatccagaccttgtcaacgataacaccgtcgtcacctatcttctgtccaccaccttggccggtagcgataccaccggcagcgcgatgtgctccgcggtgtatcacatcctgaagcatccccgtgtccatcgaaagttacgt

SEQ ID NO: 1553 - DNA, 764 bp, Aspergillus oryzae
tcctcgcaatcatggccaaaacagtcgtcgcaaccggcacctcatcgggcttgggctttgaagcaatcaaacagctgctccagcagtctgagccgtacaatttcatcttaggagtacgggacacagtcaagactcagggcaactatgatcgcatcgactttgacaggagcgagcacacgattactattttcccgctggacctcttgtccctgccgagtgtgcagtcatttgcacaaaaggccctctctcagctgggtgaccagaagctcgattatctgttcctttgcgctggcatgctagacagcgccgatggccctggacccaatggatcgccatggtgttcggggtatgtcgttaatcatctggcccagcattatttgctcmayttgctgcgggacaccctttctcggtcacaatcagcgagtagtcgttgtttcctcgggtgccatccgcaatgtaagaggccaggatccagcaaccctcgacgtagacctcaaggcaaattccaaggccggggtcaggcctgtgtacagtgcctcaaagttcgtacaactactcggcgcattttactggcgccgtgaacttccctcatgcacggaaawtgccgtctcgccaggcctgatccctagcacgaatttggccactgatctaggcttgtccatggatatgccggatgcgaaaaccattcccgagggggcgcaaaaccttcttcgggcatttactgtgaccgatctaccatctgatccagagcaactctttttgac

SEQ ID NO: 1554 - DNA, 765 bp, Aspergillus oryzae
  modified_base (2)..(2): n is a, c, g, or t
  modified_base (557)..(557): n is a, c, g, or t
  modified_base (716)..(716): n is a, c, g, or t
gnggagamtagtcagtatcatatgttctggcatgccgataactctacgtatggattgctactccagggatttgcgacgtcagatacccccgccggtccctatacctttgtcaatgcgacastcccatgggcaattggtcgcaggattatggcctcttcacggattataaggatgggcgatcatatgcgctttactcgaacggcgatasgtggagggtcgcgatgtctatattacccggtacaataaggaagtctcagagctggaagaggtggtctatcgatttaataagttcgatctcgaggcacctaccattgtccagacggacaacagctactacgcgttgatgagccataagactggatacagacctaacaatgtcgttgcgttccgggctgattcgctggagggcccttggtcccagccgttcatggtcgcgcccctgaacacgcgcacattcaactctcagtctggatacactttgaagattgagggctccaagaagactacatacctttacattggtgaccagtgggactcaaactcgctctgggagagtngttacatctggttacccattgagattgacgataagaagaaaaacgctagagctggcttggcacgatgtctatgacctcaatgtcaaaaccggcgagtggaaaccaatcgaaggaaaagacctactatggaaaagatgcaaagacttccggagatgcgtncaagcaagaggccaacttcgcgagccacaacaccattctaaccggcatc

SEQ ID NO: 1555 - DNA, 377 bp, Aspergillus oryzae
  modified_base (13)..(13): n is a, c, g, or t
  modified_base (19)..(19): n is a, c, g, or t
  modified_base (69)..(69): n is a, c, g, or t
  modified_base (94)..(94): n is a, c, g, or t
aaaggacaaaaantgaatncgatggagaaggtcttatcctcctwhctcggtggtggtctctctgcttdnaaccagcctattgaagtcattcghntggagatgcagagtaagaaggactccccaaccggcctaagaacttgamdttggcaaaacawtcaagtacatcwacgagaccaacggtcttaagggtctwtaccgtggagttactccccgtatadgcctaggaatctggcagacagtctdcatggtggctcttggtgacatggccaaggaagcagtcgaaaaactgacaggcgatcaagtcaccgctaagcactagtgaaggtttgagatacccttctactatgcacggctcgggagtcactgggcaattgagt

SEQ ID NO: 1556 - DNA, 370 bp, Aspergillus oryzae
  modified_base (242)..(242): n is a, c, g, or t
tggggatattgtgtttatgaagagtgtggtgttttcgtttcataatttacagcaggtgtcgaaggatattcttcttgagaagttctgtttgattagggaccggtttccagggattgaggctgcttgtcacattgactttttagttggcttgactgtagatatcaattaatagatggttctttgagcttgaccggggataactgacgtggagtaactgctgcattgcacgaaggcggaagcangtatgtatacaaagatcctcatgggaattatggtatgcattctgagtagacaggcatccaacttacaactggcatagttcaacaaaaccaccgagtgctcgaggcgaggttgcactatttaaaccgtt

SEQ ID NO: 1557 - DNA, 480 bp, Aspergillus oryzae
  modified_base (243)..(243): n is a, c, g, or t
  modified_base (249)..(249): n is a, c, g, or t
tgaaagatctactgctcgggaaagtgggtgtgagtccagcacgggaaagatggtmgaaggaccatccaggagcgaacgaaacaaatcctccgcaacctgagtgccgttctcgtcgcgggcggctcgagtctccaggacgtggtgaaggtgaatatattcctggcggacatgggggattttgccgcggtgaacgaggtctacgagagctttttccaggatcccaagccggcccggacgtgtgtngctgtnaagacgttgccactgggaacggatgttgagattgagtgtacgggcctggtgacgaagagacgaactcaggggaactctcgtctgtaagtgaatcgcattgtgggatacgaactctggagcttagagttcatctgatgagggtctgtggcggtcgatcaagttcttggtcgcgtctgggtgaactctccgtaccctagagacagtgatacaatgatacatagggcgaaacct

SEQ ID NO: 1558 - DNA, 1092 bp, Aspergillus oryzae
  modified_base (421)..(421): n is a, c, g, or t
ggcattatgggggggaatgcagcctcctaaaactttcgtcttggtcctcgacttctctaatgaaacaacagtcttaagaacattgtattcttatttttcattcttcgctacgttcgcaagacgttctattctttacgtggttatggtgtcctcggcagcctccggaatgtctacgccgcgatccgtctcttctgctactctgtcttcttgcgcttccccggtgttcgcggtcaggtcgacaagcaagtttcgtcagcaatcgaaaacctggagacaaagcttgttgcaactggccctggcgtcacgagatatttaaatctgcctaaagaaggatggacccccgaacagatccgcgccgagctcgagaagctggcaaatatggaacacacccggtgggaagatggtcgcgtcaggagcgtgntaccacggtggacaagatcttctgaagcttcaggctgaagcatttgggcagtttggggtcgccaatcccatccacccagatgttttccctggtgtccggaagatggaagctgaaattgtggctatggtactcgcactgttcaatgctccgtctgatggtgctggtgttactacggccggtggtactgaatctatcctgatggcctgtctggcagcgcggcaaaaggcgtacgctgaacgcagagtaacagagccggaaatgatcattcctgataccgctcatgctgctttctacaaggcttccgaatacttcggaatcaaactgcatcgcgtaccctgcccagctccagagtacaaagtcgatattccttcggtgcgtcgcttaatcaacccgaacactgttctcctcgttggttccgcgccaaactttcctcatggaattgttgatgatattcctgccttgtcccgacttgccacagcatacaagatccctctgcatgttgattgctgcttgggctcctttgtggttgcgttccttaagaaggccggtttcccatctccttatgaagaggagggtggatttgacttccgcctccctggtgtgaccagcatcagtgtagacacgcacaaatacggattcgcgccgaaggsaactccgtgttgctataccga

SEQ ID NO: 1559 - DNA, 606 bp, Aspergillus oryzae
cggcattatggsgggggactcaatccaaggatttgtttcttcgtggtttctagcaatctacctacaaaatgtcaggtaataccaaggcttactttgacgtggaatatgacggcaagactggccgtatcaacttcaatctctttgagaaggacgtccccaggactgccaaaaacttccgagagctctgtaccggagtccacggttttggctatgcaggctctggattccaccgtgtgatccctcaattcatgctccagggtggtgactttaccaaccataatggcactggtggcaagtccatctatggtacaaaatttgaggatgagaacttcaagtataagcataacaagcctggtctcctctctatggccaacgctggccccaacaccaatggctctcagttcttcatcaccactgttgtaacctcgtggcttgatggcaagcacgtcgtctttggtgaggttgccgacgatgagtcaatgcgggttgttaaggagattggggcccttggctctagctctggtaaacccagcaagccgatcaaaattgtcaaagctggtgagctgtaaatgcaagtttatactctcctcaatcagggcggtatat

SEQ ID NO: 1560 - DNA, 621 bp, Aspergillus oryzae
cggcattatggggggaggtcttagggaactggcagtagctcagcttgacggcagtggaagacccagtggctctggcaagaaacattataagtatttacaatatgaatgctctgtactaccaacgaatccgcccagtcaatcgtgatgcatgtggtttgttgcttcaaatgatggaagccaaagctgaggttgaagcaggaaaatggactccagctctggatgccatcaatgccttgaatatccttcctcttcgggctagaggctcggtgccctatatccgaagcgcastcaagcattctcatcatttcccacaatgatctctcgcaacattgggcatgtggtaatgtggagcatcacatgtattggccatgaaagagaacgactgcgctctggaacatacgaaaatgaaatcagacaaagcctagctgatgagttactggtaatggccaaagatcttatgatcttttctggcatggtgaagtataaattgccacccagagtctacgagacgcttgcccgtgctggcgcagaaatcggggcatattaaatgttttccactaggtagttgttatgcagagtatgcttggtgttacctaacttactactatcgttcctcgtacc

SEQ ID NO: 1561 - DNA, 505 bp, Aspergillus oryzae
agctaaggcgaaatcagtccgtgcctaagattattttacctacgttcagatactttccsgcacaacaagacacaacattttctcgaagatccaccaggctagcggaatcaactatgaagatactcgctctttttcgatgatgagcgctgcgcaatcggaacgttgagaccgagcttggggttaccttctgtctcgtgtcgggacggtatagacacaaagaagaggttgatcggggtgatctagggcatggcgtaaaagtgaatgtgagataaagcctactgcgccaaaggaacataatggtgatcwggcraattgaatggatttttcgcaagggtcgcgcataaaatctagtggatgacatatacccacagaatagagtcagtatgggaattggacatacggtcttttcatrgactaaaacttttttgataraaagaataccccagwctggggsatgcatgcagcatagatcgcgtwattataatargatgatgagaatatctag

SEQ ID NO: 1562 - DNA, 458 bp, Aspergillus oryzae
gcatatggtgagatgcggtatatctgccccggtattgacctgtcgtctatctacgccagggccgggatcaacagttggaactatcactacgccgtacaagacccagacttgaaagaatctggcctcggtgtagatcatacagtggaaatcaacgctatttggggcccaaattatgtcacaggagaaccgccctcatcttacttcactaccaatgcgccaattatacccgttatgcaaggttactggacaagcttcatcaagacatttgatccaaatcctcatcgttaccctgggagtccacaatggtctacttggggtaatgaagggtatcagcgcatcttcatcagaacaaacgaaaccaggatggaggaagtaccggtggatcagagggaacgatgtgaatatttgatcagcatcggaccagagcttcagcagtaataccaactgtacctatcttg

SEQ ID NO: 1563 - DNA, 208 bp, Aspergillus oryzae
gaggatgttttgactacgtactatgagagtgttctgtgaatgattatggatttctctttttttttctttccttttttttattcgcttttctttgactcgaggttggatggggctagattgtaagcccataaccttgaataacatgtatccatgatatagactgcatacattgggatctcttattctggtaatcaagaaaatatccgcc

SEQ ID NO: 1564 - DNA, 777 bp, Aspergillus oryzae
  modified_base (401)..(401): n is a, c, g, or t
  modified_base (530)..(530): n is a, c, g, or t
cattatggcggggggactaaagcctctcacgcctgctcctcttgtttgtattgtgtttattcacacatcgcttttgtaatatcatcaaagctgaacctagtcgaatcactgaaacactgtatcagtcggttgttcatcgcatcacttgtcttcgagatgaagcctgtcgtgtcggtgttgaatgcgtggtcctgcgcgatcatatcccttttcgctattgtcatcctctcggtcctcggatcgttatacaagaaggagcaccacggcttcaccggctcagagggtgagcctgaggatggcgctgcggtcgcggcttcgatcttcacagccgtgtttgtatatgccgcctttttcgttttctgttctttccaggcctatcttcacgtacgaaaccgcagggnaggcgccatatcgcttaactaattcgccactattgttatacccttcttttcgatgatgaaattcgcaaaatttgattctttggccataccgagatataactatgttgcccgattgataccacggaggtnctggagtgagacgtgatagcccgtacatgcagtatagcgtatgctgcagcatctgccgaacggatgatgacctgatgtcccctgcttctaggtacctgtgtacattatgtatcatgggctcactgaccgtcttgcttcctattgttttaggcttagcttttgatttgctgttctaagtgctttattactggtgtctccttgtgttgtacataaagtgttggttgatatagaattggctttcctcact

SEQ ID NO: 1565 - DNA, 978 bp, Aspergillus oryzae
cattatggcggggatcctcttcaactgaggttctctcaacaattaccttctcagaccattctcgcaatgtctgcrcatcttctgaggcgcatatctcgcaatccgagagctttgtccaggattcctcaacgatggagtagttctatctctcagcggccaggctcggaccgggtccgatttcctggcgctgtgaacagtaaattcaccaccgacatgacgttcatcaatccctccgaaacgaccaatatccctacataccgtgtcatggattccgatggtgtgttgttggacaagaaccggaagccctctggagtatcaaacgaggagatcttaacatggtacaagaatatgttgactgtgagtgtgatggacgtgattatgttcgaggctcaaagacagggccgtctgagcttctacatggtgtctgccggagaagaaggtatcagcgtcggatccgcagccgcattaacacccgacgacgtggtattcgcgcaatatcgcgaaacaggcgtctttcagcaacggggtttcactttgaaggatttcatgagccagctatttgcgaactgccatgacaacggcaggggacgtaacatgccggtgcattatggctccaactaccctcgtatgcacaccatctcctcacctctcgcaactcaaatcccccaagcatctggcgcactacgccctcaaattagaatctcttcaaaaccccgacacaccaccacgcatcgtggcctgctacttcggcgaaggcgccgccagtgagggtgacttccacgccggcctcaacattgccgcaacacggtcatgtcccgtggtcttcatctgtcgcaataatggatatgccatctccacacccacactggaacaataccggggtgacggcatcgcagccgaggagtaggatacggcattgacacgatccgtgtggacggaaatgacatcttcgccgtctatgaagccatgcgcgaagac

SEQ ID NO: 1566 - DNA, 930 bp, Aspergillus oryzae
ttatggcgggcgtgcctgcggggattgtttctctagtctcgacggccgttataacctttgcgaagatgtccagttcgcaggcgtatacccttacgccggaacaattcaacgatacaagacgcaccccgcaaaatgggttcacaaattgcccgataaccttacctacgccgagggtgccctcctcgagcccctctcggtcgttatgcgtggaatgtcagttgctggtctgcaacttggtcgcggggccgtcgtctgcggtgccggtcccattggactaatcgcactggccgccgcacgtgcgttaggcgctcatcctattgttatcacagacctagatgctagtcggttggcattcgmtaaggagttcgtcccgagctgcatcacataccaggtgaaccgtgatcttgatgcccaaggaaatgccaaggcaatccgagcgctgttcggttccgaagaatactttgccccagagaccgttctcgagtgcacaggtgttgaaagtagtgtatgcactactgcgttcacagctcgacgaggcggcaccgtcgtagtcattggcgtgggtaaagctgtgatgaacaacttgccgtttatgcatatctcgctggctgagattgacttgcgcttcatcaaccgctaccgcgacacctgggccccagccattcagtgcatgagtggcggaatccttgatctcaagagacttgttacccatacattcccattagaacaggctgagtcggcgttgcagctgtgctctaacccgaagaacccgagtatcaaggtcttggtggtggatgaggttgaagctacattgtagtgttatatttgcggggattgtcttgtttacattcgttctggcgttgataatagagtgcgaagtgtgtaaaaactttttatcaggactagttacgaatttaaaatcttacgaac

SEQ ID NO: 1567 - DNA, 503 bp, Aspergillus oryzae
ggcattatgggggggactacaagaagttcgtccagaagttcggtgatctctccgtcttgcccacacggtacttcttggccaagcctgagattggcgaggagttccacgttgagctggagaagggtaaggtgctcatcctgaagctgcttggccatcggcctctttcagagcagactggtcagcgtgaggtcttctacgaagtcaacggtgaggtgcgccaggtcgctgttgatgacaacaaggcttccgtggacaacacttcacgccctaaggccgatgtgggtgacagcagccaggtcggtgctcctatgagcggtgtggttgttgaaatccgtgtccacgatggtctggaggttaagaagggtgacccacttgccgtcctgagtgccatgaagatggaaatggttatctctgctcctcacagtggaaaggtctccagcttgctgtcaaggagggcgattctgtggatggccaggatctcgtctgcaagatcgtcaaagcgt

SEQ ID NO: 1568 - DNA, 398 bp, Aspergillus oryzae
cattatggggggacacaactaaatccaagatgaagaaaaggttataacttgtcagttctcgtggaaaggacggctctgctggcttttcccgggcgatgctgaagtgtcccgccgttcaccatccattttggggcaatgagcgatcggattggaggttgtgttatactggatataccgacgaagactccatgtttggaaaatgttatatagtatctcacatatcatgactatgattgcaatcctctttgttgcctgatttgccttctcccgtttgagaagccgagtctcgactcgatcgtcagggatgtccagggcaccgatgtctttattagccatgaacccttgtccttagcagtactctagtaccaatgtcaatctgtcgatctcaagctatcttt

SEQ ID NO: 1569 - DNA, 586 bp, Aspergillus oryzae
gtgaaggtagbcgtatggtgcgcgcgtgtttgtcatggctcgggagcacgcgccgagcatcatcttcatggatgagatcgacagcattggatccagccgcatagactcagcaggctcaggcgattcggaggtgcagcgtacgatgttggaactgctcaatcagttggatggattcgagcctaccaagaatattaaaattattatggctacgaaccgactggatattctcgatccggccttgttgcgccctggacggatcgaccggaaaattgaattccctccgccatcggtcgaagctcgcgctgatattttgcggattcactcgcgctcaatgaacctaacgcgtggtatcaacctaacaaagatcgcagaaaaaatgaacgggtgttctggtgcagagttaaagggtgtatgcaccgaggcgggcatgtacgctcttcgagagaggcgggtgcacgttacgcaagaagactttgatctcgctacagccaagattctcaacaagcatgatgacaaggagcgttgctgtttccaagctttttaagtagacatagcaagagtgaagaatggaagcggcttgataatg

SEQ ID NO: 1570 - DNA, 925 bp, Aspergillus oryzae
tatggcggggtcgccaaatgagatttgcgtcatccccgtggtgtcagataccgtgtaatctaccagctggcccagtaagagggtacatctgtgagctctaccaaggtcactatcaactcccagaacttggtcccattggctcgaactgcctcgccaacgcgcgtgacttccaagcccctgtggcttctttcgatgatgaggaggaaccatccgagtaccgcctgtacagcaaattcaacaacacccttttctccgctcgtcaggatcacactccattcgacattgtcgcctggcacggcaactactacccttacaagtatgacctaggtcgctttaacaccatcggctctatttcctttgatcaccccgatccttccattttcactgtcctcactggcccctctgaccatgtcggaactgccatcgccgactttgtcatcttcccaccacgttggttggtgcaagagaacactttccgtccgccatggtaccaccgcaacaccatgtccgagttcatgggccttatctccggtaattatgatgcgaaaaccggcggcggcttccaaccagccggagcgagtttgcataacgtcatgagcgcgcacggtcccgacaccgatgctttcgagggggccagtaatgctgaactgaagccgcagaaggtcggcgatggaagcatggcattcatgttcgaaagttctctcatggtcggagtatctgagtcgggtctcaagacgtgccagaaggtacaggaagagtataacgagcatagctggcggccattgaagagacacttcaagaaccctaacaaggcttgaggttgcattcgtgatgaggaaacgatgtactgcatattgtgtaaacattcattgacaatttagcactgatacctggtctacttaaataagacatacttgatttaata

SEQ ID NO: 1571 - DNA, 564 bp, Aspergillus oryzae
tggggggaagcgggagatcgaaactcagcagtactggatttcaccgatagccccgattgcaagattatattggtctccttgaaagcgggcaactctggcttgaacctcgttgccgcatcacaggttattatcttcgatccattctggaatccatacatcgaagaacaagcgatcgaccgcgcgcatcggattggacaggtgcgagaggtacaaattcatcggattcttgtgcagaataccgtcgaagacgtatccttgaacttcaggataagaagcgagagctaatcgaaggagctttggacgaaaatgcctccaagaatatctccagacttggaacccaagagctggcttacttatttggagttcactagggggattcatattttatctcatcagcatggcgttggcggatttctgaattgaacatttaattggattcgtatcctctagaagatacccaagatctatttaccccttaacttctcacacttgaatgcgattgtgctatgtcgaaccatagactgttgtgttattaaacaaatccactccttgctcaagtccatc

SEQ ID NO: 1572 - DNA, 1097 bp, Aspergillus oryzae
ggsgggatgccctgtcgctccttcgcttaatcgacaaacatcgtttcgatctcgcccatatggccaatttcctcaagcaggagtctctccaacatctacatcgattcatcataggcggcagcatcgcactcatagtatcgcttcgagttccccatctgtccagcagcaacacagcaggtcgaattctcaaaatttacattggcgaactcggtctataagggagccgaatacctcgaatggtcattcgccacatgcccacaggagtcatactacgatggctggaacatcgcatgttttacccaatacgggaagcgagactcagttgcccccaccacttactcagcaggaacaagtagaactcgctcggagactccaaatgagagagctactgtgttccgcacgatcaaatgaaacccatgctttgcagctatacgaggaaaactaccttcgccgccatcgtcgtcaacaggaggaagcagcgtcgcatgccaaggggctggacgatcagaaggatgggcgtccggaacccaaggatgacgcggaactgactgttaaccttgagtgtaaaatctgcatgagccaacttgttgatactgttctcattccttgtggacatgcgatcctctgtcgctggtgtgctgagcagcatgtgcggccggatcggtctcgaccaaaggcagcggtgctatgcccgctttgccgcactcctgtgaagcagaagctccgcatctatctctcctaatcccactactacaatggaggataccatgtgtggtggaatctacgatttacgaccgttatgtagtgcatctcgagcctctccttgctttcttgttcttctctsacttcgttcgcttattcttgtccattgtcccatattttggactaactgggggcggtgatcgcattatttggagtwcaggttccagcgaacgactatcaactattttggtcacatgatcttcgccagtgcagattgacactgagacaacaacttccataatgagacagactagtttacgggktccagaatggttcttagacactacccgtatctacggtagacatgttttgcaattgcatgatatctctgttat

SEQ ID NO: 1573 - DNA, 861 bp, Aspergillus oryzae
  modified_base (35)..(35): n is a, c, g, or t
  modified_base (117)..(117): n is a, c, g, or t
gggccttcattcattgcacagcacgcgcgcgcctngtatttagtcgacaatcatggtcgaaaacgttcttgatgatatctcccatcggaggtacaacccactccgcggttcttachncttagtctccccccacagaactaagcgtccttggcaaggagcacaagaaagcccttccaagacaactctgcccacctatgatcctgcttgctatctgtgcccaggcaacaaacgtgcgcaaggagatgcgaaccccaagtacgaaaagactttcgttttcgtcaacgattacagcgctgtcaaggaggagcaagcgccatacagcccagacaatgccgacgatctggaatctttcttcctgaaggcagagcctgtcactggcaaatgttatgtgctcaccttctcagcggcccataacctcaccttggcagatctgtctccggccgaaattgctcccgtcattgacgcttggaccgaaatctacagtgcacatctgtcacctaagtcaccgctggctgctcttgctcctgcgaccacccttcctcccaactccccaaccgctgatctggccaagcccaaggagcaatatcggtatatgcagatctttgagaacaaaggcgcggctatgggatgctcaaaccctcacccccatggacaagtctggaccaccagctcgctacccgaagagccagckatggagctggaacacttaaagaaataccgcaaagagcacggaggcaagcacatgctggaaaattatgcggccctcgaaagccaaaagaaggagcgtgtagtctttgagaacggagcattcctggttgtctgcccctggtggggagtgtggccatkcgaaacgatgattgt

SEQ ID NO: 1574 - DNA, 334 bp, Aspergillus oryzae
  modified_base (76)..(76): n is a, c, g, or t
gcagtaagtacggcattgatgaattcctcacgatcaagagtgtcacatttggcggcatgggcgagcctttgcagtnctaaagggatatatatgacaaaatatgtaaatcgagttgtgaactctcgtcttatgcgcataatccaaccgacgctgaaagaggctcagctggtgcactagaattgcacaacacgccttgggtggtcttatagataagaccccggaaagcgcatagtcccactgggtcttgttataattatgacgaacctggaacgacaatgagaagaaatgcttagctctaatatacatacaaacaatacaagcgcccgtatcccaa

SEQ ID NO: 1575 - DNA, 381 bp, Aspergillus oryzae
ctcggagcgaagcgccagaaacgcagatcacaaagctaccctggatctacgtctacgggcacgcggacgacggatcaccgttctttatcgaggaggcagggattgggtcggtggggaagcagaacacaagagttgtcattcaggttggcggcgtgtatgccagattgcaggaggcctttctggtggggcagccggggagagagcctgggggtaagggagcaagggtggagtgttgggttgtgcctttggagggggggtattgttcttgatttgaggtcaatagcaatctttactgctttactcgccagcgttggggtacggggcaatgacggcgaccatcgcgatcttctccagctatgcataattgatactttggcttga

SEQ ID NO: 1576 - DNA, 314 bp, Aspergillus oryzae
ccggcatttgctccctctccgaccgcacgcttcgcaccgtctcgcatccactaccctccctcctccactccctcgaggttttctcagatatctgtcacaatgatgcccactcggttcgcccgcgccggcctgcgtgccacccagcagttctccgttcctcgcactgccgctgtcaacggcctgaggacctacgctaccccggcccaggaggtcaagcctcctgtgtctctgtacggtgttgacggaacctatgctactgctctgttcactgcctccgccaagtccgccaaccttgagcagacctccaaggccct

SEQ ID NO: 1577 - DNA, 745 bp, Aspergillus oryzae
  modified_base (143)..(143): n is a, c, g, or t
  modified_base (301)..(301): n is a, c, g, or t
ggctccaaggttctcgttgtcctgacctcccaggctcaaattcctgaccgcgaccacgccacaggatggtacctgcccgagttcgcccacccgtgggaggtcctccatgagaaggtcgagctcaccatcgcctctccgaaggntggtgaggctcccctcgacccctcttctgtcgaggcgttcaagagcagatcccgtgtcctcgaaatttctgaaggagcaggagtcgctttggaagaacacccacaagctggctgatttcctgcctcgcgtttcggagttcgatgccattttctacgtnggtggccatggacctatgtttgacctccactacgacgagacctccctctcactgatccaggctttcgctgccgccggaaagcccgtctccgccgtctgccacggcccgaccgtgttcatcaaggcgaccaccaagtccggacagcccttgctcgccaactccaccgttaccgcctctcaccaacgtcgaggaagaccaggcacaattgaccgcgctcatgccatacttggtcgaggatgagttgaacaagatccccggatgtaaatttgtcaaggccgatcagccgtggggcgagaaggttgttgtgtcgaagagtcccgacggcgctactctgatcaccggtcagaacccggccagtgcgacgggcgttggaaaggagatcctcaaggctctgggactttaagattactatatgcatataattcatgaaatgtatgattgtta

SEQ ID NO: 1578 - DNA, 503 bp, Aspergillus oryzae
  modified_base (8)..(8): n is a, c, g, or t
tatggcgnggagagccggaaatggataccttcaactactggatccagcggttttggcccctcattaagaaacgcttgcgtcatgaggttaacttggatggggacgatgctgactctggcaagaagactgttattgtttttgcgaatcgggcgggagaggaacctggtcctgagggaaccaacccggttctgtacgctggcacgagtgctattattgttgttacgcaacggccgcgacgcccctccgcggatggagaaactagtgctgcggacaaaggttctgggaatgggtccgatgaggatgagagtggggacaaggatgcatcgccgtttgatgtgaaaatactgtgctgggatatgatggccgcgacaccgaagaatttgctttgcggatactacgatggaccccaaaatggttttcggtttagttaaagctagtagatgatatggtcgggttctgggcaagtatccatggctcggggaataatattatcctttcacaaa

SEQ ID NO: 1579 - DNA, 573 bp, Aspergillus oryzae
ggaatcaacaggtcgtggctcctccacccagcacaactgaggcgttcgacactggtccacctatcatccaaacaccgacgactgaacccagtatcacaccatcacccacgcagtccaccgccagacggaggctaccgatgaattctgggacgacatcatcaccggcgtctatggaatcccaccgttgctcaaggtccacgaccgagccgggaatataaaatggagttggggtcgagacgacgttacccaggagcttccgccgtatatcaggcactgcctgtatagcgacgcgacacgatgctacagaagtcaagtggatyaagaacggaactgccatcgctgcgatctacagcgacctcgtgctaatgatcaaccatacccctgacaacccggagacagacaaactgatcacattcgctgtctgccggcaaaatgagtytctctggaatgctcataccctcgagccgttgccgggagatcgagtagcagtsggtactacgggttccaacgcatgggacggcatcctcgtctacaactctagcgtcgataaccccctggtagacgagccgctga

SEQ ID NO: 1580 - DNA, 765 bp, Aspergillus oryzae
  modified_base (2)..(2): n is a, c, g, or t
  modified_base (4)..(4): n is a, c, g, or t
gngngaacactctgaaccagacatctctttcgcgatcgtcaaagttagacactcttcaagatgcactttactagcaagtccctcctgctcgctctgagcactcagctcttggctgtgagcgctgctccagtctcgagtgcctccacctctgaggtcagccagcccacgccccctgccggggttgctcagtatggcaactatggagactatggcaagtacggcaactacgcttcctacggcacatacaagagagatgatgtccctgagggtgacggcgaagatactgagccttccaccacgacttcgcctaccgaaacccctacccaaactcctatcaactatggcaactacggcaactacggcaagtacggacagtatggctcctatggggcgtacaacctcgagaagagagacgacagcagctccacgaccacctcttctactacctccacacccactgaaacacctatcagctacggaaactatggcgactacgggaactacggtggctacggctcttacgggtcgtacaagcgggacgaggtccccgaacctgaagagagcacgactactaccacatcttcgacccctactagtacccctgtgaactacgggagccacggtaactacggccagtatggctcctacggaagctattccgaagctgctgtcgctcaagaataagctaagagtgacggttgtgaccatgtaacacggtcgcacttatgtttaacgagggcaacagcaactatgaacgaaatgtac

SEQ ID NO: 1581 - DNA, 693 bp, Aspergillus oryzae
aaagagagaggatgaattagtatacacctactatatcaaaatcatacctattcattacgagacgagagcgacgctttcgcaccaaagacatcaaaatcatgtctgtcaacagcgtttccctttcgggttctcattctgtctcgaagactgctgtccccagtataacgctcattccaaaccatggtgtcaagggtgacgcccatgcaggaccaactgtccagcaccgacccctacgaaatgccaggccgtccgacgtaaacctgcgccaggtccacctgatgcaggctgagatccttcaacaagtgtctaaagaccctgcgaccggaacgaaggacatcgtcctcaaaccaggacagttaggagagaacattaccacccagggcattgatctgctctcattgcccaaggacacaaggttgctgttcgtggacggaaaggcatccagccaagacgcaccaaccctcagactgactggcttgcgcaaccccggtccccagcttgacgctatgaagaagggactgaaggaccgcttcttggtgaaggctagtcgcggcgtagtgatcggatacatggctggtgtcatgagtgttgtcgagaaaggaggtgagattcgaccaggaatggagattgtggtgcagaagccagcaacaaacctggctcttaactgtatttaatgtgagtagctgtgcatgt

SEQ ID NO: 1582 - DNA, 559 bp, Aspergillus oryzae
  modified_base (2)..(2): n is a, c, g, or t
gnggaaaaggagggagaaaaagagaaaagaaaaaagaaagaacgtcaacagtcccaaattgccaaaagcgacttctcccccgaaatcacttgggcaaagttgatatcacactggtcagatccattcgttccgggggaagaagcggctctgtccgagtgccaaacccaaggattgccccgcggtggttctgcgacatatttctaatttattgacaaaagtatggattactttttgctttttggtttttgactttcattgggaccctctttttgcaattccaaatcccattgttattgtgtttttactggtcctattcatttatccacgaatagctggacgcatggattgatcattgctacctaaggttgatccacgcaatcgcgccccattcttcgtcgagtgttgttatcatcgccgaaagtctcttgatcccctatcgatatcaggaccctttcgtccattacactgtcgatcgatccactccactgtcggtggtctgcgatcctctttctttatagtcatccggaccatctgcgaggtaaggaattggaaatacaac

SEQ ID NO: 1583 - DNA, 523 bp, Aspergillus oryzae
  modified_base (2)..(2): n is a, c, g, or t
  modified_base (4)..(4): n is a, c, g, or t
gngntactcgcgagcgctgtctcttgcgagcatgagctggacctcgggggcattcattggtcctattttgtctggatatctgaccgagaaggtcggatactatgaaatgaactgcgttattgccgttctgtrcgccctgtcgactgtgaacgctctctggaacctcaagtccaagaccccggcggatggccaaggtcaacctgacgatcgtaaataataaatgatttctatgaaatccggtaataaaagcaacgtagcacctgaaccgaataccacaggtgcgttaatagaggggcataatgatgtgatagaaatgatgaaaggatggttttttgaaaaaagtgatttcttagcgaccgtctgtttccaatgtcttagtttctcatgggttccaagttatgatgacgmcmscgatgatctatgaccaaacggttcactgaaacattgtctcttcatttccttgtctgtttgttctgggctttttttggcggtttcggtttcttcctaatacagttgttctccg

SEQ ID NO: 1584 - DNA, 250 bp, Aspergillus oryzae
gggtggggagaagaatcaaatttactgctaacaatattattgctaatactggtattaagaataaaaaaaaagttgtagttgtcatgataaattatttatactcgtaaattattaaggttaacacctaggtgttaatatatatatatatatattatacaccaataatattattattaataatatatagatttatattatctttatattaaaatatattattaaatatttttaattttaaggaaaaattaat

SEQ ID NO: 1585 - DNA, 493 bp, Aspergillus oryzae
gtccgtcgatacaatcgcgactattctctccgttacgcccgatagtaatgcgttggtgttgcggttgcagccgcgtgatcggggcgtgttgaggtatattgtcgcagaagggttatgttacgcttgayggggctagtttgacggttacgaaggttgtggatggagcasgaggggtattttgagattatgcttattgcgtatacgcaggagaagattgtgacggcttcgaagaaggtcggggaggatgtgaatgtggagattgatattgttgggaagtatgttgagaagagtgtgcagagttattttgccgcgggttggtgggggtgattttgcgattttggagaagatggtttccaggattgtggatgagaagttgaagaaatgaggtatggttggtgtgtagtgcctatgaggttatgattgtgatgtgtagactgctttactactactagtatgttgtcggttgaaataccaattactttttattgctttg

SEQ ID NO: 1586 - DNA, 634 bp, Aspergillus oryzae
ggcaatttatgcggctcaagccggtgaacatgatgaatatgctaacacagattccgtggccagcagctctcgcaccgaagttgccgctcccggacctcgtccatcacgtctccaaaggaccccgcagtccgcggacgtaggcgatattgaaactcgcgaagtaacacggtgatgattgggtccgccctgttttaccatattcactctttttcaagcagagcgttactcgaacacagcatctagtggattctccaaccaggcagttgcataatgaaaaatcccgggcacatgtaatacctttagtccgcctattccgatatgtgttgtcgatgctcgctcctgctaacctcgcatatgtatccggcgttttgcgtgttcggatggcttttccttttccttcctttctttccactacctgggaccaatctcgtacaaattttccgtacatgataccatatggtgtgtgcatgtcttctgagcggcgttacatggctttggcagaacatagtaattttttcctccgtggaggctgggtcacctttcttcatcgctactatttgcctggacatgtttttcttttcttcatgatgtctcctcgtctcacccagcatgagatcaatgaattgcttgcctg

SEQ ID NO: 1587 - DNA, 257 bp, Aspergillus oryzae
ggccgtagcgagtacttcttgtaattattgcatggtttgatttttgttcacagttttctttttgggcatacggaagggcatactgtgacatggtgaatattcgatttacacccggcgctggcgttcggagaaaccgttcatgtgatatgctgcagagagtgacggatgataggcacgttatataacgatattagagcacaaataacgatggtcatgcttggaagctagaacgcatgttggatgtttcgtgaagtatg

SEQ ID NO: 1588 - DNA, 464 bp, Aspergillus oryzae
tagttggtcactgtcggatggagacgtggcgctgggggtgcacaccaacggcaccacttttatcatttcgggtctctcccctctcggtgcatgccgtctgagaggaagaggatcatctatgatctacctgcaagtctattcttttcacattcatgatccaacaaatgaggttgagtagagtcataaactcgatggagtgagccttagttaggcaccctctcttcaagtggcgttggaaaaacggactgggaaacgagcaacttgcagtatgtgtgccttcttagaagcacaaggtaagtactgtatgtcgagcgccgggctaggtgtccccacctggctatttacttatcgggtaatacacctagcctgagtcgggtctcggccagcatgggtctactaagttttaagaacagatttagtacattgggctgtgcacccttcacgccccatacaaaaatgaggat

SEQ ID NO: 1589 - DNA, 773 bp, Aspergillus oryzae
acgcctatttcaagctgtgtataagttctttggcaatctaagtaatagaagttctcgaaacgagaatgtctgccacaaaagcctcgaggatcggtgaagagctatggaaaacgagggttgacaaagtcaatgcggagttagtcacattgacttatggtacaattgttgcacaattatgtcaggactatgattcaaactatcaggaagtcaacaaacagctggacaagatgggctacaatattggtatgcgacttatcgaagacttcctggcgaagtcaggcgtcggccgatgttccaactttcgggaaacagcagacatgatcgcaaaagtcgggttcaagatcttccttaacatctcgcctactgtaacgaattggaccagcgataataaccagttttctcttgtgttcgacgagaatccgctagccgattttgtcgagctgccagatgatggtagggcgcaggatgagttgtggttctctaatatcttgtgtggtgtcctgcggggtgctttggagatggttcaaatgcaagtcgaagcgcatttcgttagcgatgtgttgcggggtgacgatactacagagatgcgggtatctctggtgagatatattgaagatgaaatgccaccggagaggagtaacaagtacatggaaacaagaatgctgtggagggttgtggcgtacggtgtttgggatttgatggtctctgatctttactaaattatagcatcacttgtcattagtaggtatctgcaatctaattgtaccagacgt

SEQ ID NO: 1590 - DNA, 765 bp, Aspergillus oryzae
  modified_base (105)..(105): n is a, c, g, or t
ccattatggsggggatgatttcgagtgtataaggtagttgtttgataacaatgaaacacctttattcgtttcctactatatgctcttgaggattgggaggcagtntatgcggggcacagatcccacaaaaagtacctgggtatatccaaagttcattttgtaaatttgtaaatttctttacaaatattttaatttgttataattatattcataattatacagttattgttagattaagttcaatatttattttttatttaagtaagattttaactatatggtgaatagatgtattttaaactttacccggggggggagtgatccaactccgggatatttaaaagttttttctcatattaatattgtattttatctttattgatatgataattaattatactttaaaagtttaatggctaaatcktgcttgactgtttgacctacaagtctatcagtcgcgtaasgggcatatgatcacaagatgcataaaggaaaggtcttggattatagaaaaagttacgctagggatttatatctgtgagtcctccaatatttaaaaatattggtaatatattgggtaaatttcaaagataacttataaataaattaagtgtatttgaagcgaaacttattttagcaaaagtagcagtagtcctcgcgcttaattttaggattaaatcctaagataaaataaggacgttcaacgactaaaaggtgagtattgctaacaataatcctttttttaatgcccaacatctttattaa

SEQ ID NO: 1591 - DNA, 955 bp, Aspergillus oryzae
gaacgcatggcgggcgcggtckgggtggtgtggtctttccttttatcctgaagggtgcgtttgccaatctgggcttccagtggggaacgcgcatcctggcattggtgatcctcgtgctgtgcggactcgcctcattcctcgtcaagtctcgcctccccaaaggacagctgaaggcggccatcgatatccggtcgttcaaggactctcgcttcacattgttgagctttggcattttcagtaggtttctcgctccccgtggttgtcatcgcatacttaatagaagtagcgctcgaattggaggtgtttgccctcatcggactatttcccacgtacgtgacgaagcagggcttcaataccagcgcgagtgtatatacattggtggtgctaaacgtgtatgttttcctgccgacttgatgcatattcgtctggtccccttctgacaactgtagatgctcctgcatcggacgacttatcgctggtcggatcgccgatcgatacggccgcttgaacgtactcattatcttaatcttctctgctgttctgacgatgtttgccatcctgtacccgttcagcggtcatttgtcagcacggtatgtctttagcgccctctatggtctctgttcaggatcgttcatcagccttgcccccgtctgcattcggcaggtgtccaatgcgaaagagatcgggatgagatttggaacatgttactgtctggtgagcttcgcgacactaatctgtattccgatcggcggtgaaatgttggaaaaagtcggctcgcgtattgtagttatttggctgggatgtgtccccctgttttccatgttcctgttcatgaccgcacgatgggcctgtcttgattacaagtggcattggcggattcgcatttagctcctgggttaatatggaccggggatagtcctcaaggacaccaatcagtgtatgactggtggggata

SEQ ID NO: 1592 - DNA, 548 bp, Aspergillus oryzae
  modified_base (2)..(2): n is a, c, g, or t
gncattatggsgggtgtctagagtcagtctgcagaagtcttcggctcagatcatcgccgcgattcgggatcgtcgagcccagacggatgtgtcctccactactggcacatacggtctgtcgagcggcccctacgaccggttaaacttgacgcatgctactacgacggagtttctgcaccagttttggcaggcgttcctatcaggtaaccctgatcgtgcggcagaattatcatccttggtcgactcgttgagtgggccatggagcgaattaaagcagtagcacaggatgcagaggcagagcgacaggtggaggtagatcggaagaagcgtcatgcgcgagaggtcatggaggccactggcaagaagcctcgactcaatctgtcaagcatacaaggtggtgaaaaggtggtcaaccaactgatgggacccactattcaagcactagaaacagcgcaggcgaagtataaggcagccttggcggaagagatgaaggaggcatccgcgcaatgatgtataatagaacccttagatgaataatcagtatcttt

SEQ ID NO: 1593 - DNA, 212 bp, Aspergillus oryzae
cattatggcggggcggaaatgaagagctctctcggggaaggcgaagggagcgatctctccgacgcaatgcgcatgatgatggacgaccttggtctatccatgcaagctctcaagtccacctccatcttcagcggtgacgaggaacggtttgcatttgcccgagcgctctcgcgtctctccgagatgggctagcaagcaatgggtggagcggg

SEQ ID NO: 1594 - DNA, 292 bp, Aspergillus oryzae
  modified_base (223)..(223): n is a, c, g, or t
attatggggggtagcaaagaaagcattcgaaagctttacgaatcccaaaggcagcaggaaaacaatcctagttggggattccaggaggatttaagtgatatgattgctcaggaaagccgcaaaaggctcaaaaaggaagaagaaaaacggaaccgccattgagatcactgtcaatccgccagttttaccatacaagctttacagcacctgtaccaatgcagtnattgttctcggcctatatctcttaaattacaattatctatagtccttaccgaagaacagaataatgtct

SEQ ID NO: 1595 - DNA, 602 bp, Aspergillus oryzae
atggcgggggggactgcgtcttttttacccaagtcttaagtcctaacacccggtacgagtcccgaagaaacgcccccccaaaaaaaaggaaaaaaaggaaaaaaaagaaagatagatagagacagacaatatccaacaattcccgcctccccgaccaaaatacccggtctggttgaaaccaatgatcttatagtctacggtaatctgttatcgacagggccatgctagccacttctacgagtcagttagattaggaccgtcggtgctgctctatgtgtatgtgcgacggtacggaggaagggagggagtacccggcccactccctccccattacagatgtgcgccttttcgtatgtggtgctgcgattgatttttctatatttcatttcatttttattttatttctgttttattatctctagtggtttggtgcaaatacggagtactcgtgcccggttcgagaaccccgttttttgtttatcttatccttgctcatgccaaagcctaaaaataatatatgggtctttctaggaggttaggtggttaggtggttagttggctagttggtttagttgatttagttacacgcgacctgtggtacc

SEQ ID NO: 1596 - DNA, 466 bp, Aspergillus oryzae
  modified_base (78)..(78): n is a, c, g, or t
  modified_base (294)..(294): n is a, c, g, or t
tatggcggggaatctggtccgtggttgcacaacgcactgcaggcgcaaaacccagcccctgacagcgacgaggctgtnactcaggctgctctgcaacaggtgtaccatgccagcctgcagaaagaggatgagtcatggttgctcaagcaaatgccgaacgggttcggaccggtgttttcgatcagcatgaaaaacgaagactatgcgcgttactccccagtaagctcgccttcttccagcatgccaccagcctcggaggtgtagagaccctgattgagtggcggacaatgagtnatgcgacggtggatcgccgattgttgcggatcagtgtaggattagagaattgggaggacctccggaggatctggtgagcgcattccgggcgttggttcagtaagattagatttacgacatggtatggacatatgatttgatacgtcaatggacagtttccttttagttttct

SEQ ID NO: 1597 - DNA, 693 bp, Aspergillus oryzae
cattatggcgggggatgtagtaacagcacactggaaggactctggcgagtctcctcgcatttccgaacttgtacagtacgacctttatctttgtgctggcggagacacattagggtcccaggagaacctggctatccttatcaaagatggtgtctttgcccgcggaactctgtttctttcaagattgatccagcagttggcggcaacgaaccaaacgcatacttcctgaaaatggttgcatctggtcccgacgcccatgtaatcaatttctccgatcgtttcacgctcacagacatggctggcgctttctcgtcgaatttggaggatggcattggtttgcttagcgaaggccatgggcaacaggaactgcgtagaaggcaagctgctggagcttatactatcccataccaattgcagaccgggcctacaagatatgcgcctatggctaaaaagcctgggtcgacaattccagcggataagtcgccaactccccaattcccgactagcgcatacgagattgctactgcatacctttctgcacctacaattcagactaccgtgtcggsytctttaacgtactctgtttccagtatcgagaatactgcatcccctgcaccacatcctcatgataagaagatgaagaggtttttggagaggtggaaggattgaacaccagcagtacatatggagttg

SEQ ID NO: 1598 - DNA, 490 bp, Aspergillus oryzae
tggcgggagtgtaggacaggcacgcgctgttatcaaccgaccggtcccttccacgaaattcacgcgagctacaactcctgtttctatacgtccatactaaccaaggagctttctcatactcagacagcatgctgttagccagcgcttatgctaccctggactcatcctgcaacccttccatccacatctccgttacagcgaattgcgcactgatcgtcatcaccgccattggccattctcccgaagatccgtagcattagctctactcgaaccttgacatacatctgaaggcactcaatggatcgcaagtatggaccctagccgcgacatgctcatcgactcatttagtagggatgttgcacgacactattgtctactggacttataggcctgaagtctggaaatttgcgccgatggttgcactcgagtatataatagcttttaatgctaagggccctacacaggccgacaaaatgaaataactttatct

SEQ ID NO: 1599 - DNA, 450 bp, Aspergillus oryzae
cattatggcagtatattagcctggtgtccacggaccacaagtatatctgctgctgattgactatgccgtctgctcattgtccactgtagccggaggagcctcgtaaagctcacccaggatcttccagccaactggaggaagactttgaccgagcaagtagtctaaaagctgatacttactagttttaaaatgcttcagcttgggcttccggactttctgtaaattagaatatcgtgttgttgagtccttagttggtgaatctgtgaactgtttggatggtcacatttatatgcacgttggcttggtttgtgagaaacgaacaattacctaggtgtggcgatacatagggtctaggctatgagggggatttttacatttacctagggtagatagcgcagggcctactaagaaccccgcctagtctgatgtgactacaaatatccatcctct

SEQ ID NO: 1600 - DNA, 1053 bp, Aspergillus oryzae
attatggcggggtcagccaagcaaacgatgccctgtcgttccgtcgcctaaagagtctttaactaaatcctaagccctcgactgccagacaattaccgtccatggaatccacgacaggccctgacgcctccaagacgcctaacagcgacctccccaccatgttccgacccccggtgaaccgcgcaatgcgggttttggatcgctcattcttcaagaagacggtgccgttatctgccgcgacggtcttcaagtcatccgatatctcaagggtgcgtggccaactgcacaagagtcgggatttgttgggccttccgagaacgagttcgatccgggaggtgaaggtcgatgatgaggtgaagaaatgcttgttgctgagggggggtgttaaatacgatgatgctgcaacatggtcgccgacgatcaatgagcttgtggagaatggtgctgttggaattggacggtatgatctcgaattggactatgattactggacttatgccgatatcatgaacgcaattttgccggaggacatgcttgaggagcttcctcaagggtttacccaggtgggccatgtctctcatctaaatctccgcgaacaatataccccatataagcaccttattgcgcaggtgttgaaagacaagaacccaacagtccggacagtgattagaaagaccgtagatgtgggcgccaagagcgaattccgcacatttcccttcgagtttttggcaggggacgaggacatgaacgtcatccagcatgagcaggactgtgaattccgttttgactactctcgtgtgtactggaacagccgcttggagaccgagcaccgtcggctcgtgaacaaattccgtccgggtgagakggtatgcgatgtgatggctggtgttggcccattcgctgtcccagctggaaaaaagaaaatcttcgtttgggccaatgaccttaatccgcatggatatgaggtcatgcaggatgctattcgcaggaacaaggtcaacaaattcgtgacaccgtttaacaaggacggaagagcgttcatacgctggtctg

SEQ ID NO: 1601 - DNA, 1012 bp, Aspergillus oryzae
aatatggcgggtgtcagaagggtctgtgcgggaacaacagtcttagttattccgcaattggcatcatgatcgaagtcctctagagaatcggagacacagctctggaataaagaggccgaccatggagggactcttcacactgctcgcattgagcattgtgatggcaattacatcctttgttgtgggctcgttaccacttgcattcacgctttcttcctcccagctgcgacttatatcatcccttggcatgggagttttggtcgggacatccttgattgtgattatcccggagggttgaaactttatacagcgcaaacttacccaatgaccggaaagcacttagcagtcgttcgacgggggccattacttggcaacaccagaatattccgacagttgctactgctatgatccacacctctgaagaaatcaactccattaaagtccctgtatcctcttcctcggatacatctactttgttgcccgtttccgactccacaccatatgtcacacgccgtgagcagaaaggaaaagaggaggcatcagacgaagataagaaagcaaacgatgatgaaggaagttcgccacatgcctggattggaatcgcacttattagcggctttatcctcatgtaccttatcgacaagcttccggaattcgcagctccggccaaacagcaacggacgccgtatcatatttctctcgataacctaggctccggattacgtcgcaattcatctccctcgcgagaaggtggacttctggatgctggaaatagcccaaggagcagccacagcttcgccacaaccaccgggcttgttatccatgcggctgctgacggaatcgctctgggagcgtcgagttccgatactggcctaagctttattatattcctcgcaattatggtccataaggctccagcatcttttggtcttacgtcagttttgctgaagcagggtctctccagccgcgctgcgagagcgcattttactagtctttagcctggcggcgcctt

SEQ ID NO: 1602 - DNA, 1038 bp, Aspergillus oryzae
  modified_base (156)..(156): n is a, c, g, or t
gcgccgattatgcgggcgcgagaatatgaaagatatattcgatcgcgttccgtgccgcaagtatataaagaaattattatggataattacgtatatattaaagaatamctagtaaatgtagttygtaagagaaacggaataataaccgaagtgaanttgaaatacgttagtacgtttaggaaaagaaacgaacggagattgttatttggtcgaacctaaatacgaagaccgtattacgaaacgttgttaaagtaaaatggattaaaacgtgtttgaatataggggaccgtccgcgtaaggctaaatatgatatataaccgatagtgaaaagtccggtgagtaaaatttgaaatagtagtattataacgacgcggagtgaaaatttaaataagtaataagagtgtccgttttcgataatgggcgacgaagttaattttagatccccgcgatgattccgtcgcctttcgatggacctacgttagataaccgaattatgagasaatgaataagtacstagaattagcccggaagggtagtgacsttccgatggcgaggattataaaagycggaccgggttaccgttgtatagatayccgaagaattgtggtaagttagtgaaagcgaaacctgcstagtatacctggtttcccgcgaaccctatatgagtaggtaatttacctaccaccttaccaggtccagacctgtgaccccggccaataccttttgattttgccaccaccgggggggttgtagtgcctttcccggagagtatccccccccggaatgscaaagatgaatgttgaataaccggmcatagtccgataaggttgtatgtctaaagggaacaccccagaccaagagtyaaggtcccaaaattattgttgagtgaaattaaggatgttttttttaaaaccatcaggaaataggcttagaaccgsccattttttgaagaccccgtaaccagacccctgattaattaaatttagaaaaaacccccgaaaatttaccggacctaaccaatatcccgaacccttgtcc

SEQ ID NO: 1603 - DNA, 736 bp, Aspergillus oryzae
gggggaaggcactttccgctatctattcatttgcaatactaatatgtcttctgagaactctcgtgtgccttcattcgccatggggaatcctgctgcggtgttcctcgctgctgaacaacctaacactatttccgtgcaaggcttcaagatcactacagaaaagcggccgatactaaaagctgaaccgattgaagacatgaccaaaagactgggaatcgcgccgccggaaacgatcttcggtgacaactttgtctcgattcaacatgaaaaaagccgctggggaatcaacttcaacgcgtttgacgccttggatcgcgtggacaaaactggcgcatcgatgctcaaagtcgcttactctaaagagtggcagggaagcagagaaaaaacacatgaaggcatcaaggaggttgtgaagccctttgactggtcctacaccacagactatacgggcaccgttcaggctggtggccggtcatttgaaccaacgacaaaatctatatccttagaattattaaaacggccggatcccatactctttttcgatgaggtcatactatacgaagacgaactcgctgataacggcatcactatgctatcctgcaaaattcgcgttatgccagccagactactgttattatcaagattcttcctacgacttgataatgttctgtttcggcttagagacacgagggtttatatcgactttgagaacaaagaagtgatcagagagttccag

SEQ ID NO: 1604 - DNA, 810 bp, Aspergillus oryzae
attatggcggggatgcaactcgcaggacgatggactacgtcatttccagttatattcccacgtttcaggtgctccgattttgccgggaaagacgtcgcatgtcattccgcgagcatgagccgaagatgctccttgtgtccgcgccagaaaagctcgatcgacaaacgttgaagacaaacgtcgagctcgaatccgtcagagaaggccttcagggtcatcaagtgtcctacacgatgcttgataggccctcgcgcgatgacgtattccgagagctccccgagcaccatctgctccatttctcatgccatggctactcaaacgctactgatccatcgaagagcgctttggagcttgcttgcacagctgaagatggagcaacctcgcagctcacagtaagggatctgtcactcattggtcacgaaaaagctcagattgcgtatctctctgcgtgctcgacagccgagaactcgtccgacgaactcctagacgaggtcatacatatcgccagtgcttttcagctcattgggttccctcatgtcgtcgggacactctgggaggtcagcgacagaactgccgttgaagtaagcagactcttttacgaacagctgggccggcagatgtgtaatggtgacgagtcaaacatcgcatgctgtctccacgaagctctccagaaataccggaaaagcaggaaagtttcaagaacgaatgatgtcctttcatgggccccatttatctacatgggtgcataatggaggccctcgttgcaatttcttgtcatcgcagactaatgtattattggctttttgtttt

SEQ ID NO: 1605 - DNA, 1158 bp, Aspergillus oryzae
  modified_base (330)..(330): n is a, c, g, or t
gggcggaaacgcctatctctgtccccacagaggagaattatccgagcgacctagactataccatcatgtctctcgcaggcggacaaaatgtcgtcgacgatgccattgccgctcggggaccaggtgaggtcctcggactcggtggtcaatgggccggccgggttcgacgccgagaaacaggcctatgaagtaacggccacagccaccagttcagtggacagtgatgaatatcctgagccgacaccagaagagcaaagcgcgctccgcaaagtcgcggacaacctgccgatcgtgtcatactcgctatgcctggttgaattcgcggagagncctcctacttcggtgctcagactgtcttctccaactttattgaatttcctctaccgaaaggcgggaatggtgcgggtgctccaccgcgtgtacgcaggagactgctggagggttgggaatgggcttgcaggcaagttccggattggtgttgctgttcgcctttctggcctatatacttccaattctgggaggatggtgggccgacgttcatgtcggtcggtacaaggccatttgtgtaggtgtcctgatctgcggtatcgcgcacttgatccagatctttggtgcccttccatctgtcctgcagaagggcacggcgcattcggcgctccattcatcatcagtctgctgaccctggcgcttggcgctgggatattcaagccaaacattgcaccgaccatcctggaccagcatcggaacaagaaggcctataacaaagtgctcaaatccggggagaaagtgattgtggaccccgaactgaccagtagccgcaccatgctgatcttctacggggtggtcaacgttggtgctttttatatgctcgctaccacgtacgcggagaagtttgtgggctactggcttgcgtttctgttggcggggattatctatttccttttgcccgtggtcctggcgttggcttacaagagaactcacaagcagccaccgagtggaagctccgatctgaacaacgccgtgaagatcatctctatggcactgcggcgcaacaagtttcgagtctggcgcaagaacttctttgacgcagcgcgaccgagcgtctggcgcgaggcatcagtggatggaccgacagctagtgatgactcgtcgacttgt

SEQ ID NO: 1606 - DNA, 277 bp, Aspergillus oryzae
ttatggcgggggagcagggctggattccgggttggtgttgaggggtggaaatatatacttatgatattcggtggaagaaaagggctatcggggctgggtctgggccgtcttcttaggttggtggataaggagggtggggttgtatatttggggtttggaatggctgtgtatacatattaatcaactgtgtattgatagatcgaacggtgttcattggaacatacaacgtacataggcgccacttcctgatagtaatgctagtatggctgcctgcgaa

SEQ ID NO: 1607 - DNA, 561 bp, Aspergillus oryzae
ttatggggggcgggataagaacatagtccacgcgaaaagctggagaggtggtgccgaaagagtgagccgaaagagcattgtacatacgggtacaattacgccgaggagccagtatgggaaaggcgtgccgacgacgcccggggcaagaatctccacttgcgtgaggaaggaagagcaaccacgcgaggagggaaaggaaaggcgagaagctctgccacgcgtaagggaggctactggtcaattggacaatttagatatgagcagaactccaggatcgagcaaccgggcaggtgacatgtccaaactctcggatcgtgacagwacccagtcccgtgaactcgccttggaacgcgcgcgatgacaaacccggcattacgggccgggcgagtagatgttcagattcaggagaaggataacctagcgtatgagcacgtcacagcaccggagatgcgcccaggggacgacaaaggaggctctattgaaggctacgtgcctcaagagttttaagagaggaaatggagcattctctagcatataccatcagaattctgacttctatag

SEQ ID NO: 1608 - DNA, 321 bp, Aspergillus oryzae
tatggsgggcactgctgtctgccgaagagtgtcaccccatcgcgaattgaaagcaacttccaggatttcattattcccgacgctgaattcgaagccctgaacaaacttgaccgtaaccagagatataacttccccttccgttggggaattgatgtctttggggaagtgggarctgaagaaactgagagacgggcggagggacatgctgcgamgagcagagggagcttagacattgagcatcgtgtacgagtgtgtttgctagaactctaaatatccattttttgggggtcgtctccatagcagaataaacagcatgaataa

SEQ ID NO: 1609 - DNA, 618 bp, Aspergillus oryzae
  modified_base (463)..(463): n is a, c, g, or t
ttatggcggggggaagaggctaccaaatgatcctgaaatccaaaagattgcccgacagaatatcagaagaagtcccgtgacaacgccgtaccccagttcaatggactaatgcgccaaacgccggattcaccagccccaacgtcaagccctggatgtcggtcaacccgaactacgctcgcggcatcaacgccgaggcccaggtcaacgaccccaactctacctacagctactgggcatccgtgctcggactgcgcaagaaatacgtggacatctttgtatatggaaactacgagctggtcgaccgcgatagcaggagatcttcgcgtatacccggcagtatgaagaccagaaggcgctggtgttggccaactggactgacggcacattggaatgggattcttcttcgaatggtgtgaaggcagttaaagatgtgttgctgaacacgtatgacagcgccagamcngtgaaaggagagattttctggttccaagtggtctcttcgtccatatgaggctgtggtgctgcttattgaggcctgattaggtctgccagtcctaaaacatccaaccatttaatataaatccatattcatggacttctgcaaataaagatacgagc

SEQ ID NO: 1610 - DNA, 188 bp, Aspergillus oryzae
attatggsggggggacaccttgggatgccgagaactgggagatcacggaagactttgcaaggaaatggcgattctttcttcgaggctgtcctgagattcttatttcgacaaacaaatggagagcccggaggggaaaacgccgctcctttggaaaagggtgtttgcgtaatcaatgaggtatagaaagg

SEQ ID NO: 1611 - DNA, 586 bp, Aspergillus oryzae
tcgaagatgtagcmggtgttgagtacttggacgccagcgacatcatcagtggtcacttgcggtaccaattcctggtcggacatatcctcagcaggatcgggctggagagtattgatgtgcgtaaggtggaacgcagaggaggctgtactggccgccaaggatcgagagacaagaacagagaacggatccgatatgagcgccgagcaggtattcagggcagtatactcggcacatcagaagttggagagcggcgagctgaaagatgaggaaaatcgcttgcagaagcaggtcgaagagagatatcatgagcgtctgcatttgcgtcacaacgagtaggggcgccgggatcagcaatcaataactgatatggaaaaggaatataagggatgagattgaacaaataatgttctcatgtcggttaaacaaagtgatttttaaagtgagcgcaaggaacaaagcagagattctcagtcgcgtacgttatagatcatcagacatcaatggatgcttcatcctgggcaaagttactttatctttccaccatctactgttgtgataacatcacgattacattgcatgtttacat

SEQ ID NO: 1612 - DNA, 377 bp, Aspergillus oryzae
atggcggggatgcaagtcacgcgggggcattggcatacggtgtcggcgtcgaggtcagcgcttagctgatccacatattttaacgtacatgagattttctttcctatctatcttctactattaccacttctttctttttctctcttgttttgttgtacaacttggacataccttttcttggcgctgcgtcataacaggttttttatccactacgaagcgtcggcccgagtgacactagagccggaaaagtttcgtttcggttgtcctgttgacctctcctattgtgtcgatacatgcgccctgtagcccttggttagttatgccaaaaacgtacttgtgtttagtgcatctgaaatactatgttgaacctactctgc

SEQ ID NO: 1613 - DNA, 1051 bp, Aspergillus oryzae
attatggggggggacgctctctgactttcgcgctagagaaggacatggaaaaaatgttcctggaccttgctattcagtgcaaagctgtagtctgctgccgtgtttctcctctacagaaggccctggtagtcaaacttgtgaagcgtcacctcaaatccttgcttctcgctatcggtgacggtgcgaacgacgtgtccatgattcaggccgcacatgttggtgttggtattagtggtcttgaaggtctccaagccgctcggtccgccgatgtgtctatcgctcagttccgttatctccgcaaacttctccttgtccatgggacttggagttaccacagaatcagtcgtgtcattctgtattctttctacaagaatatcgccctttacatgacacagttctggtactctttccaaaatgctttttccggtgaagttatctatgagtcgtggaccctgtccttctacaacgtctttttcaccgtgcttcctccattcgcgatgggcatctgtgatcagttcatttctgctcgattattggaccggtatcctcagctgtaccaacttgggcagaagggaatgttcttcaaaaggcacagtttctggtcatggatcttaaatggtttctaccattccttgctactatacctcgtctcggagttgattttcctgtgggaccttccgcaagcagatggcaaggttgctggccactgggtatggggatctgccctgtacacggcagtyctcgccacggtccttggaaaagcggcactgatcactaacatttggaccaaatacacattcatcgcgatccccggatcaatggtgatctggctagcgtttcttccagcatatggttatgccgcacccgctatcggtttctccacggagtactacggcacaattccccatctcttcaaatcgcctatcttctatctcatggctatcgtcctcccatgtgtctgtcttcttcgggactacgcctggaaatacgccaagcggatgtactacccgcaacattaccaccacgtccaagagatacagaagtataatgt

SEQ ID NO: 1614 - DNA, 592 bp, Aspergillus oryzae
ggcattatgggggggacaatctcgggtgcagcttcgaaggtttttactacatctgcttcaaccaggtggaaggtaccgtgactggaatatacttccatgcaaagagcgagaagtaccagcagctggagctcaaacacgttccggatcacggctgcacccctgctattgaatttcgttgataccaacttctatggcgcgggacaacgkkctggtcatcaagtccctcggcctttaccttctacttcttttttttttaattgcctctactgcctcctcctaattctctccaccagttcctgcctgtgataaaacacacggtgtggtgtcccccaaagcacaggaatgcttattttctacccttccgctccctacatcagacacttgattcatggttttacgatggctgttttcttaaattggcgtcctcgttggttctagggttctaacatcttgtctttattccttctatcttcttggtcctcttttgtcttttatcctcgatccacattggggccattgtgtgcgaataggtagcgttatctgagggatctcggttcaacacgtttgggctattttcacatttcattcattt

SEQ ID NO: 1615 - DNA, 1096 bp, Aspergillus oryzae
  modified_base (2)..(2): n is a, c, g, or t
  modified_base (99)..(99): n is a, c, g, or t
  modified_base (101)..(101): n is a, c, g, or t
tncaaagtatataaagaaattattatggataattagctatatattaaagaataactagtaaatctagtttctaagagaaatcgaataataaacgaaagnanttgaaatatcttagtaactttaggaaaagaaatcaaacgagattgttatttggtgcaaactaaataacaagagcctattaacaaaacttgttaaagtaaaatggattaaaatctgtttgaatataggggaaccttcctctaaggctaaatatgatatataagcgatagtgaaaagtaccgtgagtaaaatttgaaatagtagttttataagcagctcgagtgaaaatttaaataagtaataagagtgtaccttttgcataatgggtcagcaagttaattttagatgcaagcratgatttcgtgcgctttgcatgdgaactagcttagataaaccaattatgagaaaatgaataagtatctagaattagacccgaagctagtgatcttaccatggtcaggattataaaagtccgaacgggttatcgttgtatagatatccgaagaattgtggtaagttagtgaaagacaaaactgactagtatagctggttttccgcgaaacctatatgagtaggtaatttaactaacatcttagcaggtacagaactgtgatctcggacaatatcttttgattttgtcaacatcggggggttgtagtgactttaccggagagtatttgcactcggaatggcaaagatgaatgttgaataatcggacatagtgcgataaggttgtatgtctaaagggaaacagcccagaacaagagtaaaggttccaaaattattgttgagtgaaattaaggatgttttttttaaaaacaatcaggaaataggcttagaagcggccattttttgaagacctcgtaacagagcactgattaattaaatttagaaaaaacaccgaaaaatttaacggatctaaacaatataccgaaaccttgtacacatatttataatattaatattgtatatgtggggtagcggaacattggataaatattaatttttttttcttctaagaagtaataagtatggattattattaaaatatttattt

SEQ ID NO: 1616 - DNA, 317 bp, Aspergillus oryzae
  modified_base (263)..(263): n is a, c, g, or t
attatggcgggcagagaacagacccaagcctttttacagactcggaacctgtacttcgcgctcacgtcgacactgtatcgatatgttacgacagagtcctcgatgtgccaagccgatgtcggtatagatcacaaaaaactggctccatccctggggtctcgcatgcctgactttagtacgagagcacaagtgccgcaagtatgacaagattgtcgaatggcgccgacaagcacgcactaccggatgatgaccccgagcctgantctgagactgtttggttatcaggcccaccacagtagactagaatcggagaagtg

SEQ ID NO: 1617 - DNA, 813 bp, Aspergillus oryzae
  modified_base (12)..(12): n is a, c, g, or t
  modified_base (219)..(220): n is a, c, g, or t
ggcattatgggngggggataacaatcttcttgagattttcgaggctgcacatagcgtggttctcgcagtgtttgcgattccagggaacgcacaggtagcagccaaacatcttccattttacattgacaatctttttgctgtattcccagacaatctgtccatccgccagttccgcctcgcttttagaaccgtcctccaagtcactgctcctccgtcgbnnattgcaaacacggaacgtcacctgccctctaytctgcttgaagtccttcacgaccggscactgcacgcctcgaacaagatcctaccgcaacctgccgaccatggagctggatcagaaaccagcaagacgccaccdctctcggagcaagctgctctcacactttctttaatcgatggtctgagcttccttcgggtggaagacttagaagaatggacatgcccttaacggcccaacttatcaatactattcgcgagtctgagatgcgtaccgcttgcgttgaacggttctgggaggccttgagtagtggcgagatggatgtcgagcgggcttgttactgcgtacctggtggagacactaaaggtgggcgtgaactcgttctctttggtaacgaacccggtgctgctgaatcggacccccatggcccttatatgagcggtgcagttggaggagttgcaccggaaagagagagtaaactctaagtttcttggtttgtacatattatgggggtttctttagatctagtcgttgtagcgcatggcgttcggtgtaacatttgataccatcgcagttttatacagctgtctctaaggcag

SEQ ID NO: 1618 - DNA, 560 bp, Aspergillus oryzae
  modified_base (8)..(8): n is a, c, g, or t
tatggsgnggaacacaaacctgctgaagaagccaagtctggtgggatgctccatctcgcaacacgatggactcaaagagtcaaccgcggagaatggcatcgcgcaacctagtgcaggcgataaacgagagcatgacccgacttctaccacccccaacgcggctaaggctaatgttgagaactcggcggaacctacaaacaaaaagcggaggactactggaacgcggactcgagatggcaatactacagcccctgctacgaatggggggaaaccaaaggcaagttgttctaaaaagacgaaggatgatgtgaagaaggtgattcctacggatggtattggtagtcgaacacgcagccggactaaggcaatttcctaagctcaggcggtatcgcgcgaacatacgcatcctgtaaagcgtatgctcttcactctatattccttttgatctagttgtctagcaggtcctatgtatcgcaaagctcccacgttcgctagctaggttctatttctccggatcttgtgaagctctagcttgtgaatgaacccattttctctattgc

SEQ ID NO: 1619 - DNA, 677 bp, Aspergillus oryzae
  modified_base (8)..(8): n is a, c, g, or t
  modified_base (335)..(335): n is a, c, g, or t
  modified_base (417)..(417): n is a, c, g, or t
tatggcgnggacacaaacaactttccattctcggtttcctcaccaccaaaaccatataatacacaaccaacacccaataccataacaataadmtaattataatacctttaattataattaaccccaacccaaaccaaaaaaccaaaaatgtccacaaaaaccaccatcctaatctacacgggctcccccctcgactaccccgaataccgccacacagccttacacttcaccttcgcgaccggcacaaccagcacgatgcacgtagtcggcacgcaaggtctcttcatcttccaagaagacgtggatctcgatccgcacgagtttgggagcgagtngtccaagacggtacctgttggggagatcgatgggggcgtgagcgccgagacgattcggcgggcggtgtcggcgacgcggtgnaggaatggcagggaggatttggattggaattgtcagaattgggtgggggatgcgttgaggatgttggttgagaagggggttttgtcggcggaggtgagggagagggcggtggatgggatggtggagggatgtttggaggcgagggatcaataaacttattttttcatttatttattgggttggttggatgaatgtatatatttatcttcttttgctagtatggattatttggttttatagagctaaatttattctcatgg

SEQ ID NO: 1620 - DNA, 1067 bp, Aspergillus oryzae
  modified_base (9)..(9): n is a, c, g, or t
  modified_base (11)..(11): n is a, c, g, or t
ttatggcgngnggaagacaaatcgaaaaaaagaaacatcaactttcacgcaaatctacaaagatggctccatctataaccgagactgtctcactccgctcggcaccaaagacctctcttagaaccgatgctggtcacaacaaggagaatggggtaggataccgtgaaacatatcagcatgacaatgagatcaaaggaaccgcaaaacagccaccggcatctttcccgaactatctccccgtctgggataacgaaacagagaaatacccaccacttcaaccatttgagcactatgagcatggaaaggatgccgacccagctttcccagatctcttccctgagggcaagggcgaggtggaggagcttaccccgaccattggtagcgaagttcacggtatccaactgagtcagttgaccgataagggtaaagaccagctggctttgtacgtcgcccaaaggaaagttgtcgctttccgagaccaggatttcgctcagctccctatcgagaaagcccttgagtttggtggttatttcggtagacaccacattcatcagagctctggggcacctaagggcttccccgagatccacctcgttcaccgtggagcagacgataggagtggagctgaattcctggaaacccacaccaactcgctcacttggcactctgatgttaccttcgagaaacagcctcctgggactacctttctgtacctgttggatggcccgacaagcggtggagatactctgttctgtaacatggcccaggcttacagacggttgtcacccgagttccgcaagcgattgcatggtctgaaggctgtacactctggtgtcgagcaggttaacaacagtctgaacaagggtggtattgcacgacgcgacccaattaccaccgagcacccggttgtgaggacacatcccgtcactggggagaaagctctctacgtgaacccgcaatttacccgatacatcgttggatacaagaaagaagagtccgacttccttctcaaattcttgtatgaacatattgccttgtcccaagacattcagactcgagtaaggtgg

SEQ ID NO: 1621 - DNA, 501 bp, Aspergillus oryzae
  modified_base (13)..(13): n is a, c, g, or t
  modified_base (406)..(406): n is a, c, g, or t
  modified_base (469)..(469): n is a, c, g, or t
ggcattatggsgnggtgtattttcaggtccgggcgcagttgcctaaggtcgagcctggcaacaagacgcagcagacgcggaacgacctcatcgcgggtacgactctggtggtacggcgggtacgattctcaacacgccgatggatgtggtgaagtcgcggattcagaatagccctaaggtggcgggacagacacccaagtataactgggcttggccggctgtgggaacggtcatgaaggaggagggattcggggcgctgtacaagggtttcattcctaaggtgcttcggttgggtcctggtggtggtattttgttggttgtgtttacgggagtaatggatttcttccgtactatgaggggtgagaatgtctgattgagtgcatttgcttctgctttcttgtctgtncttcttttgcttgcaaatagagaaagacctagctttttgcttagatggaggtgtaaaagagtntatatatgttctttatgtcaatgggtcttttg

SEQ ID NO: 1622 - DNA, 940 bp, Aspergillus oryzae
  modified_base (9)..(9): n is a, c, g, or t
ggcgcacgnacagcgaacatcatgccaggagtaccatcaggaagagcgtgtgaaggctgtcgtcgccagaagaagaagtgtgatgagaaacaaccaacctgtggacgatgtctccgattaaacataccaystgttggatcgggacagcggagattcaagttccagcaggagtataccatcccgataatggtgaagaaaggaaagatcaagggacagtcgcccaaggatcagacaagctctagcagcgacgaggagcgtacagaagtgtcccgggtgtccccacacccaagcagtgccctgacggtattaacccaagcgtttgtccaagctatacacccgtcaacggacgtccgatggaatcttgcgtggatgtatggaggttttctgcgggatgtgcctgctcgactgggcacaaacgaggccctggacaccgccgcggatgcagtgatctgtatgcatagggagttctgtacctcccggaaggtgtctgtaaaggggctcagtaagtatggtcgtgcttaaaataccctccatacctatctggatgacccggtcaaggcggccagcaccgacacgctatgcgcggtcacgatactcttgctctgccagggtttcctccccggtcagggtaaagtgcagtcgggccatgcagagggggctgcacagattctgaaggcacggaagaatttccgaccccgagatgacttcgaggcaaagctactgctgacgctgcgtggtcctgtgctcttcgaaggtctattcgtcagcagcattgaccttagcggcgaggagtatgaaagtctggttgaaagcgaccttgatgcgggcacaccagacgggcatatgatgcgttgtcttgcccgagtgccagggatccgagaccgcatcgcatcgacgatgccgggtgatgctgagtttgaatcactacgacacgaaactc

SEQ ID NO: 1623 - DNA, 313 bp, Aspergillus oryzae
taaaagacgagaaaggaaaaaaagcctcacctccatcttcaattaggtccttctccacagctgtcaggcgaacagtcgatcattttcccaatcttgggtggacgataagacgcggtgaacggacacttcaccatttgattgggtggggaaagtaaaatccatccattcgtacagcactcgatgctgaaaattgtgactcttacaaggaccagagtggtgtctacagttcatagcttcatattattttctccctaaataattatccacgccaaattatcgttgtcagagggaataacagctgcattgcaacgcc

SEQ ID NO: 1624 - DNA, 885 bp, Aspergillus oryzae
  modified_base (8)..(8): n is a, c, g, or t
tatggsgngggggaaggaagactttctccatcaacagaacgtttgtcacgatctgttgattatcttttatctctatttgatctctacgtgttatcattcaaaccgtagagtcttatttctttcaaaatgcctatctacaacggtgatgcacttggccgcgccatgaaggctgagatcgaggaccacaccaaggccctcggagttctggagaaggattataccaccagagatggtcttgatgttgacaccttgctcgattcggacaagcacggagcattgacttacaatgacttcctgatcttgcctggttacatcggcttccctgcgtcagatgtcactttggacaccccagtcaccaagcgtgtctccctgaaggcccctctcctctcctctcctatggataccgtcaccgaacacaacatggcgatccacatgghtcttctgggtggtcttggtataattcaccacaactgctctcccgaggaccaggcggagatggtgaggaaggtgaagcgttatgagaacggcttcatcttggaccccgttgttctttctcctaaggctactgtcggagaagccaaggagctgaagagcaagtggggatttggtggcttccctgtaactgaaagtggaaaccttcggtctaaactcgttggaatcgtcacctcccgggacattcagtttcaccccaacctcgaggacccagtcactgccatcatgtccactgaccttgtcaccgcccctgccggtaccactctggccgaggccaacgaggtcctccgttcctcgaagaagggaaagctgcctatcgtggacaatgatggtaacctggtctctttgctgtctcgcagcgatttgacgaagaaccttcactaccctcttgcg

SEQ ID NO: 1625 - DNA, 318 bp, Aspergillus oryzae
  modified_base (8)..(8): n is a, c, g, or t
tatggcgnggagmgggatgctgaagggaagatsaaggaggctggtggtgtcgtwgagtmggttgcttaaatgtggatwacggggctatcttaagaaggtcaaggtgcwacgctgamtctggtcggcgttattgaggctcggtttctttctgaagggaataaagactcgaacatgggagcggcggatcggccatarggatccgtgtatttacaaaacaaagggtttttgtttrtgatragcatarcatagcctccggacacccttacgatctcactatctcacaaaataccataaaggaggattccttttcgctttttc

SEQ ID NO: 1626 - DNA, 723 bp, Aspergillus oryzae
  modified_base (25)..(25): n is a, c, g, or t
accttttatgggtattgcgtatgtngttgttggcggtctatgcgtccttcttggtgcgcttttcaccatcgctcacctagtgcggccaaggaagcttggagatcacacatacttgacctggaataacgagcaggaaagtagcgccatagcaaccggtagagataataggtttgggccgaatacccattaaatgatacgctctttccaaccacccccaccgtgcgtttattgtacaccattgaatgttcatcaaagttggccaatttgcatggttccatctatggttcctgccaaatcatgcatcataagttcgaggcgtctgcggctggagttgtggtgtctgttagttttaagcggcccttctcatgcttaactgttagtatgacgttttttgttgttacgctagtgtcatctcgattaggtgcgtcctcaggtgtaagaggccacctgtttacgaagactaatcttaacgacggttgtcaccagattgtttttggagtttcccagataggttgtttacaccccttgttaacattcccgttacgttatggcattcttggattcaaatcatgcttctctttcggcagcatcgctggttatattcaagcggtaagctggttctggcgaagttcaatgaagccaccaatgttggaaaaacaacatgtcgcattttcccactttacatattttgatccttgtgatagccaatctacaaattcaatg

SEQ ID NO: 1627 - DNA, 940 bp, Aspergillus oryzae
ggcgactaatattttcctgactggtcttatcttcttcgttttcttcgtggctgtggtgatgatcctcgtctcgcttttcaaggctggctgtgaggtccttgccaagaacggcaagatgaaaaccgataagtttcaggatttccgtaacggttggaagatcgtcgcccgcggtattttgttccgacttactttaatcggtttccctcagatgaccgtcctctgtttgtgggaattcacccagcatgactctgcagctgaggttgtgttggctgtgatcatgttcttttctattctcgcggctctgggatgggctgccttcaaggtcatccttctggcaaaacgttccatcaccatgcataaaaaccctgcatacatcctctactcggaccctacatgtctgaacaaatggggattcttgtatgtgcaataccgggcgactgcatactactttgtcattccagttctgggctacatccttgttaaaggcatgtttattggtctgagtcaagaagcgccagttgtgatgactattgccttggttatccttgaggctggcccsttgattgccgtcagtgttctgcggccatggatggacaagaagaccaacatctataatatctccatcgctgccgtccccctcctcaacgtcatcttccttctcttcttctccgaagtttttaaccaacctggcctggtaacaggtgtcatgggcgtcgtcttcttcgtgatcaatgcggttttcgcgctgattcttttacttctggtgctgaccgcttctatctatgcaattgtctcgaagaacccggatatgcggtaccagcccatgagggatgatcgcggttctttcatcaagtctcagggccagctgacgactgagttggatgccctgggtgccgctgctcgtggcgatgttaagactggagcctacaagtctagtcca

SEQ ID NO: 1628 - DNA, 456 bp, Aspergillus oryzae
aaagagcaaggacattaagattgatagcattgacacctctgttggtggtcatcgaatcctgaccgacgcttctcttaccttggcgtacggtcgacggtacggtcttgttggtcagaacggtataggaaagtccactcttctgcgggccttgagccgtagagaagtcgctatcccaagccatatatcgattttgcacgttgaacaggaaatcatgggtgacgacactcctgctctgcaagcggttctagacgcagatgtatggcgaaagcgtcttctcgcagaccaagatagaattacgaaacagttggctgcgctagaagccgaacgatcttcgatggcagacacctctacagatgctgccaggcttgatcacgaaagggagggcctagacataaccttaagtgatatccattccaaactttcagaaatggaatcggacaaggccgaatcgcgcgc

SEQ ID NO: 1629 - DNA, 861 bp, Aspergillus oryzae
cgctgtgactaccttctctaaacattcgaggtttctcatctcttccattataaccggaacaatgacatcgtggcttcagatccctaagaactcgccattctcgctggcgaatattccttttggaattatctcttcaactaagagtacctctcgtgtggctgcgattgctatcggtgaatatgcgctgaacctgagcacttttgcctcgtcggggggcttcgcacaactgcctgacttccaaccacatctcagcgtttttagccagcccacctcbvvacgcattcgctgctctaggtcgccctgtgcaccgccaagtccgcgagtatatccagaatgtcttccgcgcggacaccccatttcctcaggtcctcaaggataatgcctcgttgcagaaggaggccctcttgccgttgtcagaggtgaccaaccatgtgccaatgcaaatcggcgactacactgatttctacgccggcctgaaccacgcttacaatgtcggtgtactgttccgtggaccagagaatgccttgcaacccaactataagcatctgcccgtcgcataccamagtcgtgcctcgtctgtvgtgccttcgggcacacctatccaccgtcccaatggccagatcctggcaaacccagccgctacacctaagctccccaccttttccccatgcaagaaattggacatcgaactggaactggctgcattcgtcagcaagcccaacgatctcggaaagcccattaacatcaatgaagccgaagatcatatctttggattggtgctcatgaacgactggtcggcccgtgacattcaagcctgggaatacattcctcttgggccattcaacgcaaagaactttgcca

SEQ ID NO: 1630 - DNA, 661 bp, Aspergillus oryzae
  modified_base (195)..(195): n is a, c, g, or t
gaagctgaagaagctcgatggactgaaggttggcttcctggcttcggttgagacccctgcctccatcgaggcagcctctgagctcagcaagcagctttctgaggacggcgttgatgttgtcgtcgttgcggacgtctgtccgatggcgttgatcagacatactccggatcggatgccatccagttcgatgctgtnatcgtcgcgcccggcgctgagggtcttttctctactttctccttcactgcgcctagcaatgccacctcctcgtccactctgttcccggccggccggcccctgcagattgtcatcgatggattccgtttcggaaagcctgttggtgccgtcggcagcgccgctactgcgctcaagaacgccggtatccagacttctcgcgacggtgtgtacgtcgacaagtcggtgactagtggattcgtcgatggtatcaaggacggtcttcgcactttcaagttccttgaccgtttcaagctggaccattaagccggcgtgtactattagccagcggaggatttgtaaccatcggggcatcttttactcaacattgcccgatctgtgatttgttttgtggcgaggccactatttcttctatgtatatttgactagtaacatattcaataaacatctcgcagagtattataatcag

SEQ ID NO: 1631 - DNA, 260 bp, Aspergillus oryzae
  modified_base (7)..(7): n is a, c, g, or t
atggcgncttggttgatgactacctgaataacgagcttaaggttgatgagttcattacccaccgtgaaatctggacaacatcaacgctgccttcgagcagatgcaccacggtgactgtatccgctgcgtcgtggactgccgtgaataaattgttttgaaaagtgtttaatctgtatgctcgctcgatgatatcaatgtatgaataatgtatgattgaaagccatagtaagccaagaatgatagagcaattgcaacacaac

SEQ ID NO: 1632 - DNA, 409 bp, Aspergillus oryzae
gggactgactctttttgtctctctcttcttcttctttttatttttttctctcccttgagttgttgtgctttgcttgcgtgtgttttattctcctcgctctctttggtccctctctcgcttttgggattgagcagttttttgccgtactcgactccattcgaatccacctctcccttccacccgccaaagggttggtttcctgtggtctgcccgcctacactcactctcctctccccagacgggtaaaaaagggaaattaaaaataccagaaaaaagggaatataattttttttttctagttcccttacgaaaatttatttttaaaagaaggttttcaggaacaaaatcctccgagggagaggggagactaaagaagaataaaaactaagaaataaattccagccagggc

SEQ ID NO: 1633 - DNA, 475 bp, Aspergillus oryzae
  modified_base (37)..(37): n is a, c, g, or t
tatggcggggggaatgggagcttgcattggcgcgagnatatatctgtcaagcagagtctccagggacggcaagcctacaatgccatggtccagtcgcgggagaacatgaagccgctgttccgaaagtttgagaaggtggatgttgatgatagagtactggagcatgttgtcgagatcgtccacaacgcccagctgcggagatatgtagatgcaaatgatgcctatctacgattgagtattggaaaggcagcatggcccatcggtgtaacatggttggtatccacgaacgatcagctcgagagaagctccaccagagcgaccaacaggctcatattctaagtgatgagatcactcgcaagtatctgcaaagtattaaacgatgcttgagctttgcgcaaactcggtggcctccagacgatcagctgcagatcatgggctagaagtttgaagatattctgtagttagtgtacaatta

SEQ ID NO: 1634 - DNA, 692 bp, Aspergillus oryzae
attatggcggggactgtacctgtttttgtggggatacgcattgatatcaaccaggaaaataggatatcttagttgtcctacactgaaaactagctttaagcacccgcgaacgtcgaaagaagcatgggcaagcgcaagaagtcaagcagacaaccacaagggccaaagaagagagacaccattgcctacaactttcgcatgtcttttctgtaaccacgaaaattctattgtggtgaaactagacaagaagctggggctaggaaatttgtcctgtaagkgtgtggacagaggtttcaaaccggtattaattatctttctgctgctgtcgatgtatattcggattgggtagatgcttgtgatgcagtggccaaggatactgccaacagatacgaagatactaatgccggcggtctgcggtcaaatgagtatactgtgtcttctagtggacaagatgctgagtacgatgatgcagaycgtgcgggtgcatatgtggatgacgattgatacaagtwattctcagatattggttgttggcgtacaatataaaggtccagtagctttcctgtggtcactgtttctaagttatgaccgctgtatttgctttttcggactcgctgtyactcgataatcttggcgattagctggcttcgatcctagggatattggatacttgcaatggtatcattgtggta

SEQ ID NO: 1635 - DNA, 217 bp, Aspergillus oryzae
attatggcgggagcgtgttactttccttgtcaaggtcaaggaatacattgaggatcctcgccgcatgcttcttggctaggcgactgtgctctgctcattcaccaaatagctttgctaagtatgcttttactcacaacacctgccctatggcttagatgtttttattctgtagattaaccatttagtgtgcaagatatatattatcagttccatgtta

SEQ ID NO: 1636 - DNA, 1060 bp, Aspergillus oryzae
ccattatggcgggacgaagaatgaacccaagttcaccccgtcgatggaagtatgggggacaatcaccaatctaaccgactttccggatggggttgcagtgctcatgacgtttgtcggtgtgatctggaccatgtctgggtacgattctccgttccatttgagcgaggaatgttccaacgcaaacatcgcctctccgcgggccatcgtgatgacctcgggcgtcgggggcttgatgggctggttcttgcagcttgtagtcgcttacaccgtccttgatatcgaggcgataatagactctgatctcgggcagccttgggcatcatacttgctgcaggtgatgcctcaaaaagccgccctgggaatactcgctttaactattatgtgggttctcgatgggccagggatgcatggtagccgcctcgcgagtaacgtacgcctatgcccgcgacgactgctttcctttatcaaggatctggacaaaggtagacagtcgcaccaaaacacccgtgaacgctgtcatcataaatgccattctcgggatccttatgtgcctcttgatcctcgccggggatgtagcgatcggcgctctattctctattggcgccattgccagttcgttgcttttgcgatccctatttgcatccgggtgttcttcgttggaaaccgtttccgacggggaccctggcacttggggccatttggtccctacattggagcaacgggtgtkctctttgtgctgctgatggtgccaattctgtgccttcccagtgtgacaggggatgacctgacaccagacctgatgaattggacgtgtcttgtctggggcgctccgatgctagcggtaaccatctggtgggtggtagatgcccacaagtggttcaagggtccaaaggtcaatgtggagcatgccatccaccccgtggaggaggaggagcccgtcgttgttgatgtggggttcgatggcggcgaagaagaattggaccgaagtcagggctgaggccatgccctggggggtacatttacacaactatagatctaatttcgctttctgatctttccg

SEQ ID NO: 1637 - DNA, 321 bp, Aspergillus oryzae
attatggcgggggggtactatgtcgcaccagtgattgtgtccaatgaagtggctatcctgggtgttggaaaatccaagacggtaccaatcttcgatgaggcgggtcaggttaccaagggtgaattggtaaatttcagctggagtgcagatcaccgagtcgtggacggcgcgactatggctcggatggccaataaagtccgggaatgtatcgaatccccagagttgatgcttctaaagctacggtagttcttgtatatagatagaagttgttattcagaccgttaaataaactactagtaggcttacgtgacctgacacacc

SEQ ID NO: 1638 - DNA, 298 bp, Aspergillus oryzae
gggaggctcbtcgtcgcattgagttgatctccggcaagaaggctgagttcgctcaggtcgatgtcaccgacgaggcggctttcgacaaggttttcgaggcccaccccgacattgacagtgttattcacttcgctgccctcaaggccgtcggcgagtctggtgagaagcctctggactactactatgtcaacgtttacggaactctcaacctcctgcgttccatggtccgccacaatgtctacaacattgtcttttccagctcggccaccgtctatggtgatgccacccgctttcccaa

SEQ ID NO: 1639 - DNA, 376 bp, Aspergillus oryzae
  modified_base (16)..(16): n is a, c, g, or t
  modified_base (57)..(57): n is a, c, g, or t
  modified_base (66)..(66): n is a, c, g, or t
  modified_base (193)..(193): n is a, c, g, or t
  modified_base (270)..(270): n is a, c, g, or t
ggacattatggggggnaaaagarcggcaagtaaggggtcgttaagatcaagrccgangaggaaganaggcagrgattgaaggagtcagacggaattggcagacgggcccgaagttgtaggctcggtggggaaggrtagggggaacggatacgtcaaggacgaggacacaaaggaaccgaagttcgtacggacnccctgaaaaaaaggcgcccgtcacggcttgaatatagagaatamgggaaacagtcgccttgacagctaggtggctancgcctgcaaacacgactagaaaagattagarracagcaaagccatcacgtggtcgatattcaaggtaccagmaccaggactaccggcatgtataactccaacaatg

SEQ ID NO: 1640 - DNA, 374 bp, Aspergillus oryzae
  modified_base (148)..(148): n is a, c, g, or t
cggcattatggcgggccaacatctcctctttcgagattgacgaccaggctcatrscaacctccgcgaatatgcccaacgccaacagccattgactgggctaaggctgaaggcacgcttgttagaattctgctcgtcgtaatgcaatgnagaacgcctcgaagaatgctggtgagatgatcaacaagtgccagatatctgtacaaccgtcagcataaagccgccattaccggtgaactggttgaaattatcactggtgccaccrccagtcccgacatgtagaagctttcatgaggcttcagtaggaaggagttgacatgtgtctcgacttactctaaaatcacctagctagatttttatcagcctgtaaatcagt

SEQ ID NO: 1641 - DNA, 222 bp, Aspergillus oryzae
  modified_base (157)..(157): n is a, c, g, or t
  modified_base (191)..(191): n is a, c, g, or t
ggcattatggcgggggttcgggcgatgggacagcttgattgatacactgcggttggcgtcctggctgttatgggagcttgatcttggggtggccacgttacaaactccttcctgttgtctttcctcattactgtaattatwatcattattgtgattnatattctcctacaattcatgtcttctcggcctknctacagaatacagcttgaagttccttatttg

SEQ ID NO: 1642 - DNA, 501 bp, Aspergillus oryzae
  modified_base (228)..(228): n is a, c, g, or t
  modified_base (250)..(250): n is a, c, g, or t
  modified_base (338)..(338): n is a, c, g, or t
  modified_base (366)..(366): n is a, c, g, or t
gcattatggggggtggagtcargcgagcgggggctgaaaacaagraagcagktgggaataaagtaaaaatgtatacgtcatccgtaatctcaaattcgtgacaagagatagggcatcaaggtatatcacctataggaagaattktgttcactatttgtaataaacagaaggtcataccttctrctagcttgaggaatggtaaacgagtawtaagcatcaagctatgantatgatttcagggtatagccgnagkttcccttatatttgctcggattattttaatcatatactactcgagttgcttatacattatcggcaatgacatttttacgaactgntccataaagatcgagatatggtagtttnctatttttaaccagaccaagctcggakgttagcawgagtgctaaaggtgcatccgacaaaaacgcacgatcgtgcgcatcacttctctcgcgtttatggattggggcacsagataggmaatcaggaactccacac

SEQ ID NO: 1643 - DNA, 407 bp, Aspergillus oryzae
cggcattatggcggggatcatgcggatgggattaggattgctgtgcggagtggaaacgccggtgttcgtaccggcgcgtgtggcgatgacggcgacgacggatgagcttggtggtgctggggggattctggcggtgccagcgttacagaggttgaggaggcagtggattacgttgaatcgggcatatgtggcgaaagtggccgggggagataagacaagtctgggggcggatcaggttggggatgcgtttgtgaggttcttgaatgcggattttgcaggagagggggttgcttgatgagttgtctttactggatttgcatgaagcgagaaaagtctggatactggtgtttatgagcgtgtggatagagtatagatagggttcgattgctgtgttatggtttacgagt

SEQ ID NO: 1644 - DNA, 509 bp, Aspergillus oryzae
attatggcgggggggcagtactatactggcattgaggttttccaccacatgcactgcttgaatttgatacgccagtatacctacaaagactactaccaccgcccagagaacagacccaagccttttactgactcggaacctgtacttcgcgctcacgtcgaccactgtatcgatatgttacgacaggtcctgatgtgccaagccgatgtcggtatagtcacatataactgggtccatccctggggtctgtatcctgactttagtacggagcacaagtgccgcaagtttgacaagattgttgaatgggctgacaagcacgcactaccggatgatgaccccgagcctgattctgagactgtttggttatcaggcccaccacagtagattagaatcggagaagtggcgctttcatccacctatgggcgaggtaaaggcagtaggagtatcactgtaaataattgtagagtttactgaggctgttagaggccaggggtagcatgtaactaaga

SEQ ID NO: 1645 - DNA, 903 bp, Aspergillus oryzae
attatggcgggggtcatctctcatattattttactcgcaaaccaccatcatggctcggaacccaagggaacagtgggagagactccaggttatcctacagaaccgcggaagtcgtggaggctttggcttcggcggcttcccctccggtgggggtcgtggaggcttggggctgtctggagctctgatcttgctcggtgttggtggatgggctatatcaaattccctctttaacgtcgacggtggtcaccgtgcaatcaagtactcgagaataggtggtgttcagaaagagatctacagtgaaggtactcatatcaggattccatggatcgaaacgccggttatctatgacgtgcgcgcaaagccgcgtaacatcgcttccctcactggtaccaaggacttgcagatggtgaacatcacctgccgtgttctgtcgaggccccgggtggatgctcttccacagatctaccgtaccctcggacaggacttcgatgagcgcgtcctcccttcgattatcaacgaggtcctgaagagcgtggttgcgcaattcaacgctagtcagcttatcacccagcgtgagaatgtcgccaggatggttcgggatascctcgctcgccgagccgctcgcttcaacattgctttggacgatgtgtcgcttacgcacctgaccttctcccctgaattcaccgccgctgtcgaagccaagcaagtggcccagcaggaagcccagcgtgctgctttcctggtcgacaaggcccgccaagagaagcaagcyttcattgtccgcccccaaggtgaggcccgtcccgccgaactcattggtgatgccatcaagaagagcaagattaacatcgagctgcgtaagaccgagaatscccgtaaaattgcccagattctgcaggagaa

SEQ ID NO: 1646 - DNA, 1147 bp, Aspergillus oryzae
  modified_base (284)..(285): n is a, c, g, or t
attatggcgggggtcaagggtaattcaaaattttactttgggtcaaaagctttgtgtgtgaaagcgaacaaaatgtcggcatctagttcggtcagtaatgacagccagtagatatgccccgtaaccgtcgtgcaaatrggtcagccaatagctctgagaagccagtatcgaagtctttgtctccgacagagactcatatggagttcggtggtccggctggagtgacagcgttgatgttgggatttcctttacttatgtactacatgtacattggtgcgacgttnnmcgatggtcatcttccaacaccgcagatggggagaccatcagtgatttcctgtatcatcttttcgaccttgcgtacacccacgcgttccctcatcgccgagcatggatcatctactggaccttcctgatcctacaagggatcggatacatttatctgcccggagtatacggtaaaggaaaatgtttgcctcatctgaacgggaagcagctcgattactattgttcggcggtatcagcctggtatataactattgctggctcgttggccttgcactttaccggggtttttcgtctggatacgttgatcaacgaattcggctcgattatgtcggtggctatctgttccgggttcctggtctccataatcgcctatgtgtcggcattggccagaggggcgcaacatcgcacgaccggctcacatatctatgacttcttcatgggtgccgaactgaaccctcggctgttcaaatggcttgacatgaagatgtttttcgaagtccgaatcccctggtacatcctgttcctcctgtcactggcaacagcgttgaagcaatgggaggaattgggctatgtttcaggcgaggtgtgtttcgtgttgatggcacacttcctgtacgccaacgcgtgcgccaagggcgaagaattgattatcaccagttgggatatgtattacgagaaatggggctttatgctaatttcctggaacctcgccggggtgccaatgaactactgtcactacaccctgtacctcgcgtcgcacgacccatcaacctatcgttggaatagagttgcgctggctgcactgttcgcgatgtatctctctgcttactgggtgtgggacaatgcaacagccagaggacat

SEQ ID NO: 1647 - DNA, 670 bp, Aspergillus oryzae
  modified_base (14)..(14): n is a, c, g, or t
  modified_base (580)..(580): n is a, c, g, or t
tcggcattatgggnggggacagcattctcaaaatgggtgtcactaagacgcttatcgcagccggtgacgtgtcaacttccccaagaagaatgaaactgtcgccatgcactataggggatatctgtacgaccctagccagcctgataacaagggaaaacagtttgataactcctatgaccggggtcagcccttgaaggtggctattggcacaggacgtgttattaaaggttgggatgagggggtccctcagatgagcctgggagagaaggccctgttgaccatcactccgtaagtcactatcggtctataatgtcatgcattctcttatcgaagcttgcttactaaccatcgacacagagactacggttatggagcacaggggttccccaatttgatccccgccaactctaccctcctcttcgaggtccagctcgtggctatcaacaacaaggagatgccaaagccctaatcgaatgcctaacctcaccaaagacctagacatataaggcaattgaaaatgatatatcattgttttctcgtagtcgagggttgcagggtaggatggaaagacaagcgagancaaatatcaagctattgtatgaaaatcagctttccagaggagcttcattgaacaaaaacagtagatctccgaatagcaacgctccaccga

SEQ ID NO: 1648 - DNA, 391 bp, Aspergillus oryzae
gcattatggsgggggacacggaagagttcwttgatggaataacwcatagaactctttgacatatgtgcttacttaggtgttacaacattctctcggatgggatcggcagcatgaacgtcgaatatgagggatstggggctgcgcgtactatcagakcgtctcggccacamgtcgttcacaaaaccaycatgcgacgagagcgagatgcatatacmaacttgtatcctacttgaggtacaagcatacagatcggctagaggatatggatgaaggagmattgttwaatgagcgtttagagctggccaccacatgytctcgctctatcttacttgtttctgagyacgaggcgtttttcaataaagggcttctaacatacaattttttttagggt

SEQ ID NO: 1649 - DNA, 280 bp, Aspergillus oryzae
gcattatggcggggcagataagacaactctgggggcggatcaggttggggatgctrtttgtaacgttcttgaattcagattttscasgataaggaggttcgcttgatcgagcttgtctttactgcgatttkcatgaatgcgatacaagtctaggatactcggtgtctataagcctgtctgctagagtatasatagagcgtatcgattgcggtgtctatggtttacgagtcaagaactaatcttattgcgaaaatctaatcttattatctyttcgcagact

SEQ ID NO: 1650 - DNA, 843 bp, Aspergillus oryzae
ggcattatgggggggagcactccagaaggtaaaaccaaagcaatggactcagtaaaaggaaaagtctacgccgtaaccggcctagcaggtattggtctcgccgtcgcaaaacaactctacagctacggcgcacgctctccttagccgacatcgacgaagcggccctttcatccgcctttgcgcaactcaattctgacgccgagaatgtcctcaccacaaaggttgacgtggggtcttcggcgtccgtggatgcatggattgaggctactgttcagcacttcgggcgactagatggtgctgctaatatggcggggatgatcgggaagaaacatggaacagggagattgacggagcaagatgatgaggagtgggatcggttgttgagggtgaatttgacggggacgatgtattgtgtgcgggcgcaggtgaggagtatttctgcgacttcggggaaggggagtattgtcaatgcgacgagtatacagggggtgaggggatttggattgcatgttgcttattcggcgtcgaaacatggggttgttgggctgacgaagagtgtcgcggaggaggttggtccggagatcagggttaatgctgttgcgccgggatctattcagacaccgttgctggacgagtctattgttattcaaggtggttatactcagcccccgacgattattcctcgcactgggacggcggacgarttgctcagtcggtgttgttcctactcagtgacgcagcctcgtttaccactggtacggttcttcaggtggacggtggctgggatccataagttgcttattttagtgaattagctggatttaaaactggaaacgttaaagt

SEQ ID NO: 1651 - DNA, 950 bp, Aspergillus oryzae
cggcattatggcggggggggggtaacactgataatttgtcctcatctctcgcttcctaattcgctataaaccttgctacactggctaacagtgtttgtctttcatttgaccattctattaatctatacgatcattgtgcccttggagtagatctcgttgctgtcgatccagtgttttggtggagaactatccgatagagatccacgtcccacaacttgcgacagacgaccgcaattgcatgcaaacatatctctgaccacagagcctggtaactcttcatcggctcagagtttatatatctgcycggatcatcagtgcgaaaaaccgggcgcaatcgtcctggcctacaacctattcttgtctgaaaaagattgacatcgatatcgctcgttcgctcgctagactgtctcagcaatgaatcttcgagccgcgggccttcgcaaggcccgccgccaacgctccttcacatggcttttactcctcattgccgtyctaatgttggcgcaaatatccttggcccaagataccactgggaatgaccccgcgtcgacaaccgacgtaacaactaaggagaccactacagcyacgacaaaagatgacactaccacgacatccaagaccacggaaacatccgcgacagaaaaatcagcaacgacaacaacatccgagtccaaatctacagactccagttcaacctccaccgcaacgaatgattgccccgtggtgacagtccccccactcgccgacgcaccaaaaatgcaaacatcagataccccggaaggaaccgtcttcatcgccgtgggggcagtcctaggcttcgtgggcytsgcactcctagcctggcgcggaatggtcgcatggtccgtaaaccgatctgtccggaaacagcaataatgcaatcctccgaggcaaagggactcccccgccaaaggagaaagaaacccgcgcac

SEQ ID NO: 1652 - DNA, 674 bp, Aspergillus oryzae
  modified_base (466)..(466): n is a, c, g, or t
  modified_base (523)..(523): n is a, c, g, or t
gcattatggcgggggacaactcgtggtaacagccgaggcgggggaaactctgggttcttgaccggacggcagagcccgttgattttgatgtcgacggagcatttgtttgcaatttccaacagagaccactgtggttgttattcgaagcagaaatcatcttccgttcccggactgcctactggtcgatgtcagttcagactgtgacttgatggatgaggcgaatgggtcctatatggattgcacggacatgaaggatgagtacgagtcggatacggcactgattcgatccatacaaccattctcgtgcgagaccgatgatcaggctctaggtcaggttctggggtcagacgggtcttcttgctcatacacttgctttccgttacgatggaggaacgagctttttgttttatgtccttccacatgtccggtctcctgggccacacacctgttcgacccgacatgcgtnaacgagctagctattcaacatattactcagcagttaccacccacacatatgagagtngtcttgcttatttttgttgaacctgttgctattgctctgtgggagtatgagggggatgggcaagatgcatgctttagtagtgcttctaggtattgtttattaagaaaacgagaaaaaagaaacagatgacaagaatgaaacctatgtttag

SEQ ID NO: 1653 - DNA, 1089 bp, Aspergillus oryzae
gcattatggsgggggagcacacgcatccatttccattgtctttcaccatgctctcatttctggctgccctgtccttgcccctggcgttggttaacgcctacgccaacccgggcacctgcaacggcaactgctgggcccatgatcctggcctctggaaacacgatgatggcagatatttcctgttttccaccggcaatggcatccatatcagctctgcaccttccctccaaggaccatggacggaagtgggctatgccttgcccgatggttcgtccatcaaccacgacggcaacaagaacctctgggccccagatgtgcataagggagatgatgggaagtactacatgtactattccgtctccaccctaggatcacaaaactccgtcatcggtgttgccagctccacaacaatggaacctggcagctggaccgaccatggtagcactggtctaagctccgatggctcccaggggtacaacaccattgacgccaattggatcaagattggagaccagcaagttctcaactttggatcttattggcagggtctgtaccagatcgatctggccggcccactgaagattggcaccgcagccccggtcaacattgcctacaatgcaaccggccaacatgccattgaggcatccttcctctatcagcaaaacggcttttattacctattcttctcctctggcaaggctaatggatacgataccagtttccctgcccagggagaggagtaccgcatcaatgtttgccgttcctcgacgggccgaggtgactttgtcgataaaaatggagtgtcctgcctccaaagtgggggtactactgtgctcgcaaaaaacgataatgtctacggccctggtggacagggtgtcctggaagataacggagcagtmctatactatcactatgcgcctcggaatggagacttgtccgtttcaagctatcagtttgggtggaatcggttgmactgggtcgacggatggcccaccgtatagacttctgcttatatatataccttgacaggcgattggcatamtgatcacatttaatgttattatttattattatttgcggttattctct

SEQ ID NO: 1654 - DNA, 625 bp, Aspergillus oryzae
gcattatggcggggaggtggtggaggagctccttcgctactttgtggacattggcagcagggaatgctacgttggtatgctgtatgcctgctacgaccttatccgtcccgatgtgatcatggaggtctcgtggcgccacggccttcacgatttcaccatgccctacatgatcaacttcctgtgcgagcagacgcgtacgatcgagatgctcaagaaggacaacgaggagcgcaagaagcgcgaagtcacacagaagaccgaagaggacaacacaccgatcctgggtggctcgcggctgatgttgacccagggtccagcggcgcccgtgccaagtcctatgccgtatcaacagaccaacgggatcacgccgcagcaccggcttccgcccgttctagacacgtacgcatcttacgcctcccttgtcagctgaagaatttcttttttttctattttgtttttattccctcttccaacggggtttcgtgtatgtatagcataagccatggatgatctgccgttgatcttggtgagactaaaaaccggagagggtcgtagaggatgtccaccgggggcggttcttttgcagaccttgatggatcgtcattgacgtcttgtttattttctt

SEQ ID NO: 1655 - DNA, 284 bp, Aspergillus oryzae
  modified_base (110)..(110): n is a, c, g, or t
  modified_base (125)..(125): n is a, c, g, or t
cattatggggggggaattcacctgctagtcggagagcaggagtaccgcggcggcaccgggtacaaatctggctgagcgccttggtgcactactgctggctctccgaccancgcaccgaaacagtnatgctagaacctcgagtggacaacacaaaggtcctcgaatacctcgcaaaaggcaggcttctacaaagaaggcgaagtaagcttcccgcacaaacagtccaacctgatgaaaatcaaacgcgacactgggaagccccagccatataaaacgcacaattt

SEQ ID NO: 1656 - DNA, 345 bp, Aspergillus oryzae
attatggcgggggtatgggggttgtttttgttgagtgggctgctgcgaaggggtataatgtgattcctgtggatcggttgcggaggcttgttaagggggttaatttgcagaaggctgtgtcgcagcataagccgtttaaaattagttttggggctacgatggcgttggcggcgtttgcrcagttttgatttaccatgtgatacatgaggtgatttatggtgcttattggaaaggaactgtagcctagatatatacataagctaccggataccgaaacccgagagttaccttcatagattcaagttagttactttaacagagataaatacattgttatacaggggc

SEQ ID NO: 1657 - DNA, 426 bp, Aspergillus oryzae
tatggggggggggagaggtttggaataaacgtggtcgcggacgagggtgtcttggtggttggggatacggtggcggatattcagtttgcgaggaatattggggggaaggtgtgttggtgtcgatatgggtatggggatcgggaggcttgtgaggggttggagcccgattatgtggtggattctttggcggatgttgtgggtattgtgaagaggtgatttctttgggggggttcttatgattgtggatgttgatgcttttattattggactcgcatggattggtctggctggaggttttgggaaagacagtcattccccaattgaaattgaatatatgtcggcattttgtatagaacatgagaatggaggaaagagaagagccaatatgcagataaagagtgtatcagtattcatccaaatcccatg

SEQ ID NO: 1658 - DNA, 432 bp, Aspergillus oryzae
  modified_base (196)..(196): n is a, c, g, or t
gcattatggcgggggcattcagatgctagccgcaaacacgcagaaggccmacacgactaggatsagcagcgcaacaggcagcgaactcgcacaatcaacaggactgagaatcaagcactaccaagagatcattaaatacttatatatcggctcacagaaccagcacatcagatatactcgaaccgcgcctttgctngcgcgccgscgaacggactcagacacgraaattgaatacactccgccatcgagctcagacagctctgtcackgatgatctattcacgcgmtacacgtcgacgcctcaatgaaaactagatcacgcagggatcaatactaagcaaacatcgtcaaaaaaaaaaaatgcaacgggtcgtcctggtgcagaactaaagcgcgyatatgctaccgcatgtgcgcggcatgtacggctctg

SEQ ID NO: 1659 - DNA, 433 bp, Aspergillus oryzae
  modified_base (13)..(13): n is a, c, g, or t
  modified_base (235)..(235): n is a, c, g, or t
  modified_base (260)..(260): n is a, c, g, or t
  modified_base (355)..(355): n is a, c, g, or t
  modified_base (413)..(413): n is a, c, g, or t
  modified_base (423)..(423): n is a, c, g, or t
ggcattatggcgnrgatgcgcaatcacgatcttcagsgtagcacgcgatcttcgcctacttaaacgataymtacaaccackycascracctacagatagaacgtcagcaaacgcatcgtcgaccgtctcacacagagatggggatraaggggcaaagcagaacgtcaacgakctctcctccttasgcacgctagtattcgcgcgtgcactaggaaygatcactgcgccgattgsnaagcgtagcaacgtgtatgcagasngctcgtccacgactgctaacgcatccgatgacatattcggatgagakaacaggctrccaaagactccgcgcgagatcgcgcggccgtctccaagntccgcccttcgcgttgccttcgtatgacacgcgyacacgtgccatgagaatcggccgntatcacacrnacgttacccc

SEQ ID NO: 1660 - DNA, 437 bp, Aspergillus oryzae
  modified_base (18)..(18): n is a, c, g, or t
  modified_base (313)..(313): n is a, c, g, or t
cggcattatggggggggncagctkgaacratcgctcaaagtctctgcgtaccacccccgcaaatagtgacasttskyskagagggggaasttgcggtcttcgggagcaacgtagcacatactgattcgttcggataasagagttactgatcmtgcgctatatggtgagctacggtgawgggattacgtaacgggcttgtcagtatagscgacctgggtgtagtctgttgtagattaatscgttagyccgcggaaacgcacgcggatgatatgagttgcttcactgcgacctcgatacgaacgagcgcgcggangagcactagttcaaagttgtgtgtagaatgtagaccagctgtcggagcggagatatgtccgagtaagatgtgttcatgtatctgaktctttgcggggatcgatgggggttgacgtttactaatg

SEQ ID NO: 1661 - DNA, 863 bp, Aspergillus oryzae
  modified_base (530)..(530): n is a, c, g, or t
ggcattatggcggggaatggcaacgactatgaagtccaaagacagagctacactttataatgataatggcatttgatgaagttgttacagttatccttgttgtcttatctatcctactatacggaacgtgctcaactgctascctcatttcctttggaacaagcggacttctacttacgaccagagcgacagaaaagacagcaccgtctcgcgcgaaacttttgcctctttagaagagctctcgcgcattgttgacgtctcgtactgtgtcggcagtacaggagtacagaaaccgttccgttgcttgagtcggtgtaatgaatttccgggctttgaattgatcaccacgtggagcaccggccccctcctctcggactcgtgtggctatatcgcgctgtcccatttcccacatgcgaacgcataattattgctttccgtggcacctattcaatcacagacactataatcgacctttcagcctacccgcagcgtacgtaccatatgacccataatggtcgggacgacagggnagttgttaagatgtcgtaattgcacagttcacgcgggattcctggcctcgtggctgaacactcgcccgatcatcctcaaacatgtttcggcagcaaggaaacagtatcgtgactataaagtggtgctcgtcggtcactcgcttggtggggcagttgcagcgctggctgggcttgagatgcaaatgcgaggctggggagccgcaggtgaccgacatttggagagcctaagatcggaaacaaggagtttgtcacgtttcttaacgaagcgttcaagcccggtacggtgtcaccatcagatgatgcccagcaatggaaattccggagggtaactca

SEQ ID NO: 1662 - DNA, 608 bp, Aspergillus oryzae
cattatggsgggtctccagttgcgacaaatccggcaagatggccaagtctgaaaaacggcgtctcagcacacacaacagccagaagggctcaccgtaacggtatacatagaagactaagactcacmgttatcccctccctcaagggtgttgacaccaagttccgcgcgcaaccacgcgtctacgctcttcacggtactatgaaggctctgaaggagcgcaaggaggggcaagcgcgacgtygcataaatcaacttaatttagaaatgaattaaaaatgggagcacattgagtgggtgtttcacacgtgccaagatcccaggcgtgctgtcggataaaacgcgcaacggttgctaaataagataatatgacttgattccacgasatggcctgacaattgtttccgttcttcctgtgtgtgttgggttagtaggttgtgcagtgccgcagmtcccgatgatggcgmtttacaatagtacgtatgagacaggcatatgtgtagtacagctctcgtgctttatctgtaatgcgcggctgtgcagcaaggatttttttcaaacgtrctcgaaagcaagattcctatgcccctcccaattgaccaaactaccct

SEQ ID NO: 1663 - DNA, 316 bp, Aspergillus oryzae
cccsagcatggcgagtagttggctcagctttgagctaacgagggactttcttgtccagctgaatgacaaatgatatcgccatggctcggaagggatatttcgctgatccctaagttttgccttcctacgatggtgacgtagcttgaaaaatagcaacataagcatcgctttatactaggtgttctagatgtgggaacagttggtgtacctggctattttaaagatcctatgcaggtactatattgcttatttttagaatcatacgcatgttacatcacgcaaggagtgagaaaaattaggaagacattgagcaaac

SEQ ID NO: 1664 - DNA, 572 bp, Aspergillus oryzae
gctggcagattccgattctctttattccgaggtcatacaaaactaaggcttaaaaatgaaaagacaaaaaaaaaattcggaaaaaaaagttcaactgacgataaaacacgaaggcatgcaagcgcttggttctgggttccgaagctattaattgttttcttcacgttcatctaattatctgctagacgacaagtggaagtggcggtgttactggtgcttttcatctcttctctttactcctggcgaagtggttttccttacaatgttttttatccataatttgtgtttcaacctgctttgactaattcccgacttatctttatctgtctatttcccccctttgcgtcgtgtgtgtcccttgcataagtcccggtcaacgctggtttacccgaccagtgaaattcgattgctcagggagcagtacctcaggacatgcatgtrggaatcggacatgaatttccttgctttgatttgattgagtaactgatgcgatattggaatgggttccccttcaccgggtaggaagtatgtctcatgtatggtacggagaaaattggagctcttcttttgtc

SEQ ID NO: 1665 - DNA, 343 bp, Aspergillus oryzae
gcggtasagcgggcaagcggaaccgtgagcggcgagggagaaccggaagcgaattgaaaagatctgggcggatgagaaggcttttgagcaggggttctcgtctacgccggcgggtgttggtgctgagaagaaggagtagggtactcggttggttggtgatgatgggggctgtattgcatgtcgattgattgattgcattgtattgttgtattgggtggcggatggcgtttggattcttctcttctcttctttcctgtttctttgggtctctgggtgagtgtatgattaagtaggggtgtggactatgcccggaatgagagaatggatttacatcgattgtgtt

SEQ ID NO: 1666 - DNA, 509 bp, Aspergillus oryzae
  modified_base (41)..(41): n is a, c, g, or t
gacttctagagggctsagaatccgcgtttagcgatgcaganaaaccatgtcccagttccaagttgaatcatggatttggtatggggtcacggtattcgtgataatactgcgcattcatatcgcggctgckgtacggtgaaaagcgtgaaggccctacaagtggagagactacwctaatgctcatggtattgtgcttctacacagggctggtggtcacattgaatcgaatcgaacatgcgcagacgaatttaatgaaaccgggcgacgaagcgcatttrcacaccggcagatcgatcaaggaccgcatttataggtagcaaactggtgttggcaactgaacaatgcatgcyagcgaccatttgggggtgcaaaggatgtcttcttctcctctacgccaggttagacggaagggattaagcaacagcgtggccgtcaagatcctggctgygttatgtggttggctcatacattctcttggagatcctctacttcgcggtttggtgtcggcc

SEQ ID NO: 1667 - DNA, 374 bp, Aspergillus oryzae
aaacaacttaagcaaggttgggctgacaagaagcaatccttccttattgaagtgagcggtgggttgaacgagtccaamgctgcttcgtacgcctgctcggacgtcgacattatttccactagctcgattcaccagggtgtcggcattgtggacttttctctcaaggtttcgctgcggtgaacactctatgattaaggtttggatacgcggtaagtaaaagagccgagtgacgacgccatgtgtagatgtgaatagacaaaactatgtatacatgtactttgccagcacgttcccacacagccaaaagccaacactggcagttggtctagctttgtgattacaatcaatatgcccaatacatacaatgtttgtgt

SEQ ID NO: 1668 - DNA, 528 bp, Aspergillus oryzae
  modified_base (8)..(8): n is a, c, g, or t
  modified_base (240)..(240): n is a, c, g, or t
tatggcgngggcagcttctcgtgatgccgatcactcacatagttctcttccagtttaaagcgggaactagccccgatatcattaaagatatttgcagtcgcatgttaggcctgaaagacacctgccttcacccttcgtcccagaaaccctacattaggacttcatctggtggcatagatgattctcctgaaggcatccagcatggcatcacacatgcctttgttgttgagtttgcgagtnctgcagaccgagactactatgtcaaggaggatcctgttcatcaagaattcgtcaagagccttgatggagttgtcgagaaggcgcaagcattgacttcactccaggggttttctaaattggagtaactgaagcagaggattgttgaattacttcattcggtatctgagcttataacatatcaattgccattagctttagatatctaccatgttgtcatctttactggtatagaactaaagtattaacggaagctcgtccgtttttagtgcatttatctagtgcatatta

SEQ ID NO: 1669 - DNA, 320 bp, Aspergillus oryzae
  modified_base (8)..(8): n is a, c, g, or t
tatggsgnggacagctggttgaagcgtcaagcagattatgtagaaagaattatttgattcccaaaggagtttacgttgggctatttggtttcttctttttctatttttattacatcatttgactgcgtgacggtgaaaaagaaaagggttgattggttttgggaggcgcaggaaactgctagtacgagtatcaattgctagattcgggagagcatgacgagtccgatgcctattactaaataggaccgtgcaccgtgggatcgacggacgtggggttttgggtttatgcctatttctatttttttttttttcccatttat

SEQ ID NO: 1670 - DNA, 956 bp, Aspergillus oryzae
  modified_base (6)..(6): n is a, c, g, or t
tggcgnggatagcttcagaatgactctcgatatcgcacaggtccggtctcgctttcctgcactgaagcaggagcaggtcttcctggataatgcagggggtagtcaagtactggacaccgtgattgagtccattgcatcttacctcacaaacaccaatgtccaattgggggcaacatacaagacctccaagctatccactgctggatttgcgaatggctacgaagcagcggcgaagttcatcaatgcaaagcccgaggagacctgtcttggtgtatcaactacacaactactgcacaatctctccacggcattgaagttccagccaggggatgagctcattctttcgaaattgaaccacgaggccaattccgccgcctgggtcagaatcgcagaacgactaggtttagaggtgaaatggtggtccgcttccaaccctcagaatcctgtctgcgatccgaatgacttgaagcagttaatctcggagaagacgagactagtagcttgcccgcatgcatcgaatatacttggatctatcgtggatgttaaggagattgcgaagatcgtgcatcaataccctcgggcccttctctgcgtggacggcgttgcacttgcgccccatcgacaagtcgatgtcaaggatcttgatgtcgacttttacgccttctcatggtacaaggtctatggacctcacatcgcgcastgttatgcctcatcacgcawaaatgatcagatcgacaccctaggacatttcttcaagggcacggacaccctcgacttgaagctcaacttggcatccgccaattatgagcatgttcagagcattccacgagtagtcgaatacttcgagcctgatgtatctgcatcatgggaaaagattgccgtccaagaggaaagactgcagcagatcatcttggatttcctcaatggtaatgatcgggtcactgtctacggagagc

SEQ ID NO: 1671 - DNA, 465 bp, Aspergillus oryzae
gactcgaccgagcagtggtgtggtctaagtctaaaaggtgggatggtttaggacttgatgctttgaagtcctttttattttcttcttcttttactgtatttcttgattttaaccccttttttaatttttgctttctttgctgcgacctgcagctgcacgattctagcgacttgggatgtttttcttgattacccttacatcttttcgatttgacgatatccacgtccttgatttcagatcgttgataccatgtctctgaatttgccacaaacccttttggtcttcgcccgtcatgggatgggaatctctgtttatattctgtatacagtctgtgtctatagttcgcttcgttcggtgtatgtcatatatgccggttgtgcataacaagagggctctgaaggtcaggaacaggctaggaaaacaatagtgcctatgaaaaaaaattaatgcaatcatcattgagtg

SEQ ID NO: 1672 - DNA, 404 bp, Aspergillus oryzae
gtatgcagacgagttctctccttcccagggttccggtaagacgccttcgaagggaaaggatgggaagagtgttgataagggtggggtttcgcatgagagggcgtttgcggattatatctttggaagtttgatcttgcatttcttctgtattaattttattaactgattgattgaatgggcttttggtatggggttgtggtggttggtggttgtgaagggatttagttagtttccctggtggattctttgtgtttattatggtttgttagggttagattagatggggaatccattgatgtggttggttcccttttctttctttctttttcgataggtgtttggttgggtgtttgggtgtggagtgagaagctattgatgcaatctccataacgccttttgtattt

SEQ ID NO: 1673 - DNA, 325 bp, Aspergillus oryzae
ggcctacggaactggctttgtgaaccaagaagtccttagccaacaattaccgggtccgtctgaggatactaaagtcctcctgtgtgggcctcccggtatggtcaacgccaccaagaagacgttggcggccatgggattccaaaaggcgggagcggtgtcgaagatgagcgaccaggttttctgtttctaattatcatctctacttttgacttcttgtttacttcccctctctctagacgtgggtttctatgggcggcttcgatgtatacagactgtgatatccatcaatatattgcttgagaggactctgtctttctctgcgcga

SEQ ID NO: 1674 - DNA, 429 bp, Aspergillus oryzae
aaattctagcgaatgcaaaaattatatggccagaagaaaggtgcttcgaaatcatgaccggaaggaaaacagttgaagaaaaagaaggatatgccaccgttaaaagaacgatttgctacgcatatctgattagtctgcgaaaaacagaaagccgaccatttaatctaattgctaaatcaaaacctgagaaacgaccgggggaacattgtttgacttattggaccttttggagaggagggcattcactattatggaatcagagagtacagaatgataataattactctactgtactgtacatagctatcggatcgaagcgattcgatgtttgtttagtagcaaacagatatatctaccctaatagttagtatcttttggctagctctgaggagactcaatgaatgtacacaaaaatggcgagatcgcctc

SEQ ID NO: 1675 - DNA, 929 bp, Aspergillus oryzae
  modified_base (7)..(7): n is a, c, g, or t
atggcgnggaccaaagccagtatcaacctacataccgaccgaagaaggcggttatacgacatataaggcagcgggaaagcttgttgggaaaagagccatcatcacaggtggtgactctggcatcggccgcgcgttvccttattgtttgcaatggaaggagcatctagcttgatcgtctacttacccgaagaagaaaaagacgcacaagagacaaaaagaagggtccaaggcacaggacatgactgtcactgcttggctgtggatgtgcgcaagaaggagaattgtcgaaaagtggttgataccgccgtgcaatgtatgggtggcatagacatcctggtgaataatgcgggattccagaacatgattggggacattagtggccttgaagaggatcaatgggagcgtacattcgataccaacatccatccattcttctatctttcgaagtacgcgcttccgcacatgaagagtggctcaactataataaactgtgggtctgtcaatgcatacttcggtcgacctgacctccttgactacactgcaaccaagggtgcaatcgttgcattcaccaggggcttgtctaatcaacaagttggaagaggtatacgggtgaattgtgtttgtcctggcccaatttggacacctctgatcccatcaactatgactagctctgcaatggaccaattcagcagtgtgccaatgggccgtccgggacaacccagtgaagtggcgacttgtttcgtcttcctagcgagccaagacagcagctatatctcgggacaatcattgcatcccaatggaggtgttgttgttaatgggtagccaggtaagggcgcttggctgaggggttagccctcgatacgaagcagtttcctttcagctttagctggccttcggctgtttaagatataagacaggttcacccactc

SEQ ID NO: 1676 - DNA, 520 bp, Aspergillus oryzae
gaacgccctccactaccacatattcacctcctcacaaacaatgactttccgtagcactgcggaggaaatggaacgactccaactctccgatgaagacacggacgacctctgggattctccctctaagcagggddctaggaaagtgaatcgaacacccgttaaagaggagagtaccacgcccccgcccatttcctctcacgatggtgaaacgctgttcgaccgccaagaagcgcgcgaggcagccttgcggaacgagttacagactgtccggaacatcaatcaggtgattgagagccttctaagtagccttgatcgggcaaagggtaacatggacactgtttcgcgtacggttgattccgcgtcaacattactaaacacttggacgcgaattctctcccagacagagcataatcagcggttgatcctcaatccaaactggcaaggtgctgttcaagatgtcgccgacttggagaacgaagaacgcctcaagcaacaggccgcggaaagacgtgaacgagag

SEQ ID NO: 1677 - DNA, 777 bp, Aspergillus oryzae
  modified_base (471)..(471): n is a, c, g, or t
attctgaaaaggagcggtgctagtgctttggatgatacggatgttgctggggtaacttcaacaactatagtagggacgcattgatgaggaaacttgcaagaacagatgaaccctcagagtcgtccgccgacgataagcagaaagtgcttcgccctaaaacagaaaccaagccattacctgtcaatgtcaacatggcaagtcggtgtgttatgcttcgtaatatgtttgatcctggcgaagaagaaggtgaaagctggattaaagagctagaggatgacgtccgcgctgagtgcgaagaaaaatatggccatgttgttcacattgcactagatcctaactcacaaggtgatatctacttgaagttcgaccgcgtccaaggtggtgagaacgccatcaaaggcctgaatggacgatttttcggcggcaaacagatcactgcacaaccggttgtcgacgctgtttacagcagtntgttctctcgaaccaaggcgatctagtgctcgacccatcagcacctacgaaagcttacatcttagtaggtatttcatctaatagcgtgatattaggtgcgattatctttgacggaaccaccgtctaactccgaaccattacacctacttcgacatggtgcttggctttgatgacactactacccctggtaggtgccattttttgacgtattgctttttataggccacaaggcttgttgtgcaatgatttgtttatagggatttgtacagtgcattagcgcaatgaaacctctgtagttttgcagtt

SEQ ID NO: 1678 - DNA, 222 bp, Aspergillus oryzae
  modified_base (58)..(58): n is a, c, g, or t
  modified_base (97)..(97): n is a, c, g, or t
gcattatggcgggggactgggagcaggggcttgtcgagggtaatgttgagcgcaagtnaggggataattatcgtcacgaggtaagggatcgtgtgtngaaggaagcggtcaaattagagcgacctgttctatcataaaggcttctacttcttgccattatgggtatatgctgtactgtacatagagcttctgtattattatcaagacgcatgtatgaatacg

SEQ ID NO: 1679 - DNA, 697 bp, Aspergillus oryzae
  modified_base (193)..(193): n is a, c, g, or t
  modified_base (554)..(554): n is a, c, g, or t
  modified_base (582)..(582): n is a, c, g, or t
cattatggccggggggcgcactctacatcttgctattacatctagtcttgataacaaggctagggatcgcggctgtaattagtaacatcgatggacagtaacgaactatacttgatctctccacaaatcactcttcataagaatrrtagaaactactcagcaatgtccgaccctagtatccctctcgcatgtnagaacctccttcacgactgggcaaactgcttagacaccaagtcctgggatcgtatgctgactatattcgcgcccagaatcgatgtggattactcggcggtcgggacactaaaggctaccgctgtggagttttctgtttttatcgaacactactccagttcagcacagctagggaaccccgatatccagtgacatcattttatcggtgcctgcaaatgggcacgggaactggaaaaaaacgtaagggttgtttttcaaatcatggcggttcatcggagggcgccaaaagacggtggtgcgggtgtgctggctaagggccaaggggttaacaccatggattttaagcaggtggaaggggagtngaagatcgcagcgattaaagttggcgtnctgttcatggagggtgatttcgagggcatgttcacaccctaggctttcagttaccctgtctgtttttctcttgctgttttcttgggtgttaaatctttattggtggcaaggcagt

SEQ ID NO: 1680 - DNA, 593 bp, Aspergillus oryzae
  modified_base (151)..(151): n is a, c, g, or t
  modified_base (365)..(365): n is a, c, g, or t
  modified_base (586)..(586): n is a, c, g, or t
gcattatgcggggtcgtaagaggctggatgaaatgaaggatattattgcagactgcaatccgctcaccctggtgttacatttacaacactcgcaaaagaggatacgcctaactatcaagaacaactgcaggctgcactagcagcatgcgancgttatctttagctgtacgccttctacggagcctaacttcccctatgcctacctccagccattcaagcagcgatttatctctctcattggttcctacagacctcatatgaaagagattgatacggaaactctcctctcgggtgggagccaaatctacgtcgactcgaaggaggcatgcctggaagaatcgggcgagctgatcgatgcgcacgtnaaagaagaccagttgattgagattggagaaatatatgggaagctcgggaaatccgagccgatccctgtctcggacacgcataacgtggtatttaaatgcgtgggcatgggaatcatggatctcaccatcggaaagaccctattggatcttggtaaagaacagggattggggatggaggtcgatggcttctaggtggagttattgggaaaacaacatgagtnactgtgt

SEQ ID NO: 1681 - DNA, 742 bp, Aspergillus oryzae
  modified_base (7)..(7): n is a, c, g, or t
tggcggnggggttggttgacaattcatcgggcacccgatatatctacacaatacgcakttcggaagtgtctgatgtggctcggttcttccttcacgaatctgaagcctgtccaggcagccaaattccttcggcagtacactcaggaaggcgtgctgcagacgggagatttcatgctgatcgggattgaccgctgcagggaggtggaaaaagtgacggcggcatatagcgacacgtccgagcggtggcagcaatatatccaaaacggactatacactgccgcacacacggtgggcgacgcatcgcttgcggaggactggacatatgttgcacgatgggatgccgaagaaggccgccatttgagatttgttcgcagtaaccgacatcggactgttctgccagacatcgagacctctgccggcgaacacgtgcttttggcccaatcatacaaatacacgcggcaggatgcctcgccgtgttcgatctgtccgggctcaccgtccgatacgagtgggtcaatcaacccgacgactgctcgttgtttttgctaaagaagacgggacgatgagaaaacacgagaagtccgtggcgtttctggaaatctttgcaaccgagtggcccaaaaaacccaccttcctgtctaccccgctaaagcttcactcaacgccttaaccattaagccagttttaaaaagctcacatacacgccctttggtagcctaagtttcgctttctatcaatacat

SEQ ID NO: 1682 - DNA, 359 bp, Aspergillus oryzae
  modified_base (6)..(6): n is a, c, g, or t
tggsgnggacgatcttctagcggtgatatctcgcaatccaccgtgtgtccgacgtgcataattacccattcggtggaagcttgactcgacgtttagtgaagtggtcgcacccggtatgcaagcatctccttgcttgtgtattggcggacgctgtcccgcactcagtgggccctcagcaaatgatcacggtcgaatcgtcgtcggtgcacaggaactggcaggttggtgtgctggttggggcggatgatcagctactagtaggtcccatgcatcatagccatccttatgactggccggccccctatcctcgatcacaatctccagggtggctgcgctatataatctacattttgtttcgc

SEQ ID NO: 1683 - DNA, 905 bp, Aspergillus oryzae
ttgggttcgatcgaacatatcatacccgacagatggggttgagaccggtgccggagatggcttgtaaaggagtctaacggatatttcgttcttatctctcatatacccttccttgctctgtacattcctatattttggcttgtgctattcggtttttgttcaattcccctctttctcatatgcctcaactttttctcttttagtgtgtctctgtcgacatgatttggatatgtgccgtgagattggcgttgagtgtatccgttattgcatgtctttcatttttttaaccgagacgcgattgaccttgagatggtttccacttgtactcaagctgcgttattgtgacatctgtgacattcgattctttttcttttattattactatatctattatttggttaatctttgtctttaagttgccagggccgacgtcgagtgaccttgctctagtgttagttgtactcttataatgctcaaggttcatcagacatatcagctttccaaggccattccatccctttcatttcccctatttcctttgtcttgtgattttggcgttatcgctgaggttcccctttttttgtctaagtcatcagtgactcctctccggggtatgggtttatgaattgagaaaagatacttacgtcttcgaatatcccatcggtataccgtctaccgttatctcatcgaggtccctctttcttgctttgggctaggggaaaagaagaaaacaaggaaaaaatccagcatgggatggtccagaatgtactgctcccgctggtactggttatgaaagatagagagactgagattttcctttttgttctggtcattggcttatgcgcattggcaagtatgatacctgactggcttctttcaaaatgaagtaaaaaagcttgaattgc

SEQ ID NO: 1684 - DNA, 272 bp, Aspergillus oryzae
ggagatcaaactcactcacccggaaaaggttgacgaggtcgctagttacatagttggatgtcgctacaatcaaatggccaacttcttgtggagcttgactaccaccagatatggcctgggtgatatggttcgggatgctgagggcaggatcccaatagttattgaaaatgtcaattaaatacgtgcagttagagttgttaatgggttgggttcgagttcaagatctagtatatgtcctggactacagtcaatttaaggagtcttaactaagt

SEQ ID NO: 1685 - DNA, 399 bp, Aspergillus oryzae
ggggtcgcattgtaatttgcagaggatgcttcgggtgcggcccctgtctaagtgcctggaacgggccgtcagagagggtgagaatcccgtctgggatggggtgtccgcgcccgtgtgaagctccttcaacgagtcgagttgtttgggaatgcagctctaaatgggtggtaaatttcatctaaagctaaatactggccggagacaaggatcgcccactatgatgatatcttccatgatcgggatgatgtacaatacggcacgttcttggagggttggacattcagcgttgctgagaagaggtttaactaaacttaaactagaaggcatggaggactggtaatactgattaaacagtatatttcagcagaacggaagttaaaacatgctatctatttatac

SEQ ID NO: 1686 - DNA, 574 bp, Aspergillus oryzae
tgagattatgcgctggttggcggaaaatgtgtccaaggatctctatgtacatattatggagcagtaccacccggatgcccatgtagggaagaggaaacggactatgaagaattcgaaaggcgaggaagaggccgaagtgcggtatgcagaaatcaaccgcgcggtccgcgatgatgagctcggctctgtcagggatgccgccgtggcagctgggctttggaggttttgtgaggcgaatgagaatagttccatgtttcatctgtgagttttggtccagtacccgatcaggagacttgaatatggctattacagacagataactgtcgatccgatgaggcgccagtttttggtttttcacgtcggacacatctttttcatctcaccttctcagcctcgcggtagatgggagaggcgacttggcggttctgccaatgatggcataacagattttcagctgctacataaacgaagttagatagtatgcatgtgtagctgccacaatcgttatttatacgggtcagctacggaacctcttaagatgaccgaatatgagcctgttgatgcttgtcaaaaa

SEQ ID NO: 1687 - DNA, 682 bp, Aspergillus oryzae
  modified_base (9)..(9): n is a, c, g, or t
  modified_base (85)..(85): n is a, c, g, or t
  modified_base (500)..(500): n is a, c, g, or t
  modified_base (511)..(511): n is a, c, g, or t
ttatggsgngggagcgtgtcagtgtatacctacgagcctacagaagcaggcagtccaaccgcgacaggaagtccgcgagggagtntcgacgctgcttcccagtctaccgagtatcaatcttccatcatgtccagaawacgtcccgttcccagcgcggtagctccggggaagaaaccgtcaaggaaacccacccsgtctcaaacaacgaacgaacttttgccttgcaccccagagcaacatacccaaaatcgcatcgagatgttggaagcaagagagagactaccttacacgccgcaaagcaagcatcaatactatgatttacgagttgacgcaagtatccagcccagtcccattgcttacgatctggccgcaagggacgaggtcaagaaaacggtcgccagcttaaacaatgagctagctgatattaataaagaagaacacgatgttggcatgaaactattccgagcatggaggaagcgtgacgaacaggaatgcaatgntggcagcagtngtttatgggttaaacgagtgaccagctgaacagcgattatctcggccttctacgttcttttccttctcctattatttcccgtgatctttctcatcgacatatttcgctttagagccyyyttaatttgttgacaattttcttccttctttctctcatcctctgtgctgggtt

SEQ ID NO: 1688 - DNA, 482 bp, Aspergillus oryzae
  modified_base (9)..(9): n is a, c, g, or t
ttatggcgnggttcaggaaaacggaggcctaggcaccgaagttgacgaactattcctatctcacgggcaaaagcagctcttctgtctcgctcgagcaatcctgcgtcaaggcaatattctcgtcctggacgaagctaccagcmgtgtcgataccgtaaccgacgagatcatgcaacgagttatccgggaaaggttcagcaaccacacaatcctcaccgttgcccacaagcttgaaacaattctcgactatgacaagattattgtgctggatgccggccgcatagtcgagtccggcagtccctatgctcttctggcttcggacacctcgcatttcagcaaattatatgcaagctcgatgatggaggaagccgagtaaatgactcatatacatatgcgagatacccatataaaagtgttactttcacctatatactaattttttctaatatataactaacaattgcttcaggaaaaaaaaaaaa

SEQ ID NO: 1689 - DNA, 884 bp, Aspergillus oryzae
  modified_base (211)..(211): n is a, c, g, or t
  modified_base (817)..(817): n is a, c, g, or t
gcattatggcgggggacatctactattcatacttacttactacacatcagagagtccaatatgtcttcaccagcaaacaacccacgggtaccacgcggtccagtcgaggctgagatagtcttttataaagaccccgcggatrgctctgctcccttcaactacgtggaggagccaccggaggacagcctcagcgcaactatagcgaastgtnccacaaagttcatattacggatatccgagggcaagaagatcagttcacgttagatcgcgacgcattccaagttttacgagacatcccttcacaaacgacgtacgagacattcaattcagacgatgccatcaaacagttatattaccctgaggtagaaaagctactcctggaaaaggttcccggagcacacaaaatcatcatttttgatcacaccatccgacgagccgatcccgaagcgtcacgccaacccgtccggcaagcccatggggaccaaaccaaatggtccgcggcgcacgagtccgtcgacatgttcctgatccggagaagcggaaaaactacttcagggacggtatcgtattatcaacgtctggaggccgataaatggcgcggttgaatcgttccctctggcttttgccagcgctgcaactttgggcgacagggacttcgctaagattgaacatcgctatcctcattttagtggtgagatcatgggcgtaagaaacaatccaaaggcagagtggaagtatctttccggagtggatgatgatgagagattgcttctgaagtgttcggatacggaggagggcatggccgaacgtgcgcatnaaactgcctttgtcgatcctcgcacggctcccgatgccaagggtcgggaaagcatttaagttagacc

SEQ ID NO: 1690 - DNA, 654 bp, Aspergillus oryzae
  modified_base (28)..(28): n is a, c, g, or t
tccaaagccccagctcgtgtcgtgagcnttctagctgccggccaggaarktaaaatcgaagaagataacctcgacttacaaaagtcgtggtccatcatgaaagccggcatgtatgcggcgaccttaaactccctcgccgcagaacacctggccacgctgtacccatccatcagtttcgttcacgtattccccggcattgtccgcacacctctcatgaacaagaccatgggctcgatcgccggttcaatcgtcacccccccytcgcgaccgatgtcgatttcctcgcaggagagtggtgagaggcacgtgtttatctcgacctccgctgcttatccgcccgctgcgcctgaggatccaacaaacgcaggagtsccacttgtggaaggggtgaagacaagcgtacttcgactgggaaaatcggtgggggatcgtatattcttaactatgatggggccaatgcagcaaatgagaagcttatgagcggatatcgggcggaggatttcccgaagaagatctgggctcataccctggagacgtttaagaaggtgtttgatccgtcgcagtaaatattctactcctatctcaatacgtaattacttaatgttttgtcagttagagttgtcagaaagccatcagaggagaaactaatcacac

SEQ ID NO: 1691 - DNA, 584 bp, Aspergillus oryzae
  modified_base (8)..(8): n is a, c, g, or t
  modified_base (175)..(175): n is a, c, g, or t
tatggsgngggtatctgctcggcatcgcatatacagttcctcgcgttctccaagagcttgccaaagatggcataacacccttccctaatatcatgatgcagaaccgcccctttaagacgcccattgttgcgttggccgyccatctaggagtcacaatattgttcatctgtgcgcncccagcaggcgatgccttcaacttcattgtcagcttgagttcatatccaacgaccttcctcttgacggccatcacagtgggtctagtcaaactccgactcaccaaggacgagggttgggcttcggcgtttaccgctccatgaggcgatgattgcgttctatcttgtcggcaacatattcctgctcatcatgcytttcatcccaccgccaaatggaaaaggaagcactaatcttccgtactggctaagccccgtagttgctctggctatcttgtcattgggcattgtatactatcttctacggtttattctcttcccttgggtcttcggatacacattgcagcatgttgcagtggagcttagtgatggatctcaagttacgagatataggattcagaagattggcgaaac

SEQ ID NO: 1692 - DNA, 1056 bp, Aspergillus oryzae
  modified_base (5)..(5): n is a, c, g, or t
ggsgngggttgcagtggtggttgagctttcggtattcttctttctaaaacaaaaagaagagaaaacgaaatgagtgctatggaaaaggatcacaaccgaaagcccagcagtttgcggtctatcatcgcgggctcgactgcaggtgccattgaaatcgcaatcacttatccggctgaatttgcaaaaactcggtcgcaactcaatcgcaaattaccggacgggaaaaagctgccatggcctccgtttggaaagcagtggtacgccggctgcacgactttaattataggaaattcgctcaaggcaggcatccggttcgtcgctttcgacaggttcaagtcacttcttcaggatgagaatggcaagatctcgggtccaagaacggtaattgctggctttggggctggcttcactgaatctcttttagcagtgacaccattcgaaagcattaaaacccaattgattgacgatcgcaaatccgctaaccctcgtatgcgaggattcttgcacggtagtaaactgatattccaggagcgaggtattcgaggttttttccagggtttcgttcctacaacagcaagacaagccgccaactccgcgaccagattctcaagctatactatgctaaagcaactagctgaaastattgttgcacctggagagaaactgggaaccgcgagcaccttcgccatcgggggtatggcaggctttataacagtatatgtcacacaacctcttgatactgttaaaaccagaatgcaatcgctagaagcttctaagaactataagaacagctttgtctgtgcatcaaggatattcaaagatgaggggttatttacattctggtccggggccgttccgcgacttgccaggttaatcttgagcggaggcatagtgttcacaatgtacgagaagacgatggacgctctcgattctctagattcgaagagacaatatatctgatgctgaggaagcaacgaacgcagggcagttattkgttggtctcttgaacgctatatcgcagcatcacagctagtatgcattggttgtatcttaata

SEQ ID NO: 1693 - DNA, 1014 bp, Aspergillus oryzae
  modified_base (45)..(45): n is a, c, g, or t
  modified_base (546)..(546): n is a, c, g, or t
cgggcgttggagcaggtatacattctcaagctgtcggtgatagtncttctttcacatcacctagagaaatatgcatcttccttggaaacgcttgatccgctttcgcgccctcgatggccgcatcttgcgcagcraacccatcctgcccgcagagaacaagatcgatctcgggctgatcaccgaagccgatcagctgcaasccgcgtcatccagggccaggatatatacgatataacgggcgaaaccatcgtaacggacgaggttgtgatcgtgaagcagatcctctccccgctggcccccggcgacgcacccattttacgttgcgtgggcctcaactacgctaagcatatcaaggaagccggacgcaaaccgccaccattccccttcatcttcttcaagcccaatacctgtgtgcatgaccacggcaagcccgtcgtgatcccgcggatcgcacagaacgaccaagcggactatgagggcgaattgtgtctcatcattgggaaggacgctaaggatgtctccccagagcacgccctcgagtatgtngcggcgtatacggctggcaacgacatctcctcccgtaagtagcagcgtgatcccgcctacgccggtgtcgtcccgcaatggggcttttccaagggcttcgacacctttgcgcccctgggtcctgtgctagtcgcggcatcagagatccccgatccgtcgcagttgcatctgaagactattgtcgatggcgaggtgcggcaggatgagacggtgggtgatctgctattcgactgcaaatacttgatctcctatctgtcacagggcacgacgttgcaaaagggcagtgttataatgacgggaacacccggaggtgtggcgcgccggttttaaacccccgaagtggctggttccgggaactcagatggacgtgcaaatctcgcagatcgggaccttgcgaaacaatgttgtttatgtgtagggttgattgtacagctgatttacatctattgtcttccacattgtgtctat

SEQ ID NO: 1694 - DNA, 330 bp, Aspergillus oryzae
  modified_base (8)..(8): n is a, c, g, or t
tatggcgnggggggaagaagatacctactaaactgtgaaccccttactgtggagtatgaagacaatgtgacaagcaagataggaggtttattcgtctcatgcaaacacatgcgaaaagaacatagagtcaaaccacgttgcgcaaaagttttcattttccaaagggaacgccaaattatgtatatagtaatcgatgactgagacgtttattgcactcttcctctttttgatggcgcattaccacctatctaggtatctataactagtacttgtattatacaatacgccgggccgagccccgcgttcacttgcagttgcactaaatggagt

SEQ ID NO: 1695 - DNA, 624 bp, Aspergillus oryzae
tcaaggagaggctttctgagattactctcaagaattaagacaaaatggcgtctataccagttatcgtgaagcaccagggcaaacgtcatgaggtcgagcttgatctatcctcggacggtgaaacgcttaagtaccaattatattccctcaccggcgtggaacccgaacgacagaaaattctggtcaaaggaggacaacttaaggatgaaaccccattgtcctcgctcaacgccaaaccgggccagacattcatgatgatgggcacgccatctggaggccaaggatccggggatttgggccgcccaaaagaagcagtgaagttcttggaggacatgacggaggctgaggctgcaagagcagagggagctattcctgctggccttcagaaccttggtaacacttgctaccttaactctacactgcagacattgagaagtgttcccgagctccatcaggagcttctgagatatcgcccctcaacaggtgctgctggagcatcgaacctctcggatctcagcagttttggtcttggtggcctcggcgcctcaatggatcttacgtcttcgttgcgggatctattcaagcaaatgtctgaaacgcaagagggatttccgcctcttatgt

SEQ ID NO: 1696 - DNA, 835 bp, Aspergillus oryzae
aatacgaggagattattccagtagatgcagtctagatctgctcggtataagagtactggcttcttgatattgatcttcgacccgtatwtaccacgtacagacacggtgctcagtgtcctcgtcatmggataccgtatatgcaggtgtctgcgttttatatcaactcggtcgcttctgtgctggatcgactcaactcaaagcaactatacctttgccctcgtaccaaagcgctagatatcacgctcaacgatgacggcacgctagaacaagaggcgccacacgatcaccctctcactgcgtcgtggatgcaatcccgctcccagcgcatcgtctggctcttcgaagaactaggcctcacctacaacctgaagaccttcaagcgcacctcggagatgctggctcccccggagcgtgaaaaagatccactccactgggcaaatcgcccgtcatcaccattgaaaccgagcagtcagagaaaccgctcgtgcttsccgaatcgggtaatatcaccgagtacctatgcgaccatttcggcggcgagaagctcatcccaaagcgctatcccgagggcaaggagggcgctgtcggcggcgagacggaggaatggatgcgttatcggtatttcatgcactatgctgagggtactctgatgccgtttttggtgtttcaataaramatggaccgtatgaaggatgcccctgttccgttcttcatcaagcccatcccgaggtttgttgcgtcaaaggttgaagaggccttcctttctaggaatatctttgggaactttgatttccttgaggagcgcttgaagaccgcccctggtggtggaccgtat

SEQ ID NO: 1697 - DNA, 217 bp, Aspergillus oryzae
  modified_base (144)..(144): n is a, c, g, or t
cgcgtgatgcgctgtttcgtcttgcgataagtaargcwggatcgagcatgacaatcctctccggcgcggwaccwggcacagcgctcatgtcgccagatagtaggcgcmtgccgattctagcgatcttgcgcgctcgcgcggttnatgcctggagcatgcratgggagacggacgtacaatgatagagatatgcctatgcacaaggaatctgacgaca

SEQ ID NO: 1698 - DNA, 1008 bp, Aspergillus oryzae
cggcttttgggcagcggacagactgctacgcgtgatccgactagtctactataacctccatgtacgcaccaatgttggaaaaagcatccaatacacacaaagctcagcaacctatgacgaggcctctgatgtcattcgactagaggttatccccgggtctagtcgactccagcctacgcccgggcaatactattatctttaccagccattccggtttacgggctgggaaaaccatccatttactttggggtcatggtcctacgagaccggacttcctacatcccagataaaaacgccctcacttgcgaaggacgataacaccgtagatgtgacgcaggtacctctactctccgacagctcgtctggctcacggactccccaagaagatgtaccatcgctcgatgagccgcagaggttgcgacttgtcttctggatcagacccttcgacggctggacgcgccatctccgtcaacaatgcgtacaatcgcacggtcggactttggatacaacgatacttttagaaggcccctatggcgaacagttccccctgtgggaatacgaatcaatcctattgatcgcaggcgggacaggaattgccgcagcggtaccgtacatccaagaccatctcgccagatgtagcagcacagatgaagcggaaagtccgacccgcatccaaaatatctatctagtctggacgagtcgacaggaggcgttcgtccgagaagtcgccactcgagaactgagttcagccctcgctcgagatgatttccgggcttcattttacgtgacctcagccactgcagcgagggattcggacgcatactcaacgctacgcgaagaactctcggggaaggctatcgaggttggtcatgggcgacctgatctgcaggcccttgttctaggccacgctcatgaagcgcastcaggtgattgctcggctgctgtgttgatgtgcggtcccctgctatggctgatgaagttagaactgcggtgtaccgaaccatgcgg

SEQ ID NO: 1699 - DNA, 841 bp, Aspergillus oryzae
  modified_base (12)..(12): n is a, c, g, or t
  modified_base (474)..(474): n is a, c, g, or t
  modified_base (529)..(529): n is a, c, g, or t
  modified_base (561)..(561): n is a, c, g, or t
gcattatggcgnggtttctgagatgatcggctcgggatgattgttgatctgtcccatgtaagcgccgagaccatgcgagacgtcttgggcgcaggcaaggatgactgggcgggcagtagtgcgccggtcatcttcagccatagctccgcatatgccgtctgccctcatccacgtaacgttcccgacgatgtgctgcagttggtcaaatcacggaactccctggttatggtcaacattgccccagacttcgtctcgtgcaaggctggtgataacccgaacggtctccctgattttgtccccgaaaatgctaccttagagcacgttgccgatcacatcatgcatatcgggcaactcattgggtttgaccacgttgggtttgggagcgactttgacggcatcggtactgttccccgcggcctggacgacgtctccaaatttccagacttagttgccgaactcctcagaaggggagtnagttatgaggatgcgggtaaggtcgtgggaggcaacctgctgcgcgtttggaganacgtagaccgcattgctcttgacaagcaagcnaacggagctctgcctcttgaggatgatcttcctgaagcgtaatgcggttcactccaacataatcccatcttcctgcccatggatacttgttctttacctttgtgctccgaacatgtaaaaacggctataccgcatatcttatcgaactcttgactgaaacgttgggtagattgggcgagtwattagcacctgtagtttagtcatctatttggatagatctcgactggctataatgattgttattgagctgaaacatcttgaaatggcatcaatattttcc

SEQ ID NO: 1700 - DNA, 614 bp, Aspergillus oryzae
  modified_base (463)..(463): n is a, c, g, or t
  modified_base (469)..(469): n is a, c, g, or t
  modified_base (471)..(471): n is a, c, g, or t
ggcattatggcggggacaacaaagaagtcggcattccttccgcaacccactaaaagtgctcagctcccgacaagacggtgcaatatccacatttcttctatccagaacggttatgaaacgatttctatctcacaggtacttttaattgtctaaaacgaccggatttgattggataggcatcattctgtggtacgatccatttggtggctcccgccgccgcaacctcagcccaccaatatcgattaccccggatttgacccgccagattcgcggcatcctcaacaatcaaacgatcaggagtgatcgcgacataaggagcgtgatcttcttactggctctactacattctacttcgcttgtttatgttggccttgtaatgtcccatacctatctcgagtacctgtgcgcastagtacgcaatgacctcatctgtcaataatatggcagaggccagccgcgcgtnacgcgngnttttagaatcagcgccgaaactcagcactcagatgacgatgatgagtttctttcaagtgcgagcacgacttccgagggggcgcaagagcatactgtggagtacaagcaacctgcattagaatccatgaattgccaacaggaga

SEQ ID NO: 1701 - DNA, 224 bp, Aspergillus oryzae
  modified_base (84)..(84): n is a, c, g, or t
  modified_base (155)..(155): n is a, c, g, or t
ggcattatgggggggaaggagcattttcatggcggtccgtggcttggagcaatagtttcccttttgtttctctccctctgagtnctaacagtagtatgggtgatggcttctagcacgcttcgatccattactatactacgatgcggatgacagancctatcacgggtgatgtctgaaactctatcacttggattaaggaataatgcaataccgaccaggcagtc

SEQ ID NO: 1702 - DNA, 410 bp, Aspergillus oryzae
  modified_base (63)..(63): n is a, c, g, or t
tggggattatggcggggacgagtactatcttgatttgtaaacatttccggggtggatacagtnaagcagatggttatggatttcggggattcgtggcttaggaaaggggtcgacatctatccagagcttcggtatggaagttggaagcgtgatcatggcaaactcgggaaggtgtttagctggactagtgcgcaaggggatacagaaatggtgaggtatctacttcgggaagctggtattgatgggctcatatatggatatcagactgatgagtataacgataagagtggtcctaagtctgcccttaaggatattgttgacttcgtcgaggctcattcggatacccatcgaatggccaccgaagatgatacgccttggtagtacaataatgccatgagcctatgtaagat

SEQ ID NO: 1703 - DNA, 320 bp, Aspergillus oryzae
  modified_base (4)..(4): n is a, c, g, or t
  modified_base (33)..(33): n is a, c, g, or t
gcgngcgaggaaagtgcggaggaaacgcgattnaactatgagaagggcaacgaaaaaatcggccatgcgatcgtaagcgctcgtaatgcgaggaaatacaagtggtatattctgcttgtctgcattcttattatmgctatcattgtggctatatgtgtcgggtggtgcaaatctaccgaccactgttgagcaggtcgatgatccaggaatgaccgagagcgtgataaaaacgccctggctatgaaaagatatgtgtctatgctttacttaatttacgactattggctcctacatgggatgaataatgagatgtgttttta

SEQ ID NO: 1704 - DNA, 392 bp, Aspergillus oryzae
  modified_base (179)..(179): n is a, c, g, or t
  modified_base (292)..(292): n is a, c, g, or t
ttatgggggggtagaggtggaagactggaaacggcgcgataaccccattatccggctgcggaagtggcttgagaacgaagggttgtgggacgaagatacggagcgtactacgcgcgacagcttcggaaagaggttttgaaagagtttggagaggcggaggtgagaagaagccgcctctncggggggccttcgagggtgtgtacgaggagttgacggaggaagcgcaggagcagatgaaagagttgaagcggatccttgaaacatatcctgaagaatacgaccttcggcagtncaaggatggcatcaatgggttatagattgtcggcgatctgtttgtgagtgcatagatcgagatatcccgtataacatgaattcgatcatgaaaaagcctt

SEQ ID NO: 1705 - DNA, 392 bp, Aspergillus oryzae
  modified_base (135)..(135): n is a, c, g, or t
  modified_base (230)..(230): n is a, c, g, or t
  modified_base (261)..(261): n is a, c, g, or t
ggcattatggcggggggtgtagcgaccgccagttttcgggtcgcttcagaccaaccgaccccggggtccgtatatttggggataagggccagatacagatttttggacctgctgcgcggccattgagcattgcgnttgttacatatggggaagggggtccagaggtagtggagaggaaggattttgaaattccagttggacacggattgttctgggaggcggatgctgtnctcgatacttggctaagggggagaccgagtnagatgtcatgccgctggatgagacgctgctaattatggacgtcatggatagggtacgagaggagaatagtttgaggtatcctgcggaagtcgaggggcactaatccaataacaaatattatacgctttcat

SEQ ID NO: 1706 - DNA, 702 bp, Aspergillus oryzae
  modified_base (190)..(190): n is a, c, g, or t
  modified_base (348)..(348): n is a, c, g, or t
  modified_base (408)..(408): n is a, c, g, or t
gcacatacgcacttaaagactcgtcaactcggccagggtggtgaaggcgaatcaacaacgcgattagcgcgccgaattgctccaagccgaagccgctcattttgcgaagaagaggggtatccccgtgaatgaaccaactgttgagagcgcasacccaaacaccaaatagaaggcggtccatctggcagtnattaagttgggacggaggacgaagatccagaagccaaacggcggcgaatactagaggagacgcgggacatagatgcggattcagatgggtcggaggatgacagtagcaaagaagaaagtgacgatgaagaagatgaggccgccgagttgatgcgaganctggaaaagatcaagaaggagaaacaagaacagaaggaaaaagaagagcgcgaacgctgnctgaagaggaagagaaacgggaatatgatattgccaaaggaaacccgctgcttaacgctcaggacttcaacttgaaacgccgctgggatgacgacgtggtcttcaaaaatcaagccaggggatttgaggataagagaggaaaggagtatgtcaacgatctgttgcgatcggacttccacaagaggtttatgggcaagtatgttagaaaagttgcacgagttacatccaaactaaacattggatgcaccatcgtaagakgatgttattgatacaaatacaaaatggctcaacaac

SEQ ID NO: 1707 - DNA, 535 bp, Aspergillus oryzae
gcattatgggggggtcgcagcaaataaatgactcgccaatccatctcagtgcccatgagatgctcatgttgaatrctgaaatgacasaagtggaagaagtgacgatratgattccctattatagatacgtatcgtggattagccactccaacgggactcggctaggtctgctattctctatatcgctatacgaatccggagtctctatcgattcaacgaaaacatacatcgcaatctcgcgaggctctttcaaaggtttcggattttgaccaggcaagaatgcgcacyaagtattcttcgtctcggagggcgaatgtctgtggtggggkgtggaggggtcgtggaagaaatggagggtcacgtatctaatgtacaatatatgtttgcatctccacaggccctattgggtttccgtatggggaactgaggcaatcactcttcatkaggtgcttaattctgatagcgttacaataacctgtaacaagtawatagagcaaatgggagagggtcatcrgagggattttatacacaaaat

SEQ ID NO: 1708 - DNA, 1019 bp, Aspergillus oryzae
agcctgtagtccgtttcacgagtggccatcatgctcacgattcaactggaaaaccaattggcctgctattcaggacatgaacatcttcgcggctgcgtcgtctatcattgccccaacccgatcsacatccaagaagttcgggtgagcttttatggccgcgcaaggcaaaagtccagaaagtcaagggcgcggcggcacccgctgccacctaccgaagcaaatgtattctcttccaggaggaaaagattctagtcacccctaatggcggtcaactgactcggaatacgtacgaatggccattcgagtttacattcccgtcgcaggtggaatcacccgcaaaatggcccgaaaaggccccctttcgtagcgatgaacaccacccgctgcctccgtcttttgcggtggatgtgggggattcgcagcggaagctccactgtgttatcgaatatcgcattgaggttcaaatgttcaaaccgcaaaagaactttctgtcaaaaaaagcgccggtatatactgaggcgatccgagtcaacttcttgccattggcagcacagtgggaaccgactgatcatgccgataaattaagtcgaaagcacaaagatgaggtgttcaccgtgcgcasctcctcctgctgccggaaaatcggggacgaakytcaaaagttggagagaagttccagtcttggctgtcaaagaagcaactcccacagtttaaattcaaggcgtctttcctatattccacacgggtactacagggtacaccagttgcatgtgtgttggatgttatcccgtgtacggacggttcgtccatgccctttccaggcatcacactgcaatctgtgtcgattgcagtaatgagtcgaacctccgcacgtgcttctcagtcgctgaggggctcaatagctggtgacgtggatgatcgtttggaaatattatcgaagacgtcacttggcatgcccgtattgggccagctcgatttaaacgagacattcggaccgctcatattcagacattcagagg

SEQ ID NO: 1709 - DNA, 679 bp, Aspergillus oryzae
  modified_base (132)..(132): n is a, c, g, or t
cgtgactgggaaaaccctggcgttacccaacttaatcgccttgcagcacatcbccctttcgccagctggcgtaatagcgaagaggcccgcaccgatcgcccttcccaacagttgcgcascatgaatggcagnhtggaaattgtaagcgttaatattttgttaaaattcgcgttaaatttttgttaaatcagactcattttttaaccaataggccgaaatcggcaaaatcccttataaatcaaaagaatagaccgagatagggttgagtgttgttccagtttggaacaagagtccactattaaagaacgtggactccaacgtcaaagggcgaaaaaccgtctatcagggcgatggcccactacgtgaaccatcaccctaatcaagttttttggggtcgaggtgccgtaaagcactaaatcggaaccctaaagggagcccccgatttagagcttgacggggaaagccggcgaacgtggcgagaaargaagggaagaaagcgaaaggagcgggcgctagggcgctggcaagtgtagcggtcacgctgcgcgtaaaccaccacacccgccgcgcttaatgcgccgcymcccggcgcgtcctgatgcggwattttctccttacgcatctgtgcggtatttcacaccgcatagatcgataacttcgtatagcatacattatacga

SEQ ID NO: 1710 - DNA, 532 bp, Aspergillus oryzae
  modified_base (2)..(2): n is a, c, g, or t
  modified_base (418)..(418): n is a, c, g, or t
gnggtatgaagatcttgtaatcaaaattgataatggcagtaagctcctcagcaagtcgtccgcagtggtacaatcgctggccagattctgtctttggtagacaattcgattgtgccacaaattacccactctgcctcactttggcttcttgttgcccgcgttgagcaatggcgtgggcaaccgccgaaagccttagaagcccatgagaaggcttggcgtgccacagtggcctcttcaacacagggggcattccagatgggagatgaaaagaagtggatggaaattgaacgtgccacagagaaattggtccgtaatgggtattctaaatacgcgccctatggacaaagaaggccaggaagatgcgggtgaagctgagctcgttgccaaagattggaggtttaaggcccgtagtgcagtnaggggcattctaggtaaaggcaaggagttctgggaggatagtgaagggtggtcgcagttgaaggacccccacagtgaggttggaagcacataaacaggcctcctttctttgtta

SEQ ID NO: 1711 - DNA, 282 bp, Aspergillus oryzae
  modified_base (6)..(6): n is a, c, g, or t
  modified_base (19)..(19): n is a, c, g, or t
tggcgnggaagagcacaanattgtctttgtgacatgtgccgcgggaaagatagggctaaagcgtctctcgacagtgtacccgaaagttagggtcattgtaggacggatcgaagaggagcaagagcctagatggatgagagagaagatactttggctgctgaaatgatttgaatgttgtagatacggttgagcacatgtttggctgtgtcttttgtcgaactgtgcgagctgggaagcatcgctgtagaaagtcatgacacacaatatatatatataaaacgt

SEQ ID NO: 1712 - DNA, 303 bp, Aspergillus oryzae
  modified_base (7)..(7): n is a, c, g, or t
atggsgngtgtgggtcgcgcgatcaactgggtgcagccgaagttctggatatgacccagattgaaggtatgcggaatagactgaaggactgggacgcaggcgtcaaccaactgggtcactggatcgagggtgttggcaaggatgtgtgggctgcatgagctatgtttgattgtcgtttttcctcatcaaatgcttgacgtaaaagggtactacaagagtagcacttggggttatatgtacgaatgaatattagacttggcacccataattgaaacatatggaatcatgcagaattttcacctc

SEQ ID NO: 1713 - DNA, 204 bp, Aspergillus oryzae
  modified_base (6)..(6): n is a, c, g, or t
tggsgngggatctggatgatttcgcgaaactcgccaatgagcttgacacgacttgggaggtccattatttgtgagcttatggaatttattccaagggataactatttaggacacctcgctgtaaagccgagattccagcttgtgatatttaccccgattcaaatctagcagatcacttttaattcactggcactatggttctct

SEQ ID NO: 1714 - DNA, 219 bp, Aspergillus oryzae
  modified_base (2)..(2): n is a, c, g, or t
  modified_base (21)..(21): n is a, c, g, or t
  modified_base (27)..(27): n is a, c, g, or t
  modified_base (33)..(33): n is a, c, g, or t
  modified_base (155)..(155): n is a, c, g, or t
anatcttcaccctccctcaanctcaancattantacctcccaacaccaacttctcccatacccccaacttccccttccctatcaaccaccacatccatctatcctatyaactaccatcctcccattcctatactacccacatccacttctattcntccatacatcccccctccttatcctctcccyataccctcccccctccaacccccctattactcc

SEQ ID NO: 1715 - DNA, 769 bp, Aspergillus oryzae
gggaatttttcaagaaattaaattaacccccaaccgtcaaaatggtcaaggctgttgctgttctccgtggagactccaaaatctccggcaccgtcaccttcgagcaggctgacgccaacgcccctaccactgtctcctggaacatcaccggctacgacgccaacgctgagcgtgccttccatgtccaccagttcggtgacaacaccaacggctgcacctccgctggccctcacttcaaccccttcggcaaaaagmacggtgctcccgaggatgagaaccgccacgtcgcgtcgactccgggcaacttcaagaccgatgctgagggtaacgccgtcggctccaagcaggacaagcttattaagctgttcggtgccgagagcgtacttggcgtaagtccatctcgaatgtcgactgagcaagtgcaaaaggctaactatcgtagcgtactctcgtcatccacgccggtactgacgaccttggccgtagtgaacacccggagtccaagaagactggcaatgctggtgctcgccccgcttgcggtgtcattggcattgctgcttaaacacatagttctagtcaatctaggatgtgaagtgccgggtcagaattggaacagtcggtaaggcaaactgggaagtatcttggtgatgctcaaaagttgatctggacggatcttctgcgcggttcctggaggactgataggaggtctctggtcctggcgaattcaattctagaaattgtataggaatgatgacacgagttgaattct

SEQ ID NO: 1716 - DNA, 559 bp, Aspergillus oryzae
ctttactcgcctcgtcactcgctgaatctagacgattcacttccaacaccaccagtcgtttccaatcacgcaacagaaaatgcatcagttcctcaccctagctgccctcttggcaaccacagccctcgcggcagatcgcacaccagccctggttgcccgtcaagtggttgagctcccttgctcctatcaaggtgaaaaagagtgtggcagcggctgcatccctctttcctacacctgctgccccaataacctcggtggctgtcccctgggatcctattgcgacggtctgggttgctgccctaatggaaagacctgtaccggtccaggaggcgtttctactcgtcccggatcgactatcaccgtgaccaactctctgaccaacacattgacgtccacaagcacctccactcacactttgtcgtccagcgaggttgtgaccccgacctacaccccaacacctagctcgagcacctcgtcctctcggagcgtcatccctcccagttcgagcgcggtgcctccctcgtcatctacaccggctgtgtcgcctacctctcctccg

SEQ ID NO: 1717 - DNA, 502 bp, Aspergillus oryzae
cttctcttttttttctctttcttcccctttctttctttctgcaatttaatagagggttagatctgggagatcgccttgttcaactttcgaaaccccccaaatctttttttctacctttttcttgttgtgctactcatattcgatccatctggatcgccactcaatagagagacacgaggatacttctttttaccttcttcacgtttctctctttccctcttgtcctgtacaaaacacgaatctcgggcgctcttttcccgttttttgacgataagcagatcacgcttctgctccccgggtttttttctttaaaaaaagcacttcttttcccttccctcttttttagtggaataccgcaaagatggccgacagcttgaagatgggtagcctttccctcaacgaatctcagcatgcgcctgctccaaactcttctggccgcgctgcctacatccctccccatctccgtcaacgccagacgggtgcgaacatggacggagccccc

SEQ ID NO: 1718 - DNA, 633 bp, Aspergillus oryzae
ggtgtttcgcggtgccacttcgtcttctgctctccctagattatccccgcaatgcgcgcaccgtctccgctcctgcggagcttgagctccaaaacatcgctatcgctgccttactcgcgacgatttctcacgcctcgctttccaattacagtcacctctaaaacttctctcaggacagttgcgagctatacgcatccgcatcatgcctcggccatatcggttctgcccacggcggtggacacgtcctcacctgatttcaaggagaatgccgagcagatgaaggagctcgtagatcggatgagcaatctacatagcaccatctcacaaggcggaccacaaaaagcaaaagaaaagcacattgccagaggcaaaatgctccctcgcgatcgggtgacagccctgatcgaccccggcacatcgttcctggagctttccccgttggccggccacgaggtgtacccaggcgaggacgttcccgccggtggcattattactggaattggaaccgtcgaaggcgttacatgtatgatcgtggcaaatgacagcactgtcaagggaggcacctactatcccatcacggtgaagaagcatctccgagcgcaggcaatcgctcaagagaacaaactcccctgc

SEQ ID NO: 1719 - DNA, 514 bp, Aspergillus oryzae
cacctcgcgagaaggcgaggactatcgcagtatatttgaagtcaaacaacctgactggtattcaaccggatagggagtaccactgcatagagcacaatttcctgggtgttgcactaaatgacccaaaccataattcgcttcccctggtgtctgcagctatatattgctacgttgcgcagaggcttggtctaaatgctcgaccttgcgggttccctttccatgtccatgttattgtcaagcccccaccggggctcgatataaatgggaatatgctggcgccgggagtttgtggagatcctatttatatggacccatttcgttcagatagagagacgccagtcacgaatctacaaagccagctgaactacctgggagcatctactgtcgaacagtcgaccttcctaggtgaatctcggacctctgagatcgttctaaggtgcagcaagaatatactgaactcggtccagcgcatgtctcagtatccagatgtgcatttggaaccagtggatactgt

SEQ ID NO: 1720 - DNA, 485 bp, Aspergillus oryzae
ccgggatttcatcatcatcatcaaaatagatttcgggtttttcagactcttttgccggtgttgaggtatccccgacctcatcgaatcgattaataatatgcttatatgcttgccatagcggatcctctagatctagagatgcagcatcatgaccttgctggctactacctcgtgagacatcagtcgatagagtaacctctgtctgagattttgtgtgtgattcatcgagtgttgcttcggtagcctagataaagtcagtttactctcgaggtttggactgtgacaaacggacctgcgatttcaaggcctttttccttgcccttctcaattggttcttgcttggccgcattatgaaaggccgttgaacaagagatatgtgcgagcggcaacctagtatgcttcacttgtcttgcactatggggcatagaaacacctaaacaagtagggagtgagagtgaaagtcaatgtactgtgattctttgatc

SEQ ID NO: 1721 - DNA, 591 bp, Aspergillus oryzae
  modified_base (181)..(181): n is a, c, g, or t
cccacgcgtccgggaatcttcccaaatgtcagtctcagagagaatgaggcgcagaagtccaagcccgtcgaatccacttctccagccccgaagcccgcggaaaagcctaggaggaagctacgtgcacggaaagcggctatgaagttaacacccgaggctatcgttcaactccgtaaactcntgtctcagccggacccgaaattgatccgagttggcgtaaagaaccgtggctgctccggtctcgcctaccacctcgaatacgtggagaagccgggtaccttcgatgaagtggtggaacaggatggcgtcaaggttttgattgacagcaaggcgttgttcagcatcatcggtagtgaaatggattggcaagaagataagttgagcaggagattcatcttcaagaacccaaatatcaaggaatcatgtggatgcggtgaatcctttatggtttagatcacccttccgattttctttcacggccttttggaattatcaacggtgcatcggatggcgttcttacggattgtttttccctgggattatcgagtctcccccttcttcttgttgaatacaccagtgatttcccgggtt

SEQ ID NO: 1722 - DNA, 410 bp, Aspergillus oryzae
  modified_base (69)..(69): n is a, c, g, or t
cggtttctccgtagttccatcctggttcgataacaccagtatgaggattctttccacccataccccaancaaagctgttagcgcaaccggagaaggccgcgacacagttgaatgcgcgtagaatcgtatctatcactctttgactggccagtgtgctaccgcagatggcaacgttggcattcggccgtaggatggacccctttgggatcttgatagtgatgggggcgagacagccgtcattaaggggaatatcctcgtcaattaaacatcgtatcgtgtagatgattgcagaatgcgtgatagagattgggcagttataatttccccacatctgcggtccagtaccctcccaatcgaatatagcactccctgtatcatcgatggtgatcgagactttgagcattgtgccg

SEQ ID NO: 1723 - DNA, 507 bp, Aspergillus oryzae
ctcattgtaaacccccctccacacggttttgttttgtgttgttttccttggatattcattacgatagaaattactgttctatccaattttccccttccatcatgatcgctatcggcctggagggctccgccaacaagcttggtgtgggcatcatgttgcaccccgataatggcaaccccccgcaggtactcgcgaacatccgtcacacctatgtctctcccccaggtgaaggttttcttcctaaagacactgctaggcaccatcgcgcatgggtggtaaagctggtgaaaaaagcactcaaggaagctcatgtgtccgtccaagatgtggattgtatttgtttcaccaagggccctggtatgggagctcccctccagagcgttgcagttgcggcacggatgttgagcctactatggggcaaagagttggtcggtgtaaatcactgtgtcggacatattgagatgggcaggctcattacaggctctaccaatccagttgtactctatg

SEQ ID NO: 1724 - DNA, 332 bp, Aspergillus oryzae
atattctatcagtggctccttggcccgcctggctgacattgcgtctacattaggcgccatggatgctggcaacacaggtgatccaggatgatcgtcgcctaacaatattaatatcgcacactacacccatgatttaaccgatgcgccgcaattcaggtgggtatggagtatgatacggagcaatgatgcagtttcccgcagcacatcgtaactccagcggattggtcttgtttttcaagaaggtggggtggaagtgatggaagacgtttttcgctgcaggaccctcgcgaggatacactaatatagtggtaaaaggtttaggagtataatgt

SEQ ID NO: 1725 - DNA, 612 bp, Aspergillus oryzae
tacctgcaaatttttatattgagttaacttaaaatcctctttacctgcgcttgtgtctgggacgcgtcgacaagctgtgcaaagggccgtatcgccagcttcgtgaacggaatgtcggtatccatacaggagttggacaacactgtccaagccttctacgaaggcaaaggagacctgcaaaagcaagcccagcaaacattgacagaatttaagcaaaatccggatgcctggttaattgtagggaatattctccaggagtcatcgtatccacagaccaaatatcttgctctccaagttcttgacgatgtaatcatgactcgatggaaggttctaccgagagaacaatgtctaggtatccgaaattttatcgttaactttatcatcgaaaactctagctcggaagaaaagttaaggagcgagcgagcgttcttgaacaaactaaatttggttctcgtttccatcttgaagcaggaatggcctcacaattggccgacttttatcaacgaaatcatctcgtcctgccacacaagcctttcaatttgtgagaacaacatggcaatccttcgcttgctatcggaggaagtcttcgacttttctcaagaccagatgacc

SEQ ID NO: 1726 - DNA, 621 bp, Aspergillus oryzae
gatagatcgggagtcctttgttccaatccaggattaccggatcggtccttctcttcacaacaagggggatcgatcgcctatccactctactgcagcagtgagcgactactagtttaccttatcgctttaccaccttgccatgtatagagtatccaaattactcgacggtactataggtatccgtatttcatccatgatttcatgataggtatggaggccggaaattccaacgcgatgctgtgctattcccctcatatggcccagagtccaattgactgctgtcaggctatgcaaggcaggcaaagaggaaaatgagagatgtcaaattcgagtcgagtcaaagaatgcggttccacgacggtggcacacgtttttattcgcaacggatggagcgggctcggcgcagaaaatgcaatctgcaagatggtgggaacttgggaaaaggagcagacaaagaaggggcaagctcgggccagcttagttggcctttaaactcatcctcattcccaggcttctggggcgatccgttggactgggtaccaaggaatactgcgaccgggaacatccatactctgacatacatacagtcatacaccaccaacgtatgtaagacgctctctc

SEQ ID NO: 1727 - DNA, 600 bp, Aspergillus oryzae
cgcaagcttttcccctcgagacccgcttcttcatgcgtagctacgtctccgcgcgtcaatatttggcaggctttctttgtcgatctttttcgcctgtcaactcgcagaggcatttcacgtcttatacgccgctatctaacttacggagatcactggaaccatggacaataacgaaggaagagctagcggatccgaagaagctgatcgcaagcgtaagaagggggatctgggaagggcagagtggagataagagaggacgattagataaagagaatgaggccaaacgacagaagcttgaaaagggagaggaagtcaaagctccaatatacgccacgcatttctcccaggaagacatcgagaatgaacagagacggccgaagaagaaggtggctgtactgctgggatactctggaacgggctacaagggaatgcaattgagcgcaactgagaagactatcgagggtgatctcttcgcagcgtttgtagcggccggggctatctccaaggctaacgcagcagacccgaagaagtcgtcgctggttcgatgcgcccgtacagataaaggagtccatgcggctggtaatgtcgtgtccttgaagt

SEQ ID NO: 1728 - DNA, 607 bp, Aspergillus oryzae
  modified_base (140)..(141): n is a, c, g, or t
cttcggattgccttagacaagtgactcccctcgactttgtcggcgccaccgccaagtgctcttttcggtcgctccttttccccttccggtccgtcctaccttcattggtcgtgcgatcggctaaagggtgattgatctcnnggacgttggtgccagcgaccctacatttttcccgggatcgtcaccggttcgagacaccgacaactttcgtcttcgaacgatatccctacctcaagtccttttcacttgtcgctatatgcctagatcgcaaagatgcttcttcccaagggtggtgtaacgtggaagtcggcgaaggcgaggttgcccccatggagggccattctggtcctggtgacgcgcactcgtttcctggtgtcattggcccttactggcttgttgatcttgctgtggcgtggtattagcaagtccgcatcggagatgcaaaatttctactgttacggacctcccaagtcgccaatggatatgagtcttaacgaaatggccgaatggaatgcccatatgcaaaccccggtcgtctataaccaccatgacccttatgaagtcaactcttctaccattcacaacattgacctcaaccccatcggct

SEQ ID NO: 1729 - DNA, 551 bp, Aspergillus oryzae
cggacgcgtgggcggacgcgtgggcggacgcgtgggcgtatttcacgctcaacattggacctcacgatgcgcgtgtattttatgggcccgaggcaccgtatgctgtctacgggtccaactcccaattcacctgcttcggacaatggatccatgacttccgaccactggtcgactggaagggggacatggatatcttgtccgatcatgggttccgccaggccaccgagttgcaacgtccgcttccctacggggccgtcgagaagaactggtttctcttctgggacgctgcaggacaagcgtatgtccattacgatgtagctcccaaccgagtcttcgcgcgactggaacttgacggctcagtcggtccagacttggcaccccttgcggctgcgatcgaccggcaatgtttacagcgacaccttccggccttgaaggacgcggagttggagtcgattcaccaagcgaccaactctctgactatcaccctatgccagcgatcggatccgctgtgccaggcgaccgatctcaatacgttcatcctcaccatcttt

SEQ ID NO: 1730 - DNA, 604 bp, Aspergillus oryzae
  modified_base (121)..(121): n is a, c, g, or t
cgaaacccaaggcaaaatgcgccattcagtatcagatcccgacgtggacgagaagcttctctccgatgaggaagctacttggcctcgtgaacagaagaaaaatgagagcctgttcaagaantgtgcaaaatatttcctttttgttgcagtcgccgtattctcctgcttagtaggtgttgttcttggacgtcagcaacacaatctcgataaggtctgcactcgacaactcacacaatactccccggtgatcccagaagtcgggatcgaataccaccaagaacagtttaatggctcgttcttaaaagaaaacatttatcggcaagaagcaagccctgaagtagatgctgcgtgggaggctcttggtgtcaactacagaagtcttagagtccctgcagaagaggcccaaaagtcaggacttgcccctgaccaggtgaagatcaacgaaaagtatggcggagggtatcctgcaaatgttgaggggttgcatcatctgcactgtctgaacctcctcagacagtccctctactacaactacgactactatcatgaacaaggccaaggtgccttcgtgaacgaggattatattgtccgacgccacgtgtcc

SEQ ID NO: 1731 - DNA, 229 bp, Aspergillus oryzae
gtactcgagccacgattattcgtgccaaatgccagaattcggcggcataccgtacaaagcctattttcttccagatagtgtgcggattatccggtgtgtatctgtcttcaggaattctcttgttccagatacgtccccagttttccaagccagtctggacgggcgtaaatgtatactcgaagataagtgagttctgaagactaaatataagcgagtggagtgctatacc

SEQ ID NO: 1732 - DNA, 589 bp, Aspergillus oryzae
cggacgcgtggggtcgacgcggccgcgtcgacaacgcctctcaccgcagttttccttcatttgccccataagctcccaaagtcttcgctagttcgtcctcatagttttatcgaccaaaatggcaacgtcaatgcacctgtcaaaacttcggaaatggttccttgcatctccgcccatcgagatggctatatcgaaactccgagagctgctgattggagcaatcaggcaggggccagttccacaacatatcgcgttcgtgatggatggaaaccgaaggttcgcaaggacacacgggattgagacagtggagggacacaatctggggtttgaggcactggcaaggattcttgaggtctgctacagaagcggagtcaaagttgtcacaatctacgcattcagtatcgaaaatttcaaacgctccaagttcgaggtggatgccctaatggaaatggctagggtgaagttgtcgcaaatggcccagcatggagagatcctcgatcgatatggcgcaaaggtccgagtgttgggtcggttggacttgctcaggcctgacgttctgaaagcagtgaatcgggcgatggaaatgaca

SEQ ID NO: 1733 - DNA, 553 bp, Aspergillus oryzae
cccagcatgcgtttctcaacagtagtttccgcccttttgctttccagcacctcgctggcaacaccagcccaagacttttcagcactgggcaatgcctcatcacagggggctcctgaggaacatcccatagctcagacaccggctgctgcagctgctgctcaaccaagcgataatgctagtcaacaacaaaatgtcaatgtccagcagccaactgctcagcctagccagcaacccacggtcaatgttcagcagcagccaactgctgagcccagccagcaacaaagtgccaacgacgagcagcagccgactgcgaacgtcgctccacaatcgaacgccgccccagagccatcttcgagtcccaatgccaatcaacaaacggatggtggcctgctgtcacacctgatccccactggtgttgcggagtcttctgcccaacaggaatctaatgcgcctactccgacagcctcaccagcggagtccgagggcagtgcttcgcctaccgaacagtcgacaacccagggatccgctaccaaaactgccgcttcctcttcaa

SEQ ID NO: 1734 - DNA, 552 bp, Aspergillus oryzae
cctcccgaagaaccacccgtttgattctctcattcttgggattccaattggcatgtcttctcttctttgactttcctgacgaaggatcaccgtaaccaggaaaggaaaagataacaaggcaaaaaataaataaaaaaaaaataaaaaaaaaataacggaaaaaaatcaaatcagcccctccctgaagcttccactcccttggttctcttgtatcattcttttctaattctccctctctagctgggctgaagttcatgcactgctttctaccctcttttctttcgcttatcttttctagacatttttcaccttttttgttttctttcccctccccaaatatactcattctatcatccctcatttaattgcggtcaaaactcgcatcgagtttcttatcgtatcttcccgactgccctatcccctagataaacatcaatcttagggcacttcgacgagggcagcattggaacgaggaaatatacccagccgcaatggcgttctccgatgttggcctgaggggcctccatcacctcgtccgacgggacagtgata

SEQ ID NO: 1735 - DNA, 598 bp, Aspergillus oryzae
  modified_base (219)..(219): n is a, c, g, or t
ttcagtacctagactactgctttcgatcttcgacttcttttttgttgttattatctcgccttcatctttctcaatatccttcagctccctcccgacccatcatcctcaccttatcactgagcctatcaaccgttggaaaccgaatatttccgggacacctttaaaacgggcagtggatctatctataggcaatagatcagaaggacagttccattttcngcgccgctgagcaccacgttctcccaaatctcctaactcaaccccagccatccgcccttcaccatcatgtcgagtcatatgtacgatgaccagccttatgcagtgtcacgacgtcattcggtaaaaacacctcctccttcatccactccccgacacagcagagggcgcagtcagagtgtccgagtgagcaatggaactgccagcacaaatactagcatctcgagcgggaggatgtcggaagcgacgaatatcactcaaccaccggcatactcgaaaaagttcgtagtggtcggcgatggtggatgcggaaagacatgtctcttaattagttactcgcaagggtattttccggagaaatacgttccgacagtgtttgaga

SEQ ID NO: 1736 - DNA, 324 bp, Aspergillus oryzae
tacaggatcccgagccgaatgagaatggcgaagagggagcggtttataaaaccaccgctgcgtttctgatcccaataccgcaagtcggctcgacattaccaagtttttcggtaggaaaacaagttctggcgagatacccagatactacgacgttttaccgggcagaggtgatgggctccagaaaggacacctaccgtctcaaatttgaaggcgaagaagatgacaaggagatggaagtggaccgtaggtttgtccttgacattcccggaaagtgaaggaagcagagaaacgccaaaggctacataaaaagaaaaagggggaaag

SEQ ID NO: 1737 - DNA, 603 bp, Aspergillus oryzae
cttgtaatgggatgtttggaaatgcacctggtgaagattcgattcagccaccagctcctgataaatatttcaccctgcaaaaagcacagatcacagctgtcaaccttgaggcacgggcgttgttctatgatttctggattatcggagatgctgctcgagagtttccgggagattcttgggaatctcacgaagcgaacgtggtagctaatgctattatggacgctttcattgctggcaatgggagccaagaatccatcaaggaaggacgtaagcttgccaggagatacctcggtgacaaagttgattcatcggaggtgtatgacaccgatacacagccaatagtctacggaatcgggcattgtcatattgatacgtgctggctgtggccctgggcagagactaagcgtaaagtggctcggtcatggtcaaaccagtgtgatctgatggagaggtatccggaacaccgctttacttgctcgcaggcacagcaattcaaatggttgaaacaatactacccctcagtcttcgaccgggtgaagggatgggtcaagaggggccacttccaaccaattggtggtagctgggttgagcatgataccaaca

SEQ ID NO: 1738 - DNA, 551 bp, Aspergillus oryzae
aaagagttgatcatttgaaacaagttgacggcaataaaacaccaagcgaagagcagaagcttctgaaaggtctcagtcaattatctctggctgaacaattcactgcctgggagattgagaatggttggaagtctagggtggacaccctatatgacgagatccgagttgctaggaccgaaggccaaaacggaactgttagtgccagatgtgccggaaaaatgactcgattcgtcagggaacatggatatcctgaatcagatcataacgttgtccggaagggaatccaaagagggatcactcagattctattcttgaggtcaatggaggaagtctccaccacgcctatacaaaaaagagccacccggggaatacttgctctggtaacaatttttgaagccgcttcgttccaaactatctcgaatctggaactacaagcactgggagaagccttacttaaaggcaacgaaggcgataaaaccctcatgttggtgcatgatgtttcgaagtggtttgaaaacatgaccggagattttaaaatgatctcgcaaaca

SEQ ID NO: 1739 - DNA, 472 bp, Aspergillus oryzae
tcctcgtcaattccctcaatgactacgccagtctccgctctgtgattcacgattcctttcaacttccgcggtaaggttgctttcatgctacctacctctcgttcgttctcgatacatcccgcgcccaagtcgtagggcattggacatcttccgcctcattctcaccgccagaaagagccctctagtcgtcggccaatccattccgattatacgaagcaaggcgccaacctagcctgtgatctctgtgcttaggtgtcagagctcgtacgtcagttcagtgccactcctctgggctctagctctaactacacagctcatcagtccatcgcagagcccgagccaccgagagagcaaagctcggatccgctcttgaccccatctgctccgctccccgaagcagctccacagcgggccctatctaatcagcgccctgaagccatggccgattccagcgtcacggccaccgccgccg

SEQ ID NO: 1740 - DNA, 547 bp, Aspergillus oryzae
atcgaggtctcttttcttcccacaatgaagaaccaccatgtggacggcaactcagccacgcgttcatgggagaatacggtcaacaagattatcatctccatctttgtctggacgatcctgaactatatcgaaaagatcattattcaactcatcgccataagtttccatacgcgtacctatgccgatcgtattgaaatcaataagttccagatcggcagtttgaccaagctgtacgacttctctcgcaacaagatctcagtgaaagacgatgagtttgaagaaaagaatgataacagtggcagcggtaccaagaccccattgcgctacccgctgcaatacgctggcaaggcgcaacgtgtagccaaaggcgcattgaacaaggttggagacatggccggagcagttgccgcggacttcacgggccggaaggcgacgaacagtactcatccctatcaagtcattttgaccttgttgcggactacctcgggctgccaggttctggcgcggcgtctctaccggactttcgtgcgtgacggattcgatactg

SEQ ID NO: 1741 - DNA, 664 bp, Aspergillus oryzae
cccacgcgtccgtgcatctaccaactctccactacctagcctttctttcctatcacccttatataaccgttctctaccgtcgagctctcatctcccgttgccagcatggggtccgacccgcagtatatcaagttccccgatcttaccctcgcccaacatgtcttcaacctctccaacccatcgtgcccgcagacggtgcggcaaacgtcgttgaagaaggtccaggatgctatctctgagaataaaatggcgcctttctataggcatcttgcccaccccgtggaaggcatcctgaaccattccggtgaaggcgttccccagcaccaagctagctcaactaagtccctgatcacctcgaatatgctggcatctcgaaagtcacctcaaaagatcgactttccatgggatgaatccttataccagtcgctagtcgaggataataagaaggagttggatgctttccaaaaggaggaagatgaggcggaagaagcagccggagacactgaggtgcttgcggcccgtgggaagcgtgctgagttctgggcgcgcgtaggagataagggataaagccatcgaatctcatgaagcactcctcgaaaagacgacatttcttcggaaccaagattggacttggtgcctggccatgaacccgaattggactctt

SEQ ID NO: 1742 - DNA, 523 bp, Aspergillus oryzae
tgccctctacaacagatggcaaacggtcagcgccgatagcacacaggcaggtatcaaaagggcaagctacggcgctggagtaacgatacaagatcgtgcggtcgccttctactatggtggatggctatcgaatacgtcggtccccaactggggatcgcagtcttccagggctttgtcgactatgcttcaatacgacatgctgcagaatacgtggacgaattcttcgggtccggacacgatcggtcgcgccgaagggtcgatggtatatatcccagcaagtgacggcatgctggtgtacattggaggcgtgcagtccgcaaataatggcactaccatcggccagcctatggatgagatcttgctctatgacatttcgggtggtaagtggtacactcaaaaggcgaccggcgacgtaccagatcaacggagaaaattctgtgccggcgcaacctgggctgaagattactcctcgtataatatttatctctacggtggcctcggggctccagaagggcttggcttt

SEQ ID NO: 1743 - DNA, 527 bp, Aspergillus oryzae
gatcgctctttggagcctacggccagcttcgctctgtgcgtgttcctaagaaatttgaccggtcggctcgtggtttcggttttgcagacttcgtaagcgctcgcgaagcggaaaatgccatggacgcgctgaagaacacccatttgttgggcaggaaactggtattggaattcgcgaacgaggaggctatcgatgcggagcaagaaatccagcagatcgaaaagaaagtaggggagcagatggaccggatgaaactacagaagctcacgggtgccggacggaaaaaatttactgtaggggcccaggacgaggaagactaaagtcccttgtccttctgcccttctccctgttgctagggttaatgaatagtaatggtgctgctatctttgtgtttgtgagatatacccccttgcttggcggaactcgttgggctttttcacacgttcctgctgtcaggactgtgcctgcagacgcgtcctgcaaagttccgtcgcctcgtgcatctgaatgaagctctatcttttttt

SEQ ID NO: 1744 - DNA, 560 bp, Aspergillus oryzae
cggacgcgtgggcttgctcgctttctctaagtgttccaccacccacaatgtcgctgccagaaacaacacattcaaccatctcccaaagggcacagagcgctctagtagcaggttcaaagaacctgatgtgggacgtgatgaatgacctatggtgcgaaaagacaaaccccaatggatacgtgaatgtgggcgttgctgagaatgtcctgatgcacgatcacctgctgagttttataaaccggcaactcgacctgcctgccaagctactcacgtataatgatggacctactgggtcagggagagttaaacgtgctgtgtctgcttttgttaacagacacttccgtcccttccatccggtggagcctagtcatctgtttattaccaacggtgtttcgtcggcaatcgagcatgtgtcttgggctataacggaacctggtgaggcaattcttctgggaagaccgtactatgggacattcataccggatatatcattgcgacctggagcaaccgttatccccgtgagctttgatgactgtgatccgttcagtttggaggcagtc

SEQ ID NO: 1745 - DNA, 527 bp, Aspergillus oryzae
atgcgactgaggtgcaagcggcacccgagatcgagtttgagaagttctatacccaacccgcccggattgttcctgcatcacccgcctacttctccggcagccccaaattcatcgaccacctgctgaacctggagactatcctagcaaaatgggcttcattaccgacggttgctcccagtgaggctcctcgcatggcctggttcaagttggcacaattccgcgactttgtcggcgagcctgtgccgaccaagaaatataagaaccttatcaaaatcttacaacgactaaatagaatagacccgaagatcatgcccatcgaagtgcgcgatacactgaaaactttccttcgtccgggaaatccttatgggaacaagccggcaccagcgacggtggatgagatgggtcgggcccgtggtagagggaagcgaaagacatcctcggcggtggtccatctggttgaaggagagggagacgtgatggtcaacggaaagaccctagttgaagcgttccctcggctacatgatcga

SEQ ID NO: 1746 - DNA, 582 bp, Aspergillus oryzae
cagatattggcttaccgtccctgcgagggttgcatctttacaaatctctctatcagcggcaccactcgattcataatggctggatgaaacccagtgtgaaaccacgtcacatcgcttttcgcgctcatgaccgtcatgttgtcacttgtcttcagtttgatacggataaggttttgactggcagtgacgatacaaatatcaatgtatacgacactagaactggggctctgagagcgacacttgagggacatgagggtggtgtctgggctctcgagtactacggtaatactctggtgtctggttcgaccgatagatcagtgagagtctgggatatcgaaagggcgaggtgtactcagatttttcacggtcatacgtccacagtacgatgtttacaaattgttttaccggtagaagtggggaaaaaggcagacggcacccctgagatgatgccaaaggagcccttgatcatcactggctcacgagactcaaatcttagaatctggaagctcccaaaaccgggtgatcctgtctactaccaaaacggaccacatgtcgacgataccgactgcccctactttgtcc

SEQ ID NO: 1747 - DNA, 627 bp, Aspergillus oryzae
cgcagggaaatcttgagaaaccggctggtccgacacttcgcagacggcctggtggagatctacgtcagatgcgagatggccttggcagtccattacgctcacatccagcgtcttttatgtcaaataccacctaccgaagttctaccgctggtagctggagccacttacacaacggatgtccattccaggcctctaacccatttaattcctcctaacccccgattctcccttctacaaacacattcatcacaggacctaaggcggtcatttgaggcagccatcgcgcagtttgcgcaaatcccagacgacgacgacgggggagtcgagtcagcattgatgaagcttgaaggcaaatggacaggagggtccactgacactgctgccgagccacagcaaagcacccaggttcaaggtagtgcacgtgaacaagagttctacgacactcatactcgcgcggtatgggacgctggggtccatagacgccaaaccttggccagcgaaagttcgacttattcgcactttcgagggcgcagtgttcctcgcagaccttattccgagtctctcgcagagtcggaagactcgtacagctctatacctcttcttgagcgtggactgagcgatgaatca

SEQ ID NO: 1748 - DNA, 587 bp, Aspergillus oryzae
gagagagaaagggcaacatcgaggccacaaccacaacagtgacaccttcgaccttcgaaacatctttgaccttgtatttactaacaacggaatgattatatagcggtcggctctacaggttgagagccgggtaggtctttttctgctcccaaacgaggatctacttaattttttcattctattcaagcaagaagctttgtcgacttctaatctcgattttaccgcgctacgccgttaatcataatggatattcaccgctgtcgcttcgttccttataaccctcaagctatcaatgcgctcgcattctcccatcctccatctgcagaacttgcgggacgtggtgttcctactctccgactcgcggttggtcgcgcgaatggcgatattgaaatatggaatccattgcgcggcgcatggtttcaggagacagttctccgtggagggaaggatagaagtatagaaggactcacctggaccctcgatccgcctgaatctggtcccgatggttcaaagatacccggacggctgcgcttgttcagtatcggatactcgactgcggtgactgaatgggatattgaacagggctg

SEQ ID NO: 1749 - DNA, 591 bp, Aspergillus oryzae
tgaatgtcgactcttcctttgattcggctgaggaccccgaagccgatacggattccagctttgacaacaacgatcatcgcattgtgagctctctacgtgcagaagaccctaggaccactgccccgcaccgttccaggcctaacatcttacccgcgagttctgatacactacggccgacatcgttaatggatatccccagtgtgttggacttctttgactcagttccagaagggctgaagacctaccttatgtaccagtttctgaggcggtgtccgaagccaactttgcatttcgttgctgacgttgttaacccggccttaaaatgcgatttcctggctcttctgcctcttgaactaagcctaaatattgtgaaatactttgacgctcagaccatgtgccgtgctgcacaagtttctaagaaatggaggcatattatcaattccgatgaaaagagttggaaggaacttttcgatagagatggatatgttctcccagaaggagagctggagcgtgcaatcagggaagggtggggatggcagtttcctaacgggggtgaagattacgagaaggacctaagcgtgtcgtctcctg

SEQ ID NO: 1750 - DNA, 592 bp, Aspergillus oryzae
taaacattatcatgcccgcaaaagtgttcgtgaccggaattaccggttatatcggaggtgacgcattccacctcatccagcagaaccatccggacttcgagttctccgctctgattcgaacggaggacaaagctcagaaagtacgccagaagtatccaaaggtgcggatagtcctgggagacttggacgatgcagacaagatcgccaaagaagctgcatgggcagacattgtgattcacaccgccgacgcttcggatcatgttggagccgcaaatgccatcgcgaagggaatggtcgatggccatagtcccgagcggccgggttactggttgcataccggtggtaccggtatcttgacttactttgattcggaagtacgcaaggtctccggcgagcctgacgacaaggtattcaacgattgggacggcgttgacgagctggttaatctgcctgcggctgcatttcatcggaatgtagatgaaatcgtgttagacgtcggttccaagcattccgaccgtgtcaagacggtcattgtttgccctcctactatctacggccgcggcaggggacccgtgtcaggtcgtggtcgaca

SEQ ID NO: 1751 - DNA, 517 bp, Aspergillus oryzae
atgggcgacgcggaatacatgggcgtcgacctgggaggtagtgcggatggcgaaccgcgagaatgttgggcttatagtcgacgcgtttaatgtgctggcggtggagtttgccgacccgtataaccccgccggtcatggacggctgtattcgacgcccgaagaatcggtcgacgtactttgtgcatctttggccgggctggtcgcgtctgttcccggagaccgtatctttttcttccaggtcggtgatgccgagcgaatggacccgaagatattccgaccacctactgatccggaggtgccggctttgctgccctggtcgaggggtcaccggttgtttccgtatgaaccccagcgaggggggtatatgccggttgatttggtcgctgcggcggtggttgcgacagggtatcagggtcctatgtcgctggaggtgtttaatagttccctgaatcgcccggatgcgggtgtgccgtcggcccatgctcgtcggggatttactggccttcggaaattggcc

SEQ ID NO: 1752 - DNA, 521 bp, Aspergillus oryzae
cggacgcgtgggttcgtggtgatgcagcattaccagttctttatggtaagacatgggatgaggggaaagacgatccctggctggtgtttcacacctcgggcacaacaggaaaccccaagccaatcacctatacacatcgaatgatggctggtgccgatatcgcggcctctttgccggacattgaagaaactcatattcatcaatatgcccagcgaaggtggtacacccccttgccctcgctccatttcgttggcatgttgatgagtcttgccatgactgggttcgtgaatatgacatccgttattgggcctccagctcctcccactcccaaactacttatcgacattttccgctacggccggatagacggtgcacttctcatgcccgctctaattgaccaactctgcctccttcctgaaggtattgaagcgctacgcgagctaaaatacatccactatgctggagctcccctctcagctaaatcaggaaatttacttgcaccttacactcaagttgtcccc

SEQ ID NO: 1753 - DNA, 536 bp, Aspergillus oryzae
aaaaaaaaagaatcagaacgattattctctcggataggggcccctcttacccgacctctttgcctacggccttttacaagacgccctctacgcatattatcgatagaagcctggtcgcttctttcagcgcaatcattacccttgtttatactgcaacggagatgcccatttgattcaaagactgccttgttatttgggattggatagactattaagaaaagtttcgtttttattagactgacgcgatcacgaccttcgtctgcttgttagtaacctgtcgaattgaccggcaggatttcacgcttcctacatcggttactggtttgatccgaaattgtattttcgaaagagagtttataaatctcagattgcttttgcctgtttctttgaaagactttcattgagaattcatagattgtttcgacatcgtctgttaaccttgctcagttttcatcttcgaaagttgaacacgcttcctgaactttgattctttgcttcgactaccaaccggtgaatcgttccaaccaaccctaagg

SEQ ID NO: 1754 - DNA, 468 bp, Aspergillus oryzae
ctttctcggaggaagagtttcgacgagtgcctggtgcgctgccggatgatcagatgtccattgccagctatgctggtacatctaagaccacagactccaatcccaacctcaacagcatgagcatagaatttcgtcgtcggtctaaggcgtcccgggagcgagaactttcgccgatgccacctcagtcggctttagcccttaccagcccctcggacaaagaaaacgcggcctctctgattcagaagacatgcacggtggtccttatccctccgattcagttatttatcgtcctcattcatatagcagctcggatcgtattaggcccagctttgacatcggccatgggggagttaaatcataagtatgagtatcaagtggcggatcctcaggaggctgtggacgactttgatcttccacttgcacccgactgtccgaggaaacagtcggtatccgaagccaactcttggg

SEQ ID NO: 1755 - DNA, 408 bp, Aspergillus oryzae
actgcccttcagtggctgactccagcccaaacgtctaataggaagcatccatatatgttttctcagtgccaggctatccatgcacgatcaattttcccgtgtcaggatacaccagatgtcaagtctactattgacttcaatattacttcacctctccctgtggttgccagtggattgcctgttcgaggcatcatagaaaaagcccaaccaggcagtaaaactctgtaccagtttcatcaaaaattgcctatcccaagttatctgttcgcgttggctagtggtgatatctcggaagctgcaattgggccccggagtgttgttgcaactagccctgacaaacttagtgaatgccagtgggagcttaaagcggacactgaaaacttcatacatgcaattgagaaaatcgtt

SEQ ID NO: 1756 - DNA, 619 bp, Aspergillus oryzae
cccacgcgtccgctctatagtagtgtacatacctcttcagaacacctgagttttattaatctttttctatttctctttcttttcctatttcctttgtttggcttatcggtatcactttcgtacgatcttgattctacctgaaccttgaggacaagtttttactcatctttccatattgctcttcaagtatactaggggcatgtcaatttcaggactctaagaaacgggtcaaagatatgccttcttgttgaacagctgcgcccacacatgcgatctctcaatgtttcgactcaggcgaatacttccaaactctacattttttcgaattagcccaccattgtctcagacctcgaagctcaacaatgtgcgccatgtcaaattcaagcggccgtggattaggagattatttaccacattcttaatttatggtaccgcatttcatttgtggagttcgttcattctccttcagtttgatgatacactagacgatgccgatgacatacaggaagccccctctggaaagataggtgtgggcaaaaatcgaaaaaatgatacggaggggcaccttgagaaccctgcgagcgtaacgatagatactgatcctgttttcataccattg

SEQ ID NO: 1757 - DNA, 381 bp, Aspergillus oryzae
  modified_base (119)..(119): n is a, c, g, or t
ctagttctctatatctttggaaagaggtaagaatctttttttgatcgcttggatagactcaattttacgactcgaagatgccaccgcgcctgcctctttcacatacattgcgacagccntcggtcttgtcggttcgcgtcagagtcacaagatttagcaccagtgcggatgatgccgtgatacagacccagcagatccctgcgccgggctccgggaatattcgagtcctgctgctgaacagacccaaagccagaaacgcaatttccaagaatcttttggacggtctgtctaagcatgtccagtccatatccgcggagggaggcaacggtcctacacgggccttggtcattgccagcaatgtggattcggccttttgtgcgg

SEQ ID NO: 1758 - DNA, 542 bp, Aspergillus oryzae
  modified_base (347)..(348): n is a, c, g, or t
cgaattctccgtcggtatcaaacccaatacatgggaggttaaggaatttcttccggaagaagatcgtcgcgcaacagtctaccaggacacaaattcggagtacgccggaagcatgtatcaccatcgagcgtcggcttataacaatcacaattattagtcactattaggtttgatatattttgtgacgatcatattcgcggattatctatttgattttttctagtctttcaaagttagtcattgattcgcgttgttgcggcctaacgagttaatgcctgagtttgagcgtggctgaatatcattttttatttttctgttatttttttttattcttgtaacgttttgcnnagtcgtgtgtggaacgtcgactgttacattctcaatgatgttttctttcaatttctcatgcgacggtagcgttgattcatacgacgttttctttgatattcctgaccacttctgtgtgatgtgtacagtggataagccaactcagttttgtatctagactagttacacgattaaagtgatccaagctgttcttc

SEQ ID NO: 1759 - DNA, 574 bp, Aspergillus oryzae
gtccaatccttcatcgacctttgcgaacgtcatcaagcgagcttctataagttcgtccacgaagtgcaccttcatgacaatgggctcttcggctctctgatgggatggattgaagatattcttgatttcctacgccacgggcctgttggtggcaagcttgacatgaacgctttgcttcacggggctaaggatgttgggcaaatcgataaagataaggctcttgatgagataaacgcgctcataaaatggcacgaagaccgcaagcgttggcacctgaataagaccaggcagaagatggcggcggaaggaaccgggaatgacccatttccgacattcaagggaagcgattttggtttagacgagggcgacctcgaagaccttgccatctcggacgcggagtctgatcctaccgacgagcttgacgaggaagatgaccttgaccccatctctgctgaacgacgacgccgggtgaagcaacaggatcaactccgtcgcacggctggcgaacctgttaagcctgaagtcaaagagattctcaagctagcagaaccgtttggagtaatgttacggatgg

SEQ ID NO: 1760 - DNA, 422 bp, Aspergillus oryzae
attgagagtcaaggttcagcaagacatcaagcatttccaacatgccgacgacctacgctatgcgattgctgttccagaagaatgaattgaaccaagtgaccaataaatgggagaaaagttatatctctgagatcgccaaactgggaggtcgggtgactcgcctcaacaccccacaggttactgccggtaccaacggcttgatctaccatgtgacaatgcccgataagtcttctccacgtcttgaggcggttaagtttggcccaaagcggttggaaaaattgggcaagcttgtcgacgggtggattgtgcctgataaatgaactcattataatctcaccaaactgtatattgctattaagcgactgcaattctctatcggttgtctgattgccttaattgcatagcttctttgttcaagttgg

SEQ ID NO: 1761 - DNA, 515 bp, Aspergillus oryzae
aaaatcttctcattgcacacttaacttgataatgctatagcctctaccctttcaatcgattctgttccgcttgaagcagcttcggttgtctactttactgtatcctatcctacggaccatctccacaatgggtcactatgagctgaagcaggctccgcctgcagcactacacgaaatagacggctcatcccaggagaatctggatgatatcaacttagcccgcattggaaagcgcgctgtcctaaggcggaattttgggttgatgtcaatcctgggcttcagttgcacgattctcatcacctgggagggtataacagcactgttcatacaaggcttccagaatggtggccctgctgggtcagtttatgcgttcctctttgtctgggccggtgttacagcgaccttcgttgtattatcagagctagtttcaatggctccaacagccggcggacagtaccactggtgctcgatgttggcacctcggtcggcaatgaaactgtccagttatatcacgg

SEQ ID NO: 1762 - DNA, 522 bp, Aspergillus oryzae
ctcgggctatattcagctgctggaagtacaggaaagagctacattcgacgttgagcagtgttgaaagtattaattgcttgctgaagagtcaatctcgttggtcgtgcttgcctgaatctgtataaaccattcaccatgcgtgcgttcgaatctgtcttcgcagccattgcctgcttggcccatattggcatgacagatgcattgtccttcactcagtggccaggtgtcatccatactggtgaagacaataccgtgaagtggatcggtgaccccgacctccccacgactattacccttctcaggggcgcggcgaacgaccttggcgacgtgtatgtccttacgcgtgatgcccgtgggaatgaatacacctggaaggccaatgatgacctgcaggatggctcagattacgctctgcaaattcaacaaaacgaagaaatcaactacaccggacatataattgtcgagcatcccaacggccaagcaccatcttcaaaggggccgcgtcccgatgaggaccctaac

SEQ ID NO: 1763 - DNA, 449 bp, Aspergillus oryzae
ttaacgcgccccacaagctaaagtcactcgcagggattacttcatattgatagcaaggaattagttagaaacatctgaagacagaaagagaaatgcagctgccgtccaccaaacctacgctccattaccacgatatcggtagcctgggccgtggggaggttatccgactattcttgaaagacgccggagtcgagttcaaggatgtccgatatccgtatgacgatacttggccagcagccagcgcagtactcaaggaaaaaggattatcggtaactggccacgtaccggtactagagtatgaagggaaaatcctaacacagcatctggcaattctgaggtacctagccagagagctgggcgaatacgacggaaatacgagcctcgagaagtatttcctggatgcggttgccgatgtgtataatgactggcggatccaatgggtaaacaac

SEQ ID NO: 1764 - DNA, 555 bp, Aspergillus oryzae
atcttgtcctgtttgttcccctccgcacatgattttagccatggagtcacttctccctggctataacgagtacctgacttggtacccggacttgactatacccaccaccgaaatatcagacgaccccgtggcagctggagacccctttgcgtttccagatcttgaggtgcaatcaactatgatcagtacaacgctagcgcaattcccatacctttatcccgacccgaatctaatccaaatagagaactcccatcaaggcattacgtccccggaagacgcacatcagtctccttagagtactgagtgcttgcctgacatggggggctctttgggagccgctgggtcaacgagagctggtgaggtagaggcgtctttcctttcgctgccaaattgtgatctgggctcggaagaaactagaagccttccctacgatcgttccagtgccacatcagaaagggtctatcgttgcgatcgtccgaaatcccaatctaggcgtggcttcaagcagaaggcgcacctcataaaccatatgaggacccacaaacctgttctatg

SEQ ID NO: 1765 - DNA, 489 bp, Aspergillus oryzae
catgagggcatatttcttccacccccatctcttgtcccctccagatttgcattgagatcgactcgcgcagctattcaccatggcgcgaaacagcgaaaaagcccagtcgatgctgttccgcttccgggcgcagcaggccgcggatctcggaatcatcgacatgggtcgcacccggcgtcccaaggcgatcacgtcggtggactcgatccccatgtgtgaaaaatggcgtgggcaggtcctcaaggagatttcgcgcaaggtgtcccgcatccaagagccgagtttgagcgattatcagatccgggacctgaacgatgagatcaacaagctgatgcgcgagaagtggatctgggagatgcagattcggaatctgggcggtccgaattatatgcgtggttccgggcgggtgtatgatgatgaggggagggagattcccggtggtgggaagggttatcgatattttggacgcgctagggagttacctggtgt

SEQ ID NO: 1766 - DNA, 486 bp, Aspergillus oryzae
attttctcctatttactgtgtacattcttggtacttgatatttcaagtcgacataatctcgtgaacgtctcctcccgcttaatccatccacattgattacccaaattttgacacaacatgaatccagtcttgcgctctcgctccatactgagggtagccaattcgtcgatcccttcactctaccgttcccagaaggtgtctcctatgtcatggcggacttacgctcatagttcctatggcggagaaggggagactgaagctcaacagccgaataattctcggaataccccaacccgggacattgaacatccagggccatctgccccagatgtcagcaagggctcgacagcatcttcaagctctcagcctcgatcttcttccacttcccaagaagatcgagataaggaagattcagaaggtagacccattcgaatgtcatcctccaacaacgcaaaaccaacgattactgacggacgccattccccc

SEQ ID NO: 1767 - DNA, 534 bp, Aspergillus oryzae
gtgattcgcactcaggcaatacccgtggccggaggatgatcgctagtctccctgggaatcacgatttgggattcggaactggggttcaactgcccgtccgtgatcggttccagacatattttggccaaagtaatcgcgttgatgttattggaaaccacactttcgtatcggttgacacggtatcattgagcgccatggatcagcctgacccagacaccggaagttcagggtctggggacggacacccgccgaacgagcatatttggaaagaagcagaggatttcctgaacagtatgaatgttcatcgtggcaaggcggagatggaagaattgcgcctgatgaggaaccaaagtgaaggccatgtgtttgaccacaaggtcgtggacctctcacaacctacacttcaccaaagactcaaaccggaagttgtggggttccctgccattcttcttacccatgttccattgtatcgcaaaccggccacgccttgcgggcctttgcgagaacactacccgccatcagatggtgaaccgg

SEQ ID NO: 1768 - DNA, 517 bp, Aspergillus oryzae
  modified_base (230)..(230): n is a, c, g, or t
ggcaatgcttgtgcacagatcagcagtagggcctctaggactttagcggcttcaccgtcggctaccccggtcgtggatggtgagcttgctctggcctgcttaaagtcggttcctctcgggaaggcggaggctctccagttgatggagtcgattttcccttatgtggagtggcagtccgatacctcgtatattaaaaacccaccctctgcttatctcgagccagccgtggntatctgggctgaactgaacaaagtgtacgacaacatcaaatctgacaaatatgccggtgaatatgagttccaagcggatctcttcaaggcattcaacctcgcccatgacggacacttccgtttcttccccgaccttctgaccaaggtgctgacgttccatcgcaacgttggtctggtttccgtcagcttagacggcaaggagactccccagatctatgtgcacaccgatatcgtcgaaagggtagagaacggactcgatccatctccagtgaaatccatcaatgggg

SEQ ID NO: 1769 - DNA, 620 bp, Aspergillus oryzae
gttgtctaggtcatacataactcaatgacccgccaagttggttgattggcttccagctcctatttctacggaagtttctcctcatggttctcgtgcccaccgctcctcctgagtcctaaccgtcgactgtcagagctgttacccgttttggatgttcaacttgacgacctaacgaggagcagctcgactttcgaaggtttccataatgggcattaaagggctccatggtcttctcaagtcaattcaaaaaccatgtcatttgaaaaagtttagcggacaaacacttggggtcgacgcgtatggatggctgcatcgtggtacggtcgcctgcgcggtggacttagttttggaccggccgacgaccaaacatgtcgatttcgtactgaaccgggtccgcatgttgctctattttggagttaccccatatcttatcttcgacggtgacaatctaccgagtaaagccggtaccgagtctgatcgacatcaacggcgtcaggaaagcaaaacccttgggttggaactgcagcggaagggaaggacagcggaagcttatcaagaattccagaaagcggtggatgtgacccctttaatggctcgtcaattgatcgacgaactgaaaa

SEQ ID NO: 1770 - DNA, 510 bp, Aspergillus oryzae
gccaattcagccgaaggttattattatacggcaaacgccgaccagaaaagcatgattatatacatgacaagcatatcgtggcatgcattgcaagacgtcacatcattcaagtagatcgcatcctttaaacgcccaaaatgaaaagagaaagaaaagtgacccaaattttccataagtcgtccagccgtttccttcgtttatctttcataccacatatatcagtcgttatcaacaaccagattacatctgtatcatgacaattggtgttaaaacagtacattacggctaaatgtgccgtaatgctccgaggcaaagattatcattcgcactccaagtacaagatatcgcttgatgtttgcttatctcgagtatggtttgttcatcaatgcaatttcgcgagccactgtgggccattcaagttctctctttggaggcttgttctgcttctgcagctgcagttcttcccatttcaggagctcgtagacaaaacgcagatgtggctggataata

SEQ ID NO: 1771 - DNA, 645 bp, Aspergillus oryzae
cccacgcgtccgggcttggccacctgttcgaagccggtgatttggcccgcacgtcacatacgacttttccactgcgattcgaaaccctgtcgcttcgcgaactgtttggcagaacacgtatttatccaacaggtcgtccttcagcttcagttcctgctgtcccaagccatcgagcaccccgaggctgtagagactttccgggctgtctagcactggccctgtggtcgtgatggacttgaagccgttaatgtgaaagagcatgccgagcagacacacatgcggactgagcaccaaggtcggatcgaaaatgatttcggggattttaaactcgttcctgccataaatttatcagtaaactgcttcggcggtggccgttgccagcacgtactgagctctgtctgctacggcagccagacacaatcgagtttaggacattccgggttcagccgcaccaacttctttggctggaaggtctccatcctatggcgagatagtgatgcggcgatcaacccgcggtgaatgcgcctcaacagtgtcttcgcctgtggaggacatggagagcgacgtacagacccatgcttcggtaacctgaaccgtgctctatggacgaaaaacttacaaggcctagagtgtacaaccgagagt

SEQ ID NO: 1772 - DNA, 545 bp, Aspergillus oryzae
tctcaactcattgaattatattgatcagcacccaagacaacttcagcataccacttatctagaaaacaaccattaagatacaactcaatagccatgtccgagtttaccgaaaagaacaaagaggtctggggcaacttggccaagacttacaaaacccggttcgaaaagggcacaaagttgatctaccgcctgactcaggaaaagcgcctttggggtagtgacgtttggactgacaccgaagccgggcaaggcaaagagatcaaggtgttggaatatgcatgtggccctggcgttgtatctacggcattggcgccattcgccaccaaagtcgttggcatagacgtcgcggacggcatggttgacgagtacaatgctagcgctcgtgaggccggttttgaagacaaaatgattggctttaaaggtgaccttctggccgaaccaatgccagaggaattctcaaggccagagtattccgatttcgatgttgcatttgtgagcatggcccttcatcatttcgaaaagccggacctggccatgaagcgtct

SEQ ID NO: 1773 - DNA, 523 bp, Aspergillus oryzae
aacgggagataaaatggaagttaagagtgtcgctatctcacaatgcggaacttttgcattggttgggtcagcaggaggtagcatcgatatgtttaacatgcaatccggcttataccgacagagttttcctagtcgtggcctcaagaaagcttcaaaaagcaatggtgctaagcatagcaaagcagtcaccggggtagctattgacggattgaaccaaacagttgttagctgtgggcttgatgggaaagtgaagttttgggacttcacctcgggatcacttgccgatgaactcgactggtatccgatgacatctatcactggacttcgatacaacagtacgagcgaactggttgcattcagctgcgacgacctttccatccgtgtcgttgacatagaaacgaggaaagtcatccgtgagttctggggttgtgtaggtcaaataaacgatttcacattttcctctgatggacgatggattattgccgcttcgatggattctatcatccgagtatgggacttgcca

SEQ ID NO: 1774 - DNA, 431 bp, Aspergillus oryzae
cgagaagtcccagaatccgtcgcagcccacaggaggaaacaagtgtgttgtaatgtgatacggaaacagaagcaacgtgaataagcacagaacccaaaatgcttccgctgactgttagttgctgctagacaacgaaggaaagtcgcatgcgttcactatatgctcgcgggcggagtatttttgcaatggtgtgatgaagaaagttgttttctaaagccccatgcggagtacacctgccattgaacagattgaagtttgttctgttttcaatcattgcccttctttctaccccgacgctccccccatccgtctccttctccttctacaatcactctctccatttcatcttctattacttttgcggcgttcctcagtctcatcgtctttcttaatagctatggctttggagataatggatgtttcaagctaag

SEQ ID NO: 1775 - DNA, 530 bp, Aspergillus oryzae
atttagtgaaagactccctctgatatactggaataaagaaccttggttggtgcctactataccgaaagcaaaaacaacgcctgttatcattacctcttttgccgtcgtacctacaatgtgtttccgttcctcgaaagaaatcgactcccacagcctgccgtcacggccgatcgaccagcccaatgaatcaccagaacaagataagaacacgccacggccgaaggttgtgagagacgaccggcccctcaagctgtctaataaggagatgagaagaaagacttggtccaggccgaacgtacttggtgcagttacctttggcatgtaaggggctgcttaggttgaatgctgtttgacgagagctgaaatgtgatatggtggtatatatcaatatgatgctgggagtcccccggacgggaaagaagtgaaaatggaagctttctaccaacagcggggtgtgaacatgggcgatggacaacgggcatacttttgagggcggcaactaggcttttggcatacgctgttagccggca

SEQ ID NO: 1776 - DNA, 557 bp, Aspergillus oryzae
cggacgcgtgggtgcgtcgccgtttcgccccaatccctgctcatgatgactggattcttactgtcgcgacgcgggttgacgtcctctctaccatcccttcggcggtatccccgcacctacctccgacagatagggtctggcaggaacaaggcagcttcgcagtatagtacggcctcctcaccggcagagaatggaaagaatgacacgaaacctctccccgccacttatttccccaattctgaaacctcgacccaaaaaccttccccgcgatggactgccttgaaaaccgcgaaaccattttccgacttcttgacggataccttcaaccgccaacatgactatctccgaatcagcatcaccgagcgttgcaacctccgatgtgtgtactgtatgccggaagaaggcatagagctttcgccaccggctcgcctgctcacgtcccccgagatagtttacctgtcctcccttttcgtctcgcaaggggtaacgaagatccgcttaacaggcggtgaacctactgtccgaaaggatattgtccctttgatgcagtccatcgg

SEQ ID NO: 1777 - DNA, 500 bp, Aspergillus oryzae
  modified_base (282)..(282): n is a, c, g, or t
ccgaattgcgggacaagtggatctcgctcatccccaccggcaagatgggtactcccgaggacctgatgggtcccgttaccttcctgctcagtgatgcctccaagtacatgactggtgccgatatccgcgttgacggtggctacaccctcacctagataccccgagaggggctgtacttgtttctgattatatatatttttaatatgggcatgaggtacggaattgtttttggattcggtatagaccggtttgcttgattctgggtggtaactcgggcttcgnttgcttccattctctctcgatgtggtctgtgatgacacatcgggctgcattacgacgattatttttgttctgaagaagcgtgttttctggagaatgtgttttgttccaaaagcgggaaaggttgtatttttcttgttttgctatggagtacccaaaaccgcggttggacttggttttgcatgatagacttgttttcttttcttttccagagcatgaga

SEQ ID NO: 1778 - DNA, 552 bp, Aspergillus oryzae
  modified_base (75)..(75): n is a, c, g, or t
cccaagccctcacaatagccaccacaatcataaccctccttaccatccccgtcttatacccccaactcccaaccnggctcaaaaccaccacatccaaactcctccccaacagccagaaaaagaagcaccccagcagcgaaatcctcgcactaagagtctaccccatcaaatcatgccgcggcctcagtctaaacagcacaaccctccacatggaaggtctagacctcgaccgcaggtggatgctcatcgacgccaaaacccacgacttcctgaccatccggcaaatcccacagatgacgctcataaacaccgctctcagcaccgatgaccaatcccttgtggtcacatttacaggggttactgataaagaggtccgcgtacccctccgcccagacactgcctggctagacgcccacacgaccctgggccaggtgaagatctgggacatcgagacagacgcctatatctacggacctgaagtcaatgccccatttagtgagttcctgagccgtgacgtttgcctcgtgtacaagggtcctacgcctagaatta

SEQ ID NO: 1779 - DNA, 556 bp, Aspergillus oryzae
atcctccatcccccaaccatgtccacagaccccgtaaagctcctccaaagcaataatgacgggctaccagcaacccgcccggactcccaaatcgaccaagccgtcgccgtcaaatactggagcgacaaacccgcaacagtgaacggcatgcttggcggctacgcccaggtctcgcggaccgacctgcgcggatcccggaactttctcgcaaaggcccgtcgattagttcccggatgtccggtgactgggaagctcaagcgtggcgtggattgcggagctgggatcggacgcgtgattaatgattttctgggccaggagtgcgaaattgttgatgccgttgagccggtggagaagttttcccgggtactgagtgaaaggcggctgacgaggaattgtgcccttggggaggtgctgactattggtattgaggattgggttcctggggttaaggtttatgatcttatttgggcgcagtggagtgttccttatctgacggatgcgcagttggtggagtatttggtgcggtgtcgcggtgctttgactgatgttgggctta

SEQ ID NO: 1780 - DNA, 440 bp, Aspergillus oryzae
cgccgagtttcgccttccactcttttatattgctcatcgaaacgcttgctcgacaacattctggtagcgctcagaatcagatcattggaatgtgtgcatattagacggctgtggaacgtcctgctcgcccgcctgagcgaccctcgaccggagtgatttcagccccccctcatagcctagatctgctttggtctgcccttgagttgagagtctgtgatatagacctcctcttgaggccgcaggacttagggctgttcaggctctgatcaatctcctttctccgaaccttcacccgggaccccatgtccgatcgcgcctcctcggcgtcattccggttagggcctccttcgccatcctctcccgccgctgggtctctaaaatcgaaccacccttcttatacctcaaccgaacacactccacagaccccgacatctcctccg

SEQ ID NO: 1781 - DNA, 470 bp, Aspergillus oryzae
ccatcccaaaccatccaccacagcaagacaacaaaaaaaaaaaaaaatcgaaggaaaacaaacccaaagaaaaagaaaatggaaaccctccgcaccgccttcgcagaccgaccccgccctctcctctcctacggcgtgcccttcgaaaccgccgccgcaaaaacacataaacgacctcttccacgcttcaagagtctacataatctgctcaagctccctatcgcgaaacacagacgtgctcgaccgcctaaacacctccatcggaaaaaacaagatagtgggaacccgcatcggaatgcggagccatacatattggtccgagatcctggagatcgtgcacgaagcaagagacagcggagcggatttgatattgacaattggagcggggagtttaacggatggggcgaaggttgttgctttggccctatccaacaacgtccaaacaaaagccgacctctccaaactccccg

SEQ ID NO: 1782 - DNA, 479 bp, Aspergillus oryzae
ctagaagcaaacaccatagctctgaaatctgatagcattccgtacgagtgctacatatcaacactcaaccatcatcagtccacaagaactacatccaacatgtccaagcttatcactgtcttcggtgccacgggcaaccaaggcggctccgtgagcaaccacattctggcggatccccagctccacaaagagttcaagatccgaggcatcacccgcgataccaccaagcccgccgcccaggagctgcaaaagcgtggagtggaagttgttacggccgatctgaactctgtcgaatctcttcgcacagctctcaaaggatcccacaccgtcttcctagtaaccaactactgggaatacgtcaacaaggacaccgaggtcacccagggcaagaacgtcgccgatgtagccaaagagctcggcgtccagcacctgatcttctcttctcttgttcacgttaccgactccactaatggccgtct

SEQ ID NO: 1783 - DNA, 620 bp, Aspergillus oryzae
ggtctcgaggctatttttgtgaccctgaagacaaagatcaaagcttctcacatcacttattatacagacctaattgcaaaaccagaatgtcaagttccaagtcagaggattacaaggtgggggcttatataggatatcgaatggaggagctgggagtcagcgattacttcgttgtacctggagacaccaacctgaccctcctcgacagtctcctggaaaacccacgtcttcggatggtagaatgctgcaacgagctgaacacgggatacgctgcagatggttatgcgcgtgcgtcggaatgtaaaacagcagtggctgtcattccatacatcgtcggcggtttatctatcctgaatgctatatcgggtgcttgctcagaacgacttaaggtcatcgttatctcgggctgtccacctactagcgtgttgaccagcagtaaaccgacgcaccatacgccgtcgccgacgaataaggacgtggccctccacgcctttcaaggagtgacggctgcgtcagtacgcgtcaacactgctgaatccgcgacagatgtgattgataatgccataattaaatgtattcaacaatcactcccggtatacatcgaactgccgaacgacatt

SEQ ID NO: 1784 - DNA, 574 bp, Aspergillus oryzae
cggaacttccactagagctgagaaaagctttgatcttccgcaaatagagcattatcggtccaatacagtacccaacaattctttgtcgcaaaagatatgaggatctttcggtcacactcagctatcacgtcctccgtcgctcaaatgcaatgccaccccgtcgaccggtgtcgccgcttaatctggaaacatgctctccgccaacttccgatctatgcaacgatggtcttctcggttccgacgatgagctgaacgatgaggaacgtgctgcgcaacgtcggaggattgagaaacttgctgagtcatatctccagggcaaacccctcttcatcctctcagcttcgctacggggtcgctttgacgaagactgggtgaacccttggaagactaatagaagacgagcgataccgcctggccgcagtacgatacggccgcccaaagaacccgagattccagcgagccccgtaataaatgaaaccaactctcgaagacgaagaacataccaggagcctcaggaaatccgcgattcgagaccacctactgtcgctccagagtcagatatccatgtttctgg

SEQ ID NO: 1785 - DNA, 540 bp, Aspergillus oryzae
caagctgtaaaactgaaaatcgcagcttgggcccacccgcttagcgccgacagagatgctgttgggcagatatcatcattaaaactctccttctcatactcgttattcctacggggacttaggtttcggcgttctattctgattagtctccctgcatctaagcctgtttctgctttataaaggatgatttcggggttgatatgtatacacacaccttttcgccgctcaagctgagcgggttgtatttactcgtgaatgagttttactgcgtcatgcagttacaccagggaagataatgtcatcttctgatagatttaagttgacagtgaagcttatcatcaagaaccttcatgatatccaatctggagtcaacgcggaggggtattaaattacacaaatgccgactcatgaatcaatagtcgtctgaaatataccgaatcgcctttcccaaccgaagcagtcctcgcggctgcacccagacgtatcgtaagatattgcatccgcatctgagaggtgggaacacctgacaccatactcctg

SEQ ID NO: 1786 - DNA, 630 bp, Aspergillus oryzae
cccacgcgtccgcccacgcgtccgcgatcgttgacaagaaaacccttcaggcacattcagtgtaaagagacacacacaccttcgacttcgactcttattatatctgcaaacaacaaaatgcatttctctacgctctttgctgcctctctcgctctcgccccagccgtctatggcaacagcgtaagcgttgtcgaagtcgaggttcatggccacgacaattgccatgttggaagactgcctggaaacaacctcgaggagcactcgaccatcgactccaagccaaagaaggtcttcccgactgagaattcctgcccgtcagtcaagctgcctgaccatgacgaagtcgacacgtactccttcactgtaactgcgctcaacaagaagagcttcgagcagtgccgcggtctgggtgtctacaccaacaaggaatgtgccggcaaccctgactggattgtgcctttccaccctggagagctccgggcctccagcccttgtctccctgagtacggcttcgaggactacgtttcgcttcagcttatttgcaatgacgacccagtccaccgcgacgaaggaaagtccgaggcacatggagagggaaacaagaaggcaagggtgaaggaacaaggaggc

SEQ ID NO: 1787 - DNA, 512 bp, Aspergillus oryzae
caaacgcccagtatcgttagcttttctgctataccacgcagtgatctgctctctgctacgttattcggggattatagaagtgactctctcgggccgtttggcctgaatatctacagacaccatgtggaagccgtcggagaggctgatggagaccatcagacattatgccagcttccccgccactggtgtctcccttcggcagatggtccaatttggagacaggccttcgaccgtagggactctttttcgcgcctctcaattcctctccgaggaactcccaattcgactcgctcaccgtgtccaggacctgggggaactccctgatggactcagcgaaatgccctctatcaaaaaggtccaggactggtatgcgcaatcgttcgaggaaatcatcaccctgcctcgaccgactcttacccaggaagtgaaatcccggctgttacggccaggaagaatcaacgggggtgcttcgaagatcctctcggaaaccactcagaaccctagtatcaagg

SEQ ID NO: 1788 - DNA, 542 bp, Aspergillus oryzae
tgttgatcgaatatcaccacctcagagcctacaccagtgctctcgccattcaggccgtggtggaacgggctgttacaaggggggttagctggattggcgaaaccagtcgcgaatcagttgatgcatgccttctgccccacgaccaagattttattcgtggtgttattctgagtagtagtaaagttctagaaattgccactcatatggcagccgacggcatgctacgatacgcgcctttacgcactcttgtgtgtgtcacctcttcatcggtctatctcctcaaggccataagccttggggtgcaccatactgatctacaggcctctctccatacgttagatcaatgcatcgttgcgttgcggtcctccggtactgacgacatggacttctcattgagatacgcgaggttaatagagaagcacgtcgatcggtttcgggcgaactttgtctctggccgtgtcgcgaccatgcatccagatcaccagcgctatcatctacaaacaccagagccattaacctcaacacaaccggatggccggccc

SEQ ID NO: 1789 - DNA, 502 bp, Aspergillus oryzae
gtgagagaaaaaaaaaaaaaaaaaaaaaagaggaaagggaagagggaaagtcaataaataaaaatgttgattgggttgtgtggagggatatgctctggtaaacatgccattgcagagtaccttatccagcatcaagggttccagctactcgaacttaaaagtagaagtttccctcaaatagctgatgagcccgaggatgatcgatggctacatgcgtcggagttcacgggtaaagagagaagtcagccatcgcagctatcttttggaagtgccgaatcccttctagattttgcaacgaaaaactggcaaggcctctgggtaacaacagatatttgggagagtgttactttagatcgctttcttcaacgcccgtttttcctcctagtgagcgttgacgctccagtcagtcttcggtggcagcgatttagggagaggtgtcggaggaggcagcttgaggccccgcctctcgagaagtttgtgctctggagtgatcgacatctgt

SEQ ID NO: 1790 - DNA, 398 bp, Aspergillus oryzae
gttaactgtcaggaatgtagaagagaagggagatgataaatagcgaatggtctcccctagatgaacgtcgcagccttgctacaaagtatacatccactcgtcactcaatgacccaagatggtcgcagaccccagaccccaaacactagccggcaaagtcgccattgtgacaggcgcagcgagaggaatcggcgccgggctggctgaagaattagcccgtcgaggagccaaagtcttgatcacatacacatcagcgagcagcgaacccatcgctgataaactaatcgagaaaatcaaaaacttcaacaacggctccaaggcagccaaagtccgcgccgatctccgcgatctatcagctggagaaacgatcgtcgaagcctcaatccaagcattcggccc

SEQ ID NO: 1791 - DNA, 526 bp, Aspergillus oryzae
ctcaacctctccatttcgaagagctccattaccgttctttaatacagctacttattcgtcttatgtcaaccaccattctactagacttataccttcaattctcctgctgttagcaacaaatattcaccaatccgctatcgcaaacatgtcaatgctcaagcaactcacctcaattactatccggctgggccagcccttcaaaaccgccaacctccgagcccagccactcatccagccaatcaaccaaaacaggcgagccttccatgcctccccaagacctcaaacaacccatcagcagaaggaggaggaaagtagatttcacgatcggaacatgcttgaccctcagcgaaacgaaggcacccaaacgggtacggacaatgaagtcgctggccatccatccgcctttgacccaaacacgacgagacctgagaccgaagtccaagagtccgagaatgagagccaacagcaaggtaaagttagcaacccgctgaacgttagcccgggaaataccgaagtgagtggcaca

SEQ ID NO: 1792 - DNA, 493 bp, Aspergillus oryzae
  modified_base (197)..(197): n is a, c, g, or t
  modified_base (391)..(391): n is a, c, g, or t
  modified_base (469)..(469): n is a, c, g, or t
cccacgcgtccgcccacgcgtccggtgaagcccgccccctcgagcaaaacaagcgagacaagtctctgccgggactaaaactcgagaagcaacttgggctgcctgtgtgacaggccttagcatcagttcaattcggtcaaccttatcgaggtctagcgacacaagatgtcgagcgacaagcctgaagttactgaagnaggcatggtggcctcacccgctgccacaaaacctagcttcaaatctcgcgtggcggcccactttaagaaatggtggtgggcgcacctcatcgcattcgttgtagtggtgctcgtcgtggcccttccggtggtatatgtcggctatccgaacatcgcacaggacaacattaacgactcgaaattggaagtcaagncgatggttatcagtaagccgacaccgaattcgttccatgtggaccagcagcaggtcatctggacggatagcgtgtttncccaccatctatagctttaacgca

SEQ ID NO: 1793 - DNA, 409 bp, Aspergillus oryzae
  modified_base (148)..(148): n is a, c, g, or t
cacgatataaagaggaatcctgtcgcttctcttttctctctctatccccctactatctatttgattgttgatacccatttcattcctcttctgtattttctcaaaatttcactgacgtcataatgtcttctgctcagcagcgtcttanccaggtggcttctcacttcacccctggtggcaagaagggcgtcgccgccatcaccgagaagcaccccgatgacattgtcgtgacttgtgcccttcgttctgccctcaccaagggtggaaagggtggcttcaaggataccgcggctgctgatatcctggctggcgttttcaagggtgttattgagaagagtggcatcgaccccaacgtcgtcgaggatgttgccgtcggctccgtccttgcccctggtggcggtgccaccga

SEQ ID NO: 1794 - DNA, 421 bp, Aspergillus oryzae
ccgattctttgcccttagaagcgttgtcaaaactcaaacacgtcaaattccgattctgttcgagtacgccgatctgtgtctttcatatcacagttatttcatacccaccatttcgccacgataacgtgtcgacacaccctcgtgggggtgtgactgccatctcgtatgccagagcttgccgcccgagtcaagcaaattggcttgactcaggtctactgctccaaggaaaaacctctggttgatattgttcttgtacatggattgaacggccatccctataacacctgggctacccaagggaatccacccgtcttctggccagctgaccttctcccggaagtgttagagtctagccgagtgcggatcttgacatatggatataatgcgaatgttgcatctttcaccgatggcgcttcaaggg

SEQ ID NO: 1795 - DNA, 424 bp, Aspergillus oryzae
  modified_base (329)..(329): n is a, c, g, or t
cccacgcgtccgcggacgcgtgggcggcgatggaagcgacggcaacgactacaacgactaccgcaaccacctcgtctcgctgggtccatccttcctctacaaagtcctccgtcaaccatcctacgaggcacgccgcaacctcatcgcctgtaatgccgtctcctccaaatcctcctttatgatcctcgtccaggtctcccgggaccccccatccctcctctacccagccgacaagtacgaaagcgaagacatcggcagaactctcccgctcatgccggccatcgagcaacccaacagcggctggaagcaccactggcacggctacgggnccatccaccgcgtgcgggaagtcgtccgcagcgacaacctccaggaaccctggatcgagcggacgatcggaaactccgctggatggcaatgggag

SEQ ID NO: 1796 - DNA, 633 bp, Aspergillus oryzae
  modified_base (74)..(74): n is a, c, g, or t
  modified_base (83)..(83): n is a, c, g, or t
cccacgcgtccggtttatctctactagacagttcctccacgatatagagaaactttttgagcccgccaagtcgngttggtccngtcttaaactggaacccaccatatcatatcgtacaaagctccaacaaccccgccaatcaaagtacaacccaacatggctctcccagtcagcgaattcattcatttccagctcaagtcctcagtaaaacccgaggacccctcaaacgaagaaggccaagcactactccagctcttccaaacagccaagcaccaaagcggatataaaagctcagcatggggcagaacagtagaggacgagaacatcgtagtatgggtagttaactgggccgacgcgcacgaaggaattcaaccacaattcctagccccatacatcgaacccaacacgcaagtgagcgtcatcttcgcgacactcacaccatcgatcaccgaaaccgagtccctaaccaccaaccccgtcacggagctggtcgcgctcaccgtccccagttccctgacgcccgacgagcaaaagaagctcaatgccgatctgattgagttccgggctgcgctgacggagaaattgcctgagggtggacggcccaagtcgtgggcttatggcgcaggtggagag

SEQ ID NO: 1797 - DNA, 369 bp, Aspergillus oryzae
  modified_base (44)..(44): n is a, c, g, or t
tgttataatcgtgataaaagttcattactgattttcctccccanaactcgaaaattgatatctccggcgataagatgaagttccagtcgacattttttgcgatttttctcgcgatggcttcggctgtttatgccgccgagcaatgccctgagaaccaagaatacaagacctgcggtagctcctgtccgcctgcttgcgactctccccctgatcaggtttgcacaatggaatgtgttgagggttgtcagtgcatagatggctatgtactcaatcaatatagagagtgtattccccagagtgaatgtcccaagagtgtgcgggaagacgacactgaggcttacaatctcaatataataaacgtttatcatt

SEQ ID NO: 1798 - DNA, 574 bp, Aspergillus oryzae
aaaacagctttctttctagtcaaataagaccccggtcttgcaatatacggagcttctctcgtgcccaagaggcttcggtcttccgtcgactctttagttcatccaggtcaaagagttcgccgcagtcggagcaatccagttcgctctcgcagcggttaaaggcgctttcacgggagtacggctggtcggccttgggagtgtatttactcttatccgcaatggacttcccgttctgttttgccgccgttcgcttccttggggcggagaaagtcggccattatgagcatgtagtcattgaggcgtttaagggtgcagtcggtactgtgcttcccagtgtgcaagaggagcaattcaaggacgagacaaattctacgaccgattcttcaaaggataatgtggacgggagtacagtggagaaaaagctagatgaaggggcgagcctatggacacaggttgctctcgcctatgcaatccacaagagtcttatattcatccgtgtgcctctgactgctgctataactcccaaagttgttaaggtcttacggcaatggggctgggatattgtcaaaggcaa

SEQ ID NO: 1799 - DNA, 274 bp, Aspergillus oryzae
cacctaagctgagcaggcgccggaccgaggccattcagctgcaagaggcattggaggacagccttcgtgatttgcgttgatttgataattatgtgctgctccggtggggtttttctttccatccttggtttttcccctccgtcacgcaaatgcgggagcgaaattcattgagctggtttttgagttttaatacgctttttgttatgtatctgagctagtgactagtactaatacttttgggtgctggtttaccctgccaggccaaaatgtgaag

SEQ ID NO: 1800 - DNA, 505 bp, Aspergillus oryzae
cggacgcgtgggcggacgcgtgggctagttctagatcgcgagcggccgccctttttttttttttttttttagtacagaagatcttgattcaggtttcctgtttaattatgtatgatcttagaatatggttttggctgacagttcgcggcgtgacataattactctttctcctcatgaacccatcccaggattctctttgccttctctgttgtgaagaacgactgattactcgacaagtcaccgcgaatctccgcatctggataatacttcttcgccagctcctgggacggcgtgtcctgggtcgtcgtgggcgccacaatattgaagacctcacatccgttcaacttttcgctcttttctaccgccaacaaacatgctctcgctgtcgcctgagcactaacccatccccacaaactcttcactgcggagctatcccagttctccgcgtgtcctttctgggcctctgaccgcgatgcgaccgcatggatgcgcatacacgcgatgt

SEQ ID NO: 1801 - DNA, 169 bp, Aspergillus oryzae
aaatcaaatagcctgtctttttggttttcgtggttcttgtagaacatctctgaaaactctgtaaggcggtcagtggatcaagtcacatgactgatttcacgtggtattccttcatgacgtattctctcagtggctgcagataataatagctttcgagctcccttgcgac

SEQ ID NO: 1802 - DNA, 520 bp, Aspergillus oryzae
tgagaagcctgcaccgcggtgaccaagttgatagcgtatgcaatatgtctcgtattgttgggttggaggcatgtgaaggccttttgatccttggaaaagaccacatctacattctagataattttttccagaggtcagatggcgagattgtcaatgtctggcaagcccctacagaggaacgagatccttatgttcgcatgattactggccgggaatccaatgaacgtaaatcacaggagcatgagactagaagttggaagtggtcggacctgatcagcgtctccaagaggcggttcctatttcgcgatgtggccctcgaaatattctttaccgacggaactagctatttgttgaccctcatctcatcgcccgctcgggataacctttgtagccaactcgcaactaaggcgcctcaagtgacagggagcgtttgccactcgcgaccagaagatgtctggagattcgagaccctcagaagccccgaagatgcacctcagtctctcgggtcaagatttgccag

SEQ ID NO: 1803 - DNA, 544 bp, Aspergillus oryzae
cgactgaaccggatttcatccttcaacatcatctattgctccataagaaaattataatctgggaatcctggcgcctgccttttccaaggcggagggaaataatctataatgctacctgtttcacgacctgagggccatatgaacctcaattatattcccactactcaaccgatgtctgggacatctacggggcgcagctccccgagcgatttgtccgctgccgccgctgtcaagtcgccctttggaccaagcggtttaaatggcgctgcagggtcaatcggaaatgcgaggctaggggctggatccccttctcatgaccttggagctcgcctatactcgaaaagagcacgagagatccaggcggaggaaggcgtctccccaagtatctggggtcctcctaccagtggtcattctaccccgcttcgcgagaacatccccgagtccccgagccaagagggtttccctgacctggtgcccacttcaagtggttcgatcaatagccctgcacggagagctagagccggcacggttccctcgaggtttt

SEQ ID NO: 1804 - DNA, 543 bp, Aspergillus oryzae
atagtttccaataccagtatccactactgcaacttaagtatttatcactgctttccctttccaaagtgctctcttgttactccccgtcatatttcaccccctgattcggccccatccacccgcggttaatttggcccgcattctgatctcatcgccgcttcgagcagccagctagcttctttgtcgctcacatggccacagcgactttattatcaccattctgttcccctccccgctccaataactgagggtctcacagcctaccgctccactttgacccttcttgtttccacttgggagtctcacccggggtaacttcaaatctctaatttattctcttactactatctttcggtcacttcgcgtcgtctccgctttcttatccggcattccgcagcctcccccagattcccagattatcgactgtcaaacttccccattttgaccttcctcataccaattcccattctcggtggagatgggtaattcacagacaaaagaggcccggccaccctttactccaaatcgccgaagccatggcgg

SEQ ID NO: 1805 - DNA, 524 bp, Aspergillus oryzae
ttttcttttctatcgttacattttggttcagcctgtgttttgcttttttttttttcttcttctcctctttctgtttttcttcttcttctcctctttctgtttttcttcttcttctgccacctccccttcgccgacaaggtaagtttggtttgtctctttgttcaccttgcgtcccctcctgcgacggtcttgattgagatcgccttggttgacgtggagattgaccggacggagtaattgaccttacagcgggattgctcacgcttttcccaccaccacccctgctcgtgttcaaccgcaattgaagcctggtcccaattccgatcgcaaacacgattgaggaattctacgctcaatcaacataacactacctcacttttacactttttcctatcggtgacttcaggagtcaacaacccctcgccaaaatgggtggtcaagtttccaagttgatggggaagatcttcggtacgaaggaaatgcggattttgatgttgggtttggatgctgctggaaagaccaca

SEQ ID NO: 1806 - DNA, 536 bp, Aspergillus oryzae
acaattcttccctcttttactccccagtgggaaacccttctcgtacttgcaagttctctgctgttattgagtaatgccgtgattcgaattcgctcttcttcttcttttccctcttttaattctctctctcgcttcctccttcctttccctgccattccttcctttcctcaaatgcaacgacctgcatttgcctcccggcccttccattagaccacaagatacaccatgccgaagaaccgacctgcgacctcgggctacgcccgtctggcccaggaagaagaggatagagccaatgacttgtatgactattccgatgacgatgaccaaaacgattccctcggcacaatttcccactccgctccccgatatgcccccatctcctcccgcgcgcaaatggatgcgtccattttgtcctcacccccaggacatcgtcggagaccgagtggctaccatcgccgaggccggagaaactctgggggtagatatcaaggccatcaatgcgcgccttgagcggtgggccgaagagatcgcctcca

SEQ ID NO: 1807 - DNA, 247 bp, Aspergillus oryzae
  modified_base (35)..(35): n is a, c, g, or t
gtcagatctcacctctcaaattcttctttactttncttatatcgcttgagatgtggtctctgccgcccccttcgtgactgtgaccgcattccggtctctcgcaagattctcgtcatctacgaaaaagcggtgtccattgaggatgaactgaatctgctgtgataaccactgcctgatcaatcttagaagtgcatataaacttcaattcgcgaacttccaggctgggcctgtgcataaccttgcaatg

SEQ ID NO: 1808 - DNA, 307 bp, Aspergillus oryzae
cgttccgttttctcataaaccatttcctactacatccattctcgtccaactatagttttcacaattaatcgagggagcaatggctgacgattcgaacgccatattacgtcgccgctcgtctctccgtcagcagcgtcgtctgtctctacagtatgagaacaattcctgggccgcacctccgtctggaactatctacgctggtcaatcgacattacgcgaggacgatacattgacaattgcaatcgccattcgcgataccacctatctcctagacttcattcaggaatcgctcaccttaaaagatgac

SEQ ID NO: 1809 - DNA, 431 bp, Aspergillus oryzae
gaaaagtccaaatggtttcaacgaaagaaatcgaagggacagaactgtcagaacattgagacgatcgttaccggccggatggtttctgtttgtttgttgggggcctagggcagagttagacagcggtgaagaagtgatacatcacaatgggcctatacccactgcaattttacctgtcgagacacgtactctcttcactgtcctcttttcgcgacgtccatcagatcagtctaggatctctacccgcaatagttttcttgcgcgatttgcaggggtacagtcgagattggcatcgtttcacttcacgggtgttgcctgtccggcacattttaattagatcagacggcaacttgcaggagtcttgtccttggccgaatgaagaacaagcactatgtgtaacaattatgatattaacgtgagtggaatggcag

SEQ ID NO: 1810 - DNA, 263 bp, Aspergillus oryzae
aaatcaacctcaagctatttatttcccaaccttagatttcttcttgggccgttcctcttccgacatatctacggttgggaaataaatcaacctcaagctatttatttcccaaccttagatttcttcttgggccgttcctcttccgacatatctacggttgggaaataaatagcttgaggttgatttatctggtaatctccggaataatggttatggttgtataatgaataaggccaacaatgatatcattaaagttttctagc

SEQ ID NO: 1811 - DNA, 531 bp, Aspergillus oryzae
ggattgtgcaactgtgattcacacggattagctgggtgctactgtcctacttataccttgacaagcccctttttcggttgtgcgctgaccgcagcgctctacaaaacatctctcggagttattgcctccctgccatgatcagctcttgacaagcgtgatgcagcctccggaaggtgtgcaggtcgacctgggcaaggcccaggtcattgaccgtgctcctaaagttattaaggaactgaaatttggtgttctgtcgaacgatgatattgtcagccaaggcgtagtcgaggtctccgaccggaagttctttgaccttgatcgtgatagatcggttgttgcccatggccccctcgattcgcgcatgggtgtatcgagcaaaaccgcatcctgtcaaacgtgtggaggtgcccttcaagtctgtaatggccatttcggccacgtgaaactcgtcctgccctcttttcatgtagggtacttcaagcgtgtcatcaccatcttgcaggagatctgcaaagaatgttcgcacatttt

SEQ ID NO: 1812 - DNA, 532 bp, Aspergillus oryzae
gacagagagatttctgtgatatatttcctcatcgacgcttacaatcagacacgtcagcaagtgatgatcagggcccttggaaaggtaaaagaacgcacgggtaaaattgtgcacttcgtgcatactactggcgccaaacaattcagtcggcatgggggtgttcaacatgacagacctttacttgataccgacccgatgctctatgacatccagaaaagtgctgctcctccgtataagtggtttgcccagggtcttagaacgaatgtcgcagttattgacaccgcagaggagaacggagtgcgaggttacatacttgctccctgcatagtatatggagagggagaggggttcggcaaccgcacttctattcaggacgttgcagtcgtgaaagcggcgaagaagactggtcgagtttataaggtcgatttagatgatcccatctggcctgtttgccacgttagtgacaatgctgccctctacttgcagatcctacggcaaatcttgctcggtagcgatatcggatataataagg

SEQ ID NO: 1813 - DNA, 547 bp, Aspergillus oryzae
aatcccacaaaaaaaagttcaaaagaaggaaattacaaaaatttgtgaagaatttttttttctttcccgtgccaacttccgacttcctgcatctattctgccatatgcttcaactaatctatacaggttgtgactcgttaatccaactcttaaccactgggtaaaaaggacaatgctccaacgcaggagaaataactgccaaaatataaaactcaaaacataaaaggatatcattattcactcgtggtctcatgcacacgcaagatccacactaacagggcaaattattgcaaaaggtacatatacagtggtatcatcaaatcatcgaaacaagcatccaaggcaatcacagaagtgaatgataccttggcatcacccccgagggtggacgcggccatgggcgttcgggtctgtcctaaaggatatcatccagacgcacggccgggcgaggtgtttgtcggtcaatcaccgacataaagccgcatctctcgtggcattcacgaccatcagttgtggtcaacacagggacagcgaagagctcgcggca

SEQ ID NO: 1814 - DNA, 245 bp, Aspergillus oryzae
attttgttggatccagtggaacggaaggtttctgctgctttacctgatctggtcacgggtattgcgttgactgcctaaggcagccagtcttggagctgtagactgtagttgtacatagatatgtcgtactgggtatagaacaagttaagctgccaagctttaaatagggaagcctgcttgcgccttcagctagtatcaaaaatttattttaatcccaaggaggccatgttgtggaccacaatgcc

SEQ ID NO: 1815 - DNA, 452 bp, Aspergillus oryzae
tgcccgtcggttcccacgtctcccaataccacggcgttttcttttcctttccaggcattctgggacaggtgtattgatagctacggccttcgtccatttactccctacggcgtttgtgtccctgacagatccatgtcttcctcgattttggagtgaatcataccgtgccatggctggttttgtcgccatggtttccgtctttgttgtggtggtggtagagatgttttttgccatgaaaggagcaggccatgttcatgggagtgagtacgaccatttgattggtgatgtcggtggggatactgcaagcgtctatcggaatgaggggcccgaatacctacaagagtcaacagagaatattcaccttgagggcatgccggacggcagctgtacaagtagcctgccgcaatcctcaggtcacctgctgagtgactttacagacgacggcagtcaat

SEQ ID NO: 1816 - DNA, 571 bp, Aspergillus oryzae
gaccatattgcgcttccccaactggttgtctgtggtgaccaatcagcaggcaaaagctctgtcttagagggaatcagtggaatccccttccctcgtcaagacggagtttgtactcggtttgccacggaaattatacttcgccatgagctaaaatatcgccggaataccgcaactattatccctcatatctcccgctccgaagatgagagggctaggttgagcgccttccaccgcgaggtcactgacatcgcgcagttgcctggcattatcgatgaagcggcaagactcatgggcgttcaaggagcgaatgagttggctgatgctccaacgtttgccgctgatgtacttcgtttggaagttgtcggggatactggcctgcatctgacccttgttgacctacctgggctgatttctgtgtctgaaaacgaggacgacctgcagcttgtcaatgatctcgtgaactcctatttagaaaactcgcggacaattatccttgccgtggtccccgcaagcagcgacgtggatacccagagcatcatccaacgtgctcgacgttacgacaaggatggcc

SEQ ID NO: 1817 - DNA, 600 bp, Aspergillus oryzae
aggcaggcaagtgtcttgatcaataactatttaaaatttctcttcaccttggttaatcgttactgctataatcatgaggatttgtgtgcttcagtcttcctatcaaggttccgagtccatgctcaagggacttgatacggacttacccaatccaggagccttcacttctcaacatacgtttgaaaatcgatttatacgcaaggataccgccaaagaggagatcgactcctgcgtcaaggaaggatttgacttctacttaaatttcctttggggtaccctagacgatgatgtggctgggattcaggcaagccagtactttgaatccctaggggtaccatctgctggcatccgcagctgggagcgttctcgaacgaagaatgatttttacaaagaagcgaggaagcgaggagcaccccgcgtgccaggaacggacaggtttcctctattcgtgaaaccagccaacgggtgcgctagtcaaatgattgatgaaaggtctgtgtgccacgacgaaggcgagctgcgagaggccctgcgccggataaatgtacaactctacgaatcacgactcaaccgaggacgttcacttggcgttccagactt

SEQ ID NO: 1818 - DNA, 650 bp, Aspergillus oryzae
gcgagctctcaatggcccccggttcccttgcggatgatatctggaaagaggctcacgatccagatatcaatccagagatattacaagatgcaagagtccgtgtgggaagcgatctatgccgggaagaactggagttcaggcggaagaggcgggagcatggggtaaaagcacttgcatcgtacttggaaattcctgaagaggatatccacccagacgacgtccctgtcattgctatgtgcggctcaggaggtgggctgcgggcgcttgtcgctgggactgggtcatacctagccgtgcaagaagctggcttgtgggactgtgtgacgtatactgctggcgtcagtggcagttgctggctacagacactgtatcattcatccattacaggccgcaattttcagaaattggtggaccatctaaagcataggttgagcgtgcatatagctttcccaccgaaggctctcaatgcattgacgactgcccctaccaataaatatcttctcagtgggttagtcgagaagttaaagggcgaccctggagcggatttcggactggtagatatatacgggatgttgttagccgcgagactgctggtacccaaaggagagcttggagtctcagatcgagacttgaaattatccaaccagaga

SEQ ID NO: 1819 - DNA, 531 bp, Aspergillus oryzae
cgtcccctgtagaccacaatggctgccagtgagtcatcaagatatctggcaaggtcattgccacgggcatttgtgcccaccgctcgcccacagggcttctgcttgcggcgcaatgtctccgaccaagcctcgtcgaaggccgcgccggccgacctcaatgagcttgaatcggcgagttctctgacttcgacaacgctttctgaggctactgcaaagtcattcgatccaattgcaaggaccaaggcgcggaagaagcaattgccacgaagtcgttatcaattccgttctcccaaatatgatcgtggtcctctacaccctcaccaaccccctccgccatctgatccctcttcccgactctatgttccgggccccttctctcttccccgagtagagcaaacgtatcagtccaccgtcgcgtccgacatcctcaccctctgctatgttcacaaccccccgggtttcaagccaccaccaaaggccccccgtcttcgctcatgggatgatagctccccataccacaagaacaggccg

SEQ ID NO: 1820 - DNA, 508 bp, Aspergillus oryzae
aactatcctcaagtgctcaataccactgccactttcttcctttttcaaagttttttagtcgacccccaattgttcaaaatgtcaggccaatccagcgtgggcaccaacagtctctacgaagcaggcgaccagcgcaaccagccccagtccgtccttaacgagcaggatcgctacaacgaggggcagaaaaatagccataagaacttggattcgaaggacaaccgctccatcgccaacaagctcgctgcccgtgagaagcagcctgaccccagccatcaccacaacaatgatgttgatcccgaggcggaggttagcaagaaggactctactaagccggccaagctgcatggcaacgagccatcaaagggagcaaagattgatcaggagctccaggaagaagacgagcagcgattgagggagaagggtatcaagaaataaacttgcacaagtgtgacgacaaaaggttatgcttcttcgtccgcaagtcggtttaatatggcatattttg

SEQ ID NO: 1821 - DNA, 506 bp, Aspergillus oryzae
  modified_base (332)..(332): n is a, c, g, or t
  modified_base (334)..(334): n is a, c, g, or t
ctcatggaaagcctttttgatcgccaacatcatcgttgagatcccgtaccaaatcatgatgggcatcttaacatacgcctgttactattacgcagttgtcggagtccaggactccgaaagacagggtctcgtcctcctgttatgtattcaatttttcatctatgccagcaccttcgcccacatggccattgccgccatgcccgacaccgaaacagctagtgccattgtggttctcctattcgccatgtccctcacattctgcggtgtcatgcaaaccccaaccgcgctaccgggattctggatcttcatgtaccgtgtttcccccttcaccnantgggtctcagccatggccgccacccagctccacgatcgcgtagtccagtgctcaccatcagaaatgtccatcttcgatcctccatcgggccagacctgcggtgaatacatgtcttcattcatgagcatggctggtggacagttgtcgaacccgaacgccacttcggactgca

SEQ ID NO: 1822 - DNA, 499 bp, Aspergillus oryzae
cttgaacaacgaggaaaatcattctcagccgcctggttaagccttcagatgctgttcattgattcttattttctatttttattcttctcacattttttggattcgaggccatcttatgatgcagtggcttttgtccccgagaaacccgatccagggactcggtagggcaaaggaaatcatgaggtcatctcacgacaaccaattcaatttcaacgagcagttttgaactaccacaaactagtactaacacggtcgaaacccagggcaaagggaaaaataaaccgaaagtgcgtcccaccagtttccgatgaggtcacattgacagtccaaactcgaaaagtaaaagaagaaatgaagaaggcaaaaacgcagatcacaccaggaacgagaaacgatgcacagcacccacccccgtccctcacagatggcgatgatcctcaagcacaacctaaactaaaccaaattcaagatgaagttccgattagtagtcaaccaaaaa

SEQ ID NO: 1823 - DNA, 528 bp, Aspergillus oryzae
gaagatcttcaccatgcacggtggtctgagtcccgatctgaactctatggagcagattcgtcgtgtgatgcgtcccactgatattcctgactgcggtctcctgtgcgaccttctgtggtccgatccggacaaggacattacgggctggagtgaaaacgaccgaggtgtctcattcacgtttggtcccgatgtcgtctcccgtttcctccagaagcacgatatggatttgatttgccgtgcacaccaagtagtcgaggacggctatgagttcttctccaagcgtcaactcgtcacgcttttcagtgcccccaactattgtggagagtttgacaacgctggtgccatgatgagtgtcgacgagagtctactctgttccttccagatcttgaaaccagcagaaaagaaacaaaacaggttcggacggagataaacacaacatacccacccactcatcaccacacgagaccggatccagatccccgcatcatcgatggccagtgcattagacggtcggaagcagcagataca

SEQ ID NO: 1824 - DNA, 465 bp, Aspergillus oryzae
catttatcttggcatccgctagacccaagcaactcaactctaattccgaatactcaacacactccccggtccttgaaagctcaccatgaagctcagcattgtaatctctgttcttgccaccgctgtggccgcagcacccacccctcacggcggacacccgaagcgcaatgacgccggcacgactgtggacgatatttcggaacagctttacggtgcatggggaggcatcaaacgtgatcaggaaggcactactgtcgatgatatctccgaggcactgtacggtgcatggggaggcatcaaacgtgaccagaagggcactacggttgatgacatctccgagcaactgtacggtgcatggggaggtatcaaacgtgatcagggaggtaccactgtcgatgatatctccgaggcactgtacggtgcatggggaggcatctcgaagcgagatgaggaggccacgcaggg

SEQ ID NO: 1825 - DNA, 503 bp, Aspergillus oryzae
gacactgccctatagcttgaggaagcttgttggctgtcgatccttgtcttctttccaggagtgatatcatcacctcttatatatacatcatcatatcacccctccttcgctccctatcctctcctctctcctagggaaactccttatcaattccatctatctatctcgacttatcttccacaatgcctcgcttcgacgacgctgacttcgctgttgatcccgcccctgcggcgcccggtactgctccggcccccgctgctcgctcccccagagatggccgtggcagcatggcgggttctctgcccatccccaacgatgcgggtgccaccattgagatccccgcaacccgcagctccatcagcgatgctgcccagtacatgcacaacctgagcctggctccttcgacacgggaccgtcgtggctctcgcaactccttcggcacctccctccctatccccagatctcctcgtgtgtctcgtctggcatccgtggtcaccgctgat

SEQ ID NO: 1826 - DNA, 555 bp, Aspergillus oryzae
gtgatcgccagaaggtaaagttaataaaaatctaaatgattgaaaaattaggaataaatttctaagggtatgagctcatccacattcgagttcctctcttgtctggacctctcgtgactgtccacgctctccgcttcgtcattcggctctctcaccttttcttccctctttttccacttgctcttccctcacaaactcccccacacctaacacgtcccgactttcagtgtcaacccttgggttgatctgcagcttctgactcacgccgattaaatccaagtggcctcttaacgaccctgaagatacgctgtgtgcgaacctttggtcctgaggtcgatccgtggaaggcctagcgaatctcccgcagtttgacagctccttcttacggctcaaccacagcgatcgtcaatcaccctttgaaaatctgagcggagtggtagcacgcgttgcgaattgattgaactgtacgtgattttaaagataaatgcttgatgttcgtggtgatcgttcaacttatcgctcagatagcttaggccagtcgcgcatcctaccttt

SEQ ID NO: 1827 - DNA, 497 bp, Aspergillus oryzae
ggaaaatctcgaaagtcacaagagctacgactagtgccaaagaccactatatacccaatatgcgtgtctccctaaccaccatcttctcctccctgctctgtaccgtcttggtctcatcccaggacctcgacaccttcgacaagaaatgtgtcgagaattatggtgttccatcagcagaccctgttcccggctctttctccaatgacgactgtacggatgtcgacgggacacgtggtgccatacaaactgctgtagacaaactcggtgatatgaatatttacgctgtcaccaagcaggttgtgaacggtattaactatgtcatctttgttactcgcaacgaacgaacatatcgagttcctgtttaccaagatctgacaggaacctattctcttcaggaagaagaaatctgctacaccgacggtccgccgcctgcacaaatcaagccgttggattgcggttattaatcccttcaaagctcccattcgatgacagtactg

SEQ ID NO: 1828 - DNA, 549 bp, Aspergillus oryzae
gagaatcacgggagggtcatctgccttgacttgctcttcatactaaacccggacgggattagtggataacctgacaagatgaaagtctacaacctcaaccttttgacccttttgaatttctcgctaagtctaatccatttgactttccttgtcttaccggactttttacctcatatattatctaagctgggcgtgtctccattgactcaacatgtgcattccgcgggatgccgactggctcagtccacccgcaaacgagaccattccttttgaagttatactatgaaaactggactgccaaaaagtcatgcaacgactcccctcccgaaccatggactgatgcccggccccccccctttgctctggttttctgcgttctgcagatccttgtccactggggcccgtgtatccgactccctaatctccaccccctccggtgatgctgatgatcctccctgcgtatgtgatgccagggtgcagatgggcgacctcgagaggtattgcccagacatggatcagctgcgagtcctatgttgttggccaaatccg

SEQ ID NO: 1829 - DNA, 501 bp, Aspergillus oryzae
ggcgtcgactatgacgtcactcactatgtgatattcatcttcctcggcatctgcggcggtgtgtttggtggcgtgttctgccaggcgaacttcgcgtggtccaagtcgtttcgtcagctccgattgatcaagagaagcccggtcttggaggtgttcttggtggtcttgctcacggccctactccagtaccccaaccaaatgatccgagatactggtgatatcgttatgcagcgtctgctcgtagactgcaatgtcgtgagtgaaaactggatctgccagcaagaggctcttgatgagaaaggcggatactacgcctggttgatctcggggacattcattaagctcatcttgaccaccatcacgtttggttgcaaggtgccatcaggcattattatcccagccctggacggaggtgcattatttggacgcatggtgggtcaactgataccagacatctcgccgggcatcttcgccatggtcgggtcggctgccttccttgcc

SEQ ID NO: 1830 - DNA, 449 bp, Aspergillus oryzae
cttctgtgcacacttattgtcgactacttatgaatcaatatagtcaattattctagaccaggtttctccataatcgtctcgccaccacatcaacctcgcaacaatggatccttatgacagcgactcgtcggggtttgaagatgaggacctcacggagaccagtgtgcttttgggatacgcttcggaagaactgttagatgattcaatcagtcaccttggaggctggccaacatggctggacgattctaccccgccgccaggcgagttcgccaattgcaaagtttgcaacagtcctatggtcctcctactcgaattgcacggtgacctccccgaacacttcccggataatgagcgacgactgtatatcttcggctgccccagaaaaccctgcaaccgcaagcccggcagtatcagagccttgcgcgctacacggaagttgaagagccagc

SEQ ID NO: 1831 - DNA, 511 bp, Aspergillus oryzae
ccagttcggtgatcatggatcttgtcggtacgcccgctaccgctaacaagaacaagggatggccgtttggaaatgatgcttcgcccattgtcaataccttgctcaaatatggctacatcttctgtttgatgctacagttcatcctggcgctgggaaaccgaccgaaaggaacacggcttccctatacgctctctttcctctacttctccattgtgcagatttatgttctgatcctgtcgttttacttggtcgctaacgctttcacgggtggcctaatggacttcgattttaaccacggtgcgagcggattcttttcgtcgttcttcgcttccgatagtggtggtattgtcctgatcgccttgatttccacctacggtatctacgtcattgctagtgtgctctacggtgatccatggcacattctcaccagttcatgggcctacttcttcggtatgacgacctcgatcaacatcctgatggtgtatgccttctgcaactggcatgatgtctc

SEQ ID NO: 1832 - DNA, 520 bp, Aspergillus oryzae
caaatcagaaaatacaccgaggccaggactcgacgtggacgctcaacggtcatcttctgcacactcttctttttgcgtttgaaggaaactccttgctctacccgtacaagtgtaccgggcgaatccatcgatcataacaagatagttcgtttgcagaccacttaaaggtcagtcatgaccggcatggttcagactgacctagcacatccatcgacgtccaaatacaaagacgagccggctgacgagcatcttcgacaccctgggcatcaaggcccaccacatcttcaacttcaacatccaaggccagcgagtcttgtccaacagcaaaagcaccccaactctcctcttcaacccagcgcaggtctatcttctggatcgtacgccccccacgccctggggaacggagttctgcaccatccgaatccgtacggaccacccgcacaagagccagcgtactacgcatcccaccctccatatacagcagcaagtgcaccagcacagtatccctctagtggacccc

SEQ ID NO: 1833 - DNA, 376 bp, Aspergillus oryzae
tcgcgttgctacgacttacaacgtttctttgctttgcacccctggatgcagggctatctctgtctagagcccagacaatccctatgggttctcattgcgtttcagtttcatttggctcccgttcttgacgtgggcctctgggcatgggtaggtgttaatgatgtatacgaattcaaaaattggactggctgaatctgatggtgcgatatgggattttattgaatctctggagggtgcaaacttggcgcaaaagcttcttttggctgtgttactctattctttcttcgtctttttatttctttccacttctcccctgtcttttactaaactacatcttgaaaccctagtccatgagtcaaggggctggggtctgtgt

SEQ ID NO: 1834 - DNA, 493 bp, Aspergillus oryzae
cttcgattccttttctttatgttcttttagctagtctctccctcaaccccattcaaattctaccacttttctctcgattcccctccttcaatttgctttctcctgtcacttggtcccccacttggtctacctggctcatagatacgcttcgtcattccatggaactgtagtgaggacccaaagcgggtgacaaacgccgctacggctgccaggatttctcgacttctataccccagatcatccacagttgaggacgactgacgacttgaacgaccgcacgatttttcttttcaactacactatttaccatattcttcactgtttggggtttcatcgacataatcaatcgaccgtataccctcgtccgacaaaacccgagtgaacaattcccccatgcccgccgctgcaatggacgccctgggagccttctcccacctcaccgataatttacccacatggataaaccgtatgtctgatctggctacccacaccg

SEQ ID NO: 1835 - DNA, 482 bp, Aspergillus oryzae
gagcatcctcaatattttccacaaaattcctaaattactctctgattctttgagaaaccttgatattacaattatctacttggaaagtcatactagaaatggcgtctgcagaggcacacaaagtgcccgtttactctgtcaatgatcttaaatcaacaacagatgatgccctagcaccgcatttaactaccctaccccagccctacgcctttactcaagaccacacgaagaccaacgtccgcttccttctaggctattccgccgtcgccattgcagcattcacattctatgccgatcgcacgctaggatgggaggcaacacagtcaacatgggtcatagcggccgtggtttcgtactttgtcctgaacaccttgctcacatattggatctgggccgtggaggctggtgaggtatttcgtggaaagcgcaagtctggtgaaacgattaccattcgctcctccgggaagaaacactctccgttg

SEQ ID NO: 1836 - DNA, 502 bp, Aspergillus oryzae
atctcatatttcttgcatagtatatttctcatacttgcttttttacagtgctttactgtacatcttaagccataatctcggctgaaggtcattggatgaccgcattgccttgaccttacttcttcaaggttacttcttctgtgccccggtggcataattctactcgaatatggctactcccacggtgtcgaccccggtcaaaacccaccatggaattttctcttcaaagactgctggaggtcgtatgcctctcacaccttctccccgtatgcgagcgggaagcatgacatcgaatcactcctcaccattcactcctcctcgtcagcaggaaggcgccaaggacaatggaaagtctgtctacggggggaacttgtcctcttactttgccaagtccatgtctagggcaacccggaactaccgcgagtctcccaagtctaacattgcccggatacgcaagtcgcctaagcacctagaaatgggcgtatctgagtgggcattggcc

SEQ ID NO: 1837 - DNA, 449 bp, Aspergillus oryzae
gcatcacgaccagtttgaaggagattgcaccccgaagcacacctcgccgtcccacacttctgatggagacaggtaccatagcacccctgttcttcgtcatcgcaaaatgtgataatccgggagttcgccagagagcactgaaggtcctgaagtcatggccgcaccgagaaggcttgtgggattcccaactggccgcaacgttggctcgtcagatgatgtttgccgaggcacggtagaccagaagaatgtatcttctcattatttgttgtgctgtacttcgggcatgcatagtgtcgacgtggaaaagaagtacagcggtcacctgattcacattcaatgagattcagccgtgacaacgcacaactagcattcacgtgtcagaagtattacctgtcgttgtggctacaggcaaatatgcatagtagtattgtacggtgactctttgcttg

SEQ ID NO: 1838 - DNA, 468 bp, Aspergillus oryzae
ctagtactactactagtactaccgacgaacactgccttagttcagctaagaaggcatcgtcaaaacccactcactacgaccgccccccgcccagcctcccccaaaaatagtgcactccaccgctcaattcgctccccttccagcttttctcgacccttctctgttctttctctcacgtcacggccacttagcgcattgctacctctccgctctcgctctcttgagccttccttcttactatctttacgcacttcccctgtccccaagaagaccacacacaccttccgctctcatggctccacctcctccgtcgaacttgcctttggccgagaggctgaaggccttggcccagactctacaatttgcttggtttgctgggcacgtcaccctgctgctctccgtcttccgctatctcctgtcctacatcaccttcaactactactcgtcctcggcccaggtgtcctaccg

SEQ ID NO: 1839 - DNA, 424 bp, Aspergillus oryzae
cgacgctgctttgcacattcccaccctaccattcggtggtgtcggtgaaagtggtcacggcgcctaccgtggcaaggccagcttcgacgtcttcgttcaccgtcgtcccattactagcacacctagttggctcgaatccatcctctcaatccgctacccaccatatgcgggtaagctgagcaagttcaaggcagccaacacccttgcacccgatttcgatcgtaacggaaacaagatccgattcggctggctgcgttacatcctaactctcggcggaggctctgcgaaggctggtgctggcagagccgtcgttgtcgctgctgtggcctatctcgtgcttcaggttcttgaacgccgcgcttcgaagctttaatatgacctaatattttcgattcggatatataatatttttggttcggtagcg

SEQ ID NO: 1840 - DNA, 549 bp, Aspergillus oryzae
cccacgcgtccgggcggggacttgggcttgtccggaagtagtactgacttctttgactcccatacgactgattcatttcacatgaacccggccttttctcaggcccctcacatcccgcagttgccgtcgattgagggaaccctagatctgccggaattcaacaccaacacctatgctttcacctctgcggcacccaccgacgctgccctgtttcccgctcctttctcgacctccccccgtatgcccattcacaaggctgaagacccagccatgtttctgagttctccggcccgtcgcttcggaggaccccagcctactccggacaagagacttttctcgagatcgggacgtcagccctaccatcaccagactgaagaatccaaaagggagcagcttcgacgcacgcagagtgtgcaccagaagctgcccacgtacgtccgatgacgatgacgatgatttcacccctcggcaggcacgaccgacgctgactcggagtctcacccagagtgctatatccgcacagcgtcccgggttcggtggaatgatgtc

SEQ ID NO: 1841 - DNA, 457 bp, Aspergillus oryzae
aattacctctgtttaccaccaaaattctaccaaagtttcccccagtcctacatgagtggtttatcgagatgtttccagagtctggaacatggtttgcagcaaggcttcgctatactcggtcttgtgcagtcatgtcaatggttggatacgttctagggcttggagatcgacatggcgaaaatatcctatttgaggagggcactggaggtattttacatgttgatttcaattgcctctttgacaagggcttgacgttcgataaacctgaacttgttccgtttcgtctcactcaaaatatggtggacgcatttggagcttatgggtatgacggaccgttccggaagacgtgcgaaataaccctaggtttgctccggcaaaatgaggatgcgctgatgactgtacttgaaacatttctgcatgatccaacgacagacttcattgggaagaaacgacgcac

SEQ ID NO: 1842 - DNA, 525 bp, Aspergillus oryzae
ggaactctttattaaaagttatttttatgtacctgtgctcattttattcttgttgaaaagcgactacctaattcacttacttgcctggttttgctccttacaaaccgaaaaaatggcaccgccgaaaaagcgcactgctcccaaagacgacgatttcgtgcttacactctccgatgacgaaaacgatgtattcagcggcatcaacgaggatggggacgaccatttagacgaagaaacggcgaagtcaaccaccaagaagcgcaagagggacacggcggagacaacacaaagcaagaacaagaaacagaagcaacagaagcaatctaaaaacggaaaacaacagaagaaagttgaagaagctgcatctgaaccggaggaaggctcagaggaggaggaggatgctggggaggatgacggggcgctgaattcggatttcgagtttgatgtcggcgctgcggctcagaaggatgtggtggaagggttcgatggatggggattagatgagacgaaggatggcgcaaagaa

SEQ ID NO: 1843 - DNA, 552 bp, Aspergillus oryzae
cccacgcgtccgcccacgcgtccgcttgaatctctcaccttccttccatctccctcctttctcgcgctcttccttacctctatatcttctcgacatactgttaaaacttgaaaatggaggttctactgggtatcaccggcaaggactttgtcctggtggcagcgtccaaagccgccatgaggggcccaactattcttaaagccgaagacgataagacacggcagctcaacaaacacagtctgatggctttctcaggagaggcaggagataccgtacaatttgcggagtatattcaagcgaacattcaactatatacgatgcggaatgataccgaacttggaccgaacgccgttgccaactttgtccggggagaactggcgcgcagtctgcgatctcggagtccatacacggtcaacctgttgctcgctggtgtcgatgggatcacccagaagccttacctgtactggatagactacctggcttctttggcaccagtaccatatgccgctcatggttatgcccaatactattggctctcaacactcgataaag

SEQ ID NO: 1844 - DNA, 385 bp, Aspergillus oryzae
ttttctcttccccctcttttctgtgtactcaagcatttgattccgtgcctttagctagttttaacttacctatttcggttccctgcgatggcgtccatcacccgcgcgttgcgggctctgtgccggactactccctcgttccgcatggccgcaagacggccattgccttctcatttagctcggagtacccatgcgttctctaccacatcccgccggcgggatgtcgacttgtccactctgacaccgaccccgatcacccttctttccgaaacagagtcaatgatggccgacacagtgtcaaagttcgctcaggagcagattggacctaaggtccgagatatggatgaggcggaagccatggaccccgccattgtcgagcagctgt

SEQ ID NO: 1845 - DNA, 330 bp, Aspergillus oryzae
gattctcgaaagacctgccgctccctcgtcgatccccgcaagactgcttgctgcactcttacagcatatactgctgcttgccctccgctcgtgtgttttttccgagactctgcagaacttgggttgcgtaggatcttggtgatccattgcctccgagttctgcgagtctggtaaaaggctaccagggttctctccgctagtgctcggcctgaacttaagcgtcaccctctcgagaccgtcgagagccttactatcggggtaggactgggacgtgccgacgaacgttgcgggtttcccccaagtgccaccgattggttacagtccgcctcg

SEQ ID NO: 1846 - DNA, 439 bp, Aspergillus oryzae
cggacgcgtgggataaatcctactctcttccttcccttcggactttatatcattttgacgggcgtcactactatactacatataataactacgggtgtgattaatcgtggtttcagtggcttgttgcttccatacgtacacctcaagactacccaggacggaggagattctaccgagggatcaagctgcataatttcctcgagcccgtctctatccatctttaaccttcccgatttattttctcccatttcaccgtggcgaccctagcgatcagtgtgttgactaataccccgtactccaacccggggcattccactcatcactatcattcgctgtctggttaccatctcacccaaccgacaggtgccctctctcgctcttcccttcccgagtcttcggctcacctggagagagggggggccccgccatgccccagctt

SEQ ID NO: 1847 - DNA, 475 bp, Aspergillus oryzae
tccgtctttcattattttccccttgggcccttttcccccagatttctctctccctctctgctcttgaccgattgctaagtccctcgctattcgtcttacatctcaatcgcttaacctgaccctttcactattcctattcccctgtgctgagcgatctgtagccatcatcggtcaccctgcacgcaatgagcacagtgttgctccggagtcgaccggaccaaacggcgctgagaaggattggggttttgtccagtcggctatattcttcaaaactcccgagaccaactagacttgctacatctcgagctctaccccttcgtcaaaattccgtaccgcaatgcctagcgtcgcgtgcgttcttcaatagtcaccactcgatccgacaccaatcaacagcgccggagtcaactgacgcttcacgaaaatcctctttccgaaatgcctttttcaaaacttttgcctattgtggattctt

SEQ ID NO: 1848 - DNA, 470 bp, Aspergillus oryzae
cattaatttactctaccacgaaagagaataacaatacattaccctattcaaaccatctcctaagacatcattcagtgactcgtccaaatcaagaacaaaccattgacttgaccattgatattttttttcaagatgggtgctgttgtatcttgtatccagagcgtcttccacgccatcggtgcctgcctcatgggcatcgtcaatactatcggcgcagtctgcaaagcgatcatcgacggtgtcgtcaccctcttcgatgtgatcatttcttgcctcacctgcggctactgtggacgaaggaggagaggaacaacgcgaacacggcggtctagaatctaagttgtgaatcacggcgcgctatgaattacgatggatacgctttatgcttggtctttggtttctatcggcttttgtgttttcagttctattccccaaatgtgtattatagtagtggattgttaatagaagca

SEQ ID NO: 1849 - DNA, 457 bp, Aspergillus oryzae
gctttctacctgagcagccatggcctcctatcaccgggttctagaggtcttcgaccgatcagtcgacgacaaaaccatagaatgcgactgtgacattcacccatgggagatcaccatcgatggagaaacttggccaggccggatccggctgattgcctttgtggatgtgttttttatcatttcttactcctccaacgaccgcttcatgaaaggggttattatctacaaagatgagattgcgctgcgcgaattgaataaactgctgccgccgaatcagaacctccaagggaagggcgatgccccggccagccagaagccccaagagaagggtggttccccgcccagccagagtagtaatgttgcagtcaacggtgaggaaccagatggattcaagttcaagaaaggcagcgtcttcgttgtcgaaagcttaggccacgagattggcatgcgaaccacc

SEQ ID NO: 1850 - DNA, 470 bp, Aspergillus oryzae
cccattttcaaacagaccatttcgtctcgccctgcgcttcttctctccccaaaagtataggtagccaacatgaagctgtactatatctctgtcatactcatgacatgtctgagcactgctcttgctcaaggaatggacggcctcccagactgcgcgaaagattgtgccactggctccattcccaagcagtgccagactatcgatgttgcttgtatctgcggtgacaaaagctttatcaatagtatatcttgttgcgtcgccaataagtgctcaaaggaccaacaagatgccgttctcaaattcgcaagccagctctgcagtggcgccggtgtaaatgacctccccaagagtgccagctgcgccgagggaggttcgagcgctaccgagacatcctccgattcttctgtctccagcaagtcgactactgcgaagagcacggctacggatgaaccggctacaactacttcggg

SEQ ID NO: 1851 - DNA, 336 bp, Aspergillus oryzae
gagcatcctgcggaacgaactgcctcgcgatgatccgatcctctcctttgttcttatgaacgtcgctgcccttctggttatttcgggtgtctgtgaatccgagactagtaatatgggacccggcgacgatggccaagtgattaccgaacgtggaccaggtggtgggcgctggaaggaaggtgtccgacgagccagatgggccgtcgaaagtggcgcagcccttaagtgcttggagggatttattgaagtgacgaacaaccttcagtaaaccatttatttagcagtggtctagattctctctttctctttttttcgtttttattaagaatatgttca

SEQ ID NO: 1852 - DNA, 480 bp, Aspergillus oryzae
tgtattttcccgtgccagtctttggtgccacatacgtgaggcatccaaacgaaaggccccccaaaagcagaatcaaaaaaggaaatttcttggctctcgcgcagcttccgccaaaaggctccgaagtaccatcggcgaatccgggaaaagaaaaaagaaaaagcaaagaaaacaggccattctaagaatcgtctgtgatatccaacaccaatctcccttcctcggtcgcttattcctatcagagtaagccacgtcaaggaaaagacaaagaagttggttttagcaagaactttccctcgtctggcttgatatcgcgaccccggcagccacctacctgtgggacgaaaggaacagacagtgttcggccgataactaactcagtaaaacacgcattgcgttctgcctctgcggggctacctatctatccctctgaggctgagacttcagtgcctttgattcgtgaagtggcaatttgcccta

SEQ ID NO: 1853 - DNA, 476 bp, Aspergillus oryzae
aaagaaatggattatgcgggcggcccgtggacccgccactggtccccggacagttaaactctggctcacagatgcatggagttctttcgtggatctgatcaagcatgccgaaacgattgatattgtcattatgactctgggctacctgtcgatgcatctgagcttcgtctccctcttcttctctatgaggcgcttgggctcgaagttttggctcgcgggtacggttcttctgactggcgctttcgcattcctgtttggtctcctcgttacgactaaactcggtgttcccatcaacgtgctcctcctgtcggaaggactcccgttcctcgttgtcaccattgggttcgaaaagccgattatccttactcgggctgtgctcaatgcttcggctgacaacaagcgccgaggtggtgctggtccttccagccaatcgagcccgaccactgcgaagtccatccaagactcgatccagaccg

SEQ ID NO: 1854 - DNA, 545 bp, Aspergillus oryzae
cacattcgaaaccaccattcgcatgttaggcggtctcttgtcagcacattacctttccaccacctatacagatctggcgccagtctcgggcgacgaggacttgtatattgagaaagcgactgacctcgcagagcggctatcaggagcgttcgagtcaagctctggggtacccttcgccagcatcaatctcaaaaagtcggaggggataccggcacattcggataatggcgcttcttctacagccgaagcgacgactgtgcagctggagttcaagtatttggctaagttaaccggggaagcagaatactggcggatggcggagaaggtaatggaagtggtggataggtcgaaaatggaagacggtctggttcccatctatatctacccggacaccggcaagttcagagggaagaacatccgcctcggtagtagaggcgattcctactatgaatatctcatcaagcagtatctccaaacatcggaacaggagccggtctacaaggagatgtgggacgaagcgctgattggcatccgcaaacacttgg

SEQ ID NO: 1855 - DNA, 505 bp, Aspergillus oryzae
agaattgtccctttaaatattcactgcatatattataaccaccacgcgaacagcatatccccacgttaaacatctatcgcatcctccgctggcggtgaaacaatggccgccgacgattccgtgtcgcagtcgcaactctcgacctccgcatcgtccctttcgccttcgaagatctgctcaaaaacctacaagaaagcttctcagctctatttaactcgtcggctacaagaaacgcttaccactcttgaacccatcctcacaaccagtcagacaaatgacgaccaatatgccaacggtaacgagtcactaccgccgattgctatggctcaagcttcggtgaggatcaaagtttggaatctatacatcacactgctgagcgccatacttgatcttggacccgaggaagggaaagcaacgttcggccagaaagagtggaaggctatctccaccaaagtgcgcgaaggcgaaatctgggagacagttgttcagacgggttataaaggcc

SEQ ID NO: 1856 - DNA, 375 bp, Aspergillus oryzae
caacactcttacaatcaacgcacttcaaagttactttcgaacaatccagaatgcaattcactaccatcatcaacgtcgcactccttgtggctggcagcctgggctacgccaacaactgcaagggctccagcaattctcccagcattaccgactgccaggaggctattcgcaggatcgacgagagttcatcctacggcgacggggctgagttctccgtcggaaactgctacatggtctatgccactaacggtgctggtgaacacaaggtcgacggcaagaccatccgtaacacagcacaatcgatcctggactcatgtggccaccacaagggaagctacggcaccaacaacgactgtgactcttgccacgttactg

SEQ ID NO: 1857 - DNA, 463 bp, Aspergillus oryzae
cgagaatatatcctgcctcttcctactacgagtaatccttgaatttttaaattgaaattgtcgcttggacacgatcgaaatttttgaattatggcggttcgcgcacagtttgagaactccaacgaggttggcgtcttcgctcgtctcaccatttcatatgccgttgtcgctatcggagcctcggagaacttttacagtgtattcgaggccgaactccaagatgtcatccccatttgtcacgctactattgctggtactaggattgttgggcgtctaacagcgggtaaccgtaagggccttctggtccccacaaccaccacagatcaggaactgcagcatctccggaatacgctcccagactcggtcaagattcaacggatagaagagcgtctatcagctctgggaaacgtcatctgctgcaacgaccatgtcgccttgatacatccggatctggagcgagaaa

SEQ ID NO: 1858 - DNA, 433 bp, Aspergillus oryzae
gtcacaatcgctaccactaaatgatgtgacaaggaaggtttatattctcataggcaccgtcgcatgaaactatacgaaaaatcatcgcctggctcttttcttatccggctcttgctcgccttcatcgtcactaatctccctgtatatcgttttcggttgagtctccttccatgccttagtgaaaaccgggtccttctcggccttctcggcgtatttcagcaacgcttctcggggatcctcatcgcgcatcgaactgagaggaatattctcgcgaatatgtttctcatccggctgcgacttggcgaagggagtcgttgctggcaaatgcggtctccgtggatccctgggccgtcctgacgccgtaagcccaatggttgggtgacgggaagaccaggttgccgagctataatggggcacaccgttcgatccgaca

SEQ ID NO: 1859 - DNA, 417 bp, Aspergillus oryzae
attgctacggacactggcagaacaaagcaagaagcttcagcacagatttggtgtcttgataagccaggtattttgctcaagtctcttggtgaccaacttaccgcagctcaagcaccatttgcacgggatgacaacgagtggcccaaggagaagggcacagatttactttcagttgtgaaggaggtaaaaccgcatgtcttgattggcacgtcaacgaagccaaaggcattcacagaaaacattatccgggagatggcgaagcacgttgaacatcctatcgtctttcccttaagcaaccctacacgattacatgaggcttccccggaggacattaaccactggacagaaggtcgagctttaatggccactgggagtccattccctcccgttgagcgtaatggagtagaatacgaagta

SEQ ID NO: 1860 - DNA, 501 bp, Aspergillus oryzae
ccctcattccggtctcactgttccttcaccttttgcgacatctcctccagcttgcccgtagagtattccacgtcagtctatcaccatgctctggggatcaccatccaagccagaggactcgtcggagaagcccattccccgcgagaaactgcctccgcaactgcagcaactcgtggatcacgatgacgggttctatgatgatatctactcctcctactccgtcgattccaccgacactccctaccgatatgccggatacgccaatcgactccgcacggtgttgctctccgcgcatcgttatgttgcctatacctccgacataggcgaatccttccgtcccgtcgctcatccgtatttggtgcgttccgcttacgccatctcctggtcgtacttgatcggcgatgtcgcccatgagggctacaaggcgtacctgcgcaatcgccgcgtactcgccccgcctggcgaggcctacaaggacgccaaggagctcactcaggagca

SEQ ID NO: 1861 - DNA, 529 bp, Aspergillus oryzae
agagaataacctggggttgtccgtggtttggaaccacgttactctctctgaacaaccctatcctatacttcatctgttcttttgatcaatcatccaccatgggtgtgattcgtctcccacgtccaacgggtctatatgtgcccacttctcctactcgcagtcttacaaccgatatgatctctagccccctttctcccgactttacctttgactcggagactctccctccttcaatccttcccgccctcgagtacatctcctacaagctcgagcagaaaatgatgcatgccacgttgctagtgggtcgtggaaagccatatcccaccggtgaaccatccgacctcatggtaattcccatcgacgagcttgaccaacaaacatggcgagccgtctaccgtgccgtggtcaaagccgccagcaagttctcgctgggtcagagctggaccgacgcgctaaatcgcagtcaatacgagcgtcaggccaacaagtacctggtccaacagtcgatcatgcaaaacgaggtcatttt

SEQ ID NO: 1862 - DNA, 490 bp, Aspergillus oryzae
tgttcttccagatagacatggtagatctgagttccattccggcgtgactgttgctgagggtgaaggcaaatacaaaatgaccaaggttgtcaccattgcgcctcgtttcgttttgaagaacaagcttaatgaggatattttggttcgagaaccgggttcttccaatgttcttgatatcaagagcggtgatcttgtacctctgcatttcttgcgccaggttgccgagaaacaactttgcctgtgcttccccggagtcaacaaccaatggtcctcacctttcaacatcgcagacattggtacagtgcatgtcaagcttgccaaggcaaatcaacgccagaaactcatcaaagtggacgttatcatggaaaatgcaactctcttcctgcatttcaaccttgaaacacgaaattggccgtattccatgcggaacgagagcgacatggaattcatattctatcaagccaatccaaacgtggaagattacgaggac

SEQ ID NO: 1863 - DNA, 457 bp, Aspergillus oryzae
agagccctgttatacctacatccatctctagggccgtcgatcagaaaggaaaccctttcttagtgttcttccttgaatccgaatcatcctttgtctattgctctagaaacctataaccactcgctattagcgaagtcttatcattttcatcaatcttcggttaagatgcatctctcgcgctacatcgctgtactgttgtcggcatcgagctttgtctctgctcttccacttcaaaatgatgtgatctccgacgacggatctaagcccatagatgcgacaatggccaccgcaatggagcacaaggtagttaaccccgaggagcttgatgcgacccctgcaacccctgagacccccgaggatcttgataaacgattctactataccggctacaaacgcaccgctgaggcccccgaggatcttgataaacgattctactataccggctacaaacgcaccg

SEQ ID NO: 1864 - DNA, 511 bp, Aspergillus oryzae
  modified_base (318)..(319): n is a, c, g, or t
caagtctcaatcctatcattcataaacccctccaataaaacaaaacagcccagaatgtcctctacaatcaacaccagcaaaggcgaacagcccatcgacccctacaaggccaaaagcctcgaagacccgcccctggcccaaaaggtcgaagacctggttgacttcatttccgaggccaaattcggcatgctaacaaccaagatcgctggctcggaatacttaacctcgagatgcatggcgttggctgggaaggaacacggcggcatcgaccttctcttccacatcaacctcttctccagcaaaaccctagatatcaanncgaaccccagcgaagtaaacatgtccttcctagacccagttagcggatcctgggcgtctatttcgggaacggcatcgatcgttgccgacaaggctctcattgagaagtattattcgccgacgttgccggcttggttgggtgatcttggtgatggggttcatgatggcagtccgtcggatccgaggattgggg

SEQ ID NO: 1865 - DNA, 555 bp, Aspergillus oryzae
cggacgcgtgggtgcttgagtatgcaactctgtcatgggtcgccttgactctatctgtgatgcaaaattgcatggcaggaacgatcattcacgccatttctgcttatctgcattgacctggtgtgttattagctgtacgtgcatttttatggtttttgccagcgtatacttctcacggtattcgcttttcgagctgggtcttttgcctcttatacaaagagtgaatccggcaccattccatgtttacttcaaagagtttggatctttcgagaaaccaaaaaaatatcaggatcgttgcactagtgccctttcgtagccatgagcgaacggagatcctggattgctacctgcaaaggaacctcctcgataaccatggattcctcgaccaagtaatatttatcccgcagacgaataacacgcaaagtctagattggctcacgtctactgtcaaacgcactcctctctaccaaatctcggggttcggtgattatatccagtggggcggcatggatgagaatgtgattttcatcaaaatagatggcgataccatatttt

SEQ ID NO: 1866 - DNA, 663 bp, Aspergillus oryzae
gacttccattaaccttgcgcttctgtgtcttcttgcgcatttttttttctggttcacagtatttgcagggagagagctcttgcaggttcagtgagctattcagattagaagtccggaattgcgacagcccatggagtctgctacggaagtttatctgaatcgcgataatttcctctttcgccttcccaccgtctttttacacatctctagcttttaccggctttcacgtctcttgatttagccataatgggtgttcccgcactattccgttggctctccaacaaatacccgaaaatcatttcgcccgttattgaggagcagccctacgaggtcaatggagaacagatcccggtcgacaccacgcgtccgaatcccaatggggaggagttggataatctatacctggacatgaatggtattgtccatccatgtactcacccagagggaaagcctccaccggcaaacgagcaggagatgatgttggagatctttaactacaccgaccgagttgtgaacatggtccgcccgaggaaactcctgatgatcgcagtcgatggtgttgcgccgcgagcaaagatgaaccaacagcgtgcacgtcgtttccgctctgcgcaagaggctaaggaggcggatgagaagaaggaagattccggaaccagttct

SEQ ID NO: 1867 - DNA, 641 bp, Aspergillus oryzae
cgacccacgcgtccgttctttacctaccttccacccccgctattcgaggagacctacaatatggttgcgatcaattatagtgtcctcttcaccatccagactgtcctttttggaggccctggcgctaatgttgagactgatactggtatcagcaccttggcaaatcccaggacctacgcggatctcaaatgcacagtaaacgataaaccagtcactgtcggaacagacgcagtgaattatgttcaccatcacttcccacaccccggtaacgatgacgacccccggagatatcctcaccagtttttcaataaagatgaaattacatggggcaacgagaggtgcaacaaaccagagggtggtgaacagcctgttctgcttgagtttcctatcttgctggataagagccaaaagaaggcaatccaggaactctacaattacaagcaattaaaacccaggccggagccagggccttgccgcatcgttactcgaaagaagggtgatgatctgtgcggtgtgatgtgtcacattgaatatgggaagaagaatgccaaacctggcttcaaacgctggacatgagattgggatttgcccttcctgcatgaatagcatgtcttctcctggcatttgggcgattctgtatt

SEQ ID NO: 1868 - DNA, 582 bp, Aspergillus oryzae
ccccgatctagtgcgtcgaggggcctgcctcaggcaaaagcagttgattcattacctcttcttgaggccatagttacggaaacgttacgcctccatgccccaattcctggaatacagcctcgtgtcacaccttatccatcctgtaccttagctggttacagcgatatccctgcaaacatcagagttaatgcgcaggcatactcgctccatcgcaaccctgacgtatatccggatcctgagacgtggcaacctaagcggtggcttaagggtgtcaactcggattccgaccttgaagaaagaaggcggtggttctgggctttcggaagtggtggaaggatgtgtgttggaagtaatctggctttgcaggaaatcaaactagtaacggcggccatctacagcaactacaggacgtccatcgtagacgacgacaacattgaaccaatcgacgcctatacggttaagccccgcggagataaactggtgttgaaatttgaagccgcgtaaatcgtaacccagtgttaactttcccataaccaccaagatcattagctacgtcttccgaatgatcaagattgaaacgtg

SEQ ID NO: 1869 - DNA, 536 bp, Aspergillus oryzae
gaaccattgtggcgagatgctccccgggaacctggccgtgacccaatgggcttaacgcctcaacagcctaacatcgagttcttcaccaccgagtgctacggtggacctaaacagtacgaccaattcccggtcgaccacaagcacgcattctcgatgatcgcagagcttttcgccccgaaatctcgtggcaccgttaccttgaaatccaaggatccgctggaaaaccccatcgttgactgcaactacttggctgatccaatggacctcctggtgctgacggaggcatgccgctttggcaacgaggttgtcatgaaaggaactggaactaaagatatcgtcaagggatcctggcctcccaacctgacccatcatacctacacgactcgggaggagtggattccatatgtcaaagaacatgccacgacctgctaccatgcctctggaacctgtgcgatgggcaaggacgacaacccccttgctgttctagataataagctaagggtcaagggagttgctggactgcgcgttgcggactg

SEQ ID NO: 1870 - DNA, 579 bp, Aspergillus oryzae
gacatccactgctactccatccattcttcccagaccaagactgcaccccctcaaggcaggttcaacaaaagaaaccactgtcatcaaccatgttgacaagacaatcttgatcgtcaatcgccgacatgccaagaagttcagcagtgcatttgatgaccaagcccagcaggagtcggaaaggggatatgagagcttcaaagaagtagccaaagatattgagggcttggtcgatattctttgggttactgggacgccatctcttcaaataccatatttgatctctctggcggtgtatattaacacatacctccctgaataccccttctctccgaaggcgactttccgtctacttaagaagctggattccgtatttgcatctctcctaaccggagaggacgccgactctggggcacccctgccaggattcgaatcaagacgcaatgttgtatctatgacggagaaagtccgaatcaaaagtattgccgagacttgccgtgtagctgttgtagaggccagagagcaagttgatcgtcctgacgatgaagatgacctcagtgatgacgacgatgatatggatga

SEQ ID NO: 1871 - DNA, 448 bp, Aspergillus oryzae
gttgcaaacggtgacgttgttagctgggaacaggtctggcctggtatctgttcgcattttgggctggtgggaactggaccacaaggagatcagaagaaaatcgaagactttgttcgtgagaatcgaggcgcctggactgggttggttgaaaagcatgggttgagaaagggttcgctcgaggcgcagaactggcctttcattcacttcatgcttgttgaatttgacttcgaccgagagtacacgcttgatgctgcccgctcgattggattcacggagcgcattgataccgtccagggatatcgtgtcgcatttgataggatggcagctgcgaggatcattccttcttccttttgaatctgttatgtctgaagttgctcattggagttaaatgaatctttccttagagatagcggtagaggagtataatccccacttaagtatcttaagt

SEQ ID NO: 1872 - DNA, 589 bp, Aspergillus oryzae
gccgtctttcttcgcgccaggccttcaaggcctaccacccactcccccccacatcatgagcggtggcagaatggactccgagcacccattttacgtgtactcccaatcgtcctgctactccaagcccgccccgatgaacatgcacccgtcgtcgatgcgcagtggcagagatatggccatgatgaaccagcccatgttcggtccgatgcctactgcgaatgtgctgcctccccttcgaaacaacgtccagttaccccctatggacagcgcgatcccgcctcagtaccgccgacaaggcatcatggtgcaacccgaacagcagcagcgcaaggaggagaaggctaccggaggtgttgccgcccgcttggattatgagatggaccagatgtccgactttgtggctgagatggcccagggaatcgtctacccaggaacgtcagtcccgccgcaattccggaagtacgtctttcagattctgtcgtcgactcgcctgccaagctcgacgattcttctgggtctctactatctagccagcaggatgcgcatgctgtcctcttccaaggtgtttgtgtctggcaatggtcaagtt

SEQ ID NO: 1873 - DNA, 227 bp, Aspergillus oryzae
ggcgtaaaaggaatggaataaagcctactgcgccaaaggaacataatggtgagcaggcgaattgaatggatttttccaagggtcgccaaaaatcagggtgactatcccgagaatgagcgttgggattggcatcggttttcatgactaaactttttatgaagatacccagctgggatgatgagataatcggtatatatagatatagaaattagacctttcaagtcttg

SEQ ID NO: 1874 - DNA, 509 bp, Aspergillus oryzae
cacctttgtcctggatatcataaacctcctgtcacaatgtcttggaaactcaccaaaaaattaaaggaaacccaccttgcgcctttgacgcaaacctttacccggtcctcatctacatccaccattaaggccgagtccggggaagaaacccctgtggtttcgcaggctccgactccgactatctccacgtcaaacatcaatggaatcagtgcctcggaatctctcgtatcgcctcccgtggctcccgttaagcccggtattctgatcgtcaccctccacgaaggccgagatttcgctctttccccgcaataccaacagatcttcaattcgcatttccaaaacaactatgctatgcgcccgagctcctcgtcctctcactccacccatggccaagctgcgtcattcgtccataatggccgtcctcagtcgactagcggaggtatcaatgcggcgcccacaatccacggtcggtattcgacaaagtatcttccctacgctttgttagattt

SEQ ID NO: 1875 - DNA, 622 bp, Aspergillus oryzae
cccacgcgtccgcccacgcgtccgcccacgcgtccgcttctctccctcactccttcagtctctcttcctgcattttttgtctttcccttgcattatctcttccctctgcacctttgcctcgtgccctgtagctgacttcttataataccccatatcaccgtcgttcagtcagcgtcaggtttcttcatctctccgcccaccagctgtccgtggtcatcatgaacagcttggtggctacaccacctgtgcctccacacttctacgaatattcccgtctttcctcctctcgtccaatgtctacaccaacctacacccctaatagccgcaagcggaaagccgacgacgatggtaacgatcatgatggacgaatgtctgcctctccgacgagctcgccagccttcacaccgaggtctcttccaagccggaatatgaaacgggcccgtccgaatgtcagcggccgacccctgtcacttcctcgtttgttagagaccttagatacagatgctctccggggggtccttcggtcgatgtgtgaacgccatccggggctagttgatgaagttgttcatactgctcctcgcccgagtgtgtcttctgcgcttcaggtgcttcgaaactacca

SEQ ID NO: 1876 - DNA, 711 bp, Aspergillus oryzae
cccacgcgtccgcggacgcgtgggcggacttggtactactgacctaaaatacccaaccatgacccctcgcaagaaggaagtcttatctgcggtaaccgcgactgcagatacccgcgcagacgagccggcaatcgaattgcgccagaagactcgatcggaacggatcccccagtcagcgcgctttatgttggttgttttgagtagtctggcactgagtgctgggttcttcagtttaacgtctggggatacccttggcgaactgggcgacgtgagcagacatctcgaggcatggtgggaagtggggggtttgacggcatggaaggcagtagaggttggattagcctggatcttgggctttgatggacgagatgtgtcatcattcatcttccttacccacctccccacatacgccctcctagcatctttctataacatccgccccaccacggtcttgatctcttatgcgatcatcttgttctcgacctcggtcccttttgtactcctgcgcaagccgacttgcgtgcatgacctgtcgcatgctccctccgacgcagtccgcaaccggtcaatccttcaggaccgcgcgacaaccattttacaccactatcgccgcgacatcaattctgactgtccgtcctatacctaagctacgcaacctggcttccaacacagctagtcctccacttcgaaacatccccgaattacccccgt

SEQ ID NO: 1877 - DNA, 564 bp, Aspergillus oryzae
tacaactggagtaaggtcaacttgaaactggaggacttcgaataatctgccgctgcttgtaccatccgacactaatcactgcactggtgctatatacaatcatgcctactgagcgcagtactgaacaacctgcgtcaaaagtttctgccgacgacgagcccgtttctgttacagctaaggaacagaataatgccgccaaagattccactgctagccaaaaaggacctgaaggcgcaaaagcttcaggcaattcatcggcaacagtggaacccgtgaaaggagacgatacggccgcaaaggcgcgccagagacaggaaagattcaaagcccttcaagctcgtgcgaaatccgcgaccgagcgcaacttgaaggaaacggcagccgagacacagcgtctagcaaccgatccatcgctgctttcgtcattgtctcgtaaacatgcgtttgcgtcacataacctacttaaagccgatacggaagccgccggtgaagattttgaacggaaacgcgcttgggattggactgtcgacgaatccgagaagtgggataagcgaatggagaaaa

SEQ ID NO: 1878 - DNA, 548 bp, Aspergillus oryzae
gccgacaatctccctggcgagattgagaaggtcaagaagctcaggaaggactatggcaacaaggtcatcggcgaggtcaccctcgaccaggcctacggcggtgctcgtggtgtgaagtgcctcgtgtgggaaggttctgttttggattccgaagaaggtatccgtttccgtggatacaccatccccgaatgccagaagctgttacccaaggctcccggtggcgaggagcctcttcccgaaggtctcttctggctgctgttgaccggcgaaattccctctgagcagcaggttcgcgatctgtctgccgagtgggctgctcgttctgacctccccaaattcatcgaggagctcattgaccgctgtcccagcactcttcaccccatggctcagttctctctggctgtcactgcccttgagcacgagtccgctttcgccaaggcctacgctaaaggtatcaacaagaaggactactggaactacaccttcgaggattccatggacctcattgccaagcttcctactatcgccgcgaagatttaccgcaacgt

SEQ ID NO: 1879 - DNA, 610 bp, Aspergillus oryzae
cccagtcgatatgtgttcgctacggtctcccgatcggtgcttggatggctccttgcgtcctggccctcatgtacattatggctccggtcgcatggcccatagcgaaacttcttgataggttgctgggcgaggatcatggaacgatctacaaaaaggctggattaaaaacactagtgacgctgcataaaaccttgggtgaagcgggcgaacagctcaactccgatgaggttacaattattagtgccgttctggatttgaaagataagccagtcggtagcattatgactccaatggacgacgttttcaccatgtccgcagatactgttctggatgaagacacgatggatttgatactctcccaaggatattcccgcatcccgattcacgcaccagataacccgacaaatttcgtgggcatgcttctagttaagatgttaatcacatacgaccccgaggactgcaggcgagtacgggaatttgcactggcaactcttcccgagactcgccctgaaacaagctgcttggatatcgtcaactttttccaagaaggaaagtcccacatggtactggtgtccgagtatcccggtgaagaccgtggtgccttgggtgt

SEQ ID NO: 1880 - DNA, 568 bp, Aspergillus oryzae
cgagttcatctcgaccaatttctgggtgaataccctcatctccactcttataccttttcttccttactttcccgcctcaattggctgccttagttgacaatgttctaccgtaacgttgctgcccgctctgctctcagggctttctctagctccaatgcctctgtggctcgctcggcccttgcaaacaatgtgttcaaggccccattgacctcttccgctcgttatcccgctcgcccgaccacttctcccagccttgctctggctgctcgcaagcctgtgaccactgctcttatccgccatgcctctaccgctcccaaggagggcaaggaaggtgaggaggatactgatatgatggccggtatcaagagtgaggcgaaagtgatcaaggataccttcagcctcagcgatgttcccaaggaggctctttacctcggcatggcgggtgttatcccctacgttgccacttctcttgagactgtctacctctcctatgagatcaaccgtgctgcttctctcggtgatggcctcatcttctctggccagagtgccgagctgatgcttcacatgc

SEQ ID NO: 1881 - DNA, 568 bp, Aspergillus oryzae
ctggttcagtccaatcgggagaagtactctacacatcctgaggatcgtgacaacgactcgggtcacgactccaatccttcagaagacgaacaagaccacccgcagttctcggactccgaggaccacgatcccactatgagaaccggctcgtccacctaccgtgtcccaaacattgtcttcgatgccaacaccggtcccaagggtgttatagccgacgctcaggcctttgagcgcgcgcgcgcaagctcctttcgcaaaacactgcatcataatgaccatgcaaaatacgttgccgacgattcccaccttctgcatcataccccgcctccggatggctcgctcagtgatgaggacgaggaacacttccttcgccaatggcgcgaagagcgtatacaggaattaaggaaccggagcttccggcggcctagcccccggcggagaatgtatgggtcggtcgatacagtcgacgcggttgggtaccttgatgccattgagaaggtcacatccgatacggtagtggttgtttgtatctataatcccgagtcaaagaccagcgctttagtaaaag

SEQ ID NO: 1882 - DNA, 540 bp, Aspergillus oryzae
cggacgcgtgggcggacgcgtgggctgaatcgcaagccatctactgaactgtctggtactgttcttattgatggcaactatcttatttgtcctcatctcgccttactactgataggagcctatctcgattcacgctactcccataatgcggctttccgaaagtgcaacggtagcgttcggccttttttgtgccgcgacggcatcagcccatcctcgacgctcctacgagacgcgcgatttctttgctcttcatcttgacgattccacctccccagacgagatcgcccaacgcctcggagcacgccacgagggtcaagtaggtgaactcacacaacaccataccttctctatacccaaggagaacggtgcagacctcgatgcgctgctcgaacatgcacgaatcagaaaaaggtcaagtcgtgccgaaggacgtggcatgacgttggacaaggaaagagatttgagtggtatactctggtctcaaaagttagccccaaaacagcgactagtaaagagggctcctccaacaaatgtggcgtc

SEQ ID NO: 1883 - DNA, 431 bp, Aspergillus oryzae
ttcttttagccctgcttcgcttcctttcttttgaaactgcttctagaaagtgaggctcgtttcagtttagccccatcgctcccttccctttccgttttcacttaaaagggactgagacgtcgatgatccgaaattgtttcttcgtttgaaaaataaaaacttccgatcaattatgcttctgaatcggcgtcttcacaatgacaaccgctcatattactcctctacagcaggacctttcggtcacgaccacgagtccggttgtccaactacattgtagtcccccggaatctttatcgtccggtcatacaagtcctagcgcggaacatcgtcggtcagtcgacccatcggccgtcgttggcgccaatttccccaaacagaccaatcgccgcgcttcaatttttaggaagttggcgggtccacgcgagaacgca

SEQ ID NO: 1884 - DNA, 460 bp, Aspergillus oryzae
gttgttattccctccgagtccctttgaccaagaggtgcagtcttcggtaggtgtatttgtcctctcttatctcaatgaaaaagtattgctcatacctcctcttccccgtaaccagtgatttatcggctctcccgcacaccgtctgaacacttaaggaatcccttcaattgggccattccgaaaactcacgatccaaaatgtctcttgtcaatctcgcccacgtttgttcccatctaaacaacgccaccaaggcccgcttgggtctcacatctatcccgaacacccagctacacctgaaattgtgccttgctctccaaaactctggttacatctcttcggtcgtccgcggaggcccgactccccctcctcaacatactcttctgggtgttccctcggtaaatgatgaagttgaaggcgtacaatcgttgacccaaagcaatgtcgcctcaaggcgtctttg

SEQ ID NO: 1885 - DNA, 510 bp, Aspergillus oryzae
  modified_base (206)..(206): n is a, c, g, or t
cggacgcgtgggcggacgcgtgggcggacgcgtgggcggacgcgtgggcggacgcgtgggcgacccacgcgtccgatcttctccttccctcccaggtcgctattacttgttgcgacttactcctctatatcatttaactcacctgcatacccacctaataataccttcttgtttcctttgattgttttacgtttggagctctgttnacagagtaattagccatcatgtcttctaccgctcctcttgtcaacaccgccaatggcggctctgccaatgacaacatcacccgcttcgcaccccccagccgtgtgctctctcctctcaaccatgccctcttccacaacaagaccagatgtttcgtatatggtatgcagcccaaggccgtgcagggcatgctcgacttcgatttcatctgcaagcgcagcacaccctcagtcgccggtatcatctacactttcggtggtcaattcgtgagcaagatgtactggggtactagcgagactttgctcc

SEQ ID NO: 1886 - DNA, 600 bp, Aspergillus oryzae
cgcctgcaggtaccggtccggaattcccgggtcgacccacgcgtccgcggacgcgtgggcggacgcgtgggttttttttttttttttttttttacaggatactgcaccagttgattgcttttgaactatgtgctgttggatttcaatagtctcaagggctctacaggcctttcgaaattaagaacaggaaagttattaaaaacgctctgacaaaataatgtaatgaccatgacccgtgaaccaggccagagccacagagaacgtggacttatcaagggtattgctgccagatatcaatccgagtctttagtgactggaagctatttactcctcgtgctcaaggggctcctcctcctcgaggtattcctcctcgccctcggagatggaggcatcctggtactgctggtactcggagacaaggtcgttcatgttgctctcagcctcagtgaactccatctcgtccataccctcaccagtgtaccaatgcaagaaagccttgcgacggaacatagcagtgaactggtcgccgacacgcttgaagagctcctggatggaggtggagtttccaatgaaggtggaggacatcttgagaccacgggg

SEQ ID NO: 1887 - DNA, 464 bp, Aspergillus oryzae
cccacgcgtccgaaaagacactaccattgggacctcaaccagcaaacatggaatcaaaacacaacaccagaaaggactctgatcgtgtccgcctcagggacgacgatacaggctctaccgaacccgaacaagtagaccaacaaagcagctttgctgacttggaccctactaaggagtacactgcgtcctcccagactgccggtacaggcttccaacctgagcctgccgcaccgcgctccagttcctcataccatttccaacatgatcaactggcacacccagacgaggagttccatagaccacaagagtagaaagggatatgcactgtatgtgagaaatgagtcgtctttctttaagccacggtccgttccgtttagtcttttttatgaatgatcttaatcattggacaatgttgctttgtacttgggagatcagagtatgataacttatctcaatgttcacta

SEQ ID NO: 1888 - DNA, 570 bp, Aspergillus oryzae
ccctcctgattatctacgttcttttcttttacagatctgaacacatggacgaacacttgtaataatatctactatatactaatatataccccttatacccccgcacggtcttttgctttccctttctagtacctcttaatactacctcgagactggacatctctaccttccaaccaccatgtctcttctggggacaataaaccctaatctcaaccccgcccgagcagtcggcgctcaaggtgatgccgagggcgcagctcctgtgagcggaggggagccaatgcctatcttcgagggaaacgacagcgcaagaacgtctgataccgccttggacaaactaggcaaagatgaatccaaatacgatgagcagatcgcagaagcagaggtcacccgcttggcacagcaactgacccgccaatcgacgaggttctccgtcagccagaatgcggagaacccattcctggaaaccaaggaggattccactctaaaccctctcggccctaacttcaaggcaaagaactggatgaagaacttgttagcccttacatctcgtgatccggaaagaccccc

SEQ ID NO: 1889 - DNA, 484 bp, Aspergillus oryzae
ccgcctcgaggcccattcccatccccaagccgtccttccacacgcaccaggacgacctccccgtcactcctttgacaggccggttcgacaagggctattacttcgcccatcgtgaccaggctgataacaagacccgagagaagccgactcatcacaggagtcgcccacaccctcatcgcgtcccccgttcatcggccagaatgcgatcagatagttctaccttctactcacccgtggtgtcttcgtccatgtctcccgctgcccgtccttcctcacctcaaccaccccgttcccggtcgcagaatcccaccaaatccgttccagccttccatctcagcaatctgccacgatttcatcccgcggtctactcagcggcgggttctcagggacaaccgacatccccacgtcaaccgcggccatctgcctaccgcaccacctcgggctctcgggacgcgatgtggcagtatcaggaactcgtcgaggg

SEQ ID NO: 1890 - DNA, 451 bp, Aspergillus oryzae
gttcgcaccacctcatctttcccatctctcccgcaaagtgttcgtaacttccatcctagggtcttttttgtccgttctcccacccgcgagctcactgttggtctccgttggtctttgtctgcgtctgtcacaaggttcttcaaggtcaaatagccattgaagtcctgacaaagaaccggtgcgcgtgtgattacctgcattgcattatctccgtccatttgcatccccttctgggaccctggacgttttgcagatatctacttcaggtggttgaacatagaggggtaattcctttgacccggactggcgacaggctggcctcaccatttcttgcgacgccggtagaactgcgattggtaagattggcattattgggaacaacaaagacgatttccaagtaccaaacgaagaccaatgtactgggtaggaaaagacccgggactctggtttg

SEQ ID NO: 1891 - DNA, 452 bp, Aspergillus oryzae
cgaaagagaaagtgaaaagagaagggctagggaatcagaggcaagttgcgctgccatgattctgttattccgactctcgttacgcccgttttgataccaggagttggctccggcctccgccgaccgcaacgatgtaccatctggccaggtcgttgtatatgtacgccaccagcaaagaggagtactctgtcctcctgctcgggttagataacgctggaaaaactacgctcctctcgcagatcaaggccctctaccaaccccgtcccgaaggcgcccctgctccgaaccctggcaagaccgtgcctacagtcggccaaaatgtcgcaaccatcaatctcccggaaatgtacctgaagatctgggatgttggaggtcaattaacgatgagaaacctatggcaaagctactactcaagctgtcatgcgatcatcttcgtcgtcgacagcaccgac

SEQ ID NO: 1892 - DNA, 504 bp, Aspergillus oryzae
cagcaacggtgcccagggcacgttctatgagggtgtgatgacctccggatatccgtccgatgccaccgagaactcggtgcaggcggacatcgtagctgccaaatacgccatcgcgtcactgaccagtggcccggcgctcaccgtcggatcctcgatctcgctgcaagttaccacggctggttacacgactcgctatctcgcacacgacgggtctacggtcaacacgcaggtagtctcgtcgtcaagcaccaccgccttgagacagcaggctagctggacggttcgcaccggccttgctaatagcgcctgtctttcgttcgagtcggttgatactcccggcagctacatacggcactataactttgcccttcttctcaatgccaacgatggcacgaagcagttctacgaagacgccacgttctgtccacaggctggtctgaatggccagggcaactcgattcgatcctggagctatccgacccgttatttccgccactacgaaaa

SEQ ID NO: 1893 - DNA, 540 bp, Aspergillus oryzae
ctctttgcaatcaaggcaaagggacagtgtcactctgacctcatccacttacacttccaacacaatgcgaacccagttttgcagttcgtgactttgaagctgtggtactatctgaacccatacaatcaattttgtgatgggtttgggagtctcgtcgctaccttctttttatgctgtcctatgaacgttgatactacctacacttttcctttttcttttcttctttttcttcttcttctttttttattaccctttcgggttccgtttcttctttttttcccccaaatcagcgaacagttgcatgagtggtatcaacgatagccatggcccaagacctgggatcagccctcgaacacgccggtggcgctggtcaaaagagtgagggtatcgcaatcaacacttttctcgcgtctttagctactgcgatcgtcatcttcgcagtggaattcttactctttttgcttctcaaatcgaagctcacccgcatctaccaacctagaacctaccttgtcccggacagagagcgtaccgaaccctccc

SEQ ID NO: 1894 - DNA, 647 bp, Aspergillus oryzae
gccttttccagttcatcaacctcaaaactagaaaatatgggttggatacatcgtaccaatctcaaggtggcgcagtcgccagttgggcgatggtttcgtctggagaattccggccatccccaagaacgaaagggaagctttttctttaccgaaatccgagccggattggcgaccttcttcgccatggcgtacatcattagcgtcaattccaccattacctccgattcaggcggcacgtgcgtttgtccgccagagagctgggccgacaagtgtaattcgaacaccgagtatctgctatgcgtgcaggaagttaaacgggatctggtcaccgccacagcagccattgctgcgctgggaacgttcttcatgggtttgctggcgaacttgcctgttgcgttggcacctggaatgggcctgaacgcatacttcgcatatacagtagttggacatcacgggtttggaatgatcccatatcgcgtcgcggtgacagcggtgtttgtggaaggatttgtattcttggccttgacgctcatgggaatccggcagtggttagcccgagcattgcccgcgtcgattaaactggcgacgggtaccggcattggcttggatttgacactcatcggactgagctacagcgctggaatcgg

SEQ ID NO: 1895 - DNA, 685 bp, Aspergillus oryzae
cccacgcgtccgatcctttcacctattacttctttactttcatcacataccaacaatccaagatgttaagccgcagctccagattcgcaacaagctgcacaagacagcacctctaccgccaaaccagaaccccccttcgcaatgcacgcgcccgctactccacctccacagaatcaggctcctcggggacctcccccgccgtagtgggcggaatcgccggtggcgccgtcacattcctggccggatacgtctggtaccaattctccggggcgaagacgatcgtgcagactgcaaaccaaacagaggcgtatttcaaggaggccaagaagaaggtcgctgagaagactcccgagccggatgaggcgttcgggtggttgagagatacggctaagaattatgcgtcgtttatccccggtgcgaaggggtatgttgatacggcgtttgatgacctagagcgtatcagacggaatcaggggaaggagtttgatgagattgttcgtgatgcgtataatgatctccgagaggtgtcgaagaaggggaagcttgatgtggatacggcggttaaggtgagggatgtgttgcagaagcattttaagcggttgtatgagcttgctggggattctgcggaggatattctcgataatcatccggagttgaaggagaagcttggcggagctttgatcgt

SEQ ID NO: 1896 - DNA, 548 bp, Aspergillus oryzae
gaaagccagggtgaaggttgatagcccggacttgaataacaatgctttggacagggacgggattagatctcgttttagtgtggtatcagatcttctgagtgatgctcttggagattatcgctacctacaagcttgtgatgtcgaagttaaccctgatatcctcaaggcaacttttgagcttgaggaggccctacgtcgcgcaaagagccatttatcaactggaagtgctcgtaatagccatacttcggctgactcctcagctggagcagtaggcacgcaaggaattttgcccgtgctacctcctattatggataaagtcctggaaagagctgttttcacgcatccaggcgtgagcaacgataccgagaaaacctacgatcgacttgaaatcctcggagatgcctatatagaactcattgctacgaagcttatatggaaaaggtttcgggaaattccttcggggcggatctcacagatcagagaactcctggtgaagaatgaaactctcgccgagtatgcggcgggatatggtcttgacagaaaagccg

SEQ ID NO: 1897 - DNA, 494 bp, Aspergillus oryzae
ttttcgactgactctctgcctttgcgtcagtgttagatcggcattagtagtattttccacctttactgcctccctcctttcgccatgacgatgcgagaatatgctggtggggaccagcaaaaccccaccggctatggctatgggggaaacaacaactactatcctccccagccgaaccgacaaggcaacccatctccccagtcctataaccacccgaaccccagcggctacaatccgtaccctccatctggttcaaacccttccgagacaaattacaactacaattctgggaatcagtactaccccacgcagactgaatatcctcagccgcagccatggggtggaccctcccctccgcccgggaactactaccagcagccggagaaccgatcataccataaccctccatatgggggacagccaccatatccccattctgaatccccgcggcccaaccagacggacgcctaccctcctaaaccctatcctcctcc

SEQ ID NO: 1898 - DNA, 515 bp, Aspergillus oryzae
taaacattcaatatgggtgtcgagaggaagatcattacccgcggtagcggcccctctcctgcctcaggcgacaaggtctccatccactacaccggctggatctacgaccctaagaaggccaacaagggcttccagggcaagcagtttgatagttctagatcgccggggcggggtccattggttgtgaatattggtcaggggaaggttatcaagggttgggatgagggtgtcatgcagatgagcctcggcgagaagtctaccctgactattaccccggactatggctatggtgacaaggccgctggcaagatccctgcaaactctactctgatcttcgaggttgagcttcttaagattaactagtggcatcgcattatcaagtgatcaaatagtggctatagagaggcggccccgatttcaatgacttttgcctgtttcggtacttgctacagggaaacaccaggttgcatagtatattgcagagctctaggaacttaaaagatctgcttagatgg

SEQ ID NO: 1899 - DNA, 484 bp, Aspergillus oryzae
gcggaattagggcttgtagtcgcttccgccaaccatggtcaattaaactgaccttcctagacaattgttaattgttaatttatttatcgcagacaaataaatgcacaaaaatggtggaaccgggtatataattccctagagtacatattttgatgttgacaagatgcgtcgcatttatcgcaaaggctgaatacattcaatgtcgaggtgtccccgttgccaacgaataccgcagtcccaacaccattcttgctggcataagacacctgccagaagaaatgtcagtaattctgttatcgggattgttggattccatgagcgatacacgtacatgtcatatgcttgcaccctcccgatctctctgtggccacattacaaccagggcaaggccttgctgtctcagcaattgttcgcctactcatggctacttgaatggaccagtcctcggggccatgcctcagcgcatagatttcagaaggcattt

SEQ ID NO: 1900 - DNA, 518 bp, Aspergillus oryzae
attccgttttcatttgattattattattagcaacaactcaaacccccaaaccaaattaactgtatttctatcacccttcactctcgatcgcgattccaccaggtccatttaatcactgtggcctcaggcatatgagttggcacgtgcgatccttccaaagatcacctgacttgcctattctttttcgactctccctttgattcttctttccacttccgttttatctcgagattgccttacgcttagtcaatttggcttgccgcccacgtgactctctacagcgtaccgcctcttggcaatataaattcctctgcttcctgtcgcattctccacttccgacccgcgctaatactcatctttcctgtatattctaacaccgcggcgtcgcagcagttgtgactgctgagcaacagttttcatctgtcttttgtcacttaatcagggggttttagtcgacggttgacgaatcgatccatttagtctgtgatagcgcagagaatacctattcagtgcatttt

SEQ ID NO: 1901 - DNA, 529 bp, Aspergillus oryzae
aattcgatcatcagcaatttatacagaatcctcatcttgatacatcatctccaaagatgaagccggagcctggggtttcagaggctggtgaccagccagtacttgcgtaccctcctcacgcgccgctcggccaagtgccaaatatgcatccggacatgcgataccaaccgcagacacacccgaaccctgcgctaccgcttttgcaaaacccttatatgcccggagggtatacaagtgctcctccgatgccgaacggcggtgcccctcagggcaggacagatcctccacccaagacattccactgtggcacttgtagcaagggattcgctcgacgcagcgatctggcgagacatgaacggatacactctggtattagaccacacgcttgtgattggccaggatgtggtaaacagttcattcagcgctctgctttgaccgttcattcccgcgtccatacaggcgaaaagccgcacatgtgcgagagatgtggaaagccttttagcgattcatcctctttagcaagacaccg

SEQ ID NO: 1902 - DNA, 556 bp, Aspergillus oryzae
ccccaaatctatccaagtcatcaatcccatggtctttcaggtatttcgatggcttttaccaagacgtcctaatcaggcacatcaacttctcagttggtaagaaactattatatcactttttacctagatagttttgaaccacccctgcgacacccgaactccggctctgaggcagatacggcagcaatcctctgatttgatattgcttccagatacctgacgctttgacatcgttccaaatcttgtgtagggaaaagcgacctcttgagcggatcggtcgacgtctttggctccctactctggaaaggacttgctcaagggtagagtcaaggggtatgaaatccgaatcattgcttagggaagtgtggtgaaaggtatcataggctataccaggtaacatgaagcaatgccttttccctttgaaaatttgcttgctagcagtgagactgtgagaacgagacggaggcatgacgggcaacccatttccaggatacttcatctcgtctgagttacaacgagcattccaggaacatctccttgagaaagcactgaagtt

SEQ ID NO: 1903 - DNA, 406 bp, Aspergillus oryzae
gacagcatggcaccggaccaggtcgagcgggttctgcaaggccgctgggccatcatcaacgtctggcgtccattgaagcccgtcccatgtgaccctctcgccgtagcagatgcccgatctgttcctgacgaggaccttttcgaggtccatgttgggaaaccacaaaacgtccaagccaccttttataatcctaagacctcccgacagggtagtggaacactgcttgggaagtatggaccgggccataaatggtactacatgtcggatatgactcagtacgacatcctgttactcaaaatatttgactcgaaagatgacggcaagacggcgagaagaacactccacgcggcattcatcgacccgcacacgagcgaggtacaggaggcacgagaaagtttggaaatca

SEQ ID NO: 1904 - DNA, 592 bp, Aspergillus oryzae
cccacgcgtccgcccacgcgtccgggcagcagacatactggagtgtcgaagaatccgacacatggacaaacatcaagaaacatctgctatattcgcccctcggtagaaaaaggcacaatcgagaaatacaactttcttccgccataaacgtgggtaccttgccgtccaggttccaaacgatcctgatcctattgtatcttgcaagtcaagtcgcttattgcactatactcgactatcgcgtgaatgagaaaaaggcccttgttgctgagcttcgtggacgatcgggaacgttggctgttttgaatatggtcccgcttttccttcttgcaggtcgtaacaacccactgatcgcaatcctgcacataagtttcgacacatacaattgtcttcaccgatggctaggccgcattgttgtgattgaaagtgtggtgcatacagtagcgtgggcagtcaatgcagtcgatgaggtaagcgtctcagacatgctaaagcgcctatgcgatacgcctttcttcacttgggggcttggttggaactgttgcaatggtcttcctctcgcttcactcaccttcaccggttcggcatgcttttt

SEQ ID NO: 1905 - DNA, 523 bp, Aspergillus oryzae
cccatctttggcatccttatcattattttaccatcctagtgcgttcgcaactgtggtactgttgcgcagtctttatccctgtggtgaaaggaacctgctccaggcagcctcttcaccatggctccgaaggataccttcttccgttcgtcggatatgagcttgacccagctctatatcgccaatgaaatcggacgagaagttgtcagtgccttgggagaactcggtcaggttcaatttagagatcttaaccccgacactaatgcttttcaacgtacctttaccaaagagatccgccgcctggataatgtggaacggcagctgcgttatttccattctcagatggacaaggcaggaatcccaatgcggtcttcatccgaattcaccgatacattagctgcacccttggcatccgaaattgatgagcttgccgaacggagcgagagcttggaacagaggattgcctcactcaacgatagttacgagacactcaagaagcgggaggtggaagctcacggaatggcgt

SEQ ID NO: 1906 - DNA, 442 bp, Aspergillus oryzae
aaatgaagctctgcaaaagctccttcaagaacttgaaaatcgtatagttacctcccaacaacagatcgggatcgccaaggcccaagtgaccacaaaacagaaggctatcagactgctagacttgacgtctagtgagatgagctcattgcctaaggacacacctgtctacgaaggtgtagggaagatgttcgtgggcgtcccgatgtcgacggttgataaacgcttggtggccgagaaggcggaactcaagtcggatgtgtcggggttggaaaagaagttgagttcgctggagatgacacataagaacagtatggagcattatgagcggtttgtgaagtccggtggtaaggcttgagttaatccgcatatggcactgaagccatgttggggtttgtcgtgagtctattctggctttgggaacatttggcttcgccgagccggg

SEQ ID NO: 1907 - DNA, 541 bp, Aspergillus oryzae
cttttccccatctttctctgtcgttctgtcagtttgttttttagtctcgcatctcaaagttttcttcctatcccgccatttccatcaggaggcttttgtacaatatcctagagtgaaaacaatcaccgccaccttcccggtactttgaccgctacccctcctaagcccgcgccaggagctgtagactcgagtcaaataactgttggaaagtcttgcttgaaggcaaggctttcggctctcagatcgccacaattacctccgaaattcccgttcgcgacgctgcgaagctgggaaagcgaagagcgtctgccgacaagtccccaactcgaccggagaagaaaatcatgacggacgtcgaaatgaacgtcgataacccacaggaaactgtggagaagattaagcagggggagattgatgaatctctgtacagtcgacagctgtatgtgcttggacatgaggctatgaagcgcatgggcacttcgaatgttcttgttgtcggactgaaggggcttggtgttgagatcgccaagaacattgctct

SEQ ID NO: 1908 - DNA, 511 bp, Aspergillus oryzae
gcgctttcacagattattcccgtgcttcgaataggctatatgtcctcttatatcgcgccattggcgttcgtcgtttccatatctctaggaaaagaagctttggatgatatcggtcgacggcgaagggacgcagaggcgaatgcagaggagttttctgttctagcattcgataagcctcttgagaggcaaacgttatctgcgcgtggcgatgttaactccgagattgcaaatgccatccaagttactaagaaatctcgagacctgaaagttggcgatgtcttgaaaattcgaaagaaccaacggcttcctgccgatgttgtgatcctgaaaagtgtctcgaatgatacggctcaccaggacaccgtgacggaactatcctcagatcttatacaggcggaccaaagtttaggaccgcctacggcggagtctagctcgcgtactgcagcagaaacgacaaacacatcgtcgactagcgatacgttcatacgcacagatcaactggacggtgaaa

SEQ ID NO: 1909 - DNA, 476 bp, Aspergillus oryzae
acttgtgcccaccgctattttctcttggtattggtgcaatacgctaccctgattacttaccgctctctaagttcttgtcgaccttacccgcccctggcgagctgaaatcatcgacgagattgataatcatcgcccgtgctggcgtccctgcaaatcaacctaatcgtgtatagccacccatccgttgggctctgctgccatgtctgagtcaactagcacaaataccccgaagccgagtagtagcgtgaagctggtacttttgggcgaggcggcggttggaaagtcatcgcttgttctgcgatttgtcaacaatgactttcaagaaaacaaagagccgactattggagctgccttcttgactcaaaaatgctcccttccgacccggacgatcaagttcgaaatctgggatacagccggtcaggaacgattcgcctcgcttgcccccatgtactaccgtaacgcccaggcggcgctgg

SEQ ID NO: 1910 - DNA, 579 bp, Aspergillus oryzae
cccacgcgtccgcccacgcgtccgcccacgcgtccgcccacgcgtccgcccacgcgtccggcgagacagtactatgactaccttttaaaccggattagcgttactttcgctccgataaaggctggagaaggcgatgagtttaccttgactctgagtcgtaagatgacttatgaccagttctccaagaaagttggtgaacatttgaatgtcgagtctacgcacttgcgcttcgctcctgtcatggcaagcacggggaaacccaagcaatttatcaaacgcaaccccaaccaagcgaaccagacgctgtatcaaattctcagtggaacgatgaccggttacggatatagcatgcaccgttccgatgcactgtattatgaggttctggagacaagtctgagcgactacgagtctaaaacttccctaaaggtgacctggcttcccgagggtattacgaaagagcaagttgtggaagtcttggtacccccgcgatggcaccatttcagatcttctaagcgggtttgcaaaagaaggcaaaaccttgacgaagatacaatccgtgaagttaggatctatgagacg

SEQ ID NO: 1911 - DNA, 582 bp, Aspergillus oryzae
cccacgcgtccgctcaaatgtctccgaaaccacgtcatcgtctgcttacctacccacggtctttcgcaatttaggctccagagggaaaatctgttcctccaccttgacgttcccatatacgttttcccagcgttctcgcagaggctccggtgtcgcccacgcgttctcgggatcgcgcagccaaagtcgcagaagatggcgtctgcgtttctgtcagcacgataaaactataaaaaagagataatgaagcacttactccttgtcaggctcgtcccggaatcccttccgcgcgtggaaaatactcaggttgttaatatactggacgtcgcccttttggaaatccaatgcggcgctgtgttcctcggctagaaagtgaagcgcgtcaagcgcctcggcctgggcctcagagatcgggggaatattggtcgaccgtggttgagcaaggaatccggtgaaatatcgacgagcgtattggatcagaacgcgttcggggggtggtgtccggttgccttctggtggtaaagaagggggcgaagtggtaataggggctttttcgggggtcattgaatctggatgattccc

SEQ ID NO: 1912 - DNA, 470 bp, Aspergillus oryzae
cgatttccaaaccccatcccttatattccgccaaagctatctgtgcaatctcccttccttataactcacaaatttggttatacaacaatgtcagctaaaattcccagaaactttaggctccttgaggagctcgagaagggcgagaaaggccaaggagcagaggcttgctcctatggtcttgcagatggagaagatatgatgatgagcaactggaacggaactattctcggccctcctcatagtgtccatgaaaacaggatatacacgtgtcaacatccattgcggtcccgattacccagacaatcctcctgagatccaattcatctcaaaggtcaatcttccttgtgtagacccacgaactggcaaggtcgaccctacgaagcttccgtgcttggctcaatggaagcgcgactatactatggagaccatcttgcttgaattgagaagatatatggctcttccgcaacaca

SEQ ID NO: 1913 - DNA, 447 bp, Aspergillus oryzae
gtgggtgcaggtgaaacttccgcatacaacacgcttaatgactcactaatgcttcaccacggtataatttcggcataaaatgtctgaaggttatgctcttcggagggagaagtcctgtatggactatgaaacggactgcggcacaacctggaatgattttgttgcatgttgtccctccgactcatattgcccgggaggagagagtacaaccgtctgccggaagtcgcacgttggaagtgtcccagagcaatgtgcaaacggtacctggaacctcttccacgcgaatgactttttttgctgtgatcaaggggaactcgctatcaagacagtgaacaccgggaacagggacacagatggatatgtcggctgtgtaatgtctgattatgcctcggtggattggttgagtactctcacggtgatgagatctggaacagtgtcatcaacccc

SEQ ID NO: 1914 - DNA, 496 bp, Aspergillus oryzae
ggccaattgtataatatggattattattattgattactagtcatgcaagcttgaaaatctgacggtgagcgtccaacgccactatactcatacttcgccggaagtgaccaagcgacaacacatttcaaagacgccgtcaatatggagacgcagactagaacatccggcctgcgacagagctgtatcttttgtcggggccgaaagattcgatgttctggtggacgtatctgcaacgcttgccgagaccgtaatatcaactgcgtctacggccccgaagcccgcaagggccgaccaaagcgcaaaagaacggaggacaagtgcacgcttaacccgggtatcagcaagcgcgacaggaagcagtccattttattgactaataccacaatagccagtgctttgagtgacgaatcaccgttgtccgcgtcagtggccctcaagaaggttcgcacactgggcaacgaactagaacagatgtttgatgattattttatcagca

SEQ ID NO: 1915 - DNA, 461 bp, Aspergillus oryzae
ctacactcagtgttcttatcatccaccacccctttttttgtaattccattgacttttcaatcgctcttcattgtcggtcggcgcaggttttgcccgtcagagcacaatcgaattgcgctgtttggactcgggcccaccggctcccgccgcacatagttgtctgctcccctgatcccaccccccgacaatttacaggtctgcagcccgtcacaatgagtcgcacggaggcagatttggcgattaacattcgcaaagctaccagcatcgaggaaagcgctccgaaacggaaacatgttcggagctgcattgtgtatacatgggaccacaaatcatctgccgctttctgggctggcatgaaagttcaaccggtccttgccgacgaggtacagacgttcaaagccctgataacgatacataaggttctgcaagagggacatcccatcgtggttcgggaggcgcag

SEQ ID NO: 1916 - DNA, 460 bp, Aspergillus oryzae
acagaaagggccgtggaattggacccttcctgggattccttgatccttcccttgctacacctcccaagtatctgttgatatctgtcgcagaacatatcgagaaaatgcttgcgcgatacttttctctaagtctgcttgctacggccgtgagcgcagcaagtatatctgacctcgtgggcacttggtcaacaaagtcccgcaaggttgttacaggtccggacttttatgatccaataaatgataaattccttgaaccgaatctcactggtatctcctactctttcacggaggatggccactatgaagaggcatactatcgcgctgttgccaatcctgtgaatccttcgtgccctaaaggcataatgcaatggcaacatggaaagttcgtcttgaacagtgacggatcccttgagttgactcctattgcctcggatggccgccagctagtttcagatccttg

SEQ ID NO: 1917 - DNA, 493 bp, Aspergillus oryzae
cccacgcgtccgatgcgtttttcctctcgagtattattgaggtcacaaatacgatcaaatcaacacaaagtatctctattcaataacaaaatctttcattccaccatgcctctagtcgtcccccaggttaacgccggcgataagaacgaatggctcaataagctggccgggaagacgatcacggagggaacgagtgacgttacttcatttgcgaagaaggatttgccccagtctcatcggattgttaaacccggcgatatgatgacgatggattataagcctgaacggttgaacgtacacttggatgaacagggcactgttcatgatgttcacttcggttaaggctatgataatgtatagaacgactttggatgatgtatgctagacggatgctacatatggatagattcatctgtgatgagccacggccatttatgacggatatcgatgtggagatggtacagatgtaatgaatttatctagtctatttcta

SEQ ID NO: 1918 - DNA, 468 bp, Aspergillus oryzae
attcgctggctttcttaattagataagctaatttgaaagtggggtcttatggagtcatatggggaggctcttcaagattgagtactatctactctgtagatgcctaccacttgcggaagtttctccatacaagttttatatcgtcacactgttgttcctccaaccacatctgatttcctgatagctgcaaacctgcaaatggatagccaagttacgagctcagctaagacacccaaccctgttgtcttttttgacatcactctaggtggggagtcactgggacgtatcaagatggaactcttcaccagtataacgccacgaacagcagaaaattttcgccagttctgcacaggagaaagcaaaagtccccaaggacggccacaaggatataagaatagcacatttcatagagttatcaaggatttcatgatacagggtggtgacttcgtcaatggcgatggcacaggt

SEQ ID NO: 1919 - DNA, 202 bp, Aspergillus oryzae
ccaatattctttccttaacctttgcattagcttggtgttgggtgtctgtatatactctatgtctttttttgtgattgtttttatttttcgctttatcgtttccctcttgcgttgcccttgcatcatacatgcatatacaggtgatatatacacacctcgtccagaagtatatagaaccaaagcatatatcacatttcacgag

SEQ ID NO: 1920 - DNA, 391 bp, Aspergillus oryzae
cggacgcgtgggcggacgcgtgggtttggcgtggtgatggaaagcacccatcgtgtagagccacgggtgagcatagtctctgcctctatcaagtttcccccaaaggccaattcaagcaacgttttgccattcctcgatatattggtgaacaatgctgttaagtgggcgcacgagggctggggcggtcatatcagcggcaactcgctcatcaatgtcacgccgttgttgtccttatctgaagccaaggattccctatctgaagctatcgcctatgctaagtctcagggtggcactgcagtcattgaagaatttccatcctggtatgagttctaccagaaatatgtggttcccaacgccgtcactgttggcaatgctcactttgcggctacac

SEQ ID NO: 1921 - DNA, 486 bp, Aspergillus oryzae
gaggaaagtctgcagctcttggtgttgccattgcagcggctgttgcgcatggttacagcaatatcttcatcacgtctcctagtccggagaacttgaagacgctgttcgaatttgtgttcaagggattcgatgctcttggctaccttgaccatgttgactataccattcttcaatccactaaccccgacttcaacaaggctattgtcagggttaacattcatcggcagcaccgtcaaactatccagtacatccaaccccaagatgcccatgtcctaggtcaggcggagttgctggtcattgatgaggcggcagcgattcctcttccccttgttcgcaaattgatgggtccttaccttgttttcatggcgtccactatcaacggttatgaaggtactggcaggtccctctctctgaagcttattcaacaacttcgtgagcaatcgcgtggaggacttaaggccagtggcggagaggacattgatgtcg

SEQ ID NO: 1922 - DNA, 556 bp, Aspergillus oryzae
ccgagagtttcgtcagcttggcgactcacaacagctagaggtcattccacgtctcagagttctagcgagatctagcccagaagacaaaagaacattggttcgtagattgaaagaaatgggaagcactgttgctgtcactggcgatggaacaaatgatgcccctgctctgactgcagctgatgttggattttccatgggcatctctggaactgaagtcgcgcgcgaagcctcgtcaattgtcctcatggatgacaacttcagctcgattgtgagagcaatcatgtggggtcgagctgtctcagatgccgtcaagaaatttctgcagttccaaataaccatcacattaacctctgtcgggctcgcgttcgtctcatccgtcgccagttccaatgagcagtcagttcttactgctgtacagctcatgtgggtaaatctgttccaagacacgttagcagcactggcactggcaaccgaccctccgtcgcgcaaagtattggaccggaagccggaaccgagatcgtctcctttaatcacaatcccaatgtggaagatgatc

SEQ ID NO: 1923 - DNA, 590 bp, Aspergillus oryzae
gttccccactcagaatagctgctgtcgcgatggcgaggaagcttagagcggctgcacaggcagcacaacagtcgctgaggaatgctcctcctccgctccccgatgcctccgatgaggaaatggctgaagcgcctcagtcgcgcgggtcttctcccgccatagaagatccaggcgatgcgtccgacaaggatcccgatgttgtccccgaacccgacccgccacaggaagacgagcctgccgcagtcacccatcctccatcgcgcggcgacactccaacccgtggccgtgtgtccgccattccgcgaaaacgacgtatcggtcggcctccgaagaaccgcccccctgactgggatctgcctgacgacggtacggcggcgccgccgattcatgtaagcacgcccgtgaagaggagacgtggtcgccctgcagctagcggcggacgatgggctcggaatcggggaccgtcgcatgtaacccaggtcccgattgacaaggaagggaacatgatggacgtcattgatgatgaagtggccctgccagatgaccctgagggtgagaccaaagtggacaagaatggcgttttgaagggc

SEQ ID NO: 1924 - DNA, 654 bp, Aspergillus oryzae
cccacgcgtccggttgcatgataaaggccgatcgactaacggttctttttggccactggttattgttcgttcgtttcccccagcctctacagctcacggatatataaattcaataaaaatagtagactatcaattgttgtctatcctttttaaaaaccaattttcaaccacccgtaaaactgatcagcgccgagagttgcacgctaggcatcattgttcattgtaccactttctgtacattataagctttctccttggaatcgacgaaatacacatatagaacgaattagagggtcagggagcaaggggtcgttataatgtggatcatttcattctggatttttccggtcatatcggccttcatgtggatagcaatgctacttgcaatgctggggagttgggcggacagggcacgccggtatattctagcatggaagaaggacaaacaattgcgtacatctccgatattggcgcacagggcctcaaacctttgttcatcaccggaagtgtaataacggttgtattcctggatctctccttcatctccgaacggtggctgcgacacgccggtcagctggtgccgaacaagggcaggtttgacaaagcctgcgccgttctttcgatcttcttctcgatgcgggcgccttgggggct

SEQ ID NO: 1925 - DNA, 655 bp, Aspergillus oryzae
cccacgcgtccgcggacgcgtgggcggacgcgtgggcggacgcgtgggcgagatggtcatgagcgccttccgcgtgttcaacgccgccatcctcaagaccaacttcttcacccccactaaggtcgcccttagtttccgacttaacccagatttcctgccggaacacgagtatcctcagcgtctctatggcatgtttctagtcattagctcagagttccgaggcttccatctacgattccgggatatcgctcgtggtggcattcgtatcgtcaagagcaggaataaagaagcctacagcattaatgcccgctcactgttcgatgagaattacaatttggccaacacccaacagcgcaaaaataaagacatccccgaaggtggtgcaaagggcgtgatactcctagatgtgaaccatcaggacaaagcagcttgtcgctttcgagaagtacattgacagcattctcgatctcctgctgcctcctgtcagccccggcatcaaagatcctatcgttgacttgcatggaaaggatgagatccttttcatggggcccgatgagaacacggccgagttggtggactgggctacagagcatgcaaggaatcgtggagctcttggtggaagtcattctttactggcaaaagtcccaagctgggc

SEQ ID NO: 1926 - DNA, 642 bp, Aspergillus oryzae
cccacgcgtccgcgttcgacacctgttctccccagttccactggtccggagacatggtggcacgaccctatgcagcagcctgtgtcgatggacacgtggaaagtactgccatccagcccagccacggccagcacaggagattctaatccgaatatatggaccagcatgaacaacatgaatgagttctcgtatgcttctccgacaccgtcttacagccaaccatacactacttcgccttacaatgcgacgcagtattatagcaccgctgccacgtccgccgcacttgccgcgctcccattgccaagcatgttggtacagccctgcagcacagcggcgaatatgatcggatttgggtggggggaccgataccaagactttgcgctgccgtacgggacaaccatgtaatacgcccatggaaccagacacttgacgttgatggtctccctgacttcgcgtattttggtttagatcccggagtccctgtcgaaaagctctacctagctcgtttgtaccccttcgagcccgagacacacccacaagaacgaccgggagcaatatccccgctatacagacaacagactaattggcatcagtgacggcgttaccattgacgattctgcgaccatgaatacttcacttcgt

SEQ ID NO: 1927 - DNA, 506 bp, Aspergillus oryzae
gtccgacgctgctcaagattaataaccatatctataccttcacataatcaagatgcgattcctctgtttacatggctccggcacgagcggggaagtatgtggaacaatgactacttttcgtctatcggccacatgaacatactaattggcaagcagatttttgagatccaatccggtaattaattcaacatctagtggccctggagaggaagccgagatgaccatgacatttcgtcccacaaattgtcagtactaaccacaaacaggtggcattagccaggctctggaagctaaagggcatcgcttcacatatatcgatggccgattagactccgaacctgagccaggtacgaattccccctctgcctccataacatcgccttaactgggtccagagctgaagggcatcttggatccaccattttacaaacactacccacgcgatatcgcacccggcgaagacctcgctcgtgcgatcgagtacaccatggatatcattaagaaga

SEQ ID NO: 1928 - DNA, 505 bp, Aspergillus oryzae
tcgtgtttccggcggaggaggcacccgggtttattcgcgagacatgcgatacaatcagcgatgggtggtatgggagtgggacgctcgcgaaactgaaactgatcatgcgtcataagatcctcgggctcattgaggagaggatccccgatgatcaggattttgcgcggattttgagtttcccagattatgcgacgccggagaatgtgaatacggcgttcacgctggatgctagcgttgtgtcgactaaggagttgacaatggcgacggagattagggcgatgattaagggaacgccatcgtggagggagtcgacgaaccagggacaggagcaggatgcgacagggaagcgtgggaagagtgctacgggtcggcgagtgcagtggcgggatgcaacgggcgaggaggagagtgagggcgaagaggaggctattgagaagcaggagattttggaagcagctgtggaggaggttatggaagcagctacaagtggtgtggatgaagacgg

SEQ ID NO: 1929 - DNA, 452 bp, Aspergillus oryzae
tatcgtcgccgtagaaccatggaggaccaccctcgacctcgagtacacaaggcatgcgacgcgtgcggacgaaggaaagttcgctgcaatggccagcaacgatgccagcaatgtgagcacatgggcctagtctgcacatacaccgataatcgactcgcgcgatcacggaaacacgcgcttcgtcggggagaagttatctcgaaacataagatcgagtcgtcgtcaaatgtacttcttgcaccagctttatcaccagtttcaacctcgtattttgaaagcctaatcccggaatatatgcatttcgtatacccattcaaccccatcatgaccgaggacgaggtgcaagatgcagtcagcaaaatggactcggatagggagaacgcagcatttgtatacgcattcgctgccgccactattgacctggcgcaatccaatcgccccacgtcaagcgc

SEQ ID NO: 1930 - DNA, 486 bp, Aspergillus oryzae
gtggaagaatgattataaggattatagcgcgccagaggaagcctctgagcaattggcagttgagccaacgcctaagagcgaagttgctgttcctacacctgagctggacgaagctccctcgtcaccccaaaatgagatgggagttgatgagtccaaggaggatgaaaaaaagaaacgtaagcgacatgagggagagactcccgaggagcgagctgaacgcaagcgcaagaagaaggagaagaaggaaaagaaagagcgacgaaagtccaagcaagagaaggaggacagtgatgacagcgattaaggcttctcaggaagtcccttggttgcttccggtggcgaagccttcctgtatgggggagtctaacatcccttgtctctaaatcgctatcggagcatcttctgggcataattcctgtatcatacgtgtttttcttttttattggagtcttgggttgaaaagggaaatcaatatcaattgttttg

SEQ ID NO: 1931 - DNA, 499 bp, Aspergillus oryzae
aaccccgcttaaatttgactgtgccctgtataagttcacttatgcctccatatcagtacaaaaaggaagaattttatgccgtttatcggggtcgtgttgacaggcctactatatattcttcttggagccaagtgcacccaagagtgataggcttcaaggacgccgatcaacaaaagtttgatactctccaagatgctcgcaaggcaatgacttcgaaaggttttacagattttgcggaagttatcgtacaaataaatgaaagcaaaccctggccgttcggacatgggaaattttacgcggttgcaaggtggcaggactacagaggtcttcaccgattgggagaatgcaaaaaaatccattaacgggaccaacgcctgccaagagcgtttccggacccaacaagaggctgaacagttcattgaggcatggaaagacgcctatgctgacgtatggcgaagggagattcgacaggcgttggacaaagggtggaaaccaaaag

SEQ ID NO: 1932 - DNA, 473 bp, Aspergillus oryzae
gccaaaaagaactatggctatctggactacaatccgcagtcggtgcaaatccttcacagaccgcgcggtcgcataccacaagctagatgatggagagaccaaagaggtcgataggcaaaagtgggaatcagtgtctttatctgaaagtatagccatcagtcaacatcaggtgcaatcggcaaagagcttgccagtagtactcctttttaccagcaccgtattcttcgccatgtgtctgatcttccgcgcattgatgagaggctatgcgtcaatcgacatggcttgtacaaagaaactgtctgcctgggcccctatgatggcagcagtagactaccaatggacccagtataattccgaccaacttcctgcggactatgctggtcctccaaccgtgacaagagaaacaaactggttgaatcaatacgaccacggatttatcccatacccatacgatcagatcgagaagctcaaca

SEQ ID NO: 1933 - DNA, 505 bp, Aspergillus oryzae
ggccgccctttttttttttttttataccagtatctctgtattcaatcaaaccgctcgcttctgggtatgtttaagcaaatgtcttccaaagccaaacaatatcaagccgaatcgtcagaccgggacgatcccaatgtacacggataatcatgatgttgaaatagaaaacaaacaaaacaacgggctgctccgtgaaaatgcttactctccccgcctcgcctttttgcagaccatgagaacaaatgcgcccagtgcggtttcctgtcgaatcaatcaaacaagtctaataggtaatccccagtaatttccgaacgccgagcgtgctatgtatgccacaagtacagattgcctcccggtatgacaatgaaagaaaatagaaggtaaaaaaaggaggttagaaaaaaaagtgtaagacagaagtagaatcaagtcaatatggacagttgaagatggacccagtcggcacagggaaccacgatgctccattacgcaagacgtcatctgg

SEQ ID NO: 1934 - DNA, 400 bp, Aspergillus oryzae
caggaagtcattgttagcaaggttctcaacttgcttagcgcatgtgtggacgtgctctcctcggaaggccatctgaatgctatgaacgccatggagatgtcccagatggttgtccaggcaatgtgggatcgggatagccctctcaagcagattcctcacttcagccccgaggtgattaaggtggcgaatgaattcggcatcaacgacatcttcgaattcatggaagccatggacccctcggagaacaaggagtacgctacactggtcaaacgccttggtttggacaacaagcaattggcacaagccgcagccttcaccaacgacaagtaccccaacattgatatcgacttccaggtcgaagatccggacgatatcactgctggcgagcctgcgtacctca

SEQ ID NO: 1935 - DNA, 30 bp, Aspergillus oryzae
gatttatcacaaattaaaaagtttgcaatg

SEQ ID NO: 1936 - DNA, 636 bp, Aspergillus oryzae
accactaatacgacgttgaggcaacgcctgttttcgtttccatccgaactttagtacagacttaatactatcacaaaacctgagtacttcgagacatggcagcattcataggagcaaatctgaatccttgcaattatattggaggtgtgagcttcaatcctgaacgagacatcccggatctatctggaaaggtagcgttggtgaccggaggaaatgctggactgggcaaagaaaccatcctgcagttggccaaacatcgaccgcaaaggatatatcttgctgcacggtcggagacgaaagcacaggcggccatcagctctctaaaaggatcgctatctaataatgttgagatcacttggctccctctggacttgatgtccattaaatcaattcagactgcggcacagacattcaatgcagaatcatcacggctcgacatcttgatactcaatgctggtgtaatgtcgcttccgccaggagaaaccgagatgggccacgagatccaactgggtaccaaccataccggtcattttctcctcacaaagctgttgctgcccacattactcaagacagcagaagagcccaattcagatgtgcgggtcgtgtcactctcatccatcggacataatctggctc

SEQ ID NO: 1937 - DNA, 456 bp, Aspergillus oryzae
ggcaacgcaggtattccttattgtgtcaccctttgtcgccccagtgactggtcgcaccagcatacctgtttggcttacgccgctcactggaaccttgttattctgtcttggtggtatgtactggtacatctggtggatattgctaccaagattggggcaattctcgtgggagaaaagcgcgttaattggtcctgatggggagcatgctgttgcttggcgacgcgtttccaagaactaatttgcagtcaatggacgaaatccgtagagatgcatatggaaaccgcgtaaaccatgactgccggatatgtgaccagcatacttgtacaacatataacatcgggccgaacgagaaatcccacattaaatctagcgaatggatagtccgctgttcgcctctaatagttataacattacatcaaaatttctgatatcatccagtattatgaattgctgtct

SEQ ID NO: 1938 - DNA, 484 bp, Aspergillus oryzae
aatttctccacgttccttccttctatttcttttatttgaacgattgcaaagcagtggcttcaccggacgttataatcctatctagctccatcttttactctagagctgcacgtggtctttgtgtagagataactcactaattggccctaccaagctatggcacgctactgattattctttcttctcccgagctacatggtcagctcgtcgagctcaactcttatccatgcactgtgtgctcgaggaaacaccgctataatgaatgcttgtcttctgtagtgacttgaaaaccaaacattcaccgcatggcccgtgtatttcgacggcccgcttcggctcttgccaggcgtgcttcaagtagggccgctcaaagggccgctcggaagcataaggtgatcatggagtccgttacacaagagaagaaaaagcttcggagtgttatatcattcgaagcgaaggcccctccgggttataccttcattcc

SEQ ID NO: 1939 - DNA, 473 bp, Aspergillus oryzae
agtcgactatgctgtctgtacgcgtgcgtggcacgcgtctagctagtcgcgtgaccagaacttccctctcacagacccaggttaggaacttccactccaggaaggacacagctccagctatcaacaagacatggaggtcctttgccattgccggcgcggttagtgcaccgggcttctggttgttgacatctacgcgcgacgacgatgtgcctcgtctggaggctccgccaaccgggcacttggtggccgagcccggtccttcgaaagaggaagtgacgcgtatcatctctcaggatgcatattcatttccagtcagaagtgttacgggagtgaacaggtacgatggcacacaactggcgtccaacagcctgtgtgaggaccggttcacccatggcatattcccatccccgttgaatgatggcacccgtggatggcctgggctgtcttcgacggacatgctggctggcaaaccg

SEQ ID NO: 1940 - DNA, 464 bp, Aspergillus oryzae
cggacgcgtgggccgacgaggataaagaaaatgcgatcgcacgcatttccaattggcgacgcaccaccttggatggtctcacagatgcattacatggaccagctgccgaagaacaccggtgtcagctaattgaccatctggtggatagtctggttgccaacctcgtgtcatatttgggtgatcctccgccgcccgggctggacaatggcgcacgcatgattgtggagaatgctgtaggtattgcggacaaggttcccttggagtcgcgcgacgtttgtatcgagtacatccatcctggcactctcctacacgagccgaacatgaaagtcgaggcgggtcttccaccactcacgaacgtgagtgctgaatctgccgccgcccgaaggtccggcgatcaggaacaacttgaagggccgccagatgaggctgacagagagtcatccggctcaacgagccaggagggt

SEQ ID NO: 1941 - DNA, 384 bp, Aspergillus oryzae
ccgcaatgcatcacagccacggcgggctaggactcgtgatgcacaggatgctgctgttcgacaggctagtgcagaggacgccgaagcacggaggatacaacgtgttgagcacaacaatatggtggagacgttatcaaacatgttcccaaatctagaccgcgacgtcattgatgatgttgtcaagatgaaggaggggagggttggtctagcagtagacgcatgtcttgctcttagtgctgagtaaaatccgcggtaaggctctgtagtagtataattactagactggtccatcgcatggactttgcgcttccgtctatgatgcccatgtggtagtagcaattcatgtacttattgcgtgccttgaatatggcgcctacttgtatt

SEQ ID NO: 1942 - DNA, 520 bp, Aspergillus oryzae
aatttaaactatctttaacctttccgttctttgtctgtttcatcttcgatctttattcactctttttccccaatttataaataaaataaactaaatctgcccggtgccgaatcgtccaaaaagacatatatatacattcattcaactcactcaaacacctacctaaacaaaaagaaaaaatccaaaatgacaagaacaatcatcaacttatccatccttggccttctatctgttccagccctcgccttgaatacggcctgctacaatgacctgggcagtttgactctttcgcgttcgacagaataccaatccgtggctctgtgccagcaaatctgcaacgaagagaaccagcctgtttatgccgtgcaagaccagaaatgtttctgtggagatactcttcctccgctctccgccaaggttgagaatacggaatgtacgacgaaatgtcctgggtatccggcggattcttgcggcggcccaaaaacctacacaatcggcaccctcaccaccagcaaatctc

SEQ ID NO: 1943 - DNA, 588 bp, Aspergillus oryzae
cccacgcgtccggggattgtcgtcgagctcattctaattctacgtctccgtttttcgcggagatgacacgggtcaccatggatcaggacacggagaacaaggtccttgtcatcaagaatatggactcggggtatctggtcgccggggagcaagtcaccctcgaagacgtgtcctatgacgcgaccgaaccccttgccgaggacgagttaatggtgcagcttctctatgcgacctacgatctcttcaaacgggacctggccagttcctcggctgacgcgacggaattgcggggccggaagcccgtcgagacgatgagtatcgcgcaagtcatcaaatccaacaataagcagtttcaggagggggatatggtgatcggtcgcttgccggttcacaatacgtgctcattaaagctgacgacgcgaccgagttgaagctccttgagaatccctgcgagttcgacgatattcggttattcctcagcgtcctgggcgtcccaggtctcttagccttttcctcactataccgaaatcggtcgacctaaaaaaggtgaaacgatcctcatcgccggtgcaagccgacgaaatccgg

SEQ ID NO: 1944 - DNA, 647 bp, Aspergillus oryzae
cccacgcgtccggattgagttactcctctcttcagttgaagattatacacatttaattgattaatatatcgcttacaaactacactacaaacaaacacacataatgaagctcctcaccaaggaagaagaagacgctcactacagagcagtcctaaaaggcggcacaatcggcaccgtcctcggtctaataggcggctacgccggcgtcctcgccgcatcccgccgctaccacacaatccgcaacctaacgctccccatgaaagccttcctcgtcacctcctcgggtaccttcgtcggcatcatcgcagccgacaactcatcccggaacttcgaagttgagcgcaacgccgaccagcaatggtaccagaaccgggagcagcggctgcgcgaggagtcgctgcaggggatgagtttcatggagcggtcgctggcgtgggcgaggaaggagaagtatacgattgttaccgcgacgtgggtggcgtctatgattgggagttttgtgctggtgggacgcaatccgtacctcagtggacagcagaagattgtccaggcgcgtgttatgcgcagggtttgacgcttgcggtctggttgcttctgcgcgttgagatcagtgatcagaggaaggggaaggggattttgaagaacaa

SEQ ID NO: 1945 - DNA, 228 bp, Aspergillus oryzae
ggctagagaagaacattactacgacaacggcgaacccgagagggttgtgcttgatggcggagtccatcgagttcctcaccgctactgaaggtgaagccttctccataatgaacgcacgattatttaaaagcttttattttcgcgacatctgtttgcagtaattgtccatgtacagagtacgatctcttttaatattcaagcggagcattgacgcttctttccttgtac

SEQ ID NO: 1946 - DNA, 159 bp, Aspergillus oryzae
gtgacttttttagtgagtggatctggatgtggaggttgggagttgtgtgttgtgtgtctcttaaggttattggtatttggtaatgcgtttggctgtgaactgtacgaagatgcaatctactagccctatgcttgatatggttatggtatttacagttcg

SEQ ID NO: 1947 - DNA, 547 bp, Aspergillus oryzae
cccacgcgtccggcaaaatatcctgttcctctcatccatatccatcttctccccttttattttctttacataccgcataaatcattcacaatgcctttcggctggggcgacgctgagaacgctcaccaacaggtgcaggaggggcagcacgagggtcacctctctcacgatctcattgccggtgccgctgctttcaccggtatgaaggcttgggaagaccaccagcgcaaggaaggcaaagaagtctctcacagcactgccaagcaggtaattgctggattggccgctgctggtgtcacgagattggttgagaccaagggcttgaatgcgatcgacgagcataaagctaagaagcaggccgaggagaacgcccagcgcttgtacgaagagcactacgagcgcggacaaaatgctcctcactttaaccctaatgagcacaaacctacccgtctttcgagcgcaatcgctttgacgagcacccaaaccacgagggcccgccccccagggaggccaagttgaccggtggtaaatatttcacagacggagt

SEQ ID NO: 1948 - DNA, 421 bp, Aspergillus oryzae
ggagcatggactcacggccttggtgtatccgcatcagagacagcttgttgcaagtgtgggatgcacagttcagccaggtcgaaatgggatcctggcagcgttgacagggcggccagcgatttgcttccctgcaggattcagtcccgagacgccctccgcacccctgggcatccccatcggcatcgaactgatgggccaaccctggaaagaccaggaactgttagatctcgcgcaaaaattcgaatccgtcctcaaagcaaaaaaaccgcccattcttcacctaaactaaccatatacataacatctacacaggtacagtatacatatatataaccttcgcagaccgtcctgcgatatgtacatctatcaatcacgaaacatatattcaaaccaatacctgaaaatctaaattctttctccc

SEQ ID NO: 1949 - DNA, 441 bp, Aspergillus oryzae
attcggcagctttttgtcggttcgtaacgggtctcgtagactctaaactccatggccaacgcaagaccatgttccagcgtgccattgacctaggcttacctgcctcattcgtcgagttgcgacatgaagcaactcatcgtgaactgccgtcgttgacggtcctgcggaatgccgcgcaacggtcccttgaatggctctgggattactactgggccaagattgatctggacgctggttttgcaccggacggtgtcgaggatgacatcgagcctgttaaggctgctgccagggcttgcctggcacaagtgacaggtgagacgggtgcgtcggaaccgccgcggaagaagaggagggttcaggttttgtctggtgttgcgacgcagttggtttcggtctgtaagagctctgggaagggcgctgctgctgtttcggaggttttgg

SEQ ID NO: 1950 - DNA, 464 bp, Aspergillus oryzae
tgatttgatatccgcggggacgggttaattgggtttctttttatacttcttgtgttagtcttgattgatagaaagaactgtcaccatgtcgcagactgttggaaagacccgtctcgcctactctcgggcctggcaccatgtcgacgtcggcaccgatccgcgcagcctcggccggcttgcttcctccatcgccctcttcctgatgggcaagcacaagcctatctatgacccttccaccgactgcggtgactatgtcgtcgctgttggttgccacgacctgaagaccaccggcaagaagcgcttccagaagaagtactacacgcacacgactcgccccggtagtctgcggagcatgacgatggacaagatgttcgagaaatggggtggcggtgaggtcctacgacgggctgtcaagggcatgttgcccaagaaccggctgcgggagaagcggttggctagactga

SEQ ID NO: 1951 - DNA, 299 bp, Aspergillus oryzae
ctcttgtcttgctcatccccctgcctattaacccatcatatacacctgcatatatgtgaatttaccgctcacagattgatcaccattaccagaccattgctgttcggagtgagaatgcatactcagcagtcaatgcagctttggtcttttttttaactgtttttttcttttctttttcttttctttttctttggtacaatgcccgatagtgctcacatattatacatagttcaatgctgcgcttgttatttacattttatatattggttggaaggctacatatatcttctttatgctgt

SEQ ID NO: 1952 - DNA, 455 bp, Aspergillus oryzae
aatccaagcaaattcagcatccggatctctcgactttgactccaaatccgacgccggtcccttctgcttcttctcctcctcctccgccacctcctagatttcctccgtcgtcgccttcaacctcttcttctccccgtcattctcagagtacccggaaaaatcctccaccccctccacctccaccgtaccaacccactgctgcggcgactgctcctcctcctcagccgaatcttccacgcaaatcctcgactcgtccggcccacagtcggtcgtcgtccattccttctcactccaaatcctgtcaccgtccgacacattcctctgctacctctaaggggcagtttctcttcctccgcctctcgtcctaccttctcccgtgcttcgaccgttcaccggttcaagaagcacgaccccgatcttcatccgttaaatcttcctcctgacgaactacgtcg

SEQ ID NO: 1953 - DNA, 473 bp, Aspergillus oryzae
  modified_base (311)..(311): n is a, c, g, or t
gagatcacaatgcctgtcccaaagcagaaccgatcggtcgacacggacaacatccaagggagcatttggccccgtctccctaaatactatgaaacctacctcttcttcaagatcacagataacgaaaagttcagacagcacctcagaggtatcctcgataaaggggtgatcaccaccggcactgaatgtgaggaacacttgaagtcagtgggtgagtttgaagaagcatgcgcgtattctcgtcgtcatgttcctgagaaggatcggaagcccttcacggcggtaaacgtcgcattcactcacatggggtngctcaaggtggaacatcctgaggtcgaagtgaactttgcccaggccctagcggaagatccagaggagtattgtagagatcggatcaacgagggtctgtttgagaaagggatgttcgatgatctggtgtacgaaggtgccgatagccctcccgctttggatcc

SEQ ID NO: 1954 - DNA, 232 bp, Aspergillus oryzae
aatgggataacatacctgaggcgccactacaatctgttcatgaatcctcagccaatcgggaagacgagaaggatgaattaaatatatcaaacattgagccatcggaaaacaattgtgctgagccagagtctccaaaggagcctgtaaagtctaatcggcttaaagggacaagcggttggactaagctgagaaacaggtagtaatgccacataccatacttcttcgtccctag

SEQ ID NO: 1955 - DNA, 341 bp, Aspergillus oryzae
ttttttttttttttttttttttttttttttttttttttttgcatcaacaagtgctcaccacgcgaccgctccaagcacgagcagagagtcacctccttaactcgctcggaagcaatgcttctagtctatcggacttttggtcgaccttactggttaataattttgaccggttctgatttcctccttttctgcgaatatttctttgttagataattcactcacttctacccctgaccccttgcaggcaagattacataaccctggacttctattacatcttggtgatatacccctttagctgttggagtcttttgaatttaagtgcggattgaattactcat

SEQ ID NO: 1956 - DNA, 473 bp, Aspergillus oryzae
gtgtgcttagtagtaccatctaccagctctgactgtgatgtctccagtgggagctgttctctggcgctcccttcgcgcccatcaggtttacggcgccaacactgatgtgggcaaaacaattgtctcgaccgttctctgtaacgcggttcagcgcctaaagtcacaggatcaggcagcctttctgaaaccggtctcaacggggccattggatgacgcggatgaccgacatatccaacgccatgctgcgggtacattgactaagtgtctctaccaatttgatgagccagtcagtccacatatcgcggctcagcagaagaagttcaccatcccccgggatgatgatatcgtggcttctgtccacaaaaccctctctgactgggcgggcagtggggtcaattttgccctggtagagacggccggcggtgtccattcccccggccccaatggcaattcccaagcagacctttatcgcc

SEQ ID NO: 1957 - DNA, 488 bp, Aspergillus oryzae
aggagatggctttcaacttgctgggtctcatggctcctgcaattgtcaatttgtgtcagcttgaccctgtgtgggccgatttgaatggtggactgcagttcattcctgacctgaaagccttatgactaagctccgtaccgacatcatggagacaagcgacattcgccaagcggtgatcaaagaaactgccattgagaacaaggttgtgaatggagaagacagtgaagcgctgtacaagcgtgttgttgctgagcctcgagccaatatcaagttcgagtttccgaaactccccagctgggacgaggaaatacaaccccttaatgaaactctcaagggcatggtcaacttggacaaggttgttgttgttactggttttgcagaagtcggaccttggggtaactcgcgaacccgttgggaaatggaagctcatggaaaattctctcttgaggggtgtgtggaaatggcatggatcatgggacttatcaaac

SEQ ID NO: 1958 - DNA, 450 bp, Aspergillus oryzae
  modified_base (175)..(175): n is a, c, g, or t
gtttgtccttgatttattgccatttgtttccactcttctagttttcttcccttttcctctttttgttgatttttcaccagcccggatttccttgtcagcctctttcaaaaggcctgtcaagtcacatctcctttttctttctccgcctttttgcctttccggtcggtcggagccncaacggtcgacatcaccgctatctcacctcttttcacccgcctctttctacaagtctttgtgatcttgcagccacagccgtcagctgtgtgtgcttttactcaagatgacgaccatggatttgcgtgtcggtaacaaataccgcattggccgcaagattggaagcggtagcttcggtgatatctatcttggaaccaatatcatctccggtgaggagattgccatcaagctcgagagtgtcaaggctaagcacccccaacttgagtacgaggctcg

SEQ ID NO: 1959 - DNA, 531 bp, Aspergillus oryzae
gcagaatcctgcacccacgggtgttatattcggcagagatgtcatcaaccaaatctcgacctactttagctgaacttcctctgaacccgaatgaccctccatactcggcatggggtctctggggagttgatgatgaagtcggaacactgaatctacttgatgaatccaccgtgactaaggcagccagcgaaattcaagttggccaacgtttcagcctgaactggtccctagcatctcctcggacgccaatgttcgggagggatacgtgtgaatttagccataaagtataccagcattcgcccgagctcattgcacttgatgatgagttacattttaatacacagaaaagtagccaggttgatgggctacgccacgctgcttatcaaaagtccggcttgttctataacgggaggtccaaagaggacatcctgaaagctggttccctcacattgggaattcaccactggcacgacaatggattgttcgctggtagaggcatcctgatcgactactgggccctatgcaaagcgg

SEQ ID NO: 1960 - DNA, 452 bp, Aspergillus oryzae
gatgataatgacacaagtgatgaggaaggaccaacattcaacaatgtcaatcttcaggatggactagattcagatacagatgatgcatatcctggtactgcacaaggggcggattggatcaatactagtgatatcaagtattctgacttttttgcgccgccaccccgcaagtctacgaccaaaaggtcacgtccgctcccaaaaacccaaccagttgctgcgattaataataacgatatagaccgtgcaatggccgatgtacggcgcgatttatttgaggatgatgcttcaattgagaacagtgatatatccgatggtgaactaggtgaacctgaaacccaaaaatctacacacgagaaacaacgcgcacgaatcgccgatgagattcgtcgcctggaagctgccaacgttgcaaagaaagaatggatgcttgctggtgaagctaaagccgc

SEQ ID NO: 1961 - DNA, 533 bp, Aspergillus oryzae
ccccttccttaactcatacggccaaagagtgagagagaccgtagaaacccgtgtctctcctttgtccgtggagtacggagttgtccactcccatcccactccactaattgttcggccctcttgactatttgtcgcactcgacctcctgagccaccgctcctttgggcaattcccctcccccttgaaggtcttcacttctcatctcaacccgcctcctgaccaatttttaagactcctcatccggtacggtttaaccaccggaaggattttgtttgaagatggatcccaataataaccgtctccacctgaacttcgggtacaacgagcgtggtttcaatgcggcggccaacaaccgcgcatatcccacaactccttccgctttccctcagccgatctaccagaaccaaggccctcaggactacatggatgctcaaaacggagcttacaaccagggatatttcatggcaaacccataccctcctcaagccgcctatgctcagcagcactatggacaatcaaacttgcagtccccg

SEQ ID NO: 1962 - DNA, 461 bp, Aspergillus oryzae
gaagaaagtaccactattgcgggttcccgcgaggttcctcccagtgcaatcggtatattctcctcttagacaaatatcctccactgcgcaaaggttacacgataccaagaaagcaggtgcatcatatgagtcaagcaaacagctagagaccacggcaaaggataatttaacatcccaaactggcaagaaagtgaagccagaaaaggccaagactgtttcacaagccgacgaggagcttcgccaaaaattagagcagatgtctggcgggggaggagcctctggaatagaatacgaagatggcaagcctagtgccatgaagagaagtgttcgaaataatatgttccgctacatttgaacgaccaccgagaagtctgccacctcttgagcagcggctgactgcagctcctagctacaaatatgaagccgaagagactgtcattgacgtgaacgtcatcttagcc

SEQ ID NO: 1963 - DNA, 474 bp, Aspergillus oryzae
ggcaaaattcccttaaacatatatacactggatcccggtggattgacgggagagagccatttaacagagaacgcccctcggtcggttcgaatggcacaccagacgcggtctggactccggccattcctgcgagtgttctctaaaagtgccatgaataaccctagtgttccagccaagataatcacgaaagtcgcattccagagagatactgtggagcaatggggacgggagcgatattatatcttggacaacgactacgaggccggatccgtccttccggtgcttcgagacccgcgaaaaatggaggcgttgcttaagaagctgatgggacaaattgagattggtgtcaagggcatggggtctccccagtccaggatatcacgcatcaattaaagatgggcgagttagtatatgtgatttctttattttgggttggatagcgatggtcagcattcttcggagttgggctctttt

SEQ ID NO: 1964 - DNA, 479 bp, Aspergillus oryzae
cgctataaagagcgcgtttcccgcgtcaggcacccccaaaaccacatttccctcaataccgaacatcggttacgtcagctggatagacgtcaatagtcaacaccatggcgtacaaccaaacttacaatccagatgcgttgccagcacatgcagagcccgaacaggtagcccagatgattggtgctatgcaaaccggccctcagcatcatcacaatcagagtaaaccgtctcgaccatcccccaacccctcttctagtggagttccacctcgagttcccgtaacgagtgcgcacatgaacaagccattacccgcaccggctgcgaaccaacatcggactcatccactacacccatcaccacctccacagaactacggatttgggccacccccttcccagcctgtgcgcaatcggccccagccttcgtcccggcccccacggtctccaaacccgccgttggctgtccctgatgacgatccg

SEQ ID NO: 1965 - DNA, 480 bp, Aspergillus oryzae
ggagcatgctcacgggtatctacgatgaagcgcttgtccgtagcgtgcaaccatcaactatccccggagactcttccgtcttcttaccactcccactgcatacaatcactgtcgatgaactgtctttcttgaaggagttccaggttaccttgaatgaggacgttgactcgcttgatggctgggctatctggtttgacatattcttcatgccgtccagagattcccctatttcggacgatgccatcccttcggagatgcaaaagaagggctttgttgctttcactactggccctgatggcccagaaactcattggcaacaaggtatcctcctcatcgaccacggaaagaagagtgccctgcccttgaagaaaggccagacgattacgggaaaagttggctaccaaaagaaatcaaaggaatcacggtctctggacatctccatcgaatggaatgttcaagagggcgaaaagggctcccagg

SEQ ID NO: 1966 - DNA, 572 bp, Aspergillus oryzae
caaaaagccaacgaatacttccaagaagttaagcagacttcagacgctacgatcgactcacgtctcttagtcagtgccgccgacctctcatacaagaagaccgcacatttagtcttgggagatgcatctgcaggtatagatgtggacgaatttgtctccaaatgcatatcgtttatgtgcagggctccagaagactcacaagctatgctgtcgagcacacagcgtcgtcgtggccaagcttcaggcagaagtcaagcggaccccaatgatagcgatgaggaccaaggagatgcgatgaactgggactggcttgggcgatctgcttgtttccgccacaattcacggccttccgtttccgggttcttgctaggaccattgtcggtacagaagcgtacccgacaaattacacagcgaagggctagagagcgtatcgatccgtcacaagcggtgcgaccacaggagcttcgggaggaagatcttgatcgacaagaaacgtctaaccttaccaccatgtgtacaagcatcaacaaactgcttgcaagaacgcagaatgctggccaagacatggtaga

SEQ ID NO: 1967 - DNA, 609 bp, Aspergillus oryzae
gaagtattcagctatcaagtatatcgaaaatatggcccccggaatcacggaaccctcatcctcagcaggtccttcgaccgctgaaagcaagcctaccgtctatgttcttgacaccttccctcccaaggccatcgagtacgccaagactctgttcaacattatccaacctcaggatgaagaattcaagaactggcggcaaaatgcccgagcgctgctaattcgaggctcatatgttacggctgatgacatcgcgagctgcccgaatttaatcgccatcggcaagcatggcgtgggaattgacaagatcaatcaggatgcctgcgcacagaggggtatcaagatcctcaacacccccggtgccaatgcgcgggacgttgccgagctggtcgttgcactggccttgtcggttgctcggggaattcggtccatcacaacccggcaaatgttgaagcccgtaccgaaggagacctgcaatggattgactctgtatcagaagacgatcggcatcattggtatggggaatatcggacgtacagtggcggaaatattccgcggtggcttcgacgccaacattgtgcttatgacgcctacatgcccgaggatgtgtgg

SEQ ID NO: 1968 - DNA, 537 bp, Aspergillus oryzae
ccgtgcttgaactgtcatctccaaacctcaactgcatctcctttcctaacagccccttccacgtctttaccgcctcacaacacccgcccttattaattcatattgccacagcggttggtccccaggggcgcgctgtgatgcggctgcattgactttctaccagcagcctttgtcgtttctggtcggcccgtttgtcaaatcgaaaccaaccgttcgttcctcacctcgcgcgaacaatcccttcattggtcccgcctgatcgccctgagctatcttcaatcatacctttgatctttgtcaatatctactgggcacacagactaagagtaacgcgcaatgtataacacacatcgcgggatggttcccgctcccaactcccgtctgacggagttgcttgatcaactgcgccaggaatttgagaatcaatcaaggagcactggcgagtttgaacatcaattaaccggacagcttcaagaaatggaaatgattcggcagaaagtctaccagctggaacaagcacaaatcaagatgaagcag

SEQ ID NO: 1969 - DNA, 435 bp, Aspergillus oryzae
agaaaagaaaagagagggacttgtagtaccgatacatacatatcatgtattatgtttacaaggaaacaggtccatttactaactataaagctgaagacaatcctggacaacactccgcatcctccaaaccacaaaacaatatcacaacgaattcaccccagacacaatccacaagaatctaatttccattcacacagtcccaagagtggccatcgggcaacgggcccttctctgtcgtacagccaccggtaatctcctgtgggattgcatcacctatatcgatgacgagaccgtttccaagatcaatgagctaggcggactgaaagggatagttatttcgcatccgcatttctataccacgcatcttcactgggcggagatcttcgactgtcctgtttatcttgcgcgggaggatagagagtgggtggtttgccc

SEQ ID NO: 1970 - DNA, 114 bp, Aspergillus oryzae
caacgaacaggtgtaaacaagttacatacttctgatctaaccatcctgtatctggtctaaggtatataaaacaaatataggaaatagctctaatgcagtcatgtcttcattatc

SEQ ID NO: 1971 - DNA, 456 bp, Aspergillus oryzae
tgctccttatagcggtgataggagatttttttttttttggctcctttataaagtgcgatcactagactgtttcaagctttggtctacctcttgtctactgtatttgtcccagccaaacgcgaaccaccgcacaacttcgtcgccatggacttccttcccgaatccattatatccctcatccaagacaaccctacaatccaacagctcacctcatcctcgatcgcgtttcaagtcaacaacgcccgcaccacatatctggatccctacatctcccacctgaaatcaacctacctggacccatacatcatccaacctctcgcctccatgctcgcttcttcaatgcccgaccttgtctcggtccttatcctcgctctcattttcatcatctccctcaaagtcctcgactatgcgcgacgtgtcgttatgttctgggttacattggcgctgcgattagtc

SEQ ID NO: 1972 - DNA, 528 bp, Aspergillus oryzae
ctcctctcaactgcagtcgctcttctcattaagcgcaatctctacacacaataatcacaatggcttctcccaccgtcaagctgaacagcggacatgacatgcccctcgtgggttttggcctctggaaggtaaacaacgagacatgcgcggaccaggtttacgaggccatcaaggcaggatatcgtctctttgacggcgcatgcgactacggcaacgaagtcgaatgcggccagggtgtcgcccgcgccatcaaggagggcatcgtcaagcgcgaggaactcttcattgtttccaagctgtggaatagtttccacgagggcgaccgcgtcgagcccatctgccgcaagcagctggctgactggggcgtcgattacttcgacctgtacatcgtgcacttccccgttgcgctgaagtacgtcgacccggctgtccgctaccccccgggatggaactcggagagcggaagatcgaattcagcaacgccaccatccaggagacctggacggcgatggagtcgctggtggacaa

SEQ ID NO: 1973 - DNA, 525 bp, Aspergillus oryzae
gtttacggcgctgagcttgaagacgatgaggaaggtgctcctgctcccgctcccgagggtgaggcccagaacgctgcgcccctagccaccgagattgatgcggcttcgcatcccgaggagaagcgtgcccgcgcgaaggagactaccgcccaggtgaagtcagagctttcgcagaagggcgagctccccgagagcgatgagctgcttcccaaggcttggcacgacacggaaaacaagaacgagacccagtccgagaaataaagcaattcgcaactcatttatgtatgttgaaaacgcgtgacatgggccaacggaacagagtcggatcttttggttatctcggtggataaaatttcaaaagtttcatgggactaggtctgaactgctctgggtccgcgaggaatagtttgggattggttggagctatgtgtattctttttatactatatacccttccaccctcctcatttggtttctcggtcgtgtttatctataaagctatctcatgtcatctctcttctattg

SEQ ID NO: 1974 - DNA, 543 bp, Aspergillus oryzae
atcacacttacattacgaattaccagccatgtccgaattcccttccatccggtggggaataatcaccacgggtctgatttcatcctggttcgtcgaagacctagtgacaccccaggaaacccccaaagtcaaacacatagtacaagccatcggctcctcagccctcgaaaaaggccaacagttcgcagccaagtactgtccccaaagcacgcctacaatctacgcctcctacgaagaagtctacaacgacccaaacgtagacgtagtctacatcggcaccccgcactcattccacaaacgaaactgcctagacgccatccgcgcgggcaagcccatcctctgcgaaaaagccttcaccctgaacgccgcagaagcaagggaagtgttcgccgccgcagccgaaaagaacgtctacgtccacgaagcaatgtggctgcgccaccgtccgctcgtgcacgagctacgcagactcctctacgaggagaaggtgattggagatgtctttcggacgatcgtggatttcgccctcgacgtcgatatccc

SEQ ID NO: 1975 - DNA, 293 bp, Aspergillus oryzae
gaccctgcttgttgacaaaactagcccttgaatagcaaccataacctcctcatacaagatgcacacaccacgcacttcgatttgcctgcgattcgttgcggccatcagctccctcgctgcgctgatagcgttcggatggtcccagtcaatgtttggaagcgacacggtgatggtggctgacttgggccatgaggtggtcagtccagtcaccggggcgaccgaatacacctttgtttggtcgctgataatagcatctattgaattatcccttcccgtcccgatccatccagcca

SEQ ID NO: 1976 - DNA, 90 bp, Aspergillus oryzae
caaggttaacgaagatatgctttaagtcccacgtgtatccaatgtattgtatatagataccctagctctaatgtattcaggtcatcgtat

SEQ ID NO: 1977 - DNA, 394 bp, Aspergillus oryzae
atcaataccactttaccaggtcaccatcattctgtcaattcgggtctctttgtcgagcctacctcgactacccatccttggaaatggcgatccagaagaagcatggtaagggtcgtttggataagtggtatcgccttgcgaaggagaagggatacagagctagagctgcatttaagctgatccagctgaacaagaaatatggtttcttggagaagagcaaggtcgttctcgatctttgtgctgcgccaggctcatggtgtcaagtggccgcggaatgtatgcctgctcaaagtatcattatcggtgtcgatctcgcccccatcaagcccattccacgagttatcactttccagagcgatatcacgaccgagaagtgtcgcacaactatcagaca

SEQ ID NO: 1978 - DNA, 465 bp, Aspergillus oryzae
aacgtgttccccccaccaacaataatccccgtcaatcacatgctgccagaggacaggctgaagcggaagctgccgcctatagttccatcattaaccgagggttggctattctcaggagactggctgaaaagtctaaacatgccgactcgaactcggcgttacggttcccgtctgggataatcccaaagaaagagagcttactcggggcgttgctcatgcacaatgtggatcctggcgtcgtgcggcaattgataacgtatgcgcgactggcagaatgacctggctttaaatagggggtgtgtggttggtttttcttttggttatttatagcgtcggtgaatgtctagcatcactttcaatatgccatcttgatgtttacttctgtcatgtcttctattgagtaaaccatttattcctgtgattttgtctggcgccggtgggaagatacgtgaggcgtgacctttt

SEQ ID NO: 1979 - DNA, 396 bp, Aspergillus oryzae
cgcaagtccctcgttgcgtgctggatcgccaccctttctattctggccgtcaccgtttggggattctggttctatgctcctttgacttacggtactccgggcttggacgttgccggtgtaaacgcacgtcggtggttgggttatgacctgcacttcgccaaataaggcgttcaagccggggtgtgccagtagcttctggcagcatataggcgccccgaaactaggtaaccatctgggtgcgctgatgatataactatggcatgtaagataagtgaatgagtgcgtgtacatcacgatgatcggagtaagcttcgggagggccacgaaagcgagtggccggaagccctacgcggttacgttatgaaacggtgctcttttggggctcatttgagtctg

SEQ ID NO: 1980 - DNA, 450 bp, Aspergillus oryzae
ttcacttaatattctccagttcaatagaataccaagcaaagatgcccgccaaaaaagtcctcataatcctcagcgacgccgactccttccccctaaagaaaaccagcggccaagatgccggcaaaaccgtcgaccaaccctccggcttcttcctcatggaactcgccaaaccactccagaaactcctcgacgccgggtacgaagtcaccttcgcctctcccaaaggccaagagcccactcccgatcccaacagcgaatctctcctcgccttcgcaggcaacttctacgaacgccgccgcgagaacgagctcatcgatcgcatgaagcgggagaacggattcagtcacccgcggacattcagctccatcagtgatgacgagttggagtcatttgccggcgtatttatccccggtggacatgcgccgttgagagatctcggtgcggataagg

SEQ ID NO: 1981 - DNA, 383 bp, Aspergillus oryzae
cggtgttttgcagaaactgttcgccatgattggcattcgtctgcccaagaacatctttggcggtcaaggtggacaatcccgagatggtggcaagaagggcatcatggagcacttgaactcgttcatgagcattgctaaaatgatcatgtaaggagtgaaacgctctatatctcaatctaggctgtgcggtctagcggagcgcttggctgggaaatgaccattgtatgatgggtgtgcgggaaggtaaagacatctacgatcatgatgacaatgatgacatgatataaacttggttttcggtaacttgttaatcgctttcgtttttcgtgacttattatatgtgatattggagggttagctgcaattctaccgaattcttcttc

SEQ ID NO: 1982 - DNA, 573 bp, Aspergillus oryzae
ggattctacgagtacttcaagtatctatacggcgaccaaatgttccccaacatgaaccgcacggtggtctatctaggtgccagtgcatcggccgaattcctcgcagacatggccctctgcccctttgaggcgatcaaggtgcgcatgcagacgactctgccaccctatgcgcaaacaatgcgcgaaggctggagcaagatcgttgctcaagaaggattcggcggtttgtataaggggctgtacccactctgggcgcgacagatcccttacactatgaccaagttcgctacctttgaggagacggtcaatgcgatctataagactttgggcaaacccaaggaaagctgcagcgggctgcagcagactggaatcagtttcctgggcggttacattgctggcattttttgtgcgattgtcagtcatccggctgatgttatggttagcaagctcaatgctgatcgtcaggctggtgagtcagccatgaaagccgtttcgcgcatttatggaaatatcggattttcgggcctatggaacggtcttcccgtccgcatcgtcatgttgggtacactgact

SEQ ID NO: 1983 - DNA, 399 bp, Aspergillus oryzae
  modified_base (96)..(96): n is a, c, g, or t
atcagcgcatgtcctcgtaccacttatcctcggatttgctttgctagttatcttcggagtctgggaagtctacggcgcaaggtatcctatcttccncagccgcttaaagcaagaacctcgtaccctgggtttaaccctagttatcaccttcatctccggtgccaactttttctccgtgatcatgttttggcccacccagtcattcaacgtatacggacatgacccagttgaagtcggcgtcagaagcttacccatcggattcggcatcatgggcggagcctgtatcacactgtggctattgagtctcttgcgaggtcacaataaggaactactgatcatcagcagtatcctcatgaccgccggttcgtacatcaccaacacctatcagcatacaccata

SEQ ID NO: 1984 - DNA, 414 bp, Aspergillus oryzae
aaaagatcttgtgcccaaaacagagactcctagccacggagtcccaccatctcttgatattgaggtagacgcctccatggaccttgcacagaagaaagaacctagtcttgaagagcctctacaattctccgatattaagggagaccaactccctacagtggactctgcaccgcaggaaaagcctgatccccaagagactccacggttctccactagcatgggaaacgaagcccctaccgtggtctccgtattgaatgaagaagagatcatatctcctgagcccgtgctgcccgtaattaatgagggaacagtttctgagaattgtacatcaaaaagagatactatctccaggctaacaatgtcacctgacaccagagagtccgagactatgaatcccgtttctaaggaagatac

SEQ ID NO: 1985 - DNA, 418 bp, Aspergillus oryzae
gtccccttttcacatttagaatccgtctgttgaacctcattcccggctgactcctgcagttagactctgctataggagcttccccactttggggcgccgtcgattccttccatcagtcattctgaaaatccgcgttgcatgcttatcgacggctcggaaacgggcgtcgccaaataaatggcagcgatgaaggagtccgacctgctcaaaagtaccccatccataggtaataaggaatacgattcatattcttgggaattactcgaagaccatccgctccggtcccatcctactgaatgtattcctggcttgtcctcctatgtggctaaagtatttggctatattaaaaagacgatggacggaacgcatattcccaatagtctgcctaattctgatgttcctgattgtaattcagttt

SEQ ID NO: 1986 - DNA, 526 bp, Aspergillus oryzae
gcttccggcaagaaggaattcgaggcgagcactgccaaggagagcacagggaaggaaaacactagcaaggaaagcacaggcaaggagagcacatacagcgaatctgatggtacgagaaaagatgccactccacaggcgcatattgccacagagccatttgcgccaacactcgctgggttcgaatcagccaagtgttatattcggcgaaacatgaatttgattgtgagagaggttgatgaaatcaagaagaaccctgaccgcgcgagtgaggaccgtcctctgccgtgccagagtccgattatcttcaaacagtaccttccagtgccaaaagagccgtctaagccgactgtgtagattgtgggtctatttacatatcacgctcagtcagcgcagtcatataatctctcacttggctgtacggcaacagcgtaatctccgcaaccaacccagcctcgcaaagactcttacacatatgccaatccactactttattcttagtcaatgcaaacccgtccatcttctgcct

SEQ ID NO: 1987 - DNA, 426 bp, Aspergillus oryzae
cctcaaatagctgaggatataaaagaatgccaatcactcgggcgaacaattctcctttcgatcggaggagccacttacaatgaaggcggttttaccaacgaagcagccgcaactgccggtgccaagatgatctgggagacattcggaccagtttccaatccctctgtgaaacgaccattcggagacgcagtagttgacggtttcgattttgacttcgaggcaactgtcaacaacatgcccgcctttgcaaaccaattgcggtcctattacgccagcgatacctcgaagaaatactataccacagctgcaccgcagtgtccttacccggacgcggcggacggccctatgctcgatggcgctgtgtacttcgatgcgatatggatccagttctacaacaactattgcggacttcaagcattcgtcccc

SEQ ID NO: 1988 - DNA, 460 bp, Aspergillus oryzae
tggcaaactcacgactactcaaatgtccacgcatgccggtatcggtatgtacacatatgtacggacaatctcatctgaagccacagaactcgttttggttttggcatgattctttctgtgatcattgttaaaccggttcatcagaagtaagaaaatcctggggaggagattactcgtcatactatacttatcctatagcaaagccccagggggtgggatccatcggttgcaggttccgccactgtgtgcgaatactactttgtactctgtagaatacctcgccgatttttcggttccatcaatgtttgcgaaacagccaggatggactagccgatcatttcacaactagtgtgtgtctccgaccgagcctgtcatccatgcgggatcaatccccaaggcgaattctccgagaatcctccgtccgcttcttgaccggtggtgatgagtattaaaacgaaga

SEQ ID NO: 1989 - DNA, 500 bp, Aspergillus oryzae
cggacgcgtgggcggacgcgtgggcaaaaaaaaagtaaactgatcaacacctacaaaagtaccacatttaatattcggtacctaccccgattagatgcttgttctccatatctgtttactgcagaaaaacgaatctgttttcttggttacatacagatgaaaatgaaccagtcacgaaccaaaagggcttcggggagaggaaaaggaagggtgaaaacaaagcaggatattgcagacccagagctcaacgttgaagctcttacaacgggtccgtttgggagacccccagagcctggcaaaggagatttacaagtaattgtcttgggtccaacaggaggcccacgggaggatcgagtcacggggcttctagtccggtcgacatcaaccagctggagaccagataccgtgattgccgtcgatgcggggaccctactcagtggaataattcatatcctagaaacatacaacgacatggacgagatgatagttcagactggccc

SEQ ID NO: 1990 - DNA, 398 bp, Aspergillus oryzae
cgagaaaatgatataatggatcagcgacaagaaatgatggacgacgctattgacgaagcaactggaatggagggagaggatgaagatagtgaagatattgtcaaggaagtcttggatgaaataggtgtagatctcagtcaggcgctgggcgagacgccaaccgacatacagaagactgcagtcggcgagactcgagtcgcccaaccagttggcgctggggggagctcagctgatgacgatctacaagccaggctggacagccttcgacggtgatcacgagctctatttgtttctttactttatcttctttgttcttcaagcctcactttcatccatgacgggtttactctttgcatcgattacgacgccacttctttcatgtcaggttaatgtgatac

SEQ ID NO: 1991 - DNA, 490 bp, Aspergillus oryzae
aaacattatgccctcagacctgtcacagaccgatttgcatcatcttgactaccttcctatgtcacaacctggagcttattggcctacctaaaacttggaagtgagagccaccaggccaaatctactacctaatggcgagtcgttaacttccctggtgcatcgatttaaagctccctggctttcccagcgtagactggcggtttccctccgccaaacacagctatttgatgtatcttggtctagtttctgcaagcgaagatatctactctctattgtccgggggaaggatcgattatattgggttacgtgggactagttagttgattgagaggagttaaaatgctgtcgcgacgtcttggcatagcccgtttatacgcacggcgtagtgctcccgctaccacgagcttgagatggaatgccgttagaccaccggtcaactgcgcaacatgtacagcaaagcggtctctggctggtcaggcgcatctgaagg

SEQ ID NO: 1992 - DNA, 396 bp, Aspergillus oryzae
attggaagcttatacacggcggaagtctagattgggccatatatctgccgacctgacgtcagtgccactgccggcatttttgcttacttccttcctctttcgtcaatcggatcgacattgtaaagaaaaaaaaaagcgtttctcatacttcgctatcatcctcgtactctcttccttcaacaacacatcaccatggcgctgttattcctgaaacaaaaattatttcctggtcaagataagcgttccgccggtaaacttggaaaacccttactcgcaccagacgactccactctcaacagcgaccaggatgacattgaatcgcaacgatcctacagcaccttccgtccttcatctcctacttccgagtcggggagcaccagcagttcgcgctcaagg

SEQ ID NO: 1993 - DNA, 344 bp, Aspergillus oryzae
aagatcttgacatccgcacaatgaatccatccaagtccatttcggatcaggagtctttcgatggaagtctcttgaactcaagcagcaactctcgcctctttcatgtataccatactttgtggcgctatgattacaccgtgacttcggacgacaagacacctcttttctttgtggatacgtcgtctttcaccccaaagaagccagacctcacattccatgctggcactgataagaaggcccctgttgtgggcgtctccaaattcctacatttttcaaggcacatgaaaatagggcttggtgacccgcagagtatcgaccaagttgagtgggaggaccttatctct

SEQ ID NO: 1994 - DNA, 311 bp, Aspergillus oryzae
actctctaagcatataaacccagccccaaaccaactgaactacctccccaaaccagaaactaagccaaatccaccaccaaaatggtcttcaaagccctcctctacataacccgcaaacccactacgaaaccgtgcacctgccactcatccaaaagctcgcaggcgccgacttccctctctcgcacagacgtctctaccttgcacgccccgcccccggcgaggacaacagtttcccggcggcggtgctgatcggcaaccaggacgatttcgccttcgatgcgattgtggagttgacgtttacggatgaggcg

SEQ ID NO: 1995 - DNA, 608 bp, Aspergillus oryzae
cccacgcgtccgcccacgcgtccggcaagccaccctcgtctcccggcaaaggacacaaaagacggagttcacttggaatttttggctggatgaaaggggccagcggttttgggtcgtccaataagaaatccgacccggattcttctgcgatgtccacgcagtccaatgcgtcagtcaaggacagaaccccctcccgtctagcctatgagtttcccgttgcgaacgctgaggctagggatacccatttagcctccatgaacattgcagttgaagacttcgcgtctagcacgaaacggatctcttgggtagaagaagacgcggcacgacgacctagatacgtggatcgtcgccgccgtgtttagtcggatcttgagagcccgcgtacacgatatacaacaagaaaagcaaacggaaaacatcagcagccattatctcttcaccgctatacggtctattctagttcttttgttttaatgcgtcacgataccccacgagctctagtctaacagatggcatggattgtaccaatatttgcatagcagtcgtgtctgagaagtcaggagtctttggctggatttcttttggcttttggtgtctggttggtacaa

SEQ ID NO: 1996 - DNA, 482 bp, Aspergillus oryzae
tgttctcaagagtggctttctcgtcggcattccgaccgctttcgcggccacagtcgctgccgctacgaccctatggttttcagttaccatctgccctttacgctcgactactctcatctgagacgaaatcggccattgataaagccattgcatctgccccggttgtccttttcatgaagggtacccccgagactcctcagtgtggcttctcgcgagcaagtatccagatcttgggcttgcaaggggtggatcccaagaagtttgtcgcattcaacgtgctggaggatgctgaattgcgtcagggtatcaaagaatactccgactggccaaccatcccacagttatacttggataaggagtttgttggtggctgtgatattctaatgtctatgcatcagaatggggaacttgcaaaattgcttgaagacaagaatgttctggtggcggctgactaactcggagcatagatgctcaggtcaaaa

SEQ ID NO: 1997 - DNA, 432 bp, Aspergillus oryzae
cgtatgtataccagtaccgagtaccaaccagtaccagtaccttaagtactgtacctactagtatatcacctccagaagtgggttggaagatgatggagtaagagagggcgccaaatcgaagtgacgagatggctgtcgctcttactgcaacgtgaaaatcagctcctccatctcctctggaccgtggttggaactggtcgtcttcgtctttgtctccaaacccaatccggtctcagccaaatccacttctattcttagcggtgaaaggcccatgaatccggggaaccacatctacatactattttcctctctctttatgagtcagatgtggacaagatctttcttcctttctttcattgtcgtccttttttctcttacaatcgacttcctctctgagagagactggccatctctcccttgatcgccaaaggg

SEQ ID NO: 1998 - DNA, 557 bp, Aspergillus oryzae
cccaatgaggtattatttgggactgtaaccaacacttccacccaggaccaagccgatcaaataggctttcgtgttagctactttcaatcttggttactagtacccggacacagtgcaaacatggatcctactagttccaaacacaaccgcaatatttccagatcatcacggccccgtagctctaccaaaggcccactagatgatccaaatgatccactgaatgcacagggtgcacttcagccccagaatacagcagacgctggcggctacactggagcttcattcactgaattagatccattagcaccggatgacttaccacaaaccttgggaaaagatctttcgttccttcttcggtacgacatttatcattcgctctctcaggttgacattccgcataccttgcggtctgagttcattggcctcacatccgaagagtcgctgtcttcatgcctcagcaatcttgagaggctgctggctgaaggacacttcctccttgcagcctatctttcggcaacgatcttgacatcctctttaatctcgtctagtgacataaa

SEQ ID NO: 1999 - DNA, 491 bp, Aspergillus oryzae
aacatgttgaatctggggtacgtaacttggggtgatcaattgacatccacttagatatggtacagcaaagtatacctcctggattctgtgaacaagaatataaaataagcctcgcgaccgggagtcttgtccctcaaatcatcacaatcccatcgaacatccgcatctaatttcctcactcatccttctatccaccgccaaaatgaaggccgctaccctcctctctcttctgagcgttaccggactcgtcgccgctgctccagctggcaacggcccagctggtggaatcatcgaccgcgatcttcccgtccctgtccctggactccctaccaagggtctccctattgttgacggattgactggcggcaataagggtggcgagaagcctggaagcaaggttactcctcgtgaagaccctaccggcagcgcccctgatggcaagggcaatgatggccccgacggtgatcttaccggacgtcccggtcaagggg

SEQ ID NO: 2000 - DNA, 522 bp, Aspergillus oryzae
aaacggttccttgcggatcctggccccaaccttgcatcattttctccgtgttggattctgcatccatcttgggaagcacttgaactcactagctatagctggtgcgcaggaataaagagaacttctgaaaacagaactctaagccccaccttggactacacgcggggacatttatcgtttagttctggtcgttcaaaatggcgttgccgaaaagaatagtgaaggagactgagcgccttatggcggagccggtccctggtatcaatgctgtgcctcatgaagacaacctgcgttatttcgatgtatcgatccatgggccggcccaatctccatatgaaggtatagtgcacacgccctcatatcgaaaaggaagggcctaggcggttgctaattgccgacaaaggtggtatcttccgtcttgaactgttcttgcccgaagattatcctatgactcctcccaagattcgattcttgaccaagatctaccaccccaacatcgaccgtctcggacgtatctgcttg

SEQ ID NO: 2001 - DNA, 433 bp, Aspergillus oryzae
ctttgacggctccccctctggccgaaaagagttcatatgctggaacacacccttcaaagaccccggcgaccctacttcaggacgtggagacagcgtcgctgaaaccgcacgactgttctgccagctaattctgaggggcgcaagagtgatagcattctgtaggatacgaaagctgtgcgaagtcctattacaggccgtgcgtgccgagttccaaaacctcgacagaccagagatcggtaacttggtcatgggctatcgaggcggatatagtccccaagatcgacggaaaatcgaaaaggagatgttcgagggcaagctaatggggatcgtggcaaccaatgccctcgagcggccgggccggacgcaggaacaaggatttctctctccgtgctcgtcggagacagataccccacagaccaatactacatgaaaa

SEQ ID NO: 2002 - DNA, 439 bp, Aspergillus oryzae
ctacaaacctcgttgcttgtccactgtgaaagaccgtggatccaatccgaactatctgatcctctccttggtcgagcttgaggggacgtacgtgttgcggactctctcagcgcgtcttcgtgtttgaacctctatactctccatgcagccgacattagctccagcgccgcatccaagcatgcaaacatctgctcaggaccatgcggatcaggtgctccatgaccagctcctagcggcccatcagcacctatcgcatccgcagcaaccgcgtccgcaaccccctgccgcgcagccaccgcacatgcagcccaatacaacaagtcctcgcgaccagaacaacatcgatcccgcgatttcaggtgctgcaatgctcagcggcccgccacagacacccccccagccggagcccacgggccaggagagtccgaagacgtatggc

SEQ ID NO: 2003 - DNA, 486 bp, Aspergillus oryzae
ccttgttccaggagctcgaacaggtttccgcagagagcgataaccgtggcctgggagatggacaggatactttacgcgaagtcgtagatgagacagaaaagcaggttttgggattggggttggcgactgtctctcgcgtcgtacgtaatatgcaagggcaactcagtgtccgttcggaggaaggcaaagggagccggttccagatcacactgaatttccctctgccggccgatgccgcctctgccaaagacgagtccgaaatccctgttcacaacgttgtaccgacggccccgttacagtcgaaagaagagtttgtgttggttgatactcgctccgagggacgtagcaatggcggaagtgacaccaacagcgaaagtgggaaggctacacagaaacctgctacgtcacagccaagcctggatgaaacatccaaacttaacccagagaccgacggcctaccaacacaggcacttgcaccagttgacc

SEQ ID NO: 2004 - DNA, 408 bp, Aspergillus oryzae
gttgctgcaagcacctaacgtgaacttgtctgcctgtgacgtcaaactaagtgaggcgctctccaagactgtgcgtactcgactgcgcaagcgtgaaggtctgatcctcactttaactgggtaccgcgaggaaacgatgcatccatttccccagaagaacgacgatgctgttttcaccagtgatcactttttcttccgcccggaacgaaccttcaaggtcaaggtatacgaggatcccaagccggacattgcgaacggcccaggtctaattgacaacctcggtacccccattgcacgaggagaaatgacattgggcaacgatgtgcatgtcgatgtggaggctctgaattgggatccactggaagaggtgggactcgatgtgccgtgggattcggagttggacaagat

SEQ ID NO: 2005 - DNA, 455 bp, Aspergillus oryzae
ctggaggggctatgtgccgaagcgaggtggcatgtttaatctccccttcggtttatgaatgatatgagtctggcctcgcctgggaatacgagctgaaatcacacaccattgaattcagttcacactattaatttgaatattcgcagacatggctggcgacacaaactattcaagttccccacctgggcggtatcaaggccggttatgccctctccaatgaccactacgatccctccaagccgacatgcgttctgatcaattctatgtgcatgaccgtctctctctaccatgatcaattcaataacaaggagctgaccgacgcgatgaacctcctggccattgagccattgggtcatggcgcgactagttgtccctccgaacattttacctattgggattcggccatcatggcattacaggtgatggatcactttgggatccagaaggcattcgcc

SEQ ID NO: 2006 - DNA, 432 bp, Aspergillus oryzae
cgcattcgaaaagcaagatgagcaagttgaaatcggacagttctatgacttccgcagcacttactcagatggtgagggtgaggatgaggaggactcgatcatggaggatggtggtgtcaaggtggatggcgaggatgatgagggatgggaaaccgaaacttctgcatcttctatggatgacgatgaggatgagctcgacgacacgaagggacaggtctatgcgacagagtttgagctgcatttgccctcaggccgcactgcaggtcaccgatcgctcgccaaatactaccgccagaacttgcgtaactaccctacagcggaagaacgggcagctcgtcagctggctattgaaaatggcgagattgaggaggaggaaccgaaacccaggggtcgcgacctcaatcgggccgttgttagccgtggcaatggcgg

SEQ ID NO: 2007 - DNA, 512 bp, Aspergillus oryzae
gcgaaactgacttcttgcgcctgcgaacgactggtgtgttgaaattgccaacatggcacccatgtcagaggaagacctagcatggttcagatccacctttcatcccatcccgaaacctgagcttcccgacgattgtgtggagtattcgctctatcatatctcctccgacccctcccccgctatcgtcgacgaagtcgcagaaacgagatcgcgcttggtggaagtacaacgtactgcagcggaacttaccaaggaccttctcaaagactatatctggcagagagaagggttccgcttggagattactaaggaggatggaatcacctttctgcgcggacgcaccaatttcggcgactcgattgaagatgaatgggtagttgtgtatttgctgcgcgagctttcgagaaagcataaggatatctgggttaaggtcacagatggtgatgggcagtttcttctcatcgaagccgcaggcgcactgccatcatggctggagcccgaagtcgcggata

SEQ ID NO: 2008 - DNA, 552 bp, Aspergillus oryzae
cccacgcgtccgtggatccagccgcacgaacgaactgtacacgataaaggcattggagaagtgtctatcggaagactcgcatgccctactgcggtttgctgcagtgaaggaattcagcggcgagaacatcatcttcctgaattatgtgcgagactggaaggccacctgggccaggatcaatgccaaaaatcccgaatacgattggcaccgcgatcctcaatatcaccggctttacttcttcaaaattgcggtcgagatctatagcgcctgcgtcaatttgaaaacggcagagttccctatcaatgtcgaatcgcggatctactccggtttaacgaccatgtttggcgaagcagtgcaatgctccggtcggcgtgtgtccagaggcgccgcaacacacatggaagaagacactcgtgctctatgtctggatgaaaatccttacgtgagccagagcatcatgcagatcaagtcccgtgttccagactcggtcgtggttccttcgaactttggtatttcccgtttttgaccgaggctgacaagtccatcctcgct

SEQ ID NO: 2009 - DNA, 456 bp, Aspergillus oryzae
ctctctggtaccgtcgacccgagtttgagatatgctgcataccagatgaagcttccacgatcgaagcctctaccctctttggccatcagctttttcccgtcggacgccaacctcaggtcagaagtcgaaaaggtggatcctaactgtcttaaagaggatgctgctggaacaaggagaactgcggacggggaggtgcagcaacttcctgaaaccatcacatggaggtcacgaaccgttgctctggaagacgccgcaatctcccaggccctcgcggcagcagcggcggcggagtctcgcctcgcctcgtggctcgcagaagcctcgggcaaatctgcatcatcgaaggacaaggcagctgcctacgataacgtcattattgccagccaagatgcagtggatgctacaaagacggccatcgacgaccttgtcagtgagggtgtagatcctggtgataaa

SEQ ID NO: 2010 - DNA, 482 bp, Aspergillus oryzae
gctgttcatgcctcagtcgccgcgtcatttaatgaatcagggccgtgaagaggagtgtctacagaccgtagcgcgtctgcgcgacgcctctgtcgatgatatgctcgtgcgcatcgaattcttggagatgaaggcgctccgcatgtttgaggaagagacagcgcggaagaagtatccgcagtatcaggatgggtcattcaagagccgtttcatgattggggtacatgattacatgtccctcattacggataaatccctgttcaagaggaccactgttgcctgtttgattatggtctttcagcagtggaatggtatcaatgcgatcaactactatgccccacaaatctttaaggatctggagctcggcggtaccactacttcattgctggccactggagtagctggtatcttcgagttcgtcttcactattccagccgttctctgggtcgacaatattggtcgcaagaagatcctcattgcgg

SEQ ID NO: 2011 - DNA, 490 bp, Aspergillus oryzae
gttgaaatcgcgctgtctatgctatatagcgaaatgtctgaagagtggtatgatacagaaacaacccaaaaatacatgaagaaagcagcctcattaataagatgtataactcctggtcagaccgggtgtgatacctccagtgatgtatagcccagcatttcactgttcggtgtccacataccccagtttctcaccgaccttgatgcgttgacccatctcgatggtccagttccacccaccctcacgttttccttcttgatatcccgcgtcgaacgacttacgggtgcccatgggagcctcgaagaccaggacaatcgtactgcctagttggaaccctcccatttcctctcccctctggagcggatggcctccgagggtcctgctggcgtgcaggtaggttgcctcaacgaaaccgggatactgctcacctcgcttagcagcgagagctgccgccatatctgcggcggtgtctgtggtgaggctgttcgtg

SEQ ID NO: 2012 - DNA, 539 bp, Aspergillus oryzae
ttcactaatcttatttccctttttctcaattacacgagcttatttttcaaggcgattaaatttcactaatcaaagtctgcaatgccttccgccgatcacacgcatcaatggcgcgtctacgtcaaaggcgtcaacgacgaagacatctcctactggctgaagaaggtccaatttaagctccacgagacatacgcccagaacatccgcaccatcgaacagcccccgttcgaggtaacggagacgggatggggtgaattcgagattcaaatcaaactctacttcgtacctgaatcgatggagaagcctcagactctctggcatagtctcaagttgcatccgtacgggccagatgcggaagccatgaaggagcgacgagaccaagtagtcagccagaattatgaggagatcgtcttcaacgagcctgtggagcaattccatgatctgcttactgggggtggtgcaccggcgcaaccgcagaaaggaaagggaggaaagaacactaaaccaaagcggtcagcggaatgtcaggacggcggaga

SEQ ID NO: 2013 - DNA, 166 bp, Aspergillus oryzae
cgtggcttcatggccactccgctggataatccgcgagtggtttccattgtcttactcatacccccatcgttattattatttttatattatccattcatatatatctctatatgtttgttttcataatgtccatagattttcacaattgtgataccgatactcaatg

SEQ ID NO: 2014 - DNA, 463 bp, Aspergillus oryzae
ctggccacaaggaggcctattacacttgctgcaatgagaccctggggacttcttctggatgtactaaaggcgagactcatgtcttcaaggtgtcggaggccaaacgactagcgtctattcttcagttcgaaaagactccggcgcaaccagacaagggcccgcttccaccagtatgcttcgactgtgagatgggatataccactttggggctggagctgattcggctcactgctgttagttggcccgagggcaaggagctcctcgatgttattgtcaggcctatgggggagattctcgacctgaactcgcggttttctggtgttttccccgaacattataataacgcggttcctcatgatagctccgctgcaccgggcactgcatctgccagcgagaatggagaggtcaagctagcgcctttacaggtggtggaatctcccgcagtagcaagatctttgttgtt

SEQ ID NO: 2015 - DNA, 457 bp, Aspergillus oryzae
ccctaacagctccgtacaatgattccatgcgtattggctctgggttcaattcctacacccagcagctacgagtcaacgatgccgtcatcaaggaaaataaaactgccttgaccgacaaagacctcaggggcaattcgactggcaaagcagacacaatcagccaacaagtgacctttacttcgaagtttgtcgagcatgccagcgatattaccgaggcgttgaatatcagtggcgcactggaaatcaaataccagggaatgggagcaaaggctgcaggatcctacctcgactcctccaaagtcaaggaaagcgacatcaactactttgtgcaagtcaaggtggtcaaccagcagcttatcgccgacgatgctaccaaattcaacgtcattcccaatatccccgtcaccaatcagaagcgcttcaccgaggtttacggggacagctacatctctggctt

SEQ ID NO: 2016 - DNA, 469 bp, Aspergillus oryzae
atgggtagtgataggacttcatgacttcaccatggggatatgggatgacggtgaggatccggagccgtttccgatgaggaacccgaacctggccatggtcactatagaccgtcctgcggctccagcaccaccaggaactccatcgcctccagcatcaagacggccaagtgcaccggagcacccatcaacggagccctctacagatccaaatctggcccacccccgtcttatggttaacagagcatgtatttacgaacgtcaattaccgggagatgcctatatcacggctcacgtgcagcgcctgcaacacgggttttactcgagcccagccgtctctgatcaagacctcgaccatgttgacttcctgggtatcaatttcgttttccactctcccaacacccttacgcatcgcttcaaggcagcgaccatccgagcctcgatccacagtatgcgagagaattccaagccc

SEQ ID NO: 2017 - DNA, 316 bp, Aspergillus oryzae
tcttcttggacgacgagatctggccttgcgcccgcttcacggaagctccgggctcattggcgagtcttgtttttcttgtggaccagcaagggccctgcgcgcagtttgctgagcgtattcgtttcatccggtctatgccacttacttctaggtagctattgcctttaggaactgacaaggacggttgaacataacaagtggcaagcctttagttctactacggttccatttgagcgccaaaaacaaaaatcctccgcaccagcccgccaccatctttcgcgcgtcgcgtggttatagccatctaagttgataccag

SEQ ID NO: 2018 - DNA, 570 bp, Aspergillus oryzae
gtctcaaagcacctcatgcttcccatagagattcctcgagcactgagccaaaattggccatgtcgagagcttcaaaccagacaacttgccagccttcttgggcctctcggtcctagtcctgcgacattagttgtgcatggtatatctgccacgtgcaagtcgaccatcgttcgcgccgtcctctccgccctcgaagttccacacgccattgtccgaagcacggaatgcataacaggccgccatctgttgacaaagatactgtgggcaacattagaagcattggggaaacgggatgagtgggaaaattatggcaaaggaaggtgtgagcatgtcagcacgctcgctgtccttctaagtgaatgtttggcgtcaaggtctggcaaggcaattgaaaagttcgtgcttgttttggatggtatcgataaacagcgagaggcaccacagaccctgttgtctgcactggcgaggctgggagaaataatccccagtctctcgattgttttgattctcagcgctactccacgaccactcttcttgcaggctgcaggtgtcccgcacatcagtttccct

SEQ ID NO: 2019 - DNA, 463 bp, Aspergillus oryzae
ggttttttctcgcgccagctcgggaccaaaacatccattcccaccatgtcccaagacatggtagaagtcaaggtgtcaaaaccaaacgatactgagctattgatagaatatatcgccccggtggctcaaatttcagccttgaagtccacgcactaccatcaaatgttgaaggccacgcaccatgatcgttttcttcaaaacaggggatctgagacagcagatggtatccgcatccaggtgacacatggatcctgcgatgtcgagttcgaggatgggcgctaccgaattcaatgttctacggatgatattcgttttctgatactatttatcaacttcccctttcggactatctgtcagccagtcggtcagacaattattgaattcggtaccagatttacgttcgatgactggtataagtcaatatcttttgatcctgcggtaataaattccttcgaacgcagat

SEQ ID NO: 2020 - DNA, 468 bp, Aspergillus oryzae
gatcgttatcgactcctcgcaccacagcgaggatcatttatactatacacaatggctgacacccaggcccagcagcctgccgaggttgactacaccctcaacaaccccgacaccttgaccaagtacaagactgctgccactatctcacacaaggtcctcgacgccgtcgcagccctgtgtgtggagggagccaagatcgttgagatctgccagaagggtgacgagcttctcgaagaggaaatcgctaaggtctacaagggcaagaagatcaccaagggtgtcggtcaccccacgactgtctctcccagctcccatgtgaccccatacactcccttggtttccgatgcccaggaggccgagactaccttgaaggccggtgaaatcgctaagattcagctcggtgcccagatcgatggcttcggaaccattgtttgcgaccaggttgttgtcggccaggacgaggtgacc

SEQ ID NO: 2021 - DNA, 437 bp, Aspergillus oryzae
cattgatctctcaactccatcccaatgaatatgaaggttttcgctatactctctgggctgtttgccacctccgtggtagcaggagttatgcagaatgccaacggtcaacctgataatcaggttgtaaaaagagaggctgcactcgagccctgctgtggttttaagtgctataaggtaagtgattgacccaatttgacgagaaaacttccaggacataggactgactgatgggtaatatgtacagtacggaaacggggtaagtggttggcctaggctttaaaggaaactctcaggactgactgaaatgtgatgcggtatgagtaggaggtaagtaattattaaccaggggctagggctaacctctcggacacaaggactaacaatggatagtatcttaccaaccttgagccctactgttgtaacgatggtggcctttg

SEQ ID NO: 2022 - DNA, 465 bp, Aspergillus oryzae
tctagatcgcgagcggccgctcgcgattgtaccccggaacctgcggactcgggtgtcgaacctcttgtactttcgctcgcctacccattgacgccgacttttcccagttctccatcttatccgctgaccatggccggcactgaaccccaccggtttcgacatcaaggaattcaaggccgccgcttctccccggtcggtctgggcaaagaaggacccttgggctcgctatgaggcctggagatacaccggccccttcagtcgcttcaaccgtttcaagcgtatcttccccggcttcggtatcgccagcgttgccttcgccggatactgcgcatacgaggccgtcttcatgaagcacgacgaccatcacggcgacggacaccactaaaccagcccaattgaagtcaatgcattgagaacgggaggaataacacgacgaaccgccgaccgatatcaatgggttaaaaa

SEQ ID NO: 2023 - DNA, 441 bp, Aspergillus oryzae
cgatgacaccgctcgtccccaggagatctacgttgaccgctccggcatgggccagggcaagattggctacaccgtcggtgtcgagcccgctcccaagaacgccgagcgcaagggctgggccatcaaggatggccacctcgagttcgacggatccagcctcatcgcctgccccggtgccgacggctacagcatctgggcctcctctggtgtcgctaacccgggtggcaacaaggattgcattggcattgctgctcacgtcgttgggaccaaggagcccaagccttgctgggccaactaagtttgtgctttagtgtttcgttctttggcgcagagacttgtataaaggctcgatgtctctttgtgcgtcttcattgtattaagcgatttgtgaataacttttgtgcaaatacttctttagtatgaaacactccttacatggag

SEQ ID NO: 2024 - DNA, 582 bp, Aspergillus oryzae
tttttaaatatactgttatacgattgaatacacatagtatgactaaaaagaacaaattggtatgtgttcttaaacgtcggaaggcagaaataaaacacgaacacccgtcagccgatacttccctaaatctgtttcactacaggctagactttgtggagcgacccatgctcatcccaacctcaacgtcgaccatgattctctggtggctgagcttctccaaatcctcgtctagctgaatccggcctttttcaaatgccacgatgatactcgatcctccgaactggaagaatccaagttcgtcacccttcttcacgtggtgtccttccctaatgtgctcatggatttcaacggtgccgacgtccgtcgcgccaatggccacaaacagaacgtctccaaattccttactttcaatacagacacagcaccgtgcattctccgtcaagatattaaccgagctctgcaaagccaccggatcgacttgataataatccccggagattgccttgaaccacttcaccgttccctcaacgggagagtgataccgatggtagtcctggggacttagacgaaagctagcgaccg

SEQ ID NO: 2025 - DNA, 467 bp, Aspergillus oryzae
aagtcgaaggtgccacagtcacaacaccaaatgttggatgacatgcggtcgattatgatgagtgaaggattaccgccggaggtccgcgacttcatccaaaagcacctaaaatccggtaaacccacgtctctgatggactacgtgaacttgacgcgttatatggcgaagtacttggaaaactacgcctccaaactgaacgagttggaggagaagagaacgcgggaccaggagaaatcaggagatggacagagccagaaacaacaaggacaacaagggaagggcaagaatgaatggaaaccgccaccgaatgcgagagttttcgagttccgtttcgatcccgcctcgttcctgattacctcccttctatcctactatgtctaccgaagcttcttccctggcgaaaacagcaaggatattacatggcaagagttcagagccaacttcttcgataaaggtctagtcgaaaa

SEQ ID NO: 2026 - DNA, 447 bp, Aspergillus oryzae
  modified_base (75)..(75): n is a, c, g, or t
cactcagtcattcattcattcatccactcattcattcctctctcttcagtctttagtctttcaagttgcttattnttctccttaccacaccttcaaaatgaagttcgcttacatcctctctgctctggcctccactgccgttggcgcgcctctcttggacggcctcctgggtggcttactcggcaccttgccgatcgtctccaacctcggtgagcttaacggagtcctgggtggccttctaaaccttggcggcggcggcgagttgcctctactcgccattctcggcagccttggaaagttgccaaccggcgccactggagccattccctctggactcccctccggattccccgctggactcccccctgcaaagccctctgcagtccccacgagcgtcgccgtcccctccaccggagccactccctctggcgttccctctgccgacgg

SEQ ID NO: 2027 - DNA, 464 bp, Aspergillus oryzae
cgcgatttaatccaagcactgtgcgactcggcgtcttcatttctcactttggggtagttgttacatagtcttcattggctggactaagtacttgacaccttactttcctcacccacactcattctttgcacaacgagtcagagagccagccggtgaccatgactaccatctacattgacgaagacgtcggtagggacgactctaccgcgaccggaaccgaatccgctccctacaagacgcttgtgcacgctttcttgcagcacgctcctagcgagggtttccaatatttgacgcgcaaatcccagaccgagcccgctgataaggatgtcgacaagctggagtggaagccggccaccaagtcggcgatgaagaaggccaccaacctctatgaacaacggaaaaagaaggccgcaaaggaacaggaattggccatccgtgagaagcaggaggcggagaagcgccgc

SEQ ID NO: 2028 - DNA, 453 bp, Aspergillus oryzae
atcacctccggcttgagatagtgcacagcacaataaattcaatatgagggaacccgctccgacagtaagacaactatacggtgaaatgggccagtcggtggttgatcgactagcggaaatattgtgtgatcacaatccagcaagttctttatcattctttcctgagcaaagatgttttcatatcagtgggtttcctgatatgtacccctccgaatgccttgaaatattttctcaagtcaaatctaccagttatgatttgaaatttcagcgaaaatctgccgaaggcattatcatttttcggctcatggataaaaactgggggaatctcttccaaaagtctttcggcggcaccgaccgaacttcggctgccatacgagccagaattcagctcctcgctgcctgacgataacctgccttgaaggatcggattcgactacatagcggaccctaccg

SEQ ID NO: 2029 - DNA, 370 bp, Aspergillus oryzae
ggctacaaggctataactggcctcaactaccgtcgctctgaacccgagctgatcgtcaagccaccgtgcgtcgggctgaatcagtcgcgccaagacgacgcgatagcctcctcactgggtctattaacacgtcactgttcagctactattattacctactcgtctagccgccccaaagtatcgctaggaaactttccgcttcgggcattgagcttatcgcggggttataattgtgggattgttcaaggcgaaaggcgttttgctttattaggctgcacgttgatgtataggggtcaggtggtgattgactatttgagtcttcgtccctcgtgtggctgctatcggtcttgagtatttgtttctgagaaaa

SEQ ID NO: 2030 - DNA, 427 bp, Aspergillus oryzae
cggacgcgtgggttttccgcttcgtcttccttctcaaagaacaacacacttctacacttctcgtcctcttccacgtcgaagtcgtcatctatcaaaatgcaattccgctccgttatcgcccttgtggctttcgctactgccgtcaccgctgctccctgtgacagctgtgatggtggcaactctggcgactctggtgactctggcaagtgcagccctaaccaagaactgaagtgctgcaccggtctcacccaaggcctgaacctcggcatcctgccggccctgtgtcttcctcttcttgccaactgcaacaaccaggccgcctgctgcgaggccaatggaggactcctgaactgtctcaccatccagctctaagttcatcgcatttcaccaccgcgagtaacgatacacgggcgatgtccggtggggg

SEQ ID NO: 2031 - DNA, 455 bp, Aspergillus oryzae
cttgcttgtggagcttatcaacccgatgcggtgactgctaccgaggatgggctaaagcacgatcacgatgccaggctgtcctttcaccttgccccagcagtcatcctacagcgaaccctccttgagcttcagtatcatgacattgttctttgggttcaccattcattcatccagtttccgagtcgcggcttggttccgcaacggagtccacaagccgatgtgcatgccaccacggcaatacaacatgcgctaaccgtcacggatctcatccgtcttcggatgctctatcacgacgtactttatggctcttctgagatctatcagtacctgtggaatgccgttctcacactcatagggtttatgttggcctaccccctatgctactggttccctcgtgctcagcagcatgtcgagcgatccctccagatcttcgaggcagcaggaccagtaaaccc

SEQ ID NO: 2032 - DNA, 404 bp, Aspergillus oryzae
gaatctccaacctcttcgggggctcctcgaacggaaaagaagagacggcccatctacgcttgtcttccctgtcacaagcggagagtcaagtgcgatcacctcaagccatgtacaccctgctgtctccggggaacaccttcgcagtgcgaattcaccgaggaaggaaacagtgcacatatgctgcagtcagatcttatcaagagtctcacggaagaatgcgcatacttggaaagtcggttagccgagctggagtccttggaacagcactcgcctgacaaggggtaaggagatgtgctctttttttctttgtttcgacttagtatccatggcattggggtccttctggcgacttctggagtctggttttcgggtcatggagtgtacggtgccagtgtgatgggttt

SEQ ID NO: 2033 - DNA, 405 bp, Aspergillus oryzae
agcagcacggcctcgaccgattactgaaagcaagtgcaagtgcgataattctgcaccagctgcttcgaaaggtccagtgacacttgcgatttacaacttcgcccatatcgagcggacttaatttcttccttccgggaaaaatttcttctgctctcgttgctaatacagcaaccccattcgagacctattcaacctcattctaaagtcgatcttattcgattcatataacacaatgggcttcggtgctcctcgcggacgtggtggaccccctggtggacgtggtggacgtggtggattcggcggtggccgtggtggtggcagaggcggactcggaagtgcttctcgtggccgtggtggaccccgcggtggaggtcgtggtggacgtggcggccctcctggacgtgg

SEQ ID NO: 2034 - DNA, 468 bp, Aspergillus oryzae
  modified_base (337)..(338): n is a, c, g, or t
cttctgatgtctagaaacaagaagctcacggacgaactcaccattttacgggtatcacaccgggacctccagggccaactcgagactctgcgtgaagacctgtcgacgactaaggaggagcttgaaaagtcccagaaactctctactactcttgagaatgatctccttcgggtgcaggaagaggcagcgaatgccttcccatcatctgcgatgtccgttgcaggcacgtacacatcaaggcacccctactcctctcgccggggaggtacgtcgccgacatcatcaatcatctcgggctttgaccactcttctgggtcttccaacaccatggatgccnntcgagcaggagaacctgttgggggtggctcaggcttattgccgatgatccaggcacagcgagaccggtttaagaagaagaatgcggagttggaggaggagctctcaaaaatgtacaactcagtaaagtcg

SEQ ID NO: 2035 - DNA, 479 bp, Aspergillus oryzae
ggcctagatgatagcgaccgtgcgcgggccatttttgagctaggaattgagcaaccgactctggatatgcccgagctggtgtggaagtcatacatcgatttcgaggaatacgaaggcgaatatgacagagtccggcagctctacgagcgtcttctggagaagaccgaccatgtcaaggtgtggatcaactatgcccggttcgagatcaacatcccggaagacgaggaggaagaagaagaggaggaggaacggccagtcagcgacgaggccaaacggcgcgctcgggcggtcttcaaccgcgcacacaaggtgttcaaagaaaaggatctcaaggaagagcgtgtggaactcctcaatgcctggcggtcattcgaacatacacatgggtcccccgaggacatcgacaagatcgagaggcagatgccgcgtcgcgtcaagaagcgccgcaagttggacgacgaccggtacgaggaatacat

SEQ ID NO: 2036 - DNA, 481 bp, Aspergillus oryzae
catgtttcaagagtacatgctcaagagaacacaaccaaaccagaagcttgaagcacagccctcacgatagccatttgaaaaccttgcacttatcgttatcgaccccgcacgatgacggtcatgcagttcgaccaggagcaactggacgaaatctacgcttttgcggtagacctcggtcgtaaagcaggccagctcttactggagagcattgaaaagcgaatcgcgggtgagggaagccagtcggtggaagaaaaagaaaacgcagtggatattgtgactcagacggatgaagatgtggaagtatttatcaagaccgcaatcaacgagaaatccctactcacaagttccttggggaagagacatatgccaaaggacagtctcgagactatctcatagacgaacagccaacatggtgtattgatccgttagatgggacggttaacttcactcatattttccccatgttttgtgtctccatcgg

SEQ ID NO: 2037 - DNA, 446 bp, Aspergillus oryzae
aattcattcatccatcagatcgtcctttcattctcctgctttttcattataacaaattcttaaaacttagaacgttgctttggtccggtatatgccccggattctcgtcagtcattcgcaatgcctcgattgcctagtttcttgcgcgaccatgcgcttctacctctcagccggtttactcccctctccttcctctgtccttcggcagcacgcgtttcactcttcccagtcaaaacatcaagctatctctggaactaggttctacgctaaggacatggctgtatttaaaaacagcctcccaaggactctcgaggcccaccgatcctcgaataggaccagtttggttcgtaaagtatacgaccggacaccctctagggacctcgcccgccctgtaattccggtgaaggaagctatggctttgaaactaccagttaaactggtttccc

SEQ ID NO: 2038 - DNA, 537 bp, Aspergillus oryzae
cccacgcgtccgaatccccgcctccgcacaccccctcgaagcccgtctgatcgcctggcgccaaacgcaggatgcaatgaagatggagtccctgcgtcgggcatacggtatcgcggagcccatccgccgtggcatggaactgaagctcgtgcgggatggatctttccggccggccgtgttgggaggtgcaaaggccggcaatgttcatgaggatattcttgtgctcggtggacgggatacggaagttgggtgggaggatgtgttcaaaggagatgagttcagagaaccacccactttccacgacgagatggagaagaggctgcggatggatttctaagctacgtttcgaataccggttcctggtttccgtttatgcttcgttggtctcgtttatttaattcattgtatgggtcgttatgattctttcttctcgatacaggcgggatgtgaacaagaggatttgaaatttcgcccagtcatgatttgatgggcaattactactagatgcaatttagacatacgggtttgcatggaccg

SEQ ID NO: 2039 - DNA, 522 bp, Aspergillus oryzae
cccacgcgtccgaaaacccttggttaatcaaagcgcaggtcacgacaagcttaagatagaacaaactccttcttcagagattgatgatactcaatctttgccgacaacaacttatagccccagcttaccaaacgagacacctaaaaccacagatgatgtgtcatggaaggatcttgattcctttcaaaatcgtcttcttgctcttcacgaaactcttgaggcttcgatggccggatttatataccctaatgaagaagaaaaccgcacaccccttttatgagcggcacggattatctagagacgaagagtgaggatctgccgagcccctgggttcattcttagatgttgtcaactcgactttcctgattttccctttattattccccgcagccacttcgtcgttaagcactcaacggtcttgactctgtaacacttcattccccctcatcccttctaagcgtctgagcccctttttcatttttttcctttattttcctttgctgttcaggattttaactatat

SEQ ID NO: 2040 - DNA, 474 bp, Aspergillus oryzae
ccgaccctttggggtgctcttgcccaatctcttcttgtgtttacttttcttgaccttcattcactccatccttcctgttacgtcacgctctacaaaatgcaggtgcctttgcttcgactccagtgtggtgtcaacagttatgattggggtacatgaaaaccctccgacatcctgaatctataagttgctgagtattgtcttaggcaagattggtcaggagtcggcagctgcccgctatgcagctacaacagctgcaccagacttctccatagaatcagagaaaccctatgcagaggtcagttctagactacttgccgatcacaaacaatcgccaacttccatcaatagttatggatgggcacgcatccttccctcccttcgaaagacgtcgagacccagcggaccctcctcgatatggtccaagacaaccaagctttgctatccaaggaggttagcgagaaatatggtggaaaa

SEQ ID NO: 2041 - DNA, 478 bp, Aspergillus oryzae
cagaactttgaaatcgcttcggtgagaattagtcagaggtagtctgctgttggagcgctcaactatctagtagttgacatgatccgatccaacgcccttcccttgaggggaacattacgtgctttgcagccgagaattaataactaccgcctaaccgctgcgcaacaacagaggcattaccgggtctctgctcggaattgtgcgaacggacgacctcagtcgttcaagaaccagctctatgagagtacacaacaacggctgaagcgtgagcgcgctgagcaagagcgttacgcacaatatcagactcagtcgcagggaggtcgctatacagctctaacatttgctttggtgttcttctctactggagcctatttcctagggactctaaagccgccaagtcttccgacgtcatcaacaacgaacattctcgaactagagccgccgcgtcacaatatttctcagtcgaacctccaagccg

SEQ ID NO: 2042 - DNA, 443 bp, Aspergillus oryzae
agcgatgatcttccttgtgctctatgcgtttggttgcgagctatgggctccgtggagcgaggaactgggtcgcaaaccgattctgcaggcaagcttgttcctggtcaatgtctggcaactccctgttgccctcgccccgaattttgcctctattatggttggccgtgcgctaggtggtcttagctccgctggaggatcggtcactctcggtatgattgcagatctgtgggaagctgatgaccagcaatatgctgtagcctgtgtggtcttctcttctgttggtggatcggtacttggaccagttgtgggtggatttgttgaagcatacctgccatggcgctggaacatctggatccagctcatttttggaggatttgtccagattgcccatttcctcctcgtccccgagacccgtactactattctgatggaccggattgcca

SEQ ID NO: 2043 - DNA, 418 bp, Aspergillus oryzae
ccttcagccatggattaataaacctgacattggaccgtacaccctactaacctggatcaacgctacgagggcttcaaatcgcattctatcgcacactttgcgattagctcctcaaaaatcgatatggcggaggttagcccattcgccgaattcttgggtcaggcgatctaccagttcacagccgtaaagcctcttttaccgacatacgggcatctgctcgtttcagttttatttcctatctacattgcttctcacgcctcactctcgcgaccgtcttccgcagccgaaccgcccaaaaaatcccaagatgcagacggtgatgaatcggacgacgaagacgaagatgaggaagaagagaacgacgatcgaagggtagaaggccttgcgcccagtgatgctctaatatttcctttgaccg

SEQ ID NO: 2044 - DNA, 445 bp, Aspergillus oryzae
cttcaatatttctgtttcacaacgtatctcaaaggttcagcccacccccaacttcgcattgaccatcaaacttgcaccacacaatgaagattgggcttctagttttacgcggagatcctgtagaggggcccagtgttgtcgatctcagtagctatatacctccatctcgtcatcagttcgagacccgttacatcagcaagtccgaggccgaagctgggatcgatagaatctgcaaagatgagtttgacatgtgtctgaattatatgacggtagagtcgtgcgatgatgtttcaacagtggcagcaatcacaagatacctcgaggcgaaagatatcacacttctcaacagtccatgtctcactcacatcaccgacgcgggagaagaaacgcgtcgctttcgaattccgataaaggctcacgaattgaacctggaagatctcagggg

SEQ ID NO: 2045 - DNA, 571 bp, Aspergillus oryzae
gttggtagtagaaactgccactgctgagtagatcccccgtcacattcaatcagaatctgccaacaaaccagtctggcatgccttcctaaattagtatctcatgagatcattgtcacccactcccaagccaatctttcgtgttcacgagtgcgcggcgaggcgcttgtcgtcataggcagccatattgatgatcacaagcttccaccaaacgaaccccgaagaattcagtcatggagggatgacccgcttgtaatgtcggtcaacttcttcttccttgaatacccaggaacttttcacagtctccttcttttcatacaacaagcgaccacataaaggaagggtcggccaaaatagcatctttaccaactcgtcccgcgccgccagctgaaaactagggcaaggaatatcctgagagagcatcgacggcacagtttccttgccgaaaaacggcaagagatcttcgagaacaaggtttaccacatgctcttaaatcacaggccttgctaaatactttttccaactttctattctcctcagattcgctagataactaatcttgacggaacagctg

SEQ ID NO: 2046 - DNA, 464 bp, Aspergillus oryzae
ggccctttggtgcacaatattgcaatcgaggcgcgaagttgtgttgacgagttatatactcgttgccccggtcggggtcatagtcttcaaataaattagagatactagagtaggagaaataccgacgccgtattacacatacgccatacactgaaccataatgaagccagcgaaacccttttctaccactatggacgagcaaacgttcgtcccggggactatgagagccctatatcaccgaccggcttctactgccatcaccgatctgacagctttggatgcgcccagggtagattcggggattatcttcgacacggactttcctgtaccaaagccagcggcaaatcagtatctcattaaagttcaaacagcggctttctctcatgacggactaagactcgctcgaaccctccatccatcgaaatcaatccctcagattcccctacacaactattgcggcatag

SEQ ID NO: 2047 - DNA, 487 bp, Aspergillus oryzae
gtaccctcatcgagggcccccggattaaaggagcggtcactccctgttaacggtgcatcggtacagaagccgcagaagctacggatgcaaagtccacagaagctccgagatcgtcttcagaacgaaaagaaggctcagagtgcggcacagctggggcttaaggacgaactgttccttatcggtgaggaactacgatcgctcaagatcgcaccaccacagcaaaccaggcatgcaagacaggattctgaacatttagatgagcctttctcgccaacaaacaatgcggccctcgtatcgcgtgttcgtcacctcgagatgcgctttgatacactatcttcggagttcaacagccggacatctgccattgagaaagatttggagtcatctctcgtggttagcgagaaacgagctaagaaacttgacgagctatatcgtgaagccagcgccgagaatgaagccctttacgaccggttcaactcggagctga

SEQ ID NO: 2048 - DNA, 512 bp, Aspergillus oryzae
gagatgcccaagggaccctctctgaaggagatccaagaggctgaggctcgtagcgctgctcagagagaagaactggctgccgctgctcgtcgtgctcagcttctcgcagaacaagagcgtcttagccaggctcaagtccagactcctggtctcccatcgactgccaactgggccagtgctggatccccgtctactcccgcgtccaccggatcggtgtggggtaacagcaaggctccagccgctgctaccggcggcgctaagaagaccctcgcgcagatccagaaagaggaggaggctcgtaagcagcgtgccgctgccgctgctgctgccgtggctgctcagagtgccgttgcagcagcgcctagtcctccagctccttcttctactggaaagcggtatgccgatctggctagcaaggctcctgctcctgctgctcctaccactcccgtgactacgggtgcctggaccacagttggtgccggcggtaaggccaaagctcctcctgctgcccc

SEQ ID NO: 2049 - DNA, 332 bp, Aspergillus oryzae
aaggaatttgcagatttctgatgcgctcctctggaatactaggaaatgtttccatcgataagtatgcactatctgggattccgatgttggatctgtaatacctatatctatatatatattctatagaactgttcagtttccaaagcaatgtctcaggatacatgtattcttctttgttctactcacctcgaatagttctctgcgcagttcattgcaaattcaggacatgttttggatgttgctcggtaatctattaaggatttggtaaacttgtatatatacaaaaggaacaagatagagcaacacacggctaagaagagactcaatagagt

SEQ ID NO: 2050 - DNA, 601 bp, Aspergillus oryzae
cccacgcgtccgcactgttcggatattccgcccttcaagagcacccctccttgccagtgctccgccgattacagtcagctcaagacggatcaaacaccttacacttgcatttattgctgccatccgttgttaaactgcagtcctccatatcctccgtagcgctgcccaacttgccgccttgtgccaaccccacaaaacgcccgtgatgtcacagaaccggcctggggtattctcgagtttgcgcatgggtgaagtcgtccgtgagaaggtccaggatggactaacaggggagaccaaggaaatttcgtactcgcagtgtaaaatcgttggcaatgggtcatttggcgtggtcttccagacaaagatgatgcccagcggcgaggacgctgctattaaacgtgtcctacaagacaaacgcttcaagaaccgtgagttacaaataatgcggattgtccgccatcccaacattgtagaattgaaggctttctattactccaatggtgagaggaaggacgaagtttatttgaacctcgttctggaatacgtaccagaaacggtttatcgagcatctcggtatttcaacagttgaagactacgatgc

SEQ ID NO: 2051 - DNA, 627 bp, Aspergillus oryzae
gtagctccctccggtaagggaagtgacattgtctggcatgaggatgtgcagattttcagcgtctggaacgatgagggcgagggtagcggatttgtcggctatctctatctggaccttttccctcggagcggcaaatacggccacgcggccaacttcaacctccagcccggtttcatcgacaaggacggcaagcgccggtaccccgccaccgcgcttgtgtgcaacttcactaagccgacaccgaagaaacccagtctgcttaagcacgacgaggtggtgacattgttccatgagctgggccatggtattcatgacctcgtggccaagaccatttactctcggttccacggaactaacaccgtgcgtgacttcgtcgaggcccccagtcagatgctggagaactggtgctggaccccatcgcagctcaagtcgctcagcaagcactactcgacgctgtcacccgaatatttcgccgcgtggaaggaacaggccggcgacaagcccgagccggccgagcagatccccgacgaggtgattgcgaacctgatccggacgaagcatgtcaacgacgcactgttcaacctgcgccagctgcacttcggtatcttcgacatgaccgtgcacgag

SEQ ID NO: 2052 - DNA, 595 bp, Aspergillus oryzae
cctctcctctctttctctagttgccattgcggctggccgcttcttattccgccctcagctggtcgcgtgaagcctcgtcgatcatatttcttttgccccgcaaaagcaaaggcttccctgaccgccaaagattctaccaacccttaccgactcattcacgtcggccacgtttgagacgtttctaagccagtgaaatattctccgtcttccatcatgtttggtatcatcgccgatttattgtcctcgatcatcacgatcctcttccctatcttcgcttctttcaaagccctccgctcggcgaacccctctcagctcgcaccatggttgatgtattgggtggtcctgtcggccattttgatggctgagtcctggacggtctggattttgggatggcttccattctatagctggatccgtctcttcttcttttcctatctggtcctgccacagactcagggtgccagaatcctataccagacttacgtggacccgttcctggcccagcacgaacgagaaatcgaagagttcatcggtcgctcccatgagcgtgccaaggctctgggcctccaatacttttaccaggggctggattggg

SEQ ID NO: 2053 - DNA, 641 bp, Aspergillus oryzae
gttcatcggtttcattcaagaagtgcccctttaggcaatcttgctccgccatggcacctcgtctaccaggttggctattacagtcccctctatttcttcgggcttcccattcaataattcgcagcaatgtcacgacccggccgttcggcatcaggtcgttgaaccctcccaacacctcccggttcaatgtcgggtccgatctcccagtgctcaagtcgacaccaacagcagccttagaacgcaaagcaaacacgctgccccccagaactggagccattgctatcaagaaagggatgaccgctctctacgatacagagacagggaagcgaatcgcatgcaccgtccttcagctggaccgagtggaagtcatctcgcataagacacggcagcagcatggttactttgctgtccaagttggttctggctggaaacaccctaataatctcaccaaatcactcctcgggcacttctctggtaacggtatctctccgaaacggcacatcttcgagttccgagtgcgggacgaaaatggcctcctgcccgttggtcaggcaatcaatgcagactggttccaggaaggccaatatgtcgatgctcgatcaaacacaaagggaaagggatttgctggtgttatgaaaaga

SEQ ID NO: 2054 - DNA, 300 bp, Aspergillus oryzae
tggatactgtattttgaaggtgtttccgggatttgcgatatgataccttttactgcattgatcgattttagctcacgatttccattatcttctccgtttgctgtcagggtttcccttttacttcatttctcttcgtcgcccttccacatacagccatattaaatgggcgctgacagcgttcaatcgatgattccgacacttgcactttgatattcttgcttatgtcaatttatttttcacgactgtgcatctcatatgttatgtactgtatctatcatataattggaataaaatacatag

SEQ ID NO: 2055 - DNA, 527 bp, Aspergillus oryzae
attttcaaaacaatcttgaactcgaatcccatcacagaaactacaatccatccgttacaatgtcgaacagaaccggtctctacgctgccctcgctgccgctggtgttggcgggtactatctgtatcgggccggtggtgatccaaaggccgcgaagcaagagattaaacatgatgccgatgtagcccgcaacaaggtccctagtacggacaaggccgagagagctggtcagaaagttggtgcggaggctggtgcgcatattgacgaggcggtgtccaatgcccgcacccaggcacaagaagctagcaaccgtgcttcgggactagcccacgagagtctcgataagcttaacgaagcgcgacaggatgcgtctgcaacgctcaaggctaacgtcgataaatttgataagacggtggagcagaagacaagtgaggcgaaggggtctttgtcgagctggtggagtggtagcaagtaacctgggggactttgcgtctgcaaattgaataaagcgcgctattgcgatgatttt

SEQ ID NO: 2056 - DNA, 363 bp, Aspergillus oryzae
cgactttccctctcttttcctctttcctactccagctgttagctacctacctaccaccttcttatcccattctcttttcgacgactcgccattcatcagattttccctgttgattaccttctccccatcgatcttcgacgtgttcggttcctttcgattatcttccctctttcccgccttcttcgcaaaattgacttgattggaaatcgcacaagaatcttcctctatctctcttttgcaccactacgacgcaaacgctttaacgcagactttctcctttaccctcatctgttgcatctataagggtctattgattatttttctagcatttcaaagcgaacgacgaaaagtcactggattttt

SEQ ID NO: 2057 - DNA, 554 bp, Aspergillus oryzae
caattttcgtgcggtcaatatgctcccggcgatcctgttgctgtcttgcctaccgacagcatggggtaatcctttaatcaatcgtggcacttctaccatatccagcgtctcccaagctccaacctcagatacactcacctccctaagtccctcagtcgagccaacatgctacaccagcagtcaatggctcgtcatctctggtacgaccttattctggccaacctccaccgactatctctacggaccgaccgacagccctggcgtcgactgcgcagcgcaatggatacaatatgatggccgctcaggcggcctggaatctctcggccctactgccacatcaacattaacagaactaatcccgaccagcacaggcgcctgcacgacaagcagccacctggaaagttactatgatactcatacagggcctgttaccactctttgcgacgggcatgcacgggccctaggcccccgcgaaaccgtgacagactattaccccggcacaggagcatgcagcacgttctacatcccaacaaccatcacaacgacgctttaca

SEQ ID NO: 2058 - DNA, 517 bp, Aspergillus oryzae
gttttattcattaactggctgcgacatgttagacgccagcaagggccctttgtggtcgtcgtccccttgtctaccatgccgtcttgggcggagacgtttgataactggacgcccgacctaaattatgttgtctacaacggtaatgaagccgctcgtacagttttacgagagcacgagctcatgattgatggcaatcctcgacggccgaagttcaatgtcctcctaacaacctatgaatatgttctcctagactcctctttcctgagccaattcaaatggcaattcatggctatcgatgaggcacatcgactcaagaatcgtgaatctcagctatatgcaaagctcctcgagtttaggtctcctgctcggctccttattaccggtacacctattcagaacaacctcgctgaactttctgcccttttggacttcttaaatcctggcctggttgacatagatgccgacatggacttgaacgcggaggctgcctctcagaagcttgcggaattgactaagg

SEQ ID NO: 2059 - DNA, 484 bp, Aspergillus oryzae
aatttatggtaggatagaagaaagactcaaccagaactattcgttccagtgcacaaagaatcagaagaaatcataacccgaaagaatggcgactacctactttcctcctccacctcaggaccctcaatttcctccgcccccaagatccgcaacttctcactcgaatccccaaagcctctccgatttctcgcaaccgaatttcagtttccccccgccgcaacgacaacaaacagctcctgccgtgagcccattcgcaacggataccaatgccacagcgtacaccgcgaatggggatatcggcaatccatacggatcaaactccgtgtctcctccccctcaatcatcgacgcccccagcggccgtacagccccaagctgcccccgtcgtgtcggccacaagtcaagatgaagtcggcacattcaacggtggaagctaccgcatcagccaccgggacaccaactcagtgctcacaatgcagctggca

SEQ ID NO: 2060 - DNA, 499 bp, Aspergillus oryzae
tcttgactattttctttcatttgttcagcttagtcctctacgtataagaccatggccgaccataaagcgggcgaactagatctcaaccacggcaatgcatctccatcccaagaaggaacagcgatgccagcactaacaacggttcctacctcaattacactgtcgacagaacagttcgagaaattgtacctcaccccattgagacatcgccagccagccttaaccaagacatttggaaaccctacaccacttgccctgggtggcttcgtggtaaccacaacgccactatcctgttgcttgatggcctggagaggtgctggtgggaatgggattgcgttcacgggacccatcatcttcctcggcggaacgttactagttatcactagtattttggagtttatcctgggaaacacctttccctgcgtcgtctttggcactatcggaggattctggttcgccttcggtgcaacccaaatcccagctttcaacgccgccgccc

SEQ ID NO: 2061 - DNA, 598 bp, Aspergillus oryzae
gcagatcaagagcgcgaagaggctccgcataacaggaacttcaagacgccccgacgcggccgaggtggcggaagaggagattggatggggcgcgacaaccgtgcaactcccggccaatacgcccccgctcccgcgggtggatttcctgtgatgcctccaaccttcccttcgtttgatcagaatgacccgatggcggcgatgatggccctccagagtatggggtttccacaaatgcccggcatgcctcctatgcccatgccagctcctggtggcggcgctggtcagccacaggatccaatggcgccaaagagctcagaacggtgtcccttctgggatacacaaggcatatgctatttgggcgctgcctgtccgtatcagcatgacacacctggtattccgaaggaggacgaatatgacccgaaatcatccaatatcgtgacggactttcagagacggaacactgacactccacatcgtggcagcgacagaggccgaggccgcggccgtggtggggacaggggcggatttggaggacggggacgtcgatccgagtactctgcggcaggccctaacgaggatacttctatcaccactattg

SEQ ID NO: 2062 - DNA, 510 bp, Aspergillus oryzae
aaaatacttttcatggccgaagcacccgttcatatgccttgtaactatgtatacgatttgtctctgttagcttccttacctaattcacttgttcctttgctcccgccgaccggtatacctagtctgcggccccggccactattcaatattggcattcatgatatcccgtatctttcttcttttgcaggtgtctcagccaacgcccagccagatgcttcttggattgcctgtagcacagatagcgtgctaaccatgaagtccgagctctttgatgtccttgtcacgttgcctgccccttactctaaggatgcagccgagaaagtgttcccaaagatatccatattgccgatacccaccgcgaaacacaacacacctcaagcggtacagttaaaggcaacccagcgggatgcacgccgttatgctacgcttcgcaaaggcttgcgtcaagttgccttgagcgaagatggtcgatctggcgaggaggatgattctgatgctgcatcgacatat

SEQ ID NO: 2063 - DNA, 498 bp, Aspergillus oryzae
cggacgcgtgggcggacgcgtgggctttcttatccgtgaaataccacagacacgactctcacaacagtcaatattctgcttgaggtcttggggagctcggtgctatttcacctgtcttgattggtgcctctaatttacaccaaccagtgcctctcctttacagctcaacttaggccactcacagccaactttaccttggcacttacaagcaatatcccacacaatccagacgcaaagacacccgatattgtctgtccactgtgctcttttctgaataccctacctgacttcccgagagaattacccattttccgagtctgccaaagaacaagttgcaaccaagtccaccttctatatcctcggccccctcttacatttattggaacctgccgcaaggctcaggacagcagaagccgtcatttgttttagctctgaccctcttgacttgattctctacgatatcgcgaggcctattttcacgaacaccttcgacaccca

SEQ ID NO: 2064 - DNA, 378 bp, Aspergillus oryzae
cgttattctaacgcagatgacgatgtattcggacgactcgaggacgacaaaaagaaagaggatgccaaaatccaggcagatcttaaatccaaattggacagtgtccgcgctgcacccgccgatattaccgccaccatcaacaacctcctcaaatccttaggcaaagctcccatcaccaagccgaaccgcccatcagaatctgcccctgtaggccaccctattgacgttcttttccctggtcctcgccctacggctagcgctggtcccaaaaaaaccgatgaggatcaggaacatcaggagcggcttcgcaaggctctcgagaatgcaaagaagagaaatgccgcaaggaatactccacaaccgccgaattaggtattt

SEQ ID NO: 2065 - DNA, 659 bp, Aspergillus oryzae
cccacgcgtccgggagaggtccactactacatatataaatcacatcctcatcctttcgtccaccagagttgtagtcaaagcacatccaagtgaccatcccaaccctaacagacacaagaatggatcaaccagtccaactcctctcctaccaacgcctcaaatcaaagagtaccttcattatctccctgcaacacggaaacggcaccgcaactcccatctacgaagtcgcatgtttatcctcgaaaccgaacctctccatctcccgcctgcagcctgcataccagcagcaaccaccaccaccgcctcaatatggctatccaccagcaccaaacccatactaccagcaaccataccctcctccaaacccatttccaccccagcaatacccgatgcacccccaatatccaataaacaacccaccacccaccaaaacaaccataggaaccgtttccctctcctccatgtcctccaaaatcaccatctcaattcacaacatccccgaactcaaaatgaagcgtccggacttcctcgctccgggcaccaattcacccatccccgctacggcaccctcgaatggaaagaaagcgatctccttgagaaacgctttaagcttgtcgactcgaacaagaccgtgctggcccggttcgataagtggaagt

SEQ ID NO: 2066 - DNA, 575 bp, Aspergillus oryzae
atcctctctaagcagctccagtttcctttgttattctcacttcatctttgggtcggctctctgcctccgtaagcgtcttcctttcttctctttgataccatatcgtctcccatagaattactcttacatagacactatcttgtccccttctgtctctttcaaaatgacacaaaccaaggtccctccaacctcttccactaccgtgaagcgttttcctcatatccatgatgacccggcaaccttgcctaagtccttggaccccttcactatcaccacctccaccggcttcttgcccttcattatgtcccctaccaagctgcctgatgccttcaaacctttggagtccttgcttgaacgtcttcctgtggagaagcttgatggtacccctggtcttctggctacctatgaactgggtcctgccgtccaggagcttcctgacctcaccgccgaagttgacaagcttgtcactgctgatggctccccagacctctatgctgtcactgccgttttccgtgattactccttcttggcttcgtcttacctgcttgagccatgctgggagaactggagcaaaa

SEQ ID NO: 2067 - DNA, 517 bp, Aspergillus oryzae
cgccccttataattcaatctctccaccatgctctatgccgaagacgataagctcatctttcgcttcgatgaccatctcctctggattcagtcatggggcgagaacgcattcagagtgagggctacgaagctctcatcaatacccaccgaagactgggcgctatccacaaagcccagcgcaagtgagcccgtcatcgagacaccagaaggcaaagaagcgagcatctacaacggcaaaatcaaagccgtcgtctcccagcgcggcaagatcatcatctacgattccaagggaaacaagctcctggaggaatacgctcgccatcgccgtgatcccaaagacccgaaatgcagcgccttagaggtcgaagctcgcgaactgcgaggaatcctagggggcgatttccacctcaccatgcgattcgagtcccttgacccgaaggaaaagatcttcggaatgggtcaataccaacagccatccttgaatcttaagggtgctgatgtcgaactggctcatcgaa

SEQ ID NO: 2068 - DNA, 528 bp, Aspergillus oryzae
cttccttccttttcgccttcaactcttcccattgtatacccaaactggccagttgaacatttgggattgaaccatattgatcaacacttgcgtggttatacataatctataaaatcctgagccgggtagaaggccagctgcttcaatcatggctttcagcagagtaatgctgggcttcctaggcctattcttcacggccggagctctgctactgatgttcctgaccctgctcggaggagcacggaactcggtccctttgaacgaaatctacttcctccaagtcgacacaggcaacattccaggtgcaccatctgtatcccgatggacattctggaacatctgcgctgtcggcgacaatgggaagagcgattgtggaacctcataccctgacttcccctttgatcccccgagccaccgcaacttcgacacaacaaccaatatccctgcagccttcatcggcacaaaccactacttcctgacctcccggttcacattcccattccttattatcgcgcttttcttcggcgt

SEQ ID NO: 2069 - DNA, 299 bp, Aspergillus oryzae
atcaaacatgctcttcgacggcgcgtcgctggttctctacatgtgcggaatcaccgtctacattgccaatatcgttaaggggttgaggttggtcagcgcgggcaagtatggggaggatttggctacgagtgaagaggataaggggcagattttgggacgggaggattcgttgaaggtgcttgcggctagcaatactattcttgcgttggttttgattggggttttggttttgcaggcggggcagtggtatgcggagcggaaggatgcgcaggaggtggaggatatggatgggaagaagg

SEQ ID NO: 2070 - DNA, 426 bp, Aspergillus oryzae
cggacgcgtgggccggttcggtcggactcgcctgaggcactggacttattctacctctgtgctttcttttatccttctttaataaataattacatactatctcccgtgacaccatgaggacgtcaactttggtcgctgcttcggctggcacggtccttaccggcctgttggcttatgccatttactttgaccacaagagacagaccgaccccgagttccgcaaatccttgaagagaaacaaccgtcgtctggcgagagctgtgaaggaggaagccgaggctcaaggagcccaggaacgggaatccatcaagaagtctgtccagcaggctcaggatgagggtttcccgaccgatcttgaagagaaggaggcctacttcatgggccaagttgcccggggagaatctctctgcgctgaaggctcagaca

SEQ ID NO: 2071 - DNA, 557 bp, Aspergillus oryzae
cccaattctcatctcgctcaaagcattctttcggacgggtttcctcagcttgaggcgctccgtgcaccatctgatatagagccacctggtgtccaggctgtttgccagcccattcccagaggacaggctcttcttcagcccgatcggtatagtctccctcgcagctcccacggctccgttagcacacgaccaatggccttgccggcgggaaataacctcacatcggctcggatacgagcccagacgttcatcgacatggctgcgaaggacacggaaactggaatgagagtactcgtcactgaccattctgacggttatgtgccggataatgccttggaagacatgtcagatgacgatttggagatggacatggacgagtctgtggaatgggattcaccagagcggccgagacatgataagttacctgagaatcgcgacgggcctgttaccgtgtgcgactttaggatgcccgcttacatgggccgagtgggcagcaggaggagaggccaagatgtgtccattccacggttcatcctgcgccctgatatacagggaca

SEQ ID NO: 2072 - DNA, 551 bp, Aspergillus oryzae
gaaaaaccacgtacccgccaataacgaggtccgcatctcgggtggttattccacaaaggatcacgataatgctgagctcgcgcgcttgggaaagaaacccgttctgaagcgaaccttcggaatcttgtcgagtctcggtttcagttgtaccattctcgccacgtgggaagggttatttggtaccttcctcatccctttgcaaaatggtggtccagcgggcgcggtctactcgttcatcttcgtctggacgggaacagcatgctccttcgcggtgctttcggagctggtctccatggcaccaacgtccggagggcaatatcactggtgtgcgatgctttccccgccgaggatgatgaaatgcctgagttacatcaccggctgggtgacaaccattggctggatgtctgcttttaccagtgccagcttcttggcggggacggaaattcagggcgttgtgaccctcgcgcacgaacattatgatcccaagccatggcaaggcaccctaatcatgtgggccgcgatattactagctctagggatcaacatcgtcg

SEQ ID NO: 2073 - DNA, 561 bp, Aspergillus oryzae
tggattgatgcgatttgtatcaaccagaaagatgaccgggagaaatcccaccaaatccagttgatgcgaacaatctatggtgaagcttggcgagtcatagtttggcttggagaggaggcggatcaaagcagtgaggcacttgaagccatacgtaaagctgcggaagatgcttctgtagacgatttacctaaaggctactcccgtgacaggccagacagagaaaagcatcttccttcctccttggcgctggtgcaacgcccatggtttcaacgaatctgggtaggatgccgagaccctgtaatcgagttttaatgagtctttcctgactagtgtgttctaggtcctccaggaggtggctctggcccgggacattataattatgtgtggtcctgtggagatgaacggttacgcatttatctcgggcttgcagagcttagaagttcttcgcacagctcagccgaagctacaaggcttggtgcagtcagcatattatcttatcaaagatgcagtcttccgccctagttatcgattcaacacacgtggcacactgtccatagggga

SEQ ID NO: 2074 - DNA, 558 bp, Aspergillus oryzae
gactagttctagatcgccgtcaccgctactactactgtatcgccttctatctcactctccccttccgtatcctacccgttttaacaccggaaggctccactaatcaatacgatctgtggtccgtccttgtcattagcctttcatcaaaatggacccctcatctccgcaacacccctctcaggactccccgagaccgacccagaatttgtccgccggttcgcgggcgagtctgagccatcgacccgccagtcggaagcaaagctcagactctacatccaataataagaatgctcccattccagatgatgaacatggggcggatatgcccctgaccatgtccgcttcggtggtgttaaccagcctaccgcgtgatgcccatcaagcgctggcagatgccgaggccgttgataaggggaaagttacagtccgcttccaacctctggcttcagcgcccatactgaaaaacaaggttttcaaaatcagtgcctcccagaaatttgagactgtcgtcaagttcctcagaaagaaattagattgcaaagagacggattctgtttt

SEQ ID NO: 2075 - DNA, 597 bp, Aspergillus oryzae
ggccatggaggctattccactcctgaagaaagcccgtgcagacggaatttctatcactgcagagacttgtttccattatctatccctggccgccgaggagatccgggacggtgatacccgccacaagtgctgcccaccgattcgctcacagcttaaccaggatgccctctgggccgaattggaacgccacgccgaggatggtgtcatcaagaccgtcgtgtcggaccactccccgtgcaccccggatctgaagctccttccttcccatatcccgggtagctgcacctccaagggcgatgccgccatcgaaaagaaccaaggcagcttctcctccgcctggggcggtatctcttctgtcggtctgggtcttccaatcctgtggacggagctcagccgccggaagggtctcacctctgctccggaggataccaacaccaagcgggccctccaagacattgtacgcctgtgctgtgccaacaccgcggcacaggttggacttgagcgccagaaaggtgatctcgtccccgggtttgacgccgacatctgtgtcttcgacgactctgccgaatgggtcgtggagcctagcaccatgctctt

SEQ ID NO: 2076 - DNA, 518 bp, Aspergillus oryzae
ggttgttggtttgggttgtgagttcttcaattgatttgtttatgctcggttgggtttgattatactgtgaatggtgattggggttcttggtttactcttccattgtttggttgttagctattactgggatgagtgaaagtgtcatggctcctgtcggacctcgtgcctcgaaggaggagtttatgcaggctctggccttggattcgcaggatccccagcatgagcagatttacagggctatgagggatgaagcgatcatcgtttacaatcgtcttaacgaagatacctcgcatctcctcgatagcgtagcgaacgacccgtctacccggccccccttcttctggcatcatatccgtcccgagcgccaacggtgggggatcattgagatcgcgcagaatgctggacccttgactcgtcctttcttcactcgcggcgctacggccggtgagtacggtccgaattgggtgtcggggtggttgctgtacagtgtgttccggtcgagggatgttcggaataat

SEQ ID NO: 2077 - DNA, 545 bp, Aspergillus oryzae
gaactttttgtacaccttctttttagtctatctttccttgttgtctcttttcaatgactccagaaggacgtgataccgccggccaggcgctgggcaatgtaggcatttcacgcgccagggattatttcgccgttcctgctccgattaagcgcatctttgatcaattccctctcgtcacttattctcctaatgaccttcctcaacgtggtgcttcgaaccggactggaaatcggttatttgtgtttactgatgcggcgggtgcgaaaagtcacaaaccgtcattcaatccgcagtgtctcaaatggcaggcatacttaagatttgtcggcatcgagtttgatattgttccttcgaataatcatgcttcaccaactggtgctcttcccttcctcctcccgggcctaccagtcaacaacaacgccccgataccttccagcaaactacaaaagtgggctattgaacaagtccactgcgaagaagagcagcaattgaacttgcgattcgaggtatatacatcattactggatcatcggctacggaatgct

SEQ ID NO: 2078 - DNA, 410 bp, Aspergillus oryzae
ctctcagcaccgaacaacacacatttactaatagtacaggtatgctatactttttacacctcaccatgaatccatatgccccaagtgatcagacatcaattctacaacaaaatcctggaggggagaggggaataaagcaacagttcaatccacaaaccaacagtctcctatatgatgaagatttttctcaagaaccggtatttttaggaagagccggaagaggtatgacaggatacccaatgggatcctcgtcgtcgatgcttataatggttcttctgagtggagttaaacttgttggtttgtggatggactgaagctgcttttgtcttgtttcagtgtcacatcttcttcatgtcagggaattgggaacggtatgctgatgtgttatggtataggtttcgtcgtttttt

SEQ ID NO: 2079 - DNA, 427 bp, Aspergillus oryzae
gtgaacatacccgcatgcgctgatttcgaaacttcaactggctgcaccttatttacgaactgaaccgcttagcctaagaatatgtacacaatgagtttgtgtatatcaccttcgttgctaagggggccctcttctggacctcatcctcgctgctgctttcatacgctccaaggcctaacatgattgcaagtcttaggtctgatcattcgtttgagtgcgcgcactctcgttttgcaagctatagagtatggttaaggctgaactgttctaccgttaaatgccagtcaaagcaacagccacaagcctgagactgaattggctttataattccaatacataggtactgtgctgttctgcttgcagtggaaagacagttcatgttccagtggagaagtgaaagctatcggcttatataagccgaaggcag

SEQ ID NO: 2080 - DNA, 443 bp, Aspergillus oryzae
tgaaacaatagtcaacatggctcccagcaaccaggacagggcagttgctagtcgcggcaagacgtataaacgcgggtacctggcctgtattagttgccgcgctcgcaaggtccgatgtgttctcggtgataagccaccgtgtgctaaatgcgagcgggaacaccgcgaatgtgtgtttgaggcgagcagaaaggcggggaaacgccgacaggctccaagatggtcactggcacaagaccatacctcagagagcccgcaaggacagaggatccaagggcaaccatcggaaacttggcatcaggatgcagataggtcaccaagggtgatatcgagtgtcgcgtccgagccggacgcacatcatgtaattgattctgacgcccatgataatccatccctttctggtcggattatgtctacaattttggcgcggcccagcgatgcgt

SEQ ID NO: 2081 - DNA, 454 bp, Aspergillus oryzae
attaccaatgcccacttccccaagccttgactccgttggaccacctttttcgatcctgttattgcggctgctttgaccaccggcaactaactacgactttctactactttcccacttacgcctctccagtctgcctttcttttcttttctttttgtttttctcttttctttttttccattcctgtaactacataagacttctttatttctttaacctccaatacctttttccggtcctgatctgctatccttctccgcacttctgtcgtttcagcccgtcttcgactctcccgacacctgttgagatagttgattctcacctcgaaacggcgcaagagtatgagtgacggtgttttctagagatctgctcactatggatggctccatccctccgccgtccgctatttctcccatttctccctcgccatccacttcctcagccatctttcgcccc

SEQ ID NO: 2082 - DNA, 429 bp, Aspergillus oryzae
cttaggatgggccttccactatttccccttctacctcatggcccggcaactctttctccatcattatcttccagcgctttactttgccattatcaccttgtgtcaagaattcgacttccttgccaaccgtatccatgctcttggactagcatccaggcccgccattggcaaggcgttggccggtattttcctcgcactgagcatcttcactttcacactttattctcctttggtctatggcaacccctggactccagacgcttgccgcaaggtgaaactattggacacctgggatttcgactgcaacactttccatactgaccttggccaatatgtaacccactttacaaataccaatgtcgctataccaacaacacaggcacctcctcctgaggcccctgtagcccctccaccacagcaagaccaaca

SEQ ID NO: 2083 - DNA, 440 bp, Aspergillus oryzae
accagaccgaataacttcaataatacgactgtcaactgtaaccatggtgaaagtgctcttgactggcggcagcggattcatcgcagctcatatcatcgatatcttgctgcagcgtggatatgagacagtagtgacagttagatccgaagaaaagggacaaaaaatccttgacgctcaccccagtaccccgaaggagaaactttcgtatgttattgtcaaagatgtcgcagaagaaggcgcattcgacgaagctgtcaaatctaacccacccttcgactacgtcctccatactgcctctcctttccattataacgtttcagacccagtaaaggacttcctggacccggcaatcaaaggaacaacaggtatcttgaaggcaatcaaagcctacgctccgacagtgaaacgtgtcgtggtcacatcctcctttgctgcaattg

SEQ ID NO: 2084 - DNA, 309 bp, Aspergillus oryzae
atcgcgagcggcctggagtttgtttccaagttggagacgaaccgtcgcaagcgtctctgccaggaaatcaagtgcgatgttgtcgtgcgcgagtttaacaactctgccaagcggaattagagtggctatggacggagtcccttgagggattagacagctccggccgatttgtgtaattttggatgtaataatttcgggtttataactggtttatatagtccgggcgtttacgggttgcatgcacgtcggacgttgtacctatgctatatatttcttttcccatataaatcgtcagtctaccaatgttcg

SEQ ID NO: 2085 - DNA, 303 bp, Aspergillus oryzae
cctgaagcctggaactgtctcgaggaatctgaaaaacgtgaaatactcgatctactccctgaagacctacattcgaacctggacccttcaccggacgatcctggtgcaaagatcccccctttaccagaagagtttctacgttactccaataattggcgagacggcattcgtcactttcagctagatcttcaaaatggacgctacgatcccgtttggctgcggcaggcgggagaagccatgcagcagcgggcggatgggaagtttgacaagtttaaagaagaagagtttgagcagttttggggg

SEQ ID NO: 2086 - DNA, 326 bp, Aspergillus oryzae
atttgagatcccagctgaagagggcgctgcggatgaactggagacattctaaattccggttgcgaaacgtttgtcccatttttaataccccctcatagtatggctagcgttgcgtgggtggttttgacccctcttgttttgattggatttcctgttgctctcctgagttggatcctcgccaagttgtcggggagagagagagagcttggcagctggcacgaactggagagcgagaaaaccatgagctgtgtctcgtggacagttatgataggacatttgaatttccgtcagaccccggacgagagtccaatatagaattcttctct

SEQ ID NO: 2087 - DNA, 400 bp, Aspergillus oryzae
cgacgacgcaaaacacggccacccacaccacggcgacgacgacgtccactcagacccaactccctgggtctatctcgcccggcaacgttcccgtcgagccgccagcagactcgaccctgattcagttgggattcaatggcaagctgcgctacagcttcgtggccacgacgccgctgtcttcctcgcagatcttcctttacgttccgctcgctttggagtacgcactggagatcctccgaaaggaggtgtccatgttggcgatccagccctacgacaactcgaagagcacgggctatatcgctaccgtcgccatggggtacattcccaccgatcaggtggacgcgttgcggaagatgctgaacaaccccaactcgcggctttaccagcaggccgatggctc

SEQ ID NO: 2088 - DNA, 418 bp, Aspergillus oryzae
actacttctactgagtcgcaacttctcttgctcggttttttcttcacacatctcagtgagactttttttttttaccagcgcaaagcgatttatttgacttgagcataccatgccttctcttgttggacgggatgttggccatactggctatgggttgatgagaatgacctgggtgcctcaaccacccccgcaagaacaatgcttcgaggctctgaacaccgccctcgcccatggctccaatttctggaacgccggtgaactctacggcacacccgaatataactctttgcatctgctccatagttacttcgcccagcacccagagaatgcggacaaggttgttcttagcattaaggggtgggttgaagccgggccagctggtgcctgatggttccgaggccaatattcggcgcagtgt

SEQ ID NO: 2089 - DNA, 380 bp, Aspergillus oryzae
gaagcacatctaccgagtccaagttcttcccggcgttgatgaaagtatgggaaatgaatttcgatagctctacagcgcgacgtgaagctgtggagagtgtcagccttgccgacaatcagctcgcaaatattacggtcgtcacgacattagctcaatcattccctgatctaaagaaccttgacttatcgaataacaactttaaagactctcagtccttaattggatggagatggaagttccgaaatctggagttccttgacctcaccggtacccctttcagcgcagatcctactttcaaggacaccatgctcaagtggtatcctaaactacgatttttgaacaacacggaagttcggacggcggaggaagtggccgcgcag

SEQ ID NO: 2090 - DNA, 447 bp, Aspergillus oryzae
gtctacaattcttacgcccagttggtggtcgtagccatgtcagacaaggataggcgcgggcacccggatggaacatggattgctgagttggatatatgtattgcaaaaggcgcagagatcccggaaggggacacacatctcctggaacgtctcgcgaggaatgaaacaccctcagatctgcgctctgaggtgtgtctttctctggcggctggctggctggacaagtgctcgcgggagcacacagagtgcgatgcagacaatgataaaccagccttgcttcctacacgcgtcatcgatgtcgggaactcgatgacaccacctcatttacatgtaagtggggacggtgaaacagggaaatgggtggcactgagctattgtgggggcgcggactcaagcatcactctcaatagctcatcttttgagaatctccgcagcggacagcctctt

SEQ ID NO: 2091 - DNA, 438 bp, Aspergillus oryzae
cggacgcgtgggcggacgcgtgggttccaggatccgaacaacctcatgatcatctatcgcaatatccttgaatcgatgaccgatcctgaacttcctgtcagggttgaagcggcccttgctttgcaaccccttatccgccacgatatcattcgcacttcgatgcagcagaacattcctcagatcatgcagcagcttctcaaactcgccaatgaggtcgatgtggatgccttggccaacgttatggaagatttcgtcgaagtgttctctgctgagctcactccgttcgctgtggcattgagcgagcagcttcgtgacacatacatgcgtattgttggtgaacttctggaaagaaacgccgccaagggcgacgatgaatatggtgacttcttggatgataagagtatcactgcccttggtgtcttgcagactattggaacc

SEQ ID NO: 2092 - DNA, 476 bp, Aspergillus oryzae
tgactggggatgtgctgaggataacaaaaggtgcggcattatgtgtattccaaggagcgaggagtgcaatggcgaaactggtggctgggattggtggaagaggagccttgaggataattcccatgctcttgcagtgcgctcgcctgattggggatgtgcggacgataacaagcgatgtggaatcatgtgtattcctaagacggaggagtgcaaccccaactatggatgctctgacaataacaagcgatgtggtatcatgtgtattgacaaggaccaagaatgcaacagtgaaaccggcggctgggactggtggaagaggagccttgaggttaagtcccctgctctcgcagcgcgctcacctgacggttttggatgcgccgatgacaataagagatgtggttggatgtgcatctccaaggatgagcaatgctgtggcaaccaaggcagctgcagcgcgaatgaagagtgtcacaaaa

SEQ ID NO: 2093 - DNA, 204 bp, Aspergillus oryzae
gtcaggccgtcggtaacaaggcttcctgcgaagatggcgacgccgttgtcaagactgccattgacgctttcggacgtatcgatatcctggttaacaacgccggtatcctgcgtgacaaggccttcaccaacatgaacgacgacctgtggaaccccgttctcaatgtccacctccgtggtacctacaaggttaccaaggctgcct

SEQ ID NO: 2094 - DNA, 453 bp, Aspergillus oryzae
cggacgcgtgggcaagcttcctagatatcaattcgtgcaattattactatgccttctacatactcacgaccccaagcaaccttccttctcaacctctctgagatcatccaactttacccagaggaagaaccatggtgcgcaggatacgcaccatcacagcgtcgtcgctgccacatgccaacaaatgctcggaaccggaaaaccgccatgtacttattagacgaagggaccaaagacatccatgcaggacgagacatcaacgacctgctcgaagacctggctccttatgttctgtgcacacgattccacaagaatcaggcccctgaacttgccgcaaagtggaagtggcaagttcaacgattcctggcctcctatatggtccttgctcctgctcaacgagctgcccgagagggacgacaaattagctctctggcaagatccaggcaaagtgta

SEQ ID NO: 2095 - DNA, 478 bp, Aspergillus oryzae
cctcgctaggtctcataagttagttgcctgggcggtgtacgatgttcaaggccttgcatctcaagtttatagaaaggtaccagcctggaaagagcctccgcccgtgaaattctccccaatcgaagcggccggattagatgcaggtgttgaatggagtccctatccgttcgcgactcctatttcccagccattcttcttcacggcggcgtgcttcaggtctgacctagttactatagttcatcaaattgccaagtttgcccttcagtttcccgatgcggtcatgaacaatgatgattgggagtacggccgccaattgcaccaaaagctgctgcagtggaaggccaccctgcctcctgttcttctacttgaacataataccacacccacgtaatctgcttacatgaatattactatgcaaccattgcatctctatgccagatcttctgtgcaaacctgggctccacggatgaccagattt

SEQ ID NO: 2096 - DNA, 408 bp, Aspergillus oryzae
gccccctccctactccgagtccccaatatcaaacactcccgaacaagaaactttacctccaactaccctcatcctatcaaacaagtccatccacacggaaaccgccccctcaacgcccctctaccaagtatcccaagacatatcatctctaccccaaaagttcacatcagtaaaattcgaacggctagaaacgagcacaccattaaaacccgaaagcaaatctacggaaccagagaagaagcatatattctaccttgctcacccggcgcatgcacagtaccggaaagatgttcccgcttattacattacgtctgtttcccctgggtctctgggtaatattcgctttgaggtgagtaagtcgcggtttcagaagatcgacttagggcgcttcttagtccgaggaagaca

SEQ ID NO: 2097 - DNA, 404 bp, Aspergillus oryzae
atcgagttccccagcaccgaacttgccagtgatgtggtgaccatctcaggacctgaataccaggttccgcaagctgttgatgctttgcttggaatggtcccggagagccatgagctccttttccaaagctctcacgaacttcgcgagtacttcaagtctgtcgaattccgcagcgacgtttgcgccaagctgaaggagcaatatgaagtcgatactacggttgacctcagtgctgacttcccctcctccgaaactagttcaactggctcagtttcaccgactttacctcccgaggaccgtgttgtgcttggatacactcggaacaatgccggtggtctcaaggatgcgatcgattttctaatctcgcgcttagtgggacatggacttgatgctaataccgtcaa

SEQ ID NO: 2098 - DNA, 390 bp, Aspergillus oryzae
cccgtacgagtcctgggtctttgagtacaactcatcgcacgccgtccgtgtcgtcgggcgcgtcgcctccgcatcagtcgcttcagtcctctcaggcgcctttaacggcccagaatgcgatgtcgaccgacgtgtacacttcatccacgtcgcaggcgtcaacatcactaggtcccactttcacctatccattcactcccctcggtccgccgtcggccttcgataacatgccttccgccaccatgcgcctaagcgacgctgatcggtcggcgcagggcctcaacggcttcattcgacccggagcgggcggcgcgatcctaatgcgaaaacttccgaagagcactagtctcgagctgttgcgcagcatgcttctctttgctaaagatctcg

SEQ ID NO: 2099 - DNA, 445 bp, Aspergillus oryzae
acattcgactatgataagtcgaacacctactggcgtttctggtatatgatcgatatggttctcggaactgatatttgtggattgcgggaggaatcatgatcactctcaattcttgctcccattcctctaccacttcttaccaactacacctaaacttagcaccggcgatgcgaagctttgcagcgtcagtcaatgcaagcccagcttcgggcccggagtctttcccgccttaccccgccgacgactgttggcgcgagctgacgttattcgggttggcagttttcgtatactctatgatttatggcatttactggtcggaatcgttcttgattatgcatggaaggcgaaaggaattaataaactggtcgcatggtacctgtctacggcttttcgtaggattatagtgtttaggcacttatataaatgtcgatcttggctttgcgac

SEQ ID NO: 2100 - DNA, 662 bp, Aspergillus oryzae
cccacgcgtccggggttagatgcttctatcatattgtacaattctaatcgctagtgtttaagggggcttttgtgtctgtatggtcttttggtctcgatttttaggttcttgaggacacggccgtctgtcgaatatgagggcggctgtgctgtcgggtgtctgcctttggggcgttggcgaaacgacccatcggcgtgcacggatcgaggtggtatactatttcgccggtggcaggtcagtcgcgcgttgcttgtggtgttttggctgggagacagggtcaggggactttagggttcgggctccctgtgtccatgcaggtgcggcgattcgcgcattttgatgccatccaggaggacaagagggagacgagggaggagctggagaggcttgagatcaaagagaaagaccggcagcggagtgctgagagcgaagatggggagcagggctcgcagtacgaagcttgcaaatgcaatgtccaaggggaaattgttgacgacgccgtcgagactcttcaggttcttattccgtacctactgctagtcatatagtaacatgatgacattgagcccgatagctatcctgatacatcctaacagccgttatcctacctcgaacgtctcattcaggatgagattcccccaatttcaatcgatggtgctaag

SEQ ID NO: 2101 - DNA, 488 bp, Aspergillus oryzae
ggggaaaaaagggaaaatcaatcacaattgttcgaccatctttcttacctctccgaccaagcctgagagaccactgattcttatcttctttattctggccctcaatgcatattctggttgtgaacgacgacggccctccgtcaaatcagtcgtctccttatgtccactctcttgtcgttgcgctacagtcggcaggccatgtggtctccgtagtcctcccacatcagcaacgatcatggatcggtaaagcccacctaatcggcgctgccgtgaagcctacctatttccgtcctggaacgctgcatcaagacgatggaacgacgcacgacctgcctcggggaagtgaccctgctgacgatgaagacgacgatggtgatgaatggatcctcgtcgattctaccccagccagctgtgtccagattgggttataccactatttcgaggaccgtggccctgttgacctagtggtgtcgggcccgaactacggc

SEQ ID NO: 2102 - DNA, 374 bp, Aspergillus oryzae
cccacgcgtccgcccacgcgtccgcggacgcgtgggcggacgcgtgggacccgctgaacttaagcatatcaataagcggaggaaaagaaaccaaccgggattgcctcagtaacggcgagtgaagcggcaagagctcaaatttgaaagctggctccttcggggtccgcattgtaatttgcagaggatgcttcgggtgcggcccctgtctaagtgccctggaacgggccgtcagagagggtgagaatcccgtctgggatggggtgtccgcgcccgtgtgaagctccttcgacgagtcgagttgtttgggtttcctggatgtactattgtgaaaccgagataggatgttccaatacagatcctttttcatcgtacag

SEQ ID NO: 2103 - DNA, 502 bp, Aspergillus oryzae
atctttcaccactaaagaaccatcaatagtttgatctgaacttcaccatgcaacttatctctatcctgacctccctcgccttgaccgccaccacactcgccgcacccggcactgatctcaaggaagcagaacaaatagattcaacttccaaggccgcccaggccggtaactgggagtattgtgccacagacttctggtgtgatcctttgacagactactaccaagcaggtggttgttatcagcaggcggattgccggaacaaagcgaagagtatggataccacgaactttagctgcggctacttccgtccgtacacctgctgggtttatacagattagatgttgccgggtttatggccgcggtttggccgggctccttgccggaataacacgatttccgagacttgtcgtcttggtaatgatagcccacataaccaatgcaattcaaactactataacgtcgaagacggtcaatcccgaggactttagttagatgagcacct

SEQ ID NO: 2104 - DNA, 478 bp, Aspergillus oryzae
atgattattagtgatcattctttttcttctttacttcaattcttctatatcatccgtgcttgccatcctttcttacctggattttaatctacaacggatattgaactgaactgtgatcatatctatatctgcttcctattctacatacatacacagacacatcactagttactagaccaactagacctctgtccataacccaattgtcaatctatcaaactgcctcaattgtattgggaccatggacccatccaccaccttcgatctaccagcgggagactacccagctatagatatccaaaacggcctcggcatctctatactcccctccaaacgccaacccgcatacacccccgaagcctgctcatgccccccatacccaccccaacaacacctctacaccccaccaaccctgcaacactacgtcctcccagacatgtccgacatggccgacctaatcccctacacaatggaacgg

SEQ ID NO: 2105 - DNA, 376 bp, Aspergillus oryzae
ctccttgcccttctcaactccgcacaatggtaccgcgataatgacatcgcaaccgtcgacggaaaggatctgatggctgcggcttccccacagcgcattttcccggggttcaatctggtgggatacccgaaccgagactccgtcggtttccgcgatttctataacatccccgaagcacacaccgtctttcggggcaccctacgttatgccgggtttcccgagatcattcgcgcattggtgtccatcgggtacttctcgcaggagcgaatggcggcgctggagaggtcgggtacaacttgggtgcaattgactgcctccctccttggactttcggagtcctcatcaccgaaggatgttcaaaatgcagttaggcgga

SEQ ID NO: 2106 - DNA, 489 bp, Aspergillus oryzae
gctggcatctggatggcctggagagaccttgaaggtcgtgagtactaattttcacaaccacttctcatctccagttgatccgtttgattttccctctttcttacgtcttctcttcccttggtctattcttcttgccccctatttccgggctatcgccagtcagtttcccaatccgaccgtcggagatcgtccgcttattatatcgctattttcctgctccttcacctaaccggcgtaacatcatatttcttcctatattattatttctctctctttatattcccccttcctcgttcccgtacattctctatatctcctaagacactcgtttctccttcctcaatctatgaacgacacagagtcccgaagcatttgtgtgaggagagatcgatattcgtgaaggttgggtagtgtttggtggatgatataaccgccctacagcgcgccacttcctcacccctcggacgttcttcttcgactcggttggcc

SEQ ID NO: 2107 - DNA, 652 bp, Aspergillus oryzae
cccacgcgtccggatggaccaacggcttggaagtgctggcagccatgaagcgggcaattgaacaagcaggatcggtatgcgctggctggatctcgtcctgcttgttcttctgcccgggctctaggggcgatgacgaaagcttccaccaccaacagtctctgaagcgaaagggagtcgagcgagagatgaaagtatgtcatacgcagcctcatctcgttcccccgatgaagctcgccgtcgacagtactctccccaggtcaagtccgccagcctggacatcgtctactccatcactggagctggatagtaggctgtcattgcaaaggtccaaacgagcgagtcttgcttttaagagaaggtcaactgcacctttacgaatcagtgggccctcggaatttaggacagtttccagtttcgcaacttctcccgggggattccatcctgatagttttatcctccttcctcctggacaatttcgacaatttcgaccccttgagctgagcttcgaggcctccggcaacggactgccagatcttcctgagtttgatacattttcaagtagaagaagaatgcccagtacttacacgggcctccgggcactctgagaacatctggctgatatctcccgttattcccggggccaaatccaaca

SEQ ID NO: 2108 - DNA, 116 bp, Aspergillus oryzae
cggacgcgtgggcggacgcgtgggcggacgcgtgggcttttccacattttgttgctagaccttgatgtgataatgatatagccaattcttaattgacaattgacaattacataatg

SEQ ID NO: 2109 - DNA, 551 bp, Aspergillus oryzae
cctacagaccctgtacgaaagttctacattcgggcctctctggacaaggctaagcgaatgcttgacccttatacggcagaaggagaatatgctgaacgtcgcaacaatcctcttgcccctgatcgaagcattgatggtcgtttgcaagaatacctcactgaaagagactcctctttctcggaacgctcgagagctgtctgtgtctagcacttctgtcggcgctggtttgaatatggagagtcttttcttcaagttcacggaggaacatcgcaagatactaaacgaacttgttcgtcagaacccaaggttaatgagcggcactttctccttgcttgtcaagaatccgaaggtcttggagttcgataacaagcgcaattacttcacccgtcgtatccattcccgtggtgcagagcctcgtcatcctcatcctccgcttcaactctctgttaggagagatcaagtgttccttgattcattcaaatccctatatttcaagtcggcagatgagttgaagtatggcaaactgaatgtgcgcttccatggtgaggagg

SEQ ID NO: 2110 - DNA, 407 bp, Aspergillus oryzae
cggacgcgtgggttgacggtccggcacgccgccggccgcggcccgtgacggggttctatcgtgtacccaatcggataatgagacgactttgctttgggttgctcgtcgcgctcgtactcttcatcctcaccctatttcgattcacaatccgatcttccgttacacaggtccccctcgagatcccaaagaccacgccaaaaccgccccagtgggagagtttcccttttctaaagaggtatcatggtgggctgcggtccctggtgccgcgtaaaggtcaggtacctgaatacccgggtgacaacccagatgtgatgggattgggaggcgatgccgaagcgaatgcaacaaatctccaagctcgagatgaggctctgcctgttttaagttcagttttcgatccttacccc

SEQ ID NO: 2111 - DNA, 336 bp, Aspergillus oryzae
gtggaaacagacgcctgtttccatcgctgtctactacggtggaaacagcgatgaggaggaactcgacactccttcgcgtcccattgaacgacagaggaaaccatacaccgcgcatccaggaggtgggaaggagtatggtgacattcaagaacctaaccatcgacatacatcctcgttctctgggggctccattccaagggatactttaacgtcctcggagcccagagtttccgagtatcagggccttgaccctacttacgttcgacccagcactgctcagcctccttcaaccaccgtgaggcggcaagggagcccgccacgaggatccagagtagg

SEQ ID NO: 2112 - DNA, 526 bp, Aspergillus oryzae
ggcttctcccatcagcactgtactgtggctgattggggctactggcgtgtgtgtctttggccacgccgcttttctggataaaccgatcgagaatgctttttcagaggaggcggtctaggtggtcggccgcgaactccttacggtatgccccaatggggaagaccaccaggggcacaacgggggagacaaaccgggagatgggcggatccgtgggtggaaggtgacccacggatcgaggagattaatagtgaggacgagtaccttctgcgggataaccgggacttttacgcaaaacaattgactggtatggacatggatgaaatcttaggatggcggaaacggatgttggaatatgacaagctttctgatgagaccggatttgtcgatgggatggattataacttgcatgaagacggggatagtacggtggcttatgcggttcagcttgctttgaaagataaagaggaatggcacgtggaacatgccctggaacggattcgacgcgcgcaaatgctgggacagaaaa

SEQ ID NO: 2113 - DNA, 398 bp, Aspergillus oryzae
cttttttctagtgcatataatacctcactggattcaactgaggtgcgcctgacaatgtcggaaaccgcaacaacgacagctgcctccgcggcatcgaaatcaaagcccgagagattgcccattacagtctccaaacctactccatacacttttgatctcggccatctcctcgcgaatgaccccaaccctcttgaaatctctcggtccgaaccagtaaatgtctctctgaaggccaccgcccgcgatggtgtgcagtctctcctcaaccaacttctcactacttgtcctattacctcctcacaacaaggtgtgctcctgacgcttcctgctcccacaactgttcttcccagacataagcccctgccgacacccaagccacccaccaagtgggaactttt

SEQ ID NO: 2114 - DNA, 477 bp, Aspergillus oryzae
attgctagtcctgctttaaggagacttgctaagtcgaggtcagtctcagcaaaacctcaaagatcaggctcacgtcgcattagagttctggaccttgggggccatgcttcgtgtgagtgggcatggcagattgcacatgactaccctaatgtcaaggtttacaccgtcttcaccgagcatcaagcggttaaccgtggcatcaaggggcccgcgaaccaccgtcagatctctgttcaaagtctgtggcaactaccattctctaacaacaagtttgatgtgatctctactcgctcactgcctgccttattgaagagcgaacgttcctccggtgatcagcaagacgagtatgacctttgccttaaagaatgccgtcgctgcctcaagccagggggatacctggagttcttcgtcatggatgcgcaaatatcgcgcgcagggccttacgcatctgccacgtcggttgagttcacatacaac

SEQ ID NO: 2115 - DNA, 566 bp, Aspergillus oryzae
cccacgcgtccgatcctcttcctcttctctatcagttcaaagctctttcagtatttcaaagacttcaaagccatctacacttccactttatctcttctcaaaagacaaaccagataccgatctaccttcttcaagatgtacacctacactcctacccacaagttcctcgttctctctcccatccactctggtcccatgaatgaccaggctgagagcaaggagccaactcaagtccgtgaacgctccagcagccagtcttccacagcctctgccggatcgcagctgaggggtgccttctcccctctccccggtggcttcctttacctgggacacgagcaagacagaaactaaattctgacgccacataagcttgcgcacgccatcccacttcaccaatcgcgctggacacgatacatctgcaagcgcctcagcccaaattcaccctgcaccggacgaagggaaggagcactagcggtttcatttctttattgttttcaaacatcagtttctttacgagatggttccttatctctttgaatggatttttctgtttcggtgtttacctt

SEQ ID NO: 2116 - DNA, 410 bp, Aspergillus oryzae
  modified_base (178)..(178): n is a, c, g, or t
gatgtttaactctttgacaccccccgcgaaagtcccggccttcaagaaagtctacattctccaattggacttgtgtcttgtcgtagagatcaagctcttccgactcgtatccttcccgccgtgcccctccttcaccggggtgaagcggctttgtcaaagtttactgctgactctctcnacttactctctttaatgattctatcgtccgctacacaaacgcaatcatcatgtccatcaaacgggccctttccaagatcgtccccaataagattgatacaaatgactcgtctcccgctccaagcaggcgttcggggtcaatgtcccctcgacgcagtatcctgagtggattcttgcgggatcgtggcggctatgcctcgtcttcagatgatttctcagatgactcttcatct

SEQ ID NO: 2117 - DNA, 684 bp, Aspergillus oryzae
cccacgcgtccggacgatcttgtggacagaagtggtgatcgatcttcaacattgacgtctccttctgctggccggtcccactcaagtcactccacagcctccactatccgaggtcatcccgtagttttacccacaattataaacgaagatgacgaccgccgccggtctaggttcccaaacggtccgccggctatccagcctggacgccgttcgggccgacctttatggcggccccagtgtggtcgttcctcccaagcacttgatggcctccagtgactctcatgaaacggctatggcaatggaaatggccaagcaacacctagaagatgaggtttcatctgatgaggggtcaccccgcgttgcgtccccggtcctgcgagggcctttgaccaccactgatgagtttgcgctggccttcgacattgacggcgttcttatcaggggcggagaaccgatccccgcggccattaaggcactcaaatatatcaatggggccaatccgtatggtattaagataccctatatcttcgttacaaatgggtgggagggcaagaccgaagaggaacgatgcttgggatctaagccagcaactagagctgggaggtctcgccgggccaattcatttgtgggcacactcctatgcgggaagatggcggcgcggtacaataccgtccttgtcgttgg

SEQ ID NO: 2118 - DNA, 510 bp, Aspergillus oryzae
atagtttctcatcatctgtgcccatagcgtccagtgctgtccccagagaaccctcgaagcttatcggtattagtttggagtcttggcacattccatcgcggcgggtcatcgcaaatggtcacgaacttgtcggtcaacaattacatccacacttctttttcgggtcctgtagcctagcgtgaggagctacattcacagaggcaggcttatagatcttgcagacacgcctgcatactagacaccaatggcgtcgatcctacggcaaatagtcgctggtcctagattacagcacccagaagcaggtctagatctatgctatgtcaccgataaccttattgcaacgtctggcccgtcccctaactacccgaaacgtgcctacagaaacccgctcgacgatctagtaaaataccttgactccaaacatggtgaggactggtgtatcttcgagttccgggctgaggggacagggtaccccgacaaggctgtctacgggagaatacatcactaccc

SEQ ID NO: 2119 - DNA, 570 bp, Aspergillus oryzae
aaacaatccgatcatatcaatcggttggttacaaaatcgaagcccccagtagtacatccaagattcccaccttatcgcaaaaaaaacaagtccattgtcgcaccagcgccaatctcacctttctataagctccgatcaaccgaaaccctaccaagtatatatatatcagcatcgaatggactccatccccaggatcctctccagaactctcccccacctcaggacgactactccccgattaccttgtagaggaattaccgcaccctccatctcaactgccaaacgcaacatgtcaacatcaatcgaacaaaagctggacgttctgcggaactactctgcatgtgatgtatcagatgcgctactcaagctacaaaaacttcccgagggaaccacagctcgtgctggccatatagctgatttcgtccccttctcaccaaccatcggtcgtaacgaaaacacccccaaagttattgccccggcgtcaacattcaagttcgtccccaaatcagatcccgtcccgtccaccgagtcggtagagaccatggtttccccgcggggacgcactgggtc

SEQ ID NO: 2120 - DNA, 553 bp, Aspergillus oryzae
cccacgcgtccgaaaagcaaagacaaaccaccacaacaacccggctggttgatttactccctcaaaatggcgtcgccattaattctactcccaggcgacgaagttccctctgaatatctaccatccaacaattccgctcccttgagactcggagcaggtcttcgtctcctgtcgcaaccgtcgtcgaatccccccagccatgtcataactgccacgcaacccgggctcctctcaacagataacaaaagaaatgccgtctctatcctctctaccccaaaccgtcgctacctcccgacacccggcgatctcgtgatagcgcaaatccaccactccagtccggattacttccattgcatgattacaccgcaagcgccccaggcgctgctgggacagctttcatttgaaggtgcgacgaagaagacacggccgatgttgaaacagggtgatctggtttatgctcgtgtgttgtcgactggtctgggcgctggcgcggaggttgagcttacgtgtgtcaatccgcgacgggacggcctgatggaggattgggtcccgc

SEQ ID NO: 2121 - DNA, 497 bp, Aspergillus oryzae
ccctatcacacaggccgcggaggccttttccttcatgcgtagtggcaaacacatagggaaggttgtgatccgaggcatggctgccacgggaagtctaacagcagcggtacgccctctgcgccaggatataacattcaatgccggatctgcctatcttattgtaggcgggctgaaaggtctgtgtggtagcttagccttgcacctggctcagcgaggtgcccgccatctggtggtgatgtctcgtagcggatgtgcagatcgtcgctcacaagcagtcatttccaattgtgagtcccttggatgccatatccatgtctgccgcggtgatgtgtcgcgcatcctcgacgtacgacaggcttttaaacaagctcctgttcccatcaagggtgtcatacagggtgtgatgctcctacgcgaccgaccctatgagctgatgacgatcaaggagtttcacgaatcgattgagggaaaggtccaaggcacatggaacctgcaca

SEQ ID NO: 2122 - DNA, 133 bp, Aspergillus oryzae
cggacgcgtgggcggacgcgtgggattgggtgggcgtctccattccatgggtggctctctaatgaaccatagatacttggcagacacgtaccaataccctattttttgtgaattacatttccataactacttt

SEQ ID NO: 2123 - DNA, 268 bp, Aspergillus oryzae
ctctggtcgagtagtgctcgagcccggtctggatcccgggacccgtacctcggtttttgcgctgcgtgcaggcggcctgatgcattgcgcttcttgttctgttttattcccctcactgcatgttttggcgcctatgcttctaaagcattgggtttcgtgctactggacttgcatcagtggcaccttgggcgtcctttatggttttacgagcagctagtaataataatatcttctgtacatactctacaacctgtgctatcagtggtgt

SEQ ID NO: 2124 - DNA, 575 bp, Aspergillus oryzae
cccagaactgcgggcaaaatgaagtcccaatccaaatttcttttcacatccgagtctgtaggtgaaggacacccggataaaatatgtgaccaagtggccgatgccatcctcgacgaatgtctcaagcagaatcctctgagcaaggtcgctatagaggtcgctgtacggccagggctagtgattgtgtttggtgttgtccacttcattccccaattggatatcgacgccattgttcgcttcgtgctgaaagacattgggtacactagcccagaccaggagttagactatcggacgtgccaagtcatggactgcgtggagctacacccatcgttgtttaacggcatatcctctggccttgaagcacccgatgatgaaccggcaggcgaccaggggatggcttttggatacgcaacagatgaaaccccccagttactgcccttgaccctccatctagcgcacaggatctcccgtgaactgaaagccgcccacaccaatcgcatcctcccatggcttcgaccggacaccaaggcacaggttaccgtggagtatgttgaggatgaaggtaggatggttcc

SEQ ID NO: 2125 - DNA, 514 bp, Aspergillus oryzae
gacaaatctcatatcagcccctaagacaaccaatataaaaaccaaaaaaaccgagttaccatgatcaccggcctcgcacacatcaacctcctcgttcccgaggggtctcttcccgaagccaacgaattctacgtccaaacccttggtctaacagcccgtccagtcccccaggcgcaggtcgaaacgacggcgtggttcgacatcgcaggaggaccccagcaagtccatatcgcattcggcgtaaacgaatcgctggaatcctcgcgtcatccctgcttcaagattggatctctggaggatctacagaagttgcagcaaagaatctgggaccatcatgttcgtgggggacgggctgcgccgagagaggcggataagccaggggaggctatttctggtgagatgacggaggagtatccgacacggttttttgcgagggatttcgcagggaatcggttggagtttagtttgtagttgttgtcttttgcggggtgatgattgggtgggatagatggtt

SEQ ID NO: 2126 - DNA, 499 bp, Aspergillus oryzae
catttttccaacaaaaatggaccgccaagtctatggccagatcataccatggtgaacaagtccgcgagagccaatgggcgcgcatgttttcccggcgcattcgcagcgtcgtgcccatgagcccagctagattagcccaggatgacggctccggcatgtccgctggtcgtggagcgggtgtggagggcactaaagacttccctcgattgacgccctttacacagatgacatttgctcctctggagcgtcgattggatgtggctatcttccgagctatgtttgctagcagtgctagacaggctcgacagtttgttgttcacggtgcggtgacggtcaatgggaagcagatgagataccccggctacctcctcaaccccggcgatcttttccaggtcgaccccgagcgtgtcatgtatgcaaccggtgcccctaaggacaaacacgagcgtcgagagggacgtatcgcccggaaaaggtcggcggaggcgcaggaagcgga

SEQ ID NO: 2127 - DNA, 524 bp, Aspergillus oryzae
ggacggaagagcaggaacctgacaaaggactatacccgaacggttcaagtgcttgtgagaaggttgaactaactccaaacctaagaaggtgagagagagggtggacgtcagaagatccgatgaaatgcgggggtacgaccattgagtatttaattcctacaagtacaacgacgacgtactggttggtatcttcgtacatctactactactactatattggaatataacagtagtataccactagtagtgcggtgatggcttcgtataatccattttcccgacaagagtcgcacggatcctattccctggggtcttaccgtttgctggtgcctttgtcgtggttattggtggtggtggtcgggatctactacaccatccatgcccccgccgatgtcaaacatggccatggcatcttcaaccaggccaaccaccatataacgccttttagtcagagcacaacggttactgggatttactggatccttctcctcctctcccaactcagctatgtttaccatcttttc

SEQ ID NO: 2128 - DNA, 493 bp, Aspergillus oryzae
gaacaattttccttcccgcaaagccacaacgttgcaggtaaaacattcctcatggccaccaacacaaagcccgccattgtcatctgccatggctcttaccacagtcctaccccatatgaacccttcatggagaagctacagtcccaaggatttgaaacgtactgtccgcaccggccaacttgtgatctcagcaagctcaacgtgggtgatgtagaccatccagatttcgacctcgggcctccagcagagggctaccctaccgacacggatgatgtgaatgttgttgtcaaacttctggacaagctagttaacgaaggcgggaagcttgttctgctagtggcacattcatccggtggctgggttgcaacccaggcagccataccagaattgcaagccaattctcgtcggagcgaaggtaagacaggaggcctgattggtatattttacatgggggctttcgttgtccctgtcggcgagtccattcatagttttt

SEQ ID NO: 2129 - DNA, 534 bp, Aspergillus oryzae
aaaacaatttcctcagattacatttccaaattcagtttttctttctctcaattctcaactagacgtgcgagtagtcaattgactcctatctcccaactatcaagatgtctgccgatctgaagccccttcgcattgtcatggcctgtgatgaggctggccaaccctacaaggagactctcaaggcagcccttgagaagaaccctctggtcgagtccgtcgatgatgttggtgtcaactcgacctccgacaagactgcctaccctcaccccgccgtcgccggtgctaagctcatcaaggagggtaaggcagaccgtggtctcttcatctgcggtacaggtctgggtgttgccatcgccgccaacaaggttcccggtatccgtgccgtcactgcccacgactccttctccgtcgagcgtgctatcctgagcaacgacgcccacgttctctgcttcggtcagcgtgtcattggcattgagctcgcgaagaagcttgccaacgagtgggttacctaccgcttcgaccccaagagcgcat

SEQ ID NO: 2130 - DNA, 524 bp, Aspergillus oryzae
cggacgcgtgggttttcctcctctcaatttctctcctttataaacgaccgtctttcccctttttccttccctctcatcgtttctttctttttctcttgcgcgattgacgcgcatctctcccttcaatatggatatgaaccatcttatagggtcagtcttcaatgcctactggtcttgaaccagggtttgtgcggctaggctggagttaacacctggcagtcagcggttcaacctgatctccaagagtgacattcgctatgtgggcactttacatgagatcaaccctgaagcctccacaatagctcttgagaatgtcgtgtccttcggtaccgagggccggcgaggcaagcccgaagatgagcttccacctgccccacatatctatgaatacattgtgttccgtggcagcgatgtaaaggacatcagtgtagccgaggacaagaaggaagatgcaccccaagagcctcaacaggtgccagatgatccagctattctcgggagcatgtctcgtccaggacccgccc

SEQ ID NO: 2131 - DNA, 479 bp, Aspergillus oryzae
cggacgcgtgggtgcgaaactgacttcatgggacggtcataaccgctttcgacggccctttggtgcacaatattgcaatcgaggcgcgaagttgtgttgacgagttatatactcgttgccccggtcggggtcatagtcttcaaataaattagagatactagaccagcgaaacccttttctaccactatggacgagcaaacgttcgtcccggggactatgagagccctatatcaccgaccggcttctactgccatcaccgatctgacagctttggatgcgcccagggtagattcggggattatcttcgacacggactttcctgtaccaaagccagcggcaaatcagtatctcattaaagttcaaacagcggctttctctcatgacggactaagactcgctcgaaccctccatccatcgaaatcaatccctcagattcccctacacaactattgcggcatagtcatcagcactcccactca

SEQ ID NO: 2132 - DNA, 578 bp, Aspergillus oryzae
caccttccagcaggctgatggctcaacaacgcgcaggtttggtggaacaggccttggtttatctatctcgaaacgcttggtgaacctgatgggtggtgatgtatgggttacgtctgagtatggccatggtagcacattccatttcacgtgtgttgtgaaactcgccgatcagtctttgaacgtcattgcttctcagctgctgccgtacaagaatcaccgcgtcctctttatcgacaaaggggagaatggtacacaggcggacaatgtcatgaagatgctcaagcagatggatctggagccattggtcgttcgaaacgaagatcacgttccgccccctgagatccaagatccgtctggcaaggagtctggccacgcttacgatgttattattgtggattcagttggcacggcacggttgctccggacgtttgatgacttcaaatacgtaccgattgtcctggtctgcccgttggtgtgcgtaagcttgaagtctgccctggacctcggaatcagttcgtacatgaccacaccatgtcaacctatagatctcggtaatggcatgttgcctgcgcttgagg

SEQ ID NO: 2133 - DNA, 437 bp, Aspergillus oryzae
gcgcagcgcaaatttcgacttttcgtttcgccactccaacctcatcctaaaacgtcctcatatttaaacgaactcataaccgagcgacaatccccgagatttccaccattaccccagcaaaaccaaagccagagcccgcccccaaaccccaccttcaacccgcagagtcaagcaaaagacaaagcaaagcgtcaagatgtcaaccctaattgaaatttcctccgaggcagaattcgactcccacatcaagtccctgccttcaacaaccttatcgatcctctacttccatgccccctgggccgcgccctgcgcgcaaatgcgcaccgtgctcgccgccctcgcatcccagtaccccgccacacagcccccaacaacctccttcattagcatcaacgccgaagaactccccgacatttctgaaacttacgaggtcaccg

SEQ ID NO: 2134 - DNA, 552 bp, Aspergillus oryzae
tgtttagcggggcccggcgattttccagcgccattttccagactctgcagtcctgcggtccacaaaataattgctctcccttatacagtcgtccctgtcccctctcgcattttaatcctaggcgctcacccttcctttctcgacgtttcagtacgaacacccccgtcgcagctatggcatctgctgctgaccttactgtcgccgtggaggggctcaagctccagtccaccaccgagacctcgaagttccccaactcctttccttccctgaaccccgtcgatatctacagagagcatatcgccgagaagctgggtgcggctaccggcatcgattccgagaagatctatactcgtctgcaatggagtagcacattggacaagggtgatttgttgctgccggtccccgccttgggtatcaagggaaagaagccccaagagctgtgcgaagagcttgcccagaagttccccgagtccgacctcgtgctccctcctacttgtgttggcatccacttggtgttcttcttcaagccgcaacccttgacccatactgttg

SEQ ID NO: 2135 - DNA, 472 bp, Aspergillus oryzae
atctcgttggaatcccaagctgctcttccatcccgtttcaattctcacacatttgcatcgatatacatctatcaatattcattctgcaaccatggcagctcaagtactaaccgaaaacacctacctggctggagcccgtaacagtctcaagaaggaagactgtatggagctctatgagaaatgggccgcctcctacaacgaagaccttgccgacgcatcccagaactatatcgccccgctcctggttgcccaagccgccctcgcctcaagcaaagaccccgaggctaccgtattggacgccggttgtggcacggggctcgtggccgaagcccttgctaagggcagcaaatggactattgatggcatggatttgtctcctgccatgctcaaggtcgcagaacagactggcgtgtaccgaagcctcttcaaagtagacctcacacaaccgatcgatcaaccagaccagaagtac

SEQ ID NO: 2136 - DNA, 594 bp, Aspergillus oryzae
  modified_base (423)..(423): n is a, c, g, or t
cccacgcgtccgcccacgcgtccgctttttatacacctctcgttcctcttccttttttccttataccttcataaatatcagcaaccatggctgctcccgctcaccagttcaaggtcgccgacatctccctggccgccttcggtcgccgcgagatcgagctcgccgagattgagatgcccggtctgatggccatccgtcgcagatacgccgctgaccagcctctcgccggtgcccgcattgctggctgtcttcacatgaccatccagactgctgtcctcattgagaccctcgttgcctttggtgctgaggttacctggaccagctgcaacatcttctccacccaggaccacgccgccgctgccatcgccgctgccggtgtccctgtcttcgcctggaagggtgagaccgatgaggagtacaacnggtgcttggagcagcagctctctgccttcaggatggcaagaagcttcaacctcatcctcgatgacggtggtgacctcacctccctcgtccacgagaagtaccctgagcagcttcaggactgctacggtctcttccgaggagaccaccactggtggtcaccacctctaccag

SEQ ID NO: 2137 - DNA, 532 bp, Aspergillus oryzae
ctctccatcaatcgagcccttgaccgaattatcggatctctactcgacagcgaagaaaacagcatttataaaccgaagacaacaattaagagaacaaaagctacagcagtcaagcgaccaacccgacgcaaatgaaaccgagctccaagattctgatctttcggaactgatggctgaattctaccttgatcccaccctgttgctggcgcccacactccagaactcccgggtacgtccctggcaggtgcttcccggacgtacgcaccccctaatgtctatgcgcggtggcgctgagggctatatattccacgctgtccgagtaatccccacccaacaaactatccaggccgcgggcaacctaagccggaaaaagagaaaggtcgtgactcaggagacacctaccaccgcagtcgatagcggcagtggtgtagatgttgagatgaagtcataggattttgcattgttaccatgtagactagaatgtttctggacagccatgattataaaagtacgccatagcatgcggcatacc

SEQ ID NO: 2138 - DNA, 318 bp, Aspergillus oryzae
aaaaacgccatctctcaagggcacttttgagtgcagaggcagacgttgaaaggctaaagtcccaaaagacttctcagcatacgctccttgccgagaagcgaaatctcgaacaacaggtggcaacccttgaggcacaactcgaaagcgaaaaaagggcccacggacaaacattagccaggcagtcgcatagtgcagaacagatcgcagcgcttagctcaagccttgaagaggcgcgcaatgaactcatggctgaggcacgggcacgggatgggcgtgagcgtgtctttcaacaacagagtatcgaatgggctgctcaac

SEQ ID NO: 2139 - DNA, 668 bp, Aspergillus oryzae
cccacgcgtccgtaaagctttgccagatccttggtgaagcaaatgacagtcgacgctgcgaagaaatcgtagacaaatatattaaatttacaaagaaaaatggcacacggtctcaatgtcgaaaggccctcgaactacatttgccgtcgagtcctatctacgatatcctagagggtttcatcccgcaccctgcgcatacatatcttcgcctgatagagatgaccgaagccgaagaaaaagaattcataaacagggagataggagaaaggcgtacacgactgggtgcgcgcattgagcaagtcaccttggaagtgaagagggaggccttcagacgtagcgaactcgaacagctgtatcgcggaatcgtggactggagccatgacgatgaggtccggcgtacatatgaagagaagataatagagcggggctgcgatgttctcgccgttcttccgacaaacgaaaagaaggcgaagcgcgaggaggtgtgggcggcagctcgtgacatggtcattatcaagcaccccttcgagctggcatggagaatctatcttgaatggcaagatattcaaaacttctcagagtgggatcgcaatttcctagaggaatttatcgaattctttccagaagcggggcttactaaagtcctgaaaggttcttggccagcaacc

SEQ ID NO: 2140 - DNA, 336 bp, Aspergillus oryzae
ggcagaggaatacgattggcggtgttggtgttgcaacttgttgtcatttctttcgtttttgtggttgggcttgatgtgcgatctcccgcatcatcatatcttggagataccatctattttcacattcgcttctccctttccttcctcgccaagtttgcttcgttttctgactcggtcaaggattcatactactcgtcatcttcaggggcgttcatttgtgcatagttgattcaattgtctcattgcattggcttcgggcgtttgggagggaggtgagtcgcagtatatgcaaggatagctatagtcttacgtcaaaagtttacgtgtatctgctcg

SEQ ID NO: 2141 - DNA, 495 bp, Aspergillus oryzae
cggacgcgtgggcggacgcgtgggttccaaagtggtgcgattaggacaattgatacaccgaaaatggccgatgaaccatcagtcaaattcacatccttgggcgcaatcatccaagagctcaacgtgggtggccagaacatcgtcctgggatttacgaagaaggaactctatgagaaatataacaccccttggtttggcgcgaccatcggtcgtgtagccaacagaatcaaggatgccaaaatacaaagtctcaacaaccaagaatatgaacttgagaagaacaatgaccctaacgcgctgcatgggggtagccgtggatggggcaggcggcattttgagggccctactttactgcagcgaaacgggaaagacaccctactctatacctatacgagtccccatcttgatggaggataccctggcacggtagagatcaaagtcttctacacggcaagcaaagaggacaatcgttcagtgctttcgatcgagtatgag

SEQ ID NO: 2142 - DNA, 490 bp, Aspergillus oryzae
ggaaactcaagatgggacaggttttccctgggatattggggtgttcgatgcccattgtcatcccaccgatactatgtcatccattgcggagattcctagaatgagggcaaccacgctcacagtcatggctactcggggagaagaccaagaactagtacaccagactgctgcaactctcacaggtggacagttaccatcccttccgggacaaagtattggacgtgtgctaccttgctttggctggcatccttggttttcccaccagattcttgacgatatggggaagacagaaaccgaagtcacatcggcatctgacaagaaacaggcgcactatagcaacgtcttgactccaccaccagcggatacttttatatcagctctacctaaccccaaaccactttcgcagcttatctcagaaacacgcgagcggttgctaaaccatcccgccgctcttgtgggagagattggccttgaccgtgcttttagactt

SEQ ID NO: 2143 - DNA, 522 bp, Aspergillus oryzae
cgaccacctcaccgtcgacaacaatggcgtctcgtcctaccgtcactatcgccacggctgaaggcaagcccagcggggccactgcccccctgcccgccgttttcaacgcgcccatccgtcttgatgttgtccagtatgttcgatgagtttacgccgcgatttggagggggaccggaggatggctgacggcttcattataggcaggttcacaccggcatggccaagaacaagagacagccttatgccgtgagcgagaaggctggtgaacagacttctgctgagtcctggggtaccggccgtgctgtcgctcgtatccctcgtgtctctggtggtggtactcaccgtgctggtcaggctgccttcggtaaccagtgccgctctggtcgtatgttcgctcctaccaaggtctggcgcaagtggcaccagaagctcaacctgaaccagaagtatggcactcaacgatgaaaatttggcattgggattgtacatgatattaacaggatgataggcgcttcgctaccg

SEQ ID NO: 2144 - DNA, 486 bp, Aspergillus oryzae
ctctcccaaccaaccattcatccctcttcttcttttctttccctccccccttcttattcttttccttgttcttcctcatttctgaggatttgattaattcttctcccctatattggtgattattcttcttcctaatcagaccagtgtgggcgcttgaattttctgcatcattttcccatcaacaaattttcgacttgttcgataatctccgtcaatatgtccacagagtatgatcacgaaaacggtcgctatgacgacgagcctcgcttctctcgcgacgaacgcagcgcatctcctcgcgatgagcctcgtaccgaccgcgcccgtagccgctctcccaatggtcgcgccgatgaccgggctcctatcgaaccgcgtaagcctcttgaggatgaggagggtgcggtcaacactggctccaaccttttcgtcaccggcattcacccccgtctgaccgagtccgacatttcgcgtcttttcgagaaa

SEQ ID NO: 2145 - DNA, 531 bp, Aspergillus oryzae
ccttcgccaagtcagtattggctaagcagttcccggagaataagttcttcgaaaaggcaaggcttcacatgcattgcccggagggtgccgtgccaaaggatggcccatctgctggtattacaatgtcatcatcccttctatccttggcgctgaaccactctctcgaccctaccattgctatgactggagaattgacggtgactggcaaagttttgcgtattggaggtttgcgcgagaagactgttgctgctcgtcgcgccggtgccacaaagatcatcttccccgccgacaacacgtcggattggctcgagctgcctgagaacatcaaagagggcattgaaggccatgcagtgagctggtactcggaggtattcgacttgctctttaccggtctggacaaggacgcagccaaccatatctggcagaaggagctcgcggaaaagtccaagaacaagtcggctaaggacaatgaggacgatgactgaattagttccctgatgctcgtgatctgatttggtatatactacgctt

SEQ ID NO: 2146 - DNA, 375 bp, Aspergillus oryzae
accacctgctcatttcgcgcgtgactgtgctctcactcgggcgtcttttattctgacaggactggctgtcggtttagcgattctcatgggggttgcggctggtgttggggtttggtttgagagaagtgtgtctcagcaacgagaacaggatacttctccgttgaggaagattaatatcatggcgaagtatccgggtgtttgaatctttttgtcttagtattagggattggatgatgggggtctatttgggtgttggcacatgctgctgggttcatcgttgtgctgggaggactttttaggggctttggctattactgtggttgtctctggttaggcatatgtatgtacggtaatttccaggaatgggagtatttc

SEQ ID NO: 2147 - DNA, 632 bp, Aspergillus oryzae
tcctcccccgtccactcatatcccctctctcccgccagcaatggcttcgaaattcttccccgccgtccctcgggtcggtcgtcagttcttccagcgcgcccccaagactcaatgcagaccgttctcggctggtccgcaacgttgcagcgactccctttccgtgcaccgcaacaagcctaccaacaacccgagcatcccgttcacgttcaacgagcagaaccaacgattgatcgatgagatcctcaagcgctatcctccccagtacaagaaggccgccgtcatgcctctcctggatctgggccagcgtcagcacggcttcaccagcattagcgtcatgaacgaggtcgcccgcctcctggagatgccccccatgcgtgtctacgaagtcgctactttctataccatgtacaaccgtgagcctgttggcaaatactttgttcagctttgcacaacgacgccatgccagctcggaggctgcggcagcaccaagatccttgaagctatccaggaacacctcggcatcacccccggacacaccaccgaggatggactctttcaccttgcttgaagtcgagtgcttgggcgcctgtgtcaacgcccctatggtccagatcaacgacgattattacgag

SEQ ID NO: 2148 - DNA, 690 bp, Aspergillus oryzae
tcgacccacgcgtccgtgattggtgtgcctgaaccccgtccctgctctctctatatcaaggttgcattagtcgactcaccatgatccctcaccaatattatcccaccacgatacagctaccacactttgccgccaatgagacctcggtagtctccctaatcgcccaatttggcttcttatgggctgcggtactaggaactgcctttttcgtcatacgacgtgtgcgaccgacggcaagtcgggcggataaactggcctttgtatggatgtgcttgacgggcttcattcactttttctttgaggcctactttgtcattcatcatgagaccctggcaggctcccaggaactattcggccagctatggaaggagtattctctgtcggactcccggtatctgacatcggacgcattcctggtcaccatggaggccgtaaccgctttctgctggggacccctggccttctttattgcctactgcatcgcagttcagcaccctgcacgtcatgccctgcagctgctgctctccgttggtcaggtctacggtgacgtcctctactatgccactagtctctttgacctttacttccatggagaaaccttctgtcggcccgagggctactacttctggtctatactttttcttcaacttcatctggatgttcatcggctcttattacgtgaaacagagt

SEQ ID NO: 2149 - DNA, 147 bp, Aspergillus oryzae
ggtcgacgctcaggcaccccccccctcggcactcaagcgagtccggagttacttacccatattccgttcgacgtagtagtacttgctcgatgaccaaccacaactgcaaacacacttagaatatttcaatcaagtctattttgtcag

SEQ ID NO: 2150 - DNA, 534 bp, Aspergillus oryzae
caaactttcttcatccatcacataccaactctacactacacatcatgtctggctacgatcagtacaaccagcagggcggccactacggccaaggccagcagggctacggtcaacagggctacggtcaacagggctacggtcagcagggctacggtcagcagggctacggtcaacagggctacaatcagcagagctacggacagtcttctggatacgatcagggatacaacagccatagcggtagctccggctctggtgccgccaacgactactacggcggcggcggacagtccgagcaccaccagcagtcttacggtggtcagcagcactatggccagcagcaaggatatggtcagcagggtggatacgaagggtatgtgtctttttatcaacacccacctttactctagtggtccaaccgactaacttctctcctcacagttctggtgaacaggctcccggcggtgctcaggagggtgaacgtggcctcatgggtgctcttgccggtggtgcggccggtggcttcgctggcca

SEQ ID NO: 2151 - DNA, 633 bp, Aspergillus oryzae
cgcgaactctacctcaccctccccgatggctcgcgcaccccgcaccccctccttatctcccgcaccggttacaccggcgaggacggcttcgaaatctccatcccaacagcaggctccccttccctgcccgcgcaggtcaccgagctcctcctcacaaacgcagaccaggtccgcctcgccggcctagcagcccgcgactccctccgtctggaagccggcatgtgtctctacggccacgacatctccaccgcccagactccccccggcgcatctctgggctgggtcgtcggcaaggaccgtcgcgaccccgcaaccgccaacttcaatggcgcctccgccatcctcccccagctcgcctcccccgccaagaccctctcccagcgtcgcgtaggcttcaccgtcgagaagggctcccccgcccgtgaaggcgctgtcatcgtcgatatcaacgatgaatcccgtacccccgttggcatcatcacctccggtctccccagtcctaccctcggcggtaccaacatcgccatgggctacgtcaaacaaggtctccacaagaagggtaccgaggttggcatcttggtccgtaacaagctccgtaaggctactgttaccagtatgccctgggttgagagc

SEQ ID NO: 2152 - DNA, 587 bp, Aspergillus oryzae
agctggagctgttggttgccttgcgaaggttgaattcaccaagcagtttctacggatatgcctccacgattcctcttccagccttccttcaaggcctttactgggtcttcgcatgttcagagcccgcttgctgcgctttcattgattgcttccaggacatctatcagagcgggatccgccgagactagggaacgccgaagacatgatccgtttttgatggcacagtcacgtcagcgcaaagccgccaatctgtctcgtcaacaagctcttgccgaagaacgcgaaagctctctcggcgatcctgtggagagtgcacccactccattcatccaagagctcaaaacggtcaaatctgggccacaagccccttcaagctcagatgccagactcaactacttcgtcactcccgagggactccaggaggccatggaatattcgaaagccttgacatctcccctcgaaaacccagacagagacactgcagaccctcaacttgagaaggaggcatccgagagacatcttcaggaacatcgcaatgctcaggaggcaatcagccgtatcgtgaagatcagtaacggaaacacgca

SEQ ID NO: 2153 - DNA, 543 bp, Aspergillus oryzae
caattgtcacctttgacatcataaatctttcaaaatgtccgacgagcagaccttcattgccatcaagcccgacggtgtccagcgcggactcgttggccccatcatctctcgctttgagaaccgtggcttcaagcttgctgccctgaagctctgctccccctccaaggagcacctcgagcagcactatgctgacctcagctccaagcctttcttccccggcctcgtctcctacatgctgagcggccccatcgtcgccatggtctgggagggccgtgaggtcgtcaagaccggccgcaccatcctcggtgccaccaaccctcttgcctccgcccctggcaccatccgtggtgacttcgccattgatgttggccgcaacgtttgccacggctccgacagcgtcgagaacgccaagaaggagattgccctctggttcaagcctgaggagctccagaagtacaagcacagccagtttgactggatctacgagaaggcctaaatttctctgttcgatctgaaaatctgaaaatctgctccctgatacgg

SEQ ID NO: 2154 - DNA, 426 bp, Aspergillus oryzae
attttatttgtgcctgggcctctccttgcataacttcttcaggggttatttaatgagtattcatgaccgtactccataggtgttgagcctccggcctggctgacccctcatctccgtttcttcttctccctcaaccaaaacatcccactccaatcgacgatggccagcaaggagggtaccgcagggcaggcctttggccctgttctagctgcggtcgctacaatgcagggaaatgtttccagaaccgagaaggcgcatgctcatgagtttctcgagaaattccagaaatcagttgaagcctggacaattacccatgaattattgcagtctcccgatgttcctgtcgaggctaagttgttcgctgcgaccacgctgaagggaaagatcatgttcgatctggaccagctgcccgcagaatctgtaccc

SEQ ID NO: 2155 - DNA, 600 bp, Aspergillus oryzae
tcgacccacgcgtccgctttcgagctgagcttcaattactccaaatcactactacggtttgcattcgagcccctcggttccctgacgggaacgaaggatgatccattcaacacccaggcaatcaggcctgttctccaggacctcaaggccatggttccagggcttgacctggaatggttcgatcatttcactaaagcattggtcgtttcggaggaagaggctcggactctgctagatcgagatattgagatccccgtcttcaagacacagaacaaactggcagccgatctggagccatctggcgatattgtcttgaagacctacatctacccgcggatcaagtcgatcgcgaccgggaccccaaaagagagactcatgtttgacgcaatcaaggctgccgacaagtttggcaaagttgccactccactggcaatcctcgaggagtttatagctgagcgagcacccaccctcctcggccactttctctcatgcgatttggtcaagccgtccgagtcccgaatcaaggtctactgtatggaacgccagctcgacctggcctccatcgaaggtatttggactctcaacgggcgacggaaccat

SEQ ID NO: 2156 - DNA, 495 bp, Aspergillus oryzae
gtcttggctcgtcactttggagtcggtccacctacgtcgccgcgcaatgagaactcacaagtgaagcttgaattttcacataacgaagcaaaggacaaaaagggactcaaccagccagtggcgcctccccctccaccacgagccgcgactgaagcgcctcgtccccagccggtacctgggatcaagcctcccgttcggacgaacagcggtcagttaaatacgaaacgtccacagctaaaagtgcaaatacccagcgagaattcggatcggggcagcgcaacagcagattcatcctcacgcgattctgcagggaacaaaacacttacaccagccaaagccaatcttgacggcaaccattccagtgtcgtgttacctccgccttcgccttctgccggtgcaatcctcagtgcaggcgctcagggaccaccgaatccatttgcccggccgcctccccctagcacagctgctcagaataacaatgcatatagtagtacc

SEQ ID NO: 2157 - DNA, 490 bp, Aspergillus oryzae
cggacgcgtggggtcggccatctttgtcaacatctttggcggtattgttcgctgtgacgccatcgctcagggcttgatcaatgttgtgaacgagatgggactgcgcactcctattgttgcgcgtttgcagggtaccaacatggagcaggctcataaactgctgaacgagtctggtctgaagatcttttccattgaggaccttcagaatgccgctgagaaatctgttcaattctcgaaagttgtaaagatggcccgtgaaatcgacgtgggtgttgagtttactcttggtatctaagctctgcgtcgtgttaaaaactttacaattttcttcacatagagcaagcagtcattcaaagatgattcggcgatcatgcggattaagtctgtatgctaactggattttctgcacagcagatgggctgctgaacctgggtaatgaggaggtctatttgtgaaggactgatatcaggtattcaggagagagtcgtgg

SEQ ID NO: 2158 - DNA, 193 bp, Aspergillus oryzae
gtgttgcgatatgattattacgctttgacacctatgtttcctttcgcttccctttctcctacttttgccccccgtcgcccttgcgaaagtgatgattgcacgctttatgttgtcccttgtttgtttttgcccgcccttagaggcttgtctctatcaataatgatatatcgcctgcggaaggtctttcgatttg

SEQ ID NO: 2159 - DNA, 481 bp, Aspergillus oryzae
gagcagtatgagcgtatcatctctgctaacgcacagggactcaacgagagagagcgtcgcgccgccgaacagtttgctagagagcaagaccaggccaaagtcgaagcgaatttcaatgaacagtttgccagcattagccagtcggtccaggagtatcagttgcggaccaaccaactttggcaacagtgtgtggctatcgagcaagctctccagcagcagcagcaacaacagatcctcttggactcggccccgctcactcccgagggcaatctacctggtaccaacaccctcagcgaggcacccaccctgtccctaggcgctttgacgacgagcgcgtccagcaaccgatcattgcttggacttagcttcccgcctttgaagtccagccctctgcagcatgcttcgtctcccattggtcccacgtcatcccgcccgactagtccaacgcaggcgccgtcgtacttgcagcactttccggcct

SEQ ID NO: 2160 - DNA, 456 bp, Aspergillus oryzae
aggtcatccggaggacggctttggcaagaaaccaggcccagcgaaaggcagttcgagctgttaaagatgctgagcgtgaagaattcaaagaccacctgagacagcggttcgctttgaaccgcatagagctcgataacatccgcgctgagaggcaacgacgacgagaagactggctccgcgggcctttggcacctcagcgcgatgccggatttgagggtcaatcgttcggtgccctgagcccccaggcaatgaacccaccacctatccccaagcacctaaggaggaaatatatcaacatcgccgtgggagatcgagtgtgtatcatgaagggccgggataagggcaagatcaatgaggttgtccgtgtggatacaagcaacgagacggttaacgtgagggatctcaacatgaatgatgtgcaccttcccagttggatcaactcacaatacggaaaca

SEQ ID NO: 2161 - DNA, 458 bp, Aspergillus oryzae
cacaaccgtgtttatagcaacctaggagccaagatgggaaagcgggtacgccatttcgtcggggtggagagctctgagcagctcgctttcatcgatgagcttcaagcgcttggactcagcaacacaatcaatcttccggaacttgtcgtcgtcggtgaccagaataccggcaagagctctgtccttcaagctatcaccgaggtttccttcccagttaaggacactatgtgcactcgcttcccgatccagatctcgtttcgacagacatccgcggccaaggaacttcccgtgaaggctacagtggtcccgggtccactgtctgaggaagacgatgagcttcttgcccgggtggaggatttccttatcgagaagaaggaactgacatcggaggtcatggaggagattatagataaagcaacggaatgtatcttcggtgaccaaaagtccaccaaacagtt

SEQ ID NO: 2162 - DNA, 490 bp, Aspergillus oryzae
tcgacccacgcgtccgcggacgcgtgggcggacgcgtgggcggacgcgtgggcggacgcgtgggttgggttgcacttctacacagtcaagaagttactcctgaaactgccaactacaccgtccaggcctattacaagaaaactatcaaccaccactactctcaccaccaacaccatatcaacctcaattcacaatgccttccatcggtggctctacttctcagttccctccttgccctggtcctcctcccaagggtccgcttcctcctcttcccaagtaaaccttgggctttgtgatgaaatgacgacccggcgtactcgagcggttcattcaccccgtcgtgcgaaagcatcaacacgaaccgactcgtgacgctcacgaaacggcgttgcatttggcatatggatatcacgattttcgatttcggaactgcaaaaatggctttgatctaccccgaacgcattctcatatacaaccctttatttcgacg

SEQ ID NO: 2163 - DNA, 436 bp, Aspergillus oryzae
cggaatcatcatcactgctctctttctcaaactacaacttctctccgcacgcttccttgaccaccacacaaccaccatgcggatccgctatcctttcgcgggcgccttcgtcttcctcttgctcttggctgcctatatcggtctcctcccccacagtgcatcctcaagtgtcccatcgcaactacaacccaatgacaagcttctccatgtcgtgacgttcttcctgctgtctctcatcttctactggattcccgacaccacccgccgacgcacgctacaattgaccttaattgtctgcaccgccgttctgggaattggctccgagattgtccaaggaatcctccccaatgggtcgctcgtttgacccgtttgaccttctcgccaatatcgtgggtagtctcggcgcagtcggcttgtgcagttggtaccaccggcg

SEQ ID NO: 2164 - DNA, 382 bp, Aspergillus oryzae
cgatggctgccccgatgactgtgccggtataccactatttcgaccttggtcgtctgggccgcggagaagtagtgaagctattcctcatggacgcgggaattgagatcaaagaggttcgctatccatacgacgagacctggggcgagaacagtaagaagctccagcagcagggcaatcactaggacacgcaaattgccggtactggagtaccagggcttgattctcagccagcacattcccatcttgcgtttctttgcccgggacttgggtcgctacgacggcgaaactaatgcggagaaattcttggttgacgcggtgtcggatatttatatcgactggaggttccaatgggtggcgaatctgacggaaagatcggaaaagt

SEQ ID NO: 2165 - DNA, 356 bp, Aspergillus oryzae
aatccaccctggtaaagattgagggcgatgtcacaattcattctcagcaacagtcgagttcagaaggatttgttttcgtcatgccagagtcacatccagccgtgtctgggttcgaaacgatgatacggttcctgatgcccactttcgacacttttaatctttatggacgccctactcgtctaattgccgctacgaatcacattaagagcattatgtttgcgtttccgaaacagcgacgttatggctatctggacatcttggatatcgccaatttgatgcaaaccgcgggtagtcaggattggagtgaggcagaatggaggaaacagctgaaggaggcgactgcacgtcgcatggca

SEQ ID NO: 2166 - DNA, 595 bp, Aspergillus oryzae
cgacccacgcgtccgctcgcacctgcctaccttaactgacagcgccaagctctggtacttgctagtaattcaccatctgatttacacgactccgtttcacagcccctgctctccccgcgatggagaaccagaagatctccgactttctggcggaccagctgcagcaagctcccgaacaatgccaggcctacttcctcaccttcgaagactactgggagcggaaattatggcaccagcttaccgactccttgattgaattctttcgccttccagagagtgctcctcaacggttaccgatattcaaggccttcgtgctcagcttcgccgacaagatcaaccagctgaagttcgtctcgttggggctgatggcatcgacagaatgtgcagatgacaaagaacgcctctctttcctcacatccctcgccgacaaagtgaacaagccccgacacacaagaagcttacatctatgcccttgcggacgtcgccaatggtcaagcagcggcttcaacgacttggatggagcacagaagatctgggaacgtgtcagaaggtccctggataacttcgactcggtcgagacccgcccgttcacgcc

SEQ ID NO: 2167 - DNA, 455 bp, Aspergillus oryzae
ggacgaaataacggagatcatgtctctaatggagtacatgccaggtatgcggttgatcgagatcgctcaaagaggatggccaaagcctcccggtcgcgcacacggcactcattaagctcagaaggctctgacggagatgcagagagttcatcggtatccgctgaaggtgacgactctgtagaaaagcccgaagttccactggaattgctgtatagaccatcgctctccgatttgctgcgtgatgcgtcaacatttaacatgtatcgtcaacgtgctattaaccggcggttgcttacgcaatggttaaagaaagccatccaaactcgacaaagtcatcagcatatggaagttgtcgccatcaatcgcgatagaggcacgcttcttcgtcaagccttcgagacgtggcactcgatcattcaaacgcaacgacgagcagcacaaaccgaccgcttttt

SEQ ID NO: 2168 - DNA, 461 bp, Aspergillus oryzae
ggccgacaaggcctgcattccggtcaccacaactctgcagggtctgggcggctttgacgagctggactccaaggcgcttcatatgctgggaatgcacggatcggcctacgccaacatggctatgcaggaggctgatttgatcattgctgttggtgcccgttttgatgaccgtgtcacgggtaacatcaccaagttcgcccctcaggctaagctggctgcgtccgagaaccgtggtggtattgtccactttgagatcatgcctaagaacatcaacaaggttgtccaggccaacgaggctgtcgagggtgactgtgccgagaacatcggccaccttctgccccatgtcaacaaggtgtcggagcgccccgagtggttcgctcagatcaatgactggaaggctcgcttccccttctctctgtacgagaagcaggccccggaaggccccatcaagccccagactc

SEQ ID NO: 2169 - DNA, 393 bp, Aspergillus oryzae
aaggatttctaccacaccagcgctgccagccttgaggttaagtccaaggctcccaatggcgtcaccttcaacgtgaagggcaagaacgcccacgagggtcccatcgctggctctctcgaggccaagtacgtcgacaagcctactggtaaaggccccaaaagacgcaaacgtcccatacgcaaaccacccgattccaatttcccagtgctgcgagacactcggtccatgtttgcattttcatgcggccaagtcctgtctcacaatatcaaaatctttctttcatccagaattagccatcatgcagtcttgctaatattgtgtccccgcccaggcctcaccctcacccaggcatggaccactgccaacgccctcgacaccaagctcgagctcgac

SEQ ID NO: 2170 - DNA, 510 bp, Aspergillus oryzae
cggacgcgtgggcccacgcgtccgctcgctcccagtcccctggatatcactcagacgcctgtcgctgtcgacccttcttcccccctttttctctgtcttctccgtctccttctctcgttccgatcacgcccacctgtatcaattgattatcaccctttccaggggcttgctccgtcaagatggcagccgatatgagcggcgagcagatgcaggccaagatcaccgcggcccggcgcgaagctgaaggcttgaaggataggatcaagcgcagaaaggatgagctggccgataccactctccgtcaggtcgcgcaaaatcaaaccgacactttgcctcgcatcggaatgaagccccgtcggacgctcaagggtcatctcgccaagatctacgctatgcactggtcgaccgaccgacgtcatctcgtctctgcttcgcaagatggaaagcttatcatctgggatgcctacactacaaacaaagtccatgcaatcccattgaggtcatcgtggg

SEQ ID NO: 2171 - DNA, 464 bp, Aspergillus oryzae
gatgatgtggcctttattgcccacagctctggtacaactgggatcccgaagcctattcagctgactttcggctactttggtgctctggatgctggcgcctatgttcctatccctccaggacgattctcgggggtgcctgatcgactcagcaaagatgacgttatcttggccgcggcgccattctttcacctcatggggttttcattgctgatcatatcagtgttccacggtattcgctgcgtggtagccccagataagccattatcgactgagtttttgacttctatgctcaatgcaaccaagcccacggcgatactgctaccaccttgcatcctagaagatatgactctatcacaagcctctatggaagccctctggaacttgaaatacgtgttttggggtggttcctctctctcgcctgaggtcggtcgtaagatcagagagcacaccccgctggcgggttt

SEQ ID NO: 2172 - DNA, 557 bp, Aspergillus oryzae
cggacgcgtgggttcccactagcagcgactggaactgcagacggtttggtgtgtacggtcgcgtgccatgataagactggcaaagtgagcggatcggatacgaaccggttgtgggacccaaagattctcaacttttgtccccctctctcctttccccacatttaagcgttggatggtcccgtcaacgcagcacatcggcccgatgggcacaccattcatgcaatgcatactttgggcaaatagtgaggtgggagcgattagtcaaacactagagagctgacagacttgattcaaagaacgaaaataacaatatgtcggtggatattggggaccgtccgagtgaaccaaaatgccacctgccaatttccggctatttttcttcgttcgggttccctctcggaatattgcggcccaagaaaaggggacaatttggcaacggttgggctttgtactcgcaaattcgaaagccaacaaacctcggccgcttctacaggatctttaggaagatgtgcagtgctttcgccagggatcggcaatggttgtgtgtgtgattacgg

SEQ ID NO: 2173 - DNA, 604 bp, Aspergillus oryzae
cgcgtgggatttcctccacttcccatttcgccttgagcttccgcctaccccctttgcttagagctgcaaccttaaatttttaagctccccaaactactcaaaactcccggatctcccgtgtctagtacgtcactccagactcatcacgaaatttcctctgctcacgttcgacacacaagtcaaacaatcattgttcctccgttcgatggccatttttactgcgcccacgtcgtttcagaatgctcaatctctcgttcctcgccagcttttgacccaacaccagataggcgtctcgccgtccattctcggatatgttgctccccattcaagttatccgtccttctcgcacttgattcttctggtctttgaagcggtcctagaagttgtttgcgtcagcttgcccggttacattgccgccagacaaggcctgttcgatgcggacgcccagaagctggtcgccaacctcaacgtcactctattcacaccgtgtctgatttttacgaaactggggtcccaactcactgcagagaagctttttgatttagccattattccggtgatctttgtcgtccaaaccttgggtttcttacatctgcgcactcac

SEQ ID NO: 2174 - DNA, 574 bp, Aspergillus oryzae
cgctaccaggatattcacagttattgttcttggtggatatcatgagtctttgcttgatcccagatgaagtagactatttaagcagcatcgcctgactactttcctgcctcttcttgcacaacaatcatttgcctttgcttcgtatatatcttttctctctcgccttcgctgtctattttgcacaattgttcccgagcatcgcagtgatcactctcactatacgctccattgataccgcttcagacttacgcacatatatacaagatgtatacattcttcactctttcacttcttatgactcttactccccatgtcttgtccgcaccattgaacaacgccatcaccaccgtccctaccggccagatcatcaggagctgcaccaccccgaacaccgttgccctgaccttcgacgacggtccctcgggctacacgccgcaactgctcgacctgctgaacgagtacggagccaaggctaccttcttcatgatcggtgaaggcagccaggaatatcccgatacgatcaggcgcatgaggagcgaaggtcaccaggtcggatcacacacattggagcatg

SEQ ID NO: 2175 - DNA, 517 bp, Aspergillus oryzae
gcctattgagcggacgccaaatcaacacagggatctcgcgatctacgatgaagcaacataccaaacactgatcacgagaagaccggcgcagacaggtgcgaggtaaccgaggggagctgcgggagagtgcttgtcagaatgatctcccatggtaaatatgacgcgatcgtcatcagttggaccaccagagctacatcaatgaaatggcttaatacgcatgggaatttattgtatcacctgaaggatagacctgttttccttatggtcttataaggtctggcaactgtggagaaaaagcaaaatcagacttttgaacgctctgccgcatgaggtaatgacatatgtataatggacaaaagatacgagctggtggtgtgtcaatgggccaagaaccaaccccgcagactaccagatcatgactcgtggttccgtgcccttttaagctgcacagccataaaggactgggatgatcattggattacgagctccctccggctccgggtccttggtccgtcgg

SEQ ID NO: 2176 - DNA, 571 bp, Aspergillus oryzae
ctcgactggagttgatttcaaccggcacatctcttccctttcacttcaacccaatcactattgaatcctgacagcatggctgacgctttgaaggcagagggcaacaaggccttctctgcaaaggactatcctaccgctattgacaaattcacccaggctatcgcgatcgaacccgagaaccacatcctttactccaaccgttctgcagtatactctgctcaatccgaatacgagaaagctcttgaagatgccaacaaggccacggaaatcaagccagattggtctaaaggctggcagcgtaagggagctgcctatcgcggtcttggagaccttctggctgctcacgatgcgtacgaagaggccctcaaaatcgaacccggaaacgagcaggctaagtccggtatgaatgccgtcaagagggctattgatgccgaagctcaggctgatggtgtcactggtgaccctctgggcggacttggtggtattttcaacgaccctcaacttttccagaagctggccagcaacccaaagacctctggtctcttggcagatagcgaatttatggctaagt

SEQ ID NO: 2177 - DNA, 444 bp, Aspergillus oryzae
gaggcatccgtcgactccctcgttcattccgaagaaaccgtaccgaaattaacctccgaacggaaccaactacagagcaacgtggaccgccttacctctcaattagatgatgctgaaaagcgactcgaagaagaacggaccgcaagaaagaagttggaggataaccaggaatcaaagatcaaagagattgagtcttcttggtcagccgttttgtcggagaaatcgaacaattggaccgccaaggagaagagcttggaagagaaggtagagaaccaagaacgcttgatcaaggaactcaaagcgagctatgaggtctcacaacggctgggccaagaagagagtagtggtgatggccaccaacaaggaggggctaccgctgcggaactggagctggtgtcagccgatctcgaaaagactagtattaggctggcagaagtagaggca

SEQ ID NO: 2178 - DNA, 495 bp, Aspergillus oryzae
ggctcctgacaactcgatctattctctattctcaggcaaaatttcactgttgaacactttcttcctttcatcgccttcttcgatcggcctgttggaggagaatgtgccccgatatcaactcacttcccccgtcgcgttcctcttctgcctccccgcgtcaagcacggaatctccccacttcttctgacagccagcagcattcttcatccgggttctcccctgcatcggccgccatgagtaataacaacaataataatcagaacaaccatcatcaaacctcggaggtccctcgtcggctttcccgcagctctcgcgcgggcatgccggggccagagcgacgccggtccgctgccggtgccaactttaacctgaataataatgagccgactggggactccatggccccgtccgaccaccgctcctcactaggtcctcatggacttcggacgtctagcccatcgagtctcggaggcagcccgataattgcgaccgggg

SEQ ID NO: 2179 - DNA, 648 bp, Aspergillus oryzae
cccacgcgtccgggcgctcttggctgggatagtactgctgttttcacattgaacttcctagcaatcgtgccgctggcatctctgttgagcttcgcgaccgaggagctagcagctgcgatgggtcaggccctaggcggattaatgaatgctacctttggcaacgctgtggagttaatcgttagtatcattgccctgaaggatgggcagatccgtgtcgttcaggctagtatgctcggtagtatactgtctaatatcctcctggtgttaggatgctgcttctttgttgggggtattcgttactctgaacagtccttcaacacaacggtggcgtcgaccatgtcgtcactgatgaccgttgcatctgcttctttgatcatccccgcgacactttacgcatctctgtcttcaactggtgatgaaaagaccagaaccgagaatattctcattctgtcacatggcactgctatcattttgctgattctatatgtgatgtacctttatttccaacttaagtcacacgcgtcgttctttgaggaagccacccccgacccggaaaattcaggcgatgatgtggcggaagaggaggaagagcatatcctttcccatgggctgcctgcgttgccttggttgtggcgacaattctcggcc

SEQ ID NO: 2180 - DNA, 494 bp, Aspergillus oryzae
gcacaatgacaccctcattatcgaaactagtcgcgctatcgcttttcttagggacagccttgggcgaaccctggaaagctatcgacgcggattttcccgacccgagcgtcatcaaaaccggcgatggatattacgcctttgccacgactgcaaacggtgtcaatactcagatagctcattccgcagatttcaaaacgtggaatgtcttggatggccaggacgcgcttccgggtcctttccctagctgggtaaatggtagccatccgaaggtctgggctccagatgttatccaacggaatgacgggaaattcgttatctactattccgctgccaccagcggaacaggcagtaagcactgcattggcgccgcaacctcttcctcagttaccggtccctactcgccggagcaagatgtacttgcctgtgataagagcaaaggtggcgccatcgatgctgcgggcttcaaggacgatgatggtacatactacgttgtt

SEQ ID NO: 2181 - DNA, 509 bp, Aspergillus oryzae
gcttttcgattccaccgtgctctgcacctccttctctcctcttcgctggagcaattgatataccagtctcgatttctggcaattcctccgtgagcgcttgcagatgtccagactcgtagcgtctcgcgacaatttgctactttgagctcgattgcattttagccttctatgagcccgaaggatctactgcgatacctgtccaagcctgcgaagccccgataacgcgactcacgccttcccactcttctccaacttcccttattccaattagaaaagcagatatcctcgtctgctagacccgatacttttaccggtatcggtatcttccagtacgagggtttgcgactgatagtcaccattcctttcgccagaggcattttcctcctttccctctctttccgccctccctagcagcccttcaaggcttttgctggaccctaccttttttggctgtgtgccactttcacccgactcgttcagggccttctctctcaggcggacatcccccc

SEQ ID NO: 2182 - DNA, 399 bp, Aspergillus oryzae
  modified_base (58)..(58): n is a, c, g, or t
tcgacccacgcgtccgcatcactcggctctcaatatgacagacaatggccgcgacggnattatcattggcgtgagcagcttcgcgcagctggaaagtaacctcaaagacgtccaaaaaggccccctgcctgaagaagttgttgaagcgctggataaggcgtggttaatctctaagccaactgctccgaactattggcacctcgacctgaaatacacatataacacccagcaggccctgtttggcccaaagtcaacagcgtagagcaccctatccatagctctctttgacgcgcttgattggtgtttcagtggcgtgttctagtcttttatttttggcgcgtaggatagactactactagtagttctagaacgcaaaggaactaaaatcaatccaataac

SEQ ID NO: 2183 - DNA, 627 bp, Aspergillus oryzae
ctcttggcgagactttgctgaccccgcgcagctttcctctttcaactgttcgaccatcattcgcgacatgcaatttactctcctctgaatcttaacctggcccaaaggggcgtcacgagttggccggacgtcattcactctccgagacacgaccctgtataatatcgcgggtaaaacaactgagggattctgtgaaggacgtaataggggaacgtctctcagagcgataatatcactgatttctctctgtcggcggtcctctggctattaacacaactttggatccgcgcatcacaaagaatctcgtgcttccctcgtcgccggaatttctatcaaagagcgctaggtatcacatactgcctaccaaatgcttgctcttcttgagtgaacatctccctgattattctctacctatctactcgaacctccgccgtcatcacgaccgacactgcgcccccgttcttagatcgccaaatttctccgtgccgcgaagcctaaacattcacaccccaacatgtcgccgtcgacatcccatatatcgggccagttgaggcagctaatatactatcaccttgataacaatctgattcgcaatgcgctatttcttgctggtcgtctgcatgccta

SEQ ID NO: 2184 - DNA, 533 bp, Aspergillus oryzae
gacatctcacatcccctccacctcgaatcctttaatcctttcccgtttcctcgggtctctctcgctctccagctatcttaataacgaaactcacttcccccgttccctttcacattataagacgttcaatcatggcgccctcctcgacaaccgcccagcggatagaggaagctcgggctctcgcgaagaaagacgcttccaaggccgagaccatctacaaggatatcctttctaaaggaccaggatcgacggaagcttcgtcgcgtgattatgaaagtgccttggtcggattgggagagctttatcgggatgagaagaagccgaacgagatcgctgagctcattaagactagccgagactcattctcatcattcgcgaaagctaagacagcaaagcttgtccgccagttactggacctgttcagtgagatccctaatacactcgatattcaaaccgccgtcatcaaatcctgcatcgactgggcctatcgtagagcggagatccttccttcgacagaaccttcagacccgtct

SEQ ID NO: 2185 - DNA, 392 bp, Aspergillus oryzae
ccgctgagattgagaagcgcatggtcgccgaaggccataccgttgcatccttgactggtggtattgaaggctctcagcgtgacgctgtcattgaccaattccgtgctggccaggctaaggtgttgattaccaccaacgtgctcgccagaggtattgatgtctctacagtgtccatggttatcaattatgacatcccagagcttcatcaacccggcgcgccggaacgccaggcggacttccagacctacctgcaccgtatcggtcgtaccggacgtttcggccgtgtgggtgtctccatctcgttcgtctccaaccgggaagagtggaatatgctcaaccaaatccaacagtactttaactgcactatccagcgggtggatacgaaggactgg

SEQ ID NO: 2186 - DNA, 460 bp, Aspergillus oryzae
tttctacaagaagaccattttgactgcggatggtgcctaaaagaagttatattagactcatggcctgtgagcgctttaaacatctatataaatcactccgctactcagctcacgcgctatcctgacacatcccccccgcccctcactacttgagcctgtcaatacatccgagacgtggaaacgattatcggcaaggtcattttagacagctgacttggcagctatgagcgagcctaaccccaaaagactggcttgggacaactcgggggatatcctccaaggtatgctggaccggcaggtcgcaccaacatcaccgcagttagagttctcgtcggatgggtttttaacctctgaatatgctctaagcgatccagcgtcttttctgggcctgcaattcggtcccgattccgcagtaatcccgcacagccatctatctatgctcaaccaatggccaccacat

SEQ ID NO: 2187 - DNA, 381 bp, Aspergillus oryzae
gtggaaacggagctacaggttggaggagataatggccgcagccgtcagaacagtgaagtgatttgctctatggtgcgagaatactgctccatgaattcttcggtggtgctattggcaactgcacagtcgaaagagtcgttgaacaacgtgataatcggaggccatgttgcccgtgaaatcattcatataagggctccggataaagaaggccggcggaaggtgcttgagcagctgacaagtcaagataaaggcgccagtatcactatgaacggccatgcacgagaagctagtgcatctacccagggctcatggttagatccctcgaatccagatagccgcccgagctctgctggagcagatggttttgtcttgagtcgtgat

SEQ ID NO: 2188 - DNA, 483 bp, Aspergillus oryzae
cggacgcgtgggcgacccacgcgtccgcaggaataagtcttgtcgcgactcaggatcgttgctcgacgccaatcctcgatatcgcggtcctttatccagagacattcgcgctcctaggaaacggtcgattcgcaaaccggccaccctcctactcctctcccagttaggatatctgttcaaccatttgttcccggttactcgaggaactctatagtctacattcctggccttgcttcggtctctcaggcacgcgacgcgcctcgaactcttttttcgactcttgtcttgattttgccctctcttctccgagaatagcaatggcctcgacttgcacaaacattgacatacaacggaaagactgtgaacctcgacacagtgaagacatgagaactcaaaacaatctcacggttgaagtcgactgccactccttgggttccaacgagtgtccctcgatgacttctagcttctcgcccatggattccc

SEQ ID NO: 2189 - DNA, 540 bp, Aspergillus oryzae
ccctgatcgggatctcgaccacagcatatcggaatatggtcaaccaattgtctagcctactctcctcctcctggttccttttcagtcatgcgaccatcaacgtctcccttccagaacaatcaaactagcaatccccgcgcccattcccccggatccatgaatcttcgccatcgaggcccggcccgctctgccaccttcgcagagggctgttcatcaaatctaaaaaacgaacgacgcaactcgaccttctcagattcggtctccgaggcacggaattccatccgatcctccaccgacgatctattcttcccacgcgcagccaagggttcctacgacgccgcggatgcgcccaatgaggagtcgcactggcattctgcacccctgggcctcgccctcctgcctgccatcgccggggtctttttccagaacggaagcgccgtcgtaacagatgttactctgctagtattagcagccatctttttaaactggtctgtcagactgccatgggattggtatcgctctgcccaagcgatccgacag

SEQ ID NO: 2190 - DNA, 473 bp, Aspergillus oryzae
gggaaggtgaaaatctggattaggagagtatggactttagaaatgagtgtaattgggcttcgataaccaattccaccaatcatcttcgtttctcattcttctgatgcaccgtcttgcatgctagaagcataccatttacagcaataacttccgttattgttttccacaactctttttcttttcaagccaatatttggaggagttcatgatatccctatctacttccgcgtctgccgttgcagcaggggaatggcgtattcaattaaagaatgagggtagtgtcattctgtttattgtttccaccagctggcggactccatgcattgatataacccctctttttctttttattctttttgttttctttgtgcttgccgtctatacttgacattttatcctctacatctttcttttttttccccttgttcaactagtgataacattcttgtttgaggaagtcctagacatctaca

SEQ ID NO: 2191 - DNA, 513 bp, Aspergillus oryzae
cggagaaggttttcaacggttttttcttccctcgtcagtcgctctcggccgttgcgacttggggtgcactcatcccatccacaaccctcccccatctatcactctcgtaaattaatcgcgggtgatccatctaccaaccaaacctctctggtctccttgttgtgcagaattgtggtagcctctcctccttgactatcccatcatgcaggctgtccagtacgaacggcatcctgctcctggcgagtcgcccatctggacagatcatgcgccccaggagtccccccgcaagagccctatccccaagaacgttgccttcgaactcttgctcgatgagaattccaaggttcgggctcgcatccccatgcgagtgcaaatctatccccatgacaccacggactcgatcgtgactacagtcaagaatttctatgggatttatgatggcgctgcgagcggtgtcagttttgaggatgagcacggcaccacacttattgctaggtatgagaacttacgaaa

SEQ ID NO: 2192 - DNA, 532 bp, Aspergillus oryzae
atggaagtccctccggagtcgaccttggcacaaaatccaacaagttctaacttgatgctacactatgattgatctacagaaacagaatatcgacggctactgaccctatatccttacccttcattcgaccgcacctccactaataatatatttgaagctaagctaactcaagaaacagaagactttgatcaaacattgaatcgaatgagaaacacgtctcaatcctggtaccagggctaaacagtttgggtcgtggcaccaagatacccattacgaccagtcagcatagccccgtgctgcttagcatccaggcttgcctctcggaagagagcatatttctgattatgccactcgacgctgttcatctcccttccatcatgcgaggtgaacttcgcatcgaactccgggcgtaggaagtagatgcaggagaacttgtcgagtccttccgggttcgctggtggtacaacacggtgtaggttcgaagccaatgcaccgttggatagaaaccgcatctggggttcgaagacttgca

SEQ ID NO: 2193 - DNA, 502 bp, Aspergillus oryzae
ggatgttcacctggtcccctgtgaaggatataatagagtacgagtggacgatgttccctgaatttggcttcttggtccattccaagtggtttgacgctgccctgccagagcgcgaggcagcctgggaagagtttctacctagaagtccaatttcggtccccaattctcatatagaccgactgaatcttctgcccgatacagactggatccgttccccattaaatgcagacaacatcctcgctctccctgaagtctttgttcaattagaatgtctcaacctccttcgattgcacgcccaaaaagatgaaacagacaatcgccatctaccctcgttccggggatctgaagacaaagtctaccacagggtagagcaatgtttcgatcgactaaggacatcggttctctgctggtccgatattgttcccgtactccaagagtatgcggacgatgacctgcacacgcacgttgttaagtatgactttgcgacgaagcacaattgccg

SEQ ID NO: 2194 - DNA, 530 bp, Aspergillus oryzae
gtcgaggcgcaaaccgaaaagccgcaccaacactttttgaggctgacttttctagcgtcatcactaaaaattatcctcgcggattaactcactttcccctctgttcttcactgcggagctctcctgcaaaacccccccatttcacatcgtcttgttcaaaactagacgccacctttcgcattcttacagtcttccttatcggaagtcattttatctatttctcaaccctcccgtgtgagacgcgcacaagtccctcccttggcgcgtttctggatatccaacaaccgcaatcatggcgcctaaacagaaagcccagaagatgtccatcagcaccttcttagctgatgagaactttggctcttgggccgacgagatggatgacatgcctttgcctgccgcccctcctcagcccaggttcgacagcgatcgccgtgctggtggtcccccgtctgctggatttggcagtggcttcggtgaccgtggctacgccgtgagggagccctcccctcccacccagcccccgtatactg

SEQ ID NO: 2195 - DNA, 681 bp, Aspergillus oryzae
tcgacccacgcgtccgactgcttgtcccgcatagcttgatagggtgaagtacttatctcttgattctacttggccgtacctccctccaatctataataactccacgccgacaccatgaccggctttgacttctccaactacaaccgcaacgcggctctccacgccaagggagtgcctctacctaaggctacaagtacaggtaccactattgtgggctgtatatttgacaatggtgttgtgattgcggcagataccagagctactagcggacccatcgtagcagacaagaattgcgagaaattacactatatttcgcccaagatctggtgtgctggtgctggtacagctgcagacacggagttcaccaccgccctgattagttccaacgtcgagctgcactccctctcgaccggccgggaccctcgagtaatcacttgcatgaccatgttgaagcaacacctcttccgctaccagggacacattggtgcgtatctggtggttgccggtgttgacccaactggcaccggtctgtacacagtccacgcccacggttcgacagataagctttccgtatgtgactatgggttctggatcgttggcggccatgtccgtttttgagtctacgtggaaggcaaacctgaaccgcgaggaaccggttgaactctgtgctgaggcgatcaa

SEQ ID NO: 2196 - DNA, 545 bp, Aspergillus oryzae
gaagtgacttcaccaagtcatttcactcttcaccttgcgccaccactctatttaacgtttaacctctacccttccataattcccatttatattattccatcatcaatctctatacttctataacctaccggccctgtgtcctcgcgaaccgtagtgcttcaaaatggagggcaatctgccgcagcagtcatgtcatccagcaaccaccgctgttgacaaagatgatattgccattccagtcattgacttcggtccctttctcaacggaacccccgctgataagcatgccgtcgccgtctccatcgtagaagcattcaaaacgtccggtttcctctatctcaaggagcacggtcttcccccgtctgtcgtctcccgggtgtttggctcatctgcacgcttttttgcgcgaccccaggatcagaaagacagtctgtgttggactaccccacaggcgaaccgtggttacgttaagacgggacaagagaagctgagcaacgtggacgacccaacggcacctgaagttctccgagctaccccagatctca

SEQ ID NO: 2197 - DNA, 529 bp, Aspergillus oryzae
ctcactgaatggttccttcactatgacaatatcggaagcgcaacgcaaaagaaactccatgcgcttgcactcacccaactactcagcctgaatggtccagacacacaaccaccaccgtacatacttagtcacctccaatcctatctcaacacatgggcagacatcattaccgagctcgccgagggaaccgagaccgaaaataacccccgtgctggtgaccatctggtctactggaataacgcagaaacgggcaagtgggatgagaacgaaccgcccgaaaacgaacgcaagcgtcactgggaaaactccgatattctccacaatatcaagattcgcgacttcatccgagatcgactgcgctcgttaattgttggatgcggtggtgaacaacgatttcaagacgaatggctcctcaacgtcgaccgcgacgttgtgtctgcatttgtcgcacttgggcttttctgatagatcactctactccaaatcttgggcttgatttctaccttcaccccttgaagtggtcagttcc

SEQ ID NO: 2198 - DNA, 676 bp, Aspergillus oryzae
agcgacccacgcgtccggcgccgttacttttgagagatctagcgcagtttccgttgatttgcggaagtgtacagtcatggctactgtggatgatatactgacaggcaaatatcctgccaaatcccatgcgcgccgggttgcccagcttcttcaggcccatcacggacaaggtgctcctggggttatttacttggaagcccagaaaactcgtcttatagaggataatgacgaaccgatgccattcaggcaacgacgtttcttttactacttgtcagggtgctcgctaccagattcgtacttgatctacgacattaacgctgacaagctcactctgtttatacctcctattgatgcggaagaggtaatctggtcagggcttcccctctccgcggatgaggctatgaagctttacgatgttgactgtgtacttgcggcgactgaagtcaatgccactcttcgttctattggctcagcatatggtggcaatgccgtagcttttgcgatcgctgatcaggtctctagcggagcggaattccaaggttttgcagaaaccaagctttccgtcctgaaggaagctattgaaaaggcgcgcgtcgtgaaagaccaatgtgagatcgctcttttgcgaaaggctaatgatatctctgccaaggcacatattgctgctataagagct

SEQ ID NO: 2199 - DNA, 567 bp, Aspergillus oryzae
  modified_base (114)..(115): n is a, c, g, or t
  modified_base (223)..(223): n is a, c, g, or t
  modified_base (241)..(241): n is a, c, g, or t
tctgtcccacccgcgcagggtatgctcgccaacatctacgagaaaccgtcgaagcgaaagaatagggtctttgcctgtttcagcgccggaaaccccctgggcttcgtcttcggnngtatattttcgggtattgctacgcagctgttcaactggcgagccagcttcttcttactggccatcatttacgtcgtcattgtggccattgcgctgttcaccgtcccantagacaatacacccaccnagaaaatttccatggaggctgtcaagaggttcgatgtcgtcggtactatcttgaccatcgctggtatcggcttgttctctgccgccctgagtcttggctcggacgctccccaagggtggaagaccccgtacgtccttgtctgcctcgtcctgggtgttctcctcatcgctgccttcatcctctgggagtgctggtattcctaccccctcatccccatgtccatctggcgcgaccgtgacttctcgctggtcatcgctgttcttctgctcggctttctcgccttcccgattacaacattctggatctcgctctatatgcagagatca

SEQ ID NO: 2200 - DNA, 486 bp, Aspergillus oryzae
cccccctccctgcctgagcctttaccgggttagtcgttgatctgttttaattttagtagcacccctgtttttcacagctatcacggcgcttcaatcgtttctcagctcgtgctgtctttagccatcccccatctcaagatatggctccgtgtcactgtataatacggtatcatacagtacctctccaccgcagggtctttcatacaacttctttcctcctccatctgctatgagctactgttttagttcgccatttctaaataaagatttcagctatcgctgcactgtcatgtccggcgcttctctcggctcaaccacttttctttcagctgtaagcaatcgggcggttgactttagtcgtgtttctatacttagcaatctatccaggttcttttctattcaaaagtcatccatacagagagcgagaggcgccacgggatcagtggttcaaggcttgagtttggaatgattactacttgtaggtgg

SEQ ID NO: 2201 - DNA, 581 bp, Aspergillus oryzae
tcgacccacgcgtccgctttcggcgaaccctgctgcccccatgagcatcgaatccctgatggaggacgtcgatgtccgcgccattgtcaagcgtgaggagctggagaccatggttcagcctctcctggagcgcgtccttgttcccatcgagcaggccctcgccgaggccaagctcaagcccgaggatattgacagcattgagatggttggtggctgcactcgtgtcccctccatcaaggaggccgtttccaagttcttcggcaagaacctttccttcaccctgaaccaagatgaggccatcgctcgcggttgtgccttcagctgtgccatcctctcccccgtcttccgtgtccgtgacttctccgtgcacgacatcgtcaactaccccatcgagttcacctgggagcagtccgcagatatccccgacgaggacaccagcctgaccgtcttcggtcgcggcaatgtcatgccctcgaccaagattctcacgttctaccgcaagcagcctttcgatctcgaagctcgttacgctagcccccgaggagctttcctggaaaagaccgaccccctggggtggggcc

SEQ ID NO: 2202 - DNA, 522 bp, Aspergillus oryzae
tgagattgcaagacaaggcatgtataatccggaggagcgagatgagaactatgaagatgaattgcaaaagaaggccatggcaagcttagaccgaactagtgtctggctcgcagcacaagcttcctatcttgctgccctgtgtgaaacaaatcccgccaataccccggtaagcgaaagagaagactgtatggcgatcgcgcaaagtgtcacacaagccgtagctcaggtcgtttccaaaaagtccgtccgatttgatgagacagtcccggaagcccccagctcccagccttctgcattagcaagcaaggattcgatctattggagggggttccagtcaatccggcgatgtgctagcgacatagacactttcatgcaccgaaccatgcgcttcgacgctgtgcaatccattcggctgggtttgcctaatatgcatacaaatagtttattgggcaactacgaattagtccgtcccgaacgacctccttacagaggtccattctctcaagcaccccgcgattcagt

SEQ ID NO: 2203 - DNA, 359 bp, Aspergillus oryzae
cttcccctcctctcaaaagcccaaaccaaccgaagaatcaacaacaccaacggccccaatcgcatccctcacactaaaaacctacaacccaacgtccggaatctgcctcaaataccgcacgaacaaagctgccgaggtagggcggttgattacatctctgggaaagctagcgggtggtgcgaatgtggctgcgttgggattggggaatgcggctgcagcgccggtagcgcaggctggtggtgatgtggagatgactgatgcgccggaggaggggacgggttctgcgcctgcggcgaagacggaggggagtaagggcgggaaggggaagaagaagggtggcaaggggaagaggtgatttt

SEQ ID NO: 2204 - DNA, 559 bp, Aspergillus oryzae
cgcacacccgcccactcctccaatgaccatacaacatcgatctgtggcctcttgtgcatcccccttgaatcctgctcttttccaggccccacccttgacaccagatccatctcctagtcgaaacatcgagccagtgcacgttcgagcaatagatacacaacacgtctccagcgatgttctttctcggtcagaatgggaccgtcaacatcagtatcccggacctgaccatgtgcctttcatcctctcttgtgaatctcaaactctcgcccaacagttgacgataatagaaatggctgcacttagtgaaatcgactggaaggatcttgttgacatgagatggagtagcggatctccctcgtcggtgagctgggtgcaatttctcatggaagaagagcgccggggcatcgatcttgtggtgggacgtttcaacttaatggtgaaatggattctctctgaaatcgttctcacacgcaatatccatgagcgggctcgcactataaccaagttcatccatacggctgcacatgccagacgcatgtgtaattatgcgaccatgctt

SEQ ID NO: 2205 - DNA, 360 bp, Aspergillus oryzae
gccaaatcaaagaagctttcgatctcgcccgccaaagcctccgatctaaccccgcgctcctggacttcatccggcagctgaagcagacgcgtggagtggccgtgtacgccatgtccaacatcccgcaggccgagatcgagtatctgaaagagagcagagcaggcgacatggaggtcttcgacgaggtctttgcctcggggtacgtggggtcccggaagccggagacggagttttatcggcgggtgatgggggagataggcttgaaggctgagcgagtggtctttgtggatgataaggaggagaatgtggatgtggcgcgtgggttggggttgtatggggtttgctttgggggggtggagg

SEQ ID NO: 2206 - DNA, 661 bp, Aspergillus oryzae
tcgacccacgcgtccgatcaaagccttcagacattattaccaccactaccgccactactattcacactttgttattccgttacaatcaaaaccgtctttcacaatgaagttcttcgccattactgttgcctccttggcttctatctctggggcatttgcctcggccaacggcggcaacgatgcatgcagcaagtacatctataacaccctttataacgatgccagcgtcgacgtgtaccactggagggaggtcatcgataaaacaaacccgaacccttgcaagtccgccagcggttcatgcggcgcggacctgtatggaattttcaagctagaccaaaaccaggatttttacaactgggggcaggacatgcgtaaattgagcacttgcacggccaccaacgatgcgtgcggcaagttcctctgggacacctttcacgaggcaaagagcaccgacatgaccaactggaagcagatcattcatgccaagggatcgaacccttgcgagtaagatcttctccttttcaagtattccactaagttgatttatccatccttgtcaagtttggtggatactctcgctttatcccttcagaatcgagcgcctgataattgggttcggaggccgagggaagaaagatggggggatgcttgttgaagcttt

SEQ ID NO: 2207 - DNA, 462 bp, Aspergillus oryzae
gtcatatgggcattacccataacttccacgtggacagtgtaattggtatcatcatcgccgactatcttggagggttaagcctgggctggtggaagcgcaaccacaatgtccaccatattgtgacgaatgcacctgaacatgaccccgatatcgaacacatgcccttctttgccatttcgcaccgtttccttaccagtctccgcagcacttactatgaacgtattatgacatttgatgcttttgcgaacttcatgctgcgctatcaaaactatctttactatccgattctcttgtttggccgctttaacctgtatcgcctgagctgggaatatctgctgtgcggtcaagcgccgaagaaaggccctgcttggtggcaccggtggttcgagatggctggccaagtcttcttctggtattggtttgggtacgctgtggtgtaccgtagcatccccgactggagta

SEQ ID NO: 2208 - DNA, 665 bp, Aspergillus oryzae
tcgacccacgcgtccgcccacgcgtccgcccacgcgtccgcccacgcgtccgtgaccactggtcatcgcgagcttggtccttatgggcgtgcctgtgctacctgcgcccgcgcaaaatgtaaatgtattcctcgggctggtggaagcagttgtgagaggtgtcaccgcttgaataagaaatgcatccagccagtccggcagcgaaagcttaaacctctttcgaagagagtgcagctggagcacaagctagacgggttgatgactctattggcatcggcggggcagtcacagccccagccccagccgctgtctgattcggtgagggacatgaacacaaacatcgtcacttctgggaccgagcccccctatagcgattcaggattgctagggactgtgatgtcagggccaggtctagaccaaggctcggaagaagaagcttgtctagcttctttccgtacagaaaagctcccggtcttcccagttgttcatatcccagacactatgtctgcaaaagattttaaacaacagtcgccatttctgtggcgctgtattgctaccatccaatgcaaacacccgtcccgccagtctgaactttgcatgagtattcgtgaagtagcagcgaagagactgcttgtggattgcgcaaagaacctggaccttctaca

SEQ ID NO: 2209 - DNA, 544 bp, Aspergillus oryzae
gactacctagagcagttaatcaatttgtcgaatcagtccaaaatggacacctaacctgcattgtacgcataagaccctctgttatgcctactaatactgtccctcgatcgtaagagttcccgtctttgtcaccagatactcattcacggcaacctccttcccactttccttaccatacccggactccttgatgcctccaaatggagactccgcggctgaggagttacccgtgttcatgccaatcatgccagcatccaagttctctagtaacctccacatgcgatcaatattcttggtgaacgcgtaactggccagtcccatgctagtgtcattggccagctgcactgcctcttcctccgtttcaaatttatagagggcagcgataggcgcaaaggtctcctcccgggacaccaacatgtccttggtcatgcccgtcaggatcgtgggctcaaagaaataccccttggtatccgtgaccttattccctcccagaatcacgtcggctccaagtcgacgggcatcttcgacctggctgagtgccttg

SEQ ID NO: 2210 - DNA, 413 bp, Aspergillus oryzae
cggacgcgtgggttttttttttttttttttttttttttttgtagtacaaattgtcaataaaatctcaacagtagaaggtattcaaagcagcaaacgttaatagtcatacagttgtcaacctgagtagcaacaggtagtgaatgaagcatatcatgttaaaccagctcaaaacgtgcaagaaagaacattccatttgtctaatacaccataagaagagctgaaaacccgcgtgaaagtaacagaccaatttcccgttaaaccgttagaagaacaagcaatatgaaaacaaacccaaggcggatgaatgataggaaacttagatggtaaaacatgtggtacagaaaaagaacgattcctcaatgcccagatatcgccagggacaaaccataaattatgcaagcgtgtcaagagag

SEQ ID NO: 2211 - DNA, 446 bp, Aspergillus oryzae
atagtatctgggtctctatcagcttttgttttctctgatcgttctagatcttgcacggaaaccagtgcctattaagtcattggtgttcagcttaaggagggaaacaaatcaatcctaggcagttcgtacaagatgtctgccttgttcaactttcaatcgcttctgctggttatcttgctcgtcatctgcacgagcacctatgctcactcgattatgccaggaattatggaccgtaatcaacatggcttcttcggggtgttctggaagtgtgctcgaatcggtgaacggctcagtccgtatgtcagtatctgctgcatcttaatggctgtttcgatcttctttggaggttgaaagcttatggttgcccctgttttttttcataaacagttcttccaacttttatttttttaatgaatgaagatcttcccagcaatcggcgttaaaaa

SEQ ID NO: 2212 - DNA, 560 bp, Aspergillus oryzae
ccccttctcacctttcacttctaactcaattgccttaccctatccccatttatccctattatatcccatcagctctctctagtttgtgagactattcgcaatctgtccactactgtacagtaacaatttggaacctccgtaccatttcactcctcacattcttgtttctcttattttctgtatgactatctccttttgacacagcgtatctatttaatttgttgctatcgcttaatttgcctttgccctttcttccctgtactgtgccccgtacaactgccatcatgcgtgctaccgaagtcctctattatatgctccgccccagccagttgaggtccatcgttcagtggaaagtttggcacaaccctgtccatgaacgcaatgtgaacaatgaaacagaaacgcagaaggcctgcttcaagttccttgacttgacaagccggagtttcagcgctgttatcaaggagcttcatcccgaactcctacttcccgtatgtgttttctaccttgttcttcgcgggttggataccatcgaagacgacacgtcgattcctctcaaa

SEQ ID NO: 2213 - DNA, 530 bp, Aspergillus oryzae
tgcctctcgaagaggtgatggaactgctagtggagaatgggctcgaaaccgcatgaatggagcaacacaaaccttccgccgtccgtcagtcgcgactaacccttcccacagccgggatactagccagcccgcatccgccacgactcctacggccggtacctacactcccccacatatgctctcgaattaccagtctagcgcactccgcaacggggcaaccaatgacactcggtattccaaagatcagctgttagaactttataaggctcaacgggacacgggtattttgggtaagaatctcgcagaatatctcgccgccgactggaatccgcaggtagagacatccgctgccaacggcgcctggggcaggcgggaggattcgaaagataatccctctgggcctggggtgtgctgggatcacggaggacagatggaaccgttgagcctagtggacatgactgatgacgagaaagagttgttttccctctcagtgaactccccactgaagccaccacccacgaatgtaccca

SEQ ID NO: 2214 - DNA, 585 bp, Aspergillus oryzae
cgaaccctccacgtgaagatttccgctccccagagcacgaagcgaagcgcgaccaccatcgtgtctcaagttgggaaatcccagtcccctgcagccgtagtcaacggcagtaaagaatcagccgatgcggacactcccagcagggaacgcgctgcgcgtagcttgggactgatgaatattcccgacacggtgaatgacgcgcgtatccgggcccttgtggagccgtacggcaaattgatcaagattgtcttacggcccgatcatcagggtgccattgtggagtttgccgatgtgaatcatgcgggccgggcttctttggagctcgagggccaggagattgcgcccgggcgcaaattgcatgtgggcaccgtaccagagatgctaaaacagtccgctgagaataaagatggtcggatacaaccatccagcaagccgaaggagaagcaagggggattcctccagcccacggggccgatcaagcgaccacaacaaccgggttcgcggggtggcccgacgagggggtctcggtgtgaaacgcgccggccctcatggaggacacaacggagagaaacgatgacgacgaca

SEQ ID NO: 2215 - DNA, 656 bp, Aspergillus oryzae
cgacccacgcgtccgctgaactactatacctcttcctctattcctatctctcaccgttcatcatgtctctcggcaagaaggttaccctcaactccggcgccgaaatccccaccctgggattcggtacctggcagtctgcccccggtgaggttggcgaggccgtctaccaggccctgaaggccggttaccgtcacctggatctggctaccatctaccagaaccagaaggaaatcgccgttggtatcaagcgcgccttcgaggagttcaacattaagcgtgaggatgtcttcatcacctccaagctctggaacagccagcaccaccccgacgttgtcgagaaggctctcgacgactgccttgccgagtgtggcctcgactaccttgacctctacctcgtccactggcccgttgccttcaagaccggcaacgagtacttccctctcgtcgagggcagcactgtccccggcggcgactgcattatcgacgacagcatctccatcgttgacacctggaaggccatgaccaagctccccaagagcaaggcccgcgccatcggtgtctccaaccacatggttgagcacctcgaggccatcatcaacgctaccggcgtcgtccccgccgccaaccagatcgagcgtcaccccgtcctccagaag

SEQ ID NO: 2216 - DNA, 474 bp, Aspergillus oryzae
atccaagctcttctgctgcgaaaccctcccgcaaaaaaagaattagcaaacatgtcttcaaaccaatcttcaaagaaacatccgcagtggatgaagccgttaacaaatccagacaagaagtctgacccttctttcggtggtgctgcactgggtgctgcactgtattctgcaaaccatgagcgaaagaaagcgtggggtgaatacgtggcaaatggtggcgtggggcgagctcaacagcaccggcaagatatgcaatcgccgctagtccaggcttctggaaaggaggcatggaatgcagacccggcaagtggtactacgaagtgagctcaacaggggcggcgcgagatgcaaccgccgctagttcatgcttctgggaagatggaatgattacgtagcaagtgattgggaggagcgagattgacaggagcgagatcgaggtgctgccggtgtacgaagcatactatcagaatgcca

SEQ ID NO: 2217 - DNA, 476 bp, Aspergillus oryzae
attccttcaaaggcaaacataaatagcaagaagcttgcaaagccaggtctctcgtcagacccgtgcatttacttctgtggcaactctctaggtattcagccaaaggccacagcgaaatacctagaagcacagttagacacttggtcgtcaattggtgtatctggtcatttcgtagatctcgagggctctcctctgaaacaatggcaattgctttccgaacaagccgcagcatcgatgagtaagatcgtcggagcacaagcagaggaagttgcagcaatgggaaccctaaccgcaaaccttcatctcttgcttgcgagcttctataagccgactccaacaaagcacaaaattctgttagattggaaagctttccccagcgatcattatgccattgaatctcatctggcctggcacaatctcgacccgaaacaatccatggttctcattggcccagacgagggcgagtatgagatctc

SEQ ID NO: 2218 - DNA, 512 bp, Aspergillus oryzae
cccagttatttgaaattcagctcgcacgcatattgtacctctcatttctgaaaacaaatagtcgctaaaatgtcaactaccacggcgacggcgatgcaaagctctcgcccgcctatcatccctaaagatttctccgctcagcaacctcaaacaattcgtctatatccactttccaattacacattcggcaccaaggaaacgcaaccggaggaggacccctcagtcctggcccgtctaaagcgccttgaggagcattacgaccaacatggcatgcgacggacttgcgaaggtgttcttgtttgccacgaacataaccatcctcatgtgttgatgctacaaatcgccaatgcctttttcaagcttcccggcgactatcttcacttcgaagacgatgaggtggagggtttcaagaagcgactaaatgagcgccttgcgcctgtcggttcgcagttctcaggagaaggtgtcaacgaggactgggaaatcggcgacacacttgcgcaatggtggcg

SEQ ID NO: 2219 - DNA, 416 bp, Aspergillus oryzae
cgataatgctttgaacaaggcgccaaagcctcaattcacttcccgctacgccgatcctagtcatccagctagcagtggatcggctctcggactgatcactggcggatatattaccggtgaccaacttagggaccttcggggcgatcggcgacgagacaggttcggtcgcggcctagaatatgaaccacggggtatgcgagggagccccattgggccagtgggagctctagcagctacagtacgctttattaaaaatgggcggtcgccggatgagcctcaccagaatcctggtgaaggacctcacgatgaagaatatcgcagacgatctggcggccgagtgggttcacgtaacccgcgtgagcggctgcaaaaccgagggggccccattggcggtatacagaaattcctgaagagta

SEQ ID NO: 2220 - DNA, 403 bp, Aspergillus oryzae
  modified_base (74)..(76): n is a, c, g, or t
atttcacaccagatctcatctcacactgcaattatcaacacctcctccctatcttatcgaatacacccgaattnnnaaatgaagctttctgctatcttgctcacattcttcgccggtgccatcatggccgcccctgtcccggacaactcgatccatgagcggggcataataacacccagcaccccgattgaggaacgaggaattgctggtggcttggtgaaagaacgcggcctcgcgttgaagaagccggtcgttgagcgggccagactgacgcctagcgtcccaatcgaaaaacgaggagaggcctgggttaaaaagccaattgctgagcgaggggctgctgctggcgctggcggctgggttgaagagaggggatacggacgcccgatcgccgaacgggggg

SEQ ID NO: 2221 - DNA, 613 bp, Aspergillus oryzae
cgacccacgcgtccggttttctttagtctccctttctgttctattttcgtcttctagtggttcgtttggctggtccagacgagtgctattttttgagtcttcctatttttggatcttgcattacgtcaaataatagtatcattttacacgccctgcgtctaagaagcccttcgttgaccgaagtgaatcactggcgcctttaatatcctttcccattactttaaatctccttcgctccccccaaagctgtgtccagcctccacctccacaatgatccccactgcccgtgctgccgcaagacccaagttgagcctgagcatttctgctgcgcagaatacctcacggcctacattgtcgctcaagtccccaggtcctcttccccggactccaatctccccgtctgccgccagtcccagttccgcccggttctcatctcttcaagtgccgagttatggctacgtcaactcatgttcctcgaagagcattctcaagaaacagtcgacagcggtcgcagctggcaccgttaacaacgaatccagtttaaatgcacaccgaccgtccactgcgtgacgcctattgagaatcctgaggagtactacggtacgcacaccaa

SEQ ID NO: 2222 - DNA, 408 bp, Aspergillus oryzae
cgagtggcgcagccatcttccgctgatgtccgattcttcttagccaattcccaaggatggcgagcgtcatactccgatatacttgaatagattcaagttgattgtctaggatctaggtgtcttaccccccaaaccagtgactcgttcaacccgatagactcgaaagcatcatgacgaaaggctgctacacttgtcgtcgccggcgcatcatctgcgataatggcctccctacgtgtcgaaagtgtcgggatgcggggaaagaatgcctgggctatcagaaacccctcgtctgggtgaaaggtggtgtggccagtcggggaaaaatgatgggacgcagctttgatgatgttgcgcagaacacttcagatcgcagtagtgaggatgattctaatgctgccgccgatcccc

SEQ ID NO: 2223 - DNA, 412 bp, Aspergillus oryzae
cctttctatagtcccctgccttttggcaatctactctcctgggagtctattcactatactttccttttctacaatcctctataattcctcgtcgcatactctataaacatgtcgttctggagagaaactttccttaatttgcgtcatgccgtgccgaagactgtccccggagatcgcgcatgccgcgcccaatcgaaacggcttcttacttattcctcacagagtcctcgagtgactgccccgaaccagtactcgttgtacgctaagagacccgggtatagtgtgagtcaacggcgggtatggaacggattgaaccctcaatgccgaagcttttcggcctccgcgggagttcagcatggccatatcacacctccgaaacccggagaggagctcaacatctctttcattgaca

SEQ ID NO: 2224 - DNA, 460 bp, Aspergillus oryzae
ctgcacttggtccctgtcttcggtcctttgtcccttttcctctataagcagaggggttcagaagatttctctgtagttgttgctcaaaatctagcttgagcgtgctgcagcaatggccgagttgcacaacagaaaagccgaaaaggctatcgagaaagacaccactcctactctgaaagagctcaaggatgcgattcccaaggaatgcttcgagtcctcggccgtaacatccctcttgtacctagctcgcgatatcctgtactgcgccattttgaccgtcgctgcctttcaaatccaccgcattccctcattaccgctgcgtatcatagcctgggctacttacggtttcttccaaggttgtgtcggcactggaatatggattctttcacacgagtgtggtcacggagctttctcgcctaaccagaggcttaatgacttcgtcggctgggctgggcattca

SEQ ID NO: 2225 - DNA, 357 bp, Aspergillus oryzae
gttatctatatgcgccatagaacgccgcgatgcactcgtcatctgatatccctattcctctatggctagactgcgatccgggccacgatgatgcatttgccattcttctcgctgcccaccatccatctctgaatttattgggcatcaccacagtccacggcaatgcctctctggagaacacaaccaacaatgctacaaggatattggaggccatagggcgaccagaaattcctgtatatccaggtcataaaaagcctttctgtaggcctgcaattcatgcgccgaatattcacggtgattctggtattgatggaaccgaacttctaccgaaggctacaaagtccccaattacagaca

SEQ ID NO: 2226 - DNA, 658 bp, Aspergillus oryzae
tcgacccacgcgtccgggtcgaagttggaatgggtattcacaacgaacctggatctcatcgaatgaaattcactttgccagagctggtgaagaccatgcttttccaaatcttggatcacaacgatcccgaccgtgctttcatcacacgcgaaccgggcgacgagttcgtgctcctgattaacaacctgggtggtgtgagcagcctggagctctctggtatcaccgatgaagtataccgtcagcttgagcgggactacagcatcaaacccgtacgagtcattcaaggaacttttctgaccagtctcaacgggctgggcttcagtgcttccctgttgaagctcgctgataatggcttgggtgctggcaagtctttccttgagcttttggatgctcccgctgaggcagttggttggtccgctccaatcccagcttccacctgggaccgtcgcaccgatgctcctgtagagctcaagaagaccaagttagctgagcaacagcctagtaacctcaagttggaccctgctactatcaggaaagtcttgggaagctggtctccggcgcatcattgacgccgaaccgacggttactcgctacgatacgattgtcggaagaccggtgactggtggtggttggcttggaaacgtggtgccgaggcttg

SEQ ID NO: 2227 - DNA, 431 bp, Aspergillus oryzae
cggacgcgtgggtgttgcttaagcctcctgcagcttgtattcctgtaatccgccggcctttcgtgacctctatcattcgcgccggccagcaaagatctcggagctctctttctagaatcataaatcactcggtctcaaactatcgcaaattcagttcaagtaccccaagaatggcagaagatatgccgactgggggtgatccctttccgaaccccatctccggtactaccgacgaagccagctggaagcatcgcccgccatacaaggtccaaacagacgaagaattcggtcccgttaagtggaccggaaggtgccaatgcggacaggtagagtacaaaataaatcgagagaagccattgaagtcaaagtactgccattgtcggggatgtcaagtattgcacggtgccccgttccaatgggccactatattc

SEQ ID NO: 2228 - DNA, 432 bp, Aspergillus oryzae
gttcccaattccagcaccaccaacaccgccgacatgggtcactctcacggtttgagatccggcactcggtatgccttcagccgtaacttcaaggagcacggccagatcgccctgtcgacctacctgaagacctaccgggttggcgacatcgtggacatcaaggtcaacggtgccgttcagaaggggtcagttcattccgcccattgaaaagcgacaagtccgtgttgaagcggatttgcgatttgcccttgaaattgtgtgggatcgtttgctgagactggaatagtatgccctacaaggtctacaacggtaagactggtgttgtctacaacgtcaccaagtcctccgtcggtgtcctcctctacaaggttgtccgcaaccgctacctcgagaagcgcgtcaacatccgcatcgagcacgtcaagcactccc

SEQ ID NO: 2229 - DNA, 521 bp, Aspergillus oryzae
caagcacctacctcttccctgttttggcttaacaatggaaaagccaatatcctgccaaaagatactcggcgagattgtcagtctcatctctttgcagtacgccaatgttctcgtgaactcccatccccaggtagcacagggggtgcacaaccacagctactttcgatccgatcccatgaccagagtatactacactctactctacgtttatggcgtgattggaacaccggaagagagggattatgtgagcaaaatggtcaacaaggcccatcgcggagtgaggggacgaaactacaatgcaatggatcccaagcagcagctctgggttgctagttgcttcttcgtcgcaagcttaaatgtacaagagacattcttcggattgctggatgatcaatctaaagagattctctacaaagatgcaacccgatttggcacatcccttcaggtgcctctggaaatgtggccagaaaacgttaataaattttgggaatattggaaccatgagattcaccattttgaag

SEQ ID NO: 2230 - DNA, 447 bp, Aspergillus oryzae
gtctggatgtcggccttcatccggctctgctgtcggacactgttgagtttcgcggtgccaagggaagacagtctacgcaatcgaaaaaccgtcgaacagaatctccggtcaccagtgggaggccggatcgagcagggctcgatctttccggtccttctttggaggaaatcagaaacaatccctattatgaccctagcctcggtccgaaagctacgattgcaaagccacgacagtcgcgacaacttatttttaaccaaaagggtaaatacatacagcagggcgctgctctgcgtcggcaggctcaattggaggcgatgaagaaacgcattgccgagcgagcacgacaggctggtatcgatgaagatctggatatcgaaaaggcctttcttgttccagctccaccagcaattgaatggtgggatgaaggactggtggacggggaggact

SEQ ID NO: 2231 - DNA, 658 bp, Aspergillus oryzae
  modified_base (189)..(189): n is a, c, g, or t
  modified_base (484)..(484): n is a, c, g, or t
gacccacgcgtccgcgcatttcccacccgcacctctctcggtcagcaagctttctgtcctgagcggtcgccgccctgctcatactctcctagggcttatactttcatcctttctcctttaccttttcttccctttcccttgagtagcatattccttatctccaccacaacccttctatttctttgattncatcgttggcctcctgaagagggaagatcaggtggttcatcatggagaaggacgaaatcgaggccaaggccgagccccgaggagcggccttcgagtccccgccacctctgtacggagatagcgagccaacacaggcaggtcttggtcgcagaatatgggacagtttcaaaagggacccgaatgcccatgtcacgggcggccatggttcctccggtgcagatggaaagtcctttgatatcgaaaacgccgcgcagaagacggctagttcacctttacaacgtagtctcaagggccntcatctgcagatgattgccatcggtggttctatcggtactggtctttttgtcggatccggaaaagtcttggccacaggtggcccagcgtcggttctcattgcttatgctttgattggttgcatgctttactgcaccgtacacgcacttggtgaaatggctggtcttttccccgt

SEQ ID NO: 2232 - DNA, 526 bp, Aspergillus oryzae
ccggaataatcaatgacatcctcaatgtccggagtgtgcctgccgagacagatccgcaggatcatccccggatgcctcgcggccatcttgtttgtgtcttatctttctatgacggacacgtttagtgagctaagtgatggtctatcctaccgatcctgtgaaacccaccggtttttccctaagaagatctggcaatcatggaaggttgctcccttcgagtttgaggagcgcgaccttaccgtggctcgtagctggacgtccaagaaccccggctatcgatacgaagtactgactgatcaaaatgatctttactacgttgaaacccactttggccctgacgggttcaatcgcccagacattgtggacacatatcgcaccctcacggcacaaattatcaaggccgacctactgcgatatctgatcatgtacgtggacggcggagtttgggcagacattgacgtcgaggctctccgaccaattgaccgatttattccggagcgctacgatgagcacgacattgatatgg

SEQ ID NO: 2233 - DNA, 673 bp, Aspergillus oryzae
gacccacgcgtccggcaaagacttggctccgtgactctcaggcaagatgaccagcaagctattcagctttttgactgggcagggattgctaccctcagggcttataccatcgaggagcgtttcgcttctttgcttgctcgctaccgcagtgccgagaacacgattagacaactgaacaagcagctcgaggagttcgtttccgcgaagacacagcacgaagaacaactgatagtcaatttcgtccagctgttaaacgaaaaaaagctcaagatacgcaaccagcaacgcttgccagcctctgcaaaagtagaacaggaaaaagtgtcttggatccagaatacaagatcagatcaatacctccgaccgcacaagaatattcgggccgcgaagcgtaccgctgcggaaatgagcgatgatgaggcggagagtgaagaggaattcgaaacaatggaattcaatcaaaccatgcactcaagtgatttgggggaggccaatgaaacgaccgatgagcgatcctcaacacctcagcctctggaggaggtggacgagaatgccactgatgaagggtctcccgcaccctcagatctgactggcagtgaggacgaaaggcatatgttcgaacatagaggcccaactggtcgccctataatgaaggaaccttccggttcttctt

SEQ ID NO: 2234 - DNA, 542 bp, Aspergillus oryzae
ccctgggacaatgctcctctactttattacacactctctattctttacctgtctagaaacaagcatgcctaggagtcctcgctttcttctttcgttgtttgttctttgatttcagtaatagaacgtattcgcacctcttgaacctatttgttatcattcaaagacaaattaggctctttcttacagtgctatcagcgctccatgcctgatattattgtctttatccacgaccggcgttatcgtgatcagaacagactgctgggcagtgctgcagcctattcgaccctatttatatattctgtgctgtcaattattatcattaacttcttcgtcttttctttttctctttttgaggatacatcatttctttccctcttccaagcttctcttcccaaggccacctatttttaaggcaaccaagtcgcaatgtcgaatctgtcgccgactcctccaacaccaaaaggccctcgtaacaaccggcgcaacccaaaacgaaatgcgacgccgactacacaaagggcaactctgttaacgactcctcc

SEQ ID NO: 2235 - DNA, 535 bp, Aspergillus oryzae
cccatcattcgttctaacttttggacgttccaaagcttctattgctgtacccggtcgtcctactagccaagacctttcctgttacccatgcagacataattggcagtaagtcactctttgtcatcgatcttcacagccggacattgggctacaatcttcatgtccgatagctcttccgaacctccttcattcccaacacctgcaccgcagtgatcatcgatcctattgtatggcgatggatcaagcagccgggaaggccattttaacatcagaaaatttccataatgcgcacgaagcatcacgagccacctcaccgggtggtgggcctacagggatgaacgggaatggcgagcccaaggcacgagtccgtcctcgcacctatccttatttcaaatatctaccatattcgctcgaagatgaacccgagagggaacagagcttacgggagatcctcactcagctctatgttgctgtggaggcgggtgatttcagtcccggtgccgtgcactggactcgggagcttagaggatggttg

SEQ ID NO: 2236 - DNA, 471 bp, Aspergillus oryzae
gtctatgtaaactacacaagtgctacaaagctgccttgtttcttcctatactttcctccttccccatagactaggagcccttggcccttagcgacattttagccatggccactaagactttggaaagccgcttcgaacatctttcggtcaaggacgagaatgtatcaaacaatagctgtagcacctatgcgaagaataagggctccctgtcaacggctgtctccgtttctggacttgggaccacggctcaattgaacaatagcgccaatcggtcgaatctgctcaagctggctctgcagaatacgaatgacaacaaggtcaattcgataaatgtcagttcatcccctaccaagggtacattatcgcatcgcaacgtagatgagaacggtgaccagcgccaccaaacatcgctttatgaccaaccagcaccgaagaagctacatctgggaatgtttgaaataggaaagccct

SEQ ID NO: 2237 - DNA, 413 bp, Aspergillus oryzae
aaaaaaaattcttaactcacttgtgtttgttatcatacccttcttaagataccccgttcggagtttcattgcttcggactcttgttccttttcctcaattgctccaagataatcaataccgtttgttttctctcggtgcccctctctacccctctcaacatttatcaattgatctctgcaaatcttccccccgccgcccaacatgtctttcttcatcgaaaatcccaatgtaggggacaccaaccatctggaggactcgagaattcgaggatataaccctctgacaccccccaaccttctccaacatgagattgctatgacagaaacttccagacagacggtcttgcaagcccgtcaggaggctagcgcagtcgttcatggcaccgacaccgacaagcgccgtctgctggtcg

SEQ ID NO: 2238 - DNA, 426 bp, Aspergillus oryzae
  modified_base (230)..(230): n is a, c, g, or t
  modified_base (242)..(242): n is a, c, g, or t
  modified_base (355)..(355): n is a, c, g, or t
tcgacccacgcgtccggattctgaagttcatccgtggtactgttgctgatggctctcctattatccccatctccgctcagctgaagtacaacattgatgctgtcaacgaataccttgtttcccacatccctgtccctgtccgtgatttcaccgcttcgccacacatgatcgtcatccgttcattcgatgtgaacaagcctggtgccgagattgatgagctgaagggcggngttgctggtggntccattctgactggtgtgcttaagcttaacgacgaggtggaaatccgtcccgggctcgtaaccaaggacgagaacggcaagattcagtgccggcccatcttctcgcgggttgnttatctcttcgctgagcacaacgacctgaaatttgctgttctggtggtcttattggtgtcggtacccgtgt

SEQ ID NO: 2239 - DNA, 401 bp, Aspergillus oryzae
aaccgggcccttcagaggacactctatcttctggttcagactaaggaggggtactggaggctccccagctctccagtggagcaggatgaaactcttcgactggctgctgaacgtacccttgcgcagactgccggcgttaacatgaacacctggatggtgggcttccaccccgttgggcaccacgtctacaacttcagatatccgagggtcgacaaggccaatggcacggagcatctgggcgagaagactttcttcatgaaggctcgaattatggccggacaggctgatctggccgccaacacgcagaatctccaggacttcaagtggctgaccaaggaggagattgcaccctatgtgctgccacagtactacagcaacattaagaacatgttggctgagcg

SEQ ID NO: 2240 - DNA, 430 bp, Aspergillus oryzae
  modified_base (129)..(129): n is a, c, g, or t
actagttctagatcgcgagcggccgccctttttttttgttatttttcttttgttcttttcctagcctttgtgacattgacggacggattcgacatagactacggcgccttttaagatggaagcggagtntcggtttattttgggcaacatacctctatgccagtttctttacttctttccaagcgtgggtggacaagcggtctagttttgctcgattccctttcaacttcgaacacgcactttacactcttaaattatatttctctaataattttaaggggagaggacgaggctggcaagcacttggttcatgatgtgaatgtcgttacgaaagcgatgaacgaaacgctcgcgcgacatttgacatgcttgtatgtattctatctcaacagtgccctttctctgggtctgaatcaatcattgtgatctt

SEQ ID NO: 2241 - DNA, 549 bp, Aspergillus oryzae
  modified_base (60)..(60): n is a, c, g, or t
  modified_base (83)..(83): n is a, c, g, or t
ttcacctttattatcttctgttgctccctcccgagactctctcgtcagcaacacactctncactcttcctatattggagctcnacctactacaactgaccatcactgccgctttgacttctaacctcatctctccatccatcattcacacacaatgaagtacaccagatcatcagcgataccaatgtttccacttcaggcctggagtggcaacgcggccagtctcagatcctcccccagtgaggcatcggccaacaccgacccggtcgccttcagcttcgatactacttgggacggtggctcgcccatttccaccccggcagcccctccaccaactcctcaggactctctgcttgatattacccctcgcaagtgctctttctctaccgcctttggcatgagcaacgcttgtgctttcccctcctggcccaaccgaccggctttgatcagcacggacaccgaggtttctactggaagcgcctacatctcggacgaggaactttgcttcgatttgggaccccagtccgaatccgccgtggaagaagagtcg

SEQ ID NO: 2242 - DNA, 563 bp, Aspergillus oryzae
cctgtgcctccctcacgcacatctggagtcacgaccaactctcccggctttacttcgtcggtcctgtcgttcacttcttcttcccctcctgtcacggggtcatcgtctttcgttacgactactactactctcgcttcctccacttccacttctacttcaacctctctaccttcgtttactagcacactcgtttctgtcagcactcccgtgagtgcctccagcacaatgtctctaattccttctccttcgtcgagtatcattccttccgcaacaccttccgcttctgtcattgccaatggtaatgtcgcgggtaacatcttggtgattgcgaaggacaccgctgctgctaatgtggctacctcgggcctcaatggctatggtattccttttactaccttgctcgttccgcagtctggtgttactctgccagagctgaatggcacctccggaggaaactttggcggtatcgtggttgcgagcgaggtcagctacgactatggtgcccaaggcttccagagcgctctgactaccgaccaatggaatcaactctacgcctatcagct

SEQ ID NO: 2243 - DNA, 575 bp, Aspergillus oryzae
atcctgggtgcccaaacaacttattacaagtataaagtgaacgtcaatatgggttccacttcaacatcgactctcccacccgactttctatggggattcgcaacagcgagttaccagattgaaggagccgtaaatgaggacggacgaggtccatccatctgggatacattttgcaagatccccggtaaaattgctggaggcgccaatggcgatgtggcttgcgactcataccatcgcacacacgaggatattgccttgctcaaggcttgcggtgccaaggcataccgtttctcactctcttggtcccgcattattccactcggtggccgaaacgaccccatcaatgagaaaggcttgcaatattatataaagttcgtcgacgacctgcatgctgctggtatcactcctctcgttactttgtttcactgggatcttcccgatgagctcgacaaacgctacggcggtctcctcaataaggaagagttcgtcgcagacttcgcccactacgcacgcatagttttcaaggctttcggctcgaaagttaagcattggatcacgttcaacgagccatggtg

SEQ ID NO: 2244 - DNA, 621 bp, Aspergillus oryzae
taagcccactacgctaggtcgctcagcctcgattaggacggtatcgaccagcacaaaggcagcggccggcggcaccccttcgaatcttgcggccagtaacgaaaatgtctcgactcgaagcaagagcttgctgcctgtccgcgatgacagccgatcgacaagcccattgcgacctcagccgccacaagatagccggattgctcagcgagcgagcaagccgccacaagacaagctatccgctgcaccgaccctggcgagtcgtcgtcgaagtctaattaaaccgactccattgaagaccactccatctcctgcgaagcctactaccgtgtctacaacaccgagacgaactagttttgcgcctcccccaccctctccagcgaagcaaaatgggcgtccaacatcgccgaagaagacagaaatgcctcccccgccccgcccgtcgaggtcggcttctttgcgacagcctgcaagttcgagtttggggcctcctacaccaaggggtcatacgcgacaccgcagccaagtgatcccccccgctgctagtcaagtctctaggaagacagatccgccatcggcaccaagcacaccacgttccaggacccaattttcgacctaccagca

SEQ ID NO: 2245 - DNA, 535 bp, Aspergillus oryzae
cggacgcgtgggcggacgcgtggggagaacttaggactgaatcggcgctgcaacacggtacttttttcttagatggagaaggcagtcccagtggtgcactgcgtcgttttgttatttccggtcaaggaatccctgccctgtcatctggaagtagtcctgcttacctcgacaaccaagccgccgtaatgcgcctgtttcagcaggtattgcggtcgaactatccgagtcaagctattcctcaacaggcccagactctatatcatgccttttcggctcttggaagcatacggagagtcaaggaatgtgaagtcccgagcaagaagctgcctccggagtagttattggcagtgtctccattctgctgagggccttttattggtcttgcactttgcttcctgatattcttctccctggtggagaatttgactagcgatgtcctttttacattcagtcacagatggcgcttggtggggttttcagatgcacgatgtcaggtcaccgaccgatccttttactttccacccagggctacttt

SEQ ID NO: 2246 - DNA, 469 bp, Aspergillus oryzae
tgagatgtgtgctctgcgtaagcaagctcacttgaagaagaacttcaagccctccggtaacacggagacgcttttccccaacacctactacctcactgaggtggacgacatgttccgccgcaagtacgaggtcaaggcatgaataatggctagcgcttgatgttaatttggacatgatgagtttctttttcttccttgtttagacgattcattagattcccctcaggaccgcattgtcgtgtttggttgccttgatagagctcgcaaactgggttatgtctgcaaattgtctcggtcgattttatttactttgtctgcctgccctaggttctcaggaggagcccagaaggaaaatattttcttgtttttaggagctggcatgatgctgatgttcctttccgcccaagatggcgctgaaatgcttccggatttatgagaagatcttatttattaattaaacatattaatc

SEQ ID NO: 2247 - DNA, 535 bp, Aspergillus oryzae
  modified_base (185)..(185): n is a, c, g, or t
ctttctcggatctatacctgtgcaaggccagaatggccactgctgagggccccgccagggcgcatgaccgcaatggacgccgtcgcccattttccagttggatgaagcgcctcgccaatctcaagagctccaccgactcaggcagtactcgttggtctaataaacgccatgctgtacccaaacanaaacggagcctgaagaacaacccctacccgctctccggcacagtcaacatccatgaatataacagtgacaataatccatccgacttcagcgatagtaatgaacagaggtcgtgttcgcagagcgagccgtccctggcgtactccgggtgcgacaatcaagtgccggcgaccagtgcaaagtctaccgcgccaactatctctacaaacggtgacacggcgatctcagatgctgcatattcgaaggctggaacaatggcaacggtgggcggtgggatcagttcacatggtggaggggaaggaagtaccttctcctccccagcaccgtcagtacggtcgctaaccaccacttt

SEQ ID NO: 2248 - DNA, 501 bp, Aspergillus oryzae
ccttgaaataggcttcttatacctgttagcacactgctattattcaggttcctggctcaactgtcggattttacaagtaccaatatggagtcttcaagtccaacagaaatactcacaatcaacgagttacgcgcagcagcgtcgtccaacctacaaaaggatgttgaagagtactacaatgagggagccggggatggtcaccatgagtgagaatgagacagcctttgatcgcttcaagattcgaccccgtattctttgcgacgtgtccaatattgatacctcaacaacatttcttggcgaaaaggtctccttgccgataggatttgcgccaacatgtatacagtgccttgcacatcctgacggtgaagcggcgacatctcgagcagcaacccaactgaacatcccaatggtcttatcaacattctcaacggtatcattggaagatgtcatctctgagcgcaaagagggccagaacccatacgcgttccagccgatcttccc

SEQ ID NO: 2249 - DNA, 434 bp, Aspergillus oryzae
gactagttctagatcggcgtgcgctgtcaatccctccgtccgtatgtcttgacccggtcaaacacgtcagccatatttttctacgtgatggcttattcgcccctgcggaccctcgttggtctcgtagcagtcttccacttcttcataccagcgctgtcgctggaagtgacggacgcctcaaaatgtcgcggagagtgcggtgataggaaaaacactcttacgactgacctcgtctgtcaagattcctcattcaacacgactgcaaatggaatcacaatgaaaaactgtctcctttgcgaaagcacaggcacgacgtacctaaacaatcactcgggcgatctctgggatttcctgttcattcaaaaatacactctccaaacctgcctctacgacggcgcatcggaaacctccatctccggctgtgaagacaactg

SEQ ID NO: 2250 - DNA, 428 bp, Aspergillus oryzae
accgtcatccccgctgccggtaccttcctgaacttcgtctcctacgctgccggtgccgtccgtctgtccgctctctcccgcgttcgcgtcatccacgtcgctacccacgactccatcggtctgggtgaggacggtcctactcaccagcctattgagaccctagctcacttccgtgctctccccaactgcatggtctggcgtcccgctgatggcaacgagaccagtgctgcctactactctgctctcacctctaagcacacccccagcattctggcccttacccgtcagaacctgccccagcttgagaattccagcattgaggctgctctgaagggtgcgtacgtcgccattgaggcccccaacgctgccgttaccatcatctccaccggttccgaggtcagcatcgccatcgaggctgccacctacct

SEQ ID NO: 2251 - DNA, 273 bp, Aspergillus oryzae
gaagcatattgcttgtacactcatttcgattttatctttccttcgggttatatgacttgcaacgaactatacaacgccattttgaaagcagaggcgccgtgcgccctttttgattatgaaacatgtgttcacacacatcgcttcagcccgagccttgacgctgtaccagattatgatacccactatgtacgatcctttcttacgtttctttcctacatatcaaagatgttgtatattagatacctcaggataacattgataaactacctttcg

SEQ ID NO: 2252 - DNA, 659 bp, Aspergillus oryzae
cccacgcgtccggcagactgatcaatgcgagcggtcgtctgttccatgcctgaccgctatttcctccaatttcctcaattcacttagttgaaccatgccccccgagatgagggagaagtccatgccacataccatggcgccctccgaatccacgcctcttctgcaggtggtcagcgtcggtccccagcggcaccggtacccccaccacaagctacgacagttctgtagcttcactctcgggacgctgctcgtggtttctctgttcttgttcctccttccctcagccatcttcccccgggagcatggctccatctggtcttacttccctggggcgcgtccgttcccccacaaagcgtggccgcagggccacggtctcaagtatgaagagctgcaggcaattcttcaaacgaccccgtccgctgaaaaggcacgggagtggagtagctactatacggcggggcctcatctcgccggcaagaacctgagccaggcgatctggacccaggagcgctggcaagagtttggcatccacgacactgacatcgtggcctacgatgtctacatcaactatcctttggatcaccgcctggctctgctaaagaagtccaaggacacgaccgaagttacgttcgaggctactcttgaagaagacgtcctag

SEQ ID NO: 2253 - DNA, 431 bp, Aspergillus oryzae
ctcgcttcaaaagacagaatcgagcccggctccttcaacgtccccgtgggagcgtttcccgcaacatgctcgtcaactggcattgacgctgacaagatcgcgtcggaggtgatacgactgctgaacacggcgttgggactgaagcaaccccagcagatctcgaaactattccttgaagatggttactggcgagaccatctcgttctgacatgggacttccgcaccatcaagggccaagagaacatcaccaggttcctccaggaaaatccccgtttgctacaagtagaaattgaccggtcgtccgccttcaaggcacctgctattttccctatcgatgcctttggcgacgtcaccggagttcagtttttcattaaggtcactaccgacgcgggaagtggaaagggtgttgtccgactggccgagaaggacgg

SEQ ID NO: 2254 - DNA, 442 bp, Aspergillus oryzae
ctggagaatctttctcaaacacaattcagtgcaccgactctagactttcggtgtattatccaggatgtctagcctcccaaatgcctccaacaattctaagcctcgatttgaaatcccccctaatatttctaatcagcctcggtggctcctcgacctagacgactgggtagtgagagcatattctcgcattcgttttcaccaagacccaaagaatcgcgagtatggttatggcatcatctcgtacacgtggggcaaatactggaacagaacagatactgtcccagagaaagatgctccagatgggattgactggaaaattccacgcttagcaaaagatgctatctcactggacgaggcaaaaaaagtcattactagtatgggtaaacgctacgtctggtgggactggatgtgtgtcccgcaaggcggatcccataaagacatt

SEQ ID NO: 2255 - DNA, 429 bp, Aspergillus oryzae
tcctctcttagctccctttggacttcttttttttccttttttgttcgttttttctttttattcaattcttttccctcctcccctccttgaactctctcgctccctcttgaaccgccgcatcgaagttcgggcggtccttgtgtgcgctctgtggttctggttgctgacctcttccgtgaggctgcatctgtgatcattacctctttttacccgctttttcttcccactagccgcaccttgttttctacacccccttcgtccaaaacccccgttgggtcttcctcgattctccttctactctcttctctccagtccggagatttactagattcccccatcagaagatatgtctgaagctcaaacgaggtcgtctgcctctcgtggcagggtatccgctcgcggcggtcgcggtggctatagctccagagg

SEQ ID NO: 2256 - DNA, 339 bp, Aspergillus oryzae
cattcacgcactccccacgatcgctattcaattgcagtacggaaaatagccctgtgaatatctgcaatatttggatcattgcggtacatattgtcctccgtccctcggcaggtgtgatcgagtgttggtgcttttcggacaccgccgtgcttatcaatcaggatctcgcctcaacccgccattatacggtgtcctgtcgccgcgataatggaagacaacgctgaactagagtcgtttcgacggcagtggcgggaggaagttacccgccggacgaagcaggctaaacctagcacaccacggccaatatctaccacgggcccctcttctattgtacgaccg

SEQ ID NO: 2257 - DNA, 521 bp, Aspergillus oryzae
tcgacccacgcgtccgccctttttttttttttttttttttaaaatataaataaataaataaattatattcccaggatagtcccaagtatggtttaaagaacaatggtctgtgaagagctcattcaaacatgagatgtcaggggctcattacaatcattgaacaaaaagcccgacagccagtcacaaccaacatatcaataaacaaacgcaaaacagaggcacatccctgcctggagcgggctttgtccctgccgatggtggaacctagagttgctcatcaacacgctaatttgctggtgagagccaacctcaccttgctagccttagtttccctccgtcaggaacaaccagatgaactaagcattgtacttaccccccggcctctattcgctgtcctcttctggttcttcgtcttcctcctcttcgtcttccatctccgcgtctaaatctaatacctcataacgcagaccgtcgccatacaagacccagatcgctcgacgatcgggtcggccattgacgta

SEQ ID NO: 2258 - DNA, 647 bp, Aspergillus oryzae
  modified_base (351)..(351): n is a, c, g, or t
tcgacccacgcgtccgcgaagaggaacgaaagggatgcggcctatgttaaacagacactgaaccagcttctcacggaacttgacggattctcgcagaccagtggagtgatcatcatcgccgcaacaaactaccctcagttgctcgacaaggcattgactcgacccggtcgatttgatcgacgggtagttgttgatcttcctgatgtgcggggccgtatggatatcctcagacaccacatgaaagatgtccaaatcagcacggatgttgatgttgctgtcattgcgcgcggtacccctggtttttcaggtgctgacctggagaatctcgttaaccaggctgccatcttcgcnagcaggaacaagcaggcaaaggttggcccgagagactttgactgggctaaggacaaaatcatgatgggcgcagaagctcgcagccgggttatccaagacaaggacaaacttcttaccgcgtaccacgaggctggtcacgccttggttgcttacttttcgccctcgtcgacgccactttacaagatcaccatcgtccctcgcgggatggctttgggtgtaactcatttcttgcctgagatggatacggtttctaggaactataccgaatcttggctgacatcgacgtttccatgggc

SEQ ID NO: 2259 - DNA, 470 bp, Aspergillus oryzae
aatcacgccagcatacttatagtgcaaagagacttaatgaagctgattactgccaattttttgacctgtgccgtcaaaggatgcaaggcatcaccggcgtcgttcccacttcattttagggatgcggaacttgagctgcaggagcttgattttcaacctgatttcattcgtaacattgtccctcggattgattggcatgcattgcagataatggcaaatgagcttgggttccccaaaattctggataagaagcccgagggcgatgagctcaaggatgagcaaatattaaaggagcttcatcgattattattggaaacgcatattaatgagggaaaattgacttgtggtaattgtgggcatgagtacttgatcaaagaggggatcgcaaacttccttctaccgagtcatttggtctaaaccttctgcatatactgtcccattaatcacggcaaactgagtgtcagattaca

SEQ ID NO: 2260 - DNA, 449 bp, Aspergillus oryzae
tgaagatgaatgagtataatacattggataagtaagtctaatatgacattgcgattgcgccgctcctgatattttaaggttcaaaaagcacccagaccaacagacagataaattgtacaccccgcattcgtacgttgctcatattcagcgtagtctcttcttctgtgctttaccagtgacccgaacagcaaccctctctcgctcttcagttgccttggccctcaaggcagggttcaatgctggcaagacccgggccgcgtcggcgatgaccgccttgccatcaatgatgcccgctctttccttctccaggcgtagtctctcagcacggcgagcttcgatttgtttcttgcgctccggggtcaacttccaggagtcgaggaattggagcttggtcttcggcttgtggtgacggagatcaaggggaatgtcggcgaatgcatctccttcct

SEQ ID NO: 2261 - DNA, 438 bp, Aspergillus oryzae
cttttttatgaggtcttctcgctactaatttgttcctcttgtttcattccttcgttttgatcccgaagtctcgtcgctgctacgatctttccgcgtcgccataataatccgcttacaatctgctgtcgtggctttagcatcaacggatcgtcgtcgatcatagcgtcctgaattcgccttctaccttgcgactgtaccattgcccattcatgggctgcagcccgtgaacttcttttcatttcgactctgttttagagaatttacagccgcatatcaccatgaaggttcagcacctctcgtcgccgtttctcctctttctcctccctgccatcgcgacggccctgacagacttcgccccgaatccggcgagctcgctcaatcctaccgttgcagagcgcgataccacagtctctaatgccgccgtagacggactcgcgg

SEQ ID NO: 2262 - DNA, 241 bp, Aspergillus oryzae
cctgaatattttctagcgtcgatcctatgttctcagataccccgtcgtgtacctattgttgtgtcttgtgttgtttctcataccccgagcgtgttacacgaacagctcccgcatcggctttttccacggtttgcatttgcatagctcagcgacataccctattttctgtgatgactctttttagcgaccatggttttatcgtttgatctaggtaatggcatgtgaatacgaggttgtactg

SEQ ID NO: 2263 - DNA, 376 bp, Aspergillus oryzae
cagatgcgtttctggtggaatttaagcgacgaagaacatgaggggatgttactagtgtagcaatcggattgctaccgctgcagctgcagctcagaaggcttgatcctcaaagaaaccatgcgccgccaccaccattggttggtcgaacctaaagaagatgtggaacgatagtcgatgggggggggggcatttttcgggaaagggggattcagtgtttgctatgaaagcacctcattatgaaatctccgcatgatttttttgctctacttttttatttccttttccttcttctttcatgttttactgtatctacaacatactgggaggattgctgattgcgttacgagataccactgaattgaatgctgcacatctg

SEQ ID NO: 2264 - DNA, 452 bp, Aspergillus oryzae
tgttacgtgtcttcgactttcgatcatctacactcttctagaccaacgctttccattgctgttacctgccacctcaccactcggagcctcattgacgttattccactgtactatggacaccctactaactgcggatattgttgctaactccccgcgattccggcgaaagtcgtcaacatttgttgatgcaattcatgatctgcccgaaaaggccgatttagcaccggctcagttgtatagtaccgaatctggccgacttttccactccggccggattgtcattattactgtgggcttaccagcgaggggcaagacacatatatccgtagctctggcgcgctatcttcggtggttgggcgttaagaccaggatcttccaccttggagattacagacgtgccactattccagttggccaggacatccctgatgattacttcttcgtgaacgcat

SEQ ID NO: 2265 - DNA, 480 bp, Aspergillus oryzae
gcatacttctagaagtcacgacgcgcccaacatggcttgagccaccatgactgttgttagtgccggtgtcgacagatcaattttgaactacgatagctgttgatctgccctgatattctcgaaaccctcataccctacaagggtcttcagtcttaattgaacttctcccacgaggaacttctgatcccgattacggcccaatcgcggagtccgacacaccctcaccatgtcccacaatttcgagaaatcggtaaagggggccaccaagattaagctcgcggcccctaaatctaaatacatagagcacatcctggtagcgacccatacaggagaagcgggagtagcagaaatatttcgaacactccagcttcggctacgcgattcaacatggacgatagtcttcaaagccctcattgtcatacatatcatggtaagggaggggcaattggacgctacactacagtatatggcggagaaccc

SEQ ID NO: 2266 - DNA, 527 bp, Aspergillus oryzae
ttcgaagcagagtgggacacgttagatgggattaaaggcacctccagaaaaggggttcgagctctcgaccggctcaaagtagtctggagatttccaccttcggaacctaaaacaaaggaatcagaaacggcccccacaccgggccaaatcatcaccgaacctagactcggcgaacccacgttcgagagccatgcagctgactggcgaggccaagacccgggcgaaccaaaagctgtacgagaccaggagaacatcccaatgcgggctcccgacgtcccagtgtaccaagaagaaagcaagggggatgctaacccgatcctcacaggtctcagcactgccaccagtagcgcagctgccgccgctacaacatcggtgcagatgcttagcaaggagctagggctgagaaggcagacagacgagagcaaagacgtcagcctcgctgaaagtgacgataacgagtcggtgctaggtcaccgaaagcaggaaggcgatgaagagaaaagacagactctgaatagagcagaaag

SEQ ID NO: 2267 - DNA, 570 bp, Aspergillus oryzae
  modified_base (54)..(54): n is a, c, g, or t
agctgctactatggcactaatcgacgcggtggcggatatcctttccgcttatcncgccttatccgatggtggcttctcagggtatgccgggtggggtgttgacaaagtggactctccaatcgccggagcgcctgcatcagtcatggagaacgggggctactctcatgccttcgcaaagctagacgacagcgacgatgcattggaagaagcacaaagattcgtatctgcgacgctcatgcaacggctccggaaatacaatggttctggtctcatgatctccgagagctgggagcgttatccatcattcgaagactattatatggcagcgacgagggctcagcaacaagttggattcagcaagatgacgctcacatcacgcctcctcgataaggcgtctctcacgggtgacccggcacagctcaaggagatgctacgtatcacttccacgaattcccccgatgtcccggaaaaggcaaccatatggactatgcttttcctcgttggtggaggaaaggtccttgacaaccccgctgatgcttctgcggaccgctatgttggagtccaccccgc

SEQ ID NO: 2268 - DNA, 633 bp, Aspergillus oryzae
tcgacccacgcgtccggaattttgtgaatttgaatccctgccataaatcacaagcccaagatgccgagcagttcacgactccctactccaacttcaaaactacatcatctgctcacgccacggccgccacgtctctgcttacttccgctttattccgtgtggcagccagcagcgttccacacgcctggaagcgtgcgcgttcgcctcaacagcggcataactcaagattggaaaggaacatcaacagacgaccatgctgtggaccgaagcaagaagaatgataacacagatcccactgttgagggggcttcttctggtatgaaggacagggaggaatatgaaggagtagcgcgaggtgataagcctcaggcggcaacggagagagaaggattaaagcattggaagaaggctaaggaggagcatcctaaggcacctgaaccgatcattggaatgaatgatgaaagagcccagaagggccattgatctgaaagttgggttgcttttctgcttcattcattttcggctatgtactttgaataaccgcctaagcgttatattgttcattcccagtcatatcaactgtatataaattggatactgaaatctatcggccaggcttgaaggatagtacct

SEQ ID NO: 2269 - DNA, 503 bp, Aspergillus oryzae
cggacgcgtgggcggacgcgtgggttctgtcacatcctccctttgtgtcaatctactagagaaattgccaaaatggctcgcgaggagctcatctcctctgcagttacttttcttcaagatccttcagtagcatcgtcgccagtcgagaaaagagtcgcatttcttcagtctaagaacctcacgcaagaggagatcgacatcgccctcgcccgagcaggtgaaggcccggctggagctactgcagtaactgcatcgtcagggtaccaaccgtcttcacaaccacccgcctaccgaggaccccctccacctgcccaaggatatggatatggctaccctccatatggtcaatggcagcctccgcctccggagcccccaaagagggattggcgcgattggttcatcatggctacaacagtaggaggtgtaggatatgggctctactttgtcgctaagcgctatatcacaccccttatcgcacctcctactccgccacaactagagca

SEQ ID NO: 2270 - DNA, 493 bp, Aspergillus oryzae
cacgattattccatttccatttcctcttcatccatcgtcgatcttctatcccaccacaacacaccatcgcttgtttcccatccccactgcgtaccgtgggtgatcattcttcttcttgtgcttagcctgttttcgtttttcacctcgcttcttaatcgcctttattggactcgtatacgacctccacctcgtctctcgctatcatccgggccgatcgagtcttgtaatccaccagcaccactttccatccgactttaaaagaacagtgtctcctcaattctccccggggcacatatatcacacacatcatggccacattagcggaacacccagttgtcgccccgtcgacgtacgaccaggatatcgataccttcctcaacctcgatcagctcacctataccacatcagagccagcccggcccaaggcggccctgtctcagccatccatccctcctacagaattcaacgctggtgatctgagaagcgccaactt

SEQ ID NO: 2271 - DNA, 427 bp, Aspergillus oryzae
accgctttttgggccaaatccaccttgtcgaacaatcgctacatctaagccgcttcccctccatacaacgactaatactagggcttgttcgtatctctttttgttttctgactgtgtccccccatcttcattgccagcaaccgctggctgagaagcacagactaccgccttaccgcgccagttgcacacgatgcatcaaaactgcttcctgcctcacaaccacgagctccttgttcttcaatattttgccattgacagttgcccccttccgtgtgccttgcgtcgctaatcatctccttatatcgaccgactgttttgatatttccagttcttgcatgcagccccggctatcgaaaagccatcgcggcgtttaacgtcttttgattggaaacactgtcctgtctttctagctccctttgtggcattg

SEQ ID NO: 2272 - DNA, 627 bp, Aspergillus oryzae
tcgacccacgcgtccgcccacgcgtccgtcaacatcccctcctttgtcccaccataaccactatatcccaccgtcatttctccctgaatagattcttttcttgcctaacatggcggtcaacggcacaaacggcacatccaagaccaatggtcacagtgtaaacaacggcactagtgcctaccacgccgcctccacccaagaggcgattcaagctgagagtgattttgccgctcacaactatcatcctctccccgtcgtcttcgctcgggctcagggcacctcggtctgggaccccgagggtcgtcactaccttgacttcctgtccgcatactctgcggtcaaccaaggccactgccaccctaagctggtggctgctctcgttgagcaggcgtcgcgggtcactctgagctctcgtgctttttataacgatgtcttcccacgtttcgcccaatttgtcactcaatacttcggcttcgatatggttctgcccatgaacacgggcgccgaggctgtcgagaccggtattaagatcgctcgtaagtggggatacaaggttaagggtattccggagaaccaggcggtcgtcttgagtgcggagaacactttcacggtcgtacatttggccgc

SEQ ID NO: 2273 - DNA, 441 bp, Aspergillus oryzae
  modified_base (177)..(177): n is a, c, g, or t
accgacaaacgtgactatcttacattggctgcttcttttctcgggatcaaggttgattggagagatggagagtatccggacaatgtgtctgagaagtcttacccattgaaactgggtgagtcgggtgtcaagcccgccgccataggctgttggcgcgctcatatgaacactttgatngatatcgtcgaaaatggctacaccacggcactgatactagaagacgacgccgactgggacgtatcactccggcagcagctcgctgaattcgcgcgaggtgtgcgcaccctgactaataaccagcatgaatccaagaaagcgccgtacggtacgaactgggacattctctgggttggaggctgtgcatcgggcgcacaccagaacgagaccgatttctacgtcatccccaatgatcccacggtcccgaataccacgattcggggg

SEQ ID NO: 2274 - DNA, 547 bp, Aspergillus oryzae
cttgttcctttgtattctactcagtttccaaaatatacccgtggcggattcaattgcctcgagactcgtgcttggttgagctgtgatcaaagcaatcgagctcttatctaccttatcaccgtctccccacatcagtttccaaaatatacccgtggcggattcaattgcctcgagactcgtgcttggttgagctgtgatcaaagcaatcgagctcttatctaccttatcaccgtctccccacatctgctgccaggagttcttcttctccccaactcacgcagcgggagaatcgccacacctctgtacaccctcatttctcataataaatcaatcataatggcctccattgctcgctccagcttcagattgcgctcggtgacgcgcgtgccgactgcccgcaccatcagcaccaccccgcaccttcgcgcggcggcgaagcccttctttgctgatgagcccgctggtcccaagttggccaccgccatcccgggccctaagaacaaggctgccacagctgaattggacaaggtctttgacgtgcgaagct

SEQ ID NO: 2275 - DNA, 496 bp, Aspergillus oryzae
aagtgaacaaactctgaacaatccatcctactcttctccctcacatattccgggaaacgccagtctccagcaccaaaatgcctacttcgcacggtgtatttaacggtaacgtcaatcaattcgatggccattggattgtcgacggcaacagtgtccagctccgtggtaatttcagccaaagcgttggacatttccaatcgagcaatgctacacttgaatacgacagcaccgaagaccttgctggcccctacgtgattgacaacgcgcaatcaccttcacatgtcggccacactgatgtggccctctcgttggtaaatcaagacggcaggaaagtcaagatcactggtagtctctcatttcctattcctgagagctctaccctcttcggtcacggagcctgggtcatagcagactaagaagagttggggaaacttagttctgagcctagatgactctttctggtcggattgtatcgtctcacctggaacatcgtgtt

SEQ ID NO: 2276 - DNA, 524 bp, Aspergillus oryzae
gcctctgcttacccaccttttgctcatgtgagggggaaagcaaaaggggaaaaaaaaaaaagaaagaaagaaagaaagaaaacaaagagccacagcgagctgaggctgaatgaaagctgttcctttcgttcctgatcttatttcttcttgtcccatcgttcgccaactcgaagtgcgcggcaccactctttaccccccttttgaactggctggggtttcccgctacttctcgaagtaacttaaagaagattaccagccacatcacttccgctcgcgaactccgaatcggggggaaaagcaattcctgccctaaaataagttctagcttgcgtagtacaagccttgtcggagattctgtggaaagtagaaattctaccgaaggcaattgtattcaatccgtggacgcattgacctggcttcttcggttctcgaagctctttgtcgtgctcgaattattccgccagtcctgcactcagccagactacaccctgaggacctgcagaaccattgcgcaactccttgcc

SEQ ID NO: 2277 - DNA, 417 bp, Aspergillus oryzae
ggtttctgccacctcagcgccttgcgtctagctcgctcgctgctgttctcttcccctcccccttcagtcgctttgtccgaccgttactgatatcatcttatctcactcgtacagaggaagttgctgctctcgtcattgacaatgggtatgttattgttggtttttgatggttttgttgatggaatcccccccgtgttttccatcccatcctgagcaggaaaacaccagctgccggcaccggtcgcaccgatcgatgatctctttcccggctcagctcccagctcttatacttcctggaattcgcaatgacgagatggattctctttgcctacaatccgtaaacgtgacttggcccctatactgacgaaattgcccttagttcgggtatgtgcaaggccggtttcgccggtgacgatg

SEQ ID NO: 2278 - DNA, 447 bp, Aspergillus oryzae
gcgccggagcaagatcatcctgacgggcattgacgatgcatcattgccagaacgtgacgactccaatcacactcccacccccgttgattggttaccggcaagacatgccgtgagtaatggtcgtattgttaacccgtttgtcgatgattacaatatctccgatgctgaattcgcctttcatccctggtgtttcggaacctatatgcaactctcgcggcttcgccttggctatatagaggttgaccgcttaccgagctttttccagaatataggccgctaccctcgtgacttctattactctcctggatctgacgtggaggaggcttggtttgtcgatatgtggtcgtgtaatgctggctccgaatggctggctgcaaatccatatcatgtgcctaaactacgggagctcctggacagagccatgaccaccgacgcatcgttcaattt

SEQ ID NO: 2279 - DNA, 607 bp, Aspergillus oryzae
cttttttccttgagtgcgatactaaaaaatatcatctcgattttggagggataatttttgaccgattccttcaaatacaatataacgccggtcacctcatctccctttggacaaaccgttgaacatcaccagtcgcctgactaaatacccgccaacatgggttgcggaatgagtactgaggataaggaggggaaggcccgtaatgaggagattgaaaaccagcttaaacgcgacaagatgatgcagcgcaacgaaatcaagatgcttttgctcggagcgggagagtctggcaagtcgacaattctgaagcagatgaaactgatccatgagggaggatactcgcgtgacgaaagagagtcgttcaaggaaattatctacagtaacacggttcagtcgatgcgagtcattttggaagcgatggaatctctggaactgcctctcgaggatgcccgtcacgagtaccacgttcaaaccatcttcatgcagcccgctcaaatcgaaggtgacaaccttcctccggaggtcggaaatgcgattggagctttgtggcgcgacagcggtgtgcaagagtgcttcaagaggtctcgggaataccagctgaacgact

SEQ ID NO: 2280 - DNA, 455 bp, Aspergillus oryzae
cgaacaaagcgtttattgctggtccgggatattatgcggatattggagaactagtggtgaaacccggcaatgatcaatatcagccggcccagtcctcccattccattggagctgtttcgaaatcttgacccgagtcctcacgggttccaccgagatcagccgtgtcaacctcaacgctctttacggtgtcatgtccgctttgaccaaccattcctcgttgcatctgagctacggaaacgatatttcacggtcgcagggccgttactgggaatgcattcctggtgcagagtactgtgccaagaacccaacagatacccccatggtcgacgagcttttccaaaacctgagcacggatagtaaatttaagcgcccttcgctagagattgagctccgggaacgacgccccaccgatccatttggccaactacctctcgagatcgcacagcagatttgca

SEQ ID NO: 2281 - DNA, 563 bp, Aspergillus oryzae
  modified_base (172)..(172): n is a, c, g, or t
  modified_base (196)..(196): n is a, c, g, or t
tcgacccacgcgtccgataaaatatctctttttctcctcaattgcacaaaatggccagccttcagcacaccaagaagacttacaccctgaacacaggggacaagattcccgccattggtctgggaacctggcaatccaagcccaacgaggtccgcgaagctgttaagaatgntctcctgaagggctaccgccacancgataccgctctcgcttacggcaacgaagccgaagttggccaaggcatcaaggactccggcgtgccccgcgaagagatctggatcaccaccaagctagacaacacctggcatcaccgcgtgtccgagggcattgagtcctccctgaaggacctaggcgtgtcctacgtggacctttacctcgtgcactggcccagcagcaccgaccccaacgacaagtccaagcatctccctgactgggacttcatcaagacatggcaacgagatgcagaagctgcccgccaccggcaaggtccgcaacatcggtgtctcgaacttcggtatcaagaaccttgagaagctccttaatgaccctagcaccaagatcgt

SEQ ID NO: 2282 - DNA, 520 bp, Aspergillus oryzae
aatcgatcaatacgcagaccgcacattaatatttaccaccggctttttgtttatttattggagattacgggccacaaggcactccttgtcgttatttaaccctctgagtgagtactccttcccccaatcccgctcccatgccttggtcccaaatgcgatctcagtgggaacgtaacgtctgactatcgttgttcttaaagagtcttatgcaaattcgtgatatttgagccgtgacaatgggccgaggaggatacgataccaccggcgtcaaaacagacgagtccgaccagtccagctaaatgccatgtcggcatcagttaaccacaccatgttatattgtttcgagcgaaaagtttgtggttttattggcgccatggtctgcggagttcacgtgtcgatgaagtcgatcttcattttcctgtaacactatgtctcattcctctattcgcttcattgtccaccactatcttggtttcgggtctataacctttttaatacgcctcttcggggtcacattcgt

SEQ ID NO: 2283 - DNA, 570 bp, Aspergillus oryzae
ctttaattgaactcattattctacatacataaccaacacaatacatctacttgagtatacataaataaggaaaagaaaaagaaaaagaaacaaaaaaaatgacagtccaatcaaccccccacctcgacgccctccaacgcgacggcttcgtggtggtccgctccatcctctcccccgaagaagtcgcccaattccgtaccgtatcaacaaaagccaccacactcacccgaacaggccactggcctcacttccgcaccgtcccgaagcaattcccgccctggccgaccacaccccctcccgcctcggagggcggcatctggggcgtgcagcacctcctccacccctcgatgccgggccgcgccgaattcgcgcgcttttacttctccgagaaagtgctcgccgtggccgaggagctgctcggcgtgacgcgcaccgagggcaacgaggaggagcctctggtcatggaactattcaatctactggttgcgccggagacgaaggatttcgagctgcggtggcatcgcgatgatatccccgagacggtgggaccggaggaggagctgaagttgt

SEQ ID NO: 2284 - DNA, 633 bp, Aspergillus oryzae
  modified_base (514)..(514): n is a, c, g, or t
tcgacccacgcgtccgcccacgcgtccggcccgacaagagcccagagcaggttctcataatcaactcaaatatacaccatcatgattccaatcgcaagacattcggcccttcgcgccgtccgctcccaactcgctccgcgggccttcaaccagtctgcgctcgcccgccttctctccaccttggccgtccttgagcagcgtgatggcaagctccaggcctcatcgctctccgcgattgcggctgcacagaagctaggaggtcccgtcactgccttcgtggctggaaacggcgttaagggaacctcggctgcggaggcagctaagattaagggcctggataaggtagtggccgtggacagcgaggcttatgagaagggtctccccgagaactacgcccctctcctcgttgagaacatcaagaaaggcgaatacacccacatcattggcggccactccgctttcggaaagagtcttctgcctcgcgtggcagctttgctggatgttcagcaggttncccgatatcactggaattgagagcgaggatactttcgtccgcccaatctacgcaggaaacgccattcttactggtcagtcgagcgaccccattaaggtcctcaccgttagaggcactgt

SEQ ID NO: 2285 - DNA, 507 bp, Aspergillus oryzae
gttctttgagaatctccgccccttcatctggatgaagcccgtcggtacagatctatatgaatgtgtgtacctcgctggtcatccagcactgacggcatcgaattcggatgagcctccagggtcataccattcccgagacgtcttcacgccacaccctactattcctgacagatggaagtacgtcacccgattggatgatcgacttacccttgtcaatggggagaaggtgctgcccctgcctattgagggatccattaagcaaagcccattgattcaagaggctgttgtcattggagtgggcaaatccgtcccaggccttttgatctttcggtcagacgaggcaagaagtttcaccgacgaacagtacctcgatcttatctggcccacagtggaggacgcaaactcccgagctgagcagttttcccagatctcccgggatatgatcacgatcttacccgttggctcgatctgtccccggacggataagggatcgatgattagagcgca

SEQ ID NO: 2286 - DNA, 331 bp, Aspergillus oryzae
ggcatagcttagttcagcacaaataatacaaaatggataattatggctacggttcttcctcctatggaggcggtggtggcttcgtgccaggagagacgaacagccccgccgctggaaagagcgcagacggcaataataccacactccgccccatcacaatcaagcaggccctcgacgcaacacaaccctatcccgaagccgattaccagattgacggcgccgacgtaggcagcatttgcttcgtcggacaagttcgcaacatcagcacccaaagtacaaacatcacatacagaatcgacgacggcacgggcgaaatcgaagtgaaacaatg

SEQ ID NO: 2287 - DNA, 549 bp, Aspergillus oryzae
ctttccccccttcttcttttacagaaacggtaatacaaattcaagggttcgacaagggaacgattccatgcttcagatcagtgttgtcccacagaagttaagctcggaagatgaaagagcaaaaaatacaagtcttattctgagctactcactctttcctcaatatgcaagcgactattcttcggacgcaatcatttcggtctaggattagcatacacaagtacacaccatggaggcgacccttttcatcttctctttgccgcagggaaatcagaaatatagagacgttacctcaacgtctactacctaaatacgaagaatcttgggagggcgatctcctctctcttcaatggccagcaccccctcgaaatgtctttgttgtgaaaaaggactgcgtgccaacagtaacggaatcactaattgaatttgcgaatcatgtaacatctacgtatccatctatcgccctgatcctagagccgaagactgccgaagaagtacattcaaaattttcttttcctatctactcagctccattgagcaggctagcct

SEQ ID NO: 2288 - DNA, 425 bp, Aspergillus oryzae
gcgacttgcatgtcgagacgcccgaggacaccacttcgcctcacacggaagacgagggcgagtcagagaccgagaaccataaacaaatgatcaagagtgcctcgggtgccagcccagactttgaaggccaaatggtccagtttccaactttatctgggctagttgaagagttatcttttgtccgattcaaaattaaagacgatgaattcggacgagactcgacagccgcatgggcttgtattagattagatcgcctccaagaaggctaccgcctagtccacctgtacgactgttcaggagcaaaaaccgatggcgtcctgctagttcgtatcatcaaacggatcgtctaacttgtttgttgttcgacgttctcaagtcacctgagtggcaaaaataaaaaaacaaaattgaaaggagacatcgaa

SEQ ID NO: 2289 - DNA, 530 bp, Aspergillus oryzae
gcaatctgacttaatggcctttccgtccgatggcctggcgcatggcctacccgagatcccctcatacgccgcgccgcagaacgtaatagacagcagctcgccagcggacacgtacttggaggtccgttcgttgaccagttcgagcagcgacaatggctggagcactattgagccgcgccgctcgcatgagtacttccccgaccaaggcttcttcatcaatcccacgcagacattgcatgacagaagcctctcggagtcatcctactcaacgtcatatggcagctttgtagagatttcaaatccagttaactcgcccagctcggacaccaactttgacgccgccttcaataacacaatgacccgacgcgtgtcattcgaccatacctcgcatggctcgcagtcaccgactgcggtcagtcctgtggccattgtgcgacctatccctgtccccatgaagaagccttcatcgcctacacggtccactgggtcatcctcatctacctctcctcctacgaggaagccatcccgca

SEQ ID NO: 2290 - DNA, 490 bp, Aspergillus oryzae
aacgagttcccggagaggtcgaaatacaccaaaatggtcttcgttatatgtcacctttccgaaacgagcatgtcgacgtacttttcagcaacgtgaaacacctattctttcagccctgtgcacacgagttgattgtgctaattcacgttcacctgaaaacgcccatcatgattgggaagcgcaagacgagggacgtgcagttttatcgtgaggcgactgagatgcaatttgatgagactggcaatcgtaggcgcaaacatcggtacggcgatgaggaagagttcgaggcagaacaagaagagaggcggcggagagcagccttagatcgagaatttaaggccttcgctgaaaaaaatagcagatgcaggtaaagacgaaggagtggacgttgacatcccgtttagagaaattggtttcactggtgtaccgaaccgctccaatgttctaattcagccaaccacggatgctctggttcagttaacagagcccc

SEQ ID NO: 2291 - DNA, 626 bp, Aspergillus oryzae
  modified_base (118)..(119): n is a, c, g, or t
tcgacccacgcgtccgcttcttttgctcctctattcatcgaccctgtcttcttccttttcttcttcttctttcgtctcttcctattaccctctctccatctctgtccaccttgagctnntttgctgaaggactcatcgccatgcttcttgcccccatgcaaccgccaatgtcacactatcctccttctgaagcaggtcgaacgacctcgcaaacaactatgcccacagtccctcagacctcaccatgtccgtcgacagtctctcactcgaacctgtcctgcagcctgtcatccaatgtgacaagtaaccgacgacctaccatgagacccaaacttaccctccaaacgacatcacttcccatgactttcggcacttcttcaacgggattgtctctttcgcttgctaccggaccggcagcgtctcccacggttcgcaacacttttaagaatgcctatgaagtcgctgtaccatcctctgccaccgcttccccctcaagatcatccagtcaccggttcagcaaaccctcgtcaccatataccacaaatagcccttatcagctccctcttggagtcaaaagcattcttcgcaactcgccgttagaacccacctgcaggcgccggggctcg

SEQ ID NO: 2292 - DNA, 460 bp, Aspergillus oryzae
attcggaaatacgatgtcactcaggaacgcaccactacggcgagtccacttccgaggcccttcctagtatcatcatccaggcataacctcagtctgtctcgctggtgcctggacctcgacgcccacccccttgcttccctcttcccctccccctcctcgccccaacaactgttactcttccacccttttgcttccttcgcacatttggccttaacatggactcactagggaacagtgtttgtaagtcctcctagaggtgtcagtcagcatactcctttactactgatgaggcaggccgaccgaatttgactcctgttccaagttagcttaccgtcgtggatgtttcaatttcatcaagctggcctgctggtaagtctcatggagataagcgctattgctgacgacgccctcttcggcttataggcgactatctgtttgcttggaactggatgggactcgg

SEQ ID NO: 2293 - DNA, 450 bp, Aspergillus oryzae
gcttcagcgggtttctgggtacaacaagcaggtggaaaggccaatttattttatgctgtcttacttaatttgagtatcttcccggaccaccgcaataatgatctgccagcgctgccgaaccagccttctttctcggctgcaaccgcaacacacggttactttctctgcctcgtcatgcgcacgccagcttccaatccaccgaagccaattccggagctacagtgatggcaagcctacagtatccactacgccgcctcctcctactccccgccaacctatcgcagcggacatcactatcccgtcggcagtttcatcagcgactccaggcgtgtcccagccattcagcacacccgaagaagtaaatgttgatgtgtcttccaagaagcccacaaagcctgctgtggaacgtccaccaagctcctgtcccgctggaacgaagttgaacggcct

SEQ ID NO: 2294 - DNA, 519 bp, Aspergillus oryzae
gtgtggaacccctaaggcttttactaaacaagtgattttcaacatcattgcctacggtatccttgcataccacagcgtctcgtttgatcagctgatgcccgttttcctaagcacccccaagtccgacgaagataccgtattgccgtttaaatttactggaggcctcggtctgcccacgaagacaatcggcttcatgctcgcggtgcagggtgtctactctatgattgcccagctctggctgtttccattcgttgtccgccactttggcactttgcgtactttccgcttcgtgctccttgtctggcctcctctttacctgttggttccatacctcattctccttcccgaagcgcttcagacaaccgcggtgtatgctgccttgatctgcaagatcaccttccatgttatcgcttttccgtcaaccgctattttgctcgccaacgctgctccgtcctctaaagtacttgggtccattaatggtgcagctgcctcgacggcaagtctgagccgtgctttcgg

SEQ ID NO: 2295 - DNA, 631 bp, Aspergillus oryzae
tcgacccacgcgtccgttcaagggaaagaagttcggagcagattcgactcgacatttgctgaactgtaccatgatctcgacatgggttttgcccctataaatttcatgttaccatgggcccctctaccacataaccgcaagcgtgatgccgcccagaaaaggatgactgaaacatatatggagattataaaggaacgccgtaaggctggcagcaaaaaggattcagaagacatggtttggaatctcatgtcctgcatgtacaaagatgggacgcctgtccccgacgaagaaattgcacacatgatgatcgccttactcatggccggccagcactcttcgtcgtccactgcggcttggattgtcctgcatcttgcagcatcccctgaaataacagaggagctttatcaggaacaacttcgtatccttggacacgacatgcctccactcacttatgagaacctgcagaaattggacttgcacgccaaggtcattaaagaaactctttcgcatacatgcaccaatccactctatcattcgagcagtgaagaacccgatgccagtagagggtactccctacgtgatcccgacctcgcacaatgtactttcctccccggtgtcactgcaagatcgg

SEQ ID NO: 2296 - DNA, 440 bp, Aspergillus oryzae
ggagaacccagttgcccaccatttcttccatcttcactcgtctcttcgggtccttcgccggtcccactccagccgccatgtctgccgctaagatcaaagcccagggcatcatcaacgccaacgccgtcgtcgttttctccaagtcctactgcccctactgcaaatctagcaagagcctccttagccagctggacgcaaagtacctcaccatcgagctcgatgaagagagcgatggcagcgccatccaggacgccctcgtggaaatcagcggccagcgcaccgtccccaacattttcatcaagcagaagcatatcggtggaaactcggatctgcaggctcgcaaaagcgagcttcctgccttgctgaaggacgctggtgctctttagattatacgctgagatcattgtgtataccatagacggaatgcatctgtttatttg

SEQ ID NO: 2297 - DNA, 523 bp, Aspergillus oryzae
ctgccccagaacagttacaatggccgtgaactttactcaaatcccgaccattgacttggcccacgcgcagtctccggttacgaaagcctcgttcttgtcagacctcagagatgcgattgtaaaggtcggattcttctacgtgaagaatcatggcgtgccaaacaatgtcgagcggaacttcgtagagcaatcggtcaaattcttcgatctgcccttggaggaccgcctggaagttgagatgctgcatagcaagcatttccttggttatgttcgcgagcaaaacgagaaaacagcacagcggactgactttcgcgagacattcaatcttgggatggacctggccgctccaggagaagaagagcccgcctatcgcaatatgagcggtcccaatctgtggcccaacgagactgccattccgggattccgggcagcaatggaggattatgtgaagcacatccagacgttgggtgacgacttcaaagtcctggtagccgaagcgttggacttagagccaacagccttt

SEQ ID NO: 2298 - DNA, 507 bp, Aspergillus oryzae
ctcatcggttcccctctcttgtcttactatcttttcccctctctatattataaccgaggaaataaatcaacaaataaaaaccacaaaaaaataaaaaaaaaacaaaaaactttgtcccagccaagcatgtccgaacgaggatctttccgtggaggtcgtggccgcggcggaggccatgacaggtctggcggccgtggcggtcatgccaaaagtggcggtgccagtggcggtgcacagcagcaggagaagcccaaaaaggaaaacatcctcgacctcagcaagtatatggataaggaagttcgggtgaagttcaatggtggcagagaagtcgtcggcacgctgaagggatttgaccaactgatgaacctggttctcgatgatgtcaaggaatctatgcgcgatgacgagggcaacgagaatactcgttctcttggtttgatcgttgctcgtggtactatcattgtacccatctctcctgccgatggcagtgaagagattgccaacccc

SEQ ID NO: 2299 - DNA, 500 bp, Aspergillus oryzae
  modified_base (299)..(299): n is a, c, g, or t
atcgactactattctcgcggtagactcgtccggctggtctgtggtgccgtccaacaactcccgggatctttcgtgggtaggaaaagccagatttcatctggagagcgcccagattcagcttccgtcgggcatcagcgttactccgttgacaacggccttggtcaatctcgatcagagtgaactgacgaacttcaatgttacgggcaacctcgtgaatgtggacgataccaactccatctcattgaacacgagtgatatcgccctgatcagttgcgaccaatccgcctatcccggaaatntagatgcgagtgagaccgttcgcaacgtcgttacatcatcgcaccgtgcatcggcgattcttttgtacagttccgaggtgcatcactgtaattacaccgcaggtcccaacgccaacggttacatcaacgtcttcacgctagtcaatccgactctcgcgaagcttgtcactaaactctctcattcatcgacggggaacggtt

SEQ ID NO: 2300 - DNA, 560 bp, Aspergillus oryzae
ccaaacccggtttttctccagttggattttctaagctcgactcgactaaattcattggcggttccggctccctccacagcagcagttacttccattatttattctgctactgaatccttctgtcgcacctctacagacgtcacgcatccgcacattcacctcacaaccatgtctaccccaaccagtcccgtggacaagctccctcatcggtcgtcgaccctcacgagttccattgctccggaccgccgagcctctatgagtgatgatgaggccattccggactctgatagcagcgagactacgaacctgctgaacgagcgtttgcgcgctttgaagcacatgtgtggttacctggaggactatgttaccgtgacttcgaaggtacagaggtcgcattcgaaggactatgagaaagtcctcaaaactgtcagtgaaccgctgaaggaaggtcaccacttttcccaaaacactggtggcgtggcttctatgtttgagaacatccgcgctaatactcagggaatggtgaatatgtacttggaaacggagaagaaccttaaggg

SEQ ID NO: 2301 - DNA, 318 bp, Aspergillus oryzae
agatgatttacatctgcatgggacggcgtttatgggtggacagagaagagtggtcttcttgaccggtcatagaggttcggttctggaatgagcgttgggtctctttggttatacctgcagactgaaataacgacagatatctctcagataccaaatactgtatctattgaatgatgatttgaacttcttgcatagcggaacaatgatttgtgaacgaataaccatgtgcaggtatgaggacgttggattgggcagtaagatatttggcttttcttccatggccattgatatgaatgtgatggctagttagcgactttg

SEQ ID NO: 2302 - DNA, 583 bp, Aspergillus oryzae
ccttccttccttacacactctctaatctcccatgccgactttccttcattctttctaagtgtcttcggcaacatcgtccttcattgtgaaactatctcacatactgtctatctctctgtctcttgtactttccctcattgtaccacctcattacacattctctatactgtaatattgtgtcataccatacatactgtgttacattcattcgcttgataccgtttcgacacttgcacaacacccggcatatccagcctatccatactaaacagtgcttgaataggcacaaacattgacatacaacggaaagactgtgaacctcgacacagtgaagacatgagaactcaaaacaatctcacggttgaagtcgactgccactccttgggttccaacgagtgtccctcgatgacttctagcttctcgcccatggattcccctacgccaaccccgactagcatctatagccaaggctcactggcctcacctgggtggcaagacgccgggtcatacccaggacatgcctacgagcgacatactggagctacgccaatgcggagtgctttccgtctagcggggatgaccc

SEQ ID NO: 2303 - DNA, 455 bp, Aspergillus oryzae
tgttgcttcaaggtggagaatgcaatggtaagttagtggcgctcaaccatggttggaaatggtcgtgtgtctcccttggcagagcgtttgccctgtttgcacttgatgcctcgggcaaccacagtttgctcccaagatcgacgattgctacatacggaagtgttactggataaactatatcatagtctattggcgtgggtcggacctaatcagacgatattaccttgctggtattcatttagtctgaatgaaatctgatatcaattatactgttcctagcaattaggccttcgcatgcgactcggtctactatgtactgtggtagctgttgaataactgtactggacgagcgtagattctactactataacattgccgtcttttacatcttgttctttaagctttagacccacctggtatcccttttctcaaccaacagtctgcttggatactag

SEQ ID NO: 2304 - DNA, 519 bp, Aspergillus oryzae
attcccagaggtcatccaatccccctgcatcacggatatcactactctattcgaaacccctgagcacataatagtgccgcggctaacacacattcgcttggatcctggtctcactacatgcgacccctccgttcgttcttcacttcctcggtccagtctctgcttctgcggaaataatatccgtctacgcttcgtcaccgacgccgatgagcttctcctcttaaaatctcacggactccctcgttgaccttctaaaaatttccgctcgttcttccacctttctccctctcgtgaccggagtcacgggtctacctccccatcccgtgaccggcatttcatcacgggctgtcagattttactttctcaaggatcccccgaaacttaatccccgcgtgtcataaacatgcgcgacatgccgtccagatttatagaaatcctcgaccccgaggattctcattttcgtatgtctgatgccgacgtccggctggaagatgtcctagcggaccaagaggcgctcgc

SEQ ID NO: 2305 - DNA, 591 bp, Aspergillus oryzae
cgacccacgcgtccggaggcttccaacaaaacttgtggcttttcggcgaggaagaatacgtaaccgaggtcggcactatgaacctctttattgcgctgaagaacaaggaaacagggcagaaggaactagtcactgctcctttagatggaaccattcttgagggcgtgacccgtgactctgttttaggacttgcccgggagagattagcaccaaacggctggactgtgtctgaacgcaagattagaatgtctgaggttgctgaggcagcagacgagggtaggttgattgaggtgttcggatctggcaccgcagccatcgtaagccctgtacgaaacatcagctacaaaggcaagatggtcgattgtggcttgaaggaagatgaggaagctggcgagattgcttcccagatgaaaaattggatcgaggggatccagtatggtgatgaagatcacaagtggagctacgtcctgtaaatgcagctttggtggtagaaaacgggctacgagttgtctagaatgtttacatgattctttatgggtatcgataaagggacgattcgcagtcttcggttatatcactgctatagtttgg

SEQ ID NO: 2306 - DNA, 366 bp, Aspergillus oryzae
ccaaggaggaggcgattgaaatccttcgtggtcatgaaacgcgtatcaactcgggcgaggtcagcttgggagatcttgcgatgtcagaatcagactgcagcagcgccaggaagaagggtgatcttggcttctttggacgtggagagatgcagaaggagttcgaggacgctgcctttgctctacagcccggccaggtcagcggtatcgtggacacggcttcaggtgtccatctcattgaacgcattcaataaattcgtgatctcctatttcgatacataaacataaatacatttaaagagaagaccgatacctttgtgatatacttctcttcccccttcgtgcggggactatatatcaacttttgag

SEQ ID NO: 2307 - DNA, 658 bp, Aspergillus oryzae
  modified_base (39)..(39): n is a, c, g, or t
  modified_base (247)..(247): n is a, c, g, or t
cgacccacgcgtccgccactccattcctcttctccagcnccgctatctcatcccccgccatggcctcctcgaagtcggtcgcgaggctggtcacctaccgccggcctgcgccttctctgttgacctcttctttccgtcccttgggttcaaccgcaaacttctcctcctcagtgtgccgggctgcgaccccagctggtccccctccatccggtttccgtctggctccccccaagaaatgggacgagancaccgagtcctccttggacaaggccagcaaatacttcctcatgtctgagattttccgcggcatgtacgtcgtgttggagcagttcttcagaccaccttacactatcttctaccccttcgagaaaggtcccatctctcctcgtttccgtggcgaacacgctttgcgccgctatcccaccggtgaggagcgttgcatcgcttgcaagctttgcgaagctatctgccctgctcaggctatcaccatcgaggccgaagaacgtgaggacggaagccgtcggacgacccgttatgatattgatatgaccaagtgtatctactgtggctactgccaggagagctgcccgttgatgccattgttgagactgccaatgctgaatatgccaccgagacccgtgaggagctgctgtacaac

SEQ ID NO: 2308 - DNA, 132 bp, Aspergillus oryzae
ctgtgcttcatactcttatgatatatgtgtttatttgttagactgtatccacattttatgaatgtgttcatgctgctgttcttccataacccgacctttagtatgaacgaatccaccagtaaatgctgtcat

SEQ ID NO: 2309 - DNA, 524 bp, Aspergillus oryzae
aatacatctcgttgtaccgcattgaaagcgtgcaagatacatacttctgctttctacaatagatcagaactaccttttcttgattttgaaaatatcatctctcgaatttttacctctaattaatcgaataacccgccatgtccttcctcgcttccaccattcgttccacaattgcccctcgtgtggcccttcgcccatcttataccgtcacatccgccttccacacctctcctcttcgttccggtctcaaggaatctgatcacaaccgagaggacctccacatcacctacgaagagcacaaacaggaccaattgagaagcaccaaggagggaaaggcaaagtggaagcaggaacttgctagcaacagtgaagcttccgtcaaagcagaccggggtgaggttgatagtgatggacatgatataaaagatttgcaggagaagacgaagcatctgcctaaccgggatggaccggtgaataagactcaatgaagggatgggttttagcttccttgtttctttcttttg

SEQ ID NO: 2310 - DNA, 593 bp, Aspergillus oryzae
gtttcaagtacatacccagtgatataccgccgccatgacgaccctttttactgttccaatttcctctactggcggaagcttcgtctgctccaaccccacagcctcggagaaggagaagaatatttacctactcacatttacatccccgaaggataacagacttaccccgacattcatagatgcctttatacttgcattggatattatcgagcacagataccccaagggagtggtgattaccaccagtggcattcccaagttctatagcaatggattagatctcgagcttgctctcagcacggagggcttcttggacaagtggttgtggaaactgttccgccgattcctgacatttcccatgcctactatttgcctcttgaacggacacgcttttgctggcggcctcatgctggccatgtatcatgactatcgaatccagaacccctccaagggccttctctgcatcaacgaattggaatttggagtcccgctccaatcgcccatgatgagcatcttccgagagaagttgacgccctcttcttttcgggaccttatcctcgaagctaaacggtttggaggtcctgagtccgtca

SEQ ID NO: 2311 - DNA, 554 bp, Aspergillus oryzae
aatatggcctcgaaggtccatctcgtccgccacgcagaatcggtccacaatgtcactcatgacttctctcagttggatcctgagttgacccctcttggccttcagcaagccacagggctcggccagctattcccctacgccccccaagtgggtgttatcatcacctctccactcaaacgagctgttcaaaccaccctcacggctttttcgcatatccttgataaacggtatttcgaccccgactctgggtacggagtggagaatggcgctgcccttttcttggaaccggatttgcaagagagaagtgctcttccctgtgatacggggtccccaactagggtcctggacgcggcttttccgagactaggtgtccaggatttggctgagggttggcaagtgaaagaggacttctattctcccgccgacgaagctgtggaggagcgggcgcagaagatgagatctcgtattgccgcagtttgtgaggatcttcaacaccaaggacggacggacgttgtggttgtaactcatggggtgttcatgagattcttattggg

SEQ ID NO: 2312 - DNA, 575 bp, Aspergillus oryzae
gagctgctttgcgtcgtcgcgcggctgccgaccacaaggagtctctgcgcaatgccagacccagctcgactcgcgctgccggtgccggtggctcttccggtaccatgctcaagctttacactgacgagagccctggcctgagggtcgacccggtcgtcgtcttggtcctgagcttgggcttcatcttttccgtcgttggtctgcatgtcatcgccaagatcactcgcaagttttcctcgtgatcaacgacgttgcgtctgctctcgccatcactctcttgcctgcctccagcgacatctggtttgactgaatgaggttctgagtgagcagggatgttttgctatgtatagccggtccctgctcctggaacgattttggttattctgtgagagtcgcttttggcgggttcactcccgtactctcttctaccctttcgaaatattataccccttggtgtccgttacctatcctttgttcttggtgcgcggggatccttagatcggatcgtccgatacttcgcgaagttgagtgttgaaaacctatctgcagcataggttgggaaggtgtgctggttg

SEQ ID NO: 2313 - DNA, 575 bp, Aspergillus oryzae
ctcactcaagtcgagggtcagagcttcgtttccaaacttgctgaccgctggttctggttctgttgcgtcaggtccccattttctaggccgactctggtccgcccgttacctgactttccgtcgcacctacgactggcctttggaatcacctcaattccaaaggctctagctcaccacggctcccggagcctcgttcgtacatttccgtcaaattgtctatcctcgacgtccccgcggcactcttaacaacattccacctcctgctggtttccccccgtgtgttctcgtccggcgcgccatttattaacccgttgacgccctcccaattcatcccctcgccccttgagctgccgcataggactactctaaaggttcttcctcttgagggggaagggtctaggagacttggtccagtcaactacggttgcgaaagttttcgccctccttaacacgcagtcgcgtaactccacttaattttttttttaatcttcttatctttcacctttgtgcatcgtcgcagcgcacatggttatggcaccgactgcgtgtattcctgctgagatatgcatgactaa

SEQ ID NO: 2314 - DNA, 554 bp, Aspergillus oryzae
ggagttggctaggcaacgaatcgagcaactcaagaagcagggcctaatgaggctacagcaaaagtcaacctcaagcgatgcatccccaagtaatgacctgccaaactcgaaaacaactaacgatattacacccaccttgaattcatcgtcaatccaacatcccctgcctgagcgtccccctgatcctgagacaggcgcttttgcaaggatccctggattgttcatgaccgaagtagctcaggcatcacatgacgacccatctccgacgcctacccaagggcttgtagttgattccacgccgcagcctcgctttaatcaacgcaagcgcccgcgagcatctgattttgacgagccagttcctttacctaggaagacttctaacaatggagtgaataatagtgtctcgggcgataggcttatcattgacattagcgatgacgatctatatggggatgacgaagatgatgctatggatattgagacctcccaagaaaatgatgttccttcagtccccgaaggtccagcagggacctacctttctgtggagtccctcc

SEQ ID NO: 2315 - DNA, 646 bp, Aspergillus oryzae
ctcaattctctaatctactcagctttccacctcacaccctttccctactagacactcgtcacagtccagagggatgtttacggcttctgctcgaagccgtctctccacactttcgcggccccgtctctctcctaccaactctcttcttgctagatctgctgtggcaccaactatggctcctcggcgtaaggcttcgtctgtcccggagggctacgtagaagacctctctaagggcaagatgctcagatttgaagattcccttcctcgcttgcccgtccccactcttgaagaaaccgcccgccgctacctgaaatcggtccatgcggtggtttccgaagccgaatatgagaacaccaagaaggccgtggaagccttcgttcgccctggtggcgagggtcaaactctgcaggaaagacttctggcccgtgctgcggaccccaaaaataagaactggcttactgaatggtggaaccacgccgcatacctgggttatcgcgacccggtggttccctacgtttcctacttctactcatacaggacgaccgcgctcgtcggaaccccgccaagcgtgccgcatctgtcgcgaccgcggcttctcgagttcaaacgccaggtggacgatggctccctggagccagaatacatg

SEQ ID NO: 2316 - DNA, 594 bp, Aspergillus oryzae
gagctatttaactgggtctctcctatgcatcacgatgcttacatattatactattagtgtttccatgacgcccctgagggttacacttctcaacaacttttaagatgctctttacttctggctcaaattatactttgtatataaaaagtaccttgcatcatgtgccatgccggtcattgttcatcctcaaatgccaaagaagatggtatagtgtttccagaaaggctactttacgcacagctcttttctttccgggtcatggagtacagcgcgtaggaatggtgtcttcatggatcaataactttccagacatcgctgggagcttcctggatgaaatggatagtgtattggggtttcggctttctcgtgttatttctgaaggaccgaactcggagctgaataagaccgagaattctcaacctgctattatggcgacgtcaatattgatcctacgaatcttagaacaaaagtttggcttcgacacgaaatctcgtgtggatgtcacccttggtcatagcctgggggagttctccgcactagttactgggggctatattgatttcggcgacgctcttaaactagttcgacggcggc

SEQ ID NO: 2317 - DNA, 581 bp, Aspergillus oryzae
attctcttgtcgcctacattacctgcacatatcctatcaaatatcctcaaccgccatcacttgtttcattgcctacagtagtactccgtcggttctgcctgcttagccgtcatcatgtcctgggcagggttcaagaaaaatgtcaaccgtgctaccacccaagtcatgatgaagacgggtcatgtggagaggacaaacgatcgtgactatgaaatcgaagaacggcgataccggaccatggaggccgctgccaaccgtctacaaaaagaggctaaaggctatctcgattcattacgagcaatgactgcctctcagatgcgtattgcggagacaattgatgctttctacggtgatgctggaacgcgcgatggtgtgagcagaagctataaacaagcagtggaagatcttgatgccgagacgataaaagccttggatgggccatacagaactaccgttctcgaaccgatttcgcgcttttgcgcttactttcccgacatcaatgagtgcatcaaggaaacgcaatcacaagttactcgactacgactctatgcgagccaggtgaagaagttagtcgagaagcc

SEQ ID NO: 2318 - DNA, 495 bp, Aspergillus oryzae
cgcaacgccaagtcgaagtgggtggttcatttcggcttggcgttgcgcctctttggccgggtcactattcgggaggaagagtagacgatatatctcacgagcacctttcagatgaatgttccagttatggttttgggagtccatcatttcgaaaagagagagtagtaaacaagtggcgaggtccgttaactgcaggttctggtcgggctgcgtatatcgggtgcggaaagacttgaccacctctccatatttgcccatggcccgttgaaagtgtagattccgttgttgacctctagaagtgtttgcgagatgtaatgctcccagtgcctgcatcgcgttggccatagttggcgatgaccgggccaattcggggaaatatcgtctgtatgggttgatgttgattgagttatcatagatcagtagcaaggttgccacactgtcgataaaatgagtataatagcgaccgtccacgcaatctaatgaagacgacatgaa

SEQ ID NO: 2319 - DNA, 582 bp, Aspergillus oryzae
ctcatcataagccatcgcttctttcctcacctttcaagcatatcctttgtcctagaatcttttcaggaatctacagtcattgtcatgtcgtggtacgagattggcaataagaacggctacaacgagggctactacgctgggagagaggcggcgctgaaggagctcaaaaaccaggaaggaatcgacaagaccaagcgggcttgtttggacgagttactgcaccgggatccgcagaatacatactactcttcgaacgttattcgagactttctcgctgatttctataaggcggacttcgaccgtgacggacacattaccttgcaagaactatgccaacaatggagacctaatgatgaggaaactttcaagaaacttgaagccaggtttaaagaggcggaggtgactggggaccagaagttaagccttgctgaatttttcatcatcggctttcttggagatgaccgcaaaaatggttacaaggttgccaagaaggtcgactcgtaaatgactctgtatgaggtgcttcgcgagggatcagagaaaaaagttatctgcagaaagtttgaatccttcttgtacctc

SEQ ID NO: 2320 - DNA, 528 bp, Aspergillus oryzae
  modified_base (198)..(198): n is a, c, g, or t
ccaactggacctctacccacaagtcgctatcgatcaacggttgtttacgcgtcagggactgggaatgtcttggggcattcctctcagaagtctcggttgagaaatgcatggtgttaagaacttaaggggttatgttccggtggagttcaaatctatccttggcaacaacgtcatattgcactgggcgccaagtcatgntgctgcaagccttactatgccatacctacaccaggcctgtctccttccataaattatattttcagcactgttacaacaacaagcccgggtggtctgtatgattttcgcttagggcatcgcttaacccaagcatatctgcgagacgtcccgcggctcgggccgctttctttcttttttctctctttcctaccttcattttttggtccttatatcttatttttataattttcttcttttcctccttacacttgtggatttgttaaccgatacccgctgcatggatggagttcaactgtagacagctactttcctactaatcaattgtacttg

SEQ ID NO: 2321 - DNA, 467 bp, Aspergillus oryzae
tggagaccttcctccaagagaacccccgagtgcagcaccagacgtgtagcaccgtgagctttgcggacttcgaccgccatgagctacaccaactcttggttcgccgcatcaccgaggcgttcggcgggaaaatgcaggtcgaaggcggacaggacggccagtatatgcaggctgcggctcgccgacttgcccgcagtcgcggtgaaggattcaccaacatctatgccgtgcggcaacttgtggagaccatcgcacaccgccaagctgagtgcctggcggagcagcaggacgtcggaatggaggatgtagattacttcttcttctctaaggacgatattttggggcccaacccgtccgatattcgctcccagagcgttgcatggacatctctccagtcgttcgtgggacaggagcccgtcaaggcctccgtccgcgaggtcttcggcacggtggaggagaactactgg

SEQ ID NO: 2322 - DNA, 591 bp, Aspergillus oryzae
gtctgaagctaaatcccatccactactatgcatttgagcagcttctcgttgcttgctctgggagcagcaaccgctaatgccttccgtgacacctcgcccttcttccttgcatcgacgtctgagatcctctctacttcatcccagcttaaaaccgcgccgtccttgctagatgacctctcctcgaagcttagctcgtgtccctccgactactatgtcattgcttcccaacccggtgttcatagcaccgacttcgcgactcgcaagtccgcaccccgcctgggcgcgaagatgacaggaaaggataagactatccgatcgactgcgactgtgaacgaagttgtgggcgtgcttgaagcgaagcagattcaaagcattatcgagaaggaatgtggggcgcaaactactgttatcgatggttcctctggctcttatccatccgactttggcgccgacccccgagtcctttttattaatttcccagtgcttcctctgggtaaggagagggctcagcagctttctgacaatgatggccttctttctgatatcatcgaacggataccttcgtcgaagaagtacaccattctctacgta

SEQ ID NO: 2323 - DNA, 669 bp, Aspergillus oryzae
tcgacccacgcgtccggttggctttggggagaagatggaagaaaatttaaagggcgttccgcctccagagctaatcctgcggttcatcataccccatcaatctcagtgttatcctcttctcttcccataccatggctgctccgctctttgattgtttgattgtcggcgggggtcccgctggcctggctgctgccctcggtctctgtcgcgcgatccgcacggcggttgtctttgactccaagagttaccgcaacccgactgagcatatgcacaatgtgtccacctgggatcatgccaatccccatgactaccggctcgccgcgcgcaaagagctgaccgagggccgatacaacaccgtgacgctggccgacgtggccttgcgcaagatctggaagctcgactccggtgagttcgaggccaccgatgctgtgggcaaggtctggaaggggcggaaattaatcctggccaccggggtgaaggatgagatcccggagctgccaggatatgccgactgctggcccaagtcaatctaccactgcctcttctgccacggattcgaagagcgcggtgccccatctgtcggcgtcctggccattggcccagtcgccaacccaaacccgccgaacatctctcgcgactcgccacaaccttgccaagactgtcaccatc

SEQ ID NO: 2324 - DNA, 577 bp, Aspergillus oryzae
gaggtgagaggcattgatcggttgagagggcgtatatagtctgttgctatacaaaaccaacaagtttgatcaataacgttcaaggcctgttacaccatgaccttacctgcttcgttccaactgtcatttgacttgtccaatatcataggacctgtgaccagaacagttctccggcttggttcactagctgtccttcacgacatcaaccgatccggctcagacggcatcacagaattgcgccttgcagctctcctcggtaggcatcgtattgcagactacctgaaggagaattttaaaagtatcgtggctgattcacgacaatctatcatttcacgggttctccgagaggagcagctggccctcgaagtcgggtctggtccaaccgttcagcaagcaatcactaaccctaacccggcatggctctcaatggtgattcagatgtcgcttctcgccttttcccaagaacagcagtcgttagcccaagcgataactaccgtgtcgtgcaagctttcgagaggtgctgctgtcgataccagacaggaattagattatgtgtccgttcttggagccattacgg

SEQ ID NO: 2325 - DNA, 650 bp, Aspergillus oryzae
tcgacccacgcgtccgtctttttcttccagagtaaagcgcgacaatgccgtcagaagaccagaaccaacagttcaaacgcattggcatcgttggagccgggaacatgggctccatgatggcctttgcgttctcggagctcggtcttgatgtttctatctgggacgtcaagaaagagaatgttgaccagctcttgcaatcggctaaggatattaaaggccaaggaaagatcgaaggatttgaagatattggcgaattcacccagagcttagagggtcagggagagcggaaactgttcatcttctccatcactcatggcgatcccgcggactccgttcttagtaagatcaagcatgcattgaagaaaggcgacattatcctagacggtggaaatgagaactaccgacgcacggaaaggagacagaaggagtgcgaagaaatcggcgttagttggattggaacgggtgtttccggcggatatcaatccgctcgccgtgggccgagcttgtctcctggtggcgatgagaaggcgctggagcttgtactacctcttttggagcgctacgcagccaaggaccgcaagaccggtcaaccgtgtgtagccagagttggtcctgcgggctcggggcattttgtcaagatggtacacacg

SEQ ID NO: 2326 - DNA, 572 bp, Aspergillus oryzae
ccttcttcctacccccttcttctatccttcccttccgcctcttcctgctgcatttcggagtagtgtcctaaaaccggcaagccgaaagctcctaatgtgctgggcatgatttagttgaaaaaaaaagtcaaatacttctcatctcccataccccacggggtctttttgttctcagagacgacttgaggaaccgacaacccccaactaccatcagctatggcggacatctctaagtccggctctgatgccgcccaccttgaagaaaggcccgtagtcaccacagcgaacccggcgctggccgacccggcaacgcgtgcgcggatagagaagagcctgaagcgcaaactcgatgctcgctgcggcttcttcgttatcatctacatcatgaactacctggatcggaacaacatggccgctgctcgtcttaaggggcttcaggatgacctgggactggattacagccaatacgcgacctgcttgagtattctttatgtcggttatattttgatgcagatcccttccaacatcttcatcaacagaatcccgcggccctctctctacatcggagccgt

SEQ ID NO: 2327 - DNA, 414 bp, Aspergillus oryzae
cgcgaggagaaaaagatcgaagatttctcgcgcctgcgacgaatgcagacgcaagaaggttcgctgtgatgcaagctctgaatctggcgtggaaacatgctccaactgtcgtcgacttggggttgtctgtcagttcagtcgtgtgcccatgaagcgtggtcccagcaaaggttacatcaaggagcttgcagagcgccttcacacccttgaaagtcaaatgcagcctgcgatggttcatcccgacatgccttatcaatctatgaacgaagtgtcgtcaccaagagcttatcaggacttctcgccaccaatggatgcaggctccattgggcgcaagcggacctattctgtattcgaaggacttccaagctcctctttcacacagccgcaattcaattctcgctcccagaatgcttt

SEQ ID NO: 2328 - DNA, 579 bp, Aspergillus oryzae
ctccgacccacgatctcaagaggaggaggaaccgtgaagggttttcgcacaagaagtcatggctttggtacaatccttagaagagtcggcctcgtcagaatcgatttggagacaccttcgtggccatcatggaataagcaagacatcgttcaatgtccccgccagaattaccgatcatccttccaccccaacggaatcaaaagtcacttccggtttactctacaacgatgtcgcagttgaacactccggtcgggggattcaactcactgttaacgagcaacaatgcctcataagtttgtgtagaaatatgatggaccattacgaactgggacactacccaaaaagtttctggattcgcatctccgcggcactacaggagcaaactggccgccgatattcgtggcagtcatgtcgacgacgcattatcggctatatcacgaaacgcaaggcgtactgggctgcttacaaatataatcacattccggagtgtgacatgcacagcgaagtcgcagacgacgttgattcctggatgggctcgtgcgatagaaagttgggacggcctgtgcgccatgaagtcgc

SEQ ID NO: 2329 - DNA, 517 bp, Aspergillus oryzae
ctcctaaaaacttcttccatctcaaaacaatagaactccatcaccacctcgtcatcatgtctgacgtccctgagactaagcctgaccccaccaccagcgctcctgaggcggctgagaagcctgaggagactaccacctctaccgaagctcccaagactgaggaggacaagtctgcaactgagaccgtagttgaaacagctaaggaggcggccaccaagacaaccgacagcgttttctcgatgttcggcggtggccctaagaaggaaaagaaggaagaacctgaggataacaatgatgagccatctggctcttcgaaggctcaaaaaaccgaagaagaggatgaagcacctgagtcccctgacgttcacttcgagcctgttatccgctgaccgagaaggtggaaaccaagaccaacgaggaacttgaagagcagactttcaagatgcgcgctaagctgttccgattcgatggcgagagcaaggaatggaaggagcgtggtactggcgatgttagactg

SEQ ID NO: 2330 - DNA, 578 bp, Aspergillus oryzae
gaatgacgagagatacaagaacggaagatgcagtggacttgggccttgattacagcactagcaacagctacttcagccttacctcatgaagcccgcaaagatgtctggggccagcttcggtcaaacatcaaacatgtagtttacttgatgatggagaaccattccttttccaacatcgccggatattgggactttcatccggagattgacaacttgcgcaatcgaaaatactgcaacgaatatactaaccccaactggacagtttggggcgaacctctcgatatatgtgccgggccctacgagacggaagtgccattggaagacccagatcacgagttcgccggggtgacctatcaaatctaccggaaatggaatgtaacaaatgacgacgtccccaacatggggggctttatcgaacgccagtcagagaaataccaggctaccccaggagaatcggcgtttgtcatcaaggcatacgatgagaagaaatcctcgacgcttgcagagattgcccagaatttcgcgttctgggattcctattttgcggaacaccctggacctaccaatccgaaccgtca

SEQ ID NO: 2331 - DNA, 553 bp, Aspergillus oryzae
acggcttaaacatgaacgctttctgtgtagattttccagaggctccgatccccgaatcattcaaaagagccaaacaagcggaggctcagaaagaagctgaagtggagcaaactcgacaggctaatgaaggcgaaacgacgttcatgactaccgacaccactttcgtggaaaatccatcaagcacaacccccccgaagccggtgcgcaaaactcctacctcgtcgcgggggaccacaagaggctctagtactcgtggtcgttatacaaccagaggcactagtcgagctcgtccgagcgcgctgccaaggggcagagggttgcggtgaatatcattgatgacagttcatgatccctcttaatggaccgactcgtgtgtgtacgaaaagggcctgtcgatttcttcactcgtacaaagggtatatatcgctagccgccataccatcggcatcccataacgagggtccaacaaactcacgcagcgccgtgggctatgagcgtggttgattcatgctagagagtccaatggtgacccccaagacaatctattctagcc

SEQ ID NO: 2332 - DNA, 543 bp, Aspergillus oryzae
ctcgcccacaaaaagctcattcccaaagataccgccccaggcacaacccccatacaacccccggacccaaccatcataaccttcaccccgaacccggtctacacaacaggccgccgcgacctcccaccctccaacacaagtcccacagcacacctctcactaccccctccactcgagccgatccgctcgctcctcacctccgcaaacggcgcagagtatcaccccacgctccgcggcgggcaaacgacataccatgggccggggcagatggtagcgtatacgatcctcgacttgcggcggctaggactcacgccgagatgccacatccgggtgctggagaatagtgttgtggatgtgttgcgcgggtacgggatccggggattgattacggaggatccgggggtgtgggtgccgccggtgagtggggagggagtgccgaagaaggttacggcggtgggggtgcatctgcggaggaatattagtagttatgggattgggtttaatgtgacggaggagccgatgtggtggtttaagcagattgtg

SEQ ID NO: 2333 - DNA, 603 bp, Aspergillus oryzae
ctcttgccagtagccattgggactataattctgctctttttatacgggaaatatgtaaccagcactctcattcccggtccacccactttgccattgatcgggaatcttcatcagctaccgagtgatgatagacgtcatgttctagcccaatggcacaagaagcatggccctatcataagtttgaagtttggatggagctcggtggtcattttgggaaacatagctgtcaccaaggaactctttggcaaacgaagcctcaagtatggttctcgaccgcgcatggtcatggctcgcgattgcatgaccaagcagatgcaaacctctactctcccttggggtgaaaagtggaagatacataatcgaatccaactctcgcttgttggcggccccaagatcaggagctatcagagtctcctggatattgagagttgtaaagtcctataccagctgttgagcacagagagcttagtgacttgctttaatcggttcaaattcaacatcatttatacccttgcgtatggcaaggacccagaccaaaacgaatctgatttccacgaaatcctcgagttagccgatcattttacccagacacttaccaacgca

SEQ ID NO: 2334 - DNA, 487 bp, Aspergillus oryzae
cccacggttatggatcttaattatttgtgtgatgttacacccttccgtgtcccagcgaaaccgtggactacggtgacgaacgatgacaacctggtgtcccatttagtgtctttgtatttcacttgggactatcccttctatgcttttgttgaccaaaaagcgttcattcgccatatgacactcgggaacgtggattccgacctttgtagcccgtttctcgtcaatgctgttctcgcaaacgcatgctattattcgcagtactccgaagcgtatgtggtaccaggagacgtcgccagcaaaggacgcaatttcctggccgaggcggaacgatatctcccaagccatcaactagagaaggggggaggggtccggctggcctcattgcaaggggcattagtcttatacgaaagatacgccatgtcgggagaggacgatctcggctatacgatgctcaacattgcaatcgagatggcggaggcactcggca

SEQ ID NO: 2335 - DNA, 485 bp, Aspergillus oryzae
gtcctctgcatgcttccttgtcctccaagtcactgacgagccatgtcgtcgaagccgattgacaaccagggtccgaccatcctggccgtgtgctggatcctggtcttaatcccggcccttattgtagccctccggatgtattgcaaggtaatattgaatagaggattcggatgggatgacatggtaatcagtctggccctggtattactcctcgtctacacagcgctcaccacccgaggcgtccagatgggcgtaatcggtaaacatgttggcgatattgatgaccccagtaaaacgcctgaagcgctgaagttgatctatattggcatgattatatgcatcatcagctgtgtgctcagcaagacgtccttcgccatcaccctgttgcgcatcgtgacgcgcccctggcagaaggcgatcctatggtttatcatcgtctctatgaatgtcatcatgtggctatgcgccatctgctacctgctcca

SEQ ID NO: 2336 - DNA, 509 bp, Aspergillus oryzae
gcgaaatactgcgtcttcctgatcatccaaaagctccaccgccaacacctctagcttatctccgccggaacaacaacaagcgcaggatgacgtctcttaatcagtccggggataccaactttacagttttcatacgcctcccttttcctcggggcgattttgtggatcctccacctgctgagtggaacgcagcgaaggaccaggcgctctgggacctactatcgcggccctctaaaggtgatgatatagactggaaagcattagcggagcgattcgatgtaactctccaattcctccttcaacaagcagcatggctgtatgatcggcaattatcacaggtccgctggcagatgcgcaaggtgggcaccactcagtcgagttctccgtcccctgcgcctggctctgtatccggaagcacggcgctcggcggccaatcagccaagggtggccctggtgcagccccacgagttcaaagtcgtctatcctcacatcaaaaagatactctccct

SEQ ID NO: 2337 - DNA, 585 bp, Aspergillus oryzae
attcaaacctcaactgaaaataacaaaaagaaaaaaaagtacaatacgtttatcataaggggaaagagatgcccaccagttccttcgttctcgactcgcccatccctccccaacttgatcttgctggtgctccctcgcagcccttcctgccgccgaatccctccgcctcatcggccctttttcgctccatctccatccccagccgcaagagagcgcggggagtggagtccgggcatcgttcatggcttgattctccgtccagtcccacctccttcgctgtccccgatgatcgtctcgctggcgtagacgacgtctccgccgagcatcactaccgacccagtcgctatcgagacccaccgctgaggctccccctggattccagcgttgagtcactcagcgatgcgtcgggggctcgtcgcaaacgcagccgtcgagatccgtcatcggtggtagcaccatccccgtcaggaccggaggacgagaaaatcactcagaacaacagctgcgatccgcaaactgcccccgtgcgctggagccgcgcggttttggacgtggtaggcaaggtctgggacttttgctggtcgg

SEQ ID NO: 2338 - DNA, 501 bp, Aspergillus oryzae
atccgacaccaccgtgatgcgtttatcctttacagtactgacagctgcccttcaggcggcagtcagtacggcatctaccttgactccgcccgtcctcccgctgattgtgcggaatccttacctcagtacttggttcggcaatgcccgtgaggcgccatggtccaaatggcccatgttttacactggagaggaggttggcctctccttgatggcacacgttcctagtacggggaccgtgtatccgttgttgggcaagccccatgaatccctgccttccgattccgattcaccggaagtagcgttcccagtttaccttggagccaactacgatgcgtctaccactaacctgacctaccgcatcaactcggatacgtcggcttctactccgctgaacatcactgtttctttcttatctcctattacgcctacatcgactctgcggcagtcgatcccggcttcatatgtgaccatccacgttcatggtgatgtggctgtcaatgt

SEQ ID NO: 2339 - DNA, 601 bp, Aspergillus oryzae
cctgcaggtaccggtccggaattcccgggtcgacccacgcgtccggttgcggccatgttgtacgagttaattgccgttgtccgtccgggcagcctccacgaggtccgagaaatcgcccgtaatgccggcattcaggtcctgcgctccggcggcgtagtccgcggatacaccaactggggcaccttccgactccccaagcccaccacaaagcaccaggccagatacacggaaggtcaccacttcattatgcgcttcgatgcttccggccccgtacagatggctgtccgcagaaccctcggcctcgatccccggatggtccgcttctcggtggtcaagctgggcgacaagcttgaggacataaaggatgtccagggcaaggttgaatggaacaacgcacgcaacatctccgagtctatctaaaagtcgacgcttctttggttacggattggatggatgagatgaagaagagccgttgtacagctcgtctaagttgttgatttgcattcggacattgatggacattgacagttcactgtattattgggattgagggttgaatttttgtactatcataccagcatcgcaggcgcacatatatatc

SEQ ID NO: 2340 - DNA, 569 bp, Aspergillus oryzae
ctttgtggtcgcatagcagccagtggcactactgcttaacctaaactatgctttcaagatccttgaaaagagctgggccagtcccttgggtgcggccagtcctttcttgtacctgtcggcgctctctagcacatgtcgctagtttggaagacataccttctgaagatgataagccatttagtgttccaatagcagaagatagcttcgatacgtatcatttagacccgcctccgtattcagttgaaaccaccaagagggaactgaaacagttataccatgatatgacaatgataagacgtatggagcttgccgcggatgggttatacaaagataggaaaatccgtggcttttgtcatttatcaactggacaagaagcagtcgctgtcggtatcgagcatgcactaactaaacaggacaaacttataacggcataccgttcccacgggtttacattaatgcgcggagggaccgtgaagtctatcattggcgagttgcttggacgaagagatggcatttcgtatggcaaaggcggctctatgcacatgttctgcgagagcttctttgggggg

SEQ ID NO: 2341 - DNA, 516 bp, Aspergillus oryzae
tgcacttctgcggtcttatactgacctgaatcacctctttgcgattgttgtggcaacagcaattgagacgagacgagactcgccctcggccaaacattatatcaacttccccgcgccttatctcccctcgggttaattcaaaagtagcaaaaatggctttatccaatactaaacccaaggttctgctcctgggaaagatcatccacgcacatacaacatggcaatccctgagtgatatcgcggaactagtcgaaccaaccgcaaccaaccgtgctgagttcatccaagaatgtaaagacggcaagctcgacggcgtagtcgccgcataccgcaccttcgactcagtgagtatcacaggcctggtagatgaggaagtagtgaacgcccttccaagctcgttgaagtacctagcccactgcggcgccggatacgaccaagtcgacgttcacgcttgcagcgctcgctcaccccccatccgtgtctcaaatgtccccacagctgtcgacgatgccaccg

SEQ ID NO: 2342 - DNA, 472 bp, Aspergillus oryzae
gttttcaatccaccatacccatcggaaactattgttcccgggcactacatacttcgcctatttccgaactgctggacagttgtttttgaggcttgacctacattttgagggaccaaccgcagtaaagactcaactattatggagccaacgcatccttacgtgagggagctcgaaattgcttgtctaacggtgcaaagagctactcttttgacgaagaaggtgctcgacgcggtcgacaaaggggctttggacaaaagtgactcgagccccgtgaccattgctgactttgctgcccaagcattgatcattgcggcaattcatcgggccttcccggacgatgacattgtgggagaagaagactccaaggctcttcgggggaatgaggccttgcttgagcgtacgtgggaactcgtctcctccattcatcttgacgatgagacgagcgaggcgctcctttactccccgaagaaca

SEQ ID NO: 2343 - DNA, 528 bp, Aspergillus oryzae
ctcgacgcgttttcgacgcaagatctctcgcggccccttcagccaatggccaatctacaaacatccttaggagtacctcgttgcgaagcccccgcaagggaccatccattcgcgctcggaggccgagacccccagcaaagtcgtcagcccccaaattacgaaaaggtggacgacctcaacgttcgaaaaatacggatatggaagaaagcgatagctctcagattgagaatgtatatcgcgaactcgctgagaaatcaaggccaacgccaagccgctacgaaccccaggctcctgacttctctaacctgaaggaaacttggccctcttttcccacgggtacgactgcgaatacagccgaggttgttgaaaaattatcttttctaagtgaccgctttccaaatggttatgttactccttatgaactgggcatgcggctcttcaggggacagtttgttcagtttctcgacgaggaggaaaaggcacaggctatagcagaggcgaagaaactctcccaacagcgtgcagaca

SEQ ID NO: 2344 - DNA, 578 bp, Aspergillus oryzae
cgacccacgcgtccggatatatgtttcgttcttcattgacagcgctcaaacgatatccactccccgcctcgattcgatactacagtagaaccgccagaatgtcgttgaaggctatctcttctaaagatgccgcatccctagacaaagacctgatggagattggaggatggtccctggaccaactgatggaacttgctggattgtctgtttcgcaagcagtccatcgcgtacatcctccaagcgctggaaagaacatcctagttgtttgcggccccggaaataacggaggagacggtctagtcgctgctcgccacctcgctcagtacggctatgagccatccgtttattatcccaaagagggcaagaacgagctttaccagcgtctcaaaacccaactcgacaacctctccgtgccattcattaccgatttccctgtcgcaatcaaatctgctgatctcttagttgatgcaattttcggtttttctttcggtggtcccctccgtgaccctttcccgaccatcatctctcagattgaggcagcttccggtgcctgtactgagcgtcgatgcgcccagctt

SEQ ID NO: 2345 - DNA, 480 bp, Aspergillus oryzae
tgcaatgccggagcaacgactacgcttgatccagatctggcaaatcttcccagagtctagagatgcatccagcaactcagggatgaagcgggtgaatcagtcgaactccgagctgtgtgcaaatccttctggggggacagcggtcaatgaagggggttcaaaccaatcaactcatacggattccactgacgatctggatatgtgtgactcagtacacgacggaggtaacaatagcgatggacaccagtatgccgaaccgtatatgatttctggctatgaggttcttgcacagagagactatgagctatctgcaatcaagaacatgcctgtggtgaatgagccaacaacgggctcaccatataaactggcaaacgaccccatctacagggctcagggccatcgatggtgggaacactcccagtcagatgcgttggaatatcagtacggcactttggaggagatgaatcggtatgcaggctg

SEQ ID NO: 2346 - DNA, 505 bp, Aspergillus oryzae
cgtgacctcctttttcgagacaagcgccgacgacatcgaatcgcctattgtgaaacggttgacttctcctgagactatattgcgtcaatcgtgtgatgccagcatgctcgtgcaagcgatcctggatgctatcattgaccttgcaatccctgtgaccacagcttaccaagatgccattggcgacttggaacttgacgtcttgactgatcctgatatcgatcagtccaaggacctctatattctaacatctgagatttcaatccttcgaaattcgatgcaacctatcgtaactatcatcaacgcgcttcgagatcatcgctctgaacctatcaatacccccggaataggtgtactgaagggttactttgggccctcgaactcctcagacccagcaccatatataggaaccgctactccgaatctcaaaagtgtaggtggctctagcgtatccatcagtaccatgtgtcatacgtatttgggcgatgcgctcgaccactgcatcaca

SEQ ID NO: 2347 - DNA, 552 bp, Aspergillus oryzae
attccttgcaatcatgagtgcagcatctgaacccacagtcccagctgcgtcagcccacagcggtgaggcagtcgactcacagacaagcccgccatctgcagctgctgaaaattccagtaacactgtcgaccaggctcagcctgcaaccaatggcagggatattgaatcagagctcccatcctcagcggctgatgggctcattcagaagcccttccctcgccctctcgactcggccaagcctactccgcctgcagagcttacctccgaccaacaggaaaagtacaattctgttctcaaagccgtttccgcttggacaacagtgccgacaacgtctgcgaagaacgcccctacggaacccctcactgacaatgagcgcatgttcttgacccgggaatgtttacttcgatacttgcgagcgacgaaatggaacgtgtccgaagcaatagcacgacttgaacgtactctgacgtggcgtcgtgaatacggcgtggagaagctgaccgcagattttatctcagttgagaatgagacgggaaagcaggttatccttgg

SEQ ID NO: 2348 - DNA, 478 bp, Aspergillus oryzae
cactactagtgatggtcgccgggatctactgtgtgaagtctgggctcagagttgctatgatggttgttattgtatgctttctcggatcgattgcatatctacttagtcggattgtcgtgctgtgcggaaactcacaacgtgcgcataccgtaggcagggagatgatgttatttttcgccgttgtcgcgttggttcttattgtaatgactgtggggtgtgcggtgcaatgcatcttcaatctcagctacggattacaggtcggtcgtcccgacagtcggtggccacagagttctcatgcctttcaaacacttgatgcgcccatgagcccttctattcaagatacccgatatcatcgtcgcttgtctcttgattagatggagcgaagagtgcgaacgatttcgttttgtatggatatctaactgtatccgaaagctctcgctttgtcccgggatgctggaaaaacgagacgaacgtgtgg

SEQ ID NO: 2349 - DNA, 597 bp, Aspergillus oryzae
cggacgcgtgggcgaccgctcgcgtaatgtcttcgtcacccgctccaagattgtctcctatatccgcaacttcttcgacacccgcgacttcgtcgaggtcgaaacccccatgatgaatgccatcgccggtggtgcgaccgccaagcccttcgtcactcaccacaacgacctcgacatgaacctgttcatgcgtgtggctcccgagttgtacctgaagatgcttatcgttggaggccttgagcgtgtgtacgaaatgggtcgtcaattccgtaacgaaggcattgaccttacccacaaccccgaattcacgacttgcgagttctactgggcttacgccgatgtctacgatgtcatgaacctgactgaagagctggtctccggcctggtgaagcacgtcaccggcggttacgagaccgttttccatacccagactggcgaggagtacaacgtcaactggaaggccccctggcgccgcgtggagatgatcccggccctcgaggaggccactggtgagaagttcccgccaggtgaccagctgcacaccgctgagacgggtgaattcctcaagaaggtgctgaagaagaccggcgttgagtg

SEQ ID NO: 2350 - DNA, 539 bp, Aspergillus oryzae
cgttccctcagaaagttgtatgcaaatagtttggctatctctataggcctgtccattcctttcaattgatatctttctcgttgcaatctcagctcacacacctgtcaaaatggctcgtaccacgctctctttctatgccgtttgcttcatcctagccctcacgggctctgctttgcctgccaagcgcgccgacccttcctcgtctgccagtgcggttgcccccagcggcatgacgaattttgcctacgatgctgtgaagtccgccacccacatggcgcaggacatcaacaaagaattctatgacgatgatgagactgcgaagcccacgcccatcgatattccccctgttcatcccacgccttccagcagtgggccagcaacaaagtctctaaaggacgtttacaaagagcaagctgcacagaaagtgcatgatctcgaggagccctcaccctcgcctacgccgaaaaccgacaccaaggctgaggagcctcaaacggagccttcaacggaagagcgacagcaaagcgagcctgctccta

SEQ ID NO: 2351 - DNA, 435 bp, Aspergillus oryzae
gaagtataatcgttagcgacgctgatcatagtggtgttttcaccaaccaagccggtggccagcctgatcagtgggaattgcatgacacacctcaagcgcccgcatacagccggagcttacatgtctttgagaagtaccctgatcatttgatgctactcggtgcaggcgtgtttgacgcaacggtaaatctgccgctttatcttagcgttgtgagcgtagaagataccttgaagaagccagctgggaaatagggaagctctgcaggtcagcttaatcaacccggccgagactgactgcgggagcagccagggagcgttagagattatttgacatatctctattcatcggaattggaacataataagaagacacaacatgttgagataatgagataataagattcaaaaccttgagacaaatcctaccaccgaccag

SEQ ID NO: 2352 - DNA, 521 bp, Aspergillus oryzae
caactggtcatggagagccccgacaatcgtccaggctgcatcgtcgatccttcaagtcatctttatctggtttgtccccgagtcacctcgattcctcatctacaaaggcaaacacgagcaagcccttaaagttctggcagactgccacgccaatggcgaccaagaggacgaagtggttcagctggagatgcatgagattaaggaaaccattcggttggagaaggagttcgaaagcaacagctggaaggaactgatccgcaccaagggcaaccgacatcgtctgatcatctgtatcacggccggtttgttctctcaatggtccggtaacggtctggtgtcctactacattgccaaaattcttgactcagtcggatacaccagctctgtggagcagaacttgatcaatggctgtctccaaattcttaacatgattgtggcgttgacgatgtgcttcttcgtcgataagattgggcgacgcaagctcttcctggtctcgacggccggcatgttggtggcgttta

SEQ ID NO: 2353 - DNA, 460 bp, Aspergillus oryzae
ctcgtgtccaccaacgtcgggtttgtttttgtttttgtttttatttatttttagtttcctcctttgaaatccgaagtcgcataccatagggcatatagctggctggctacacactctgtctacgtaagagacacgagattctaagatccgagactggacaacagtccataggactttgaccatggaaagtgtcaaccattgaatggaggaagattctctagttcaacactaggcttggagcctgcatcccagacccaacttaccatgaaccagttgcgtggagcatggtcaatgattgaggcaggattaaatttgaaacagggaggcttctcaaaatatccatatctgtcatacaaaaccatctatcgattccggactccgcgaagtcgatcatcgtcgatttccaggaatgtaaacgaccactttcgccaacaaaatagcgcagatactggtaggctat

SEQ ID NO: 2354 - DNA, 134 bp, Aspergillus oryzae
aagtaggtttattggattataatgtaaagcattaactccgacgccgtcttgtcttgtgtatcttgaagctcgagcttgatggaaaggtaaaaagcaaaggggggaatgagaattaacagggggactgagaaagg

SEQ ID NO: 2355 - DNA, 658 bp, Aspergillus oryzae
tcgacccacgcgtccgccactgtgctccaattcagcgtgcttaatattcctcgcaatctatcgcatctcgctcgtacatgctacctctgtctcattgactatcgcgcaaacaatttcaatccgtccaactacctaatcgcttaatcaacacggcgagtaaacacaagaagagaagaaaaatacaacatcacagcaaccgccaatcatggctgtagcaaccatcgacatcatgccgaaacaggcatcctcctcccctctctcctccaacaacccctccatgaacaagcgctggccccctcttgccgacaagacctccctgccttacaagctcaccaccctgtcgcgccagaagctcgcccgggaggccactgcccccgacccagatatcagacggtgccttggccacttccgtctgcatgttatctctatggagtgggcacagaaggacatgactactcggatcaactcgttcgaactggaggatgacgagtccgaagaggaggaggaagacagcaagcgcgacgacggtcaggagaaggactccgacgcgagtgactccaccgaagaggagaaggaagactccgagaccaaggccaaggatggtaccggcaccgacgccccttcagacaggaacccgttcaggtgaccttcaccgtct

SEQ ID NO: 2356 - DNA, 563 bp, Aspergillus oryzae
tgctcattggactgtattcggtcatcttgtactttcctttctggcattctcaaaaatggctgtcaggattgcgagattccttggtctttccaccgtcgcctatcttgctttggcgaatgggatcgacgcccgcgacaccatctctcgcgatgtaatcatccttggtggtggcagttcgggaacatatgccgcgattcgtcttagggatcaaggcaagaccgtcgctgtcgttgaacgcaacaactatctcggcggtcacggcgaaacctactacaccgaagataatacgcctctgaacttcggtgtagagggatttttcaacacgaccgtgactcggaactatcttgaacgacttcaggtgccctatgggcgccgcgaccctgctcccgcgcacgaggactacgtgaacctcaacacagggcaaagaacagaatacactccaggccagcttcaggacagggaggcattcgcgaaatgggtcgacgccatctctcagttcgggttcttagatgacggcgtctaccgaatcccagagccggtgccagaggacctcatcagtccgt

SEQ ID NO: 2357 - DNA, 532 bp, Aspergillus oryzae
atctttttgcgttagaacattcctacattgatcctagaaattacccttgagggccctggatctgttttgaataacttagccccctcgttatcttgcgtctttgctgggcaacgtttatccgcatgagctacgactcggggtatttggattgattttctatactactagtatcttccctcgccctaaaatacaccctggatctatagatataaaggcaaccatggatgcccaggtagacagactagtcgataagatctgggataaaaccgaatctacgccagacgattcccggttgatgatagcagtgagtggcataccgggctccggaaagacagcacttgccagcttgatggcaaatcgcatcaaccaactttacacggcacagcatcccaattcaccgcctatcgcgactgctatccctatggatggatatcaccttacgcgggcgcagctcgctcaaatgcccgacccggtgtatgctgctgcgcgacggggtgcagctttcacttttgacggggagaagttcttgaga

SEQ ID NO: 2358 - DNA, 552 bp, Aspergillus oryzae
gccggtatcctccaaggtgcctttaccgccgcccagttcgccacggcgattccctggggtcgcgtggcggatgctgaatggggtggacggaagttcgtccttttagttggtcttttggggacggcggtgtcgtgtctgggtgtcgcctttgctacgtcgttcgcgcaggccgtgttctggcgttcattcggcggtgccatcaatggtacggtgggtattattcggaccatgattgcggagaacgtcaaggagaagaaatatcattctcgcgcgtttctgattttaccgattggatttaacattgcttctttgttcggacctgttatgggtggtatgctcgccgatccggtgcgcagttatcctgcgttgttcggccctaactcttcttttggcggagcgaatggtgtacaatggctcgagcgctatccttatgcactgccgatgttggccaatgctgttttcctctcttttgctgcgttctgtgttggtatcggcttggaagagacattggaagcgtgcaaaggcaaaccaggcttggggtgttttcaccgc

SEQ ID NO: 2359 - DNA, 147 bp, Aspergillus oryzae
ggaactgctacgacagtttgacgactggaaaccgaccagcaaggttctaaaggatgtaaagttccgattagaaggaatccgctcaaagctctagccgcagttccgcacttgacacataccctctgcatcaacccttcactgacatct

SEQ ID NO: 2360 - DNA, 555 bp, Aspergillus oryzae
  modified_base (176)..(176): n is a, c, g, or t
catggattctacatcttcagccaatccagaacagctggttcctagggacggcatcggttcgcgcgacagtggaccggactcggagagtgatcgtgtaggtggtatccggaacaggttgacgccacaagacctttgtgttccgtcactatcacctgtcgttgagcgtttctctcaanagagtgtgtcacctatagaaagttccgaggagacacgtacggtaaatccaggggaaccggaagaagttaaacatcagagcgagcccaggctgtacgaccgcgaagatgaacccagcccgaaatcacttcctgtagataccagtggctcattgaaagtatcgacatcaaatatctcgaattattacacggcttccaacacacccgtgatttccccggtggaatcaaagtccgttgaaatatcggaaggcaaagtcgatttaactgataacgtcctggaggatcaaccaggagattcagaaaaagaacaggctcaaaagctctacgacagtcaggatcaagttgtgggaaatgagccggctgctgcatggctcggtgaccc

SEQ ID NO: 2361 - DNA, 369 bp, Aspergillus oryzae
  modified_base (171)..(171): n is a, c, g, or t
ggggcttgcatttacgcttcccaggtacccgaacggtggcgccccggcctcttcgactacgtaggtgggagccataatatctggcattttgccgtcctaggcggcattctgttccactattgcgccatgcaagatttgtttgcaggcgcttttcagagagccaagggggantgtccgcacttgacttcctgaagcctctgctgcttggcttctttattgttatggctgtatatgacgggatcaatcttcacgcgcacatagattttggctgtcgggttagatattttggatgcccagtcgccagttatatatagatttccgcggatctcatataaaccccggcagttgcatggttggagtacttaaatc

SEQ ID NO: 2362 - DNA, 369 bp, Aspergillus oryzae
  modified_base (133)..(133): n is a, c, g, or t
gtcttaagggtgtcgatcttgcaccacccgaattggagtcaatcaacggagataaattgcagtctttcatctttccggggtcaaaggcgttcgcgtacaagtcggtcaacttctctgattaccaggatctagngtgcgacattacttatgcaaaccccagctagcctcctgatacctggcatatcgaaatttggtgtggtcaatgcttgtttatagacggcacagctctatgcagtccttactatatacacatacacatctccagtcgagtaatttcccatatcgatgtacctatgatgattgagttgttagtcatttgcaagtacttctagtctcaaccctagatagctatacattttgcacaggaag

SEQ ID NO: 2363 - DNA, 465 bp, Aspergillus oryzae
  modified_base (136)..(137): n is a, c, g, or t
caaattcactccacaaatttctacctctgtcatccgccttcccttgaatattatcaggttgtcatcatgggcagcacttcggaagatgtttacgactacattatttgcggaggtggtacagcaggatgcgttgtcnntggtcgtctcgctgaaaatcctgatgtcaaggtgctagtccttgaagctggtcaacataacaaagatctggagaacgtacatatgacgggaggatggtcaaataattttgactcggaaaccgattggaatatagtcacaacgcctatgaaaggagtagataaccgacaggtgaaactgagccgaggtcgctttttgggaggctgcagcggatgtaatggtaccctgtgtgtgcgaggtagcaagcaagattatgacgattgggagctggaaggatggagtggagaggaattctttgccgcaatgagaaagtcggaaacttttcatccc

SEQ ID NO: 2364 - DNA, 460 bp, Aspergillus oryzae
attccttcttccctttcaggactttcgctttccgaggctttcttttctttccacccctatcacgtatacgcctgacttttgtctcatctcatatctacttaagagctagttcctgtatcttctgtttccgccatgcctgccaccacggcggacagcctttccctcgtcacgcggaccgtcacggtcgccccgttagtactcctctcagtcgcagatcattatggtcgctcggcaaagggaactcgcaagcgtgtggtgggagtattgctaggagagaactcgggtcaaaatgttcgagtatcaaacagctttgcggttccctttgaggaggatgaaaaggatccctcagtgtggttcttagatcataattttgtcgaatcgatgagagacatgttcaagaagattaacgctcgtgaaaaactcattggatggtatcactcgggtccgaagctacgggccg

SEQ ID NO: 2365 - DNA, 634 bp, Aspergillus oryzae
tcgacccacgcgtccgcacggacatggacaatcacagcagcttaagaatccagaggaatcctcacccacaacaacaacaacaccaccaccctacatctacttatctggacattgtatcgacgcttgtgtctccgcaatcttttcttttcaaccaacaacgctcgagacccccgccgccgaaatccccaacttcgcaccctgccgcgtcgccgacgatggacaaagcgcagcagcctagctcttttcaacagctggaaaagctaggagaaggaacgtatgccactgtattcaagggccggaatcgccagactggcgagctagtagctttgaaggagattcatcttgattccgaggaggggacaccatcgacggccattcgagagatctcattgatgaaggagcttaagcatgagagtattgtttcgctttacgacgtcatccataccgaaaacaagctgatgctcgtttttgagtatatggacaaggatctgaagaagtacatggacactcgaggcgaacggggacaattagaccaggcgacgatcaagtcattcatgcaccagctcctcaagggcatcgcgttttgtcacgagaaccgagtcctccaccgtgacttgaagccccagaatctctt

SEQ ID NO: 2366 - DNA, 618 bp, Aspergillus oryzae
caacaagcgaaacaatcgcaagtctgagttcttacttcgggagatcgagtatctagccacgcttgcgtcgatctcgcaaactagtggcaattaccgatatcccaagaaggagatagacgatatgtgggagggtgtgctcttatgtcagttccacgactgtctgccaggcagttccatcgagatgtgctacgatgactctgacaaactttatgccgagatcttcgaaactggtcataaagttaggagacaagccctcgaggctcttggattcggagacaagaaaccttccaagagccttgtggcgatcaacactctgccttggcaccgttcggaagttgtcaagctccctcccgaactcgaaaaagcaaaccgccggaagtatgccgtggttagcgggaagacgggtttcatggagtgtcgagccaacccagtcatttctactcgagtgaccgtttcggagatccggccaggagtgttccgccttgagaatacaaagttgagggttgacatccacaatggagtaatcacatctctattcgatgttgaggcagatcgcgaagtgatcgcgaagggcggcaaggctgggcagttggtcatctttgatgataagccacttta

SEQ ID NO: 2367 - DNA, 538 bp, Aspergillus oryzae
cttcacaccgtctcagccattgccttgtgaaaggtcctcatggttcttgctacgccacgtgtcttcctaaactggcatcgtcattatatgtctttttgcaatactcagacacgaactgtccggaaacgattgggccagatggctacgcaactctcgaaccctgcaaagagggtttcgttggaggagctcccaaaatccaatattttcacagccaaactgccaccagaccctgctttcgagactcccaagatctctcatggagccccgagggaagccctcggtcctcgcttggtgaaaggtgccttgtatactttcgttcgccccgagccagccaaggagacggagctcttagatgtcagcccgaaagcaatggcagacttgggattaaagtcaggagaggagcttacacctcagtttaaagcggtagtgtctggaaatcactttttttggactgagaatagtggaggcatctacccatgggcgcaatgctatggaggatggcaattcggctcatgggctgggcagcttggggatgggg

SEQ ID NO: 2368 - DNA, 172 bp, Aspergillus oryzae
cagactgcattggatacagtcttttactgcaaggttttttttctcttcacaaatgttttttctttttcttttttccttttccgcgataacgcaggaaggcattgtgatatagtccacttgatgtgtcaaatagtctaatgaaaagcacttgcgtgcagtgaattcggatcgc

SEQ ID NO: 2369 - DNA, 567 bp, Aspergillus oryzae
cttctcagagaccttcctctatgcagatcacatctagaatcatgcctataaaatcaccctttgaggcatccattgccaaacccggacaaggcaatgttgtcctttcactactacctccttcaaatcctaccttgacgaccctcacctacaaataccccctcaaactccttacaagaacacccggctatgtgcctcaatcctccgctctatcatgtcccgcttcccgcccagtccacctctacctcctcacctatggcggcggccttctaccaggtgaccacattgaggtctcaatcaagctcgagcaattcacaagaatggtcgtaacaacgccacaaggaaccacgaagatctacaaaacagagcccagcagaagcgtcaagggccgccgtgccccggggcgagtactatcagacaagagccggcaaacactagacgtgcggatcgaaaagggagccgcaatgtgctacctccccgatccagccgtaccatacaaggacagccggtacgagcaagtccaaacattcacagtcgacaccacaacaaaggactcccaacggagtagcc

SEQ ID NO: 2370 - DNA, 515 bp, Aspergillus oryzae
  modified_base (100)..(100): n is a, c, g, or t
catccctttccctgatactttttactactgcacagtttgatccaaaccctcgggtgtaacgaacttctcacctccaccaattgcctggcgcgctccccgngctgtcgggggatactattactgatacctaggctcacgacgcaagcaagcgctctttgattactttcactttattttctttttccttacttgtccacccggcgagtttctccgcaaggccaacgtgattgcaacgatctaccctcggcagcagcagctcgtcgccccattcgtggtgtgcacacacacagccttaccgccatgccgacctctaacacttcgtcgcctgtcaagcgcccgggtctgggtcgtcgcgcagtctcctcacacgccgtcgtcacgcgatcgacatccacccaaagcgaactggccaactccaacaccgcccaccaacaatcctccaaactctctcaccggccacatcgtgcccatgttgtcggcggcggtcatcgcaaccaccatcgtaatccgtcctt

SEQ ID NO: 2371 - DNA, 468 bp, Aspergillus oryzae
gatcgtatcaaagctggggaaaatgcctttgactgctatatttccaatggagagtggactcaggcaaattcggtggcgagagatgttgtgaagctcttccccttgttggttccgcggtggttaagtcaagatgaccagcaacatctacttaaaaacatatcgcacttcacatctcgtgcagcatctgccgtgctacaggcaaatggacctccccttgacgctctcaagatattggagaccgggaggggggtgatagcccgctgcagtatcggtttgaagaccgacatctccaaacttgagaaatcgcatccctcattgcacgatgagtatactatgctccgtcggcaactttcccttccctctttctcaacattctcaagtgcagcggaaccttcccagccaacattgatatgccgacgacggaaagctccaggattactcccaccccatatcactaccaccggaccc

SEQ ID NO: 2372 - DNA, 440 bp, Aspergillus oryzae
tcgacccacgcgtccgcccacgcgtccgcccacgcgtccgaccccatgatgttcatgtagcttcattcttttctatccatcgacctatctccgtttcgaccactgttcctcctccttctagccctgaagcatttgatgccatattcaccgcgaagaaatccacgaaacatgaatcggatgatgtgattttcactctatcctctaccgtcaactccatggagaaccctgcctatcacctaggtgaacaagaaggctctctgaaccacttcgatatggagggtaaccagctcgacggaatgaacatggcggaactgaaggtttccgtggaggagctcacaagacgacttcgtccattccaccccccgccgccaccggttcccttcgatgaagcgaatgatgccggtgccgtggagtcggaaaacttctctccccgcgaaacc

SEQ ID NO: 2373 - DNA, 425 bp, Aspergillus oryzae
agctaattttttgattcggatcattctggatcctctatgttttcccacattgtcactgcggcaaagggtctatttactcgacaggataccgacaaggcacaatcgaagaactttaccactacctcgtccgacaacgcaatcgctagcacatcaaagatggtcacaacacggcggcggaagatttccgatattgttcccaaagaggaacctgagatcaatggacagcaggaggtgaatgggaggcgcaaatccgggccagccggctccgggaagatggaaactcagcgcaataaacggagaaagcgagccagtcttgaagccgcagaaggcgagagcgggactccagaagagccttcagaagatacccaggaaacggattccaagcaagaggaagagaaatcggcacctgctccgaagaagcactt

SEQ ID NO: 2374 - DNA, 646 bp, Aspergillus oryzae
ctcctgtactacttctcattcgacgcaagaaaaacatatacagcaaacaacaggcatcgacaccatgccggtcaccaaattctcacacccagacccttactcctatcaaactggatttgattcttatcatgaaacggaagccatcgaaggagccctccccgtaggccagaactctccccagaaggctccgtatggtctatatgccgaaaagctgtctggaacagccttcactgctcctcgacatgagaacaaacaaactttggtttacaggatcatccccgcggcagcccacgaaaacttcaaggtcgaaaacggagactcctatcacactcatatgaccaccgagaccactaagctccaccacattcccaatcagctgcgatggaacccgttcgacctggatgagactgtggactgggtgcatgggttgcatctcatcgcaggctccggagaccccaccttgaaacaaggactgggaattctgatgtacgcggctggaaaagacatgggaaaggaggccttctattctgcggatggtgatttcctaattgtcccacagcatggtgtgctagacattcagacagaattgggaagacttatcgtccgcccaaatgagatttgcgtcatccccgtggtgtcagatacc

SEQ ID NO: 2375 - DNA, 423 bp, Aspergillus oryzae
cccttctgctcgctgcttccgggtctcgagttacctggttacatttttgttctttgaatcggtcggctattacgggattgtcttgagcttgtactctctttttatttatttatttttttttatttttttatttgacttttgggttttgtttgccggccttgcctgattttatcatggctgcgaaacttgccatcacggatttggtacccctccctaactcggcggttaagatcccgcgtcttgggttcggtgtttatcgctcgccgccgactcagtgtgtgcagtctactttgaaggctttggagacgggttatcgtcatgttgatacggctcagttctacgcgaatgagaaggaggtcggcgatgcaattcgcgcctcgggcatcccgcgcagcgacatcttcgtgactactaagatccttg

SEQ ID NO: 2376 - DNA, 479 bp, Aspergillus oryzae
cggaccgcgacatcctgtacaaaggtttgaatttcggtggcactgtggaatgggccaccagtatgcattcattccacgaagttccttcagatgcactggtgcctggagggtcgctctcagatattatcaaggaatggcctgtctttgttgagacagtcattaatgggaagagccctttcatacacggcgaccgcaacgggcactgggcggatggctcgattacctgtacggatgacgccgtcgttggtgtgcttgatatcccaccgaagaagcgatgggaagaccttgattgcagtactgcgtggcaagatgcgctggacaaataccgccagtttgaccttcctcgaaattgggactttaccaaatctattagcgacaccttccacggtcgcgagaatatgaactgtggcatattatcggcacaagctgactgcagcatgagcttccagtgcgagcagtccaaaggagagggttctggg

SEQ ID NO: 2377 - DNA, 436 bp, Aspergillus oryzae
cccctactgctcggacatcgccaagtcgattgatgcccctgtcttccacgtcaacggtgatgacgtcgaggccgtgaattatgtctgccaggttgccgcggactggcgtgcggagttcaagagcgatgtcgtcattgacattgtctgctaccgtaagcagggtcacaacgagaccgatcagccgtctttcactcagcccttgatgtacaagcgtattgccgctcagaagaatcagcttgacaagtatgtcgagaagttgatcaccgagggtaccttcactaaggaggacatcgatgagcataagaagtgggtctggggaatgcttaacgacagctttgaccgtagcaaggactaccagcctactggcaaggaatggttgacctccgcatggaacggattcaagacccccaaggagttggccaccgaggttctgcct

SEQ ID NO: 2378 - DNA, 479 bp, Aspergillus oryzae
cagagtccctccatcaattgcgtccggactgaggaccgacagcctccaattcctcctcgtccttctcccctctcttccgaatggctgcttcctttactcgcctggcgggcagcgcgcccaaaaggctttgtctccgcccctccaccttcaccaaatacaacgccatccccagatcccgctcgatagcgacgacgcttcctcgtcggcaagcggaaccgaccagctaccaggctaccagactcattcccactgaccctaccttcacaagtctggctaacaaggagggtccccaagaagccgatgttgccgctggtctcgaatccgagagtgaaggggtcggccgcaaaatccgtcactacacagtcaacttcggtcctcagcatcctgctgctcacggtgtgcttcgactgattctcgagatcaatggtgaagagatcgtccgcgcggatcctcatgtcggattgcttcaccgtggtacc

SEQ ID NO: 2379 - DNA, 355 bp, Aspergillus oryzae
ccagacgagaccagcacaatgccgagcgccagtgagacaagtacagatctgacgagccgcaatccctacggccacggcaatggggttagcgattttttgagcaatgtctcgcggttcaagattatcgagagtaccctgcgtgagggcgagcaatttgccaatgccttcttcgacacgcagaagaagatcgagattgccagggcactagatgagtttggggttgattacattgagctcacaaacccgtgcgcctcagagcagtcgaggcttgactgcgaggccatctgcaagctaggccttaaggctaagattctgacccatattcggtgccatatggacgatgcgcgcatcgcgg

SEQ ID NO: 2380 - DNA, 584 bp, Aspergillus oryzae
caaccatttgctaagacaaagcgaacttacaacacctaccagatctcctcgatctcattctccatagagagccactcacaccttcatttgcatttgcgccgcttaacactatctcccaccgcgcataccgccttatctctttacatagccacagccatgtcgtcacggaagaaggttcttcttaaggtgatcattctgggcgatagcggcgtcggtaaaacgagtttgatgaaccaatatgtcaacaagaagttcagcgccagctacaaggcaacaatcggcgcggatttccttaccaaggaagttctagtagacgaccgactggtaacaatgcagatctgggatacggcgggtcaagaacgttttcaatctttgggtgttgcgttttaccgaggagccgactgctgtgttttggtatacgatgtgaacaactccaagagtttcgaggctctggacagctggcgagatgaatttcttatccaagcaagcccgagagatcctgaaaactttcctttcgtcgttattggtaacaagatcgatgttgaggagagcaagagaatgatttcctcgaaacgcgccatgac

SEQ ID NO: 2381 - DNA, 467 bp, Aspergillus oryzae
cggacgcgtggggtcctgacataattcttttctttctttccctccttggacttcctcttcctcatttctaagcgcccttatattcggttccaacaataattgtacaatgctttgaacactaactgactcctgctgtgcacgagaatgcaaaccatccctggcagatccaccttaacgctcgaccgatgagaacagggattttgttttagaaatggatatgatgtcagtcagcacggcggcgttcgccccagctgcagcttctggctccgacctgcattcgatcctaagctcaaccggtcctaccagagcagcgacgtcgacttcctcgctcaattccttgactgactacacgaactatcctctgatccgtcagggcgaacgcacgtacttgcgcgaccccgaaagtctgtaccctttaccatgcgatctcccggaaattcatcgccaaacgctgcgctctctaatgc

SEQ ID NO: 2382 - DNA, 576 bp, Aspergillus oryzae
cggacgcgtgggcggacgcgtggggcaaaaggataagataaatcaaagaaaatagggaagaaaatgcgctccatcgcgtatctcgccagcggtcttccggtcgctttggcagccacctccggccaattcgatgttctctctttcaacgtcgcgggtcttccggctatcctcaacggcaacgaagtgcccggcgataaaaccaataactccaaagcaattggtgctaagttcgccgaatacgattatgatgtgatccatgtacaagaggacttcaactaccatgcctacatatacgaaaccgacgaccatccttatcgcaccgccacttccggaggtgcgggtatcggatcagggttgaacacgcttgccaactacccctgggtggactttgagcgcgtcaagtgggaaacatgctctgacgcctcgggttctgattgtttgactcctaagggatttaccacgatgcgcgtgcgctttgacgagggcgtctacgtcgacttttacaatttgcatacggatgccggttctgagacagacgatgtcacagcgcgcagtgccaatttgcagcaggtggcc

SEQ ID NO: 2383 - DNA, 592 bp, Aspergillus oryzae
ggaatcgaaagcgttttatctgtccgcaaagacaaaatgaaatatgtttggggattttccagaaatgtcagaccccaatcggttcccgcggagcccggaataaactcatccaatagtgaaaaaaacttcgctgcctggcatcaatcctaatgtctacctacgttgctgtaatctaatatggcaatcgactgtgacctgtctcaaattatagaacgaaaactcaaagccttgtaaggtgatgtgtgccaggacggttacaaaatccacgattgaacatcctcgtcctcccgcctctatcgacaaataatatggccgccgagccacttagtatattgctggcaagcacaaccgcatccctctcactagatctattcacatatcccttagatacgatcaaaacccgcattcagtctcgcgaatattcgcagttcctgagaaccaacacaggaaccagcatatggagacacccagggatattccgcggcctttaccaaggtatcgcgagcgtaaccgctgcctcatttcccacagcgggcgcattcttcatcacatacgagtatgcacagtcaggactccaagtcatacatcaaaa

SEQ ID NO: 2384 - DNA, 518 bp, Aspergillus oryzae
cggacgcgtgggcggacgcgtgggcggacgcgtgggcttggaaactgtgcagctgcagtttagtctgggaactagtctgcttaagctttcccataccattgggtccttgtccatattggccagctgtgccaacccaccttttctttgttctctccctccgtataaataccttccatatcactttccttcataacaagcaaccgttcccttctcaatacactgagcatacatatcatcattaacgccgagaacactgatataaataaaacttttattcacttttgatacatataaaaaagaaaaccacatcaataccgtcacgatgagtgttgaggttcccttgtggccgcactttcttttcagggtctttgagcctttatcatgcttcggcggctacatcttccccctcctagaccttaacaagttcatcgtggactcaacaccaaacgtcccaccgcccgagaccatccatccaagcagcgtcgtcctagccggccaactaggaaacatatacgctg

SEQ ID NO: 2385 - DNA, 494 bp, Aspergillus oryzae
agacccttcctccagtatatacatacgcaatatatagtagttctgcagctgtcatgggctcgaacaacgagggccgagttggtgtttatagcagcgctcattttatacctcggttccaacccgccgtcccaccggttttggagcgcctacgaccgaggagacgatcccgagctccagtaccacagaagaggtcacataccacgtttccatacgaacctctggaccctgcgaagcatgaaatcagactatttgaactctggccaggaaagcccggtagcaaggtggtcgggcgcctcttccacgtctccttggatgaaaaccccagcttcgaagccttgagctacacttgggggccacctaaaccaacttataacatctccattaatggatacaaggcatttcctgtgcagcggaacctgaggaaggcattggacgatctgcgccagcctgacaagcctcgtgttctctggacggatgccatatgtatcaatcag

SEQ ID NO: 2386 - DNA, 491 bp, Aspergillus oryzae
cgtaaatcatgaatagattatgatctgttcaccactgactcgttgattgacattgaattcaaaagaacagacccggtaacaaaacaaagggttcttctgttccaagacccattggtaattgtgttacacactcacctccagacccacgtttctttggttcgtttgggtcagtttgtaggagaaagtgttcaagtgactacagtcaggcgcttgcagtccgacaccttgcgtttctcactcgtcaccattcccagttctttgtctgccgcttatcgtcattcgctcgtgtggaactctccaaggaaaccccatggaggctgtccctcatacctaactcgcaagtcgtgtcggggggccctgatatttggacggtatctccgtgcgggagactcgggttcaccatacaacgttgttttacatactagtccctttttcccttcgttctgtccacccgatctaaagacgacccggctcagtttcgtcctctagcc

SEQ ID NO: 2387 - DNA, 364 bp, Aspergillus oryzae
aacaaaaccacatacacaaaataaaaaatcacgttcttctacaattcgaaccaaaagctatatctccaaaactcaaaatgtcgcagtcctactctagctcttcttcctacttctacagctcttcgagcagcaccgacgacggcaccgccgctaccggtcagcgttatgctacggtctcccagaccgagcctgatggaaccacgactgttcgtaccattcgtcaggatctcggcgagccggatgtcgttgatgagaaacggtacgaccagaccggtcggctattgactgcggggaactcttcggctgggggagtgcgacgaattacggaattggatgatgaggggggtgaatcttatgattaggg

SEQ ID NO: 2388 - DNA, 513 bp, Aspergillus oryzae
ctcattgccccatatccaatatattgcttggggaatcaagttcttccataccctaaatacaaacatcatggcttcagacacagaaaccatccgaattggatatgtaccagaacattacctcactcccctccaccttgccctccgctctcccgctgtcgcatcccttccgtttaagatctctattgttccgttcccatccgggacgggacatatgatcacctccctgcgcgagaaagaaattgacattgcaattgggttgactgaaggctgggttgctggtctggcgggaaaacagcaagcgcagaaggatgcagtcttgggcggatataaagtcgtcggggaatgggttgctacaccattacggtgggctattgtcactggaagagagagagcggatctccaaggtgttgccgacctaaaggacaagcgggttggtgttagtagattgggaagtggttctcacatcatgtcattcgtccttgcccagaatcacggctggaaatccgactcctt

SEQ ID NO: 2389 - DNA, 525 bp, Aspergillus oryzae
gatatgaacgactgtcgctaggttttgcgcatcacgataagctgtttccccccggttccctgaaatcttgacggccaatggcttttcccctcccgcggggcattacgcccccggagatatcctttctcgctgaaatggagatggtcaccatccttcctcgtcaacgtttggagggattagagcttctcggtggccccgttgagcctctcctgccgcctcgacgcgcttctcttcccctctggctggctctccttctcaaacgccaacgccgcgcaaatatccttcctccgccctggctccatccagaatctctgtccctcatcctcgaaattgaaacccaacaccatgagtaccagcatgcattctccccaccacctccactcccgggccaaccaagccttcgggatcgcggaaaacgacccgtcgctatgcctcgctataccccagatggcggacggtactacccagcaccgccattcctgcctcagaatgtcgcgcaggaccatgttccatctggcgagcctc

SEQ ID NO: 2390 - DNA, 606 bp, Aspergillus oryzae
gcctgcaggtaccggtccggaattcccgggtcgacccacgcgtccgtatcaacttcggttatcgccactagaccgtttccctgttgcgttcgtggtctatatattatatcgtctcatttctctcttgttcctttgtctcgaaccaattttttgggcttcgtctcacccaccgattactattccgagtgctctctatcgataagggcttccaagaaaacttcaccccacccactcagaggaaaaggcttttggtcgaccccctttgaccccgctattatttgatccactcactggaagttcttttttctctttcttccttgccttaccgacaggcttttgatctttcctcctttccgtctcttgacgctttcctccaccccccccctcccctcctaccaacacataccctcgacaaaatggtgtctgcttccaaagccgctcgtttggcaaagcgtgccgatggcgactccaagaagaagctcggcaagggaaagaagagcggtactgagtccccccaggtcgacagtgacgtcccggccgatgatcagcccgccaccacgaccgagaagatgaaggaggttgagaagcttacagcacagatggaca

SEQ ID NO: 2391 - DNA, 510 bp, Aspergillus oryzae
taaacttgcagtatttcctggaatttctttgtgtttcttgcaggtttgtggtttctgcgccgtcaagtcaaaatgtcaccgttggctctttctcctaagaccgttgacattgtcaacatctttcagaatgacgtggagttctccctcgtaaatgagatccataagggcattagtcctcccgctggcgttaggaagtcaatgccaacgatgcttctttacgatgccaatggcctcaagctttttgagaaaatcacctatgtgaaggagtattatctaacaaatgcggaaatcgaggtcttggagacaaattccaggaggatagttgaacggattccagacaatgcgcaactgcttgaattaggtagcgggaatcttcggaaaattgagattctgctacgggagtttgagcgcgtgggaaagcgcgtggattattatgcccttgacctgtctctatcagaactgcagcgcacattcgcagaggtgtccattgatgattacacacacgttggc

SEQ ID NO: 2392 - DNA, 507 bp, Aspergillus oryzae
cggacgcgtgggtcccgaccgatagtgcctcctgtggcggctgtacatacttgtttccccgtttttgtatagatacagtacagattcaatccgatactctttcgtcctaccactcctcaatgcagaggcaattccagcccttttaccattaatttccgatggcgcgtccagacaggcgcgtcagtttagcggtagctaggatcatacctctggtgctactctgtactgtcatttatgcctcctacgctattacaaaacctctatgcatcgactacctaattacccctctaccgaagtataatcgcagttctagagttggcgctggaatcgccataattgttgtatattacgttttactcacaccgatggttattacatatcttcggctactgtacaatgtcatttgcaatcccggcttcataccgcgaggctcttcatatcttcctgatcaacaggatgccgaagcaccgaacgctcatcgtcgaaaccgtaaacgaaggaggaaaa

SEQ ID NO: 2393 - DNA, 620 bp, Aspergillus oryzae
cattgagcagcagtcccctgatatcgcccagggtcttcactatgatgaggccctcgagaagctcggtgctggtgaccagggtatcatgttcggttatgctaccgacgagacccctgagctcctccctttgactgtcatcctttcccacaagctcaacaaggccatgactgatgctcgtaaaaatggcaccatcccctggctccgccctgacaccaagacccaggtcaccattgagtacgcccacgacaacggtgctgtcaagcccctgcgtgtcgacaccgttgtcatctctgcccagcacagcgatgatctctccactgaggagatccgtgtcgctctcaaggagaagatcatcaagcaggtcattcctgctgagctcctcgacgaccgtactgtttaccacctccagccctccggccgcttcgtcatcggtggtccccagggtgacgccggtctgaccggccgtaagatcattgtcgacacctacggtggctggggtgctcacggtggtggtgctttttccggcaaggattactccaaggtcgatcgttccgccgcctacgttgcccgctgggtcgctaagtccctggtcaacgctggtcttgctcgtcgtgcccttg

SEQ ID NO: 2394 - DNA, 86 bp, Aspergillus oryzae
cgattcatcatcaataaataacccattaaagcatcatatatgcagtgagatcgttacgttccttatacaaacgcatggatggtttg

SEQ ID NO: 2395 - DNA, 576 bp, Aspergillus oryzae
gtagatcagttctcagtccctaaccccacccacggtgcactatttgtccccagcccataatcattctttaccaataaatccggcctgcctagacatcctatctaaagcgagcacgttcggctatctcccgggactcaatccatacaaagtaaccctaaccttctgaagaagctctgtcgatctaccacttcaatagttatactcgcatccctatatcacggatcgatggaatatctcctttatgaaccatagtagctataccagaccatatacaacgcgtggacacagttgaagcctctttgcacggacatcaacggtacttgcttggtatctcacgcagaagatggatcacatagctacggcaccgagtctcaacaagacatcacacgcaagacaggctgcatgcctcaactgcagaaaaagcaaggtccgatgcagccgcactccaggggatgccagctgtgataggtgcaggcaggccgctgccgaatgtgtcattcccagccaccatgtcggcaggcagaaaggagtcaaaaacaaacgcaaaggcctcgagaaggcgttgcatcagataga

SEQ ID NO: 2396 - DNA, 605 bp, Aspergillus oryzae
cggacaagatccctatcacaatcataaccaggctcatggcttagcattttctgttcgacctccgactccagctcctccctccctagtcaatatctacacaggtatcaaaaatgactacccgtcctttcaacgaccacctaacaaaggagggcttctgacaccatgggctgagcgtggagtattgcttcttaatacctgtctaacagtccgtgcacaccaagctgctagtcactcaaacaaaggatgggaacggtttacacagaaagcaattgacattgtagctagagtgcgatctcacggagttgtctttcttgcatggggtacacccgctgggaagcgtgtggcaggtattaaccgacagaagcattacgtacttcaatcggttcatcctagcccactcagtgcatccaggggctttttcaccaatggacattttaaaaaatgtaacgagtggctggctgaacgttacggtccagatgaggccattgattggagcctgacttcgaaaacaaagactaccacccctctcgctactattcaaagcccctccgcctccgttgacaaactagcagactctgttgcaaagcgatctgaatctcgagccc

SEQ ID NO: 2397 - DNA, 275 bp, Aspergillus oryzae
ccgagactgacgaccacactctttcttgttttcctttccttctttttttttttgtttcttaacgggtctcctttgttcgttgtgcgatagcttagacataccccccatatttccttgaaacatgtgttggctcaccgttgtacattggtggctatgttattatgcatttctggtgagatactgccgtttatcatttatttcctaatttttgtattaattgtcaggcgagcggcctacgtgatacctatgtactactgcaactagtgactttggac

SEQ ID NO: 2398 - DNA, 541 bp, Aspergillus oryzae
tgcagagaaggctaccagctgtggcctgactgtcaggggatatgtatcgtgtatattttccgacccttttgacggcccgactgcgccatccgcagtgcttcgctgcgtgagggagctgctcgagatgggatgctatgaggttagccttggggatacactaggtgtcggctgccccgataaagtaagaagtcttttgacgtatctggaggaacatgacgtctctctcgagctgctggcgggccatttccacgatacatacggtcaagctgtagccaacacctgggaagcatataactgtggtcttcgtgtgtttgatagtagtatcagcggcttgggaggttgcccttatgcaccgggcgccaagggaaatgttgccacggaagacctagtatacatgtttcacaatgcgggtattgacaccggccttgatatgctcaagctggtcgaaactggcctgtggatatccacaagattgtcaagagagaatgcaagccgggctggaatagcgctcgcgaatacccacggactggtgtgtccaccg

SEQ ID NO: 2399 - DNA, 573 bp, Aspergillus oryzae
  modified_base (486)..(486): n is a, c, g, or t
tcgacccacgcgtccgcaacaacaacaacaacaatcaccctcccacttcacaggttctctttctgatacccatccttctgtctctcatctactaccactactttcatatactctcttctatcctacttcatcaccatcacaaccttcttccccattcttgtttcaacccaacatcaatatatcaccgttgtcaaccatccatcatgggtaaaaaggctatccagtttggcggtggaaacattggccgtggctttgtggctgagtttctccacgctgccggctatgaagtcgtcttcattgatgtcatggatagcgtcatcaactctttgcaacagaccccgtcgtacgacgtcacggaggtcagcgaagagggtgaaagcaccaagaccatcaccaactatcgcgccatcaactccaagacgcatgaggccgacgtcgttcaggagatcgcatcggcagatgtggttacctgtgctgtcggtcccnacatccttaagttcatcgcgccagtcattgccaaaggtattgatgcgcgcaccgaagagagacccgtggctgtgatcgcctgtgaga

SEQ ID NO: 2400 - DNA, 418 bp, Aspergillus oryzae
  modified_base (91)..(91): n is a, c, g, or t
  modified_base (122)..(122): n is a, c, g, or t
cggacgcgtgggcaatcatcccacacatcccatcgctatcattatccgaatcatcgccaaaatggacctcatatcttgttgaatgaatgtngggggtgttgactttgttgaaactcgatttntccacgatttatcgcctacctcttatccctatttaccatactcagttcctttccatcacaccactatgacagccaccctcgaacggagtctgtctcgcacttcgagcatgtctatgcccatctcgagccctagattatctcttatacatgaaaccacaccacctagcttatccgaccctgccctatctcacattcacgaccgtttaaccatactcgataccagtgtatttcaattacgctcgactgtcctgaccaaagacggctatgtcgagcgacggaaccgggaagatgatcac

SEQ ID NO: 2401 - DNA, 522 bp, Aspergillus oryzae
gccggatcagagtcagattgtggcgaaattcgggcaacaagatactggcaaatcactctacagttttgtaaggaattgcttggcgggtcctttcgtcggagaaaagtttaccatcacaactttccccggtggtggccagagtggaaagaaactacataacgtgatcccggattccgatcagactttactgatcaaagacctcggtatggtaggccgaacccttgtcaatttctcctgggacgcaaccgcttcccaagctgctcggcaaagccagagagacctactgagaccggagctacgaacacaggcgaaggaacttaaggttgaacaaccagccaatgtaatggacacctctgaggagacggtgcagccgaagtcgggatctgatcgtcaaggagagaagtcaagcgggcgcaaaccaggaagcctgcccaagtggttgaaactacccgggaagaaatagataagattaatatgttggtaccttaggtgttaccttcaagttacgtcttctaacttacg

SEQ ID NO: 2402 - DNA, 599 bp, Aspergillus oryzae
ctggcaacctcgctaccgtgcgcttacaccgaaatcgcgtcttatccccttgactgtgcccttcatctcctatctccgcgcagacggtattgtcttgccacccgaaaatgcgacccccacagacgacgacaacctagacacgtattccgatgacgaggccgacgaacagccagacccatcgaccgaatgggaagaaattcacacccagatcaagacaacaatctccgagcttggaggtatcataaccccgaagttgaattggagtgcccccaaagatgcaacctggatggctgcgacaaacgatatgcaatgccgcacaccaaacgacatctacctcctcttgaagagcagtgactttatcagccatgacctggagcttcccttcgatgattgtgtcccggatatgccggattcgacgaccacccccgacgttccataccatctcgtgcttcgcaaatacgtcaacttcaacccctcccttgagtttcggtgctttgtgcgcgatcgcgtgcttctctgtatttgtcagcgggaccaaaaccactttgatttcctctttcctttgcgcgcgacccttaagatcttcggattcaagcttt

SEQ ID NO: 2403 - DNA, 538 bp, Aspergillus oryzae
gacccacgcgtccgatccatagacaggaggttggagaaaaggcaaggtcatcaccttgttcgatgtcaaagtacagctagagtatgaaggtaagaccaaggacgaggagtctgttagcggtactatcaccatccccgaggttgcccacgacacagaggaagacgagtatgtttttgagattgacatctactctgaatcctcttccaagcagccggtgaaggacctcgtgcggtcgaagcttctgccccaactcagacaggagttggtcaaacttgcgcctgccctgatcactgagcatggcaaggatattcagcatgcccccggtgagaacccgtccaagggttttaccgccccaacctatcaccctcaaactaagaaggacacacctgcccccaaaacgatcaccacttctaccagcggcaaggttgcttgtcaacactactaccgtgattgcctcggatgagttccgtaccaccgctgaggaattgtataatacctttacagaccctcagcgcattgccgctttcacccgcggagc

SEQ ID NO: 2404 - DNA, 456 bp, Aspergillus oryzae
tggggttagttctctggccgggcaaagagaatgatggggctgtgtttttcccttacttcatctcctgactctttgacctgaccactgggctagccgttagacccaatatgcaaggaacgctgtctctgccatgctttcgcaaagtgggatgataaaaatcaagcatgatcatgttcgccggatgccgccgcatgcaatgatgagctacaccatcagcaatctcagctccacgtcaaatctcaagaacaaaccgactaccaaccttcgtcaaatataagcagacccaactgggatatccggacaaagccatgagtcaaggcctcgaacaaaaccgcatgagtcgacactaccacttgcttgtctttcaagagctcatcccaaatatactggctcttccagcgctcaaccttgtccagccctgtgattgtacaggctctcacagcgggaagatgactc

SEQ ID NO: 2405 - DNA, 470 bp, Aspergillus oryzae
ccataacccgaacatgtcatcaatcaagaaaattctcgttctcggggctggagaactaggcacgcaagtactactatccctcgcccagcattctcgcttgaataccattgttgtttccgtcctcttacgacctcccagcatcgcgtccacgcaaccacaaaaggtacgggagctctcgctactgcgcgaacacaacatccagcttgttccaggtgacctcgtcgcggactcccaggaatcactggcccaaaccttccgcggatacgacacaatcatcggctgtgcaggttttgttgccggtcgtggaacacaaagcaaagtaacgcaggctgtactcgccgctgaagtccctcgctatatcccttggcagtttggtgtggattatgacattattggacgaggatccgcgcaggatctcttcgatgagcagcttgatggtcgcgacctccttcgctctcagacaaagaccc

SEQ ID NO: 2406 - DNA, 41 bp, Aspergillus oryzae
ttaatgttgctattaccataatatgatcaacattaatatct

SEQ ID NO: 2407 - DNA, 499 bp, Aspergillus oryzae
tcgacccacgcgtccgccggtgttgagcgatactgatgcggtctcaagtgctttcaacccgacggacccgggtatctctgccctcatggcgttgcctcagtacccgagtgtcgcgaccaatgaagccaactttctggctgtctcagaggtcgtaaatgcggtgatcgatcgcgattcctattttcgccgtgtagggggaggggatgagggaaccatccatcgtcactcatcgccacccaccgacttgtacatgtcagattcagagatgacggatgtattgtccgacctgggcggggtacccctcgcgccgtatgagaacgggcaactcggcatggagacgctggttcaccacttgatcgatcacgcaacagccaggcgcgccatttccacgatttcggaagatagtgaagacgaagacgaagatgccgcagccctgatcacacactacgacacccccgtgaatcaagatccgtctaccccgatctctgagcaagacgat

SEQ ID NO: 2408 - DNA, 421 bp, Aspergillus oryzae
gtcatgtccgtgacatctataccttggacacacggcattctggtctacgtcgaaatacgatacagatgtgacatcgcactatttgagcctgcaatagcgaggatatccatatattatatctgagtgcgccatcttgcattttaagaaaggtattatggacgtactcgaccagctagataatctgtggttggtgtgcttcaccgtgttcggactgactgggctatgtttcgctttaagtggattgaagaacaaaccagtctgccttcgttcgaaactccatagccctcgaagtggaaccgcatcacagtcgatttcaccggagaagaaaccagcgcagtatgcggatacattgccacctcagggccgtcaggcacttgctgcattgccggaattcgcgacaggaatacatgaagtcgacgaa

SEQ ID NO: 2409 - DNA, 446 bp, Aspergillus oryzae
cggacgcgtgggcggacgcgtgggcgctggcttcttaaaggccttgagggattttggtctttggattcgtcaccagggcaaggaaaggattcgtctagggaataatggccctcggaaagattgcttccactatttactcagtggatcagatcccaacaccggtcaaggattaacggagagggaattaagagttgaattgttgctcttaatcgttgcggggtcagataccgtcgccaccagcctgagtgcggttctctttaacctcgcgcataaccagcaagccctgcaaaaggccacagcggagattcgctcatgcttcgaacgggaggaagatattcgcttgggcactcggttgaaatcgtgtagctatctacatgcatgcatatcagagtccttgcgcatttcacccgcagtctcaaacatgcctcctcgccgtgtattacctg

SEQ ID NO: 2410 - DNA, 450 bp, Aspergillus oryzae
ccttaaacaatcaaagcgctatcttatttgaatagtattatacctttgaacctttcggttacattcacagaaaatcttcacacaagatacaatggccgactccgacaagcttcgtatggcagctcgcgctgagcaagaccttaactcctatcagatgaagcaaggtcttggaccaaagagcgactctgtcctcgagtccaacatcgacgaaagggcggacaagaaattccgtgaagcaacgggaatcaaaactggccgagaggcaggcgcaacagggagcaaccggaaacccatccctgaagacgagggaggcactcgggactctcgtggaagattggcaccagctagcgaatatgaaggcaccggaggccctgaggataaggtaaagctcgagtcagaacgccgtccgggtgatcaagacacacttaacatccaggatctgaagactaa

SEQ ID NO: 2411 - DNA, 467 bp, Aspergillus oryzae
  modified_base (253)..(253): n is a, c, g, or t
attcaaaaaagccatgtccccatcaaacgatgcgaccagcgcgggctcggatcctagaccggtgttcttctttgacatagataactgtgtatgcggtcatacaattcttcaacttttctaccttctaaactaacgtgcgatgcgtacagctttactctagaagtacggaagtccccccattggcggggaaggtgatactgaatgctgacgatcgcatatagaatgtaacatccacgatgaaatgcagaagctnattcatcaatttttcgtgaaacacctctccctcaacggcgaagacgctcatatgctgcacaagaaatactacacagagtacgggctcgcaattgaaggtctcactcgccaccacaaaatcgatccgcttcaattcaacagcgaagtcgacgatgcgctgccgttggacaggatcctgaaacccgatccccagctgcgcaagctgctcgaagaca

SEQ ID NO: 2412 - DNA, 570 bp, Aspergillus oryzae
  modified_base (81)..(81): n is a, c, g, or t
  modified_base (160)..(160): n is a, c, g, or t
  modified_base (339)..(339): n is a, c, g, or t
acccacgcgtccgaacttaacctcattttgaacagcaatacagttgctacatatttgtaaagatggccaatacagccttantcggatgtaccggaatggtggggagtttcatcctcaacaaccttctcgcacatccctctgttgctcgtgtggatacaanctcccgtcgcactccacaagccgcatctgccgcccagaccaaactgaccacaatcgtatccgacgatacgtcgcgctgggccagtgagctctcctcgctcactcccacgccatctatcttcttttccgcatttgccactactcgtgcaagtgcaggaggttttgagaaccagtacaaantagaacatggtctgaacgttgagatggcacgtgcagcgcgcgatgctggtaccaaggtttacgttctgatctcatccgccggagctgataagaatgcatacttcgcatatccccgtatgaaggctgaaattgaagaagacgtgaaggcgctagggtttgagaggaccgtgattctgcgtccgggtctcattgctgggcagagagaagaggaagcccggcccaatggaaagc

SEQ ID NO: 2413 - DNA, 463 bp, Aspergillus oryzae
cgagaagccacatcttatagtcaacgcaatggcttcctacagctcactcatgcccactgcggcaaggagtctcttatcgtcatgccgctctccgcttcgccaggggtcaatggcccctctcctctccagctttcagcaggttcgaggagccaagaacaaccctcaagcacaaggtaaaaagaacaaggaaaagagtaagaagacgaagaagggtcctcgggagttcaaacaaagggatctgaaggatatggatcaattcgcgctttgcgatgctatgaggtatcttcgtgcattcgaagtcggccgtgaaccagctacctccaaatacgaagtccacatccggttgaagacgatgaaagacggtccagtgattcgcaacatgctccggtttcctcattcagtccaaacagaatcacgcatttgtgtcgtctgccctgctggatctaggcatgagaaggaggct

SEQ ID NO: 2414 - DNA, 551 bp, Aspergillus oryzae
  modified_base (142)..(143): n is a, c, g, or t
cgacccacgcgtccgcccacgcgtccgtgttcctcctacctaccaaacacaacccaccaaaaccgacccttcaatatgcctttcattcctatccctgagcccgggttttacgagcacgtcatcaacagacccccgcccaccnncgtccatttctgggactcagcagcaggtccacctacccaagaattccaaatcttggagtcgggaaaccaccctgctagcgatcgtgagacattcggggttgatgtttcccaattccctgttccaaacgccccgagcgacgtgcctgtgacgatcctcttcagtggaggccaacagttggacactgccaacggtggagatattggcaaattcttccatcttcttgagcaagctgagtgagggctttgaaatcataaagcggcggccttaccatgaatgatgcatataacatgttagggcaccgggccgtatggacccggagagggttaaaaaggacctcacatgttgtatctagcttctttccccagggatcagtcttgtagccaatccagttgtcatctttgatccaa

SEQ ID NO: 2415 - DNA, 519 bp, Aspergillus oryzae
ctggcaaacaagtctcacattggaccattggccgcaaaattatctcagctagcccgtcctattatgctaataaaggtaaagaagatcttgcattgctgattctgcgagatcacaaaactgggaaaagggagatcgttgtcgctcacctagatgagaagaacctccacgaaactgtcatcctcgaaacaagcgctcggcttgaccatataaagtgcatctctgatggccaagctgtcattgcatacagcggccagcgtgtactcattggataccaaagtccaggccaaaatgatccggaacttatgcaatatacctggaaagaggtagctttgcctgtcaacattagttgtgtcgatattcggtgttctacgacatcgtctcgggttgaaggacaaagtgtgaatagcaagaagggtccaaccagcattgacttggccttaggcagttcggatgggtctatcttgatatatcacgacattctaaaccttgttggtaaagaagagcaccgcagaggcgaga

SEQ ID NO: 2416 - DNA, 525 bp, Aspergillus oryzae
atctcccgtctatcactggtactgcacgggtgtactcgtcgccaacatgctggctacttggagaaggtttttccatccgtcggggaacgacgatgcttccaatccttcctcgctgtacaacgagaaatgcggcgagctcgaaatcaacgtcatagaatccagtccaccaaaagcgactggagcggtcaaaatcgaggccgtcgaagctgtgggcggccggaagggaagatatctgctctatatcggcttggtcctggttatggtcatcttgtgagtcttgtggtgatcttcaaagccctctatgtagctctaacatgcgtttagtgaactggacaactctaccgtagggacttatcgcaacttcgcgacgtccgacttcaaacatctttccgtgctggccacgctcaacactgcggctagcattatcacggcagtaagtaaaccgcccatagccaaagtctcgaacgtcttggggcgagccgaggcatacatctttaccatcacatgctacattctgtcctacat

SEQ ID NO: 2417 - DNA, 585 bp, Aspergillus oryzae
acctaccccttttttttttttctttgccctcctgtagtggtacctcgatatgaacccattttttccccatatcacggacctttacacaaaataaccgaagaattaggaatatggaaggacccttacgcccattcaccgatccggccagtaaggcctcggacagggcattcccgctggatgataaagacatcacttgcgtctccgatgagtctcttatcgacctcttaaagtcttctccgatcctttacgatttcggccaaacgacggtggtgcgattgtctaagaatctcgttttaaaaggcggcggcaatgtgctgccttgcgaggcaaagattcttcaactagtcgcatcaaagtctaatattcgagctcctcgtgtccatcggtctctccacttcatggacgatacgaaatattttggcaacatgggatatattgtgatggattatatcgacggcgagccgcttgatggctgctggagagaactcagtgatgaacaaaagatggatgtcgcgaagcagacggcccagatgatcattgaaatgcagtccatcaagctgttggagccaggtccgatcggcgggg

SEQ ID NO: 2418 - DNA, 514 bp, Aspergillus oryzae
cgcttggactctcttctctccgcgaatccgtttagtggtgattcggttgaatcgcgggtatcttccgctcgtccagagagcttgcctccgcttccccgtcagagctcctccacggccggttcgctgtaacaagaagcctaaaaagaaagccgccacttgacccgagcccgtttaatgatccccattcccgaaaattatctattattatttctaaatccttttaaccccagagtgtgtggcccccctttctctatccaccaatttaaataccctgtgtcagttgtgccgagggacgtagtggctatacttccgtaactccccgtattttaaaggtcaacctgtgaaggtccgatatcgtcgatattcttttctttaagaaaaaaaagtcatccctggcgctcgattgacgattgagtcattcttcctctcgacctcctttatcttcagtccttcttccttctgcgtgctgttgttctccccataccgtcgcattgacctagacaactataccccc

SEQ ID NO: 2419 - DNA, 574 bp, Aspergillus oryzae
aagaaccggctaggacgatataccgggaaggcgtcaactaactgcatggctttcctttgactattatacagcatattatgttcaacatgtctctctatcaaaacatcgctctcaatggctcttttgccttgcatggcttgcgccatccattggatatgtactcaagtcttggtcctacgctgagcgaagctaccttcggcctgttggggtactccttcgagccgagcagagatattggagatctctctggaaaggttctttttgtgacaggagggaatgccggtcttggaaaagaaaccgtccttcagcttgcgcaacataacccatctcgcatatacctagccgctcgagacgctactaaagctcgcgaggccatcagctcgattcaagacatcatttcagcctccgtcgacattagacatattcaacttgacctatcttctttccagtccacacgcgatgctgcagagaagttttgctcggagtgtgatcgcttggatatcttgatcctcaacgccggcaccatggcgaatccgccagagcttacaaaggaaggcttcgaaatccaattcgg

SEQ ID NO: 2420 - DNA, 518 bp, Aspergillus oryzae
gtagactcgtcggttcttccatctttaatattcgcctcttctcccttcgtttctttccttccttcacgaccggttttctggtctgcaagctggtctttgcagccccttcccaaccgacgacgagggagtcgagtcgtctgcagttcacaatctctcgctctctatttgacttgctttggtctggaaacccggtccagccagactagagcctacatacattccgcactctctatctcagtctgacttcagtgttcgaccctgcgtcattgccacaaccacgatcttcgccacttggctcttcattctcggaaagcatgtatcgaaattatagtctaatatggttgttggataccgctagacgttgatactcgtggatatggacttcattctctccttgacgcatttctgcgaggtgcatggtcccacctcgatcatctgctcgcaggtcttgccgttctcctgctcgcaatgctacccagacagatccgatttttctcccgacgacacccctgcaactt

SEQ ID NO: 2421 - DNA, 589 bp, Aspergillus oryzae
ggctgaccgactggatcctgcggaccgttgaacataaaaacatcctgggttccagtgccatacatatgaaaccagttgtttcgccctgcatcactcttgctcagtaccacccacctcgtgacgtatcttgccatccactcacctacaaccgttacctgcagcggctgggtgctgctggcaaacatcttccccggggtggacggttggtgtattgtttcgggcggctcgtattcgctctcactctcctcttgcatctgcgcatttgtgccgttgactgcgccactagcctgggcctcagttgttatgctcgagaaatttctctcccgaacagaaccgagcccacaagcaggccagacaccattgatcaaggcatctaaatcgcgttccaaagaagccaaatcgacatttccagctgcagcccgcggagcagcacgccacatagcgtctcccccatcaccaccctccgagacaacatccatcctatcagtcaaacccttccgatagcccctaaagagacactccatctcatcagcagcacgactgatccgaaagagtatctcccctagaatctcaccttcttcgaccaagt

SEQ ID NO: 2422 - DNA, 539 bp, Aspergillus oryzae
tcgacccacgcgtccgctggttggtatattgcggccgtgacattgggatgtggtggtggtgtcgccctgctatcggcaatctttttcgttccgtttgtgcatgcacgtgtgatcaagaaagaccaggacgtgaagtggtggatgttcatcatgggccccctccttctcaaccgcgcgtctccgaacgtgggagaacaagcaaaggttcccgactacgccgtcgtccaggacgaccacgatgacatggcatctgttccctccactgctggctccacgactggagagcctggtaaggaccaaacccaaacgaaggaaaaggccctggtcatggccgaaacccaggccacttaccaggagctcgtcgcccagggagaggcacggttccatgcaagactcatgaagaagcgtggccccctcggttgggcgatgcgtaccttgcgggataacccgatgggcgctggtgagatctatgaatggaggaacatgttgcgactggccaaacgtgtcccggctatgatcactggttgggcttctctatg

SEQ ID NO: 2423 - DNA, 512 bp, Aspergillus oryzae
tccccccatcccgcgttctcttttgcaaaaaaaaaagaaaataaaagcaaaatcacatagtcgtgcatcatggcgtcgctattaggtgctgactacgagtctagcgacgatgagaccgcgcgcccccagtctcaaactaccgtgccaacagcgactaagattgtcgcagcgcctgaagtaaatacagaggaccaagcacatatgcagatgatgcttgctaatacatcctcccaagctctgacctacaatgcaacatatgacgatctctcccgtcccaaccagggtccagcgaatccgtttaagcctgatggccccgcgaatggactcaaacgcaagaacgtgcctacggggtacgcagaagaagcagcaattagcgcagccaccttcgccacgcaacaccgcacattccagagcttaggatacacacgcaaccccggactaccgggccagtttgtgggagacctggaccgggcggcacagtatggaggccgggatatcgtacagatgaagcc

SEQ ID NO: 2424 - DNA, 460 bp, Aspergillus oryzae
ctggtcgtggcgtccgatgagtgagagataactaaaagttccttaacaccatcctttctttctttttttcttttttcctttcctttccttatattgattggattccgagcaaaaaaaggcgatgaatacccttacatgcgttggacttttatttctttttctgtccttcattggtgctagattccgaaactatcttccctggcttcagcccaaacaccacccacaagatgttagttgcgaggaccttaagcctcctcccatcaaagggagggagagatatagagtcatgatggatattcggaagctggatgcccagaactggcttaccatcgacaagaactacatggcggagcatcaggtccggagtcaattgctgcaacaggaaaagcaaaaggtcctccaatgcctcccagagtcatacgaagcatgccttgaagcgttggaggaggtggttgatttt

SEQ ID NO: 2425 - DNA, 386 bp, Aspergillus oryzae
gaagtcgacaaccataaggagcttgtggcgatgttcaaggacaagtcaaataaggacaaagaggcattggaaatgaagaaccgtgatcatgctagactgagctttatttctgtcctcgttgatggtgactgtatgaactttcaggatagcctcatccaaagtggatacgacggcggtcaaaaagctgtacagcttttgaggaaagcagtcgaggactacctctttcagcttgacccggaggcaaaccctaggattcagtgtaagatccgtgtatatgccaacgtgagcggtctgtcaaagacgtatcgagatacgaacattgcccctgtcgacgggacactagaggcgtttattcagggattcaacatggaaaacggactatgtga

SEQ ID NO: 2426 - DNA, 445 bp, Aspergillus oryzae
tttatgaccacgagatcacagcgtccgaacgctcttcactttctaacgccagttcccaacatccggacctggtttctttctagtttctaagatcttgcttgaatatttcagcttgccaatatgcagtctcgaaggtccgccatacgaaaaagcagtgggtcatgccgacgaaaatcgtcattctgctgtgagccatgtcgggaacgcaagtctcgttgcgacggaaggaaacccatctgcagcccttgcactcaacggtcgcatgcggctgaccggtgcgtttataggcgcaacattgtcaggctattggacaccgatgaataccttcaagtcctttatcgtcatattcgcgaattggaagaaatgtgccacgaagctgggattccagtccctacgtttaacccagatgtttcatccatagactcagatggagagacagctcata

SEQ ID NO: 2427 - DNA, 587 bp, Aspergillus oryzae
gacccacgcgtccggcctagaacccggcccttactagggaaataaggaaacaatcggatcctcactcttcagtacatctcacatcctacatgacgacgtattgtcgatcataagtaaaccaaaaatggcttcggaaacgtcgctagtggccaagctagatacattggtcgctgacgtcctggctgactggaacatatacacgactctcatcgcggggactattatcacctttctcatctattcgtttgctacgtccaaggagccagacattcacccattcttgctggcccgtcagtcaacagccttccccgtccgtcagcctggcgaatctgccgcctaccgcagccttgagacccccacggatttccccttcggtccggactgaacgtcaaagaccccggagcaccgaaatggaccgctggacgaaaaggtgacttgcgcgatgtctggaaaactgctgttcgtggagctgcagaggacggcaagttatctggtaaacagggaaagatctatactgtgctgggaagaagggcgatagagcagtcgttggaacaagtaacgcaagagatcaatgtcattggatctct

SEQ ID NO: 2428 - DNA, 454 bp, Aspergillus oryzae
  modified_base (138)..(138): n is a, c, g, or t
acccacgcgtccgcccacgcgtccgctccctgacagccctgcgccacagtccgaaaactcagccatgccgagaacgaatttccactcgacgttcgactgcattatctcttggttgcgcagagtcaaaaatttcgatantggatcggaattagcagatatcatccgtcgcggcgaattggtctctttgagtgacgaacaagccgtgcaccttttgtacctccagttccagaacgaattcgaacggctgaagcgcgtcgattatacacttgaacagggcgacggggatcctctgaagggaagtttagatgggaaaggccttacgccgtcgcagtttcttttcggtgaggattacgccgagataaaccgaacggtggataactttctgtctctaaaatggcttctcgaggataaccatcaagcgtttacagcgcatcaacccagtgcccgtgccagg

SEQ ID NO: 2429 - DNA, 447 bp, Aspergillus oryzae
aagaaaagtcgtctctttttctgttcacttttccgatcaacggccataggagcgatcttgaacaagagttgcgccaactcttgctaggtcctttcgcctccatggtcttatagagacgaagtccatgccgcacgttcccatcagtttgtgagatatcccacaaaccgatcgtttcaacctatctgaaacacgctggaatcgcatccctcggtggtcctcatgccccgctcacggcaacccgctcggttctcgagcgaagctccttccgagtcgtcatcctcgacatccccggaccggaacgttgatgatgacaccgacttcttcacagcccaggcaaatgattcgcaatcatctgttggtggcattgcgacctcccgtgacgtacacgcacaaaatgagcattatgtgcttccgccgatcggacgtcttcccccggaactcctgatc

SEQ ID NO: 2430 - DNA, 416 bp, Aspergillus oryzae
  modified_base (326)..(327): n is a, c, g, or t
cggacgcgtgggcgagcccgagcctccatctaatatgggcaaccaaaacagtaccgctgatgacagtcatgggccgactgactctgagatcttctaccccgaattctacgatgtgcttaaggttcggtatctgctgcgatggaagataatccctgaagggctacccgttgagattgtggatctgatcgtggatgcggccgaatattggccctccatcgaggctacattggaccaaaagagaattattcaccaggacagagatcaggtgttggtcaggacagcaccactgtgctatgatgaaaagacattgggaagtgactcgcctnnagtgctccctcaccggactgttcatccttgtcggaagattgtcttctccatcgcctcgcatgaccagggctttgctaacagtgggcgtg

SEQ ID NO: 2431 - DNA, 361 bp, Aspergillus oryzae
  modified_base (246)..(246): n is a, c, g, or t
ttgcggaacacggacctggcgtttgtttatctacgttttaatccttttcagtcggtgtgcaactggctgctggtaaactgtttgctcattcttgtgaactacccctttcccccgtcaccgtgcacggggctggttttgattctctgcagcaatattggctcattctatgtatggacagcttcaactgttttgtgtatatccctcagcctagggtgccatgtttgatgtcttacgagatttgatcgnttggttgatagatatgacctggatagctctctgatagtcatccgcaggctgtacttcacacctacggttgccatctggtaactcggaactgacctaatggattggtcttgtatag

SEQ ID NO: 2432 - DNA, 478 bp, Aspergillus oryzae
cggacgcgtggggatctgacaactacccagctaccatccactgaagccttcgatgagtctgcctttgaagctgcatttgaacaagccaaggcggatttggcctcacaaacggctgatcacgcgcaagaacttaccaatgagaccactaatccggatgcaactgttacttctcaagttgaagccatcaggattggttcagacaccatacctcagaccgaaaaggatgacgctcgagcacattacaatgacccagacgagcttgcccgaacggcgggacagctactggaaagtgtcagccacgatcagagccagaaatttcgggaaagcaacttccttgctttgatgcgccgtatccgagaccgcgaggttcatatcgaaggagatgagttccgtgaagtcagtaccagtccgtgatctctagagtttcggctggcgtggcacgagcgctggtatattttagtctatatatgccggcctt

SEQ ID NO: 2433 - DNA, 468 bp, Aspergillus oryzae
ttcctctccacagcattagatgtgctattctaacctctgagcatgttgtatttacattccttaatgttgtttctttctttttcgacctaatcttgagctccaaagagctcattagcattccttcgtccactgtccttccagttttctaatcaagaccacttttgaggttattcaatccttcttcacactatgcttttcgttcgaaaaagctattttcttccaacatttatcttagtcttcctcacgtatatccttttctctaatctaccgccaggcgcggagataccgtacattgacgaccccgcagaatatggacctcctcctccaaggcctcctccaaaaggcaacgacctaatccattatagaaaccccaccgagaaacacccggtggaagaatatatcccccttccaacagctgccccatctcccatcccccgtgtccagtatgaattcccggtggaatcatgg

SEQ ID NO: 2434 - DNA, 492 bp, Aspergillus oryzae
ttcaactgttcttttactggtggaacacgagtaagctgtgatcagcaaacatctaccatgaggttcagccctggtttgctttgcctaataggcgggctcctccctgccattgtctctggggcgacagcgcctacacccttcttcccggaattggacgacttctatactccgaagcacggattctgggaagaactggaccccggatccattatagattatcgccaagtatatgtcaattcgctctcgtacggcatcccatccaatgcaacggcataccaagtactgtacgttacaacagacttgaacaagcagaaaactcactcagtcacaacgataatcgttccgcacaatgcaaagaaaggttggcttctctcagtgcaacccgcctatgactccccggatatcaactgctcgccatcatatggactgcaggttggagcagtcggccctgccttatcctggaacatgatggatctatcgttcgtactaccc

SEQ ID NO: 2435 - DNA, 217 bp, Aspergillus oryzae
cgtctaacatatctagtttcggtaacactatggaaatcgaataaaagatccattcggccgacgaggacgattatatgaaggtcacccgcttcagccgataaagtggcacccacattcacaaatggtaccagcacttggaaggcattgcaatacctagcgcgcgaataggcacttctttcccctcctgttgtcataagctacacatcagaagcgagaa

SEQ ID NO: 2436 - DNA, 552 bp, Aspergillus oryzae
gacccacgcgtccgcttcgacgcacgtcacatagttatcacctagatctcaacatgttttgtctacgaagctggttacctctcctattcatcccgaccaatgcctccccacttttcattgtctccttcgtcactctgacctacatcctccatcgtccatgtatctactgctcagctcttcttttaatcctctttatctcatcctgccattggtcagatcgctgtttctttgaccttcgtggtgactggtttgcgcctcgctactcttccgatccgagcgcctcttcggtcgcccccaatgagaccgtcgccggctttatcctggagactgtgaatactactacgaagaacctggcgggcgtagtagtcgacgaggcgcaacgtcgtctggcactaaatgggtcgtcagccgccgcaggactgggcgggttggttcaggaggaatggaccggggttggcctggagtggttgcgcagtttgcttggacgacgggagtggacgatcccctgtgtcgacgtcaaggtccgtctatagagatggttggctttggagc

SEQ ID NO: 2437 - DNA, 400 bp, Aspergillus oryzae
tgttgggcaacaggctcgggggcagcggagctgccatctccccgaacactgcaaagcctagtgccctgcctactatgtcgggcgcctctcgtcctacggaagagtcccctgcttctccagccaccaacggtgtcacagccacggccaccgaacaagctacacagccgtcgtccactgtttcaacgcagtcgaaccagaccactcctgccgctagcagtagccctctgtcacagttcagccgatccgcttccattcctgcctggcagatggccgctgccaaccgctcgaagaatgcatccccatctactcctacttcctctaccggggataactctaccaagcctgccgacgagcaaactgctccggccagctaagaccttcgccgcttctttcatgctct

SEQ ID NO: 2438 - DNA, 555 bp, Aspergillus oryzae
cttctccattatatctccgagaagcagacaccgtgtgaatgccttcaatcattgatccctttcaggagtccgaattcgacaggaagtttaatacgcaacggaaactccaccgcctgtacaatggcccttcaaggaacactaatatcgactaatggcttcatgaatggctttctactattgatgacgccacgatatatgagctgccaggcatccaagaccccaagctgctgtgttggaacttcctgatggccctgacgacacgctatgctaacttcgcggagccacacatcatagcgagccgaaacggaaccgaatacacagtcagaactcttgttgatgagtttcgacgctttcgtctagattaagcggtattatacgcggtaattcagactcccgcattctgacatgatgcatatttctcctaaatcgattacccacaagatcgtcatctctatttagacccccatgagtatggtaccatcgccaagtcggaggtcagttctgaatgagggttatacatccgcatccgataggaattcccccatacgcacccgg

SEQ ID NO: 2439 - DNA, 510 bp, Aspergillus oryzae
gttcaagctcccccaatagctcccaaggctcctcacccactccaaggtctgctgttccctcacatacagctctcctctcaattacttactccctctagcttacaactgaatcttccaaatcaaattcttccaactcgccaaaatgcagcccagcgccaacatgatccaccccgaaggccccgtggtcatctccatcccggagagtgcaaagatccacatcgtcggcaagacaaacgcagacttccgccaaagggtcaccgtcgaggagattggcaaagacaagtacatattcgaaggcagcggtgaaggcaagcccatgacccttgcgggaggaaacgagagcgtcgaccttgagcctatcaagggcactggattccgcacatggaaaatcgacttccagaactccagttccggcgcagaggactcctttagaatgtcgaaagtgctgcgtccagtctacaacaccgtttacgatgagaactacaaggttcgaaaaatggagtgggagat

SEQ ID NO: 2440 - DNA, 500 bp, Aspergillus oryzae
gtcaaagcgtgttgggttgtgaaccgataaatgaacaccgttcttctgtgttgaaatttactccatcaccacgcatcattagcaagctcccgggcagattttcacactgtttgtctgagcttagctctagattcattcaaaccctcaggccattaccccttgaaagcatttggcatttgattccaggatccacaatgtctcttatcaccgacgatatgttgctcgtgttatgggaagacgcccagagaaacccaacaaatgaatggagggccgttgccgtctggaccccagctatggaccaagcatattttctgggagaaggattgggtggtcatgtcagagtctcctccggaaggcagcggtcgtcgacgggtagatgtcacgatcaagtatctggccggaaccccatagagttgcgattctcgccttccacgaggcaaaggcggggaatgcaacacctcaggatgttgaagaggctttcaggaccaaaaagggctgta

SEQ ID NO: 2441 - DNA, 497 bp, Aspergillus oryzae
ggacggatgtacattttggagctgactccaaacggaattgtacccgtgaaatggtttaccacccaagactcactctacgatcttgcatggtccgagatccatgaaaatcaagttcttacagcctccggggatggtagcattaagctatttgattgcaacctgaacgacttccccgtccagaattggaaggaacacaaccgcgaagtcttcagtgtgcactggaatcttgtcgcgaaagaccgtttctgctccagcagctgggacggtactgtgcgcgtctggactcccgatcgaccacattcactcgtcactcttcctacacacagctgcacatactccgcatctttctcgccacattcacccgacatcctttcctgtgttacctccgactcttacgtccgtctgttcgaccttcgcaccccggcatccgcctccaaccacctcactctccagattccgatccatgcagccccggtatctccgattcctggtaaacc

SEQ ID NO: 2442 - DNA, 525 bp, Aspergillus oryzae
  modified_base (161)..(161): n is a, c, g, or t
  modified_base (275)..(275): n is a, c, g, or t
  modified_base (415)..(415): n is a, c, g, or t
cgacccacgcgtccgcaatcattgcattaccactgcgagattaaccacagcaggagcaaatcaaaatttatatattgtgctacggttttatggtcctgccgtcatgcttcttctcgactaccacaacgttcttatccatgccctcctgacggagcggttcnctggatccccgccagtctcaatcgaccagattgcctccgatttcgacggagttaccttccatctgtctacccccgaatctaagactaagatccttatttccatcaacgtgaaangcttccgagagctcgtccaatatggtgcccaacaggtgctggagagggaatacggcccgtacatcgtcgcccctgaacccggctatgacttctcggtcctcattgatttagagaacctccccgccgaacaggaagccaangatgacctcataatgcgacttgcgctgatgaagcggaatgcaatggctgccccatttgagagagctttcgacgaattcgccaagctatccgaagaggcttctaaatacag

SEQ ID NO: 2443 - DNA, 385 bp, Aspergillus oryzae
  modified_base (63)..(63): n is a, c, g, or t
cgacccacgcgtccgcgattcaagtcggacagcaacacacctttagaacttatcccttgcccntaaacatcctatcttcaccgaaataaggagacatggggggcaagtctgctaccaaggccgcttacttcgagaagctgaagagccttctcgatgagtacaagacggtcttcattgtcggggtcgacaatgtcagctctcagcagatgcacgagattcgtgtgagtctccgtggtgagggtgttgccctgatgggtaagaacaccatggttcgccgtgccatcaagggcttcgtcaccgacaaccctgagtccgagcgtctccttcctcacgtcaagggcaacgttggtttcatcttcaccaacggcgacctcagggccaccaa

SEQ ID NO: 2444 - DNA, 387 bp, Aspergillus oryzae
  modified_base (322)..(322): n is a, c, g, or t
cggacgcgtgggggcgtacagcccacaggtcatgtacgccagaagttgaagtctggtgagcggttgacactggagcagtatagggttgacccaactctccagacttcaacttctggcgtacagcccacaggtcatgtaccaaacccggcgaatccaagcccgggaatggctccaggcaacgcaactccaatacccccaatgcctccagcaagccctgcgcggtctaattctgtatcctcgattgctacgcaatctactgctgtgcagcaagccacgggatctgttgtcaataacccgacaccgacactcggatcggtgccgntagtcacagcaacgcattcatcacaaccaccaactctgccacttactacgccgccgcagacaccg

SEQ ID NO: 2445 - DNA, 485 bp, Aspergillus oryzae
caaaatggcctctcagaaacctacctaccgcatcgcatccattccgggagacgggataggcatcgaagtcgtcgacgctgccatccaggtagtagaaaagctcgccaagacccttggaacattcaatatcgatttcactcacataccatggggaactgcgtactacaaggaacacggtcgatatgtgtccgaagattgtttagacacgctgcgcaagttcgacgctgggctgtttggtgccgtgggtgccccagatgttccggaccacatctccctctggggtctcttattagcacttcgcgggccgctgcagctatatgctaacgtccgtcccgtgcgcacattcccgggcaccaaatgccctctcaacaccgcgacagagggtattgactggatgcttgtgcgcgaaaactccgaaggagagtactccggccagggcggacgcagtcacgtcggtcagccgtgggaagctgcgacagaggtgg

SEQ ID NO: 2446 - DNA, 468 bp, Aspergillus oryzae
gtttgtgctcggttcacagccaagcaggactcaaggctcacaacttcgcgaagctgtctccctatctaagagctcgaaccttcccagtatttcagcagaagcgactctcggcaggaattcaaaattctataacctgactgctgaagaccgggaaagactgggaggtatagagtatcgggctcttaagatgttattaaagaccgttctagggtactttttcggtctccacataattggtgcaatatgtctagtgggttggatacagtatgctggtcctaagtaccgggagtacctaaaggaatgtgggcagaatcatatatggtgggcgttctatgcggcgcaaacgatggcaaacaatctgggtttcaccctcaccccagactcaatggttagcttccaagacgcaacttttcccatgctgattatgacattcttggcatatgctgggaacaatctctaccccgtttt

SEQ ID NO: 2447 - DNA, 349 bp, Aspergillus oryzae
ccgccctttttttttttttttttcaagaaaaaccccgagtgcattccatcaaatatatcactaccggttaaacaacgccaaatatacaacattgtgaaagcgagaaagaccccatatataccatcccataaagctcacggttcccaaacagctcgatgacgaaataagcaaacaaacctgacccaagttctggaagcaattttcgcggaaagtcgttaccgcattaaaacaaattatccccccaatagccaagaacgaagaagaaagtaaacaaaaggtggacatgaccgactgtcccctgcaacaagttcagtaatcgtcgtcataagtatacttcttcgtcgcccgt

SEQ ID NO: 2448 - DNA, 575 bp, Aspergillus oryzae
atggccgctgcaattaaggcgatcaacgcaaaaatccgttccaacaaggttctggactatgtctgctctacacatttctggggccccgtctccaacttcggtatccccgttgctgccgtgatggacacccagaaggaccctgaaatcatctccggccagatgaccggcgcccttgttatctactcgggtaccttcatgcgctatgccctcgccgtctcccccaagaactacctcctcttcgcttgtcacgccattaacttctccgcccaatgtactcaaggataccgctaccttaactactggaactggggaggccgtgaagctaagctcgccgctgaagccgctgggaagggctcgcaggcccccgaggccggcgcataaacgatccgaaccttgtcctacctgccgcgtggccgacaaacaaggatgcccgttttcaatcagtagtagatttagacctcacaagagacaagacgcctatggatggcgatttgtggaatacagatcggttcggatgcaagaggctggcctcatttaactctggttttcttgggtagaagaacggattgcgtgcg

SEQ ID NO: 2449 - DNA, 657 bp, Aspergillus oryzae
tcgacccacgcgtccgtgtttggataagagacaactttcaaaatggctacggcagtctctcagggggccgctggcaacaacgccttcaaggacaaggagaagcctatggctgtgcggacgtccaacattctggccgctagagccgtcgccgatgccatcagaacgtctttgggacctagaggaatggataaaatgatccaaacacccaagggcaacacgattatcaccaacgatggaaacactatgttgaaggatatgagcgttatgcatcccgcagcccggatgctcgtcgacctgagtgccgctcaggatgttgaggctggtgacggaactacatcggttgtcgtaatcgcaggaagcttgctgggtgctgcagagcgtctcttgtccaagggcatccaccccaccgtcatctcggagtcattccaaagagctgcagccgcagccgtcgagatccttcacaacatgtcccgccctatcagcctggtcgaccgttccactttactccaggcggcctctacgtctctttcatcgaaaattgtctcgcagcactccggcctccttggccctatggccgtcgactcggtgctgaaggtcgtggatcctaagactgctgagacgttgacctcaggaatatccggattgttaagaaggttg

SEQ ID NO: 2450 - DNA, 639 bp, Aspergillus oryzae
tcgacccacgcgtccggggagaactctcttgaggtttgtgagccagagacgatcgtggtgcctattagcactcctcagaagggccatccattgatcttcaactctatggctgtttatcgcaacacgcgcgctcggttagaggtcgacctcaagtcgatccaagaggccttgcggtatcattcgtcttacgaagtggccgctgcaatgacagttgctcgtgagaaggtgaagcgctcccaggagatgaacaaggttattcagtcctgcttcgaatgcatcgaaattgctgccatccaaggaattaactgggtagcgaagacatctgccaccaactggagtgttgagcatccgctctgtggcttggatctgatggtcatcttgagtctctggctctatcgcctggaacatgacgaggagccagcgactgaggctgaaatggccatctacaacaaggtgcggaatttgttcgatgatgacgccgtcgatgcctttggtaaactcagctccactgtggcccgtgtatggggtaacatcctagacggagtggtagtatggggaattaccaagctcatgggcgaatcgttcaagcttcactcgcaggccttggttggctacgaagactcattgcgcgtcggcaag

SEQ ID NO: 2451 - DNA, 618 bp, Aspergillus oryzae
ccaatgggttggcgtagaaagggccatttccggggtaaatgctgcaagtcaaggcaagtgtatgaaattatcctttaattgtcaagtgggacttggcagatacctattactttattccaaccatgctaaagcaactgtggcctctcatcccagcctattcctcctgattaccttcaagactaaccccaaactaaccgtcgacgcaattttggcctgagatgattgattgatatcaaccaccctttctttgccacagtacaatctcggcccccactgtcacccttaaacagtacctggacttcctgaaaagtagaacataaggaaagcaaaatggcacagacgccacaacaacggaaagcgaatgaaaagtacgcgaagagtgaagctgcaaagcgtggcaaaggaaagactgcaacaaaacaaaaacagaacttgaagtctccggtgtcgaccgggtgggttgttgttcttgcctttgcggtctgcggtgggcttgcatttgaggctctgaggattgttccggagttatggtcggcagctgttgcgatgttcaatcgcaagttggcataaatctagactaaatttccgctaatcgaatacagtggttttgataaaaaa

SEQ ID NO: 2452 - DNA, 571 bp, Aspergillus oryzae
cttcctttcccctcccagatgctttgataacacaacccattaattaccattcacccccggtttcgaccaaaatcctaggcctgaaggcctttttttaaccaagttcagcttggtcaacttagagtttaacccgagggaccttttaggtagcggttacccgcctagttcgagtgacaactgtgctttgggtccactttgcgccgcgacagcagtgcccttccggtaaatagagccatcgggatatcgcagcactgaaccctcttgactcgttcgatgatttccccggattcttcgcaatcgaccgataggtcagcattgtttgctaaacagcctattctgttacacgaagcctctgctacaacggcttcgggtaacaatggaatttcttcggtgtcttcggtgagctctggagtagagggcatctgctctccagtatccttgaatggagaattctcaccgaatataaaggatgaaatgattcaccaatttcaccccggggctccacagccccttccgtcgcttcagatacgaacggatctgccgcgcacagcgcaactgagcccgtcgaaga

SEQ ID NO: 2453 - DNA, 594 bp, Aspergillus oryzae
tcgacccacgcgtccgctgggagccaatgttccgctccctcctcacaaacggtctagacctcgagcgtatcagccgcgtctgggactgctgggtattcgagggagaccgcatcatgattcgagccgcagtggcggttctcggttgcttgcaggcgcaactgtttggatttaccaagccggatgacgagagtcgtgccacggttagggaaatcctcggatgggggccccgtagtgccggagccaagcctaaggagcgccatagtgctccggtaacacttgcagggggctttggtggtcaattctccagtgccggcgttggtgactactggatactcacgaccgcgggcgatgaagatggatttatgagcgaggttagggaagcgggcaaagtgcggcattagaagtttgccccgttaaagttatttttaattcatctagccattcttttccctgcgtggctgtcacttttattacctgtatacctaccgttcgtttgacttatgctttggtcccttcccttcttgccgttggatatataattctataggtgcttagggcatttcatgctaaccgagctaattatcacttacactt

SEQ ID NO: 2454 - DNA, 447 bp, Aspergillus oryzae
tttttttttttttttcaaaaaagaattgcaaatacattgccgaccctgggcatccgacgcctgtaatacaaacagggggagaaggagaatgttaaggtatcagaggaagcgaagtgtgaagaaaacccagagacactgccaaatcgaagaaagcaaagttggaaatgaagaaagagcttgaaaagagcgcccgacgccccagtacaagtgaataatgcaaacatccgcagctgaaacagaaaaatgccgtcgtaaacatatgcaagaggtgtcctataccatcacaaccgaagaaatgccatatatggaatcaaccaactcctccccttacacccatcccgccaagtagcgagatcttggctcatcatgggtgccgcaaattcccccttctgatttattcgtgatccttgatatagttgtacggttctgagagggagctgtcgatgt

SEQ ID NO: 2455 - DNA, 577 bp, Aspergillus oryzae
tcgacccacgcgtccgccctatcagcgataaacaccctcggtcaatcgtcggcgtcagctggtggttctccccccaaccggcctccaagggcgtatcttggtccgtctgggcccaggactggctcctctccttccgccaattcctcttcaacgtccgcttcggcggacgcggtggcctcaacctccactgctacaaaatgtggaaggagatgcagcggaaaacccacgatgtagtctggaccgacccgcgcgggtattacttctgtaatgtcttggctgtgagctcggaaatgcgcgggatggggctgggccggaagctggtggaggttgtcacgcagcaggcggaccgggatggcatgccatgttatttagagagctcgaagggagttccgaatatcattatttacgagaaactgggttttaacttggttacggagattgattgtgtggatgggaatgatgcttgcaagctgtattgtatggttcggaagccgaagaccaaggcctgaacggacttttgcaggttttgcttggtgaggtcattggtttggaatgagtcacgatatttattggctat

SEQ ID NO: 2456 - DNA, 630 bp, Aspergillus oryzae
cgacccacgcgtccgtcgtcatcctacattatccccccatctatcatccaacccctgactaatagagtcgacttcattataatattccggtttaggtataattagagtaaaaagaacatcttgttgattccgcggcacacacttggactatgggtaaccagcagtccaacatcggcggaggccccgggggcgatggaagggatgataaggataagaagaaggacaagcccagatacgaaccacctcctcctcccacgactcgtcttggacgtaagaagcgcaaggctgccggcccaagtacagcttccaaactccccgacatcttcccaacgtcacgatgcaaattacgatacttgcgaatgcaacgggtccacgatcacttgctgctagaagaagaatatgtcgagaatatggaacgtctacgcaaaactaaggcacaggcagcacatgattccgtcagcagaagcgagtttgatattatggaccgaaatgcagacgagaggggtcgcgtcgatgacatgagaggtacccccatgggagtcggcaacttggaagagttaatcgacgacgaccatgccattgtttccagtgctaccggaccagagtactacgtttccatcatgtccttcg

SEQ ID NO: 2457 - DNA, 447 bp, Aspergillus oryzae
cggacggtgggtcgacaagtgataaaagaggggttgactctcttttcgtcctttttttattttatttctttgaatagacatcattattattatctgatttctcctcaaaaccgtgacaaagaaagatgtcaggccgaaacatcaacctcctaagcctagatggcggaggcgtgcgaggtctctcctcgcttatcgtcctcaaagagatcatggaatccatagaccgcgagaatccccccaagccatgcgactacttcgatttgataggaggcagcggatcgggtgggttaatagcgatcatgctcgggcgcctggaaatggacattgaccagtgcatccatgcttacaagctactatccaagaatgtgttctcccaaaagagactcctacccatcggtagcaatctgcgcagtcgcgcgaaatatgacatcaagaaggtggaattgg

SEQ ID NO: 2458 - DNA, 555 bp, Aspergillus oryzae
gtaaacgttcgtctcgtccagtcacttcggaaatctatcaagtccagcgtgaacttcgcctccttgccccccgccgtcaataagaagaggttgattcagaaagcggtcttcgatgaattagttgctctggtcaatccacatgcagatcctttccgacccaagaagggccggtctaatgtgattatgttcgttggtttacagggtgctggtaagacgacaacttgtaccaagctggctagacattatcagatgcggggcttcaaaacggcactcgtctgtgcggataccttccgtgccggtgcattcgatcagctgaaacagaatgcgacaaaggccaaaattccttactatggaagtttgacgcagaccgaccccgcagtggtggcggctgagggtgtggccaagttcaagaaggagcggtttgagatcataatcgtggatactagcggtcgtcacaagcaggaggaggaacttttcacggaaatgacgcagattcagactgctgtcaccccagaccagacgatcttggtcctcgacagcacgatcggtcaagcg

SEQ ID NO: 2459 - DNA, 287 bp, Aspergillus oryzae
gcagcccaccaccatgaagctgtacctgctattcttcttctttctcaccctccacgctctcccaggtctccccaggtcaactgcggacaaaccgccgttcttcctcctagccggcgacagcacaacagcagtccaatcgacgaacggcggtggttggggcaatggattcatccaaacgacgctggccaagggagccaaaggtcagaactacggccacaacggagcgacaaccgtcagcttccgcgcgggaggtgactgggacaccctcctcaagaaggttgaggagg

SEQ ID NO: 2460 - DNA, 658 bp, Aspergillus oryzae
tcgacccacgcgtccgcactgcaaggaagaggatcgtgaggcgattcttgctgagctccacgtctgcaccgccaagttgattccggaccaattcggtaactacgtgattcagcatgtcattgagaacggcgaggacaaggatcgaacccgtatggtaacaattgttatgtcgaacttgttgacctactcgaagcacaagtttgcaagcaatgtggtggaaaagagtatcgaattcggtcaagagtctcagcgtcaccaaattatcagcatgttgacgtcaacggatgataatggggagaaccccctacttggactgattcgtgatcagtttggcaattatgtcatacagaaggttttgtgtcagctcaagggcgcagaaagagacgctcttgttgaggaaatcaagcctcttctcagccagctgaagaagtatagctatggcaaacaaattgcggcgattgagaaactagttgcggactcgaattcaccaaccaacggcactcttcctcatactacctctaccacaccgccaaactcgcacaaatcctctccccagccatcgaagcgggctgtgaacggcctcgacggctgccgagcgccagtcgtgggcgcggcgcccccgacgccggctccaatagaccctcagagcaacggcgat

SEQ ID NO: 2461 - DNA, 657 bp, Aspergillus oryzae
gacccacgcgtccggaaaagtctcgacttcaaccaccagacgggacctaaaagtttctataactactttgtcgtacctttaaattgagctgctcaaaatgaagtttctgcaacgcctccttcccttggctgtagcctttctgccaatgacctgtgcactgtcagatcctgaaatgatacaaagtgttgagctgaattccgaccccaagccaccatccttgatctacaatgatccagtcggcggctccggtggaaaggacttttcagtcatcgccgcaccctccgagacaatcgataccctccatttctgggtcggagatggcgctggtcaaccaaaagtactccgaggactccaaatcacctggtccgataatcaaaagagcacagtctacggaacaacgaccgatgactatcagtccttcaaatttgcgccaggtgaaatcatcaaggagatgcagatcgccaaggggatacgcgcggatagtatatctttcacaacaacgtcccgctcgttctttgctggaggtcacggagggaaggaagttacgatgaatgtgggcagtggcatacttgtgggttttcaaggacgcgcggcgagagacattgatcgcctcgggcctatctttgcacaagttcagcccactacgttgaaggtggg

SEQ ID NO: 2462 - DNA, 553 bp, Aspergillus oryzae
ctggtccggatgaagaaagtgacgatcgatcggaagacaatgatagtcaccctgcagggtggctgtcaatggggccacgcgtacaaacagctagtcaatgagcgtatgaatggcgctatcatcaacggtggccgctgtccgactgtgggtgtgagtggcttcaccttaggcggtggtcttggtccatttacccgcagtttcggcatggggtgtgacacccttaaggaggcgactatcgtcactgcggatggcaaattagtaacagtgacagacggtgatgaccccaaatcagacaagggcaggctcttctgggcgctatgcggtgccggaggtggcaattacggagtggtggtcgaattgaagctcaagattcaggagttgcagaacagcggaggggaagtggtcgcaggacgcttcacatggatgcccaaggtggacgagatggatgattttatgcaaacaatgattcgcttctacaccacggactggccggaacagatgactctggatagctcctggctgtgtgatttaaagcagacttccagtgaactgg

SEQ ID NO: 2463 - DNA, 372 bp, Aspergillus oryzae
gacgaaagaaggtgcgcatggcgctcaattgcctcctggagcgagacggactgttgctccgactgagggacatcaaatgtcctgtttattggctacagggcactgaggatacaccatttggaaccgtcgttcctgcggagcaaatcaaacttttcactgcttccccggaggccaaattggtcatgatcgagggcggtgcgcactatctgaacgccaccaatccgaaggaggtgaatgaggcactcttggaaatggtcaccaagtatcaatgaagtgttcttgtgaaagtcttgcgaataggtaccggattgacaaatgtttatatatgaaagaagagctaggtagcgtcaatgattagctagtggtgggttc

SEQ ID NO: 2464 - DNA, 559 bp, Aspergillus oryzae
gaacacttgcatcgttctaccgctttgtttcttttctaattagttccggctgaagatcctaccatttccattcaaggattacccctctatcaaactgtatccctcctctgtgctactattcgacgctatctccaacctcccttccgaccagccctgaatgtcctcatccattaccgtgattcaccatgttgaccgttgaaaagtcatgggtcaatgttcagcagaaaacctttacaaaatggctcaatgataaattaaaggttcgaagactcttcattgaagatctagtatctgacctctccaacggcatcatcctcattcaccttctcgaaatcctcggcggcgagcccctcggtaaatatgcctcgaaccccagattgcgcgtacaaaagttcgaaaatgtcaacaagagtctggacactatcaaggggaggggaattcagatgacaaatatcggtgcagaggacgttgtggatggcaataggaagatcatcttaggactaatatggactctcattctgagattcaccatcagcgatatcaatgaggaaggtatgac

SEQ ID NO: 2465 - DNA, 592 bp, Aspergillus oryzae
tttcactttcctcaggaaatgccagaacccgaaggcttgcaccatccttctacgtggtccctctaaggatattatcaacgaggttgagcgcaaccttcaggatgctatggccgtcgcccggaatgtcatcttccacccacgactgtcccctggcggtggtgctatcgagatggcagtttctgtcaagctgggccagttggccaagtctatcgagggtgttcaacaatggccttacaaggccgttgctgatgctatggaggttattccccggacattggctcaaaacgcaggagccagccctattcgtgttttgactcgcatgagggccaagcacgccgaaggccacaccacatggggtcttgatggtgactcgggtgccctggtggatatgaaggaatatggcgtctgggaacctgaagcagtgaaactccagagcatcaagactgctgtcgagtccgcatgcctacttctccgtgttgatgatatctgcagcggcaaatctgcacagcaggtgggtgccaacctcggtggtggcgatgaataagagtagtaactggtttaaaaatgcgtacataatgctgcacgattacct

SEQ ID NO: 2466 - DNA, 573 bp, Aspergillus oryzae
ctcttttatccatcatttggattttttaaaaactttttctcagtagtttcatcttgctggatagtcgttttttgttttgagttctctgatcaccttttcccatctccctttgctcccatcatgttgggcgctttccgccgcaacggcgttgcccatgcgctgcgcgcttctgctccacgatctctttcggccagagtgacaccccagcagctacaatggcgtccaccggtcttctctgcagtctcgcatgtgccccgctcgcttttccatgcatctcgagtctctttcactgccgttgcggaagctcaggcccagaatgctgaggttgaccaggatggtcgtctgaccgattttaagcagctggcggatcagggattggttgaccccatcattattcgtaccattaacaagaacatgggcattaagacgatgacggatgttcagagcatgacaattcaagaaactctgcaagggcacgacgtattggctcaagcaaagactggaactggaaaaaacacttgccttcctcctccccgtagtgcaaaacatcttgaaggatccaaccgtcaaaaa

SEQ ID NO: 2467 - DNA, 507 bp, Aspergillus oryzae
gccgcatggaattcagatcgccctcctgtctttgaaccaggactggaaaatttattatttgagcctaatgacccaccggcattaccgacaccgtcgccatcaccaaagccagaggcctcacaggatgaagattgtctagaaaactcaagtaatagtaccaatcacggggagctcatcgctctgttaccgcgccgacggaagctcgccaatgtgaacttctcgactaatatgcacgaagccgtggcagcggcggacatggtcttcctgtgtgtagacgcgccatccagtatcatgaacggagacaaaagcgacatagacctatcccgcttggaaatcgccatccaggcgatcgcacaggtttcgacaggccacaagatcatagtccagaaaagtaccgcgccatgcggtattgtaccacgactaaagaagctcttgaaagaaacggcctcgccatcggcatccttcgatgtactttctaaccccgacttcctcgtacccggcgcagca

SEQ ID NO: 2468 - DNA, 389 bp, Aspergillus oryzae
ttttttttttttttttttataaaagaagccaatgagaatatataggtaggtcgtacggagagggtggcctcaaaggcgttcacctgacccgtactctggaccagccaaaccggctaactacaaaggatcaagatgtatactgataaatgtgcccttcgcgtccgatctccgccgcctgaggaatacctttaatctccccaccgttgtctattggcttgtgggagaatttcccagaggatctagacagaagactttccctcttcgcttccggggtcaaatccaacatctctgacatttcccgagcaggcactcgtccttcaggagcgaggatctctggcccagtgagataatgctttgctgtggctacagctttcgagaggtagtctttt

SEQ ID NO: 2469 - DNA, 548 bp, Aspergillus oryzae
gctatattctagccacttcaaagcgctagtttcctacatacaacaagcaagtgtccactcgcctcaacagcactacaaacaccgccaacacaattaccccaaaccagatcaacgcagactccttcccagtgacaataaccccaccaacgaacaaaatggccgttccccgcgcaatccgccaagtctttctggctatcgaacaagccgagggtgccggtgcccgcgttcgccgctcaattggaaccgccaagctgcgcaacttcagccccttcctcatgctcgaccacttcaccatcggcaagggcgccggtttcccggaccaccctcaccgcggccaagagaccatcacctacctcctgtccggtggcgttgaccacgaagatttcgccggcaacaagggcaccattggacccggtgacctgcaatttatgaccgcgggtcgcggaatcatgcacgcggaaatgccccacgagaaccccgacggcagccccaacgttggcatgcagctgtgggtcgatctgcccaagaatctcaagatgtgcgagccg

SEQ ID NO: 2470 - DNA, 366 bp, Aspergillus oryzae
gagataccttccagtgtcataatgcctccctctaccgaatccgatttcgaatcttctccacggccctcaatcgagatagaaaagcaaaacctacttgaacaaggccttctcaaacgagaatcaaagcgacggcccgtgttctcgcatattggtactctctatattgtcaatggcttcttgatcttcatggtgattgtgctcgcacgagagttatggaagaagcctgtggatccgtcacttcaggtatactctcccgccaacgacgtcgtcgagtatattccacagcagcatttccgggctgcgttatttaatcaaacggaatacatggggttcccgacagacgagactgacaagctatggtccgat

SEQ ID NO: 2471 - DNA, 549 bp, Aspergillus oryzae
ccgaaccgttcatgccaggtctttccacagcctctggtccttcaatcgcaagtgcttcgtcttccgctataggctccccttactcaggaactgccccggctattcacgagaattgggtagacaccactcacggtctggggctaccggctgcgctcatgggtgacctcttcccgaatgaatacactgggagctcgttggacatggaagggttctattcaaagaagaactcgaataactatgttgacccttctttgattgagacattacaaccacaaccgaacattcctcaatcttctatgccatactctgagcagccgaattacggctacgggtaccttcctccgtcccctgagcttccctatgttccccagcccgaagattatgatacgaagccggcgattgcgcagcaactcaatcacatcccgatgtcttcccctctgatcaatgaccggaggtcctccatctcatccgagcactcccgtcgttcacagctgagtccagctgctagtaacgcgtctcttgatgatgagacccaggagaagggacggt

SEQ ID NO: 2472 - DNA, 423 bp, Aspergillus oryzae
aaaaataaaaatgagagctcctctatggctagcaacatcttagttatggatgtggagggtacagacggccgtgagcggggtgaagaccaggactttgagcgcaagagtgcccttttcgcattggcgaccagtgaggttcttattgtgaacatctgggaacaccaggtcggattgtaccagggtgcaaatatggagcttctaaagactgtcttcgaagtcaacttgcagttgttccttaaagataagaatactactcaccgatcgcttttgttcttcgtcattcgtgactattcgggaatgacgccgctccagaatttgcagaagaccctaatggaagatatggctcgcctctgggattcgatatctaagcctggtggcctggagaactcgaacgtacatgattactttgacttccagttctac

SEQ ID NO: 2473 - DNA, 118 bp, Aspergillus oryzae
cacgattttaattcttatggatccggcttggagattggagaatttggagtttgaatttggagccttcgtaattcacttgtaatattagtactcaacacagcaccgtaccaagatttcg

SEQ ID NO: 2474 - DNA, 544 bp, Aspergillus oryzae
  modified_base (251)..(251): n is a, c, g, or t
agcagattggcgcttgctaattagatacgacctctaggtaatgccactaccaacgatctttggtctgcactcagcgaagcatccggtcaagacgttaacagcttcatggacccatggattcgcaaaatcggtttcccagttataacagtggcagaagagcctagccagattagcattcgccagaaccgattcctttctacaggtgatgcaaagccggaagaagacgaaacaacttggtggattcccctcgnaatcaaatcgggctcgaagatggaggaagtgaattctcgtgctcttgttgccaagactgatactattcatggtgtcggccagaattcgttttacaagatcaacaaggatctttctggattctaccggacgaattatccgactgaccggttggcaaagcttggtaaatctctagaactactgagcaccgaagacaagattgggttgattggtgatgctgctgctcttgctgtgtctggtgaaggcagcactgctgctctgttggcccttcttgaaggcttcagtgaagagcaga

SEQ ID NO: 2475 - DNA, 538 bp, Aspergillus oryzae
gcacacctagatgcggaaatggcgttggaaatagattacgtgctctcccacatctcgcaggaggacaagatcgcccttctcgcaggcatcgatttctggcatacccaccctattcccgaattgaacgtgccttcaattcgttccaccgatggtcccaatggtataagaggcacgaagttcttcgccggtgtaccggctgcctgtttgccctgtggcaccgccttggcgtcgacttgggaccaaaatctactgcgcgaagtgggagttctgattggaaaagaatgtctggcaaagggcgcgcactgttggcttggtccaacaatcaatatgccccgatcaccgttgggcggccggggatttgaatctttcgcggaggacccgcatctcgccggagcaatggctgcctcgatgatcacaggctgtgagagcaccggggtcatctctgcggtaaaacatttcgtgggtaatgaccaggagcatgagcggagggctgtggatgttcttgtcacccagcgtgcgttgagagagatctacctgc

SEQ ID NO: 2476 - DNA, 504 bp, Aspergillus oryzae
cggacacttcgacaactaaccgggttcaagtcgacaaagcagtcaagatgcctcgcggacctaccaagcaccagaagcgccttagtgcgccttcgcactggctcctggacaaaatgtccggaacctatgctcccaaggcctcccccggtcctcacaagctccgcgactgccttcccctcatcgttttcatccgtaaccgtctcaagtacgccctgaacggtcgtgaggttaaggccatcatgatgcagcgtctcatccaggtcgacggcaaggtccgcactgaccctaccttccccgctggtttcatggacgtcatcggcatcgagaagaccggcgagaacttccgtctcatctacgacaccaagggccgtttcaccgtccaccgtatccaggctgaggaggccgaatacaagctgtgcaaggtcaagcgtgttcagctcggcaagggcgggatcccattcttggttacgcacgatgcgagaacgtgagtgcatactctccaca

SEQ ID NO: 2477 - DNA, 484 bp, Aspergillus oryzae
ctcccaaacaacaataacaaccaccaccaatcgcccgcgctaacaccaccaaatcgcaaatccactccataattactccaacgagaagaggcgcacctcaagcatacactcaaaatgtctccctcccttcgtcgcctaatgaaagaagccgccgagctatccgcctccccttccccacacttccacgctcaacccgtttccgattccaacctgtacgactggcactttacaatcgccggccccccggctccctcaccttacgcctcgggaatctatcacggccgcatagttctacccccaacgtacccgctccggcccccgagcttccgcttccttaccccctcgggccggtttgaagtcaatcgggaaatttgcctcagtatctcggggcaccatgaggagacgtggcagcctgcgtgggggatccggactgcgctgctggcgataaggagcttcatggacggagatgcgaagggacaggtcg

SEQ ID NO: 2478 - DNA, 532 bp, Aspergillus oryzae
gatcgtcgtactctcagctccccacagtttgtttttacttcccccctgtcacattgtttgtcctccattggaatttaggccctcctttcgtcaactttgcgaaataacgccgggctggaattattgagaaaaagcaaaaaagggagagagaggacctgtcaacctcgtgtcacccatggcgactctaacgaccgctaggtctcccatcctctcccattgtgttgttgctttgctccatcgccatgaatcatacatggccgaggctgaagaagaccgtcatcggttcctcgccagtattgagaacctggaacgcgagaagcgtgaggtgcaggtcgaaaatgcccgcataatcgaagagaatcgcgggttattggagcagctggaagctctgaacaaagccgttgctgatgcagattctcatgctaagtcccttgaagttagactagagaattctgaagctgagcttcgcaaagtcacggtgtcggctgcccgtgcagctgaccttgacgcccaattggttcagatggagaat

SEQ ID NO: 2479 - DNA, 302 bp, Aspergillus oryzae
cgacccacgcgtccgtgtttctccccccgctttgacttttctgcataaattggagaggaaacgctggaaataattggttcccgacagccgattctatttaccgtatggtcgaccttttccatttaagaccagacatatcccttcttcctcgagtttagtgtatcttcgttcggtggattcgcgcaaatcgtccgtcctcttgacacgaactaaattccaagctccgttgctccactcaccgtgaccctcaatccatccgagggaaacttgagaaagaaaaattagcccagcgagagagagag

SEQ ID NO: 2480 - DNA, 538 bp, Aspergillus oryzae
gttggttctctatactgctcgtccagcgcaaaacatggccccttcactcgaggatccgatcttggctccagccttggatcatgttattctcccaaagaaagaggtcaacggcgacaacaagtttcactacaccccgggacgcacagtcgtcgagcgtcacgataactacgcttatgaagaccttctaccttcattccctgatattcattgggatccgctagaagagattccatatgaagacagagggcttcgcggagatcctaaattccgtaacctactgcgggatgcaaccgatgtttttgattatacgcccaagatcgggactgaaattcacggtgtgaacttggccaagttagatgaagcacagaaggacgacttggctcgcctagtcgctgtccgtggggtggtgttcttccgtgaccaaaaggacttggacattgatgcccaaagagaactaggaagacatttcgggagactacataagcacgcaactacgtctgttccgaggaagcaaggcttggaggatgtccatgtagtt

SEQ ID NO: 2481 - DNA, 559 bp, Aspergillus oryzae
agcgtacggcggcatcatctgtgtattccgatatgaacgggggtcagccacatccaatgccatcagagaacagccagctaggccctgctccacctcttcctgaacgctcaaatatttcacagcctggtcaaccgatttctggtactccagtctccgaagctgaagcacagaatcagcatgaacagagatctgaaacttattcgatcaggcatgtcaattggactgacgccacaggaaagctgcgcgactgcccgattctcgctcaaaataaaaatggaccatgcccattgctagcgcttgttaatgctctcgtgctgcgctcaagccccgattctcagcctcctatagtcagagcgctacaaacacgagaacagatatctcttggtttgttgatcgaagctttattcgacgagttaacaacatgcttggggccagacgacgagcttccagacatcgaagccctgagtagattcttgactatgctccatacgggcatgaatgtcaatccacgactcacactgggatctagcgattcggtgggcacgtttttagaaactag

SEQ ID NO: 2482 - DNA, 623 bp, Aspergillus oryzae
agcaaatatcctcccaagttcctctgttgttcaatagtttccttccccccatacacttctagacgtatttagtttccggtagtatttcggactatagtcttttcttctcattttgacccagtgttggtattcaagcgcatcaccgattatcgcgtccttctcctcgcctgcagtttgaccctctcccaagccctcatcgatatctctcagcatggccaccgcagagaagaagaaagaagaacaacctgccattcaaccggacgaatactcggacggcgattacgatacggatgactattcactgtccgaagacgagcaggatcagaaaccccaacgtccgaaacaacagcaagctcgacgacgtcaacaacaacaacgcaaacgtcaaaacgacgagtatgaggatgaaagtgactatttttccgacgaatacgattcagatgagtacgatgacgatgacgatgcgggtcaagggcaatgccatgcagccatataagcgcggcacccagtccttaacacaaggcacaatcacaaacggagccatgacggacgccccaggacaagggaaaaacgatgaggagcaggatggcctcaaactgaaactggagctgaacctcgacatc

SEQ ID NO: 2483 - DNA, 507 bp, Aspergillus oryzae
  modified_base (188)..(188): n is a, c, g, or t
tcgacccacgcgtccgcggacgcgtgggcggacgcgtgggttcctacgacctctagaaccatacgatactccaaattacctcagccacgatgtctcttcccccgaacgtccatatctcatctcacccgtgcctacaagccaagatatcccagttacggtcccataaaacttctacccgcgaaacaagnagccttgtccatgagatcacgaccattctaggcgtggaggccttctcaacggtattgaaagctacaaagcggggaacggatcaaaccccgttaggtatcgaatatgatacccaagatattgaacccgccaatgtcgcaatggtacccattcttcgatctggattgggcatgactgaggcaatcaacaacctgctcccaggcccggtccctatctaccatttgggtctcttccgcgagaagttcacccttcagcccgtcgaatactacactaacctcccctaccaacgccaggatggctctgactccaacaccgtcgccg

SEQ ID NO: 2484 - DNA, 282 bp, Aspergillus oryzae
ctttttaaaatgtatggggaaggaaagggaagaagatcattctttattccagtgtggcctttgtttcttttcaagatatcgtttctgctttagcatttatttcatgtaaagcccctttttggttgtttgttttttcccttcctgttttatgattgaatcatagcatagcgttcaggtaaaggaggcatagcaaaggtgttatcttttctgttatgtacttacctgtctgaatacttttctttcatgttgatagccattttatactttatttcatatgatgtg

SEQ ID NO: 2485 - DNA, 488 bp, Aspergillus oryzae
gacatcttccaaagcaaaagtgtctattggaccccagccttattttgagccaccgttacgtatgctcacgaaatagctttgagccacgtctcactgtccgatcaatcattcgcgcatgagggaagcgagattcactaactcgtaccctttgtcatacacctttgattggtcgctcttagcgtgctcaccttgcattcatttaaaggcgctgccttgagttaatatacgtctgccttcatggtcttgcgcaaacgggctccgccacacctgtacagtctcaacaagggtaatgctcgtgctgaacctcgttccgcaatttcacagatctcccctacctccaaatccgtgtcgtcttcctccccgaaacgcttgacccgaccgagacgagctcaaagctctccacaaccccatcggcttccctctcaagaatcagtatattctccagatcttaatacgtcacctgcatttgatttaatgcccttggagca

SEQ ID NO: 2486 - DNA, 561 bp, Aspergillus oryzae
aactcatcaatttctcttcctccgttcagtcttctcataacctttagataccctcaccatggctgatactgttggaaagaccatcacttgtaaggctgccgttgcctgggctgccggcgagcccctctccattgaggacatcgaggtcgctccccccaaggctcacgaagtccgcattcaagttcaccacactggtgtctgccacactgacgcctacactctctccggaaaggacccggaaggtgctttccccgtcgtcctcggtcacgagggtgctggtatcgtcgagtctgtcggcgagggcgtcacctccttgaagcccggcgactatgtcattgctctttacacccccgaatgccgtgagtgcaagttctgcaagtccggcaagaccaacctgtgcggcaagatccgtgccacccagggtaagggtgtgatgcccgacggtacttcccgcttcaaggcccgcggcaaggacctcctccacttcatgggtacctccactttctctcagtacaccgttgtcgccgacatctctgtcgtcgctgtgactcccaagatccc

SEQ ID NO: 2487 - DNA, 602 bp, Aspergillus oryzae
  modified_base (284)..(284): n is a, c, g, or t
tcgacccacgcgtccgcccacgcgtccgcccacgcgtccgtctgtttccaccaacgatccacccttacgcctgttgaacttgaatctcgtctcgtagaccgaggtctcttttataacttcaacttaatattacaagtgatacctacccaccctaacgatgcctcccaagaaagcttccaccggcgcagccaagaagactgcctcgactcatgcttcctaccgtgatatgatcaaggatgctatcttgaatctgaaagagcgcaatggtagcagtcgccagtccntaaagaaatatgttttggcaaacaacaagattgcaccttgcatctaccaatgctttcgatagccagttcaacaaggctattaaggcaggtgttgagaagggtgaattcacccaacccaagggtccttctggacccgtgaagctcgccaagaaggaagctgctcctaaacctgctgccaagaagagcaccaccgccgctaagccgaagaaggctactgccaccactactaagaaggctgagaaggcccgagaaggccgagaagcctaagacgaccaccaagaagactggcactactactactaccaagaagagtgtcgg

SEQ ID NO: 2488 - DNA, 514 bp, Aspergillus oryzae
atgcaggtcactggcctcaccaaagatgcctcgggtaacttgaatggggcgcgagtgaaagatatcataccaggaaagaatggccaagaggaaggagaatttactatacgggccaagggcatcatcaatgcgaccggccccttcaccgattccatcagaaagatggacgagcctgacgtgaaagaaattgtcgcacctagctctggtgtccatgttattttacctggatattatagtccttcggacatgggtctcattgacccttcaacgtccgatggccgtgttatcttcttccttccatggcagggaaacacaattgctgggaccactgatcaacctaccgaaatcatcgactcaacccgagccgtctgaaaggacatcaactggattctgtcagaagtccgtggctacttagcccctgatatcaacgttgagcggagcgatgtgctggcagcatggtctggaattcggcctttggttcgtgatcctaaagtgaagagctccgaagcattgg

SEQ ID NO: 2489 - DNA, 596 bp, Aspergillus oryzae
tcgaccacgcgtccggtcgcgacgaccgctgtggttgccaagatgctcggcctcagtgagaaacagactgcggatgccatctcccaggcgttcgtcgacggtcagagtctccggacttacagacactcccccaacaccatgtcaagaaagtcttgggctgccggtgacgcatgccagcgggctgttaacctcgtgctgaaggtgcagaagggtgagggtggattgcacactgttctttccgcccctgtctggggcttctacgatgtgctgttcaaaggcaataagttcaagttccagcgtccctatggcagctacgttatggagaacgtccttttcaaggtctcctatcctgccgaattccactctcagacagcgatcgaagctgccgagatcatcaacaagaagctcgctgccttgggcaagagcgccaaggacatcaaggaagtcaccaaccgcacccacgaagcttgcattcgcatcattgacaagcagttcaaggccatggacaacttcgcggaccgtgaccactgcgttcagtacatggttgccaccatgctggcattcaatcgtctcaccggcacccgactatgccgatg

SEQ ID NO: 2490 - DNA, 539 bp, Aspergillus oryzae
cgagacgagtcgaaatctgcagcaaccgacacaaaatagcaaaatggtgtcctcaacagcggtcactactaaggtggcctccgggtccccttaccaactcgagaagagtcaggtttccaaagcttcttctgcgcttttgcgacacattaaatcgaagcaggtggaaaaggagaagtctgcgaccaagaagactcttattggagacaacgacgagtccgacgatgaaaccccacttaacaacgaggctgtctggctcgtggtcacgaccaagaagcacgttgtcgataagaaccgcctgaagcctggcaagattaccgtcccacattccctgaatgactcctcaaacctcagtgtctgcctcatcaccgccgaccctcagcgctcagtcaagaacattgttaccgatccttctttccctgaacatcttacttcccgcattgaccgggttatcggctactccaagttgaaggccagatatcagagcttcgagagtcggcgacaactcctgtccgagcacgatgtcttcctggcggatgacc

SEQ ID NO: 2491 - DNA, 436 bp, Aspergillus oryzae
tcgacccacgcgtccgcttcaccccatcccccattcaattttcgctctttcgtctgacaattcttactgggtaaacactcgtcatcagtggctttcctgctgcctgtctctctctctcgctagatgacgagcaggttccttgcagttcttccaacgtgttctgtacggagtatatccagcaaagtctctgtctttcctgggtcctccggcaataaaacttccccacagttggcactctttattttccttttattctctttttgattacgtaccgaagaaccgttgagcccggagagcctaatcgtattattagctctagtctgactctcaaacccaaattatttggcaaggccaacgaaagacaagaacggaaaagaaaagcccaatagtccagagagttcttttgattatttatccttttctgggggggtggagg

SEQ ID NO: 2492 - DNA, 598 bp, Aspergillus oryzae
tcgacccacgcgtccggagctgactaccagtgcaatccagcagtgatgccgaacctatctctatgtcaaagttgatggcctgtatcctcttctactccgcttggtagagtactgaccaatcttcaatccaaaccccctcacgcctttttctgttatgcctagaatccctgcatcagaggaaacaccaatgttacctctccctggagctcctgcttcctcctgggctagattccgagagcgactaagtgctttattcagtggcgctgaccccagggtctgcattgcattctggctgtttggcttgatcaacaatgttccttatgtcatcatcttatcagctgctcttgatttagtcggtcctggtgtacccaaaggcgtcgttcttctcgcggatgtcatcccttcttttggaactaagctcattgcgccgtactttatccatgtagtaccatattcggtacgggtggtgatattcgtgctcctctccgccatcggaatgcttcttgttgcgttgagccctgactacacggatggtggcacgatatctaccaagattgccgggattattctagctagtgtatctagtggaaggtggtga

SEQ ID NO: 2493 - DNA, 450 bp, Aspergillus oryzae
gtgctgtgcacggaatttccatattgtacactttcattcctttcatttgacccaaccaataactactataccactcctttacataccaacatccataccatcatgaaggccttcactttcttgggagctgctgctcttttcttttccccggcccttgctcaggaagaccttggctatgttactatccttccctttcctgtgccctctggtacgccttccggaacgccttccagcactccttcggtcactcctaccccatggcccagcggagttccgcgtcccaccggcgttttccctacgggttcgtggccaactccttcctcgagcggagttccacctccttctagctctccggtctttgctttccagcgcaggcacgcccgtcaggtccgccccatcttcgtctaggcggctccgtaaagtttggatcattgctgagagagtgagctt

SEQ ID NO: 2494 - DNA, 395 bp, Aspergillus oryzae
gcatcccgctacttgcaatctcacatatataaggcctccttacttcaggagcggaaaatagctcagtacgttcagtcgatttattgcccctgtttcgaatatcataaacgcctccaagaatatcaggaaggatgttggataccttcgaaccagttgtaagatttctcgcacagtaccaaggtggcgactatgtgaaaggatgggccgaactgtgggataagggcgacttgattgactgggataaagggtttcctaacccagccttagaagatacccttatccagcgccgctcgatcatcggtgatcctgtggtcaaggatgctgggggaagccagtatagacggaaggcactggttcctggatgcggccgaggggttgatgtccttcttctggcc

SEQ ID NO: 2495 - DNA, 487 bp, Aspergillus oryzae
  modified_base (246)..(246): n is a, c, g, or t
ctcgatcgtgctgaaagacaagacacagactggaaccaaagagtatgggcttcccttgctacaggcccttacacggtaccacacttgccacgtccctttcgacaatctcgtcttgcactattccccacacaagaccgtcacgctggaccaggcggagctctacacgaagatagtccgccggcggctcggcgggcgatgtatggaaaacaacacctttttcgggacggtccttcgctcgctcggctntgaagtgcgcaactgcggaggccgcgtcgcgcgggcaatgagtccctaccctgatgttcgacataatcagagcgcgacttatgacgggtggaaccatatgcttaatcttgtgcgcctcgacgacgagtggtacgtcgtcgatgtggggatgggctccatgggccctaaccttccatatccgctgcgcgatggattcgagacgactagcatccctccacgctggattcgtttgcagttacgg

SEQ ID NO: 2496 - DNA, 476 bp, Aspergillus oryzae
agatggtccatgagactgcccaagcttgacgaactctgcacgaagctagagagccaggttgctcatgcaaacttttgcttggtggcacaagggaaattaaacacaaccgtcgaagttctatttccacatacttacatagatcgacccattcgggagaaacactttgtctttgaagacgcccatcgaagaccttcacactataccctttcgtgaaatatcatcctggtcggactttcatcaattcctgctcaggttctgggatggcaaacgtggtcgagagttgatcgtgagaaggcaatacgtcctctacaacgtcaccacagagcaggaacttctgcccagcagcccctgcataaagccactgaaggatgtaatttctccgaatgatcgggtcgatatgagcgtcatattctcttccgataatttatactccaagaaatgtccgttctgtcgggcacgtcgttccaaggagagcc

SEQ ID NO: 2497 - DNA, 537 bp, Aspergillus oryzae
  modified_base (307)..(307): n is a, c, g, or t
tcgacccacgcgtccgcgtttatgcagttcatgcttgcttctgtctgggtgtggttgccattccccttccccctattgaccaaaatcgactttcagaagatgccccagcgttcttacacgttatcaatgatttcaatgtgaaagccatcattgtaaacagtgatgttgatcatgtgatgagacagaagctcgtttcccagcatatcaagcagtctgcacaggttcttcggataggtgtaccggcaatctacaacaccacaaaaccaacgaaacagtctcacggctgtcgtgagctcggctatgttgngaaagatgcatggttacagggaagtacaccggccatggtttggacttattggacgccagaccagaggaggatatcggtccatatcggccacgatactattatgggtatgtgcaaggtacaaaaagagacatgccagatgagcagtgcaagaccagttctgggtagtgttcgcagcaccctgagtcttggcttcctccatacatgtttgatgggtatctatgttggggggc

SEQ ID NO: 2498 - DNA, 521 bp, Aspergillus oryzae
ggcccgggctgtcacccagaagcatattgagctccttgcccaacaaacggcgtctatggatgctgccgcaggaaacaagcttgaacagcatcacgacccttacatcttgcgccgaggtgtcaaccatcgtctcaacaagcagatcattgaggagaacaacaaccgcaaggatatcattgctgtacagaataacttccagcagtttgaggcgcatgttctgcagaccattcagggggccatgcaagaattcgtccagatcgtttctggccagctcgagcatcagggtactatgtatcaggatatgctgggttctgctcagaagattcctcctgacttcgagtgggtcaacttcatcacgaagaatgacaatgtccttatcaacccggatgcgcccccgaggaccctctccaacatcactttccccaacatggatcatcgtgcgaccatggcactgatcgaagggtccttggaacgcaagtcccgtgccatgcttaagggctatagctccggatactacgttg

SEQ ID NO: 2499 - DNA, 465 bp, Aspergillus oryzae
cggacgcgtgggtccggacatactacggactcctcaaaacattgtcttctttttagattattcgtgttggaatattgtcatattatcttcaaaatgcactcagagtcagaatcaggctacgagtcccaagtctcgatggacgagccattcacccccatgtttaaaaaggaacatcaacatgatggccaactaccagatatcacaccagacgaccgcgtgattgcagtgatggggataacaggtgtcggaaaaagcaccttcatctcacattttaacgaagacgcccttgtaggcgatagcttgatgtcctgcacaacagaagtaggcatccacaaagcccaaatagacaaccaaagaatctacctaatcgacaccccgggcttcgacgacaccacacgctccgacacagacgtactcgtcgaaatcgccgactggctccgcttctcctacaactccaacatcaaa

SEQ ID NO: 2500 - DNA, 548 bp, Aspergillus oryzae
cgtcggggccacttggtttatctactcttgaaggactttgtcccacccagtctctctatttggattcaatatgctggaggacacatcactcgaatcccctcgtccgcgggccgaatgcagcagtcagatggagccgggcgggaagaccgagataggagcatggacggcgaacgtatcttcttgcttagatagaagtagcaagcattacgtcccctcgtccccaccgaaccacttggagcctgcacatagccatggagatgtgcacaatgacacgacagatagaccacaatccccagtccggaaccccaacgagcgccagattaactcggaccagtctgtacgactggataccgaccccactgaagtccaggtggccgatgaggccgctgttgaagtcaatgggtcggagacagaatccgccccgtgcgccgagcagatcacgttgaaggcattgttagaaaagatccggggaaaaagggactgaccaagtggatatactcagcgtgtgcttcggggagcctggtgtcgacctcaatgtacacattcag

SEQ ID NO: 2501 - DNA, 549 bp, Aspergillus oryzae
cagaaggcccggcagtctggggtgaatcccctgaaaggcagtttcctttgcttgccccgctccctttgcattcgtcatctgtagctgtggcgaagcgtccagtgctctttcccgatgtacaccctatcctggttgcccgttgcgctgagtgcttgactgatcgctggtgtcgtcgatgcaacaaatggttctgcacgaactgcctaccgagtcccgaacgggtgaggactaacttatcgccccatcaaactgcggtaagggggccgcgagctagccaggatacaagtttgtctcacgagcgaaggagattccaagttggagtgagtagagactgctgggaatgcggaccaacgtgcgctacctgcaaagccgaatgccaacgaacatgtcagaattgccaaggagaatattgtgttgatcataatgaaggttgctctcctacaatgtgtgactggtgtaacacaagtgcacgtcatcaatttagacagctctattgagtgggagtaagttaaatgggcacttcaccatctacccagggaagacgctatt

SEQ ID NO: 2502 - DNA, 452 bp, Aspergillus oryzae
  modified_base (209)..(209): n is a, c, g, or t
ctttttacgcccgtcctttgcgtcttagctgatttgaagccatttgacatcaattgattttatagcagccacaatgttcgcccgacagtgctcacgattggtgtcttcccggactgccgtccccttgtcttcgtatctttcccgtgttaggccgtattcctcggcatcaggatatgagcacatcctgacctccagccccaagcctggtntcgggctgatcacattgaaccgccctaaagcccttaatgccctttcaagccccctcttcaaagagatcaacgatgccctttccaaatacgatgaggacaaggatattggcgccatcataatcacagggagtgagaaggctttcgctgctggtgccgatatcaaggaaatggcgcccttgaccttctccgctgcctacagcaacaacttcatcgccccttggtcccaccttgccaacaatatcc

SEQ ID NO: 2503 - DNA, 569 bp, Aspergillus oryzae
gtatgcatccgcaggctaccttcaatgacatcgacaccaatgacgataggatcctttttgttgaagacggcgacgggactaagaacacaagggaagacagcaagcatcttgctctcctcctttctcttctccgtcaattcagcgatatgcttcgtgaagtcatcaaacagatggtagatgatgtctgcggtgaagatcttgacaccaacttcctcggcatacgcagccgcttccttgtcaaccttaacatcgaagcacagcatgacggcgtactccttagccttttccaacatcgtaccagccatcatcacatcacgcttataaacaggaccgatggagatgttggcaacggggatcttagagacacgaaggaactcaagcaaagcttccagggaacccagggtcgaggcttggacactgacaccacgctgatccttggaaaccttgctcagcaggttctccagatcagacatgacttcatcttcgatgtcctcctcatcatcatcaggtccgacgaccatcaaccgagaaccagcaatggcatgctcgagatcgttggctgcgatctt

SEQ ID NO: 2504 - DNA, 554 bp, Aspergillus oryzae
gcgagagtcatcaacttggtgaatgacttggtcctaaggagagatcgcgaagccgaacaccgagagaacctagcgactacgattcggacattgcgggcggaggatgcccagaagacactcgagattgagaaactcaaggcgaagacatctgaattgacccgatcggtcgctttggcggaagcgcaagaacgtgcccagaaagctaatgtagcgagtgccgacgctacggtacgacaactgaaagatcaagtccagcgtatgaagactacgattcagcaagttcgggctcagtgtgccaacgatatccgcaagcgtgacctggagatgcagagattgaagtctcacctggctgaacgtcagagaggaaaacgggaggggctaggcgtgacaaccataaacataaaccctgcagtcgatcgatcttccaaatccaagctattgtcgggtggtgataatgtcaatgatccaggctacagtctgaagcaggaaaccaatgattttctgacggagttatgccaaaacttgagcgacgagaatgatagtctgattatgct

SEQ ID NO: 2505 - DNA, 623 bp, Aspergillus oryzae
tcgacccacgcgtccgtatctatacacatacacattccttcccctctgtgttcgttttagtctgcgcgcgtgactcgactcgacatcatgaatccctccgacccctcggagacggtcgaggtcgccaaagcgacagccaaccttcatgatgcccatttgaatgaaaaaaaggctccttccattgacaaggacttggacatcacaccgagtattgaagaagtaccggcgaccaaagttgttggcgccaccaccgatgataccgatctccaaaagacctatccgaccgacgaggaactgagaaccctgcgtcgagtgtgcggacaaatcccatggacctcatataccgtggcgtttgtggaactgtgcgagcgattctcctactatggaaccacagccgttttcgtcaactttatccagcgtcccatgccggcaggctcctccaccggtgcgacctatgatagttcacgagtgccgggagcgttgaacatgggccaacaggcctccactggtttgaccttgttcaattccttctggtcctacatcatgcccacggccgcgcattcgtggccgatcaatacttgggtcgattccgcaccatcatgtactccatcgctgccgctttg

SEQ ID NO: 2506 - DNA, 450 bp, Aspergillus oryzae
cttcacctcgccaatccaccccggaaaaacatggcatcccaccgcgccgatgccagttccctcctcgacaatcgcggctacaccggtccattagtccgcggtgtcaatccagccactctcttcgaaaaagccgtgcgcgaccgcatcacggactcctactactggaaggaacaatgtttcggattgaacgcagcgacgctgtgcgatcgcgcggttgagctgacctctattggaggaacgtacggcgtttccgagaagcccacaccattcctctgtctcgcattcaagatgctacaactaaacccggaccgggatatcgtattggagtacctgaatttcaccgacccggtcaacgacgaggaaggggagcagacggcggcggagcaggctgagaacggtgtggtcaaacaacgaggggatttcaagtacctgcgggctttggcggcgttt

SEQ ID NO: 2507 - DNA, 563 bp, Aspergillus oryzae
tcgacccacgcgttcggagcaggttcccatcgcggatcgtgtccagggttggttcaacaaagccaagtcttatttgcccacggctactccggtgatccccgctgctgtcgagaaggtggtcgaacagaagattcaagaaaagactgtcacccctttcaacctgtccaactggcaatcccttctggcgccatccgatgagcctaaggactggtttgtcttcatcaccggtggaaacaagacatgctttggacgttgtcaccaagcggagaaatcgtttaatgaatccgttctcctgttttctgctgacccgacctcgcccaacctgggttacctcgactgtgaatcgaacagggtcctatgctctgcttgggccgctggttctccgtctgtttcgtacttcaaggtccctgctcaggtcggcgaggagcgccctgccaccgctcaatacaatgtgtacttcaacgcgacaactgtaacgcccgagtccctttacaagattcactctgagaagacctatgagaagaggggcgcgtacgagggcttcttccacgctacggatagct

SEQ ID NO: 2508 - DNA, 472 bp, Aspergillus oryzae
gatgatggcgctctatgtcctccaaggcttctgcccacaaggattgcaatttccgacattgattgtgtatgcgctacctactatataaatacttgtcaactcatgcgctcgattgggctggtccctaagctaagcgcgctcatttcgatctaattatagcctactgtctatacgcgctcaattcgaaatctttgcttttgcctttgcccgtacctatgacacccaactatctactcagcacgcaccgatcctccttatcatattgcgccattgtttacgggagcgagtattagcttgttgactcacaatggaaagctcgtttccaaatgtcatgaacccatcggagaggagcgacataggggcgccgccgatggttgttcaacagtatgcaaggtatccacctacgttggaacctggattacagagcgcttcctctctaggcagtgctcgcagccgaatggcggcctccaaa

SEQ ID NO: 2509 - DNA, 441 bp, Aspergillus oryzae
ctatcccgtcgactgagccgttgcgatcatctatttctttagtctagtcgcttcagataatccatccaccatcgatttcatcaatccttttgtcgtgaacatgggtcgtaccgtcgaccaggaagttcacgcggcgttcgtcgagttccgcgccaaggaagacgataagtgtctctccgtccagtgtatctactgccagcagatccgcgccaaaaacacctcgcgtcagaagcagcacctgctcgagtgccccggtctccgtggccataccaacccccaggctcagtctcagactgctcagtccgcccccaatggcatcggtgctaccaatggctatcctcctactcccaatggcgctacagccactgcaccaggcgctggcccgggcccaggtgccctgcctactcccaacgggcccatgatgacgaacggcgtcaatcc

SEQ ID NO: 2510 - DNA, 380 bp, Aspergillus oryzae
  modified_base (298)..(298): n is a, c, g, or t
ctcttgttccctctcccgtaaatggccaaggtcgatgcagcggcggattctccgtccgccgcatcgccaaaccacagccttccccaaggccccgttgaggctcgctcgctatcctccattaccgctgtagcctcgaatcctccggcttatccgcggaatccgacgcagaagaaacttgatcctttggttttgtatattgtgagagtcccgggcagtaaagatgtctttctctccccgctgaaaccaccaacgaaagccagtgtttcggctgaggccatcaatgcgtccctctactatntgcatgtctcgacgcccgaggacgatgtcttgctccaggaatgtgagcaagagcgcgaggaagaagcgaaactgcggaggga

SEQ ID NO: 2511 - DNA, 494 bp, Aspergillus oryzae
gggtaatttcaaccagttgtataagatcgagcccacaacattccgtacgtggctccgtatactggcacggattcctaatgccgtactgtggctacttcgcttcccggaccttggtgaacagaacctcaaggaaacagccgttgcttgggctggagaggaaactgcctctcgcattatattcaccgatgttgcgcccaagaacacccacatctcgcgggccaagatattggatctcttcctggacactcccgaatgtaacgcacacacgaccgcgacggatgtcctgtggagtggtacacctctccttacccttcctcgctacaaatataagatgtgctctcgtatggcgagcagcatccttagcagcgccttacccgattccgacgatggtcaaaaagctcgcgaagagttgattgccacatctgatgaagattatgaagaaaaagccatccggttatgcctgagcttgaaattcgagcctggcagtgagggcc

SEQ ID NO: 2512 - DNA, 632 bp, Aspergillus oryzae
tcgacccacgcgtccgcggacgcgtgggcggacgcgtgggtgatcgctcaaaatggctcctaagtctcttttctacactcttttctcctccctcaccgttgccctcgcggcatccgtccctcaaaccgactatgaagtgatcgtcgtgggaggcggtcccgctggtctcactgcgcttagcggtttatcccgtgtaagacgcaagacggctctcttcgactcccatgagtatcgcaacgctgctacgcggaacatgcacgatgtgatcggcaatgatggcaccgtacccagtgaattccgcggtctggcccgcgagcagatctcccggtacgacaccgcaaccttcatcgacaagagagtcaacacaattgagactgtctctgatgaggccacgaacacctcatacttccgggcccaagacgccgatggcaaggcgtacaccgcccgcaaagtcgtcctgggcacgggtctcgtagacattctccccgacgtaccgggtctgcaggaagcctggggcaagggcgtgtactggtgcccgtggtgcgatggatatgagcaccgggaccagccattcggatcctgggtgcgctccggatgtcgtcggcagcgtgttggaagtatacacctgacac

SEQ ID NO: 2513 - DNA, 539 bp, Aspergillus oryzae
gtcctcagtccttagagctcttcagttgtcgtattcgctgaccctagtcaacaaaaacttatcttttctgatccccggatttttctgtacccggtcgacaattgacctcaagacaccatggctgccaactccatcaagcttttgactggtaacagtcatcctgagcttgcgaaccttgtggctgatcgcctcggcattgaactgaccaagatcatggtccttcaatactccaaccaggaaacgagcgtgaccattggtgaaagcgtacgagacgaggatgttttcattctgcaatctactaagcccaatgacataaatgacggtctgatggagctgctcattatgataaatgcctgcaagacagcttccgcgagacgtattacagctgttattcccaatttcccatatgctcgtcaagataagaaggacaagagccgtgcgcctatcactgcgaaacttatggccaacatgctccaaactgctggttgcaatcatgttatcactatggaccttcatgccagccagattcaaggcttttt

SEQ ID NO: 2514 - DNA, 560 bp, Aspergillus oryzae
cttctccttcttctgtctcctggctgtgaagtaccgtctcctgtccctcgaaatttataaagctaccagctggtctgtggttatcgctgccgtcatacccctctcttccacagcggaacacatcttccggcttctaacgataccaacgacaccagccgtgcgatcgtactgatatattacactctctgccaatatggtcgctaacgctttggcttatcatcctaccttggcgcactacttgcgctttgttgcaacgactgtgggtcgtgacaagatcctccgtacgctgcaatacttctcacgcttttatgcctggtacctgtatcgcacaaaccgcccgcagtcctctatcgacccctacaatgcagtcaagaagcagtttggaacaacaagaaagatcctgaggatcggaaagtttgccgagcacctcaaggctgcagccgttgcagctgacaacaagagccccgtcgaccctgttctccgctatctagctgtcggtcgccagctcggttacgccggatatctgactctggatactatcaccgttattgacgttatcg

SEQ ID NO: 2515 - DNA, 527 bp, Aspergillus oryzae
gacccatgtcctacgccaattgctgatatgagaatctcataccccacgtcctcttcttctgtgtggtcttgcccttcattgtgcttccgccttggcttgaatttccgacataatccccgtacgcaaagcatggacggcctcccgagtattacatcgggcacgcttactatacaacactaaagacaaagcaggtagtcgtcgaacagtccgcccactgagattctgatgagagcgttaggagtgcttttctgtaacgtatacccagtaatcattgcgaaagaaacgaaaaggggcatttattactcaccatgctctccaatgctgcgtcaccaagctgcttgggaacagcgtccgggaacatctgatagttgaggagcatctcatcaaatgtaggtagcagtagaatctccgtagcctgctccacatactgaagtgccgtctggggattctcgggatttacttgaacgacatcaaacgaggttccctcaatgatcccacaccgactcaattcttccaggcattctttg

SEQ ID NO: 2516 - DNA, 632 bp, Aspergillus oryzae
acccacgcgtccgcccaaatcccccagcaacagcttggtgtcccgatgaacagccccggccaacactcgcatcgccgcaaccagtcagctctccctggcttgggcttgggaccccctccagctccgtcctccggggcttcaggatattctgactacaatcagccgcagggcaaccagccaaagaacgacaatggtggtcacggccgtggtcgaggggggcctccgggtggtggccaccagcgacgccactcgcttgcactgcctgaagctaagaaggccgcagaactcgctcagcagaagagaacggcgtccgggttccagtttcctgcccccggtgctggagctgagtcatccgataatgcagcaggttcggacgataagtccaccgcttcgacgacaccgggccctcagggtctcggtcttcaccgggccggcaacattcgagctggcggtcatggtcggagccaatctatggctgtgggcagcaatcgaggctcgctttctggccgcggtgctggtggatttcaattcccattcgtcgaacgactcggagaacccacgccgtggaagcgcccatgctcgtacttcatccaggaacttcgatggcaactggcgtcaaccaaataaccaga

SEQ ID NO: 2517 - DNA, 422 bp, Aspergillus oryzae
  modified_base (146)..(147): n is a, c, g, or t
cggacgcgtgggtgagagtggatcttcctcaagtcgaccatcatgttggttggcaacatctatgtcattgcgggcatcgccgtcgtcggcggtgccctctttggctttgatatctcttccatgtcagctcagctgaatgaaaactnnttacaaatgttactttaaccaaggccctcagggtcctccattcaccgatgatgcagactgttccggccccgaatcactggttcaaggaggtatcaccgcatccatgtccgctggctcttggctgggcgccttgatttccggtccattgtctgatcgcattggccgaaagacttccatcatggccggttgctctctttggataattgggtccacgatcatgtgcgcctcccagaacattggcatgctcattgtgggccgtatcttcaacggtctct

SEQ ID NO: 2518 - DNA, 507 bp, Aspergillus oryzae
atttctttcctcctcttctcgacaccctcgaaaaccctacctcgagattaaggtcggtttctcgaccatcgatacatctgaaacctctttgaagtgcagtggaaaattacagcggagttgagcttaatattttgcagattaaattacccagtggaggagcttaggccccatttcaacccgtggtccattattcggcattcccacttaggaacactttctgtctcctgtcttcatcctttcctcatccattctcttcatacttcctccccctccctcctctcttctcttcttcttttctcctcctcacccctcaaaggctcgacatcgccctcaagtcctctttcctcctccaattccgattgatcttttaagccctggactcgtcgtccagttgtgctgtttttcttgctgtcggcctctatacttcccttcggctgctgtttccccatcacgacggggcgaccgaataatttcaccgggcctttcaacccgaaccacctccttttt

SEQ ID NO: 2519 - DNA, 452 bp, Aspergillus oryzae
tcgacccacgcgtccgcgttctttgggtcttctctgctatttactcgtcctttccctcccttcttctctttctcttctcctctctcggaagtctcgtctattctgattgtcacttattttcatcctctaccaattctttctttatttcttgtttaccgacccctcgtggctagctcccgaggttcctattctcggtacatctctcatactcctactggctcgaatttcctcgtcccattaaacaacaactttcgctatggcgcagatccgcggcaccgcgggatacaatctcggccaccaaaatcccttcgggggacctggtcgcgcagatgctacaagtgaccctagccccttggatgccattcgggaacagaccagcaagattgaggattggttggacacgttggcagaccccgttaaaccgtatctcccagccattggccgtttcctga

SEQ ID NO: 2520 - DNA, 542 bp, Aspergillus oryzae
  modified_base (51)..(51): n is a, c, g, or t
  modified_base (199)..(199): n is a, c, g, or t
tcgcgcgagggactgacatcgtcaatcacgtggaagagattcctccggatntgttggatccgtcgatcacggaaagcgtctttcacatggacaaccgtcgtgattcagtggcagaccttggggtagctgaccttgccatatccaaaactcctacgcaagagcatccgatgcagaccctgatgggcgtacaccgtccggnccagtcaaagcgcgagaggcatttacggaaagcagctttctatgcagcagactcaatctctatgtcagaccggctcgggaatactttcgcggaatttacatgccgagacttgcccattcaatgcgcaatgtgtacttttgactgcgcgcaagtccttgccgagtggattacaactgtgcaggagcgggtgggcccctacttggggctgctagggcgggacgaagttgacctggtccaagcttcgagggtcatgttgctagaggaggaggattgtaagctcctggagaagatcaaggagatactcgccagtgttgaaaccaagatgcaagcggaggtacaaacc

SEQ ID NO: 2521 - DNA, 519 bp, Aspergillus oryzae
cggacgcgtgggtcataccaccccccctctttcactatctctcttccatattcatagacttgtatcatttttacagtcgagtctttcctattatctcaccgatacaatgccacccacaggcatcccaagtgaaatgcgccctatgaccattaggtctgcggttgattgtttgtctcctgcggggtagaatcaattccacccccgaccatgacactcaaagaaatggcaacacaagaacagggctcccagggaacccaacagtctcacagcatgacgaagagagccgtcgtctcttccttcatctttcactttcctccgggacagcctaccaagccgtccgtagcgttgttcaaacggagcgagaaagtgagaacgtaccgtcatcaccttgcccctatctccggtagcatcgatcccgatgattccgaccctctcgcagcggcgtggcgtgaattgtgcgaagaaacctccctcaccgcatcggatctcagcttctggcgcactggcaagccattcacc

SEQ ID NO: 2522 - DNA, 604 bp, Aspergillus oryzae
  modified_base (307)..(307): n is a, c, g, or t
  modified_base (383)..(383): n is a, c, g, or t
tcgacccacgcgtccgcaaaaatgaccgaccccgttgccgatacccccgctatggatgaattcgcgcagactcgtggcggggatgacctattcgacgatgagattgtgcctgtggccgcggagtcagaggtcccgccggaagtccaagcattggaagagaacgtcgcatcgctatcgttagaaacccaaaccccgccgccccgtaccgaaactcctccacggtcgcgtggaggcgaaaggcgaggacgtggcagaggaaaaggacgcggtggcagacaagaatcgcaaaatccagcttcaaggcggngtgatggaggctcaagggcaaagtccgctgacgaggccgcccagaccgagaagagcagtgaggaacccagcaaggntgtgtctgctgaaacgacagaacaagcaaagaaggaagatgcaacttcagactccaaaccctccgccgaggctaacggtcaacgcgtgccagctgtgcgcggggatcggagtgctacaggtgggatcaagaagccaaaactcacagaggaggaactctctcaacgcatcgccgccgcgaaggagaacgctgctcgcaaggctgccgcccacgcccgtgctg

SEQ ID NO: 2523 - DNA, 505 bp, Aspergillus oryzae
tcgacccacgcgtccgcccacgcgtccgcccacgcgtccggctcgctttatatttgtctgagtccctcctttcttagtcttcttctgtctttatctgtagaggttgcaggcaactctcgtctcctaattaattcggaattgtgcaatactattctctgtttttgtttctatcagtcccctgtcttcagattgaacttgatatggataccggctcaaccacttcggtctcctaccatgtgtcctgcgcctccgatgcagacgagtcgaaatatctccaaagggttcaataccttcgttgggttcgactcgctctcgggatcatcatctttggcgtcgcggtctctatcatagggtgtgaagcagtccccttccagcattatcgagcgacatcagcatacggcaaggtcggattatatctctggcccttgaacttcgacatccgtccgaccgtcgcattgctgtcctgtggttgcataattgcctttctgaatttgacatacaccat

SEQ ID NO: 2524 - DNA, 482 bp, Aspergillus oryzae
cccgtatcagacctgctactttccagaacgcagactccaagctcttcacacgtcgtacgaataatgcccagccaagtgcttttgagaagaaactggtcgctgtgagggataaagaaagacaatcccagcttagagggactagacatgaaagaccatcggcggaaaccatcgattctatacggcaatggcagaggcattatcggaaggctttcccccagttcgtcttctatttcgacagtattccagaggatctgcgcagcaaatgctcgcgacaagttcttgcattgggagctcatgaggagaaattcttctcgcgtttagtaacacatgttgtcacgtcgcgccctatccctccggaaaccgacgtggcgagcccggcggaggtcaatacggaatcggtcgaccaagctgctgcagatggcactctgcagacggttaacccgtcattacttgagaaaaatcctgatgggcacctacatatg

SEQ ID NO: 2525 - DNA, 392 bp, Aspergillus oryzae
  modified_base (276)..(277): n is a, c, g, or t
gcggacgcgtgggcggacgcgtgggttggtcattaaaaaagtcagccgctatggcgggtgccgcggacggcccctgagagtgacgctgccgacacctttgacactattgaaaaatcaaggaaaaaaaaaagtccagtcatgcgttctggctcggaaagcgaacttgatggcacttgcaccaggagaaagtataccctgatcaatactacgtaccatatgtcgctatggctcgatgttaacacacagaaaggttaagccgcagccgtgtcagtcgtnnaggttgcctgatgatcgcgagcgtctcggaggtttttttacgggaatctttgaagcttaatgaaaaactctgcaatgttgtaccgacacgacatgatctgtcatgacgagctgtc

SEQ ID NO: 2526 - DNA, 491 bp, Aspergillus oryzae
cggacgcgtgggcggacgcgtgggcggacgcgtgggctgccatgtggactggcgacaatcaggcaacttgggaacatctggccatctctctgccgatggttctgaacaatggtatttccgggttccccttcgcaggagctgatgttggtggtttcttccataacccgagcaaggacctcctcacccgatggtatcaaactggcatttggtatcctttcttccgtgcgcacgcacatatagatactcgtcggcgtgaaccgtatttgattagcgagccccacaggtctatcatcgcacaggccattcgtttgagataccagctcttacctgcctggtacactgccttccacgaagcttcggtgaatggaacgccgatcgtgagaccccagttctatgttcatccttcggacgaagcaggctttgccatcgatgaccaactctacctgggctctactggtatccttacgaagccagtagtcaccgagggaaca

SEQ ID NO: 2527 - DNA, 550 bp, Aspergillus oryzae
acttggtacctcttaattactaccacaatggatattacagattacatcttcaaccagagagaagaggtcctcttggccggtgattacaatgcctaccgtgcccataccacccgtaaattgcacaaactccgcaagaagctcgggcagaccacacccaaaggccggaaatatactgccaaaccccccgtcagcgcagagaatgtcaacggcaatgttgcatatgtccacaccctactcctaagctcagaacgagcatgggcacaagcgctgcaaatgaagtcggcgcattctgcagatccgtcagcaaagggaatcacaggtgccgcccggcgtcatatcatctcgcgactgcataaatccgccggttatgcaaatgaacttgttctcttgttacaagaccaagcttctggcgctactgataatgatcttcttgaggcgcgtgcataccatgccacactctcgggggccctctcattggagaagcgaaaatgggagcagtgtatgcaggatttctccgtctctagggttatatatgcagcacttggtcaaa

SEQ ID NO: 2528 - DNA, 424 bp, Aspergillus oryzae
catagattaccaccggacctgagggcattaccatctccgtcctcaagaatcaaatgtggttccgagatgaatttaacccacgccgtggttccataacatccttctctatttgtccagcaccaccttccatctccactcggtgtattctgaaccgaagcgtttcacggtcaccatccagaatcaacgtgaggccctcgttggttgcttagcaggtaccttagtgctggtaggctgcctaactaagtgctaagtaccgcgttcttcactgtccgccatctactcagcggcatcagcggcagcttatgccttggatgctcagctttcggccttaaaacgccactcttttgcttttggatatatttctatggggacaagtcaatagggctgtcacccattcactcttccaattgccattgattcgttt

SEQ ID NO: 2529 - DNA, 535 bp, Aspergillus oryzae
cgcagattggttgtcccaacatggcgccaagcatgttgtgctcttagctaggagcggagatgggaaggaaaatgtaaaacgactgatacaaagggcagaaagcaaaggagtaaaaattctcgcccctcgttgcgatataagcaacgaggcagacgtcagggcagccatttctaaggttcagcgagaaatgccccctattcgaggtgttatctttggagccatggtcctacgggactgcttgtttgaaaagatgcaatatgacgattaccgcgctgtcatctccccaaaggtcgacggtctatggaatcttcatcacaccctcaaggaggcacaacaacatcttgacttctttgtcaatctatcatcggtttccggtgtcattggtaaccgagggcaagccgcatatgctgctgcaagtacattcatgagtgcctttgcgcgggcgcagcttgctggtggttatccctacaccaatatcgacctgggtcccgtcaaaggaatcggctacctcgcagagagaaagggaacggtcaac

SEQ ID NO: 2530 - DNA, 389 bp, Aspergillus oryzae
cgagcttcgtcttctccaagcgcagatctccacaaacccggccagttctggttcgtcttatctggccatgggaaatacaactattatgtgctcagtccatggtcctgcggaaggacgccgaggagatgcgaccggtggtgcagcaggttcttcgggagcagtggtggaagtcgatgtcaacgtcgctggattcgcgggagttgatcgcaagagaagggcgggaggaagcgacaagcaatcttcgcgcattgcaactactctacgggctgctttccagtctcatcttcacacctacctttatccgcacagtactatcagcatccatgtttcagtgctatccgccgatggctctctgcttgctgctgctatcaatgcttgcaccctagcac

SEQ ID NO: 2531 - DNA, 553 bp, Aspergillus oryzae
ggtgccacttgttagcttgcacacaacggtcccgagcagtcatttgcgtactgcaaaagcaaatcgaactcatacgggtctgtgatctctatctatctggaaaatccagtgtgtcgggagagctccattactgggtattcggtccgagacgttctgtttaggctgttggttatggcagccacgaacgatgcactgagctgcctgtatcactccagtagcacttagaaggttgatggaaatatacggagtttgctttgattatcataggtccgagcatgaggcggacgtacgtcttgcgaagggggttatacaaattacccaggccaaacaggcaagtcaaagatcatttcgtccaaaaaatacctcgcgatgcagctcttgcccctatggacgaaccaatggggctgcagaatactggcaggtcattaataggacacggcatggcatgccctctgccctctgccctctgcctgctcttaacctggctgtggctccttcatcacacttcaggaccacatcattccctggcattgcatgctttcccgcttgccaa

SEQ ID NO: 2532 - DNA, 467 bp, Aspergillus oryzae
tgcctgccttgcgtgtatctcaccgccatcgcagatttgctttttgtcgcgactccttgcctttgtattctttgtccgttaccttggttctgaagtaccaccattcaatccgcatttagccaatatggcccaccgtctcgtttcccaggtcgtcgttacgggcgcccgagtcttcggtcgagccttcgccgaggcctacaagcaggcatccgctaccggcaagtataaagcagtcaagggcaatggtggaagcagcttctcttcatccggtttgaccctcgatgaggcttgcaaaattcttaatgtgaagcctccccagggtggtgagaccaatttggaacatgtgatggaacgattcaagaagctgttcgatttgaatgacccacagaaggggggcagtttctaccttcagagcaagattcttcgtgcgcgggaaaggatagagatggaactccgccaggctgaac

SEQ ID NO: 2533 - DNA, 555 bp, Aspergillus oryzae
  modified_base (417)..(417): n is a, c, g, or t
gactagttctagatcgcagaccgtggtacatgtctgattgatgagttcgacaagatgaacgaccaagaccgtacctccatccacgaagccatggaacaacaaaccatctccatctccaaagccggtatcgtcaccacactgcaagcgcgctgcgccgttgttgcagcagccaaccccattgggggccgctataacagcactgcaccttttaacgccaacgtcgagctcaccgaacccattctctcccgtttcgacatcctctgcgttgtccgcgacctcgtggatcctgctgaagatgaacgcctcgccaacttcgtcgtcgaatcccaccatcgcgccaacccagcccgccccctgcgagacgaagaaggtaacctgatcgatagcgacggcaaccgcatcgacgaagaaggctancgcctggacagggagggtaaccgcctcccattcactccggaagaaatcgccgcccgcgaagctgccaaccgcaaaatcgaagaagaaaaggagggcgaaatcccccaggaactccttcgcaaatacatcctctatgcc

SEQ ID NO: 2534 - DNA, 434 bp, Aspergillus oryzae
cgtttctttgggcgaagaagagaagcaagcatggtgggaaaggccctgtgttccttcagcgtggctccgaagaagcgcaatatgaggagattcgggggaatgatgatgctgatgagaacgtcgatgatggtgaagaggatgaaagcggggacgaagacgatggtcctttcgagtccagtccccttctgcccatcttctcagcctctcactcagatacgcttcccgtttatgatatcacccatacgattcgcgcacttatcgcagctcgttgcgagaccacgttgtcctgggaccagttgcggtcgccccagatctctcagtttctggtaaaaccaatccagcaacagattagagcgtttcacttttctcgggctacgctatatgccttgttaactaactgtttgcaattcaacaaagaagtccatcttaacccc

SEQ ID NO: 2535 - DNA, 498 bp, Aspergillus oryzae
cccttagctctagttagttctgggggagaaaaaggaagaaagaagaaggccgtactccgtactcttcctattcttcattgcacattaacatttacgacttgactctctacattaatttccttcaattggcgacttccattgttgtctttttgcccaacctcatccgaatccaggtcatcatggcttttcgcttaccttttcaccgtctccccgaacagaatctgcgggtcatacctcgatatgcccaaagccctcgtaacatcagcctgggcacccgcaggaatcttacctcagctgcgctccgcagctgtgtcaggaacactaaaaggcctgcttcttgtataccacaggttctgggggccaatgtttttcggtctagttttgctccccttgggggctatcaggttcgcacttacgcggacaccatagttaaagttcctcagatggcagaatccatcaccgagggtactttgaaacagttctccaaacaggtcgggg

SEQ ID NO: 2536 - DNA, 513 bp, Aspergillus oryzae
aacacatcacccttggagtccttcttgagtcaagtgcaagttatcatggccaaccccacgagaaagattgtctgtttttcagactttgacggaacgattttcatgcaagacacgggccatgtcctcttcgataacctggggtgtggcgaggagcgccgtcagatgctcgatgagcagatcaagtccggcgaacgatcattccgggaagtctccgaggaaatgtgggggtcgttgcgggttccgttcgaggatgggtttgaagtgatgaaaaaggaactggagattgaccagggctttaaggagtttcaccaattctgcattgacaacggaatcattttcaatgtcatcagtgctggattgaagcccttctgcggaaagtgctggacactttcttaggcgaggatgaatcatcacaaatcggcattgtcgcaaacgacgcacagatcaaatccgacggctcggaatggaagccgatctggcgacacgaaaccgaacttggtcacgacaaggccc

SEQ ID NO: 2537 - DNA, 590 bp, Aspergillus oryzae
tcgacccacgcgtccgcccacgcgtccgcccgtggtgagatttccatatcatataaaattctctttgtgccacagtgcgttcgacatatccaagacctttggttttgtaaaaccagtttggtacctaaggagcgtcatcactctatctccataatggcgcttgataattactatcacaataaaatcgagagcatgaagctcgagattattcaagggcaagcggtgctacggagattggaagcacagcgtaatgattataactcgagggtgcggttacttcgggaggaactggggttactgcaacagcctggctcctacgtcggcgaggtggtcaaggtgatgagtaccaaaaaggtactcgtgaaagtacatccggaaggaaaatatgtggtggatattgcagatggtgtcgacatcagcaagctgactgtgggcaaacgagtcgccctactttccgactcctacaaattggaaaagatgctaccttcgtccgttgaccctcttgtgtctcttatgatggttgagaaggttcctgatagcacgtacgacatgatcggtggtctcgatcaacaaatcaggaaatcaaagaa

SEQ ID NO: 2538 - DNA, 584 bp, Aspergillus oryzae
tcgacccacgcgtccgctgacctacgaggccgtcaaccagaccactcagcggaatttaatattcgaccgacagtagagagctcctcctgtcgtctggactacaatggctgctccggaagttcatcacctcttccataaccccattgctgatcactcgttttcccctgacaagtcaacacttgcagttgctcgggacagcaatgtggagctctaccagaaagcgggtaacaagttctcattgaccgatgaactcaaaggccatgagaagattgtaacaggtgttgatattgctcctaacagtggtcggattgttacctgttcgcaggatcgcaatgcatatgtttgggagcgaacccccgctggctggaaaccgactttggtcctgcttcggatcaacagagctgcaacctttgtgaggtggtctccatccgaacaaaagtttgctgttggctcaggggcccgtgtgatcgcagtttgctactttgaggaagagaacgactggtggatctcgaaacacctgaagaagcctatacggagtaccatcactacactcgcttggcatccgaactctgttcttctggctg

SEQ ID NO: 2539 - DNA, 548 bp, Aspergillus oryzae
acaacggtggacgatgccctctactactacaccaccactacttcggacctctcagagggcgtgaacattccgcttcttcctgaggggcaaggaggccgtgcgtctggccttctttgtgcccaagcaagagacgacgacagcgatcttctggtcagcagtcttctttcagtagaccaggatgcaaacatctatctgcttcagcaggactcggcctccaaagcctggcagcggtatcctttctggttttcctctgagaaaaacgtcaaggaagtggaaggctatatgctccgattccaggtggttcaaaacaacgaccccgaggaccctaataacgatgacgagggagagatgattgtgggttcctggctgtatgtcacctgctctggtcttgtgcgatgttttatcaatggaaaacccgcaaccatgtccccggctggagactggtatcagaccgatgtcaagggggtgctgaacgtcttgctgcaaacggaggatgctacatgtcaccagttcgctgttcagcgctatcgtccagtggagatacccgg

SEQ ID NO: 2540 - DNA, 563 bp, Aspergillus oryzae
ctcactcattgctttcaaatactctttcatctttaattccgtttaactcaattccttctgccccccttgatctccgctcaacacaggactcgagagcgttcaaatctagaatgaaagctcgggtcactgtttgacttgccttgttcctcagttttcctcttgactttcatccataacttctactcatagacacccttgctaagcttatcgtcagcatgggaccccatacttccggggttgattctcccaaaaaccatcgcgtaggagaacattatggtacacacaacccggttcccaccatccaaaagttcctagagcacttggaaaaagataagcaggaccgtaaagcccatgaggaggctgtcactgcgagggaaaaggaagaagatgcccgcggagaggcgaagcctcataagccgcggaagagacctggcaaaggtaaaacccgtatggttacggacccgacaactggtcgcgagatagaggttgaagatcaggatgcggattcgatggaagtggtgaagaatcccaagttggtagttcccaatgccaaccttggaaag

SEQ ID NO: 2541 - DNA, 488 bp, Aspergillus oryzae
gtcttctcagcgtcggtggcgggagcggcaacagaagctccggcgcaggagaacactgccccggctactgcttaaatgacaagtcgttctcaaccagaacgaatcaatgatctcgacatacccactgtatcgtcgggatttgttggaggaagagaaaagaccttcgtgcggatgataacttcatactctgccgtcgagaagcgtttttacaaaagtcaaaaaaaggtaaaaaagacaacgaggccaactataaaacgcaaaagctatgaaaatattatccccgttcgaagcggtcataggggacgaatttatcatgaggatgaggcattcattatttcctattttttttttgcgcacgaactgccgcgaggcactcgtgcgactggggcgacgagagacaccgtaatgtgtggttttcacggagacgtgaccttttgctaacgactattgcctttctgctatcctgtatcttagcaaccatttagttt

SEQ ID NO: 2542 - DNA, 483 bp, Aspergillus oryzae
cggacgcgtgggttaagacagcggatgctctttcagcaacagcaacagcaacaacagcaacggcatggagggctccccgtgtcaatgccgaatggtacgcagccattgaatgctgctcagctggcagccatgcagaatcctgggatgcgtccggtcatctcccaaatgcaacttcagcagatgcctcatggacagccgcagaatatacaacaacagcagcattttctggctatgcaagcccagcaggcccaacaggcccaacagcagcaagcccagcaagcacaccaggcccaacaacaagtgcaacagcagacgcctcaaccaggccagcagactccacagcagcgcccagctcctcaacctcaaaatgtacatgatgcccaaagtgtcacccctcaaccgcagccgatgccgccgccgcatcagggaagtgccaccccgcagcccacccctcagcaacacctacctacgtctcagccgccg

SEQ ID NO: 2543 - DNA, 511 bp, Aspergillus oryzae
tcattattaaacgtccacctgcccatcagtggcaggcttctaataattatcttcacccactacgtccaacatggcttctaccgcagaaacaactcccctgctcccccagcaccaacaacaacccgcaacatctaatacgtcaccgcgagcaaaccggcggacagtcaccttcaaccctctcactacagtcagcacatatcacgataccacctctacaaacgctccggtgaagaccctatattccggtccttcctcatttccgagttcccaggaaaccccgcaacgaccgactggcctgtccgcattgaacagcaagcttcgtcgccggaatagccatggagcgccctatagtgcagccccctcaatgcctgcggcacccaaagtcggcccacaaagaacgacaaagaaagctcagaaattgaaacttctccctgatccgatcaccgaggaggctgctgaaggcgaattcccatcagacgtctactcgcaaatcgcacggattaaggaaccc

SEQ ID NO: 2544 - DNA, 503 bp, Aspergillus oryzae
gaagcttcctcgcctgcggttgacccctcttttgaccctcagttggagagtctaaaccgcgactttgaagcagtcgctcggtccatgaatagtggcagtacccccgactctggtttcttctcgagcagcgtcgacaacgcgagtaacgcgagtaaccaatcaaatatgaccaacgtgcctcgtcagtcaatgtctcccgctatgtctcacactcctagtcaggtcaatggtgctgggatcgctggcatgaatgcggggattcctctgaatgctggccaccaaatggatctccagcgctgaggaggtcatgcgacgctctgcctcggaaggcacctctccaagcttgcaacaagtcaacggcgagatctccggtagggttcccaatcaacatctgcacatgtagccactgacaaaacccacagctgcccgtatcaccgagctagagcgtgccctggccagagaaaagcgcctgaacgaggtcttgcgaaacgaacaggaagaaa

SEQ ID NO: 2545 - DNA, 496 bp, Aspergillus oryzae
ctaatcctcctgattcaaacatattcatatcatcctccagggaactgttcatgggttttcagatttcatgatgcacggctcgacgaattctgaacgcttgccacaacactcttgaccacctcatttcagccgagtaagacaggtcaccccacagctaagtttgatctgcaagaatcgagatttaatccaggctgagctgaagcgtggagcccgcttcgtcatggcagaccagtcagcttccgccagcttcaggatacggtacctagcaacagtactattcgactgtctgcgcgcctatcaaggtttcctgcccaattacatgacgtgtttgtgaattgtcggtgaaaatgctatttctacattttcttatacactactcaagggtccgctgtctcgaccctacagtgtgtttttgtcgaaatcattgcgactttcccgatggcaatcttcacatcatttgagcacgaaacggccacgcaacagccttcacagttaa

SEQ ID NO: 2546 - DNA, 527 bp, Aspergillus oryzae
ccaccggagaggacgacgggaggtactcggagaccgtccgtctggaactcaccgagggactatattcggagctcggcgggttttgtcgtaattctctttccgggatttgggagcgggtatgatcgaaactcgtcttccagaccggcagctgcttccgtgccttatttcgccaggcctggtcgcggaccggcgcgccaaaacacagcaaacacagacacaatacccgcgcaatggtcgtcaacggctgatcaaagctctggtcatcattcagatcgatctccatgtttggctcacacaggtggtagtacaacgtgcccggctcatcgtaagggacacgtaacagaaccaatgccaatccgttcgtcaaatatgagtactcgagaccttcctggatcatgacatggtactcttgagttatagccgatccggtcagccaggctgcattatacgacaatttcgcggattcctccgtggggatggaattgggctggaccacctcttcccaaaagttcatctctcgcaagccg

SEQ ID NO: 2547 - DNA, 470 bp, Aspergillus oryzae
tcgacccacgcgtccgggtgatcagagccagctgagctggtctgagatcccgctccccctccttacaacttccctgccaggcaggtcgtctcgctgtgcctcgtcgccaaaggtacccgctcgtcgggcctcgcgtgaggaaacggggacgcccgcccaccccagccgcgcttatacccgccgaggccgtgaaacgtctcggtggtgcggtctggggtgaccgaagcccggtggccgtttggtcgccggcaccgttggggtctgtggatcgttggccgctggccatcatcgaaaagcagattccaggggggagccgccctgcggtagccgccgttcgtcggcgtgtccgcagggtctggtccccccacccgagggccgtatgccgcaggcctgtctccgccctttggggtggtcacgacgggaacaaccttgcgtgcggaccggatcctgaggggttccagtgggggcaa

SEQ ID NO: 2548 - DNA, 572 bp, Aspergillus oryzae
tcgacccacgcgtccgcggacgcgtgggcggacgcgtgggctgggcaacaacgacggcaagaacctgagctcccagaagcaattccgctccaaggagatctccaagtccaacgtggtggatgacatggttgcggccaaccacatcctgtacgagaaggatgagcatccggaccacaccgtggtgatcaagtacatgccggccgtgggtgacaacaagcgtgctctggatgagtactacgccgagatcttcatgggcggtcaccagaccatcagcttgttcaacatctgcgaggactccttgctggcttcccctctgatcatcgacttggttgtgcttgccgagatgatgacccgcgtcagctggaaggcggaggaggctgccgactacaagggcttccacagtgtgctcagcgtcctgagctacatgctcaaggctcctctgactcccccgggcaccccggttgtcaacgcgctcaacaagcagcgcaatgcgttgaccaacatcttccgtgcttgcgttggcctacagccggaatcggatatgactttggagcacaagctgttctaggtat

SEQ ID NO: 2549 - DNA, 542 bp, Aspergillus oryzae
ttccaaagtaaacatcgacacgtcccttaaagacgaaaaaaatgacatgctcaacggcgacggtcctaacatcaccgttgtcgctaaagaagccccaattaccgtgaaacggattcccgcgactcacatcaacgaagccatagacaaccccggcgtcgcgcgcgcagatgtcgcagtatccattgagaagccctccggagaccaagaatgggccaataaggtccggggatacacccctctccagcagcacgtcctattctgggaccgtgacggtgatgggatgattttcccatgggacacctatattggatttcgtgaactgggcttcaatatcctcttttcattcctggccgtgttgatcatcaatattaacttttcgtacccgactcgactggcatatagctggctcccagatccgtggtttcgagtttatgtacggagcgtacacaaggctaagcacggctcggacagtggtacttatgaccctgaaggccgattcatcccgcagcttttcgagaatctgtttgcgaaatgggactcgg

SEQ ID NO: 2550 - DNA, 535 bp, Aspergillus oryzae
ctgcaacccagagggcattggtgtggctttatccgattctttgacaaatccgcattcgtgaagtcgtctggtaatcggggtcaccggtcactgttccttctgtcgccatggagaaataccagaagatcgaaaagatcggagaagggacttatggtgtcgtctacaaagctcgtgagcttgctcatcccaaccggattgtcgccttaaagaaggtccgattagagacagacgatgaaggggtccctagtacaactattcgtgaaatatccttgctcaaagagatgaaccaccctaatatcgttagattgttcaacatccacacagagggttataaactctaccttgtctttgaacatctagactccgatctcaagaaatacatggacgctcttcccgtgaacgatggcggacgcggtagatctctcccgaatggtttaagcatggatatggggctaggggaagccatgatcaaaaagttcatgtctcaactcatcgaaggcatttacttctgccacagtcgtcgggttcttcatcg

SEQ ID NO: 2551 - DNA, 232 bp, Aspergillus oryzae
cgcgtggttgtgcttcgcggcaacgatgcgaacgagcagaagcgatatgactttgaggcgcgtaacgcactggaagcgatggagattgtggatgaaatcaagaagaacatggcgcattatcggatttagcctcgttccaattcgttcggagataatctaaggacgacgtcgagacgacgattgatattgtggaacgatatatcatttgctgcatagagacaggcaatccccc

SEQ ID NO: 2552 - DNA, 554 bp, Aspergillus oryzae
tcgacccacgcgtccgacggccattgattccggactgggcgtcgctcctcccaccatcgttttgttgtttgtcttgattgaattcccatctttcgttgatcgacccctttatcacaatggcctccactactgagactgcctcccccattggcattgccaaccttcccaactagcgtcacaagattgtcgctaagcggggtgcggctttcactattatggttgctggagagtctggcttgggaaagaccacgtttatcaacaccttgttctcgacgaccatcaagaactatgccgaccacaagcgtcgtcaccagaagcagattgaccgaactgttgagatcgagatcactaaggccgaattggaggagaagttcttcaaagttcgcctgaccgtcatcgatacccccggattcggagactacgtcaacaaccgcgattcctggcaacccatcattgagttcctcgacgatcagcatgagtcctacatgttgcaagagcaacagccccgccgcacagataagatcgatatgcgtgtgcatgcctgcctgtatttt

SEQ ID NO: 2553 - DNA, 515 bp, Aspergillus oryzae
cccaagatacaaaatgagcggtcctaaggctgtcgctgagaatatgctctggggaggtcgattcacccagggcctcgaccccctcatggttcaatacaaccagtctctgccctatgaccgcatcttctggaaacaagacattgccggctcaattgcttttgctcgagctaacgtgaagactggtatcctcacgcagcaagagttctccgagattgagcgtggcttcaagcagattgccgaagaatggagcaccaatacattcgccgtcaaggagaacgacgaagatattcacaccgcaaatgagcgtcgactatcagaaatcattggcaaggagattggaggcaagctgcacaccggtcggtcccgcaacgaacaagttgcgactgacatgcggttgtggttgcgggatgagctgcgcaggctggacagtatcctgtgcgacctcattaaggtctcgatctctcgtgcagaggccgagctcgactacctcatgccaggttatacccatttgcaaa

SEQ ID NO: 2554 - DNA, 566 bp, Aspergillus oryzae
aataatatcaaggaagcaaaggacggattggacttctacttcagccagagaagccatgcagagaagatggttgagttcctttcttcagttgtgcctgtcaaggtgaagaaggcatcagagcttatctctatggacattcatacatcgacgaagtcctacaagttctcctactcggtggaaatagttcctatctgcaaggatgacctcgttgctattcctatcaaattagcccggtcgataggtaatatctcgccactgacactatgctaccggatcggaactacaattcaactcttggatcccaacacacttcagacagccgaggttcctggcgcgacctactggagatcgccgttcaagaacctcgcggatgtcactgagttggtggagttcatcgtcatggatatcgagccggtaggcagatcaaacgggcgatttcaccttgccgaggcaactgttgcccgtgcgtcggacttgggctcgaatgaccagacctactttacccgtactcatctaggcggaattctccatgttggagactctgttctaggctaccatctgactgg

SEQ ID NO: 2555 - DNA, 568 bp, Aspergillus oryzae
tcgacccacgcgtccggttggtaacctctgctatttagaggtgataaagcagcctgaatgcacttaatatctacttaggtactattcgttgtcacatcggactcagtctcctggttcgataacccttcgttataattagcatcatgaatacccgtcaggttattgatgaatccgtggggccattttccctttccgcgacctttaataatgacaacagctgtttttctgttggccttgatacgggattctgtgtctttaatgccgacccttgtgagctgaaagtatcaagagacttcaatgcaggcatcggtgtcgcggtgatgctaggccagacaaactacttagccatcgtcggtggaggaaggcaacctaagtttccccaaaacaagctggctatctgggatgatgcaaaacagaaggcggtcattactctagagttccgcacctctgtactgggtgtccggttgtcaaagtcgcgaattgtcgtcgctttactgaatagcatccacatcttcgcattttcaaatccgccgcaaaagctgtctgtttttgaaacaacagataaccc

SEQ ID NO: 2556 - DNA, 469 bp, Aspergillus oryzae
  modified_base (206)..(206): n is a, c, g, or t
  modified_base (342)..(342): n is a, c, g, or t
cggacgcgtgggcgggcgcttgttcgagataagactccctttggatcgatcttaggcccggagatttctcctgaattttcgaacgtgtgaacagcttgtttctagcacttgcagcttttcacgcttatcttccggaagcttcgatcgccgcagcaaaaaaaagttttgggtcttgcggggaaaacaatctacgtgtccattgaatnttagttgtctatcttacagatttcagccatttcacaccagtttcacgatgtctacagccgtcgtacaggccgacgatcttatggagccttcgctccagtcgattgtcagccaggataccctccgctggatcttcgntggtggtaaaggaggtgttggtaaaacaactacctcctgttctcttgcgattcagctggccaaagctcgcaaatcggttctactcatctcgaccgatcccgcacacaacctcagtgacgcctttggg

SEQ ID NO: 2557 - DNA, 561 bp, Aspergillus oryzae
tcttctcctcactgcttctagtcctacgtttacttttccatgtggacccctcatatgccttatttggattgctccggacggagtctcgcataaatggcggaagttgaaaatggctctgcgaatgagccaacccagacacctccggctctgtcgcaggcagacaacaaagagcatggggtagatgtttccacgcactccgacgcctccgatgctgtcgaagaggacaagcccacgctcccccaggatatggaacgccaaaagatcgatgtcaatgattcacaaggtcacaaggaagtacaaagcgaattggactctattgaacctactgagcctatagaaacatcttcaggcccttcgaaggacgctgtcgagcccccagcacccgaagataagccatcgctccagtcggaggccaaggatgaaaacacagacaacacccaagatggtagccaggaagttagtcccgaacagggttctcccgccgagaatccagatagagactctgtaccgccccaagatgtacctgttccggaccctcgcgtgcgctcagattcgaggtca

SEQ ID NO: 2558 - DNA, 578 bp, Aspergillus oryzae
tggtgaaaagtttggaaagtctgctggcaacgctatctggcttgacaaggatatgacctctacgttcgagctgtatcagttttttgttcggactccggatgatgttgtcgagcgctaccttaaaatgtttacctttcttcccctacctgagattgccaagctcatggaagagcaaaacaaagacccatccaaacgggttgctcagcacgctctggctgcagagttcgtggagctaatccacggcaaacaagaggcggatgcagttgctctccaacatcgtcaattgttccgctcacggtcgtctacagctgagcctactcccctgcagaaaaactccagtccacctgccggccacgcccagtcaccaacatcgggtttcgtaaatcctcagtcaggaaaccagtatgctcctcaaactaatttttcgaacatgccaagcatccaggttaccctccccgagtctctagtttatggccaaaacttccacaagatcctgtggtctgctggcctggtttcttctaaaggtgaaggccatcgcatcgttacgaacaaaggggcttacgtaggaagccggccgg

SEQ ID NO: 2559 - DNA, 587 bp, Aspergillus oryzae
tgtctatcttgtcgagcctaccccggccaaccttcaaatgatcaccaacgacttagctcgcggactctatacaccagcctacgtgaacttcctatcgtccgtgcctcggccactgctcgaagattttgcttctcagatagcgacaacaggaacatcggaacatattgcgcaagtctatgaccaatatcttaatttcatcgtcgcagaaccggaccttttcagcttgggcttggggcatgatgcctactggaagattaacagtgcgcagacaagtgatgaggacctagacgccatcatcgataagattgtgagcggtctattcagtgttagcgtcactatgggggcgattcctatcatccgatgccctaaaggcggggcagcagagctaatagctacgaaactcgatcgcaaactccgcgatcatatcctcaattcgaaggataatcttttctcaaccaacaagaaatctactcctggagttcccacgtcacgacctgtgctggtcattgtcgaccgtaatgtggacttggttcccatgctttctcattcgtggacataccagtcgttggtccaagatgtccttcaaa

SEQ ID NO: 2560 - DNA, 553 bp, Aspergillus oryzae
gaatcaatcggcgacatcacagccacatgcgacgtttcccaagtagaagtgcaggggcccgacttcgattcgcgcattagaggcggtgtcctcggcaacggtctcacctgtctcctcgccggcctatgtaccatcacgcccatgtccgtgttcgcccaaaacaacggtgtcatcgctctgaccaaatgcgcaaaccgcaaggccggatactgctgctgcttcttcctcgtgatcatgggcatcttcgccaagttcgctgccgcgcttgtcgcaatccctagctctgtcctcggcggtatgaccacattcctcttctcgtccgtcgctgtctccggtatccgtattatttcctccatcccgttcacgcgtcgcaaccgtttcatcctcacggcttctttcgccattggtatggctgccacgttggtgccggactggttcgactatttctttacttacagcggtgataaccacgccctgcaggggctactggatgctgtgacgctcgttatgaccaacggtttcgcagttaccgcagtgttggggctgatcctca

SEQ ID NO: 2561 - DNA, 577 bp, Aspergillus oryzae
tcaggccttcttaaaggccatggcgactaatatctcgacggggagtttgatcttgctccaattgctcgtgctcattccgctcgcttggattcgaaacatctctaagctgggtccggcagcgctgctttccgatgtgttcattctcctgggactaggatatatctactggtacgacgttgcgactctcgtaacgcgaccgggagcagacccaaccgtcgagctattcaacccgcactcattcacgctgaccatcggttcgtcgattttcaccttcgaaggtatcggtctcgtattgccaatccagtcctcaatgaggaagccgcaacatttcgaccgtcttctatacatcgtcatggcgatcatcactacactcttcacagcagtgggcgcattatcttatgctacattcggtaaccggactcagacagagatcttcagcaatttcccccaaacagacagacttatcaacacgatccaatttctttactcccttgcaatcctagtgggcgctccaattcaactgtttccagctacccgtatcatggagggcaagctctttgggcacaagtccgggaaa

SEQ ID NO: 2562 - DNA, 545 bp, Aspergillus oryzae
cgacacgacacgacacgggctttgccacatatcgtcaatatggttatgaggtcactcaagttttgggcgtccagccttctctgcgcgacactccttagggaatgtcacgctcaacaatctgatgccaacattggctccgagcttggtgggaagctgtcaagtggtgctagcatttacttccccggaagtgatctgttcaataatgcgactgcgcggtggtcgcagtggggcaagccgaatattagtgttgttgtggaggttgcgaacaagtgggatgttgctgagacggtgaaatatgccaccaagcacgatgtacctttcattgccatcaacggtggccatggaaacatcgaaaccctggaaaatgtccaccagggaattgagatttggatgcacaagctcaacaccgttgacatctcggacgacacagctaccttcggtggtggtatcctctcgcatcaggttatcgagtccttatgggctgccggtaaacagacagtgaccggtgtctgtgactgcactggattcctaggaccggctctcgg

SEQ ID NO: 2563 - DNA, 569 bp, Aspergillus oryzae
tcttttctttgtatatgctcaatttcaactgcgagtcacagtatggctcccatccgtcgatacctcagaatcagcaagtatactatcctcgaatgtcggatctacctagaaaacccatcagacacgcgatggctcctcgacagccgggatcccgtcctcccccgaatattcggtgctattcgcccgctagttctacctaaattacgcgaggagaacgagaggctctttgctcggaagaaagggaaaccagtgaaagacgtgatagctgaagaggactttgaggtttcgttattcctccgcgaatcccgaacacgccactcactcctcacgcgacacaaggagttcgacgaacccgataacgcatcgagcagaaaagaaggagcacaaaatccaccccgacctgcggaaagttcaagcggagttgccgatgctggtatcttagttgagagtgatagcgaatctaatatcgatctacgcgatatccctcaagccactgcggaggagaacgataaaaagggcaaacgtcatcgagatgcagatgaagcagttgacaccacagctaattcccg

SEQ ID NO: 2564 - DNA, 548 bp, Aspergillus oryzae
ctgacattctttctcctgctttcttattcggtatttctgtgaccatcacgcctacagacggttatcctcaccaccatgtcgccatcgcgtgaagaacaggcattgcatcaactgcagtcgcaacaatccaaactactggacaaaatcgacgaactccgcgctatcggagtggggggtcttgttgaactcccacaagtgattgtctgtggcaaccagtccagtgggaagagttcggtgctcgaggcgatttcgcgagtacgctttccggccaagagtaatgtctgcacgcgatttgcgaccgaggtgattcttcgtcgcagcccacaaccaaagatcaaggtctcgatcgaaccgggagagtcgagaacaaacgaagcagaacgtcaaaaactccgtgagttcgcgccccaggcgttttccagcgacggggacctcccgaagctcatcgaacaggcgaaagaatgtatgggcattagcaatgaggacacagtcaactcagggtttagcgacgacgttctgaaggtcgcgatttccggtcccgataaacc

SEQ ID NO: 2565 - DNA, 465 bp, Aspergillus oryzae
gctggttacagtacgctggattttctattacctcgatcagtcgttcctcctccactccaaggaatacccagttatacgcgagatgggcttgatccagttccggcaacatatattcaatgacacagtcttacagccacaagtgctacagggcgcctgcgacctggtcgaagcggaccgtgatgaagggcgcagcatatcggccgactcatctttgcttcggaacgctattgaatttttccacggccttgatgtttatactactggctttgaacccctccttgtctctgagtcgaagaagttctttgcatcatgggctcagcatgaagcctcaggatatcttgccactttcgcggaaaacagtcaccgcttgattgaacaagaagtagacaggtgtacattgttctctttaaatcggagcacaaaacagaagttgtctgaactattggatcaggagttagtggcaga

SEQ ID NO: 2566 - DNA, 584 bp, Aspergillus oryzae
cttttgcctcctccctgaaattgtcttcgtattactgccatccgcaattcttgaacaagaatggcatcccgtagcgaaccaccacagaaacgcccccgggaggaaactccaccggagagtccaccaccacaagttgaaccggaacctcaacctgaacctcaaccgcaagctgagccggaacccgaacaggaacagcaaccagaaatcccacagggacatattcagggcatcatcgagcctgataccttttcggatgccgacggtgattccttatatgcgggatctctgggagatgccagctataccaccagtattacgtcgagtgctatgaattatcaatatgagaatggtcgcagatatcattcgtaccatgagggtgaatacattctgcctaatgatgaacaagaacaagaccgtctggacttgagccaccacatctatcggatgattttgaaaggagagctgcacgcggcccctattaagaaccccgctcgggtcctggatattggtaccggaactggaatctgggccattgattttgcagacgaacatcccgaatccgaagtgattggaaacgatctcag

SEQ ID NO: 2567 - DNA, 550 bp, Aspergillus oryzae
tcgagccgcaaatcaagtccgtcgatatgacggaggatatgcagcaggaagctgtcgaagttgcgatcgaggcaatggagaagtaccacattgagaaggacattgctccagtacatcaagcgagagtttgactcgcgcaaaggagctacatggcattgtgtcgtagggaggaatttcggaagctttgttacacacgagacgaaacacttcatctacttctacctcggacactgcgccattctcctcttcaagacccaataaactcgccctgacatacatggttggaaataaaaagaggaccgagtccttgggcgattgggccttgactgccaattgggacttaccgccataaaatagacgccggcgacgtatctatctaaaactcgcgacacgatggacaggcccctgagatcaggcgtcatggcaattggttgctgcataatcttcccttcccttcagcggtatttatttacaatttcgactcttacatgattcaatatggtcaccattgaatcttgatgtgagctagattggtcgtaccaagcagatt

SEQ ID NO: 2568 - DNA, 624 bp, Aspergillus oryzae
  modified_base (355)..(355): n is a, c, g, or t
tcgacccacgcgtccggtacgcttcattcaatagacctccttctgttttacagtcatcatggcacaggaacctccgaggaagcagaaggtagtcattgtaggtgccggtccggtcggatctctcgcagccctatatgctgccgctagaggtgatgatgttgaagtgtatgaactacgtggagaccttcgtgatcctactacgattcctttgaatttcaccaagtctatcaatctcgctctgtccgaacgaggtatctcgtccctcaagggctcaaatcgagatggcatgattgagaagattctcaacgatgcaattccgatgcatggtcgtatgatccacggcagagacgatggnaagctctgggaagctgcgcaggcatacgacgttcatggtcaagccatcaactcagtagacaggagcacgctgaacaatgccctacttgatgagctggagcggacaccgaatgtcaaactgtttttcaatcataaactaacaggagctgatttccaatcaaaccgagcatggttcgaacgtcgagccccaggggatactccccttcctggctcctccaaccgtgtccctgagatcgaagtaagctttgactacatgatcggcgcagatgg

SEQ ID NO: 2569 - DNA, 477 bp, Aspergillus oryzae
gaaaaggaggcggaggcagaccatgaccgtgtctcaatcgcaccggatgttcctggcgaggaccatgtacacttcgcacgcgacgctgatccggaaaaggccgacgggtttctccaccccccagctcctgccgcttttggctccgagcgtgcatccgatctgggagttggccgccaggccgccatgtctccagcccgcagcgattcgcttgatcccggcgcaccgatgaatggatcgatgcattatacgaattggcttcgggagcgacctcagatgccatacctacactatctccgggtctggaacggtcgaatatcccacgacaactggatgcgagtggccgtgcgcccgtttatcctatttgcctacccggccgtgctgtggtcggcagttgtttatgcactctcggtcggatggttaattgtcctgtccgagtccgtcgcaaaagtctatgaaacgcgagacacctacaatttc

SEQ ID NO: 2570 - DNA, 540 bp, Aspergillus oryzae
ctactctaagaatgactctaggagtgaatttagctagactggcttgggagggttccataccagtgcagaatactatcttttgacatgggaggcgtaggaccggatgcccatggacggagacatattttccatatcgaagtccaattgcagacactgcgtttctttactactcaattgttactactatagatactttctgcacagggtgttagtggccaatgagtgacccgcaaactggctttgatcagccattcttcatcgttacttgggttgagactggcttggcactagttctactttctgctagatgctttacatcctggaagatcgtccaatatactggacctgacctaattctgacgataatcacttttacctttggcattgcaagcatggtcatggccactgtgggagcagcatacggcctcggaactccctcagctaccctgacaaacaataacgacaaggatgcactgttgttcggctggattaatcagttcttggctctcattgctataggccttgggaaggttgcccttg

SEQ ID NO: 2571 - DNA, 516 bp, Aspergillus oryzae
ggagcaagaagactaataggagaaatattgttgagaatgctcttttccgctctcgcgaagtaatcgaggatgcgttgaatgggcctattgccgccattgatacgcgcgatgatttactcgaggcaatcagagatactcggctatcagaccccgagagctggcgcacagtcattcagagtgcacccttgactgagaggaagtacctcagtcaagtccatgagctcctcgttgacctggctcacgagaaccatgtcaacgacggtgcggacaacttcagcaacgcttttatatacaattatcgtacaggttcatgtgtttattatgatctaggacgcggcaagtaaggtacagagtcatgtgttatgtatcatgcatatttcctttgttccttgttcttttgtgcctgaaccaacttattcacttttggtttttatttgacatattattggcattggtgttggatgttttatctcctctcagcattttatagcgaactatacccgcaaatataccatg

SEQ ID NO: 2572 - DNA, 573 bp, Aspergillus oryzae
gtacctactggtactactagtacgaatcaattctcacatccttgcaaccatcggtacatcccttccagtgatttctttcaggaattctggatccggtttatatagcatgacatgaaaatgttcgaccgcatgcactgacttgagagacttccagttcttgaaccagatgacctgcaataatggtcagtcgtcacttgaccatgggacggaatcacgaaggccgcagacatcacacccaccgcacgcacgggatacatactttctctgatggtactcgcgagcaaaatgtcttcttcacatagttatcaatctcttgcctggcccgcggtgtcagatcgtcggtcaccggatcatcttccagctcgaacttggtccacactactaaatggacgatatctttctcgattccgtacggccagtcgttgtgcaaaattcgaatatcctctacatataatatcagcgactcggttcacagagatctatatcgcgcgggattgaacacgaactcaccgtcaaactcaaatgggcgccctctgggcttaaggtcgtcaggactgccttctccccagcgta

SEQ ID NO: 2573 - DNA, 650 bp, Aspergillus oryzae
  modified_base (67)..(67): n is a, c, g, or t
tcgacccacgcgtccgcagaaccatccaaaatgcctgaaaggtatggcgattaccagtccgtcatcnatggccgtggggccatagaaagtgttcagccgaatgtcactacggaccctcgtcttctcgaggaacaggcgcgcaaggcactaggtgtccgatctttcaattatgttgctgggggagccggtgaaaaggctaccatggacagcaatcggctggcgtttcgtcaatggaaaattattccacgaatgctgagacaggtggataatcaggacctttcggtagagctctttggtcaaaagtacccgaacccggtcttgatggcacccgtcggtgtccagagcttgttccatgaggataaagagacgggtctagccgaatcatgtgcagaagtcggagtcccgtatacccttagtacagccagcactagttccattgaagaggtggccgagacaaatggggacggaaaacgatggtttcaactctactggccccaagatgatgacgtcacgctctcactactgaagcgtgctaaagacaatggcttttctgttctcgtagtcactttggatacttggtcccttgcctggcgaccggccgatttggacaatgcttatgtcccatttatcaagggcgttggcacccaaat

SEQ ID NO: 2574 - DNA, 593 bp, Aspergillus oryzae
tcgacccacgcgtccgcttcctgcttgaagcataccaactttttgacttcggtcagccattcttttaccaaaccaactacccacgctctcttttagccaaccgctaaacaacaccaaataaatcaaccttgacggttatattatctcgtgaaaaaaacacatcctacagtcaaaatgcgtttctctgccaccaccattgctctcttcgccggccttgctgccgccatccccaacggcgaggtccacaccgtctaccagaccgaggatgtgaccatcacctcttgcgctcccaccgtcaccgactgccccggccgtcagacctccactcctgagggtgttgagcctgtcaccactggccccgctgtcactgagactcccattgctcagacctcctctgctgaggttcctcctgttgccgagacctcctctgctgaggtcccccccgctgtccctaccagcagctctcctgttatccctggagttcccagcagcggtgttccccctgttccctccagcagcagccccgtcatccctcagcctcctaagcagcctagccagggcacccactgtcatcgctgagaccaccctgcatc

SEQ ID NO: 2575 - DNA, 559 bp, Aspergillus oryzae
cgtaatactttccccgccgattccgttacacccgctgtctcggcacttattgctgtgatccttgacagcttgataacagcttcgacccggatgtttaaatcataatgctctgcgtcttcttctaaaaaacgttcacttcagcgacttaatctactagtttattagtgtgtatgcggctggcttatgtctgccacagaaccctcggattccccggctcctaatggacaaggggagatctcctcaaattctcacgatgaggggcaccgactagagcaaaaagtgacaccaggagattctgggccatctcgtgcgtcgcaggatgagccactcgccgattcgaaggataccaaggatttgaagcaagacgatatggaagcagatatacaggataccccgcagggtgcagttccagagtctccacgttcagtaactacacctgttgtcgacccgccgagcacaacacctacccaacaagagtcccttccggaacggatgaagggattgtctatatctacaaacgccttagatcgttcaccgtcgccgaacaccgatcgacccc

SEQ ID NO: 2576 - DNA, 456 bp, Aspergillus oryzae
gtcgattgcagtgcttaacggtggctggactcctgatgggaatgttactgccattagcatgatgcacgagagcgggactggaggcgccccaaaatatgggattatcccacagatgcctctcaccgacgtggctcctccagtgaatatacttgataatctcacatatagccagccgagggtcggtcaagataccgcgagtgtgggttatttcaaaacccaattacaaaatggcgttcaagtggaattatcagcatctcgccacgccggaataatgcagtactcttttccaaaaggcgaaaagtatgtcttagttgatgtgtcgcactaccttcctggatcaccaagtgacccgaatggccaatactatatcggcggagaagttcaagtccatgaagatggccgagaatatagtggatatgggacctatattggtggttggaataatggtgccccttt

SEQ ID NO: 2577 - DNA, 444 bp, Aspergillus oryzae
cttcgcgagaggggcccagatgcagcaacaacaactccatcaaactcatgacggtcggttagcactcgaggcgaaagcgggcgccgtgaagacaagaatacgggatgtatggaagcacaacttggcccaagaaatggccgtgctgcggcagttggtggagaagtatccgtatattagcatggataccgagttccccggtatcgttgcacgtcccatcggagcgtttacgaacaaggcggattaccattatcagactctccggtgcaacgacgatctcttgaagatgattcagctgggaataaccctgttctctgctgaaggcgaggtaccgccgcccaatgctacggatgcgaatggacaacccctagggaatagtctggtgccggctccctgcacctggcaatttaacttccggttttcgttggaggatgatatgtacgcaca

SEQ ID NO: 2578 - DNA, 414 bp, Aspergillus oryzae
cggccttcgctcaataatttctttccccttcttttgaccgttctgaccctgacttctattctcctatcgaagtacccctcaattcccccctttactcggcgctttcgtccactttcaccatggtcgatagtaaagtcccgcagccaggaccggccaaattaaagcgcaatgccggtcccgacgaatggttagaggctgcgaaagattgcaagtatctttcagagcagcatatgaaacaactatgtgagattgtgaaggagtacatgatggaagaatcgaacgtacaaccggtctcgacgcccgtcacaatctgcggagatatccatggccaattctacgatctactggagcttttccgcgtctcgggcggcatgccagacgagtctatggtcgaacccccaaaaacatcaccgt

SEQ ID NO: 2579 - DNA, 412 bp, Aspergillus oryzae
gcaaggacttttcgactccacgaaacaaaagctcattcagttagaagacactaaacattcgtaaccagtgactatgaagctaaatttcgcttcgggtctggtgctggccctcgcaaccgtggaggcggttggggcacactcgtggttcagcaaagctgtgtacgataaatggcatgaatcagaactggagcggtggctttccgatcatgacatcccgtatccttctcccgctgatcgcaaagacctcgaaagcgctgtgaaggtaaactggaactcgaaagtccaaaagcccttgggacaagcagcggaccaggctaccgatcaatggcatcaagccaaagactggatttttgatacctggtctgattctcatctcaaagcttttcttgatcgacatggtatccctgcccct

SEQ ID NO: 2580 - DNA, 392 bp, Aspergillus oryzae
gttcttttatttttttttcttacacacccaaccatccaacctccttctttcttagtgacctacatggctgcgtgtcttacctgttgtcaattcgaatgataattatttgaatttacctttttggtccatgtcagcccccgtccctctttttcaactgtattgacccctcaataatccatctgcatttttctctgttttgatttattattattagtttattccctctttttttttactgttttcagtatttgttattaccgttctatcattattatcttccctgtgatctgcaccatcaaactattacccccctcaagactcgctccgtcgtcgaccgcttcttcgcaagtctccacggcccggccccaagtctcgtcttagagctggtaaag

SEQ ID NO: 2581 - DNA, 485 bp, Aspergillus oryzae
  modified_base (205)..(205): n is a, c, g, or t
  modified_base (217)..(217): n is a, c, g, or t
ggaaatcgagaaatctgaattgcatgagaaaacgcagtacccaattcctgggtctgattcggaacctcaggatgctcgtggaaaccgccactattcttggacgggcgatagcatggaaggggacgccgataacattcccctatctcaatctctggcgtcgatagattcagaagggtcttggatgtcaggtcaattccttcgtcgnatttctcagagnacgagcaccccagcccgaccaagccttagctcctcaagaaacaggttggacgaagagcgtgaagagctacctaaagaggaagagatcctgggcaacgaacaacttgtcaagtttagcaccaaccacgatgaggccaccagagctagccacgtgcttggtgagcaagacaacgattttgaaatggtcaatgcgccggagccaaccgaggagacctggcatgacgagattgcaaagcgtcctgtgcttgtcaacccagcagtccggccca

SEQ ID NO: 2582 - DNA, 552 bp, Aspergillus oryzae
ctacagctgcgtcggccagttccgacctcaatggttacgctattttcaatgcctgtgagcaactcaacgagcgtcttcggccttatcgggaaaagatgccgaatgccccaatgaaagaactcgcgcatgcagcttactttgaccgagtcaacctctctgctcaggggcattatcgtaccccagatattggctatgtctggggcgagaacacaggccaaatgtttttctacttcacacagggtgtgacagccgccgaagttgagatcgacacactaaccggtgattggactccgttacgtgcagacatcaagatggatgtcggccgcaccatcaatccctctatcgactacggacagatagagggagccttcattcagggtcaaggtctctttacgacagaggaaagcctctggcatcgtgcctcaggccaggttgtcactaagggacccggaaactacaagattcccggatttcgggacattccccaggttttcaacgttagccttctcaaggacgttgaatgggaaaatcttcgtacaatccaacgatctc

SEQ ID NO: 2583 - DNA, 531 bp, Aspergillus oryzae
tcgacccacgcgtccgcttggggatagcaaacttatctttcaagcactagaccttcttgatggtctaacttgtgtttgatctttcagtcgtcacattcactcccattgatccggtcggctgctcgctgaagataacccgcgatcaacctcctcgttctctctccaccatggctaccactgctacctcgacctcgaccaccccggctaccgttttccctcgcagccatgttggtttcgacagcatcacctcccagattgaaaggaagctcctcaagcgcggtttccagtttaacgtgatgtgtgttggccagacgggtcttggaaagtctaccttgattaacactatctttgcttcccacttgattgactcgaagggtcgtctgactcccaacgaacctgtccgctccaccacggaaattcagaccgtctcccatattattgaggaaaatggcgtacgtctccggctaaacatcgttgacacccctggatacggtgatcaagttaataatgatagatgctgggaccccattg

SEQ ID NO: 2584 - DNA, 558 bp, Aspergillus oryzae
  modified_base (366)..(366): n is a, c, g, or t
tgcgctcccactcctcttctaccggatcggtaaatcagtcttctgcggggtccgtaacgagtgcgccgtcatcggactcgatgggaccgtttccgacgctacgccacgagaaaattgttgcaacaggaagtggtatcacggtgggcattgccctcacggagcctgtgctatacctgcagggatacgatcataatgacccgagcaccaagaaattcgccattctacgcggtcagttgcatctcaaggtcaccaaaagcgtcaagatcaagaagatatcgatctgcttccgtggccatgcacaaaccgattggcctgagggaataccacctaaaaaggtacattaccatgataagaaggacctggtcncccatggtatgatgtatttcaatcacggtgattcggttctgccgcagaatgactacggagcaaacttttatcagcatgctaaaccggtcgcctccgttactggcaaggatggtagcccagtaactattacccgcgaaattttctcaaaatctggatcctcaacctctctcggtaatggccaccctacgagca

SEQ ID NO: 2585 - DNA, 546 bp, Aspergillus oryzae
caaaggtttctttttagattaagaccctgtgtaaaccttttttattgtctcttgtccttcactttgtcatttaacgtgagggtgaaagagtttgacagccaaagaaacttacgatggcctcaattaagcagtggacgactcccttgaagggagtagagtcgttaaaactcaccgaagccccgaagcccgctccgggcaagggcgaagtcctcgtcgagatccacgccgtgtcgctgaattaccgcgacatcgaggtaactaatggcgagtacacccatcacaagtccgtcggacaagaagaccgcatagtgccatgctccgacatgtgcggcgtcatcacgcaggtcggcgatggtgtcagcgcttggaaagtcggcgatcgcgttctctctaccttcctccccgatcatcagactggccaagtgacggaaaaggaactgttgcgggggatgggtctgcccctcgatggtgtcttggccgagtaccgcgttttcccggaacatgcgctggtcaaagcgccgagctacatgagcgatgagcaggccg

SEQ ID NO: 2586 - DNA, 609 bp, Aspergillus oryzae
tcgacccacgcgtccgcccgccttctcttcacactagcgacaccctccttactagtgggctacggcacgcatgtctggctaaactcactggaagcacgatatccccctattgctccagacagaaccagcaccgagcttctccgtacaccagccaactcaacaactcaacatgtcccccacatagacatctacgccgcccggatccgtctccgcgaccttcaagcacggaccaacaaccccacagaaaaacccacgaaacaagacctgaacatcgcctgggcacaatcgttactgaactgcagcatacttcgcctagaagccaaagtgatcggactcttcagcaagggcaaattcaacccaggcgatctgggaaccaccccagcaggattcagccctgatccagaaacgggggctccgcgtgagcttctaaatggggccatgactgttattcgacagccggtgcgtgacgagcctttgttagtgaaatgggagatcccagatgggccaaggcggttctttgagatgattgctcgttgggggtatccatggcgcttaatgacggtggacggcatgagatgagtgtcgaggggcccgtttgacggtgaaagg

SEQ ID NO: 2587 - DNA, 556 bp, Aspergillus oryzae
cggacgcgtgggttctaggctcaattcactgtactataagaccactaacctgccaggtgagccggatacaggtatataacccgtcttctctccccatcgtcccctgaagcttatcctttccattgaccatcgccccgccatacccgtcaattgcttcctttccttcatacaagctcctaagacataccagacatcatgtccccgccagcgatcattgccccatccatcctgagcgcggatttcgcgtctctgggaagcgaatgctcgacgaagatggcccagggatcagactggctccatgtcgacatcatggacggtcacttcgtccctaatatcaccttcggagctcccgtggtcaccaagatccggtctcacgttgaccgtccaactcagccccatggccggggcacctttgactgtcatatgatgatcatggagccacataaatgggtcaaggagttcaagaacgccggatgcgacctctactgtttccactacgaagccgccgtggcttccgtcgcagctaccgagcctgccgactcaacaaccactcgca

SEQ ID NO: 2588 - DNA, 543 bp, Aspergillus oryzae
cttattcatagtaacaccatgccacaccaggatttggatgagaagccgccacttcatgtccaagatgctgaaattgatgaggaggtagaagctctggaaggatatgtcgttgatcctagccaatatcccgacaatgcagcgcgcctgaaaactagcccagacggtcgctttgttctgattccgcaacctctcgatacacccaatgatccgctaaattggccgtcccagaaaaaatggtttcttgtagcaatagtggcttatatcgcgctgctagccgattacaccggaggcaccgctatcattactgttattccacagtcgatgcagtgggagctatctcaagctacggtacagagagcagtggtcggtaatctgtttactataggcgcgtgtggcctcttcgtagtgcctttggcgcattacttcgggcgcctaccggttacgcttttcttccaatgcgtcatggttggcacctgtgcatggtcagccgcagccaccagctttccctcttatttagccgcgcgcattatcaacggcttcttt

SEQ ID NO: 2589 - DNA, 542 bp, Aspergillus oryzae
ggagaaactcttctttgaagaggcgtacaagtacggaccagaggaacgcgatcaactgtggcgtgatgccaagttactccagtctacggaagtgggcaatgggtctgacgattaccatctccatcttctgacatccgctgccctcaacctccccacgtctccctctcaatatgcagctcatcctatacccagctttgaagaatggcagtccctgtggacagcatgggataatgctacaaaggctatggtccctcgcgaggagcttctgtcaaagccgatcaagctacggaactctttaatcttctatctggggcacattcctacattcttggacatccatctgacccgagccctgcgcggaaaactgacagagccaaagtcttataaactaattttcgaacgtgggattgatcctgatgtagatgacccccagaagtgccactcccatagcgagatcccagacgagtggccagctcttgatgacattctagactaccaagagcgagtcagaagcagagttagatccatctaccagatcgagg

SEQ ID NO: 2590 - DNA, 533 bp, Aspergillus oryzae
ctagtatattcgaggcgctatttgactttcaactcgttacccgttatatacatccaccatgtcttcaagttcaacaatagccaagcgtcttgaaggcaagacaatcgtgataaccggtgcctcatccggaattgggaagagcattgcgaaagaattcgcccggacgtcaccaggcaacctaaagctgattctcaccgcacgccggatcaacaaccttcgcgaagtcgccgccgagatccaccaggaggctggcgacggggtcaaagtactccccgtccaactagatgttagtaaaccggaggagattgagcaattcgtcccctcattaccagacgaattcaaggatgtcgatatactggttaataatgctggcctggtcaaaggcatggctcaagcgcccgatatcaagccgggggatatggccgtaatgttcgacacgaatgtcactggcctgatcaacatgacacagaccattctgcccatcttcaagaccagacctgatggtgggcgaggggatatcatcaacattggca

SEQ ID NO: 2591 - DNA, 527 bp, Aspergillus oryzae
tagctatttccgccaagctatgctaactacctggaagccactccagaaattagaactactgtgtttctgtagtttggatacctgatactcatttgaaaaccccctttcccctgctagatctgctattcagacttcccttctattcctttccccaagttccatagagcctcacgatgaaagacgaactcggaccggatgccggccaccagaagaagtcagatggcatggatgaagtttctcctacagccgaacattcagagaagccaaggcgctcgagtatttacgacatcgagggccgacccgccaataagctcagcgccgtcttcaagaaccctctggaaggcattccccgccagcagctgatggaggatgtggacagattctgtgcccagtatggcctggagacccacaaggagcttttccgtaaaggagccctgatttcgcagaatcctcaggatgcccacaatatgccagagctgaccgaagatgagagggcggccattcggcgcgaacacacgcataaatgg

SEQ ID NO: 2592 - DNA, 537 bp, Aspergillus oryzae
  modified_base (165)..(165): n is a, c, g, or t
  modified_base (283)..(283): n is a, c, g, or t
ttaccttctgttaacccagcctcactaatttttgatgctgtccagttcgataaggatccggggcttgcacatgtttaccccatatgtagatgtagatcttttcgaaagactgcttgagcgcgaagggaccgtgattagccacacaatcttcaatcattacagganatttttgcaaagcctctctacaatttgacttgcacaaaccgaccccgattttatatactaaggctctcggacctcgcaacggtacccgtaaccgacaacacattgccaagatgcacangcagctacgcttggatacctccgttggggggaatcagcgatattcctttattgagacgccactggaaatgcatgcttctggaatacgaaatggtcaacagcagcaagaaataccaccgtcgcaaccattaacagtacccaatcctgatactgccccggcccaggctgcagcagagcaagaacaaccacaacgcctaccactgttgaatgagaaggcacagtatgtgcggcaagaagcggtggctcctggtaacc

SEQ ID NO: 2593 - DNA, 563 bp, Aspergillus oryzae
ctttgctgcttccaactgttgaagttagctcttcttggatgtgttgcggccttgctcacctcgcatagagagctttcacaatgatctccacaaggctcgcgcgcatgggtgcgctggcccccaagtcccgcctttttctcggggcccggggtctggccactgccagcgaacaccctctcgacaagaaggtcgagatgtccaatgttgaaaagggcaactacatcaactacaagaagatgtctgagaacttggaaatcgttcgcaagcgtctgagccgtcctcttacgtacgccgagaagatcctctactctcaccttgacaaccctcatgagcaggatatcgagcgtggtgtttcctacctgaagctccgccccgaccgtgttgcttgccaggatgccaccgcccagatggccatccttcagttcatgtcggctggcatgccttccgtcgctacccctaccaccgtccactgtgaccacttgattgaggctcaggttggaggtgaaaaggatttggctcgtgccaatgagatcaacaaggaggtctacgactttcttgcctcc

SEQ ID NO: 2594 - DNA, 474 bp, Aspergillus oryzae
  modified_base (69)..(69): n is a, c, g, or t
cggacgcgtgggcggacgcgtgggggaactacggcgaccacgcacaaggctctcagccacttcaaggancatcccgcttatccggagattccatatttggagtagagagaccagtataccccgcatatgcacccggtcagacacgttcgactggcgatgcaattgctcttgggctgcatccgacggactataacgaccggggccgcgggaggactgtggagacgcaatctggaggtgtagccgtgctgcgagccttgtaccagtggaaagtgagtgcatctcgtcccagtgctgcctaaatttggctactgggtgggagtcaattgtcgtgtgttgcgttgtataaatatttgggagcattcttacgattggttatgttttggcgttcggtctgagttatatggtccggcgttgatggagttggccagcgtagccaacgcaaggactggttgtatcggaagtaaagatcgaact

SEQ ID NO: 2595 - DNA, 389 bp, Aspergillus oryzae
  modified_base (101)..(101): n is a, c, g, or t
  modified_base (128)..(129): n is a, c, g, or t
gaaaagaataggatctccgccgtcaattgtgaaagtagagaagcctgaggatgtgcagtctctttcgagtagaccagaactttcgactacctccgtacccngaacctcgagaaagcgcagcttcagcnngactatcgatggtgagggggacgcgggccgtcctgctcgcctgagagatcccgcagtatctcgtgaacgggagcgaaaagatttaagcagtgtaacgtttccccggccggtatcgactgaccggtcagcctcgccagtccgatctgtgcacaagcgaaccgcttctggtccccagcttggtgatatgcaacgcaagaagaaggcaccgacgccacttgttaccggatatgctcgacaaagctcggaagaccgacagtctg

SEQ ID NO: 2596 - DNA, 553 bp, Aspergillus oryzae
tcgacccacgcgtccgcaccacttcactctactttttccatcgaacttttgtttagtctcatttacattgaaactcttctcatttcccgcttctcgtgatatcctacatcatattccaccatggatgagatcgcccccgaatatgatgttgttgttctcggcactggcctgaccgagtgtgtgctttctggtgttctgagtgtcaagggaaataaggttcttcacattgatcgcaatgatcactacggaggagaggctgcttccgtgaacatcgaaacacttttcaagaaatacggcaacgtccgccccggcgaagagccatggaagaagtatggacgggtcaatgactggaacattgacctggtccccaagctgctgatggccaacggcgagttgacgaatatcctggtttccaccgatgtcacacgttacctcgagttcaagcagattgccggcagctacgtaccaacaaggaaagagccccaaggccactgtggcgaaggttccttcagatgccaacgaagcacttcgttcatctctcatgggcatgttc

SEQ ID NO: 2597 - DNA, 565 bp, Aspergillus oryzae
catctagcgagttacgtcgattcctctacagtttcttttggaaatcaatgtattgctagccttactcctccggacattgatcgatctcatgtactatgagaaagagtaacaatgcacgcagtaagaaaatccatctttgatatttgacattctggttgaaagcttctagggatggatcagcgctcaagagattcctggaaaaggagctttcaagaagctatgttttatagctgagattaagtcaggaataaacttgacttccttccgtgattccaatcagacagtatacatcaactgagtatgtggcacacaattcagtcactataccggccttgatattgtggtgcacgcatcggtagaagcactgcgaggatatatcaacattaagtcgagtcgtcaaccattgttctcatccatagctccacactttacacacctgagctcttacacgggcaccctgacatcaagaacgaggcctgaatacacaaagatttcggttgtttgttctattcctcgcgagtattttgcttagtgcttgatacttaccccatgagctcgctaatcg

SEQ ID NO: 2598 - DNA, 581 bp, Aspergillus oryzae
tcgacccacgcgtccggcccggcgcaggcaaaggctgtatttgcccactttatgctagggaatagtgacaactacaccaaggccaactgggagcaagacatctcggcggctaaggaggcacacatcgatgcttttgcgatcaacacagggtttggcctatcaattcatcgaatgctgaccgatgcattcgcagctgcggatgaactggacttcaagctatttctgtccttggactactcaggagatggacactggccgcaggaccaagtaatagactacctcaaggacttcacaaagctaccagcctacttcaaaactgatgacgacaaaccccttgtctccactttcgaaggggaccaagctgttggcgattggaagaacatcaaggataaggtagactgcttctttatcccggaatggtccgcgctacgtccggaaaaagcaatctcctacgagcaagtcgacggtctgatgagctggacggcctggccaaatggcaccgacccaatgaccaccgagaccgacaaagagtatctggacgctctcaacgggaaaccgtacatcatgcctgtctcgccatg

SEQ ID NO: 2599 - DNA, 594 bp, Aspergillus oryzae
tcgacccacgcgtccgcaccgctacatctcccctttgagcttgctttccttttattctgtttctgcctcattgtcccgagacacatatatcaaggcgacaattgtttcaggttttaacagtctgcttaggacttgaatatctcaacatggccactcctactctaaccttcacgagctccgacggcgttgacatccctgtcgaacgtgatgtcgccgaacgctcgcagctcattaagaacatgctcgaagacttgggtgaaactggagagcccattcctatccccaacgtcaacgaagccgttctgaagaaggtcattgaatggtgcacccatcataagaacgaccctcccagcaccggcgatgacgatgattcccgccgcaagactacggatatcgacgagtgggatcagaagttcatgcaggttgatcaggaaatgcttttcgaaataattctggccgcaactaccttgacattaagggactacttgatgttggctgcaagaccgttgcgaatatgatcaagggcaagtctcctgaggagattcgtaagaccttcaatatccagaacgattttacacccgaggaggaggatca

SEQ ID NO: 2600 - DNA, 514 bp, Aspergillus oryzae
  modified_base (223)..(223): n is a, c, g, or t
cagagattttcttttcttgacattttcccttcctctccacacgtcccttctcgctcgtcctttctttacaggcactttctctagttgaaataaacgacaatggctgccactcaaggatacccttttctttgcttggagaaccctctcctcgacatccaagttgttggtgatgctgctcttcttcagaagtatggtctgaaggacaacgatgctatcctcgctnaggacaagcatatggggctctacgaggagcttctgcagaacgatgatgctaagttgattgccggtggtgccgcccagaacactgcccgtggcgctcagtacattctcccggacaactccgttctctacattggatgtgtcggccgtgacaagtacgccgatatcctgaaggacacctgcaccaaggctggtgtgcacaccgagtaccgtgtggacgatgcccagcctaccggcaagtgcggcgtgatcatcactggccacaaccgtagcatgtgcacccaccttgctgcgg

SEQ ID NO: 2601 - DNA, 547 bp, Aspergillus oryzae
ccctcttgtgcgcgaccgtgatatctctcgagtgcaacagcgcttccacatcctatcatctcttctaccttattccaaataagtggcgtatatccaccaattgctcacagccgtccttgtcattggttctagatacttggtgcctgacatctgcatcggtccaaccacgggactcattggaagcgtgacggaaagcgccgtcgcgactccatgatggaatatcctccacaatatcaacagcctcatggccaacacccacatgccccctcccacatcgctgccccgtatcagaccgcaccccagaacccaggttcaacggtgggttcgatgacctctcccaccaatccccaggcacacatgcagcaagcccatcctacgcatcaagcatctcccattgtcccatcgcagtctcattaccaacaggcacagaatgcgccgggttcagtacaccagcagatgaactttcctcaatcctatggggtaactacagcgatgccgcagacgtacggcatctcaccaacacaggcggcggctatggctactgcgg

SEQ ID NO: 2602 - DNA, 556 bp, Aspergillus oryzae
  modified_base (280)..(280): n is a, c, g, or t
tcgacccacgcgtccgctttttttttggaagatcgtctggccttatccaacgttgcccccatcaaagacttgctggatctatcgagaatatcaacccttgcgcatagactggttgtgcaattcagcgtgttctttactgtcaaatatcaacagcactcggacacggtgctagttaaatgtgatagggactagagtgcattgcttctaggctgattagttctgttggagaagtcctcaggaaagtgcccggctgctgggtgttcccactagaaaattcgantcatctcgagatggcaagcgggctttctaactaatttgagcacccgagcgttattggaaaagcaagggaaagaacgttgtgtatgtgaaggaaatatgtctgctatgacgggtccgagatcacctacttctccgtggcctcaggagccaccaaacctacaaattacaggccaccctacctcagcagcaattttttcgttgtgtgaccctcatcagtctccactcaactccagccttagtcctcgcaatacagtccctgaacgttcgggtcctaatt

SEQ ID NO: 2603 - DNA, 398 bp, Aspergillus oryzae
cggacgcgtgggtaagatgcagaatcaggccattttggacgatgatgacgatgatctctatgatcctgccgatgcagtgccggtagctgcatctcagaatacagcccatcacgcccaagcgaacctcaaccaagaggcagatgacgtcgaggaagaagagatagaggttgaagaagatgatgatgattttaatattatcacggaagctcctcctgatgcgcctccccctgaagtaccacacccccgccatgctagcctacgagctgagtcgcagcgacctgcatctgtagattcttctcccgtatcgaagtcagttacgccttctgtgacaccgaaagttgaacatgcaactccggttccagtcaccgcacgccccgccgtaccgcagaaaccaggtt

SEQ ID NO: 2604 - DNA, 463 bp, Aspergillus oryzae
  modified_base (67)..(67): n is a, c, g, or t
gcttcaaacagcgaccagatatgctcaagcaccggttccctagtcaagacatttgggaggattcgcngaatagcttgcagttgcacgctacagtgtctacaccggatgttcctaagaacgaaaactttgagactccggagcaggagcccttccgtagaagtcaggctaaccgcgttgacccacacaaggttgcgtcacagattctacaatcagaagggtatctcgatgagaagtctgtttcacgcccagatattgtcaagcagcggtttcccagcagggacatctgggaagatgccccggaaagccaaaaactggttactacagtagagccggcagaagagaaagaggttaaaagcccagatgtgccagcgaagcctagcattccagctcgaccccagaagcgtcctcaacaggcccctccagtagatgcttctacaaagccagtcacctcgcccactgaaaa

SEQ ID NO: 2605 - DNA, 389 bp, Aspergillus oryzae
cctttccatttctcccagatagaattctttctatcctttcctacacatcattcacaatgttcgctgctcgccagtctttcaacctcctccagaagcgcgccttctccgcctctgccagccaggtgtgtgattgaatggatccattggacctcggagctagctctgcaacatcaacaaaactaacatactaacttatcttcttcataggcttccaaggttgccgttcttggtgccgctggtggcattggccagcctctctcccttctcctcaagctcaacccccgtgtttctgagcttgccctctacgatatccgcggtggccctggtgttgccgctgacctgagccacatcaacaccaacagcaccgtctctggctacgaggctacccc

SEQ ID NO: 2606 - DNA, 589 bp, Aspergillus oryzae
  modified_base (146)..(146): n is a, c, g, or t
cccacgcgtccgtggggatcaggtatacactttgataatcacatttgcccatcatggccgaaactcccgagcttgagcctcacaatgccttcgatactatcctgaccctagactttgggtctcagtacacacatctgatcacccgncgcctccgtgagctcaatgtctactcggagatgcttccttgcacccagaaactggccgatctcaagttcaagcccgctggtgttatcttatccggaggaccctactcggtgtacgaggagggtgctcctcacgtcgaccctgcctactttgacctaggcgtgcctatcctcggtatctgctacggcttgcaagagattgcttaccgcctggacagcaccaatgtcattgctggcacgtcgagggagtacggccttgcgcagctcaaggccaagaaggtcggcggccacgtcgaccacctctttgatggactggaagacgaattcaacgtctggatgtcccacggtgacaagctgggcaagctccccgaaggtttccacacgattgccactactcccaactcagagtacgctggtattgcccacgagaccaagcccatctatgg

SEQ ID NO: 2607 - DNA, 500 bp, Aspergillus oryzae
cggacgcgtggggtgcttgtgtactagccatgaaagacatcccggctgtcaacgcgtcgattgaggggcccaatggtggcgataccattgtctaccgtgattacgttgatataagtgtcgctgtcgccaccgagaagggccttgtaacaccagtagtgcgcaacgccgaaaccatggatcttgttggaattgaaaaggctattgcagatctcggaaagaaggctcgcgacaataagctgaccattgaggacatggcgggtggctctttcacgatcagcaacggtggcgtcttcggatccctcatgggtacgccgatcatcaacctaccacagacagctgttcttggactccatgctatcaaagagaaacctgttgctgtgaatggaaaaattgagatacgccctatgatgtatcttgctctgacctatgaccatcgccttttggatggccgggaggctgttactttccttgtcaaggtcaaggaatacattgaggatcct

SEQ ID NO: 2608 - DNA, 579 bp, Aspergillus oryzae
tcgacccacgcgtccgtttttctctcctctccactcctttctgctgtttcagctgttgccccaattgcccccgatcaactagttactgaatcatcgccaatatggaagagagggcactcgcggactttgagaagagcgacggagcgctgcgcaccattaaggatttgggtgctggtgcagctggtggaattgctcaggttcttcttggacaacccttcgatattgtcaaagtgcggttgcaaacaaccactcagtatgccaacgcccttgactgtgcgagcaagattctcaagaatgagggtcccgccgcgttttacaagggaacactaacccccttgattggaattggtgcctgtgttagcgtgcaattcggtgctttccatgaagcccggaggcgtctggaggaattaaacaagaagaaatatgccgatagtagcctttcctacgggcaatattacatggctggcggtttcgcgggtatcgccaattccgttctgtctgggcctattgaacatatccgtattcgtatgcagacccagccgcacggcgcagaccggttatacaatggccctatcgact

SEQ ID NO: 2609 - DNA, 522 bp, Aspergillus oryzae
gtccaaaccgattctgccagccatctgaccgggggtttaggacaatcctataagggaatgggttggaatcacttgtcgtgatgggcggaatatgatccttttctcggttgactacggcgagaatctttaaggctgctttttgaagcatattctccatcgccttgcgcactttggcgcgctctgcatgagcagtcagcactgacatgtatttgtacaagctgcagagtgcatgtatgggccgatattaaggtgccaaatgcatacctgattctgtccgcggagtggcaatcgtcacatccagattccacacctcccaacatacttcttcctcgccttttccagcaagtccaccgaaccagattccggagcgtctgcgcttcttctcgtagaactctactgcgatccgaccgcgcacaccgccgcccccttcatgggcgctagcagctgatgaggagtgctgtcggactagggcgctgatacgtgactcaatcagagtttcgaggtcttcatcgttaatagcgg

SEQ ID NO: 2610 - DNA, 536 bp, Aspergillus oryzae
cagttcttgacattgtcacgtcttccaaagtcccccggaaagctgttaaacacggcttacggttgttactgcgcattttgattcatcaaagccactgaagaaccacgcagctggtttctctctcttcccgttggagaaatccactaaaacagagtcgatcgagaacttgtctatgtattcgtcctgtgtcagagatttagaacaccacctgccgctcaagctgcaaacgtttcgccccgcgtcgaaaccttgtagtatacattctaagtcctgtggctgaaagctttgggctgccatattcgctgtgccaatcgttccgttgagacgatcttaaccgccaccattcctccaaaatcaggaactcaatacgcatgtcttgtacttccaaggcatccttagtccggaatccctcccgcttcgttttcagacaccttaagtaaacaaagattttcatctttatccaccatggctaccgtcaacattcgtcgggatgttaccgatcccttctatcgttacaagatggagcgcctgcagtc

SEQ ID NO: 2611 - DNA, 125 bp, Aspergillus oryzae
cgcagttttgcatcactgttggtgccgtgggctttgttcttttatatctccccccctttgctttgagattttgcgcaatatttactgtcttgggtagcatgagaacaaaactccgatttttcaat

SEQ ID NO: 2612 - DNA, 455 bp, Aspergillus oryzae
cttgccggctcgcccttctctccattatttcttatcattgatacaccatgtcgtctacaaactacaatccgccctcgcgcgccacccggctagaaaaagctatcaccaaccccggtgctgtgaagattaatgttaagggtgctttcattgtcgacgaagatccgcgatccaagagtcccgtgagattggatggtgtgcactatgaaggccatgatatccggcttccccatcacactggagtagtgagccatgttgctgtcgacatcggtggttctcttgcgaaattaatttattttacacgagagctggactccgtggataatggcggccgattgaactttatcaatttcgacactcatcgcatagatctgtgcatcaacttcataaaagaactgaaagaagaataccagaaagcccacggtccttccagcgatgagctatgtgttgtggcgacc

SEQ ID NO: 2613 - DNA, 553 bp, Aspergillus oryzae
caggacaagagaacggcccgcaggacatatccattgcaaatttgcaaagccattcgccttattctactatacctaaactgtactttgttccaaacatggcgcctcctcttgacttatcccatcattatgcatccaccaccaaacgacgtcagggaagcggcatcaaagacctatataagtacttcttcatcccaggcattgcgaacctggctggtggcttaccaaacccctcatacttcccatacgataccctcgaggctaccgtcgcgacaccccagcgtttccaaccttccaacaatggcacaaccaagaagtctggagatgacgctaagtcatccatgcggttgatcgttcctaaggagagtcacgcgaccgatgtacagaatagaatcgatatcgccacagccctgcagtatgtcacagctgatggcctccccctatggcctcatttgttcgccaattcgcccgtcaccatcttcatcccaacgttccatatgccggaggtcccgaaaccatcctcaccactggagcgaccgatggcttctcaaaatca

SEQ ID NO: 2614 - DNA, 456 bp, Aspergillus oryzae
atcatatccttatcctcaagacttcccttcctgacctgtctttctccctcttcgatatccttaacgacaatcatccaccatgtctctccctcagaccatgaaggctctcagatatgagcagcctgagaaacatgctgttgttgacgttccccttcccaagctccgtgacaatgatgtcttggtcaaggtcaaggcttgcggtgtttgtggtactgacctgcacatccatgagggtcaattcattgccaagttccccttggttcctggtcacgaaactgttggtgtcgttgcggctgttggccccaaggtcaagggctttgaagtcggcgagcgggtcgtcgccgataactcggagctttgtggtgaatgcttctactgccgtcgtggagacgagttgctctgtgaacacttcgaggctcacggtgtcaccatgaacggtggctttgccgagtactg

SEQ ID NO: 2615 - DNA, 542 bp, Aspergillus oryzae
ctttacttacttgtacacttaacaagaatggcgtcagaaaacaacaaacggaaagcttcggaggaagccctttccccagattcacagctacagagtaagaaagcgcgcaccgattccccagagagggaaccaaagtctgaaggtggaccattgggaaagccaccattgaggattgttcctttcccggagaagccagccgtactagaagaacgtcgaggggagatcgaattccgggtcgttaataatgatggttcgcgcgacagctttgttgtcctcactggactgaagtgcatctttcagaagcagctcccgaagatgcccaaagattacattgctcgattggtctatgatagatcgcatttatctatcgccattgtcaaacatccactggaagtagtaggaggaattacatacaggccttttaacagtcgcagatttgcggagattgtcttttgtgccatatcctctgatcaacaggtgaagggttatggtgcgcatttgatgtctcacctgaaggattatgtgaaggcaacgtcgcctat

SEQ ID NO: 2616 - DNA, 512 bp, Aspergillus oryzae
cttattcccccagatccagaggcttcttcaactctgctctcccccagactttcccctcatacttaaactaactactgacctctttcaatcatcgttgaactttgaatactctgtctatcctcctctcctcccctcctctctccccctcctcaaaactattgaaacatcctgtgcggaggcaccacgtcaattatattctcagtgtttgcttttttttctttccttttagttctaattatacccgttcaagatgtctgagctgcgcttcgacaaccaaaccgtcgttgtgacgggagctggcggtggtctcggtaaggcctatgctaccttctttgcctcgaggggcgcaaacgtcgtcgtgaacgacttgggtggttcccactccggtgagggcaagtcatcaaaggctgccgatgtggtcgtcgaggagatccgtgctgccggaggcaaggcagtcgccaactacgacagcgttgagaacggtgaagctattattgataccgccatcaaga

SEQ ID NO: 2617 - DNA, 458 bp, Aspergillus oryzae
atcgctgcgaagtataacacaattcatctcaatatctacgcaaataatcagcccttctacctttataccaactcactcgcacccaatcccacactcacacaagaataaggataatggccctcaacggaaaagtcgctctcatcaccggcggtgtgaagaaccttggtgccgccgctgcccgcgagctcgccagctccggcgcgaaccttgccctccactaccactccgacagcagcaagggcgacgctacgacactggaggccgagctgaagaagtcttatcccaatatcaaggtcgcgttctaccagggtaaccttacctccgccggagctgtgacgaagctcttccaggatgccctgaaggacttcggaaagattgatatcgtggtcaacacagtgggcaaggtgctcaagaaacctattactgaaattacggaggaggaatacgatactatgttt

SEQ ID NO: 2618 - DNA, 429 bp, Aspergillus oryzae
cttggtttctcaaatattccgttacgacccgactgcacggccaaatgctgaggagatacttgcacatccgtactttgcggaggaggagcctaggcctcaacaagccattgagctggagaacattgagggtgattggcatgaatttgaatccaaagccctccgcaaagagaaggatagggaagctcgccgcgctgagtatcagagagacaaagagaaacggaaagctggtacttcagctccccccagcgagagagaaacgaaacgtaccaagcaagacgccgaggactcgcaatcttcagcacagcccacagaacaataggtcaaaaacgcctacatgcgtcgcatcactgggatgcaagatttgcgtggtaactttttgcttagaagtttccacgataagaattatggtcacgcgttctgacagcagat

SEQ ID NO: 2619 - DNA, 426 bp, Aspergillus oryzae
catatttccaaatcagctattccaccgccgtctcccaaatcgcaatccttgatttcgtccttatccgatcaacatctgtgagctgttccggtggccgttctcctccgacatggccaccagtcgcagcaatcctatacctccacccatctcccttccggccgcgaacttcgcatctcatgccgtgccaccgactccatcgcccagtcgaccaacaatccccagttaccagtctctcgatccattactcgcaaacctatcccccgaatctactctcgaagcgcttacctcgacagacgcagtgccgaagaacgaacccgcatacgacatcctctgcaagagcatatcccaagtctctgaggcagagcgagctctcggaatccgcgcggctgttgcggcacagaatctaagcctatggtataaagaggt

SEQ ID NO: 2620 - DNA, 498 bp, Aspergillus oryzae
ctccccttctccttagacgttcagagatgtcgttacaaacaattgcgatcgccgctatcgcggtggcatacttcatcatccgctatttgaaccgcacggatgtcccgaagatcaaaggcattccagagattcccggggttcctctcttcggaaatctattacaactaggtgaccagcatgcgacggtcgcgggaaaatgggcgaagaagttcggaccagttttccaggtgcgcatggggaataagcgtgtggtatttgccaacagtttcgactccgtgcgtcagctctggatcaaggaccaagccgcgctcatctctcgcccgactttccactctttccatagcgtcgtttccagctcgcagggatttacaattggtacatccccttgggatgaatcatgcaagagacggcgcaaggcagctgcaacggcgctcaatcgcccggcggtgcagtcgtatatgccgatcattgatttggaagctaccgccagtattaagg

SEQ ID NO: 2621 - DNA, 454 bp, Aspergillus oryzae
gcttcaagaagtttctcgtctcaaatcatcctttcgatgagcactcatgaccatccctgatgagtattagtttgagtccgtaattctgggacaacacgcagttaatatttttgtgtcatggcggccataatctgcagtacttctttaggaagaatcgtccattggctttctggtggccggctcttgagatttcctgaagaggagcctggattctgtctgtcaccagcatattccacagcgacgagggtcgctggcagcgtggaatcagacacgtacgacgcagaatgtgaaatttctgatcagaaaggtccttccaaatggctcgttccggaaactaccactgacggaatgatacttgtggattggtattctgatgatgacccggcaaatccgcaaaattggcctcgctgggccaagatcatgacctatattcagataaatttttacactttcg

SEQ ID NO: 2622 - DNA, 432 bp, Aspergillus oryzae
tcgacccacgcgtccgtatggttgttattatcgacctaattccttttttcgggtctttgattttatttctcagctcctttttcctatcatcttttctcgtggcattgtgtggctatcagttatgttgatattatacgagccatcttgaggacaaaacctcaagcgcgattaatcatgtacagatgatcttcttttaccttccatggcgggcggaactgttgcgattcgaatttggcatgggttcttatgtttttctctttccagtacgggttgggtggaacttttcaaaaagaggccttttatggatgtcattgctacgtctcgtgactgcatcttagcagaaaacgtcattggtatcattcgatgcatttgaagcccttgtcttttctttctttttcttttttgttctgataccagataccatacatatgt

SEQ ID NO: 2623 - DNA, 414 bp, Aspergillus oryzae
tccattttggggcatttagaggagtagttcactcctattcttatttggccctttgatcgcgataccttatctcgccacctccctgcaaaccgatcctccccgaactgttcccgttcgctctgttcacttggaaggctgcggctttatcgagccgattaggcagacgctgatagtttcagaagtccttggatcttggttggacaacgtggattaaatcgtctacgagggggctgacctccccaaggaggtcatcctacatatacccgaagatcgtgatgtgtgtagaccaacttgcgagatggcatgaccgacgcacgcctggggtttccatacacgaacggccatcgtttcagtcacaagatgagtgggatagcttgcgatcgtcgcgacgacattggagtcggtccgatggcg

SEQ ID NO: 2624 - DNA, 546 bp, Aspergillus oryzae
cttgcgcgactttttgactctcttctataaatacgaacctaatgcgcatccaacgcttctccacagccctccgcactttcacctcctccttcagataccggcccacacccctcatcacgaaagccgcatctcaacatccgagcaaaccatccttcccaatctcaaaatccactgcactcaaagccgccccaggaatccttccattcctaagctctttcttcacctcaacagctaaacccgaaaccgaaaacaatagcaagatgtcctaccccgaccagcgcagcaccgaagaatggcgcgccgtcctaagcccagaacaattccgcattctccgcgaaaagggcactgagcgtcctggtactggcgagtacgattcccactacccctctgagggcgtgtacaactgcgcggtgtgcaatgccccgctatataaggcgacacacaaatttaagtccggctgcggctggcccgcatattttgattctatccccggtgctgtgacgaggcatacggataacacctttgggatgcagcggacggagattg

SEQ ID NO: 2625 - DNA, 550 bp, Aspergillus oryzae
caaactctgcctttcatctcccttgtgtctgaggccaacagctcaataatcttcacttcaagactttaaccccaatatagccatgggcagcacacaactcgcacagaccttgctgcagtcggcgcgcgtcgccccggaaatcttccagctacgtccggattaccgcgcactcttgatggtggtcgagggaattcctccaggtcctagtgatgaggccagtgaggctttcctccaggaggcagaagctaccgtgaaagaattgctctcaaagtccgccgtgacggaactcccacatatcgccgcgtggcgggaggcgtataaggctttcggagccaagccccagaaaacacgcaacagccttgaggcgttgacacggcgtgcagcaactggcctaccccgggtcaatcggttaaccgatatatacaatgcgatttccgtcaagcatcagatccccttcggtggcgaagaccttgacaagtacgacggcgcgccgtttctagtacgcgccactggtgaggagcccttccagactttctctggaggagagcct

SEQ ID NO: 2626 - DNA, 502 bp, Aspergillus oryzae
tccggaattcccgggtcggacccacgcgtccggtccgtaccaagaacgacctgatcaacatcgatcagttcttgcagcagatgcaggataccatctatgaaaatgacgacaacgtggcagctgctggtgttgctcagccgggtgcccattacgttcatggcggcatgagctatcgcaccacccactcgccacccagtcagctgcctccaagccatgctacggccaccacttccgcaggccccattatggctaatcctgcgacccattcgccgactgggacacccgcactcacaccaccctcgagcgcgcaatcgtatacctctggtcggtcgcccatctccctgccgtcaacaagccgggtatctcctcctcatcacgaaggtggctcaagcatgtacccccgccttccatcggctactatgactgacagcatggccgctggctacccgaccacatcaagcgcagctcctccgtccactcttggaggatctttgaccatgat

SEQ ID NO: 2627 - DNA, 444 bp, Aspergillus oryzae
cgatgttggccttgataagatcgataagttcacgtatgctacggaagatcagattaaggtcggtgcgctactgtctattggtatcctaaactcgggtgtccgtttggattccgatcctgctctggcgctcctgagcgatcccgataacctggaagccaagaacgtgccgatgagagtcgcatctatcatgggtcttggtttggcttatgctggatctaataaggaggaactcctcgatgttctgctcccaattgtcgaggatgtgtcgcttgatatgcaactatctgcgatggcggccgtctccttgggtttgattttcgtcggttcctccaaccatcaagttagcgaggcaattgccacgactctgatggatgaggaccgtcaaaagcagctcaagaacaagtggacgcgtttcatggctcttggtctggcgctgctttactt

SEQ ID NO: 2628 - DNA, 454 bp, Aspergillus oryzae
ccagcttcttctgtcgctcacggagctgcagggaatcatggcgaacttcgcacgtcctgtggcttcctctatttcggggattgacttttccgtttacaatgatgaggatatcaaagccacctcggtgaagcgaatccataatactccgactttggattccttcaacaatcctgttcctggtggtctgtatgaccctgctatgggagcatggggtgaccatgtctgcacaacatgtcgcatgagctcatggtcctgcactggccatcctgggcacatcgagctaccagttcatgtgtataatgtcacgcacttcgatcagatgtaccgtcttcttagggcgcaatgtgtatactgccaccgtcttcagatgtctcgcacgcaagtcaatgcctacacctgcaaattgcgactgttgcagtatggcctggtcgatgaggtagctgcgttggagtca

SEQ ID NO: 2629 - DNA, 435 bp, Aspergillus oryzae
ccactcaaaggcactcgtcgagtctccagccttggaccttatcaaccacagggggaaaaggtgctcgttatatcttttcacctcggtctttcttttaaatttccttgtggaggaattcaggcctaatttgccactctgttcttcttcgacggccgcaagtagctgccggagattctgatattcttgagtacgcagggatatctctactgtctcctgtaaagagagacgatccgctttgattgaatccttatccgtccgatcagtagctcgatatcaccaagatggcgcctaagaagaagggaaataagagacaggaggctgattgggaagccgagctcggtgaggctgcccccggagtcgagcctaccccccaggaggataccgctcccgccgaggaagagactggcggcggtctgctcgccgctttgaggaaga

SEQ ID NO: 2630 - DNA, 495 bp, Aspergillus oryzae
ttcatgctgtgcgtatagtactctgaggtgtcagttttacctggcattgtattattttattcggccggttgcttccagcgtgcgcactctggcgcatcctctgccgccaaaacctccccctcatccccgcggggcttgcagatcgtgtgattcggagtttcgtcttaatacggaagactctcttataattcaattctgacaccggttcttcggaaggggctgtgaaatcatgggtttgctagcactaggaaccgctctcgattggcccgaggcgaagaagcgagcggatcaggtgcgaaaatggggtatcgagcaattgctcgccaattggcgccgagcgaaagggaaagagcgcgacgctcttctttggggtgatgaggtcgagtaccttgtcgttgccgttgatgacgaggcgaaaaaggcccggttatctctcgctcaggccgagattctcaagtccctggctgaggatgaagccaactggaagtctggagg

SEQ ID NO: 2631 - DNA, 490 bp, Aspergillus oryzae
ctctattgaaatactccttgtgacttcataatgaggcagtcttcatctttcactgccggactgctgtccatggcgtcgcttgcttctctcacgcaagcggaattaggcaagatccaatggaaaggactttgcgacccaacaaatgccacagggccgatgatctgcggaacactcgacgtgccattggactacacagattctacatccaacaagactttgactctggatatcggcaaatggccggcggccaagaaagcaaccgcagagcctgtctttgtcaactttggtggccctggtgtaaattccttcgagggccttggatcatatggcaaggaattccaaactatcctcggtggacactctgatgtcataaccttcaaccctcggggtgtcggaaacacgattccattttcgtgctatagcaatgactcctccagggagcttgcatcgcttcaggctccaaacgacggcacagcgtctaatacagccc

SEQ ID NO: 2632 - DNA, 576 bp, Aspergillus oryzae
tcgacccacgcgtccgctcatttctggctttgactcgtcgcgatggactccgaagcacaagcacggtttaatctcatcagcgagaatctcgccgagatcttgaaccccgagattatcgaaaacatcttaatcgaaaagagaaatcctagaatctattggggtacggcaacgacaggaagaccacatatcggatatttcctcgctgcgctcaaaatcgcccaattgctccgtgcacaatgcgacgtcgttgtcctgctcgccgatgtccatgccttccttgacaacctgaaggctccgcttgagcttgtggagaaccgtgctcagtactatagaaagatcattacggcaattctcgagtctgtcggcgtgcctaccgataagcttgagtttgttcttggcagctcctaccaaaaaagccccgaatatgtcatggatgtgtatcgcttgtctagtttgatctctgagggagatgctaaaaaggctggcgcagaggttgtcaaacagaccgagaatgctcctttgagtggtcttctgtacccggtgcttcaggtccttgacgaagagcacctgaaggtt

SEQ ID NO: 2633 - DNA, 525 bp, Aspergillus oryzae
agcaggcaccaccaccccatggcttatcttcaactcctgtagttctggaggcccctgtcctccaaatttgctcaacagtttctactcagttcctggtatggtaatgttttatattctactttcatggcgcccacgggttctcgcaagagagtaaagtccattccgtcagttgcggactcacaatcgtcaaacgatgggacgacattgccgtcgaaagacagaggacgctcgggttcactgaaacagaggggtagtggaaactggcacccaggagcctggcccgtttccaaatcatctaaagcggccccagttaccgaggttgcccgtgagagcatctcggttgcccaaaacgtagcttcaagcctcacttcctcgccagtatcgcagcttgcctctcctaaacaccctcgaaatccttctctgcaacttactagaaaagttggcgcttcgactcgctctcttcctgctaacgccactacaacccgaatcaatatcgcatccgatggcactgcgtcttcaccagca

SEQ ID NO: 2634 - DNA, 482 bp, Aspergillus oryzae
  modified_base (218)..(218): n is a, c, g, or t
cccacccccgcgtggaagtaacattgaccggccgaggagagtgagaacagacctcaagaagattaagaaagaaaggccaacttgcaaccatcacccctgccgatattacagtgtcgactgaactttccggagggtctccgttttcgtttccaatcgattattattgaattttaatttgtttttctattttcctttttacccagttcccctttttcttntcgtccttctgatttgctctggaatccggtttgggtgttgagcattcgcccattcagagtcgacattctccagtgacaacagtccagaccttccaaataacacaacaacacatctcctcctctcattctcctccccattctcccctcttgattgcagcatcacagatcatggctgacgtttaccgaccatatcaacgcgagaggtctcgttcaccccgtcgtcgttcgcgcagccctcgacgtagccgtcgctcttattcgcct

SEQ ID NO: 2635 - DNA, 531 bp, Aspergillus oryzae
cggacgcgtggggttcgaagagagcacgagcatcccctcccacccggccgcctggcgcagaaccgcactcccgcacccagcagaagctgtggctgcagcgcactgccgccctgaacacctcccctcctgatggccatggcgtcgcagcgaccgcatccccgtcggcgatggacccgaccttcatggccgcagcgcacgcccgaccaggagccggatttgatgcaggaagaggaattgtaaatggagtgtcacgggccggccctgcgtatgacaatgaagcaaagcacgtgcgcaaggcatatgagaaaaccgctttggagcttacagtggtccgacggttccagtcaccgaccggggatagttttcgtcgtttggcgtcccttgtcaatgatacgaaatcgggttccagccaccagcgccattcgtcccttggcaaaccaattaagtcggcgcccgccttgacattgctccaaaatggcaaacagcagtctcccagtcagaacagcgcaagtccagagccgaaacaactaa

SEQ ID NO: 2636 - DNA, 485 bp, Aspergillus oryzae
atggctttttggataattatggtggtaatcgccctgcgaacccgtccagtcgccgtcagttccaccctccacctgcctttccgacgctggggtcgccgtctgccattgagatgggtaatatcggtgagcggctggaacgaactcaaacacggcatggcccagcagctacttttatggggcaacaatcgggcttgggccctggctttggggccgcaggctttggcgatcacgcgtctcccgcaccatctatcctccttgacccgcatcatcaaccgacagcgtcagatttccgaacggcaaaccgctctgccctttatccacggttcaggtcgtcgcgtccagtgcgacccattactgacccaatcgaggacgacaatgaatcaccctcagcagagatccgccgtggtgctgtcaagaagtcgccacatacaacgacgggatccagcggtggcgctatcggtaccagtgatagcaacctgggagag

SEQ ID NO: 2637 - DNA, 464 bp, Aspergillus oryzae
cgaaccgcggatatgcggacaacccttcaccgcctgaccatcacaccttaaatcccctctaatgaatttattactataccttctggcacaacatccctcagtcgacatgggtctgcttacgggaagccgccaactcgatgcggccgatgcccacaactttggtgtggattgggtcatccactaccagtttgaggatactgaaatgctgaaggccatcgaagaattccgaaccctcatcaaagatctgcaagatgcgaaattacaagtgcaagttcgccctggctatggcgcttcgttgttgctgtgcatccgcgtcccccgcgaccatctggggaatatggtctataaatctcgagtaaaggattggctgtatggaattatccacgaactccccatcggcgacgagcacacttcgatcgactccgaatcaccggctgaagaactgcgatccgtataccacgccg

SEQ ID NO: 2638 - DNA, 558 bp, Aspergillus oryzae
  modified_base (189)..(189): n is a, c, g, or t
tcgacccacgcgtccgctttacccttcaggttctagcgagcacagtcaaaatgcctctcgggattcacaatcccttgccctcgtctttgaatagcgagtgtagaaaggctggtaaaattctcgcctcgtttatcgaccctcgacaagcttttggtcctgataagatcattcctcctgaaatcctagctngtgctaaggggcttgcggtcctcaccgttcttaaggccggtttcctaggctccgcccgatttggatcgggcgtagttgttgcccgcttggcggatggctcctggtctgctccctcggctattgcaaccgcaggtgccggattcgggggtcagattggattcgaattgactgacttcgtcttcattctcaacgatgccgccgctgtccgaacattttctcaggtgggaactttaactcttggtggtaacgtttcgctcgccgcaggaccggtgggccgcaatgcagaggctgccggagcggcaagcacaaaaggcgtggccgcagtcttctcttactccaagacgaagggtcttttcgcaggtatcagct

SEQ ID NO: 2639 - DNA, 255 bp, Aspergillus oryzae
acggtatcgacgcatatggggtgggtgaagacccaacatcaccacgacgtcgaaaacaccgaaggagacaacgaggtcgccctagaagagatgcaaatgcaatgacacaagctagaggaaattcccaatctagagacacagatggcagtttttctccaggtataccacgcccacttgtggtggggacgacacaatcaacacagcctccacaagggcctgatggagtaagcctacaatcaagcggcgaaacctccc

SEQ ID NO: 2640 - DNA, 557 bp, Aspergillus oryzae
  modified_base (277)..(277): n is a, c, g, or t
ttctgtcccaaaccatgggaaccaccaaaccgcgcccttctggaaaagcttccctcgcagccgcccaaactttacccgagaggactttcataatcgacaatggcgcgtatacgatgaaagccggctatgcgcccgactctatcacggaagatgaaacagaggcactatccgcctgttctgttatttctaatgcgctcgttaagactcgcgacaaccgcgtttacgtgggttcgcaacttggtactcatgttacggattggaacgagttgatgtttcnacgtccggtcgagaagggatatactgtgaactgggaagcgcaaaaggaaatctgggagcattcattctttgacgaaaagactgtacgaagcaaggacctgcggattgccaaaccggaagaaacgactcttgtgcttaccgaggctccaaacgcgttaccggcgctgcagaagaacgcagacgagattgtgatggaggagtggggctttggtggctatttaagatgcgtgggtccgtcgctaaacgcctggaacgaagtccaatctttatttggagacccc

SEQ ID NO: 2641 - DNA, 517 bp, Aspergillus oryzae
gtctatgcgagctacgcactcggacaatagacggagtgctgccggaagatctgctcaagtcaactttgatccacttactgcttgctctcgactttcttcacacagaagccaagattgttcatactagtatgatattcctaatactgattgtgaaaccgcgcacactcctggagttccctattgacccaatatcagatatacaggaagataacgtcctgctcagtgtggaggatgagtcaattctcgttgattttgaggaagcagagagttccagccccggccctcgcaaagttgttggcgatcgggtgatctattcctcccgagacctagggatgccaaaggtgcatggccgtcctatcttgtcggacttcagtgaggctcgctttagctcgagtctagggaagcagtgggaagatgtccaacctttcgtctaccgggctccagaggttatattgcggatgccatggaatgaaaagattgatatttggaatataggtgcccttgcctgggatctttt

SEQ ID NO: 2642 - DNA, 390 bp, Aspergillus oryzae
  modified_base (188)..(188): n is a, c, g, or t
  modified_base (333)..(333): n is a, c, g, or t
  modified_base (347)..(347): n is a, c, g, or t
gtcgacccacgcgtccgccccccccttttttttttttttttttttttttttttttaaggaatggctaaatcgagtcaaatttgctctgcattgacatcaaaagaaaactcatcagatcgttcataacagttcccattacctctataatgcgacgacattgcagcaacgtcgttgaccctgcgatttgngatagcttagccatgatgacccaaagcttcatccatgcatgtgcaaagtatccttgcaaggtatcagatagcttccaatcatacggtttcaaggaaccacttatagctcgttagggcattagtattccaaaacctaagattgcangatctctttggcgncgccggcatcacggacagcgttggcgacgcgagttgcgagatc

SEQ ID NO: 2643 - DNA, 501 bp, Aspergillus oryzae
cccacgcgtccgctccaatccctcctctaataaaatcaaaactacttaccgtcgccatggctcccaaggttgctatcgtttactactccatgtacggccacatcgcccacctggctgaggccgaaaagaagggtattgaatctgctggcggccaggccgacatctaccagattgctgagaccctgcccaaggaggtcctggataagatgcacgctcctgacaagaaggatcaccccattgccaacccggaaaagctcaaggaatacgacgctgtgctgttcggtatccctactcgttatggtaacttccctgcacagtggaaggctttctgggaccacactggcggcatctgggccaccggtggctactggggcaagtatgccggtctgttcgtctccactggtaccctgggtggtggccaggagtccaccgccattgctgccatgagcactcttgcccaccacggcttcatctacgttcctctcggctacaagaccatgt

SEQ ID NO: 2644 - DNA, 55 bp, Aspergillus oryzae
ttttttttttttttttgcatcatacttttcatgatatagacacgagggatccgat

SEQ ID NO: 2645 - DNA, 642 bp, Aspergillus oryzae
tcgacccacgcgtccgcccacgcgtccgcccacgcgtccggcgagatgaagcccgtgatgcgctctctaaagtatccgtcggcgctacacgcgctgctggtggtgaagcaatgcaggttgattcaaatggactgcctgatgcagttttgtcacgtgttgaaagtacacaagcagcgctctcgaagactcgccgtaagcgcgctgttccggaaggctgggcgaccagcgatgctatctccacatataagcccgcccaaagcaccgagcccctctaccctggtggcaaggcactgtctgttaacgcttccggagagcttgcccttgttgggagcgctgacggcgttgttggtgtcttctcgctatctcagaagcaagtcgttcagagcttgcaagcaaatggtccggttacggatgctatctgggcaggtgataaggccgtcgttgcttcgtctaccggctcagtgaaggttttcgagaacggcaatgaagttgctgacttcagctctcatgctggcgcagccactgcgctcgccctgcaccctactggcgacatcgtcgcatccgttggcgctgacaagagttacgtgctttacgacttgacgactaactccgtgattacccagatctttcagtgacgcatct

SEQ ID NO: 2646 - DNA, 515 bp, Aspergillus oryzae
tcgacccacgcgtccgaacttcccaacgccctccccgcgtccagcaccccggccaaaccttcccacctacgaagaaccaaaatcccaaaaaaagcccgccaaaatgcccacccccgagtccgccgccttcctcgccaagaagcccaccgtgcccccaacctacgagggcgtcgacttcgaagacaacgtcgccgtccacaacgcccgtgacgccattatccgtgagcaatgggtccgcagcatgatgtctcgtctcgtcggtgaggaattggggaagtgctatgcgcgcgagggcgtgaatcatttggagaagtgtggggctttgagagagaagtactttgagctgttgaaggagcgcaagatcaagggttacctgttccaggagaagaactatttcgagaagagtgcttaggtggattttgtgcgctggaatggaatgaattgaattggattgagtataggacgggttttattttctttgttaggctgttttctagatcaattgtatcattttt

SEQ ID NO: 2647 - DNA, 436 bp, Aspergillus oryzae
ttaatgcagaaggcatctcatccgacttacagaaggttttctggagtggtgcgtatcgagccatgattagcccgcaggattacacgggagagaatcctctttggaaaagtgaagaaccgtattacgacagcttctattgtatatgggactcataccgtggcgtacaccaattgctgactctgatggatcccttgtctcaatcccgaatgatcaggagcctggttgacatttaccgccatgaaggctacttacctgactgccgtatgtctctttgcaaggggtacactcaaggagggtctaatgcagacgttctcatcgccgatgcgtttttgaagaatgtcagcgatgtcgattgggacacagcatatgaggccattgtaaaagatgcggaggttgaacctgcgaattggggtgtcgaagggcgcggtggtcttcg

SEQ ID NO: 2648 - DNA, 518 bp, Aspergillus oryzae
cgctctccctcttctgtccctcccgcttcctcccctttatatcaccgttttaatctgtttcgtttttttatttgatttgttcactgctctcgtgcgtttcattccctttcggattcagcccggacaatcccccttaactatccacccaccgctgccactacccctacataatacaagacggtcggtacttgtcggccaccttatatctatccgctggccactactgtccgcctccaataccaacctccctggtttgctggactacctacttaactggtgttggacattgattactattaaaaactaaaaaaaagtctctgggctgtgcaacatcctgaacgttgccacaactaccggcgtctcttactacatcggccactgccaaaaaaaagacatcgagatctacaactggatcaacctcgccacttggatttccccataggacctgcattactcttcccgttgacaggcgtctccattcccttcatggatccttaaggcgacttcttcttgttccg

SEQ ID NO: 2649 - DNA, 322 bp, Aspergillus oryzae
gactgttcaggacttccttacccggttaccgccttctgtgacggcgtcggcggatgttgggccgtggatctatgtcgataatcccggtgcagggcaggaggagaaggatattgcggggttggttggtcgggggacggagatgttgagggcgtttgaggcgaaaaaggttactattgaggtggagatggagggggcgtctgcgctggcgaggggccggaagttggtgccgttgcggcgggggttggagggggagattttcgcgttggccagggagactggggtggtttcggggaagtggatgttgtttcttggggaggaggtt

SEQ ID NO: 2650 - DNA, 575 bp, Aspergillus oryzae
ctccccctcgcctcattcccttctccatttctttccctccacctttaaccgccattgtcccttaatcttgttgagtttctattctcgggaacttttttctcccatatattcctctttcgcttgcctctttaaccctcaacgagcttttcactaagtgtcgttgtctccgtggactggggctgtctccttcgaacgcgtgagaaagtaacctttattccttctcacatcaagcaaaggaaatttcccccgccgccttccttggctccaatctgacccgacgagtcctctttgtcgctagcctcaattcttctctggtgacatcgtaccattggctctattcgccccagcctttggactgcatcgtttttggccacaaccgtccacgcaacgaaaagaaaggattcacggactcccactaaaggatcaacaaggaaaagcaaacagtcaaataaagcgcacttcgttcgctctccgactttcatccgtttacaaccgcgttcccggttttgatacgtgctgttgaagaatccctccatgttattttactaagcgatactcacgacgcaaaactaaag

SEQ ID NO: 2651 - DNA, 493 bp, Aspergillus oryzae
  modified_base (35)..(35): n is a, c, g, or t
cgctccatactcggcaccatgagcaacgcacaagnatattacgagctttatcgcgggagcagcctgggcctgtccctcaccgacaccctcgatgacttgatcaatgatggccgaatcgagccccagctcgccatgaagattctttccactttcgatcgagtgatcaccgaggttctcgcagacaaagtgcgcgccaggctaacttttaagggccacctggatacatatcgcttctgcgacgaagtatggacattcctcatcaaagacgtcaccttcaaactggacaaccagacgaccgtacaagcggataaagtgaagattgttagctgcaacagcaagcgccccggcgaggcatagcgacatatcgttcccagacattcatggctcttttgtgcatttttgtttcccttgggtcctgtttcctggaccggcgttatgataatgtcagcatcgggttgactggagcatggatttcttgatattaggggttttt

SEQ ID NO: 2652 - DNA, 607 bp, Aspergillus oryzae
tcgacccacgcgtccgtggacacttcctctgatattcatcatcctcctcccaggtgtacagtaccttctaggaccatcctcacatcgattcccggggaataacgaacgagtcatcgttacgtcgaaatcccttcatcatacactgcgagaggtgacatacactctttgagtcgtcgtgctaggcatacataacttcccacgctacactccaaggtcctcatctcgacacctgatccctgccgctgccttgtttggttggatacaaaagacactaaacatacgccaaaagtggagtgcaaggaccttgaggacattcaatcacaacggtcgacacctcgttgcacaacaggatttgatataaggggagcggggcaggaaaacccataaattggtccgatataccaagaataccaagcaccgacatcctgcattccaagaaaacctcccctcccttgcgagtgtctccgttcgtttcccacgtggtttctatctttgcaaattccttatcacctcaactttgagttctattgggctatcgtgcctgccagagagtttcttttgagctattgctcttggcccgtgccgtcgtgcatcggtttttggaaag

SEQ ID NO: 2653 - DNA, 516 bp, Aspergillus oryzae
ttcactctttattactactgcggtcgctccttattttcttttcgtctcttctgggaaggatttgcagggtgaacctcctacgactaccctgcctgaccttcttctatacgacctatccctacccctctgtgttcgcaaacaaccgtgaagatggcaccctccgcgctcgctgccctcgggacatggaaagaggaaaagcgcgtcacatcctctaaaggcctcaacgacggcccagagaccgaagctctcgtctcgccccccagccccgcggttccagattacgatcctacgatcggtgcaaagccctgctcgcctttttatcgccatgcgacgcaaaacttcactggacaaaccccgaattccaccctgaaagtacccgaagccattgatctggaaaccggcggcgtcagtgcatatcgaccatccggggagtcagataatcgccgcagttcaaagctctggacagaaaagaagagacactgtgactggctgagggcattgccgaagaagcagaga

SEQ ID NO: 2654 - DNA, 50 bp, Aspergillus oryzae
cgttggtcaaacttttttcatagtgggaggtatcatatcattcttgtttg

SEQ ID NO: 2655 - DNA, 511 bp, Aspergillus oryzae
actggtgagagtgagaaaccggtagtagtggagaagagtgttccaaaggctgctactggaaatgaccctaccccaaaggttgtatctggacccaaaagagtgtttgggaaaaagccactcaaggttgctgggcgccgtcgggaggaccaaggggccccgttgtctttcatccagccaatcatttttttcgcttcgttgaccgcgactacggagagatacgctcagatattgttagaggatctacgggctgctgcgaaggagagagccgaccccgagaaccgcgagcgtggccttcttcctccccaaattcacgacctgtcatacattgactttgacgattacttcaccacggccccgaagcctccgtccacctcgcctggcacacgctatgtatactgcttattgatccctacctacaacatcgacaccgtcctcaacactttccttggccatctggatgaaacccaccacgacttccgcattgacacctcgtctttgtcaactttggctg

SEQ ID NO: 2656 - DNA, 493 bp, Aspergillus oryzae
ccaccaccttgacccttcccccagtcccttgtccatgtcttattctagcacataattacaccaaaatgcggggagtacaaattttctctgggacatcgcatcccacacttgctaaggtggtctgcgaccggttagggactcaacccgcccgggcagacttgggtaaattcgccaatggcgagacaagtgtaaacattggtgtctcagtacggaaccaagatgtctacattgtccagagtggcagtgagaagatcaacgacagtgtcatggaactcttgatcatgatctctgcctgcaaaggaggttctgcgaagtccatcacagcggtcataccgtatgctgcctgcctagtctgactatcgcacaattgatgctaacctagccgaggtatttcccatactctcgccaatctaaaaagaaaagccaccgtggtgctattaccgcccgcatgctagcaaacctcctctcagttgctggagtagaccatgtgata

SEQ ID NO: 2657 - DNA, 567 bp, Aspergillus oryzae
ctagttctagatcgcagcggcctttttttttttaggagcaacacacataggcccttctgtcctataatattcaggtcgagttagccctcgatcctgatcctctgtgtgtcgtttcttcgtttttgcactttactatacaaccccgcctctaaggcttttcacaaaaaaaaaccgccaaaatggttaacttcacaatcgaagagattcggtccctgatggacaagccgaagaacatccgtaacatgtccgtcattgctcacgtcgatcacggaaagtccactctgtccgactccttggttcagcgtgctggtgtcatcgccgctgccaaggctggtgaggcccgtttcatggatactcgtgctgatgagcaggagcgtggtattactatcaagtccactgctatcaccctgtactccaagtttgatgaccccgaggatctcaaggagatcgagcagggtcacgacggcaacgagttcctgatcaacttgattgactctcccggtcacgttgacttctccgctgaggtcactgccgcccttcgtgtcaccgacggtgccctggtcgttg

SEQ ID NO: 2658 - DNA, 344 bp, Aspergillus oryzae
ctataataggctttatcttctgccaccccttcaagttttcttttttgtcgggaacgagaaagagaggcgagaagacaacaggtttaattagagagtcctgtctcccttccacgcgacgcactcatatctcttgtcatcccttgcgtttactgggcctccgccgctcgacacccgctcaccaaactcaaaccacaaatcgagtctatctgaggattcgaaatctgactgttaaatttcgctgtgcgaatttggctttggacagatgattcttccagacgcaggaagggccgttccgatctgatctgttccctgcgcactacggactgcctgatcttcctcctccc

SEQ ID NO: 2659 - DNA, 504 bp, Aspergillus oryzae
  modified_base (153)..(153): n is a, c, g, or t
ctccctactccgcacaatccgttgccagacgtcgaccgagtactcgctcattcgatacggcactcccgggaaacgtttgttgtttgatcatgctgggggcggagggtttctgtattcactcggctccacacttttaccatgggagaccgatgngcaatcttgcagtgcaatgaacatgggccggcccgctagttcctcggatatttcctacggatcgtttgtgcttctctggccagtgttcctccggctgtgcctaagccactttgttgaaacactttcgtgcgcgctacagggaagagcagtggttacagaagctgggatgtctattttcgagcattctcttgcatttgccgaggcggagtctacaattagtcaaacgcttgggctaggactgtttggtctacccaagcaaagtgctagcaaagatgacttaggagaaagcgcccaatccacccttcatctacttagtaggactcaagttctcgagcggatgaatgtgacccc

SEQ ID NO: 2660 - DNA, 441 bp, Aspergillus oryzae
  modified_base (318)..(318): n is a, c, g, or t
cgaagttgctttttacatcgaataatttcttctttgcatatgattatgacctcactagacatattggcgggcaaagtttggcactcaacaatagccatctgccactacacaaggtagtggacgaattgtatttctggaataggcatctcatggaaccatttatcacaatcgatgcccatagtttcgtgttgccgctgatgcagggttttgtcggccagcgggaattcacagtggcgactacagaaggccaccgaccgacaagactagataatcctcaagagagctcggaggggcgtatcgtcgacgaaacacatgaancgcaagcccctggtctcgataagcgaaaattcctccttaccttgatttcccggcggtcggtaaagcggcctggcctccgatatctgcgccgtggtgttgatgatgaaggaaataccgccaaca

SEQ ID NO: 2661 - DNA, 541 bp, Aspergillus oryzae
caaagcatcattcttactactggaaattgcaatttggtctgtcttggtggagtgtgatatccctgtctgcgcgtacagcccgatagtgattcaacatggcggatacaactgtcgaacaagctcctcaaaaacaacgcaagtcagtcgcattcagtgaaggctctgtcatcatggataccaacggcgaagtcacagaggcgcctaaggtggagaagcccaccgagaatgaagccacagccgacaagtcggtcgatgaagttaccgaaatgttcaagggattgtccaagaagaagaagacaaagaagcctaaggatgcagaggccggcgaaggcgacgaagcttcccccgcagctgacggcgaattcgaccccaccgccttgaaaaagaagaagaagaagaccaagaaggttgacgcgggcgatttcgaggccaagctggctgaggctggtgcagcagagaagggagctgaggagacagaggaggtcctccctgagggcgacctcgaggccggaactggtatctgggcccacgacgcaacgca

SEQ ID NO: 2662 - DNA, 563 bp, Aspergillus oryzae
ctctccggatccacgtaagacactaagacaccgatctgaatcaaagtcagatactacactcgattcgcaacaatggcggaaccggttgttcagctccaatgcggagtaaagaatgacccatggggtaagcaaggaaagaactcgttagctggtcagctttggtccaagacccccaagaatggagatgtaaaagatgaccaaacatactctgagatgtggatgggcacatacccgactgttccttctcggatcctttcaacaggcgagcttctctccgattatctgaagaagaacccacagcttgttgggaaatcggcgcttgataagtatggacccgagattccgttcttgccgaagatcctctcatttagtaaagcgctccctctccaagtccatccagacaaatctctagcagagcagcttcacaaagaaaatccagaccagttcaatgacccaaaccacaagcccgaaatcgcagtcgcgctgtccaatttcgagctctttgctggtttcaagcccctcagtgaaatcgaagcgatcatgaagcttaagccaattgagca

SEQ ID NO: 2663 - DNA, 580 bp, Aspergillus oryzae
gccttcagtttcagttgcggagcgtgctataaacaccgaaatccctggcctggcattctcgacaatcttcacagagcacaccgaacctatagcggcgatgcttccagaaccagttccagagccggagtccacggtggctgtgggtcaggcttcagccgagcatgaagtccctgatttgacagtatctttcataccaccagaatccactgagccgattgcacctcgggaacgcgagattcccgtccctgcgtctccgcaattgtcggtttctaccatccgttccgtggaaacactccctgtcgaggacactccagctacggccatcatcccggcagccctgccatccgacgagaacgcaccactcatgcaaacgagaggtgttatggtcgacaaacccacttcagagtctttgccaattgtggttgtcgaagacgaagcaaatgatagctctgattatgacacagctggccaccagaaggatgtcccctcccctctgaaggctatctccggcaatgctgtccctcgccatgcaagacgccgatcgtcaaaccaggcagatcaaggtgctcagacgatactg

SEQ ID NO: 2664 - DNA, 554 bp, Aspergillus oryzae
ctcctgtgtttggcacacagtttatgcccagtacgacatattatttcattccatcaaagcaaggacagacaaatcagtatgcctgtcactttcaaagttgcaaagcacgaagcagagaagtggtgggcccaaaaggccaccactccgggagaattcctcgaaagaacgtctcctagagattacagacgctccaaacgaattgtccaaagttctttcgaaaagctcccgttctatgacacgcacgacctacaggatcgccatatcacaccatcagaaaacggtcttgtccgggcaatcttttcggcgtacagcagtcattataaccttgtcctccgcccggaagatgtgtggttttccatcctatcccaactcggcttctacgtcaacgcgcatgccgaagaactaagatcatacttcgtttcgcatgagggacagaaagaactcacagtcaaaagtgcaatacgagactttggggctctagcgatggcaatgacagagcagattcaggagaacgtcaaggacccggagctgcgagaatggatcatgccggcttt

SEQ ID NO: 2665 - DNA, 498 bp, Aspergillus oryzae
ccgtacacctttttctagcacatatcagtactgcagtctcacgatgggcaagctacagccagattgtgatcccaatgatctccctcctccgtacgaacaggtggtctctggacaaccctctttggacgactctcttccacctctggctggaccttccacagcgacacccccgatcgccgacaatgaagtacaagacaatgacagatctgagattactgagcgaccgtctacaaccatgtccccctttttgagtcaagatcccaccgcacttcacagtcttatcagccacgaggctcgcatacccccacgaccgtgtctaagtgtccgcggcgcacatcaagagacccaccccgaccgaaatgatcgcaaggaaaaccgcacggagtctgtggtcgattttgacttccggatcaatctgacaaattacttggtgggcgaccccgatcacgatgcaggctggtatcagttgcgcgtagcgcgggacggggatgggcaaaa

SEQ ID NO: 2666 - DNA, 188 bp, Aspergillus oryzae
gacgttttgtgtgtcatctttgatcgtgaactccggcccagttggattcatgtccaaaggttctagaagacaacagccgcgtacacaagattgagatagatcgagtgtcgtgcattcgtggcggagtgaaggacaccatttgttatgccagattttgtacgtaaaaaagaacgttcgttgctataatg

SEQ ID NO: 2667 - DNA, 548 bp, Aspergillus oryzae
acaatgccgagttccaaggactgtggcctatgcgcacccagaaggagagggatgaagtctgttctgttttcaaccttgatcttgacactgcaaagcgctacgtccaatttggcgaagtttttaacatgcttcatgctggagcaagctacctacgcgtgcatcaacaagggtttggtgcagtgggcgtttctcgaaagtacggtaaacgttcttatgcccggtacccaatcttttggggtctgaagaaggttggaaatctaccgaacccggacccttcagacactggcgaatggaacaaggagttaccaaaggacagcgagattcgggttgacccgaactacgaggctagcagaggagagcttaagcggcaggcgcaggaatgggcaggcttggatcaaaaccctgatgccgacctgttggtgtttgttggaagatggtctatgcagaagggcgtggaccttattgctgatgtgatgcctgccgttctggaagcacgtcccaatgttcaactcatctgtgttggtccagtcattgatctttatggtaaa

SEQ ID NO: 2668 - DNA, 565 bp, Aspergillus oryzae
attaactgggtacctaccaaattagatatcccagtggatgtgagcgaggagcctttggatttaagcccatatctttcctctggacaaaaagagggcgaagagctcctgccagacatcgatgcttccaaaagggattttgtgcctaaccaatatgctttggatcaacttctcagtatggggttcccgagggcaaggagtgagaaggcactctacacgactggaaactcggatttcgaagctgcaatgaactggttatttgctcatctggaagatcccgatattgatgaacccttgactatcagcgagatcagggggggaggaaccgacgcctcacatgacccagcaaaagtggcacaattggtcgaaatgggcattgacgagtcccgtgccaaacgagcattgggtgccacaggtggtgatgtcaatagagctatcgactgggtgtttagccacccagaagcagatgctgaaggctatggtcgtgaatcaaacacccattctgatggttgccctagaaacctcggttctagtgatgtaccagctaggtataagcttcgctctattg

SEQ ID NO: 2669 - DNA, 502 bp, Aspergillus oryzae
  modified_base (108)..(108): n is a, c, g, or t
aaataatgtaggtttggtagtcaatgttatcgaaagcgacaggggtgatcataaccacgaggaagttgaagatccagttcgacgatgtcgctagggcattggctggancacgaatcttcaaaggcacaatttcggcgggatacagccaggtcattcccagccagccgatagcaaagaacgtattgaacacaaataggaagacaatgcaggcgatgttggcttccgaggttttgagactagctgtgatggcgaggataatcatcgagattgacatacccgcggcaccgaaaagcatcagcgtccggcgaccaaatttttcgatcgtgaacaccgcaatccaagaggcgatgaagtactcggttccgttgcatgccgcaatcagtcgagagttgattagggtcatacccatctgctcttccaacacaaccgggatatagtacgtgatcagattgatgccggaaatctgctggaacatctggttgacataggccaacacggtgcg

SEQ ID NO: 2670 - DNA, 474 bp, Aspergillus oryzae
catcgatttatctctcaatttttatactttccctgccatttccgttcaatgatttccttatatttctgactagatcgactgggacacagaataaattacaattccatacatacattccttacttgaacggatcctccctccccccaaaaaggtcttacccaaaaggcccgctgataccttggaaatcttaaaaaaaggcaccctctcattcatcgagcttgctgtcccgagccatatctacctttgagctattcttgatctcatcttccggatacgtgcttctccgccccattaagttctacgccatctcttgtctcaaacatgcacgtctggtcctgaaacctctcattatcttgttgatctctcgtacttcgtcgtgggcctctacttgacatcctggcaatcttgcccttttattctcccctcattcataatcagtagcctagtcggcgaaagaagcaacgaggaaggggg

SEQ ID NO: 2671 - DNA, 508 bp, Aspergillus oryzae
ccgctcccaacctccctccaacctccccagcccaaccatgtggctgtggcgaggcgctcaatcggcggtcttctattatgccacctgtacaccatgtgccgagaaagtcgatcgccgaaaacgtatgaaagaagccgaagccgctcgatcccgtcgcgaaaaggagaagaatgaagagatcatcgccgaccaacctcggccgttccctcaaccaaccgccttcagtaccaaccccggatgggccgaggaaattgcgttaggccctggccccccggcaagaagaggtggcaaccggtctgcgcatcgtcgtacggacagttggaatacggatggtatctcggcgaactcctgtcatgatgtacgtgcatcgcaaaagaaagacaagagcagcctgatgcaaccgattgaggaacggtggaaccgcatgcgatatcagcgcgaagacgagccgttatggggtgaagaaatggaggtgaagggctcttcggttggactatcaggtagcggg

SEQ ID NO: 2672 - DNA, 529 bp, Aspergillus oryzae
cgctgaactgacattgtattcaccccacttatctacatattctgcattcctcctggttgtttctctcgtctttctggtaccccgcactagaaaaagaaataaatgagttcttccaacgaagatcctgtccccctgccagggcaatggccagttgaccctcaatatgatgtaccgattgacgaagaccgtatatgggtggatggatgctttgacttcagtcatcacgggcacgcgggtgccatgcttcaggcacgtagactgggaaaggaactctacgttggtgtgcattccgataaggcgatactcaagaacaaaggcccaactgtgatgactttgactgagcgtgtatctgctgttgaagcatgtcggtgggtaacttgctgtgttccccatgctccatatgtgacacaattaccatgggtgtctcattatggctgcaaatatgttgtccatggggatgatattacatctgatagcaacggcgacgattgctatcgatttgtgaaggctgcagggcgatttcgtgtgg

SEQ ID NO: 2673 - DNA, 517 bp, Aspergillus oryzae
cccaagtcaagatgggcgccgcatatgaactgtgtcaactaggttgcgattttaacccggcgttatctttgcattacaacgcattggctgcccgacaaggagagccagaagcggaaatggccatcagtaaatggttcctttgtgggcatgagggtgtcttcgagaagaacgacgagttggcattcacatacgctcagcgtgcagctcagagcggcttcccaactgcggaattcgctctgggatacttttacgaagtcggtatcttcgtccaggttgatattaaggaagccagaagctggtatgccaaggctgcggcaaatggaaacaaagacgctactagtcgaatcgacagtatctcacgttcgaagacgttgtcccgaagggatcatgagcaggttgccatcgctcggatcaagtcacgctacggctctcaccagcggaatgaatccatgcaatcagcttcggagaatcttgaaatgcccgatccttcccggatgagtctttcagataatacccc

SEQ ID NO: 2674 - DNA, 520 bp, Aspergillus oryzae
caaacaccgcgcgctcggtcatagtgagccttatcgccgaaagggttctatgtcatctgcctattgccacccataagacaaagaggcggccctgacaaatcactttcacgtgtgccttgccaacattgcccaatcccttttccattgacttccataaacacataccatcagtgttcgtcaaatatcgccttctgggcactatatctttagcaaaacatcagcagtgactttccctattatcctcactcacatcctcattttttgttgttgtctgttgtttgtctgcgactgacaatcagtctgttgggatgacctcgtttactgttgcctcacctttgggccgaagcgacaaaacaaacatgaatcgtttatcatccgtttccagcctaatgtcgcccccagagtccaaaccgttcgatagttttaaccctgcattttcaccccatcaactgtcacagaatccctcatacagccatgacatgaaacttcctcccatctccgttgaccggaagcgaacaca

SEQ ID NO: 2675 - DNA, 479 bp, Aspergillus oryzae
catccccgcaacaggcgacaacccagccaccatcctggctctgccactgcgtccctccgacgcaatggtttccctgggaacctccaccaccttccttatgtccactcccaactacatgcccgacccagccacacatttcttcaatcatcccaccacagcaggcctgtacatgttcatgctttgctacaagaatggcggcctagctcgagaacatatccgtgatgccatcaacgataaactaggcatggccggggacaaagacccgtgggctaacttcgataagatcacactggaaacggcacctatgggtcagaagaaggattctgatccaatgaagatgggcctctttttccctcggccggagatcgtcccgaatctgcgggctggacagtggcggtttgattataaccctgctgacggcagtctgcatgagacgaatggtgggtggaacaagcctgccgatgaggctcgtgctatcg

SEQ ID NO: 2676 - DNA, 602 bp, Aspergillus oryzae
tcgacccacgcgtccgctcttctcttccttccccttgaaccttgtttttccatatcttaatttacgaggaagaacaggaataacaccgcaatcatgggttacactgatttggatcaattggctatcaacacgatccgtgttctcgcggtcgatgccacctccaaggccaactccggtcaccccggtgcccctatgggcatggcccccgtttctcacgtcctcttcaacaagttcatgaacttcaacccccagaaccccgactgggttaaccgtgatcgctttgttctctctaacggccacggttgcatgctccaatatgctcttctccacctcttcggctaccagctctctctggatgacctgaagaacttcagacaactcgacagcatcacccccggtcaccccgaggctcacgacacccccggtgttgaggtcaccaccggccccctgggtcagggtttctccaacgctgttggtctggctattgcccaggctcacactgccgctatctacaacaagcccggctacgatctcatcaacaactacacatacaccttcttcggtgatggctgtgctatggagggtgttgccagcgaggctgt

SEQ ID NO: 2677 - DNA, 460 bp, Aspergillus oryzae
gtgcttcggacccctatcaagttctcctcaagaccaacaagcttcccatgagcctgatcagagacggtcaaggtgtgaatgggctgaaacagcatcaagcgaagatggccattgagaccaacccatatagcgatacatttgggcccaaggctcagaggaaacgtgttaagctgggtgttggatcactggaagacttggctggcgagacggccaagatgcatgatgcctatgttgagaagtcagatcatcagactcatgccgatggttcgctcgccgtctctggagatgtttctgctgcgcaagacgatgcgcataccacaacggccactgcagttgagtcggtcttctccaagggtcaaagtaagcggatttggaacgagctttacaaagtcattgattcttcggacgttatcatccacgtcattgatgcccgtgaccctgaaggtacacggtgtagggg

SEQ ID NO: 2678 - DNA, 501 bp, Aspergillus oryzae
  modified_base (334)..(334): n is a, c, g, or t
gattgaatcaggtgggacaaccatgtatcactatttcaacgtgctttgcgcgctcctcataggtgtcgctcaggggacgcccttactcgggtcgccaacgcatcatgctcggaaccagcagattcagtggagtccctgtgaggccaacggaaccctgtccacggagtgcgctacgtttcctgtgcccctagactataccaatgaagcctctaatgccacgctgaacctcgagctcattcggattcgcgccccgaacagcccttcaaaaggaagcgtgttcttcaatttcggcggcctgggtgataacggaaaactaagtctagctacgtacggnccgatgctacaagctgctaccggtggctaccacgatctcgtagtcctcaccccaagaggaacgggcaataccattctattctcctgttatgctaccgatgaagaaagagctgcagccaaaaccttatacccggaactcgctggtaacgcatctgacgtcgccttggg

SEQ ID NO: 2679 - DNA, 482 bp, Aspergillus oryzae
tgcaagagtcacctcgcccaacttcagccagaagcacgtcatccactcactactctgagtcttctttactttcccctcccagggtaaacaacggcacaccatttcccgatatcaatcgattaatgcctggggccatacagaccccagatatttatcgttcaccatttgtaccgcctccgttgcctgagacaaatcggcctgggccccagcgcctccaaccgacccttatacccgacagcgatgatagcgatattgccgagatctcagctcaggatttcgagcttctcatcggtccttcctccaagcgtcctttcccatcgcaccattccatcggcagttcgcgttactcattgcaagacagctttcagcaacagcgaccttactctagtctgtatccttatctagagtcaatgcccggcccaagtggtatcggtggacctggccctgcatacggcccacacgtattgcagaacaccatggca

SEQ ID NO: 2680 - DNA, 518 bp, Aspergillus oryzae
cttttatattggcggatatgagcaaacggcatgtgggagctttcaaattcaataacatatcctctttatctacaacgaagagtccgagatcgagatgtttctccacgataagccagcggcgaaatgcagattcgaaggcgaatgaaagcaacgagactacgcaatcacaggatgaatctaaagaagaaagcgctatggcgcgaaggttgtcggagatgacagaacaagctatgcttgaaggaggtcgctcggcgcgcaaaaatatagaacacgcggggttctcggatgatctgaagaaacagctcgaagagagaattacagcaacggcattcaaaagtgaccatgcgactgcccattcaatcgtcaacatgccttcgagtgcaggtcaaggaactcaagatatcgccgcggctgagccatggtcgggaacagagagccttcaggatgtcacgctgcgcatgctcgatagctcgaagaaacctatgcgcgtaccctacaaaattccacaacctaacccc

SEQ ID NO: 2681 - DNA, 454 bp, Aspergillus oryzae
tttttctttttcttcactgttgccttgtggcttcgccgaacggacacgtctacaagttgcctccttatcgattaggttaaccccgtataatcgcataacccattcctttagatcccggggtttcgcttacctcccccctcaaactatcacccgcactccacctcactatacgctgctagcgaaatgactggcccatcgattcaggatcgcactggcgagttccacgccatcctgggacaagcccagaaacgggtggccaccaataaagttgggtcccagcggcaggcacttctatcggattcacaaaggagacaagccaatgggtctgcgaacggaggcgcgcaacccggcaggagatccgagtttgccaggagggctgttgagattggacggggtatcactgcgacgacggccaagttgcagaggctggctgaactggccaaacgaaagaccc

SEQ ID NO: 2682 - DNA, 414 bp, Aspergillus oryzae
  modified_base (201)..(201): n is a, c, g, or t
ctgcagtcaacggagtgccgaccccggatcttgaccgtttcgtgaaggaagtgagcaagatccctgacaacacgtatttccgactgcgggcggttacattcgacaatgttccctgggtggtgactatgaagaagaacgatcactatttcccgatgtctgagtatctcaaggacccctctcagccgtgcggctggaggacgntttctcacaataaatccaaacacaaggacggcattgcgccggacgcggccaatctcaacccggacgccatggaacaggggtatgacggggccagcgatattgaaccggaggcggagtaaagtggcggcttgtgtataatagaccttgttgtacgtaccacacatgtacagtgcgtgactaatatatccaaaatgatgacttgatgattgtact

SEQ ID NO: 2683 - DNA, 348 bp, Aspergillus oryzae
gaacttgacacaatctgcgcaatctgtctggaaagacaggctggtagcagttcatgcctctcttgatcgcaaccacgcgcgctcaccatctcgtcaaagaataacgccactgagctatataaccctacccagcctttgcttctagccggccagagtaccagcctttcctttcagcagtgaagaatattgccaaaccctctaacggcatcatggcaaaacaaccatatattcccccgttgatcggatggctgtatgatttggttctatggcttttttccgttctcgtagacctcttctttcgggaggtgcatccgcgcggttcctggaaaatacctagaaaaggcccgg

SEQ ID NO: 2684 - DNA, 583 bp, Aspergillus oryzae
tcgacccacgcgtccgcccacgcgtccgcccacgcgtccgatctcccttcccttcaactcgctttgctttaaatctcctccttttcacttcctttcgctaccttccaatcgatctcagatcgtcgttccgttttcgtctttatcctatcgcaggaacaaagcttctttccaagcagttaaaattactgggttctgctctgcatctgttgcaagctgagatatcttgaaaaaccacttctttagtctatatccttcacacacacatcaattcatcatgtctgaatcaacaaccatctccaacacggagaatgtgcgttacacttctcattgattgctatcatgctttcttcagccgtcttcccggctttgaggaaacaaacatactgacttgcgctggcaacagctcatgaagtacatgaacctcgaccagcgcggacgcgtgcaggccgagtatgtctggattgactccgttggtggatgccgcagcaagaccaagactctctctaagaaggttacgtccgttgacgaactccccgaatggaacttcgacggttcctcaaccggccaggcccctggtgacaac

SEQ ID NO: 2685 - DNA, 370 bp, Aspergillus oryzae
cgctatctgtacaacaatatatttttaccttcgttgttatcatttagaaagctattcccttgctgttcactcgttattatctatatcagcccgccgctctcgaatcgagagcgtagggttcaggcgtataacaggagcgcaccgttgggtgtacaaacttacctcgggaccccccttataaacaatccttacttgcgtcctaaagcgaatattcaactgcaagctctattttgcgcctggaacttaaactctcgaggcgttcattgtgttagtccagtcatctccgtctcatagtggccgtccatcatggccttcaagaacggacttagtgaacgcctcgatgagctgcgatttccctctccgcgatccc

SEQ ID NO: 2686 - DNA, 297 bp, Aspergillus oryzae
caaagggcaaagcgactgtaatccatgatgcatcatccttgctcggttctaatatacaccaagacagaccagtaacagcggcttgtgaaatgagccagctcaatataatgcaaaccagaagctgacggtaattcatgtagaggcaagatgagacaaaaagaaaaacacataggaaagatacgacaaaaaaaaaaaaaaaacatgacgctcatgcaaatgcttcatgataccgaccatccgcatcaaccataatccttatgactgacagtagtgtctcatgctatcgtatgaagatta

SEQ ID NO: 2687 - DNA, 290 bp, Aspergillus oryzae
gtggcttcccccctcgggaacgttctccaggatcctggacgctatttgtcttattaccgtttacctcgttcacagcgattgcttttctctctttctcatggcgggggttgcgggatggatacgatatgacggatgtacatagcatgtagcaccacggcggtgcctctatctcttcttatctttttgagtcgcattttctcgttgtttaggtctcacatttcacggttcgtcgcctgagatgcttcacattgtctgggagacgggtgtttgcgaagggtgtacggtgtttg

SEQ ID NO: 2688 - DNA, 443 bp, Aspergillus oryzae
agttgatatcgccagggtgggttgtcattgttgcggtaggtaattctggaacacgttctgtggatgcagactcatggcctatccttggctattgtgtttgggagggcatcggagacacagcggacgagtccaccaaacggtggaaggagacctcgaatgatagctggtggactcgcgtacaggaactttttgggaatgtgagcgaacatttcgtgactcgtctgtaccccgaccgaagcgtagatgcatctcgcttggctaggtataatgctttaaccgtcgagtgttttccgtacaacgacttcccagaaatttggttcctgtccacactggcagttcatccggcgtaccagcgacaagggatcggtcgcagactcattgaatggggcctcaaacaagccacgtgggacggaacccctgttggtcttgaggctagtgccaaa

SEQ ID NO: 2689 - DNA, 559 bp, Aspergillus oryzae
ggcaacatgtcgactctagtaccccctccgaccaagcgccagaagacggagatcgccgagaaggcgcgtctgcaacaggagattgaaagcatcccggataacctgggcagtgtccgagtccagttcttcgaccaagcaacaggatccgcaacgggacctgcagtgtccgttccagtggccgatgccaatgtgaaaaatcttgagacacttttgaatacattacaaggcaatgaagatgatgaacgagtaccgtaccggttcacctaccaatctcaggataaagacaatcaggcaatcgacatcttagcagatctctatcattcgctactccaacctggactcagaacaaccgaagataccatctctctatactttaccccgcaggcagtattccgagtgaaggctgtttcacgatgcgctgcttctatagccggacatggtgaagccattcttgcgactgcattctcccctgtatcttcttcgacaatggtaaccggaagcggcgactcgacagctcgcgtctgggattgcgacactggtacaccgttgcacacactga

SEQ ID NO: 2690 - DNA, 416 bp, Aspergillus oryzae
ctcctcaaggaatgctcatcgacggtgaaaagtgggcttgtgaagcttgcgtccgcggacaccgtgtgacgacttgtaaacatcatgatcgaccgctaatccgcatcaatcggaaaggtcgacccttctccacctgctccgtatgccacaacactccctgcccaacaccagaagagcataccaagctcaaacgcgaggccgaggccaaatcctcttcaaaagtacaatgtgaccaagcacccctatgaacctagaaccaaaagccaaaaagacaaggaaaaagaaactctgaatgaaaaaagaaatatatcacataagccacacacacacacacactgggaaaccattttatataaaacaccacaggctgatgttgggttgtttcattgagtttcgcttgttccagagaggtgccg

SEQ ID NO: 2691 - DNA, 444 bp, Aspergillus oryzae
ctggtatccattttctgttctgctggttacctgccacgttatcatgaagcttggttggatcgaggtggccgcattggcggctgcctcagtagtcagtgccaaggatgatctcgcgtactcccctcctttctacccttccccatgggcagatggtcagggtgaatgggcggaagtatacaaacgcgctgtagacatagtttcccagatgacgttgacagagaaagtcaacttaacgactggaacaggatggcaactagagaggtgtgttggacaaactggcagtgttcccagactcaacatccccagcttgtgtttgcaggatagtcctcttggtattcgtttctcggactacaattcagctttccctgcgggtgttaatgtcgctgccacctgggacaagacgctcgcctaccttcgtggtcaggcaatgggtgaggagttcag

SEQ ID NO: 2692 - DNA, 437 bp, Aspergillus oryzae
tctcgctttcctccccttctcttcctcctttttactccttttgcctgtcatcctcacagtccttcgtcagaatgcccgcaccaactactaccctcctcatcgagggctcctttagcgaactcgccgacgagttcgcccagtaccttgacgcactgcgcaaaagcgaaggcaccaccaccattcaggccgaaatctccccgctcttggaacccctccgccagcaggaacagagtgacgctgagcccgatcggaaacagcgtgatgaggttctcaagaagctggtctcggcggcttccgtgttgaacaatgctccagagaaggagatcatctccgcctacaaccttctcgtccatcttattcactacgcctcagaccctgacatgttcctttcccgcatctgctcctacctcgctaaacccatcacctcttccgcccag

SEQ ID NO: 2693 - DNA, 469 bp, Aspergillus oryzae
cggacgcgtgggttccaacgattatcccagaaagcatatccaatacctcttgatttctcaacactatggactcggtggtagatgtcctgattgccggcgccggtccagccggtctcaccgctgccctcacactggcccgccaacttcatacagccgtcgtattcgacaacaaaagctatcgcaatgcgaatatctcccacatgcacatgatcccaacatgggaccacagagatcctgctcaattccgcgctgaagctcgcgacgaagttctccatcactatgacacgattaagatcgaagacgtggacctcaaaacagcggagaagactagtgatggactcttccaacttgttgatgccaatgacaaggtgtggaaaggaagaaaattgattattactactggttcagaaaatgtcttccctgatattccgggatacgcagaagcgtggggtcagagaattttccactg

SEQ ID NO: 2694 - DNA, 546 bp, Aspergillus oryzae
tgctgcgccctctccgtacatgtcacatcatgagtcctttgacggggtagataataacccatctccgctcttggcgcctcagaatgatccgggactctacgacagctcgctcggaatcgaatcctttacactgtcggagcagcagcagcagcagcagcaccaacagggcatcagtcccatccacagtccgtacatttctccgcaactaatgccccagcaagggaatgacctgatccctaacatgccgtatatctccgctcctgcggggaaccgatactcatgtccccccacagatatctatggcaacggcgcggaaggcgttatcagtatgcctcagggaaccgccatggttggagacattggtcaagcgtcgcagatggcgccaccatccattaacgtggagttcgcgccgcctgctaaaaacccgatctttcctccagccaagccagcggcagatctggattcgttaagtccacctccgtctacgcgccgcatgcgtagcaaatctgatccgtacgctcatccggcttctcgctcacggtcccc

SEQ ID NO: 2695 - DNA, 457 bp, Aspergillus oryzae
tcgacccacgcgtccgagagcaacctcctgggtgaagaaggacagggctacaagtatgccatcagcgttcttaacgagggtcgcattggtattgctgcccagatgactggtttggcactgggtgcttgggaaaacgctgctcgctatgtctggaatgatcgccgtcagtttggtcagctcattggaaccttccaaggcatgcagcatcagttggctcaggcctacaccgaaattgctgcagcacgtgctctggtctataacgccgcacggaagaaggaagcaggtcaagatttcgtccaggacgccgcgatggccaagctctatgcctcacaggttgcaggtcgcgtatctggctctgcagtagaatggatgggcggaatgggcttcgtgcgcgagggtatcgcagagaagatgttccgtgatagcaagatcggcgctatctacgaaggaaccagca

SEQ ID NO: 2696 - DNA, 491 bp, Aspergillus oryzae
  modified_base (49)..(49): n is a, c, g, or t
cgcctgccacctcaaatctatgggaacatgttatgtatcatgtttgaancatggatgaatcgcctgaggtatcatgtgtatcctccattcaacctccatcagtcacttctgaagatgcggcacgaaaggttgtctgtttccatatccggggggcgggttgcagtcatgtaccaatcatgggcgtcagcctttcaaagccactgaccaatatccttgctacgatcggtgtttctaagagatcacacgaacatgggccgctgagacgaagacaaagtcgaagaaggccaaaggaagaggatgggttggacccgtgggtcagttatgattagtagtatatcgatgatacgatcggaactagtcttatcgttttctccgatagcgcttgagtcacagatctgtatcatgctcctttatcaatcatgattcttgtcgattgagatattagtgctagaatgcactgactcagatgaaagatgttgaactcatgagtc

SEQ ID NO: 2697 - DNA, 444 bp, Aspergillus oryzae
cggacgcgtgggtggctgatcacgcaaactacttagcacgcaaatacgccaccatgtcaacaccgtcatcatgtcccttctgtaacatcgcaagcacatatccgcccatgtctcccacagccttcactccagaaaacaactgccccaattcccaaaatacaaagaaaccatatactgcaccaatctcactaccggactcatccgacccaagccagccaaccgcacatcttatcctgtccactaaacatgtactagcattcctggacatcatgcctttaacccggggccatgtactagtgatcccgagggcgcattacgagaaacttggcgatgtagatatcaaagtcagccgcgagctcggccaatggcttcccatcctctcgcgcgtcgtcatgcggaccatcttccgtgaagacgacagctccgattggaactggaacgtgg

SEQ ID NO: 2698 - DNA, 350 bp, Aspergillus oryzae
ctcccaccgactgtcatcacagccctgggtctctttaacaacagtgccttctcgggtaccgataatgtgaataagaccatgccgacggatgaaatcaactatggccgacagtggaagagcagtgacattttgccgttcttgacgaacattgccattgagaggctgagttgcgatagctatggatacgacgagggcgattattaccgggtgctggtgaactcgagcccccaacccttggaagattgtcgcggtggaccgggagatagttgtagtgcgacgaagtttggggatttcgtaaaaggtttgggtgagagatttggcgattttgtgggcgcttgtggtgcaccgaa

SEQ ID NO: 2699 - DNA, 540 bp, Aspergillus oryzae
caaccaaaccttatatatttcgtctttataatacctaccgactgccccgcaccagctcttctttctcctccccttcagtgaagacacgaaactcatccctcacagtaaacctcccacacaatgagcacgcccaaggcagaacccgttcccatcccggggccgcggggtgtgcctctgatgggaaacatcctcgatattgagagcgaaatccctctaagaagcttggaaatgatggcagatacttatggtcctatctatcggttaacgacctttggattctcacgttgcatgatcagctcccacgagctggcagctgaggtgttcgatgaggagcgttttaccaaaaagatcatggcaggcctcagtgagcttcgccacggtatccacgatggtttattcacggcccatatgggcgaggagaattgggagattgcacatcgcgttttgatgcccgcctttgggcccctcaacatccaaaatatgttcgatgaaatgcacgacattgcaacacagttggtgatgaagtgggctcgacaaggg

SEQ ID NO: 2700 - DNA, 547 bp, Aspergillus oryzae
aaccctcctccacatcaaaccgcataatctacaatgcgagcagttcgcttccacggacgtggcgacatccgcatcgaccagatcgacgaacccgtctgtcaaaatggccaagtaaagatccgaccttctttcgttggaatttgcggaagcgatctccacgaatacctctccggcccatcaaccgtgcccgaaaccccacacccaatcaccaacgccactctccccgtaacactaggccacgagttcagcggcacaatcgaggaagtcggggcagacgtcacgcgagtgaaagtcggggatcgcgtggctgtcaagccgaacctgtatgacgggacttgtgctcgctgcgtacaagggagggtgaactgttgtcggaatctggggtttattgggtatagcagtaatgctgggggtctatcggatcatgtcgtggtggatgaggaacgggcaagactgttaccggaagagatcccgcttgatatcggagccctcgtcgaacctctcaccgtagcctggcacgccgtgacccgcagccccgtggcaacag

SEQ ID NO: 2701 - DNA, 495 bp, Aspergillus oryzae
cgggttttccctcggcgcaaatatcctcaccaattatttgggcgaagaaggtgaggcttgccagttgaaagctgcggtactttgcgcaagcccttggaacctagaagtaagctccgtgagcttgcaaagcagctggatgggactcgaggtctacagtaaagtgatgggatcaaacatgaaacgactctttgagcatcacgtagatgaggtctccaagaatcctcgagttgatattgatgcagttcggagcactaaatacctacatgagttcgaccgggctttgcaatgtgcttcatggggttaccccacagagggcgcctactatcgtgatgcttcgtccgttgactcgcttcttgctattaaaatccctttctttgctgtacaagctgaagatgacccgattgctaccgtcaaagcacttcctttccaggaaatcgggcaaaccccttatggtgttatgatgacaacgtcctggggtgggcatcttggctggtt

SEQ ID NO: 2702 - DNA, 457 bp, Aspergillus oryzae
gacattctcttgtgagattttcgtattccttgggtaccgatatcacatggtacgtgcccaagccacggccgggcgttttccgtgtaaccaaaaacaatcacaacattttgcagggtgtcgcttcccctgaggagcggttgagcgaggaggactgggcgcaggtgacggagtgggtcaatgagaatgcaaagagatactggttgattccaggaggccctctgcaacaccctaaagatggaggagccgacgtggtgattattgatgacccgcagatgcccgcattgattcccattgcgaagcaaattgccccggaccgaccggtgatctttcgtagtcacatccaactccgcagtgacttgattgacaaaccggggactccccaggcagaagcatgggggcggctctgggaaaccatcaaactggcagatactacattagccacccagtgaagtctttt

SEQ ID NO: 2703 - DNA, 422 bp, Aspergillus oryzae
tggacagcctgagcccaccggtgtcgatggcatccacaatcaagaagaatcctcgtctcatgaggactctcacgggccctcttctactcctgtccatggacagcctaagcccactggtgttgatagcacccacaatcaagaagaatcctcgtctcatgaggactctcacgggccctcttctactcctgtccatggacagcctaagcccaccggtgttgatggcacccacaatcaagaagaatcctcgtctcataaggactctcacgggccctcttctactcctgtccatggacagtataaggccaccggtgtcgatggcacccacaaccaagaagaaccctcgtctcatgaggactctcacgggccctcttctactcctgtccatggacagcctaagcccaccggtgttgatggcacccaca

SEQ ID NO: 2704 - DNA, 517 bp, Aspergillus oryzae
ctgaactgtcgccaaactcatcagaagtcgctacgcagtcgctcggttgccaatttggtatcgccggattgcaggacatatctataaatctcagccagcatcaagacagcgctcacgcgaccccgctcacgccaagcattcacgctgcgcgcgaaagaggaattcgtcagagtcagaacaccgaaacccggtgttggaaatactgtcgctacgcgttgtgtcttaaataaatctttgtggaaacaaatttgagaagataaagtaatacccgtgtggaccgagcagcagtgccactgtccagcgtcttctcttgtgtattacttgaaccctctgatgccgtagaacgagatttgggtggcgcttgtcccaggttactctacatcgcaccgtagaaagcttttgcatcttatcattatatacccccaccatggccgaagagccgcgacgatcaggtcgctcgaccaagggtcagcacaagaacctcgatcttatccctgagacacctgcgaagaaaccc

SEQ ID NO: 2705 - DNA, 458 bp, Aspergillus oryzae
ggttcgcagagtgtttcgtcgctcgcctagcggttccaaatcgaaggacaattccaactccatcaagatcgagtattacaagcgccatgagatcccgccgtccaagttcaagggcccatttgaccgcgagcaccaaaagagactggccgcgtggtcctttgacgacgcccaggccgaacgaccccgttccccggatctttctttgtccccttgcgcatctttgcccgactatttgaggcctcgtgtccaggaggatagtgtggctcctgatgaggttccctcgcttgccccagagggtctgtctgatgcatccgccacgatctccgacaacgagcgcgcggagcgccaggatgacagtggatccacctcctcgaccgcttatgacccggacagctacagcagctcgatgatgaccctcttcgatgaagctatccgtcaggactcgatcgcccaattca

SEQ ID NO: 2706 - DNA, 508 bp, Aspergillus oryzae
cttttctcacaaaaagcttccccccacccttcagactatgtagtcctcggctttggtgcgagctcgctgtcgctgcttttggatcttctcatccttttgtctcaattgccagctcctcttcctttctctaacgcacttttgcttttcctctgcatcattttttcattcttgtacgagtcgctttcaactcccagctatctactcgcgtgcgacagcttgcccacgggcagcgtctgctcgacatcgccctttgccgactcactatagctatactatcgtgcatctttgcattctcacggatattatactgtcaggctagaattccttatccttatcccaccttatatacacgccgccctccaccatgactcctcgtcgctcctctcgtgcccgtacctcccaaccctcacccgcaattcttcaacacacgaattcctcgagttcttccgcctcattgactcgtgagagaagtactcgttccaacgctaagaatccatcccctcagggg

SEQ ID NO: 2707 - DNA, 381 bp, Aspergillus oryzae
atttcacgctgtcagagcagcctttggacaatgatttgctgttacagttgctcagcaactccgatgataacatgggaaccttgtacggcaattgatgtgggcattcatggctgcaaacacgggcctcattatgaaattaggcgtgtcgcagctatagaaatgtcaaactgcttccggcagtcaagtcgtcttatgccggtggtcattatagtaaacacggggctaacagccgtttgcgtgaggtctatcttcaaatatactagcttttggcagtcataaagcattgagttgaaaacggattcggccactatacgatggagtgctgactggacatggctggtgaaaaaccatttgacttcataaaacttagttgatcagcat

SEQ ID NO: 2708 - DNA, 517 bp, Aspergillus oryzae
gccgaggatgctgctagctcgtcgatcaagctgacccagaaccgcttcttgcgcactggcgatgttcgcccagaagaggacactactctgtaccctgtcatgttgggcttgcgtacaaagcagggtcttgatgagaacaccatgttgactgagcgtgagggccagttcaaggtgcccgaccttgatttctataagctgaacgccgaccattctgctatctatcgtacctcctacactcctgaacggctcactaagcttggtgaggcggccaagcagggcctgctgactgtcgaagaccgcgccggtatgattgcagatgctggtgccctagcttcgtctggctaccagagcacctccggtttgctctcgctcctcaagggctttgataacgaggctgagtttatcgtgtggaatgagatcgtggcccgcgttggtactctccgggccgcatggctcttcgaggatagccaagctaaggatgctttgaaggcgttccagcgcgctttggtcagctcca

SEQ ID NO: 2709 - DNA, 460 bp, Aspergillus oryzae
cgaaattgtgatctatctttgtatgtaactgtacgtagggcccgacagcgccccagtggtaaagggtaacaacaggtattgtcaacgtaccgccgaaaaagattcgagcccctctcacaacaacaacttcaaacaaacgcttctcttcctcgtcgtcttctttcctctcaacttctatcctctcctctcccttgacctcttcctcctttccctttcttgaattactttgggccacctcccgcgggccattctttaccccaactcattctcctttcttccaccccccccccccccgccacttcgtctcgagtgtttgcgcccgccaccttcagctgtaccgtatcaacttcctcttcgccatttcgcctcatcgcccgtcggcgtcaaactttccttccctccgctccgtgaaccattcgaaccgatcaccctttgtcgcaacccggaattatggacgggg

SEQ ID NO: 2710 - DNA, 458 bp, Aspergillus oryzae
caattattggtaatttgatggaagcagcagctgttcgtgctgataaaggccaatccgatgaagaggcagatttcgatctcgatctccgaatgctgaggttcgaacagctcatggaccgccggccattcctggtcaatgatgtattgctacgacagaaccctaacaatgtcatcgagtgggagaagagggttgctttgtggggtgacaacaaacaagaaatcgtcaacacttacacggcagccatcgcggctataagccctaagaaggctcatggcaagttctccgagctctgggtcaactacgctaaattctacgagagcggaggagatctggatacagctagggtaatctttgagaaggctgtgaaggtccccttcaaatcggttgctgagctcgccgagacgtggtgtgaatgggctgaaatggaactccgcagcgagaacttcgataaagccgtt

SEQ ID NO: 2711 - DNA, 462 bp, Aspergillus oryzae
cgacccacgcgtccggagtataatccgaacttcaacgacgagggtgtcaagcgcgctgtgcgtagctgggaggaatatgctgccagaggtacctctgaaggcctggagaacgctgcccgtgatcgtgatctggatgagattgttaagcctgacgatgacaagtctggtgtcaactgggagcaatgggagaatgaagaggatggatgtgaagctaatcttgtctatcagctggcagcctatcttcctccctctcttgtaaattttattgaggacaaggctcttgccatccgtggtttcctcgagcagaacggcatcctacctacgaaagacgagggctccgcctccgagtccaaggcagtgactgaggcccgtgacgccgtcgatgcagtccgcaagtccatcgaagatttgaagaaccaggtaaaggatcacaaggaggaccttgatacggactacggtgtg

SEQ ID NO: 2712 - DNA, 119 bp, Aspergillus oryzae
ctgatggtcatgacgcgcgcccttgctctaagtcggcgcttgggttgtttggaatttgtccggtgtacatagtatctatctggtttccgttatatcaagactgtacttttttcgttctg

SEQ ID NO: 2713 - DNA, 441 bp, Aspergillus oryzae
cttgtcgtgtactccgtactccctggccgttttcaacaatttccctacgttcctcaattgaattccccgaaacgacaaaacggcagaaagaaataaaaggagaaaagccaaagacaaaacgctgccatgcgactgttcgtcattccgatctcgacgagacgggccctgatatatgctcgcccgctccgtcgggatcatgcaaaggagctgtccatactcgatcgaatcactaacaaagctgccgaaacatgggctaaatgggaggaagctgagaagggttggcaaaaacacttggttgtgtggggaaataaggtccaacagcggattccttatgaagaatgggggctcaagagtattccttcacttaatgctcagcgacgacttgatgaatcgtatgggtcgaagaagattgatgtgcttctcccgggaaatgcggtcaaa

SEQ ID NO: 2714 - DNA, 466 bp, Aspergillus oryzae
aaattttattcaaccaccattcacgtgtggtggcactgattgacgacaagtggatctccgttttgtttatcatatcaacatccatacatattatcccccacacgagccaaaggattaattaatatcggttgattaatacttgatccaagcgcatcaccaccccgactcaaaacgatatcaacatgcgatccaaacccagatccgtgaaaccatcggcgtaccctgcaataccatttcattccatccgcgctgtgggctttatttccactctggttgtcggtatcattctagccgtcttcatctacaacctccatcaaggtggtttcaaacttccttgggcattcctggtcctcctgatagccggtatcctttcccttcttaattacgtcctaactaccataacccactgttgctatggcctctcgccgcgtctatcactcctatcgaatacgatctgtctccttct

SEQ ID NO: 2715 - DNA, 445 bp, Aspergillus oryzae
cttcaccctcatcatccattgctcttcttccctttctccccacttcgccatattcttgacctttttgtcaacacaacccccccagactgttactgctggatccagtgactactttttctactagatcaataattcggaatcaaaacatttttctctagaaatccaaaattacctagcaaaagatgagttccagcaaggatgcaatccccgccagcagcaaaggctcctggtcaagtttcctcaagtctatcgcctctttcaacggcgacctatcttccttgaccgctccaccttttatcctttcctccacttccctgaccgagtactccgcctactgggctgagcatccgaaccttttcgtggccccagctacagaagcggaccccgagaaaagagccctggctgttctgaaatggttcatcagtaccctgcaccagcaatattg

SEQ ID NO: 2716 - DNA, 314 bp, Aspergillus oryzae
catttctttgttctttctcttttacctatatgttacaacagattgatctcctggatgttaaacgaacgggacgtctttcgcgcacatactgtatggaagcttatggctggactcttacctgacttggccccgtatacttttctttcagaaggatgaaggatgattgaatgatgttatggtcgagtgctatgctaagatgtaaatctactgttctttggcgtctacgtatgtacatatctagctaggatttggggatacgagatccctacattactgtctgaaccatataagaatatattgatgatcggaaatgg

SEQ ID NO: 2717 - DNA, 471 bp, Aspergillus oryzae
taaattgttatactctcctttgcttcagtattcccatctttgctaatgggtctctcttcacaagagctcacggaacaataccgcctcgaagcgagcggtggcaattcaccacataccgactttggtcatcatgagggccagttcgaagagccctcctcctacagtctaggctcagcacgacttgaggcgctggcatccgcccctctgattggaaaccaccggcgttcacaatctgcagacacagatgacagcaacaacggcaccgaccacgatgatactcttgataccgcggcggagaaatcagaaaaaccagcatcttggagctcgcttcccagaaaggggcagctcgcaatcctgacattggcgcggttgtcagaaggactcacacaaagctcgctgcaggcgtacttgttccatcagctcaagtcatttgactcgtccttgccggactcgactatctccgcacaggtc

SEQ ID NO: 2718 - DNA, 561 bp, Aspergillus oryzae
gtcgtgatgtcgaccttatctatgcacagcttcgtaccgtcttcgagaaggtcagcgtcgcaaagccgagaagtagtcgagcaagcagtctggaagcgttcgtagtctgcgaaggcttcatcccaccatccattcacggtggctccatgggtatagatgctcttaagaacccgctatttggtggcgcagcagtggcgcatactgtgtccgccgatggtaacgtcggtgtagaggtgatggacgttgactctgaggccaaacccggagctgatctcacgactacaaagaccgttacttcaaccgaacctcataaggagaaccaggtccgcatgctgcatgccgattccgataactcttctgcaccagaacccctctctcaaaagcctgtgacggagagatttgccgtcgagaacaggtggattcctcctttcatcgcctgcggcgacctctcttcttgggattccgacgcgtcctacactcttccccctgaccatgtaagcttagatcccgtccagccacctacagctcctccgtaccggagagcactggaattgaggaaag

SEQ ID NO: 2719 - DNA, 461 bp, Aspergillus oryzae
ctctacttctcctactctttccttttgttattattttttttttcttgggacctcgtgatccccttctcttggttttgtcttgtcttccttctcctttacttccttcctaggccaaggcataattacggtagtcagaagttgcgttactacttactgtaagagaagcaacgggctcttttgcgtcactctgctctgcgtcgctctgcttgatattaaccaaacacctggatttactaccgcattatcctttatgacgaatttggcaactatttagcgtaagggagacataaagtcataaaagaagaatggcgccacagaacgaaaagagctctcttaaacgcagtagggttagcacggaccatgattcacaagatttgaaaaagcagcggcgctctcagagaactacagaccaagatcaatcccagactacgccggtgaatcagtcctatttacctacgcct

SEQ ID NO: 2720 - DNA, 495 bp, Aspergillus oryzae
cgaaggaagaaaaagggcgccaaaaagaaagaaaaaaagtggaaataaagtaaagtaaaaataaagcaaaacaggctgtcaggcctactttcatcctctatctctcctagttcactccctgaaacgccactccttcttttattctaggagggaaaagaagggtagaagcttttcctgaggattacttttgtctttgcaacctcgatattattcctttccttaccgtcgcttgcttctcttaccatgtcatccatagcaccttcgatgccctaccgccgaccgtcgcgacagggctctagacaggcatctagagatagcagagacgacatccattttcacatagaccattacatcggtatcgatgttggcaccggcagtgcccgtgcttgtatcatcgatggcaaaggggatattgttggtttggcatcagagaatattggcctttggcagccacaacagggatactatgaacaatctacaaatgatatatggcgg

SEQ ID NO: 2721 - DNA, 525 bp, Aspergillus oryzae
tcttatactgcacaagggaaagctgattgtctcagtccttgttatttagatcgctagttaatttcttttctaccggacattacttggaaaaaagaataaaaggcaaaccgagtcaccctagacatccacctcgcggaggtgtagctgttaagatgcaaccagggcaacatcaagaacctaactcgaccacggttgacgatgtaaatgtcccaacggtccccaccattcacaacgatggcttcgattccgctccgctgtctactagatcctcgttctcatttcataacagaacggcctcgactcctgccacgggcgcgcagacgccagatcctctcctgggacccaagcctgtcaataacgaggatctgctgaaaaagctaccaacgacgattacccaggcggctgagagtggagatgagtatgaattgggcgagaagagaggtcgagcagcagccattgatgggttgcataaccggagaccatccgccatccctggccgtgatatggcagatgaatcggcatcgc

SEQ ID NO: 2722 - DNA, 601 bp, Aspergillus oryzae
tcgacccacgcgtccgactagttctagatcgcgagctagaaccttgcaggaccatttagacttaattttgcttgtggattcccgttgacgctgccacctgccgacacaatgcctgagcacgaagaagatctcgttgcctccaagaccgagggtttcaaggtcggggagaagaagacaatcaatgagtacactgagcttgataaaaatgacgaatccctaaaccgctggaaggcctctctaggccttgcaaccggtgcaacaattggagaccccagcgatcccaggaagtgcatcatcaagtctctagccctggaggttgagggacgccccgatgtggtcatcgacgtgtccgcacccggtgcagttgatactctcaaggacaagccattcaccatcaaagagggtgcccacttccggatcaaggtccgtcttccaggtgcaccatgaagtcctgagcggtctgaaatacctgcaggtcgttaagaggaagggtgttagagttagcaaggacgaggagatgctgggcagctatgcccccaacaccaccgacaagcccgtttacgagaagaagttccaagaggaagaggccccctcgggattt

SEQ ID NO: 2723 - DNA, 501 bp, Aspergillus oryzae
gattggcgctcctcttcttgaaagctacttaatccctgtcttttggttggattgtttataagactcacgatgcctttcaaatcgcgttggcaggtgcatgtcccggatgcgcacctggcaactgtcctgttcacatcgcccactcatccgttgtcaaagacgcacaggtgcttctctgaggcagctcgtcctgatacgcattatttcactacccatgacttccgactatggtcgaagcgttttgcggcgggattgcgcaaggctggtctccagtcgggcgatcgggtcttgctcttctccggcaacgatctcttcttccctgttgtttttatggggatcatcatggcgggaggtatcttctcgggggccaatcctacctatgtcgcaagggaattggcgtaccagctccaggatagcggcgcaacttacctcatttgcgctgaggggagtcttgacactggtattgaagcggcgcaggtagcaggactgagtcggggtcgg

SEQ ID NO: 2724 - DNA, 302 bp, Aspergillus oryzae
tcgacccacgcgtccgggtggcaggacggcggcgcaaaggcagaagcaatatgacgaggaagcgcactctttcacttccatccgtgtgatggtcgtgcgctcttcaacggcaaatctgagaaagaaagcctacgagagacgggatgtcgatctttctgcgctcatttcccggtcttacccaggcggatgatgtactggactggattctttgtactgtagtttagctggggatagtggaatgggtgtgaagtggacgatgatctacatcatggtggaaatacaaacccaaaagtgattctcgt

SEQ ID NO: 2725 - DNA, 546 bp, Aspergillus oryzae
gcagaccggtccaggtgggagaccgctccccaaacggtcaaggagtacgatggcaattatgaaaaacccccagaaattctctcagaatacgagatcgtggttcaggtggttgtctgtgggtatactattgaccattcttggggatgcagctgtcaatgtggcacatgtgatggtctctaggtcggagcaatggtggtgtggccagtccgttgtgatctacgttgtgggttcgttctttgtctattcgattatcctcgtctcgttattagatacagatccgtccccgacatttgcgcagtttgtcccttggttggtagcagtgcccatcgaattagctatattgggtatctcttcctcgatcaacgctggcaaccatcatgagccagttgtgggagatccgactggaggtcgcttgcagaaaggcgtgacttcgtgggaactcctggagcttatctgtaactgcgttagagtgctgatccttagtatattggtcgcactgtacgtgttcagctctattagaatgcattctagttccagaaaagcacc

SEQ ID NO: 2726 - DNA, 375 bp, Aspergillus oryzae
cgaagaaggcccgagttctgccggcgaaacgctcgtcacggtattgtgtgaaactctctgattcggatctaacagatgatgatgagttttcaatctaacggcagcgatattcctttgggtggtcggatagtttcaatgtggaaatcctacctactctaccagaggtataactcctcgaatagtgtctagtccaaggaactacagggcgggttctgctagggataatcatccttcgacactcatttcacgatgatctcttaaaaaaatgctttcgatgagtctatgatggatacatgtggttactttgcgtttgtcttttaacctttggtggttttcttacagtatacacattaataagagcaagttgagttcaag

SEQ ID NO: 2727 - DNA, 563 bp, Aspergillus oryzae
atttagatcacctcaacccgttagtttctgttaatcatggtacgtctatgaccccccagctatggccagatttttcggccgcccattaaaatgtcctgagatatctgggcgcggctctggaggattttgataatagatactggtatctaaccattctttccaactacagcctcagaacgagtatatcgagcgctggcaaaagcagcacggaaagcgtcttgaccacgacgagcgagtccgcaagcgccaagcccgtgaagcccatcagcagtccaaggatgcccagaacttgcgtggtctgagggccaagctgtaccagcagaagcgccatgccgagaagatccagatgaggaagcgcatcaaggcgcaggaggagaagaatgtcaagtcttccgcgcccgacgaaccatccaagacgcctttgccacagtatctgctcgaccgttcccaggccaccaatgccaaggcactttctagcgctatcaaggataagcgtaaggaacaggccgccaagtttgcggtgcctctgcctaaggtcaagggtatcagtgaggaggagatgt

SEQ ID NO: 2728 - DNA, 587 bp, Aspergillus oryzae
aatcattcaaaatatctaccttatcattttcatcacccccgggacattatgaaggttgtcgaactagatacaacggtagcagaacttcacaccacccatggtgttgaatggccgctggccgtcgatctttaccacacctatacacatatcgacctgcatgaccacttcaagcgcgaaacgcggtttatcgaagatgaggaccccgaggtctattaccaaggcgacgggaacttttcgcggttcagacaatgggcgctatgtttcaaaaccatccgctttcttccaatggtcgggccgggcctcgtcattctccatgtgcctcaggatttcaggaagaatatcgagcgggcattgagtcaatttccagaacgtcagcaccctatcgttcagtacatcgacttagacagctcgaacttcgaagtggatcgtcaatctgctttacaaggtaggaagctggtatactggcggcctaaatcttggatgtcgaaggaattctccttggtggcacctgaagtctcatacgaattgaatgacaaacgatttctgagccatcctggaattccaacaccaaccatggagatcattca

SEQ ID NO: 2729 - DNA, 534 bp, Aspergillus oryzae
  modified_base (113)..(113): n is a, c, g, or t
acccacgcgtccggtcatgtaccaatacttgttgaaaaaactggaggtttacgataacctgggggagatgaaccccctgtgatcgaacgggcttcctttgttgcatatgaagnggatggagtgttgccacggggcgacacttgtagataatgttgaatcatcaccacatgggaaacgatgtgggcagggcgttctgggaccgggatgttacatgatctctcacttcttctattaccgtttgcttggatcggtctggggcatggcagcatttttccttttgggttttcttgtttagataccctgctccagactggtatggcttacatagatttcttttttgcttttggctacttagacatggttaatcacgccacgatgtatattactattactatataaagatagagtccaaggatcactgattggcagggaagttgctcttctgaaactgagggccttttggggtcaggtggaaatgtaaacaaacggatgcggtcaagcgccacgggacgggcccaatcagcatcgcccctg

SEQ ID NO: 2730 - DNA, 359 bp, Aspergillus oryzae
ggcaaaattgggtatcttatcccttttggatgaggagtctcggctgccgatgggttctgatgaacaatttgtgacaaaactgcatcataactttgcagccgataagcaaaaattctacaaaaagccccggttcggaaagtcggcgttcaccatatgtcattatgctgtggacgtaacttatgagtccgatggttttatagagaagaacagggatactgtcccggatgagcacatggaggttctccgcaactcctcgaatcaattcgtgaaagatatattagataccggcgccgccgtccgcgaaaaagactctgcatccatctcatctaagccagtcgctgcgcctggtcgtaaaattg

SEQ ID NO: 2731 - DNA, 417 bp, Aspergillus oryzae
caaaaccactctgctttatactctgtcgctattattcggtgtcgctttaccagctgatatctgattttgctaagaacgactgtatcttaaccttcgcccgcctcactttcgtatatcaaccaacctcatattgctcacactgatcaatctgcgaaatgttacccctaggactgctcacggccgcccagggccatccaatgctcgtggaacttaagaacggcgaaacgctgaatggacatcttgccaattgcgataactggatgaacttaatactcaaagaggttgttcaaaccagcccagagggtgatcggttctttaggctgccggaagtctatatcagaggaaacaatatcaaatatttacggatccctgaagagattatagagatggttaaggaacaaccgcaaaaccagcctt

SEQ ID NO: 2732 - DNA, 491 bp, Aspergillus oryzae
cggacgcgtgggcggacgcgtgggtcaattttctatatctattccttttggctccaaggccatcatctcacgtttacacaaaattgcttcctggagaagactcatgttcaattcgagacggtagtcgaagttggcaagggctcgtggcatctctagccgctgctctaaaggccagtcgtactgcatacaaatcacctctggtcttttcttgtataagtcaagtggagaacctgtcgcatcatggcttcacgtcggtcgaggtctccatcgaccccttctgagggtgagatcatcgaatcaggttcagagacgaagagccagtacatcaccggcgcccagatctccagcatctctaagcagcagatcgtctcgtcgccggagatcgaggacgagatcgcgttcccggtcccgctctccctaccgaagctacagaggacataagcgtcgacttgacgatgattttgatgatcgacggttccggaacgacatct

SEQ ID NO: 2733 - DNA, 283 bp, Aspergillus oryzae
cggacgcgtgggtcgacccacgcgtccgcgatgtttcaatcgccatgttcgagcatgccgggctttcccgagatcatgagaccggccactcagaggtgtcccattcatggagcggcgaaacccacgcaaatcatccgtatcccgatcgagaacttagtccggtggactttacctccctacatcaacagaagagcctcccgtcgaaaacgtcgacagaaagtccggggtgacaccctagattctttttcccctttgatcccttaccctcggaaccccccatctt

SEQ ID NO: 2734 - DNA, 578 bp, Aspergillus oryzae
gaaaggtttacgagcgctctaagcctctgtataccagctacgatgcctcttcgttcgtcagcgtcaagtctgcgggcgcaaagggagacggatcgaccgacgatacagcagccatccagaagattctgaacagcgccaaggaggaccagatagtttacttcgaccacggagcctacatcatcaccgataccatcaaggtgcccaagaacgtcaagatcacgggtgaagtatggcccgtcctgatggcctacggccagaagttcggcgatgagaagaaccctatccccatgcttcaggtcggagaagtaggtgagaccggctccgtcgaaatcaccgacatcgcgctgcagaccaagggccccgcccctggcgcaatcctaatgcagtggaacctcgcggagtcctcccagggcgccgccggtatgtgggacacccacttccgcatcggtggatcagcaggcaccgagctgcagagcgacaagtgtgccaagacgccgaagcaaaccaccacgcccaacaaggagtgcattgccgcattcatgctcatgcacatcacggagaaggcgagcgcttacatc

SEQ ID NO: 2735 - DNA, 21 bp, Aspergillus oryzae
ttttatactttatttcatatg

SEQ ID NO: 2736 - DNA, 592 bp, Aspergillus oryzae
aattgaaacggctttggaataatattctctggaggttcatgatgactctggagggacttcatggtttcgctgtcggtctatctcctgttttgttacctgtcgtgccttgagcccttgagcttatccgctcttcacccggcggaatgaagcttccatactcacggcctgcggtttctgtcaaccggattgtgggccaaatcaaaggattcccatgtggctctactaaatatctccctctccgagcacagcaatggcactctagccgaacaatcagcagcgctgaagcgacgtctccaagtccacggcctcaatccagcagagaaaatgacactcccgataccggacatacgacactctccctatcagaccaagtccgcctgctgatgagacgagtgccctaccccgttgccatcatcacagccacagacccccatgaacctctcgacaaagccttccgcggaatgaccgtttcgtcattcaataccgtaacgctaaacccggagccggctatatctttcaacgtgcgacggccatccgagacactaagcgcgcttcagtcatccaaacgattcctcgtccatcttctagcccc

SEQ ID NO: 2737 - DNA, 481 bp, Aspergillus oryzae
ggctgtcgcaagacccattcgcatgctgggtgcgtcatgcatcattctcatcctcttcctgatctttaaaatgaacaatggtcctactagcatcattagtaaggggcccaaaggggattataccggcatacaaaacgaccccctcaaggagccgaccggagaacccgaaggacatttatggcgagccgacgagaacgattattcccccgacagtgccaactccgcccggaccaacgcggcgctcatctctctcgtccggaacgaggagctcgaggagttgattccgacaatgcgcgatttggaacggacgtggaacagcaaatttaattacccctggattttcttcaacgacaagccgttcacagaggagttcaagaagcgcacgcaagcgctaaccaaggcgaagtgccaatatgaacaagtaccgaaggaacacttgggatgtccccgattggatcaacatggacctcttccgcgaatc

SEQ ID NO: 2738 - DNA, 577 bp, Aspergillus oryzae
atgagatgggagcaccacgacgcctgcaggatacctcgcgtcacgctacccctcctctgaatcccgaccaaacaaactcaggacctaccgccgatagtagttggacattgggtccgagattccctcggcatgacacctctttgcctgcaacaagacggtcaagtatggctagcaatgtacattccttgctaaatccagctgataccgccgaaagacccgacgaggaacagcatgccacactcgaggatcgaaaacgaaagcgtctggagtaaataaacattggtgtaccttcttgagctgtgctcttcacgctgaacgatgcgtgtgtcacggtctttggccttcgacggaaataacatcaaggatcaactactcgttcagattcgaccttcccatgtggcgtgcattctggaatcaaagagagaagcgcaaagctaaactttcagtgctgcatatgctgggagtttcgtcgtacatctggattcttctaattgtctaaaacttggtggatcgacaatcacacaatcctttggcgatcttacttcattgggactacggatgccccaatcgttcttac

SEQ ID NO: 2739 - DNA, 568 bp, Aspergillus oryzae
tcgacccacgcgtccgcccacgcgtccgccctcttcctttctttacacttcttctccctatactttatttttcacaatggctcccgcccccagagtaattgttgtcggcggtggattgtccggtctctccgccgctcacaccgtctaccttaacggtggaaatgtcctcgttttagataagcaagctttcttcggtggcaactccaccaaggctacttcgggtatcaatggcgcccttactcgcactcaggtcgacctgggcatccaggacagcgtcaagaccttctacgaagacaccctgaaatccgccagagacaaggctcgccccgagctcattaaggtcctcacatacaagtccgcagccgctgtggaatggctgatggatgttttcaacctcgatctcacccttgtttctcgtctcggtggtcactcccagccccgacacaccgtggtcacgatgccaaattccctggcatggccatcacctacgccctcatgcaacggttagaagagcttaccgagaaggagcccgagcgtgtacagatcgtcaagaaggctcgcgtcacct

SEQ ID NO: 2740 - DNA, 593 bp, Aspergillus oryzae
  modified_base (10)..(10): n is a, c, g, or t
tcgacccacncgtccggctgaataccgctaacccgaattgctgagctgtttaatgtgaatcacttcattgtgtcgcaagcccgaccatacctcatcccctttctccggtccgacgtgaatcttttggatcgccgtccgacggggcagtggagtatcacccggtcactgatgcgcttggtcgctaccgagatccgccaccgactgagacagctcgattatgttggtcttctgccacaagcgctcgcacgacttctcatcgaggagacgatacctggccccaatctcacactggttcccgatctctccttgaaggactttaccaaattattccagaacccagacaaggagtctttggctcaatggatcctaaggggcgacgagagggacgtggcctgcgatcagtgccttgaaggtccgttgcgttattgaaatcgagttagataagggctaccaggttgttcggcgacgacgaccagccgagaacccctcttcctctgttcaacatactatgggtcagcggcccatgccaaatgaagggatcccgaggaagtggagaggatatagcatcgatcatgaccgaagatatggaccgg

SEQ ID NO: 2741 - DNA, 479 bp, Aspergillus oryzae
actcattgtattgcttggcttttgtcaccctcctccttgctctctgtgctactttgactctcccccaatcacctttccaacatggcttgttctacagtttcccggcgcttagtactctcttcacacggtcgatgtgagtccattcgacatggtcccctcccctcccgagctgctagaccagggcgccagcccaaagcccaaaacccatcagtagtattcaaatgggtaacgcctcgcgcaattgacttgatcagtttctttccctcccctcaacgtctcacatttctggatcttgtttggcccaagtagcgctggcttcgcaatctttgcccaagcagaccatcaggaggaaagtcgattggtaaggctcctcaggatactaaatcgattaatactgtgagaccacgaacaagtcgaatcatatattcactttcttcattaggagtgcttggagctgtcctgctaagcgtccttctttt

SEQ ID NO: 2742 - DNA, 404 bp, Aspergillus oryzae
gtcggatgcgtgcattgtttcgtcaactcgagatggcatgaatctggtcgcgtacgaatatattgcagctcaacaaaagcggcacggtgttttggttctctcagagtttgccggtgcagcccagagtctcaatggcagtattatcattaacccttggaacaccgaagaactcgctggtgcctaccaggaggctgtcaccatgagcgacgagcaaagggctctgaatttctctaagttggacaaatatgtcaataaatatacgagtgccttctggggccagtcattcgtaacggaattgacgaggatatctagccaatctgcggagaaattccagtctaagagggcttccctgaccggcacgtaccacgaacaagtgaacggtgtagaatccgagggatcggctt

SEQ ID NO: 2743 - DNA, 377 bp, Aspergillus oryzae
tgtctttcgttctgtttttagtacctttcttctttgggcaatcgcctctctttcattctgaccgtgtccttcgttccatagaacatcttgcagaaagcgtccgctcccttgtcttttgcgataccgatttttagtcctctgcttgcttcgatcctgcggcagatagtgatcgatcagcgcactttgcatctcatttcgattcgacctaattgactacgaattttcttcattccgatatccccagctttgcaatcatggagtgtttccggcagattggtcgactggttaaggccccattccagcgtgactcgcatcacaaggcattggaaatcgggcccccaaccaacttccgcaaggaggaaatgccgactttcttc

SEQ ID NO: 2744 - DNA, 560 bp, Aspergillus oryzae
cctcaactccaacgagatcgacatccacagtgccatcgtatccgctcagggctccgtcgtcacctccagcccggagatctccgtcaacaaggatacccaagtagctaccgtcaagttcgccgagacgatccccgccggatcctccgcccagctgaagctcaccttcaccggcatcctcaatgacaatatggctggcttctaccggtcgtcttacaagacggcaaacggcgagaccaaatatcttgcttcgacccagatggagcccacggatgcccgcagagcgttcccctgcttcgacgagccagccctcaaggccaagttcactgtgactttaatcgctgacaagagcatgacctgcctgagcaacatggacgttgcttcggagactgatgccgaaggcggcaagaaggtcgtcaagttcaacacttccccactcatgtccacgtatctcgtggctttcattgtcggtcacctgaactacattgagacgaaggacttccgtgtccccatccgtgtgtatgctacgccggatcaggatattgagcatggccgcttctcgt

SEQ ID NO: 2745 - DNA, 539 bp, Aspergillus oryzae
cttcatattatcgacgaggccaactcgcgcctactggatataggtggtgtcaagcttcgtctgctgggactgggaggcgcggtggtcatgcacaagctgttcgataacggcgagggcaagaccactattgccggtggcctaggcaccatgtggaccactttactgcaaatgggtgagctaattgacacagcaaaccgtgtgtacgacccatcggaaacccgtatctttgtcactcatgcgtcacccgcgcgcgaaggaatgcttaaccagctatccgtgaccctgaaagctgatttctctatttctgccggtttgcatttccgctacggctcatcctacaacgaattctctgtgaacccctcattggaccactaccgaggcaagctggccgcatcgaaggcttccttcaacgatgtttgggagacggtgcgcggtgaggtcgaggctgcaattgcctctaacgaagcccagaagacgctcttggacaatgctctcgatgtggtgcagaagatgcctacaatcgctaacggtgggaaccc

SEQ ID NO: 2746 - DNA, 612 bp, Aspergillus oryzae
tcgacccacgcgtccgagcgagcgtgacttgtcgcaacccagttagtcggccgctccgtcctcaggcatcaaggcctcgcccgctggcatctgctccctttcgcattcccatgtcttgcgtctgcccattccagtaccttcgttctgacctgcagactactcttcgttacttgtctttccctacctaccacttatttactttctccccacctcttatcgcgacagcgcataaggcccatcccacctcgtcttagtgcgcttgcgactaacccctccacaagctaccaccttaccgcgacaatctaggaactgcttcgttcactcaagtcgtcgcttcagcgtcgcaacgattgaagtggctttgataacgtcgtataggttgtgcgcaacgccatccaccatgttggatgagctagataacgtgtttgacgagcatccctcattggatgcgtcactcgaggactttgagaacccaagtatgcgcaccgttctccggtgtttggtctaccatcgcaacgttcaggatttcggtcagaggaatccgacgtggaggaagatgacatgactcctaacggggaagcgctggtcacccccagggtttcggaggtatga

SEQ ID NO: 2747 - DNA, 427 bp, Aspergillus oryzae
cccaaggcctctaacgaacaggtgtcgattggtagcaccgagtctcaaattaccgttgcagaagtgcaagttgatgaagagacggaggcagctccacaggcggtcgatgcagataccaagataaccgaacaggaggaatcaaagcctagcactcagggaagcgatgcgcagaaggatgagcccgaaacagcctcaaccgaggaggccacgaaaccagaatcagaggcagagacaaaacagactaccgagcaagaagccgaaccagtgtctgagcccgcgaaagagacgtaaatcttacattcaacagaaccctatatttatttccttctgatgctatgccatgtgtttatactacgattgtaatatgccttgcatcactatcatgcctgcattgatgacgttatctttcttttcttttcttttcttt

SEQ ID NO: 2748 - DNA, 459 bp, Aspergillus oryzae
cttctgttaagaaaattactgtactacgtggtgtatgacttgagattgactctgcttcagggaagagtttttgtcgattcttaatttggttaaccgacctttctctttgcaactcttgatctcggacgttccctctctacaaatatgtcttctggggtaggggtcgataatgactgccaagcaaagtttcttgaaatgaaacttcggcaaaaatatcgatatgtcatctacagactgagcgcagacaacaaggaaattgtggttgacaaaacaggaagcattgactccacctatgacgatttcattgaggatctttccgaacatgagtgtcgatgggcagtgtatgactttgatcccaaactagatggggatcgtcaaataaggaagctggtattcataagctggtgtccggatgttgctcatataaggtcaaaaatgatttttaccagcagcaaagaa

SEQ ID NO: 2749 - DNA, 540 bp, Aspergillus oryzae
cttgaaaacaatagccatggttgacattcctgagcgtccgcgagtcacagactcgaagaaagtatggtgctcgatcttgacaaacaccgcctacctgccgggcatcttgacccttgaatattctctccgtaaacacgacacgaaataccccttcatcgttctctataccgactcactcccggaggaggctcatgccgctctcgatgcccgcggcatcctcaaacagcccgttccctacctcaagccggcgatgacaaccgacttgacccaggacagacgtctatatgatgcctggaccaagctgattgcctttgccctgtatgaatatgaccatgttgtccttcttgactgtgatatgatggtgcttcacaacatggatgagttgatggatgtcgagttagatccaccagagatgggaggtaagggaaagcgcgtgtttggcagtacccatgcatgcgtttgcaatcccctcaagaggcctcactacccggccgactggatccccgccaattgcggctgggctcttcagcatgacacccc

SEQ ID NO: 2750 - DNA, 369 bp, Aspergillus oryzae
ggctatgttcgctcgtgtcatggcagctcacttcaccacctactactatgtgggtttctcctacatgatgatgcgccgttacggtgacgccatccgcatgttcagccacatcctggtctacgtctcccggaccaagaacttccagaagggtggcaacagctacgatgctatcgccaagaagaacgaccagatgtatgctctcattgccatctgcgttgccctccaccccacccgtctcgacgacactatccactccgctctccgcgagaagtacggcgagcagctccaccgtctccagcacggtggccccgaggccctccctctgtttgaggagctcttccgttccgcttgccccaagttcatcagccc

SEQ ID NO: 2751 - DNA, 523 bp, Aspergillus oryzae
gtttcgccggacgaagagaagcccgaacacaatgcctggaaattttggccagaaaatcctcaaaaccttcgggttagacgataatcaacatggacacggacagggccagcctccccaacaataccagcactatcaaccacctccacagcaaggatatccaggccagcttcctgggaaccgtcacattgaagatggtgacagggaccttcaccccgacaaacacggtacatacccccgtctcgccagactgggtgatggatcgttactcacctcgttcacccacttccagggcaagacacgcgtgctcgccgtatcgagaagtacggacggcggtcggaccttccaggactggggagaagtaagccgcggcgagggcgacgtcgacaacgtgtttcttctggaggtcgcaccgggcactgtgttgggggcattccgcaaccatgacattgggccccacggccccacgtacttccgtatcacagtttgccggtcgaccgatgccggtaggagctggcacttcctg

SEQ ID NO: 2752 - DNA, 493 bp, Aspergillus oryzae
gaagatgatggttcctagggcatttctcttcagctctgtgcctcccctgcacaatgggaagaaaagtcagctctcaaagtctgagattgactttattgctgtgcaggacgtcccaggcctcgagccttcacgacaaggaaagcccacacaccagcccagtcattatcccccctaaacgaggtcctcgagtgaccccggtgcaaagagactctgtgagaaagggtccgaagactccacgatgtgcaaagactgttcatagaacatcgtcggcggcctcgggtgaccgccctatacctagctctattgcttcgattttggaagccaccgccatcccggtgcctcgacgcaagcgcaatgcgcgagagcctcgaagaataccacaagtgaatcatgtacaggatttcagcaaattgctgttagaaggtgtcaagtccagagatgacagcttaacggagggtacgggaaataccatgctcgacatcctccttagccc

SEQ ID NO: 2753 - DNA, 570 bp, Aspergillus oryzae
gagcattacctgcgttctgatcgatattatctttctctccttgcctatttttgtgaagaattactctgtctttttgccaccagtcttcactcgattcttcttttttttcctttttttttttttctctcttctcccggctttaggttctctgatcactcgcgcggccccttcgcttgtctaatataacccgtcacctccagctaaattatgtctgcagctgttgcatcagcagttacaggcaccttaacacatcgcgctgatacaattaatacatccccaatggacgcgaaaaagaacgctttggaaactgaagactcccaggcgccgtcttcagagactaagaatataaaatccgatgtagatccccagacctcactggcgcctcccccgcggccggccataacatcagctgcggataccccggattactttaactctgtgcacaatcccttttcacttgaaccgaatccctttgagcaatcctttggtggtggcactagtggtggctcctctggcgagacacccgggaagtcgatccttcccccagtcgcttcgctcacgtctcctgcc

SEQ ID NO: 2754 - DNA, 578 bp, Aspergillus oryzae
tcgacccacgcgtccgggagtctgctttgggtgactcataccgctcgacagcgttcacgaagatcgagccccgctacccgcccctttccgatcctgtccccatcacaggttctctacccagccaaccgcccaagcctcttccttctctttccatggtgttcggtaagaagaaggaagaacaaatctcgaagagctggagtgacttgtgggatgaggacgaggagctggagagcgaagagactaccttgcagcaacgacgcgagcagaactctcgtagctggagccatgacagcaatactcctgagctcgctggcccttcaaacgttcttcaggatgtgactacatctatgctcaatattcagttacaggacgaggcagttcccgctgccgaggcccgtgctattcctgggaagccagtccacaacgagaagaccacgtctaaatcagcaccgacttctccgcagaatacatcgaagaagtcgaacctggataaatgggccgctttgggtgaccgcagacgcaattacaagccggcagaggtgtcactcaaacagaagaagttcctgaacaacatggca

SEQ ID NO: 2755 - DNA, 527 bp, Aspergillus oryzae
actgggctttgggtggtgtcaagtcaatttgttaccggtgttttgatctttacatttttgtccaggcaggcatgtgtaagcagtaatccgttggcacatttgcatacactgttgcgaaggcttgcggtcctaatttggaacaccctccgccgaatcaattcttggaggctccgtttaattttctctcttaatacccccctatctcatcatgcttcaacctcgattggccttgacgggccttcgccttccgttcagatgcctgccttcggtgtcttctaggtcctactcaagtgtcgtgcacgaaaaagagactcccccgacggagtcttcgacgtcaactttcgacccaagcattgcttttgctccccctcctacgcgagatgatgcaggcgttctcattcgatcttataagccccggactcccggtattcggcatttgcggaggccgatcaacgatcacctctggaaaggacggccagtacagaagttgacgtttcccaagcgaggacaaagtaagggtggtcgta

SEQ ID NO: 2756 - DNA, 545 bp, Aspergillus oryzae
cactatacttcctcccccggcaactaaattaatccgcttcatggccatgttatcccaagttgactctggctgaaattaattctgcctatcttgcgcgcggcttcttcctccccgtcgcgatggccgctcaatccaaactgcttcctcccgaacgatcggttcggcagatcttctcgagtctaactaccttgtatctacgccaccgcactggaatttctcgcacagtctatttggccctcttcgcggctttagcaaagcgcatccataatgccatctccgaacagaaagccgcttcccagcaacaagtcgagctgcggcggcgtccagggaccagcagtatcggggatggcggcgaccggccgcgaaagaaagtcggggtgaaccgcgaattctttcgaaatctacttcggttgttgaaaattgtgatccccagctggcggagcaaagagctgcggttactggccggccacagtgtcttcctggtgcttcgaacattactcagtctatatgtcgctgaactagatgggagactggtcagtaactta

SEQ ID NO: 2757 - DNA, 595 bp, Aspergillus oryzae
cggaagacgagcgaaacaggtggtgagagtcggcctcgtagattctccctcttgccggcatcattctctctcaagggtctttcttcgagcagatctcagacccccgatgaagagtcacaagtcgatcgctccacggataatcgggctcagcaaaaaccatcaaccggggaactacgaccccgcgcacgtgcgaccagccacggaacacaagatgcaataggagtcatgccagaaggggcaccggcagatgaggtcttcgtccaagatgagcccatcaactaccaggcccgtattgatgagcagtttgcggtgttgcatggaacccaatctgcgacgtatcaaccaacgtcctactcggctgagcaggtgtaccagaacgacaacgatcactattaccggaaccaatacgccaaccactcgacaccaaattactacgaagaatacaatggcccatatgacagcgcgcctcggcaatctacgtcagtttcccgacctacaagaggggccagtgtcctacagaaaaatcatcggaaatttgccgatgcctatgagtacgagcgcgattcatcacaccattccggcagctctggtgcgg

SEQ ID NO: 2758 - DNA, 495 bp, Aspergillus oryzae
gtttcagagctcttgacctcaaattgtgccaagatgtctactgacaagattaccttcctcaccaactggtatgatatgccgctggtgctgtttctatctgtgttcttgctgtttcttctgctacgttcgtgaactgttactaagtggttgtgtgttatataaaggcacgcgacgccgtaccacgctcccctgtacctcgctcagagcaagggttacttcaaggaagaaggcctgaaggttgctctgctggagcccaatgacccctctgatgtcactgagataattggtagcggtaaggttgacatgggcttcaaggccatgatccatactctggctgtatgtatcatctctccttgggaccttttgaacagacctctaactgccgaaccaggccaaggctcgtaacttccctgtcacctcgattggctctcttcttgacgagcctttcaccggtgttgtgtacctcaaggatagcggaatcactgaagacttccg

SEQ ID NO: 2759 - DNA, 381 bp, Aspergillus oryzae
gatggatttaatctaattcaatctactccgatggtttgattgtgcccatgcttttttcggagtaggttggtttactccgagttagagctggtgcgcaatggacaacttttgttttttctttctttctttctcttcgggttctaagtctaaatggggttctcgaaacaacgggacctccacttttttgatcgttttcgtgaaatgtggtcggtttctatctagtgctgaatttagatacaaatagtgttttcttgggtttcgtataattttgtcatatgcttggagggattccgcctcaaatgagggtgaattttttttttcttgatctctgaacggatgatcctcccttcttgaagaggaatatggagaaaggaaaaagtc

SEQ ID NO: 2760 - DNA, 456 bp, Aspergillus oryzae
ttcttataaagctccttataatttaagtttacacttttatctcagtgatttctcctccttattttcttctatcatcgagatggcaaagagtgtccgagcgagtgtccaaaagcgcaatagagcgaatctgcgagccacagtctttgggccagttgttgatgcacgaactgaaagactctctgctaagctgcaggagcttgcctcccagccaaaaccaagtaatgaagagaaaccagatatggagctgaacatgaaggatcgccaggaagggactaagatatcacaaacaagtgaagatatggacattgacaacggtaccatcaaaactacccagggtcgctctcacaaaggcgggcggattcataaacgccacagcaacagaaagaaccgctcatctattgtcttccgtccacaccagtccaagaataagaaggggtctgaagaggaggtagagtt

SEQ ID NO: 2761 - DNA, 331 bp, Aspergillus oryzae
gaatgcactgatcgatagttttgttcaagtgtactctctgttacccggcaaaccacagctgggggcaaattgttcagccatgcagttcgctctaccacctcggaggaacgtcaatgctcctctatacagccgctcttcccggctgtcgttacaacgcagaaaacaacttaaagctgttgcgatattagtattcgcactggcggtgatttatttcttattatcgcaactattttactcgagtacaggaactcctgcagcaccagccgggacttcaagtcttgtcatcgtgactgttctagaccgtgcccgctggagcgccgactacattcaa

SEQ ID NO: 2762 - DNA, 350 bp, Aspergillus oryzae
ctgggatggttcgttcctttctaacaatcgttcttgctgtcgttccttattcattccctcgttctgtcgatcattaagacctgaccactgtcattctttacatttgtatattgtttcactcgtcactcctttattttttgtttaattgattactttggacgcgtcattccttccttccattcgtggtgttccattgtcaagtatcagccacttctcccgttcgaaccccacaaaacgcgtatacgaacggtttcaggtgcgccatctaagcttaaccgacagagcatagagacgatctccacaaagatcgaccgtcagctcatcactctatgaactgggggttacacgag

SEQ ID NO: 2763 - DNA, 493 bp, Aspergillus oryzae
tctttatttgcttgactgttgcccgccgcactggaacaagcaaaattaagtcaagaggagatacgcccccatactcatctcttctccccatctacaccacttacacgtcagatactcccgccatttagctttcccacatatatacactgtacacatagtttgcaaccaaaactgctccattccaaaacatgacaccagaaacaagcaggaccgatggtggcttgcccgacctgaatcatatccatgattccctcattgagatagcatacaaagccggagaaatcatcatgggtgctctccccactacggatggtattggatcgaagaagaatagtgcggatcttgtcacccaatatgaccgtgcggttgaagaaatgatacgcacagcgttgaaggaaaaatacccagattaccagttccatggggaagagacatatgacccaggtcatcccttgaccacggcccccacttttgtgattgaccccatcgacgg

SEQ ID NO: 2764 - DNA, 498 bp, Aspergillus oryzae
ggctttcaagaaccggcttcttcgacctgtgtcgtccccttcgatcgcattccaggtaattggaagaaaatctatctctacagctgcaaaccggtttgctattagcggaactccaacaagagccgctctggattcttcctcgacctccattgcttcaactgccgttggcacacgtctcgatttactcaaccgacacttctcgtcgacgtctgcgacgcccgactcgaacaagatgcctcccgtggagccccagcagtatgactatatcgttctcggaggtggtagtggtggtagcggcagcggacgcagagcggccggttggtatggcgcaaagacattgattgtggagagtggacgctcgggtggaacttgtgtcaatgtcgggtgtgtcccgaagaagatgacctggaactttgcaactgtcaacgagacacttcatattgccgagcactacggatacaccattcccaaggacgtcaagatcgactacggtcattt

SEQ ID NO: 2765 - DNA, 520 bp, Aspergillus oryzae
ggaacctctttgtgaacattgtacaacgttatataactagtgtcgtatacattgtgccgacgctatgacagagagcttgaaccctcccctctcatacgaggcatcagccacgacaacccatccgcatgtggcaagcacgctgccccaagaggtcattgcatgcttgaagaattcacgatttcttcatctggcaacatgtgacggcctgacccctcatgtctctctcatgtcctatacctacctgccctcgacgccttacgaccagtatcccacgatcatcatgaccacaaatccttcctctcgcaagacaaaccatcttttgaccaatccgcgagtttccctgcttatccacgattgggtgtcacaccgtccgcccacccgtgcacccaaccccggaggtcagcgcgacggatccccgcctccggctgcgacccgttcatccttggccaaccttctgttgaatctgaacacaagcgcgctatcaagtatctctaccaccatcgccggttcggctcgtgcc

SEQ ID NO: 2766 - DNA, 543 bp, Aspergillus oryzae
aatcgctcccccccaaactgctcgtctaaacatctggatccttactagccggttttagacctccatggacaatcgttcaggcgccatttcaacgccgaacgattcgtccgtctcctcactccgaaacacggccaacagcggcaaacctcagactacttcgaccctccccgctcctccatccgactattcttctgtgcagaatgtttcttcctccatgatggatgttgataacaccacagtggcggaggatcgctcacgtcgagctactagtgttctctccatggatgatattgaggcggcgcaggccctggaagggctccgtacggagtacggtcaacctcctcgcaacgtgtcgcaacaaacctccagttctgactccaaaccgcaacccgaacccctcctatcgttgcttacctcgacccatcctctgatatcctctgcgatcaacggatccgtctcagcgtacgccagctctaaatcatactcacctcgtttcaaatcgggagcagagttcctcgaacgtaacattggctcccccgtcgc

SEQ ID NO: 2767 - DNA, 332 bp, Aspergillus oryzae
cgtcgagtaaccgacgcaaccgacggagaagcacaggcaacattttccaggagatgcgccgacagtcagctgtcttcttcgatgattcggatctatacgcggaggatgacaagaaggtcgagtgatcgcttatatagtctttctttttctatcatttcctttcaccctttgcattaggcggcgttgaactacctcataccaccacatttgtctagagcagtgtttactatcccttggattttgtgtacattagttattttgtattagagttgagaagagtttccatgtgtacttctccctaatacatatgttctcaaggtgtggccacgcac

SEQ ID NO: 2768 - DNA, 476 bp, Aspergillus oryzae
  modified_base (170)..(170): n is a, c, g, or t
gatccggttactaccgttgttggcggcaggcggcattctacccacctgggctgcagatgactcctcgagttcgaccgacacgtccactggcacggggaagggcatgttcactctggaaggaaccatcaccggtaaagtcagtgatgccgcaactccgaccggcacctatnggtcgatcacctccaccgtcaccctaggcagcggccatggcactgtcgtcggctctcacaccctcacaggctccgacgccacggcgacgaccgcatcaaataccaccacctccaattctgtgacggtactgggcggcacccagaccctcaacggcaccgccaatgccaccatgacggcctcggcatccgcctcgtcatccccggtcgtcaacacccagccttgcaatggataccccgaattctgtgcacggaactattccaacatcaccgtggtggctgcccacaacagtccctttgtacaatcgg

SEQ ID NO: 2769 - DNA, 547 bp, Aspergillus oryzae
taaccacttggatgttgccaatgtgaagtggttgcaggaatacctgaagaagcacactgagatcaccagtttgattgtcagtcacgactctggattcttggacgaagtctgcacggacatttaccactatgaaaacaagaagctcgtctgctacaagggtaatctggctgctttcgtcaagcagaagcccgaggcaaagagctattacaccttgtctgccagcgctgttcagttcaagttccctccccctggtattctgtccggtattaagtcccagacccgtgccatcctccggatgaccaactgttcctacacctatcccggtgcctctaagccatccctgactgacgcatcgctcaccctaacactgtcttcccgtgttgctatcattggaggaaacggtgctggtaaatctactttcatcaagatgcttaccggagagaccatcccgcaaaccggcaaagttgagaaacaccccaaccttcgtatcggttatattaagcagcacgctctcgagcacgtggagatgcatctggagaagaccccc

SEQ ID NO: 2770 - DNA, 477 bp, Aspergillus oryzae
agcatcgctgttatcgggcctatggcgcatgggtttatgaattatggagactacgtcgtctacgaaagccagtaccgcggcgtgacccccttggacggcatcaaagccgccgtcggcgacaaggcaacgatcaactacgcccagggctgcgaacgctggagcaacgaccaatccggcttcgccgaggcagtcgaagcagccaagaagtccgacgtagcagtcgtagtcgtgggtacctggtctcgcgaccagaaggagctctgggccggtctcaacgcaacaaccggcgaacacgtcgacgtaaacagcctcagcctcgtcggcgcccaagcccccctcatcaaagcaatcatcgacacaggcgttcccaccgtggtcgtcctctccagcggcaagcccatcacagaaccctggctctcgaacaacaccgccgcactcgtccagcaattctacccctccgagcaaggcggaaatgcc

SEQ ID NO: 2771 - DNA, 374 bp, Aspergillus oryzae
ggtaccttgggccttttctccgtgttttaaccttatagcgaggaagcgacgagaacacttctatcaacccgactgcgatcttgcatacttctgtacgcggtgcggagaaagaaagaccggcatactaaccagagaggggcgtctcacccgattccacctccacactgcctaaccctcgcgccaccacaacatccctttaggcacgaggggttgagatcaattacccttccttgttatatctcttattttcccgcttgattcaatcaacaccatttattgcccatcatgtcgaaaatgtgggaggtagatccggagacgaaggcgaagctcctccaaatctccaaaaccaatggaaacgacaaatgctgcgactg

SEQ ID NO: 2772 - DNA, 338 bp, Aspergillus oryzae
ccagcctgcggaggaagatgatctcgaaagcaaggagattagaaccgaactcctttctctaatcaacctgcttggctgcgtggagaagagtgaagcctatattttagtcgagaaggaagactccagtgtacccgccgccccgttcgcagatcgacgctgtagtctgcaagcagacgatgacgggaatgtattcatggaggaagctgatgtcaactcacccacaccctatggctccaagcgccgactcagctccagtgccaccgcaatcgtaccatccggacgcagagatagcaggtcttctgtctctacagtcggcagccatgctccccgacggcgtg

SEQ ID NO: 2773 - DNA, 568 bp, Aspergillus oryzae
gcagaggggaattctcagcgcaacaattgcaccagactagtgatcaatatgacgagtacagctccgacggaatcccaaaaattcctctccaccagaggtggtgactatggcctctcgttcgagaccgttgtcttgaagggactcgctgcggatggcggtcttttcttgcctcacgaaatcccgaccgcaaacgactggcaaagttggaaagatctctcgtacgccgaacttgccttcaagatcgtcagcctttatatctccccctccgagatccccccggaagacctgaaaggcatcattgaacggagctactcgacattccgcgcagaagatgttgtccccttgacccatctgcaggatgacaacctgtatcttctcgagctattccatggcccaagctactccttcaaagactgtgccttgcaatttctgggaaatcttttcgaataccttctcgtgcggaaaaaccaaggaaaggttggaaaagatagacatcatttgacagtcgtcggtgcgacgagcggtgatactggatccgccgcaatctacggtcttaggggcaagaagg

SEQ ID NO: 2774 - DNA, 429 bp, Aspergillus oryzae
caatgtctgactacgcgaccaaagtctttggcttcggaacctttggcagagtctacggaacaattatctgcttttccggtctcgtcaacttcgcccaatacttgttggactacttaacgcacggcccgttccacggcaacccgatcccaattaatatcttccttgccacggctggcctgatcgtgggtgcagccctggtggcttttgtatatattgcggagaaaagatggagggaagagaaggcagaatacgacgaagaacggcagagactgattccggaagaggaggaagaggaagcttgagacaatgaaggacctcgtttggctggtataacggtacaactccttgcagatatgttacagatgagtttaaaaagttgctttacgcattggacatattgttagtgacaccgcatacgatatatgaatc

SEQ ID NO: 2775 - DNA, 577 bp, Aspergillus oryzae
tcgctcaatctaaggacagtgtggagaatacggcggtattggtggatccgttgacattcgttaagcgttcttatccacaattccctcggtcgaccagccttcccgagtcgagcctgaataattttggtcacaacaaccctttgccggacgacgacagtgacgacgaacctgacgaagacggtgatacacaacaaccgctaaagaccgaagagcgggaagaaggtagccgcgctactgaccacggtgatattgcatcccgcctgttgagtcctgcacacgctgctaaagcaccgcccgccatgtcctccatatcggccacagcgaagccggccacagtcgattcattgtcacgcaatgcttctctgaccaatatagcttccggtcatgatgggttacgccgaccaccgctttcctcgtcccaaaatgcactggccaataccccaggcaatctgacgcaagccacatcatcgtcgatcgaaggaggcgtatcgaggttcatcaagactggtttccatgcaacttctcgcaccgattcggaccccaacactccgtcatctttcttgccccattatcaccc

SEQ ID NO: 2776 - DNA, 574 bp, Aspergillus oryzae
ggacaccattgtcgtgggctgctgagagtagcaggaatgagaacagcattaggatcttactcgaacggggtgcagaaattgaatccaaggatgacgctggccggacgccattgtcgtgggttgctggtcgatgcaagcccgatgcctatgatttctatgatactagtatcatggatgctctcgggattagtgacggggagaatgatatgaacatcataaagatgttacttcaggcgggtgcgaatgttgaatccaaggatataaatggccggacaccactgtcatgggctgctcagggtccgtctgaaaaaattcctatccaagttctccctaaagagcaagaagagggacatgtgaatctaggaacatatacttccactcgggagattcgtgatatcatagagctccttcttgaggcgggtgctgatctcaatgcaaaagaccaccatggccggactccactgcgatgggctactgattgtggtaatgaaaaagtcgtcaaacttctggaatctgcgggtgccatacagtaaagcgagattcattcagcgagagcttttcaaggctgaagtac

SEQ ID NO: 2777 - DNA, 573 bp, Aspergillus oryzae
cggacgcgtgggcggacgcgtgggattttcttccccgcaattgaaaacccaaaggattcaaccaacaagaagactacctggtttactcggacattctccgcttgaagaaaacattgccgtgccgggcttatacatgatctaatcttcgagctaactcccgcatcgtttgtctctcatccgtatttccgggtctacttctgtgtccgtttcgcgtcgcgtcttcgccgggaatggcccctcatcagaaccccgcacctgatgtaggggacgaagaggaggatgattacatgtctatggtgattgaggagccgcagcagaaagaaacgtttacccagaaaaaacgccgacaacagagagaggccgaagctcgagctaaagtcccatccaaagcagaacgtgcagcccaggaagccgaacgtcgtgatgccgccttagccaccagcacgcttaacccctccaacaagggattccaaatgatggccaaattggggttcaagccaggacaagcattaggtaaatcccaaggtgagagagtatcaaatcaaaaatccgatagcaaaatcggcggccgag

SEQ ID NO: 2778 - DNA, 442 bp, Aspergillus oryzae
ctccttggtaccccggatgaagattcttggccaggcgttacttccttcccggattataagccatcattccctaagtggaagcgtgacagtgatgaacatctaattcctggattggaaaggcatggattacgtcttttagatgctcttcttgaatttgatcctgcacgaaggatgtctgccaagcaggcccgctcccacccttactttcggcataggagctcataaagagtgatttgtggggaattggtatccggtcaatgatgttgtgtaagcgatgctgactaggggccgctagaatcaaggcatgggcatatccattcggaacattcctctacccaagtcatgcatttctctcttgcatatgcgggtctgtaatcaacaggacacgagaacaaatgatggttgagcacaatgatgtataaattaatatttcagctatttc

SEQ ID NO: 2779 - DNA, 537 bp, Aspergillus oryzae
gacccacgcgtccgcacagactatggcccagacaccgatatctatggatgcgccgctggacggcctctcctcgctgtcctcggtccattttgctctcatatatatcgacgagaatggcaagctccggtttgaagcgtcgctctctattgcgagcaactgccagtcgattctatctcctaatgtaaccgattcattcttgagagccgtggccttgtccaacaagggtgaccccggcgtgataggatctccgagattaaaccaagaacatatggcgggcaaaagccccatgtcgccccaatcacccggcacaagtaacttgagccgcaaaaactcaatgtttcaaacacaccaggacggtcaccaggccaagagaaagcgggtatctcacgagtgtgtggtcccaatgagcatcaactgccaccagaaaaccatgttgcctatccgcaaccacggtctcctacgtaaatactacgagaaggcattcgagagcctgcagcagatcaactgccgtattcttgccaaggcgtatataaagct

SEQ ID NO: 2780 - DNA, 288 bp, Aspergillus oryzae
atctcggtaagccagttggacgacgccattgcgagctatgccctagatgcaagctgcattcacaatctcttaaagcggaatatccaattggcgaaaacgaatctggcgatccttgaaaagttcattgaatcttaccggtgggcctgtgggtgggtcaaaccacgcgcaggaacgacggcatttgtgcgatttagcaaaatgggaaaacccgttgacgatgttgccttttgtgaaatgcttctggagcggactggcatcatgtttgtgccgggaagtcagcgttttggt

SEQ ID NO: 2781 - DNA, 658 bp, Aspergillus oryzae
tcgacccacgcgtccgagaagtccaagttgctgctgatacaacaccaaaacgcctcttcggcgaaatcaccccatctgtgttaggaagctcggatgcgctgggttctaaaatgcatgcgtttgaaggagacaacttcagcattaatgacttcatttcttcagccgctgaacatgaattcgtggcaccctggcacatcaaacaatcgtccgccagtcgtcgagacaccggcacagccaactggagtgaaggtggggggttctgcagagaaaagggaggcgaagacaaagcagcgaaccagccctggtaacgaaacccctaaaccggccatcttcagccgacggattgaactgcccatgcctgataccgccagtgaacgctcgagccccgagagtattgcgcaacgtgccaaggacgaacgccatcaaaccaaatcgattccaggggagattttcgacatcgagctggcaaataccattgatgccaaaaccggccagccaatcttagactatcccgagagaacagctggcgatgctccagccgatccagcgccgaccacgaatccgaaaattgtgctccagcccaggaagcctccaattctcctaggaaagttgacgacacttcctgggtcgattttcgaattgaccatcccctcgaaga

SEQ ID NO: 2782 - DNA, 660 bp, Aspergillus oryzae
tcgacccacgcgtccgcccacgcgtccggacctgttgaagttcccatccgaccagagagacttgtttctctctcgcacattcatttggaaaccttgtccgtgattcgctccttggacactctcataattcacttcgtacctcgattagatttacagcgacagcacttctgcaacttcgacctctgtacagaccttgaccgaagcgcgcaccgggttttattgcgacgtcgatccataacctgaaggactctgtgattaaccttccgacttgacacaaacgcgatgaagttcaacgcagttgctctcaccttggcgacggctggttccctcgtggccggtcagcatcacaacgcccaccgtcatcaccacaagcgtaccgttgacactcaggtcgtcgaggccaacggcgccactgttgttacctacgaattccaaggccaggcggtctccagcgagtttgtgtgcaatggtatccgggaagggaagctgagatacaaagagggccaacccgccgttgatgcctgccagtcgagcgccccggtttcatcttcttcctctaccgcggctgctgcgcccacggaagcaccagctgagtttgtggagacttcctcggcactccagcttcatcctccagcgcctctgcaacctcttcgtccgctg

SEQ ID NO: 2783 - DNA, 502 bp, Aspergillus oryzae
tcgacccacgcgtccgcccaaaatgttcaagaaagatatccccccgagcaaccgctcaaaagtgaaatccagcgtgcagcgcggcctccgccaacgcttcgtagaagcatacccaggcttcgaaccttacattgatgatatcctgccgaagaaagctcagctcgatgctgttaaacttcccgaaaaatgcaccctctacacaatcgactccacacccctcttctaccaaccccaagacggccctcccattccacacctaaaactcatccaccaatatcccaccgccctcccaaccgtacaaatcgaccgcggcgcgatccgcttcgtgctagccggcgccgcgctcatggcgcccggattaacgagtcccgggggccggttaccggagaaggagaatgcgttggaggcgggacaggtggttgctgttttggcggaggggaaggagacggcttgtcttgttgggacgttgaagatggggacggaggatatgaagagtaagggg

SEQ ID NO: 2784 - DNA, 499 bp, Aspergillus oryzae
actagttctagatcgcgagcggccgccctttttgtgttatattcacattacttagcggtacatatattgccctacttcagagaactgtaactctgtcggcatcatgctggcccaaattgctccgctgtttggtgccctgtgcattacattcctagttctacagtacctccagcgactttatcagcagcgcaagcgagcccaatctcttggatgtcagcctgccgctcaagggccatcaggcatctttggaatccgatcgtttgtacggttgctcaacgaagtcaggcacaaacgatgggttgaatatattgccgggcagtatgggcgttacggaaacacctatacccagaaggctctgggtaaatggatggtgtctaccattgaaccggagaatatcaaagctctgttggcaacccaattcaacgatttcggcctgggaaccagacatcgtgaattctatcccttgcttggagacgggatctttactctcgatggcccc

SEQ ID NO: 2785 - DNA, 533 bp, Aspergillus oryzae
cgacgagttcccgggataccatagtgggtgggatctatgtactctgtgggtgtagttatcgtggtgacaataaagtaccaggaaaccatggatgtcagtgacatctcccgttctctttcccttgggtgcgttttgcacatgtttgcaccaaccatggtcacgcccccggccggaagagtgtctttccagttccgcaactcaatcgcttgacttcgtccaatcgttccgatcaataccaccaaacatcgtgaagtgaagagcctcagggcatgacttggataagactgtatcacaaggcctcactttcatccagtagttcgcataccagtctcggcacggtgatactgataccgatgccggatcaagcggatttcaaccttcagtcctttgtctccactgcccctccgcttttaaccgtggtgataccactaacactagtggctcctagcgaatgagatatcattgaaagtcgacggagcaggcttcacatcctccgtcagcgtcatccaaaactttgacttttgattcggggg

SEQ ID NO: 2786 - DNA, 590 bp, Aspergillus oryzae
tcgacccacgcgtccgcaactatactggtcgctcgttgaacaacctcattaccacctccgatgaccccaatgaccgatatgtattccgtctccatggaaatcgcgtctattatatgaaactgtccttggccaatctttcgacagccattcctcgcgcaaaccttctctcacttggtacctgcatcggaaagttcaccaagagtggtcagttcaggctgcacatcaccgccctggatgtgattgctccccacgcgagatacaaggtctggatcaaacagaatggagagatgcccttcctgtatggtggaaatgtggtaaaggcacacgtcaaccggtggtcagacgattgtccagaacacgcaggtgttgttgtcttcaactcgaatgatactccattgggctttggtgttaccgcccgctctagtgctgaagcgaggaaattggagccaacagcaattaccgtgttccgtcagggagatataggggaatacctgagagaggaagatactctctttacgacgtaaaggaaaatcgttgcatgcgcgggatcgttcatggaatttggatgctagataccctggggattctcg

SEQ ID NO: 2787 - DNA, 490 bp, Aspergillus oryzae
gaaagaactcacttccctccccaacccctccaccccctgattggactctctttcttgtcgcctgcctcgtctcattgttctccctataccagtcgctttcaggctgcagtcttattgttttcaagtctgcgacatcaaacctaacctacagctagagggctgccggccagccaagatgaactcctccatacttaatattcaacgcgaaatcattctcaatacaatccggtatacggcagggaatgagtggaaagtcctggttgtggacgagaccagtcggaaattaatcgataatgctgtgagcgaggatgatattctcaacctcaatgttaccaatgtcgagcagatcgaggaaaagcggaaaaccaaccctatggatgcgctgtatatcctatcgccccaatcacatattgtcgattgcctgatggccgactttgagcgaaagcgatacaagaaggcctggttggtttggacgtcatacctcgaccct

SEQ ID NO: 2788 - DNA, 653 bp, Aspergillus oryzae
tcgacccacgcgtccgcgtcctccccgctagacttcgacacaaagcagtgctcctgtgttgagtgtaattctacgggccttttctccaccatcaataaataaaacacaccatggccatgcccatgcgaaccactcgccatgctaccaagctggctcagtcttcgcgcctattggctcagtatacctctcgcagatcttatgcgacggcggaacccgatctgaagtccgccctcaaggcggtcatccccgccaaacgtgaactcttccagcaggtgaaacaacagggtgacgatgtgattggtgaggtcaaagttgccaatgtcattggtggtatgcgtggtctcaagtcgatgctctgggagggctcggtccttgatcccgatgaggggatccgcttccacggcaagaccatcaaggattgtcagaaggagctccctaagggtacctccggtaccgagatgttgcccgaagccatgttctggctcctcctgacgggacaggtcccctcgaccagccaggtgcgcgccttctcgcgcgaattggccgagaagtcccacctccctcagcacatcctggacctcattaagtccttcccccgcaacatgcaccccatgacacagctgtcgatcgccgtcgctgctctgaacactgag

SEQ ID NO: 2789 - DNA, 516 bp, Aspergillus oryzae
cttttccccatccccaggtctcgcctcttcttttcgtccccttggacgaaaaaggtttgatcgtggtaccccagttaccaaaacttatatataaataaaattttataaaaaaaaacaaaaaacaaattaaacgaaaggtcctctccactcttgactcttttgattcggtttaacagttttggaattgtgttctcttccttctttttcactatcatcctttttccctcttcttaccatatcggtcctttctcttatagcattactctatatgagctgaaactcccccgcggctcctttaacacgataatctatccagttgatggatctttggcgttaactaaaaccgcacacttcacaatgactaatctcactgcctcgccatcatcgagtaacatggccgagaacgaggccaaggggaagcgaaaggcttcgacggcgggcctccctgccaatgcccggcccgtaaaacggagggcatcgaaggcatgctgttgctgccgcgctcggaaagttcgt

SEQ ID NO: 2790 - DNA, 161 bp, Aspergillus oryzae
tttttattatccttcctctccgaaggagctttagcatgaatcctgaaaaccaaaaaaaggagtgatgaaaaaactcatatgctgaaatgtttgatttttgttgggcaacccccaacacactgacgcccccactgctatattggatctttttttatgactat

SEQ ID NO: 2791 - DNA, 450 bp, Aspergillus oryzae
cggttattccattgcccttgttggtctcgtctactacaagctcggtggcgataagatcaaggagtacaccagccaggccaaccgtgcctgggccgaatacggtgccaaccaccccgccaagcgcaagtccatcatcatcggtgctattgtcctcatcttcttcctgttggccggatccatggcacctagctatgctggcggctctgttgacagagtcaagggcttgcttggtggcgccactgctggaaacgcgtaaaggcgtcgtctagctttgtgaagtgttctgtctcagacagatacggcgtggttgcatcctgaacatggagcggtttcaggtgccatgtgaaactgaacgacacagacttaccaaccttcttttctttacctatttataccactatttacacagtggacctcacgataaacctatggcccgcagcttaaaagata

SEQ ID NO: 2792 - DNA, 344 bp, Aspergillus oryzae
tcgacccacgcgtccggaactcgtcaaggagattgatatcagcatggaaaacccggctcgtgttgtttttgcccgggatactcgtgcctctggttctcgtcttgccggtgttcttaacgctgcgctcaccgctaccgaggttaacttctctgacctgaaattcatgaccaccccccagcttcattatgttgtccgctgcaagaacaccctgggaacgcagtatgagtacggtgaacccacagagcaaggatactatgagaagctcgccaaggctttcaagggagttatgcggggcctcaaggttaagggctctttgaccgttgattgcgcaaatggtgttggcg

SEQ ID NO: 2793 - DNA, 397 bp, Aspergillus oryzae
ggcatatgttcaccagcttcatccaatatatcttgctcactccgacgtatatcaacgtgttgaatatttatgcgttttgcaatactcacgatatcacatggggtaccaagggtgacgacaaggcggaaaagctgccctccgcgaacctgaagcctggcggcaaggtggacgtcgacattccgcaggatgatggcgatctgaacgcccaatacgacacggagttggccaaatttgccgaaaagccacccaaggaagtacaggtcatctcggaagaagaacgacaggccgattactacaagggattccgaagtgcggtcgtgctggcatgggtgttttgcaacttcgctctgggggccgtcgtgctcagcgcagccggcttggaccgtttcgatcagag

SEQ ID NO: 2794 - DNA, 625 bp, Aspergillus oryzae
tcgacccacgcgtccgtatttttgtaagaagagaaccctgctgacacgctacttcacttgaccccttgtcagtcgcggacatttacaaacttcacaacttcatccaagcatgtctcaccttcaaccctcgagtctattctccgtcaaaggactagtcgtagtcctaacaggagggggaagtggcctcggccgtatgatggcccacacgctcgacgcaaacggcgcatccaagattttcataattggccgtcgacaagaagccctgcaagagaccatcacgcaaagtccgaacagcagcagtagcgccataatccccattcaagcggacatctcctcaaaagcatccctcgaagcagcctaccagaccatctcggcacagacagatcacgttgatctcctcatcgctaacagcggcattctcggcccaaattctagtcccccgcctcctaagccagacggatccctccccagtctcgctgaggtccgcgatgccctctggtccgttcccatggaggacttcactaaggtcctggacgtcaatgtgaccggtgcttattatacggcagtggctttcctcccgttgctggaagcggcgaataagcggcggccggcgcctgtgaagaat

SEQ ID NO: 2795 - DNA, 324 bp, Aspergillus oryzae
ccgatcgggggaaaagacatgcgccaattgtggccaggagaaatgctcagaaaccatacgagacccacccaagaaacaaaaaccagaaccagacccggaggtagtgagacgggtggaagagcgattgaaagttacgctcagcgctggctaggaatgcaatttggtggggttaccagtttcaaacggctggcgtggttccatgaattctcttttcactacagcaacactactagcgtccactcctttccgactacaataccatttgatacagtggagcaggctcaccaaggaaccgctccgtgtcagtcctcattcggaaatact

SEQ ID NO: 2796 - DNA, 437 bp, Aspergillus oryzae
cttctttgcctcgtggtgaacatccttctattagcactccttcagcaatccattgctgtcatttccttcccgggcttagactgccccgtactactgataagccatccttatcggggggaattctagactctcgctttctgcttcgtcgtttgctctgtcaattctccttgtgcgcctatttttgttgaaccgctaaatctcttcttctttacggactcttatgtcctaaggtagaagagacgaggacagtgtcgcttgcgaagctgttttgtgcctagatgtttggtttttgagttttgcttacacctttaacacatcctatcttggtctcttactactgtatactcaacattaaccagctcttgtgtttgagtcatcctcctcctgtattcctcgtatactgcccttgggttatttttttacttttttattatatg

SEQ ID NO: 2797 - DNA, 261 bp, Aspergillus oryzae
  modified_base (212)..(213): n is a, c, g, or t
ggcacctaaaggaacaactaggggcattttcgctgtagataaggaaggtactgttctgctgctgcagcctggtggcccggatgccacggtggaggctatgcggcaattgattgcaaggaaatctagtagtagcagttcagaatcgggtatctgacagcttcagtcaccagtcaaagcaaccagaaggacagcaaccataggcgaacccaganntaaccgcacctacgcaagtaggactacttgtgatttttgtttccttcg

SEQ ID NO: 2798 - DNA, 582 bp, Aspergillus oryzae
ccccggcgcatttttgcgtatatgcttgatagttctattatatggagcagagatagctatcgcgcagggagatggggcaagtaacaacagatttatcaatccaccggccgccaattcggctgagaatcccgtctgggtccttggggagcagcaagtgatctcatggatgacaacctggactacgttcaacatatctatttggcatcagagtctcggggaggaaacagcatatagtttgggtgatatctatacccagattcaggacatcggagtcacaaattttacatggaaggtacaaacatacggcgccaaacttgaagactcgcccatattctttttctggatcaacgccaatccgacaagttcgggattcagactcacatcaaattactttaatatcaccgacaaaccacgggccacgagtacttcaacttcgtttacagcaacttctacatccgaatccaaatcaacaagctcatcaacaagcactactacatctgctccatcagagacctcagccaccgagacctcccaagcatcgtcgtctaactctggcctcgatccatccgccaaagtaggcct

SEQ ID NO: 2799 - DNA, 325 bp, Aspergillus oryzae
gaaatggccaaggttcaatatatcagcaagatattcgatgacgcctacaagagtcgtaccagtgtggtcgtcgtcgataacattgaaagaatcattgattgggtcccaatcggacctcggtttagcaatactgttttgcagacattaatggtctttttgagaaagcagccgaccaaggagcggcgattgctggttctagcaactacaacccagagagctgtcctgaagcagctggatgtgtacaactcattcaattctgatatcatggtcccgaatgtcatgacgtgtgccgagttagagtacatcatgaaacagtcggagacgt

SEQ ID NO: 2800 - DNA, 380 bp, Aspergillus oryzae
tgcacccttttatcccggaacacactttactgctgtttctgtcaatggtaaagtgactctgttttacaagaaattgaaccctgccggtgccattgcagccacgatttatgatggcagctcgtggaaggatggaggcattgtcgtccctgcgtgatacaaacacagagagcaagatggaacatcaaagtgggctatcagaatgttgcagcggttgactgtaggcttgagggatcattgaaatgttgaacagaaacaaaatgccaagagatatatggtgaaatagcgtatcttcgtcgaccagacaccctgcctttgccttctgaggataccacttgtagccttatttagcgtgtaattgcttcacgagcactggcaacttc

SEQ ID NO: 2801 - DNA, 622 bp, Aspergillus oryzae
  modified_base (320)..(320): n is a, c, g, or t
tcgacccacgcgtccgtttttttattgctcaatgaacagcaactcacgtgtcataaacattactcgtagacatctagtctgtatgtacattcaaaaaagaacgaaagccaccaagctaaaaagagtgcagaagcagggagaaaagaatgctgcataaaaacgcggaatcgcgaatcacaagtgcaccgccgtaaacgtatatcgaatcgtaccaccgttgacaaatcgtctccataaaaatggaattaagaatggtcggggatcaactcatagccaccttcagacggtagcacgcgaccggcaacaataagggcagccgngcagagcaagctaatgcaccagctgatggtgcaataaatccaggactcgtccagtctccagccggggaaaaaccgcgtgtcatggtcgtataaataggccacgatggacatgctcgccgcctggacaacagccgataacacgatcaacaaactgagaaccttccacccagattcccgcagtcgcttcccaccagacaatatgatcaagtatgcgacgatactcatgccctccagaacgacggcaaaggacataaggaagcccacggagcgccacatggaacagaaatagcggcctcggccac

SEQ ID NO: 2802 - DNA, 589 bp, Aspergillus oryzae
atcattgcaaaatctctgtatctctccgttatcacgattcgaattactctatcacgcctttcacaaagaccaaattaaagaacccttcatcatgagcactctcgacaagatccactccgacaacaaccctaagcagggtttccatcctagcgctggtaactcccagccgctcacagacaagggccatcaacccggccgcaaggtctctcctaaagactatgcccctgagttccacgcagagacatatcctcctggaacggctcccgctagcaactctttacactcccaacacccggtcggaggtgggaagccaggctcagaatcccaatgttgagcgatctcacggaaaggagtctgtaagaacgaccgcggaccagagtctgcagggagctacctcccaggatgtgcacaccggtctaggtcaccctggaggcggccagacgagcgcagaacttcgccatgacggacaaaagcaccggaagaaccccggtggtggcctcgagggtgtcggagcaagccaggagccccgtaacgaacgtcagatccccggcctgcgcggacttgagcgcgatgaagcgaagggaggtca

SEQ ID NO: 2803 - DNA, 398 bp, Aspergillus oryzae
cggacgcgtgggttcgcgtagagtcagttatgcagatcacgatagtgacgaagatgacgtcgaaatggacgactgggatcaagataaagatgaagccgaagctgaagaagaggaagaggacgacaacgaagaaaatgagaacaaccacgcaaacaacaaccacgtccaggactcagaggacgacggtagcgacctatcatcgcctccaccatcactacctccatcatccccaccaccaagcgccaaaaaagcacgtgccgaaaaggcgacaaccctgccatcccgacgctcctctcgacgaggataaaagcggacacagttagcaaggtggatctctatcaagcttcatgcatcatcattatccctttcgtcccccgtcacatctcatcaggcctgct

SEQ ID NO: 2804 - DNA, 501 bp, Aspergillus oryzae
gtcagtatcaccgggcgcgatttcaaatgcgagcctatcccactgaagaccgtgcgaccctttgtcatgaaagaaattgtcctctcagaagagaagggggctcagaagttggctcggaaagaaaacaaccgcactgaagtcacccgttttctaatgacgatcgttgaggagctcatagaacaagcgaaggctgaatggctggcaatgcaggaagatgtggaagaagaagaggagttagaggtgcccttgccactagtgagactgcgtgtggagatctccacaccagagggaggtagctatgattgcgagaatcctcagcggttttccaatcgtttcgtaggcaaggtcgcaaatgtgaacgatgttgtacaattctaccggaagaaaaagaacgcagcaaaccgcaagaaagatgatgacgtcgatgcaaccgcagtctcccaactctcgacgctggacacggtgaaggttgaacaattggtgcgcgaattcctctccgcc

SEQ ID NO: 2805 - DNA, 409 bp, Aspergillus oryzae
tacacctcgcttctgtcgacgttgacttcatctccccatgccaactgaatcacctaccgggggtcctggtttaggggaccttgaaaaggaactggtctgttcaatctgcacagaactgctataccaacccctcaccctcctcgactgtctgcatactttctgtggctcttgcctgaaagaatggttctccgtccaagcttcgcgccaccggtcatcctcttccgcccgattcacttgcccatcatgtcgcgccgtcgttcgcgaaacaagaccgaatgccacagtcactacgttgttggacatggtgctcaccgcgaatcccgaccgtgccaggcccgaggctgagaaggaggaaatcgcgcaaagatataaacctggccaacctgtcttcccgactgccgcttcaccg

SEQ ID NO: 2806 - DNA, 492 bp, Aspergillus oryzae
gactagttctagatcgcgatctagaactagtcttggaaagcacaatgactgaggacatcgatgaacctcccgatcaccggtttctgaataccgccccaatgaacgttgacgacggtgtggtttacgtcaagtccaccaccgccatgagtgataagaaagaatccctcctcacccgtgccctccggcacagcccgtccgaagagcttccctcgccccgtgacaggtccttctaccgctcgtaccctcatagcaacgttagcggtgtgtcgactgctgaattgactagcgacgaaggcctgagcagtccatctctgtccagcacccccagtccacctctgccagctcagctatccagcaaagctccgtcaatgggcagcagcaagaagttgactgtccagactagcgagtcgactgttgaggccaacctgggacgcaagagatgcatcagctttgcatgcggtcgtaaaacggaggagtcgaaggcccaaccac

SEQ ID NO: 2807 - DNA, 612 bp, Aspergillus oryzae
tcgacccacgcgtccgaccttctttggggcagtcatattgatacatactacttccttaatactaaaagtcctccccactctctcataatggctgaccaggcagttgctgacttcggtttgatcggtttggccgtcatgggccagaacctgatcatgaacgtcgccgatcacggtttcactgtttgcgcttacaaccgcacaacctccaaggttgaccgcttccttgaaaatgaggccaagggcaagtccattgtcggtgctcactccattgaggagttctgcgctaagctgaagcgtccccgccgtatcatgctcctggttatggctggaaagcccgtcgaccagttcattgagtctctcctgccccaccttgagaagggcgatatcatcattgatggtggtaactcccacttccccgacagcaaccgccgtaccaagtaccttgccgagaagggcatccgcttcgtcggtagcggtgtctctggtggtgaggagggtgcccgttacggtccctctctcatgcccggtggtaacgaggaggcctggcctttcattaaggatatcttccagagcattgccgccaagagcgaaggtgaggcttgctgcgactgg

SEQ ID NO: 2808 - DNA, 461 bp, Aspergillus oryzae
cagatcgagcgtcaccccgtcctccagagccccaagctgatccagtactgcaaggagaagggcatccacgtcaccgcctactccgccttcggcaacaacatgatcggcgagcccctcctcatcacccgccccgagatcaaggccgtcgccgaggaggccggcaagcgtctcggcaaggaggtctcccccgcccaggtcatcctcgcctggtcccaggtcggtggccacagtgtcatccccaagtccgtcactcccgctcgtatcgccgccaacttccaggagatcgagctcacccccgaggagatcgccaaggtcactgccctgggcaccgagcgccgctacaacgtcccctacgttgctaacaagcctcgctggaacattaatgtcttcggtgagcctgaggaggctcccgctgaccacaaggtcatcctttaagtgtctcgatgtgctggtcacgttta

SEQ ID NO: 2809 - DNA, 305 bp, Aspergillus oryzae
cgcttccccgggattgatgcgcctgtctccgcagtcaatgccggcgagcgcagggttgttgtccagtataggaagacgtccctgaatcttcgcgtgaccccgtccacaacagctcaagacctattgttcctagccgcagattgtctggcgggccagattgacccaccaaagtttatcatgatggaatcgtttggggaactcggactggagcggcccttgcgcacatacgagtgcgtccgggaagtcatgaactcatgggctcatgatcaagagaactcgttgatcattgtacccgcggccagcct

SEQ ID NO: 2810 - DNA, 593 bp, Aspergillus oryzae
cgacccacgcgtccgcacagatcgtacataccacgagctttacttggtcctctatacccggtgtggacaagtccagtttcatcatcaagtcttgatatggtcaccatgttcggccgactcacccactacgcttttgacgctgtcctcttctccgcctttttggcaggtgtgaagcgttcgactggtcttacccccagtctcgactccgacaaaatcaccgacaacaaagacttcaagaaatggatcgatagctacctcggcgttggcgagtgggtgatggatcagtccgttgccgtcctgggttccaccagctatttcgagcgcaggcggtgaattatacaccccgggttatccggataaatcggagcgacgctttgggtggggattgaattgataccgaggcgcgctctgggttttccctaagtcagcctgggaatcgagttcgccagaagaataaataggaggacatacattattacccgcttgggacatcatgtcgagagagtgcgtgtcttgtaaaaaaatatcaagagagccgtcgtgactggtattttggcgtcctgcatagcggcttggattacgattgatgatta

SEQ ID NO: 2811 - DNA, 520 bp, Aspergillus oryzae
taaaatcatcctgacactacatcattacaacaatacaactaacatccatcctgccatctaatatcaaacaaaccacacacaatgtctggcatgctacacaaggttaaggaggctgtcactggccatcacgactcgacctccgacaccacccataccaacaccaccaacaacgccaactacgctgagaaccctaaatcctccaaccacggccctcacggctcggcaattgcgaacaagctcgacccccgtgtcgacagcgaccgtgacaaccgcgctggtcatcacaccaccaccactaccggccctggtggcacgactaccacccactccagcacccatggtcctcagcaagctcccgttggcgccgctggcggcgtagacgctccatttggcacaactggacatgctggttcccactctaccaacgctggtccccatagctccaacgtcgccaacaaggtcgacccccgcgttgactctgaccgagacaaccgcgctcgtcacgaagctctgggcggcg

SEQ ID NO: 2812 - DNA, 580 bp, Aspergillus oryzae
tcgacccacgcgtccgttttttttttttaacaataaaatccaatatgacataagttttaatctgttcatctatgctaagcctcaacatctagcgaagctacaagtcgtgaaggagcaaggaaaggatagcccactcccatccaaaccattaacaataaaaaataaaaataaaaataaaaataaaaagcccgtctcgttccaattttcggaatatcgtggctgtaggatcgtttccaacaaccgccaactcataaacaaatggatatcccatcagtcagcagacgtgtccatcgtctccggtgcactttgcgtcgctggatttctgcgcgctgccattcgctccgctttaaatgcttcaatcttccccttgagctccgtatcaggggtgacatcttccatcttgaggggagctcggttgaacggatcatgagggtcactcagaagatgagaccggatggtagagcgatcgatagacactctcgacccaggaagaatcacaggatcttcctcagtgtatacataagaggatctaaaaattcgtcagggacctctccgaggtcctcctctgcttgttcgtcgg

SEQ ID NO: 2813 - DNA, 444 bp, Aspergillus oryzae
aacccggaggcttgcattggcgagtgcgccagcagcgacggctgcgtgggtgcaatctggacggccaagacgacactgccatatccgtgctacctggttcaacatggctctgagccctccatcaagactgggtctgacaacatgtggatcacttatcggaaggacgaggaagaagcaggggaggatccatttgggggaagtggatgtgaagctgatttggagacgatggaggctgagctgaagaagtgcaagggtttggcggctcggacttgtaccaacggccttcaagttcagacttattccactggatcaaagaaatacaagatcgcatgcggtcatacagtttctgcggctgtcggaagcggtgccaatatgaacatagttaaggatgtagattcgttccaggaatgtgctgatctttgcgcgagcacagctggatgcgcc

SEQ ID NO: 2814 - DNA, 428 bp, Aspergillus oryzae
  modified_base (239)..(239): n is a, c, g, or t
attcccttttcgctgtcgtctctgagaaaactcatctcgactcgcctctgtaggtgaccaactacctcctgcaggttttcatactctttttccttttttcctcttttttcttgtttcttctccattgtccgcgtgatctgtcccttcgcctaacacattgttgttgggcgtatatatcttttttttgggaacaacatattatttgcgacatcagagtttggtctccaagttcgagttgntgacgattcccgccactcatctctgaacacatcagcctatctgcaccaaataccagaacatcagatcttaaaactttcctagtgtcctacatttggatctctaacctcttctttggactccttttccctttcttctttttttttgtttttttgttgttggtgtgtagatagaccccctctttcaacgcc

SEQ ID NO: 2815 - DNA, 447 bp, Aspergillus oryzae
atcgcgttgagttacaggcctgatcctagcgaccatagtccatatctcttttcttctcattgttctacgtggagcaataataacggtacctgaagatttcttgtcgctactgattccatggcgttcaacatcagaattggtcccagccctcacggctccgatcattcctcactttctgacgaagaagactcctccggcgtgcaagtctccccgccgtctgactcgggaagccatgactatcaggatccttatgatgaatgggcacacctgccatatccagacgagttgaagccatctgattccgcgtctcggcctaggacgtcgcatcgtagcccgtagccgtcacccggttcatgggtcgtcgtcaacccgtcgtcacccaggtagacgtcatattgtacaggaacgggaacatttcactcgtcgtcctcggcgccagccttcccc

SEQ ID NO: 2816 - DNA, 549 bp, Aspergillus oryzae
atcgactaatgagttacgatggcataagttaatctgccttcttttcaggtcattctcgacagactattggtccatcccgtgccagcataccactggaacacgtcgactaagacataccagggaatttgcacaggatacggggctatcggatcagttctctcccagcacatatatagaccatcgcgtgcccactaggcatgatgtgcgatatgggcgatccattgttcaaagagaagaaacatctttctcagtccttcaatcttgaagagcaggctatcgcgcaaccccttccagcaagactctccatcggtcaaaaaatggagcgcgctctttattttatcttcttagcattcttccttatgatgaccgcacatagcctccggacggagccactagggatgcgcatctcaagtcatcatgaggtcttaaccctggaacaaagagtagacaatatcctgcagaaaaccccattgatcgatggccatgatgatcttcctattctcatccgcctcaaatatgggaaccaaatctatcaggataatttcacta

SEQ ID NO: 2817 - DNA, 435 bp, Aspergillus oryzae
tcgacccacgcgtccgttttttttattccagaattcggaaatcaatcagatgaagaaaatagaaccataagagaaaaggaacaaagcctccaaaaacacttcccttgcgtgccaacgccgatacaaatatagcatacatagggcgatccaagaaaagttctcgcacttttcccgacataatccgtcccacaaggtgtatatcaaccattaccaaccaagaaaatgaaaccgatgaccaaaggtgaatagaggtactgaagaaagggtaagacgtcctcgctccgcctcatccgctgtggttccagccaggattttccgaccccgaatgtctcggacattttgcgcacatccggaaatacggtgaatggggaaaacggagcgcgcaagagagaacagaagaaccaggatagaagtaacataaagaatggacagtct

SEQ ID NO: 2818 - DNA, 507 bp, Aspergillus oryzae
gtcgaaattcctgatgaagaagaaaacggcgttgacttgcgaaatgaaatcaagaggctgcgacgcgaagcccaaatgaaagatcgacggctggaggagttggaaagaattgttgcggacttgcagcagagaatcccgcagactgcagtctcgcagggataggtgggttcggactgtggtctcatgagaaatatcaatcttcaatgcatgtagctctttcacgagctgacatgtctttcttttttctttttcatttggctttgcttttacccctttgttacttttgctttgcattccacgggcgttttcacatgcagagtgcgggcctttgggtttgcgttcaatgcttacaacatcagtgggtggtttatatggatcgatctacatctcagaacgcgtggtttacaacaggcagctctgaagaatctggcgtttgctcgtggttgataatacggacccggcggtgttattatggttgtctccctttctattccctgaaatataccc

SEQ ID NO: 2819 - DNA, 625 bp, Aspergillus oryzae
tcgacccacgcctccgcaggaagaaaggtcgatcaacgacttgcgatcgctccacattccccagcgtctattgtgtctatttttgggttgaatgagcaacattgccgggccattcggggactatcgattgttccatgactccgtggaagcccagacattggtgactcaaccccaaggccttctcctctcgcagggtccctgttctccatccaactccggtccccggggcttccctctcactcttaataatcccttccacctcgttcctgccttttctgctaagtggcggcaacaaccttcaccattcaatttgacagcttgatctgccgaccttaatatcaacctcaccccatcggttcactcacgtctcttcctccgtatcgtcgttatcagtcatctacacctcgttgaactacacagtcatcatgtctgactccaacgaccttcgtcataacggtaccgcggccaagagggtctataaccacaagtccaaatgggcctacggtggccgagcggcgctcccgcatcgcgatgtctctctctctgacccagtgactcgtccagcggcacctcagactcactccctgaagtattccccgtcttttgcagcttgaccgaaaggccc

SEQ ID NO: 2820 - DNA, 516 bp, Aspergillus oryzae
aaagactgtctactacccctcccagaccgtatttgccatctcctctgcccacttgggattttatctgtctgctgtccccggcgtaaacccaatctaatgcatcttcacggctgccgctattctcatcggggaagacacagttccaaaggacaaggggagcgtcggaagccatctcataggtcggcttacgcgggttcttggttatgtctaacaggtccggcacaatagtcggtggctcgagcccctggcccactaggaacaaaatacccaccatgtgccgcacctgatgccatagaaaagcggatcctctcaagttaaatacatatacttgagaaggggttggcgaaggagactctggcgacccgggagtttgttgcgcagcagggtcttctagagcttggaatcccggttgactgacgtagcccagtgggctgcttcgcgggtcaaggagctcaatgtcagaatggtagatgactctctcgaaattttcgatttgtttgctggtgtccagtttgc

SEQ ID NO: 2821 - DNA, 553 bp, Aspergillus oryzae
cgctacccagacatcaaaagacttactacacccaacctgcatgcaatcccacgtcgagtacaactaggagtggtggacatccagaaagagccctaccgaggaaatcgaaacttggcctgcgctgacgtgatctggtcgattgggaaagctggcgattcggagccctcggagccgtttgcttcttatgttggaccgaatatcaagaagatccttgtgttcgtcaatgagcgcgaggaagccgatgaagtggcccaatttttaaggtcaaagggaattgacgcccagtcgctttctcgggactccagcgcccggaagcaagaagagatcctcgccgagtttaccgagtcggcacctccgcccagcccagaagaaatcatgttagcccagaaaaagaggcgtcaagaggatgccattccctttgaactgcccgagaaccacaacaaacccgagaatgttcgccgattggctaacaccaaggtgctcgttaccaccgatttagcatcccgaggcattgacaccctccccgttaagactgtcattctataccacgtcc

SEQ ID NO: 2822 - DNA, 409 bp, Aspergillus oryzae
gaattcccgggtcgagtctgcgcgcataccaaatcgaatcaaatgtattccaccaccgctaccagaaacaaaagaaaaaactcgacaaaggcaaagcccgcgccacgacagatctcccccaagcagaagacatgcacatccaccgaatgtccctcgtcacgcagatccaacacctcttccccgacctaggatcggggtacatcgtccgtctactcgatgtctacgacgataacccggagaccgtcatcgcacatctcctggacgactctattccccctgagctccgggaccttgataaatcagaacaactccccactaccaattccactgcccccaagcacgaccccttccctccgcgtccaacaccacctcaaatttcctctccaccagtgcaaccccgcaaaaacgt

SEQ ID NO: 2823 - DNA, 371 bp, Aspergillus oryzae
gacgccttcttggaacgttgaacaggctacatcaaggacaaaggcagtctcccctgagttgcccagatcgttggagaaagaaagcaattcagcaaagacgcctgtcgacatgcagtctgccgttattaaggctgaaaatgccttcccagctggagcgcccgtgggtcaatcaaattcggttcgatactccggggtagaaatgccctcggattcctcgggaaatcggaatgtccaagctgatggtgacgcttcgttgtcccgaatgaaactcgaaagactgaaccatagtgaaccacttctctctattcctcgaggggggtctagcccccaagccccaagagagttgacaccagaagcaagaacaggagacc

SEQ ID NO: 2824 - DNA, 343 bp, Aspergillus oryzae
tcgacccacgcgtccggaacagtataagggcaccgtgtgtcggatatccgacgtgaccgagatcggtgcgccggctagtggattaaggttgtacgttccgggccaacattaaagatgaaggagtcggaagatactctgtcatgtaattctctgtctccaatgtgaaaacatatgaagcgaatatttttacgtggggggaagtttggtgatagggtggcgcccatggctggaaggaaagccgcttactagatgtatggatttgctgtttacgctaatttcccagcgacgttgttttatattaccttgacttctactttcgcaatgcaacttcaagatgttcatg

SEQ ID NO: 2825 - DNA, 309 bp, Aspergillus oryzae
caccgaatacgtgggttaataacgcacttattatatatttttatttttattttttcgctttactctctaggtcataaaatccctttttctttccttttccctacataaaatcatgggaccacaagcaaaacggcgaaagacgagcaaagtcgaagaaatcaccttcgatcattctgcccgtcatgaattccttacaggttttcgcaagcgaaagcaacaacgaactaaacatgcgcaggaaattgcagagcagaaagctcgagagatgaaaagagaagaacggaaacgaattcgggaagaacgagaagc

SEQ ID NO: 2826 - DNA, 428 bp, Aspergillus oryzae
ccaagaccatatcaacaaaatgacaacaacaaatatcaactatagcgcccttgaacaaggctacgacctcgaaatcaacaaactcacccccgttctcaccaaacgccaacaaatcacccacgagctcaatcaactacaaaccctccgcgactcgaatctctattccgcacagcaagccctcctcaactccaccaccgtgtcagacgatcaattagcccgccaggaactcgacgatgtccgatccagtatcaataacacactccaacaagtccgcactctggtagatgagcttagatatcttgcggatccgagtgatccgcgcgtgcgggcacaggtcgatgctacgaagaaccaggtgcaacaggcgatccaggattattatcggtcgcagacggagtttgaccgtgcgctccgcgaccaggtgtggc

SEQ ID NO: 2827 - DNA, 544 bp, Aspergillus oryzae
tcgacccacgcgtccgagttctcatattattgcttggttatagtatccatctacaatggaccgttctaacaagccttcggccatcggcgtgggtgcatctgtgcctcagcccactatctccctccgcgataatactgtcgaagccacgctgccctccggcgaatctgttacgatccacctgtacggagctactgtcacttcctggaaattagcaaatggcaaagagcaattatttgtgagcgagaaggctcatcttgacggttcaaagccaatccgcggcggtatccccgttgtgttccctgtcttcggtcctcctcctcagaaccatgccacctcctcccttccacaacacggctttgcgcgtaacagtacttgggaattcttgggcaagtcatcatcggaatccctaggcaaggatcgcagcggagatggctctgtcaagctggacttcggtctctcccgccccatgctcacagaatatttccagaaggcatggccgaacgacttcgggctggtatatagcgttactttgaccaaggagagt

SEQ ID NO: 2828 - DNA, 533 bp, Aspergillus oryzae
ccccacgccgctccctctccctcgatccatctcgacatgcctcttgccccgtagccgctccgctcattcgatacccttctctcataccttcccacgcccctccagttcgttccgcagccgaccattttctagctccgcaaagcgagggtaccagtatggagggaaccagtatagaagattcaatgacccgagacgcgagccgctcttcatccgcttggtgaaggatgcccaaccacaccactttgtcataatagggctgggaattagtgggctctacatatataatagcgacacggtagagatgactggacgccgacggttcaactgcgtctccgcgcaacgggaacttgagatgggtagacagagctatcaggaagtcctgaacgaaaaccggggacgcattcttcccgagtatcatccgcttaccatgcaggtgaaccgtgttttgcagcgcttgattccgcaggcgccgattgaaggcgcagactggaaggtccatgttataaaagacgataacatgcttaacgcctttg

SEQ ID NO: 2829 - DNA, 282 bp, Aspergillus oryzae
ggccaagtacgctgcccaactggagggatctacatgatgcgaccatatggcaccagcaccagcaaaatattcatgctctaactctagtctgactcctccttctgtcttgaagcatttgccgtccgtcatctcgaatacgctcattctacagccgctttagggttatatatttctacagtggaaaaaccggatccacaaatcaaatccccagagcttttcagatcagatataactcgtttcaatctatatatttatgttgcgaatccatatatgaaacgttct

SEQ ID NO: 2830 - DNA, 458 bp, Aspergillus oryzae
attcgttcagaccctgaatatcattctacaagcacaaaaatgcgtttcttcaagtaccttgtttttgcggctcccctcgcccttgcgactcccagacccaacccggtagcagcacctgcgccggatggtggtctcctctcggagctgcctgcgctcatcgacgcggtcaaggagctcctgagcacagacactctcaatgacattcaaacaatcgtcaagggcggtgctgttcttctgggtggagacactcccaagaacctacagaaactcctttcgagcgagaacatcgataagttgcagggtatcgtcgataatgccgacggtctcttgacacctaaattcgtcaatgagacgaccactcttattgatgctgcgtcaccgcttgtggataatgtttcgaaacttttggctggactgttgggatccttggtttaatgatgttacgaaagcagcctttt

SEQ ID NO: 2831 - DNA, 440 bp, Aspergillus oryzae
cttttcagtcccaagcgcttaaccgagagaaaccaacataagaattccaaataggacggagagcaaaaaggagctagcgaagtatcaaagcaaggggtgaggataagaaagttccaggaaattaaaaatacaatggccaccatcatcaacgggcaggtgtttacccccgggcttgcgattatcgactcccctcagccctatactccactcggaggggacagcctccaagtagccattgacgtctctggaaacggacagctgacctccagcccatccgatgccactaaattcaaggacattactctcttccttacctcgaatgagctttcgaagaacttcaccatctctaatggcacagagcccaagggcaatgcctatgtcggtcctgtcctggagatcaacccgtctactaacgtccaacaagtcaactggaactggcc

SEQ ID NO: 2832 - DNA, 530 bp, Aspergillus oryzae
ttttgttctataccggctttcgcctgtgcgagatactttatgggctattgggtctacgagatcttcttttctttcttttaattgcatagcttctatttcgtttcgctgtacgtatccatcggtcgatttttacataccctgtttatattactatccaataatacaaatatcaaaatggtcgacgctcctgagagtcctgtcccgcagcaacaaactcccgtcaagactttccagaatggagtcagaacgacaggccgtgccttccattccccaaactggcgtgtgaagggtgaggagagccccagtgcgcaaagcgcggggtcccccggtccgaagaccaatacctcgaggattgcattcagcagacctagcccccatgtccctcaggctatctccgaaggacgccgtctctatgtgggcaacatgccttacactgccaagtcggaggacgtgcaagcgctgttcaccgcggccgagtttacaatcgagcggatcgacatcgccattgacccgttcactggccgtaaccc

SEQ ID NO: 2833 - DNA, 505 bp, Aspergillus oryzae
aaaaaatccacggcccttatgcgattgatccatagcacctcattacgcccagcgcacctaaattgtttatagacttctaatcgacatccacattaagaagtccccgtactagccagccatcatggacccgcccaggctagacaagattacggctgattccaacctcgaagctcttggatatacgccagagctgtctcgcaatcgatcaacatggcaggtcgtcttcatggtcttcatcctggcgtcggtgccctacggtctatcgacgacgatgttatactcgattgcgggtggtggctcggccaatatgatctggggttggatcgtggtatccctgatcatgttgtgtgtcgccgcatcgctcgctgaggttacatccgtctatcccaccgccggtggtgtctattaccaaacctttgccctgtcccccgttaagtatcgccgggttgcagcctggatctgtggctggtcattcattgccggcaacatcaccatcaccttggcc

SEQ ID NO: 2834 - DNA, 180 bp, Aspergillus oryzae
gcaaaagggtgtcgacaaccagcactggtaccagcatctgcagtctgaccagcgcgcttaattgaataatgattatgatggacggtatgaaaagatcatgagcgggtatctcgtgttattttcatcttcagcctgcagaaatggccatgtactatagataatatgataaaaagatctttt

SEQ ID NO: 2835 - DNA, 689 bp, Aspergillus oryzae
tcgacccacgcgtccgaacttgctgggctaaatttcagccacatatcttcgcaacacagtttgataattaatacccgtatattttccggtgtcagccttgtttcgccctattttcttttatttttctggttgattcttgcttgcattatacccaacgccgttccattgcagtgtcctcgagatcgctctgtgtaatttcagtactcgtgtgcttgttaaattctggaaccggacttattaaccgggtaacttgacgccatcagcaccggtgttagacagattcgccagaaactagctgttcgggttgcaagctcagacgaagcgtgtggaacaacagaacttaaccttattatatccaacatggcgcccactactaccaccaagactcagactgtgcagacacctcccaagaccgagggtcctgctacgcttgacgacatgaaagaacacatcgacaaggccacatttgaccagatcctggagatggacgacgaccccgatgatagggacttcagcatgggaattgtcgttggcttctttgaacaagctgagggcacctttaagaagatggaaaaagctctagagaagaaagacctcaaagagctgtcttcactgggacatttcttgaaggctcgtcagctactctgggactgactaaggtcaaggatgcatgtgaggagatccagaac

SEQ ID NO: 2836 - DNA, 580 bp, Aspergillus oryzae
tcgacccacgcgtccggatttcctttcccttcacctacactttcctttactctctctcttccctctcttccaccgctctaactctacttgcacccatcaccccatctccctttaagcccatcatgaactggctcaagtcaaccctcgcgagtgttgcgggtacgcaggagccgatctatggccctgaggcgattcgatctgttgcccaacaagcacaggaagtgccttacactgtactctctaaggaggatctgcgttggcgcgcctaccaatacaccaatgtcgagaccaagaccttttatatcatggccgacaatggcaccttagtttttgtgcagatcatctacagcaacattgttggcatccacaccaccgcccagttcaacgcgaagattttcaaccttactggagatgccccccacaagtggtactcggatcccttgtacaacttcatgttcgatgagagcatgctttcctttggagccgacaatctctctctaacgctcaatgaggagggagatgcttacacactgaaatccgctgtgaaccgaagactgtctggtgaacatcaccttcaacc

SEQ ID NO: 2837 - DNA, 636 bp, Aspergillus oryzae
tcgacccacgcgtccgcaacgttcttagcttctctgcactcgggcactcgtttggtcttcccaattatacatagatcaccttaatcttaattcaacttaccagtctttcccgtcaagatgagattctccgctatcttcaccctgggtctcgccggcaccgccctggccacccccctcgttgagcgtgctggttcctcccccaccgacatcatctccggcatcagcgacaagaccgatgctctcgactccgccatcaaggcttacaacggtggtgacccctccaaggttgagtccgcctccgctgacttgatctcgaccatcaccaagggcactgatgccatcaagagcggtgatgatatcagcaccaccgatgctcttgctctgcctgagcccgtccaggctttgaccaagaaggtcgagcaggctatcgatgacattatcgccaagaaggacaagttcgtcgaggctggcgctggcggcaaggtcaaggactccctgaaccagcagaagtccgctgccgatggtctcgcctctgccatcacctccaaggtccctgagtctctcaaggagattgcccagagcctctccgctggtatcagcaccgctatccagaagggtgtcgatgcgtacaaggac

SEQ ID NO: 2838 - DNA, 453 bp, Aspergillus oryzae
tcctaaccttaggttacctatttcttttctaaaagctatcctgtacaccagttctacataatgattgccccttcagagcccgtcccatcctccaactctgccgcagccctaacccaattctttcccaatgccaactttaaggaggcttttgatgaaaaggttgtcttgattgtgggtggcgccaatggtattggagctagccttgtagagctctgttgccaaaacggcgcttacgtctgcattggagacatcgatactgcccgaggagaggccctaagcaagaaatgccgaaacaaatggcctgtctacttggaccctgcccttccaccaaagccgccccgagcctccttttacaccacggacatcaccgattaccaggccgtagcctccctctttgaccgtgtattcaagacctacaagcgcattgatcatgtagtagtcacagcgggtagc

SEQ ID NO: 2839 - DNA, 483 bp, Aspergillus oryzae
gatatcttgacttaagcatttcagatcttcttttccagaccatcacatatcactatcttcaccatgggctccatcacacctcatgcagcatatagcctcaacaaccccttccggaccaggattctaaatggtcaaatcacaccgttaatgtctatcaagttcgtcacgggtaatgaaatccccatgatgtgcaagatggccggtgttcatgcaatgttcattgacatggaacattccgccctcgacatgcgcactgtcgcccaacttattctcgcttgcaattacgccggtgtctcgcccgttgtccgttcaccctctaagtcacactggcacatcgagtctgtccaggaagtcagggacattgtgaagcacgccaagtttgcccctctggggacacgcggatgcaccaacaatcaggccgtgatgaacttccagcatgtaccgacactcgtacagaatgagattctaaacgagcagaccatg

SEQ ID NO: 2840 - DNA, 502 bp, Aspergillus oryzae
cctccatcgagccaacttctgagaaaatgtcaagcgttgttcttgtcactggtgctaccggcctgctcggccggcaggtattcaacactttcaagcactcggggtgctttgtcgtcggccaaggctattcgagagccaacccaccgaccatcctgaaagccgatttggagaacaaggacgacatccagcgtatcctggacgaagcaaaacctcagattatcatccattgcgccgccaatcgttcccccgatctgtgtgagcaagaccccgagaaggcgcgccgggtgaatgtcgaggctacgcggacccttgcagaagaagcctcgtcccgcggcgcatttctcatttacatctctacggactacgtgtttcccggaaaggaaggagaagctccgtatgagaccgatgcggaaacgaaccctcccaacctttatggtcagctgaagcgggatggtgaggttgctgttctggaggcaacgaaggagaccgggctcggcctcgt

SEQ ID NO: 2841 - DNA, 516 bp, Aspergillus oryzae
attttttcctccagttctgtttatagtacattctttccatccgaagacgatctctttccctttagagatacatcatattagagaagtttccaagcccaccatggcccttccgtcagcataccgcgagaaccttgaggcggcactagaccctagccgccagaaaggtcaggtcttcaagcttacagcaccagctgacgagcttggttgtgttgacttcggctcaaataaaaccctttcccttggtgggagcgcagcaacacgagaggagtttctcagagagcttgcgcgaaatcctaactttgctattgggaccgggggcagccgtctcctaggcggaaccactcgatatattgacgagctcgaacgagacttggcccacttttataatgcagacgagggcttgattttgccttctggatatgagggcaacgttgctattcatgcgacgctcccgcagacgggagatgccattattcacgacgcaaagattcatgccagcacgcgcgatggcatgcg

SEQ ID NO: 2842 - DNA, 581 bp, Aspergillus oryzae
cattcattttcattttcaccgagatcaatatcgtggtataatcaactgaacacaattcaaaatgggtaaaattcttatggttctctatgacggtggcgagcacgccaagcaacagcccggtctcttgggtaccaccgagaatgagctcggattgaggaagtggttagaggaacagggacacactctcgtcactacctctgataaggagggtgagaactccaccttcgacaaggaactcgttgacgccgaagtcatcatcaccacacccttccaccccggctatcttaccgctgagcgcctggccaaggccaaaaacctcaagatcgcagtcactgctggtgtcggatcggatcacgttgacctgaacgccgccaacaagactaatggcggtatcactgtcgctgaagtaactggctgtaatgtcacctctgttgcggaacacgttgtcatgaccatccttactctggtccgtaactttgtccccgctcacgagcagatcacccgcggtgagtgggacgttgccgctgtcgctaagaatgaattcgatttggagggcaaggtcgtcggaaccgttgctgtcg

SEQ ID NO: 2843 - DNA, 529 bp, Aspergillus oryzae
ccagcggcaacccaggctatgtcaccccctgtcggtggccttgtacccaatcgggcccctccaagacccccagctgccgctaatatgacgcccgcccgccctgctcctcagcccccaactactgcttcatacgctacgacaaggccagtacaggatccctggcctcagttcggaacgatcccggagaatgctcagccgttcggcacaccacccatcccggaatccgagcccttgccgtctgggccgcagctgagcagatcaaactccaaggctaacggcgcaacggctccatgggtgtcaccagctgttactccctcgccaacacagtatcaacaacagcaggagcaagcaatggctacagcccagcaggcaattgcaagcaagcagcttgaccgcagccaaagcctacgccaacagcaggcacagcagccaaaacaaaaacaagcaacgcacccaactccacaacaggtgtcgcctgtggaggatccatctgctgcgcttcaacaaagtgctcgtgccgtacctgctg

SEQ ID NO: 2844 - DNA, 423 bp, Aspergillus oryzae
aaacgatccacacaatctcacgagctttaacgaatactatacctccattatccattaatcgaattcccttaccctactgaacctcccaagataggacagcaactgacatcgcccttctcaccactgaagacgcccttcaggttacgaccaccatcacactttaccccagaaccaaacatgtcgtctcccacagtgcaaagagccactggcactcctcgcaagctacgtgccgaatccggctccagcgccggaaatatcgccgaacagagcccctctaaacgaacaccccagaagctccaagtccgaagccgcaagccgatcgaagaagacgtccccgaagaaccggctaccccgtccccgaaaccacggaagactgttcagggtgagcagcgtgatgctcccgaagagacacagtcgcaggct

SEQ ID NO: 2845 - DNA, 664 bp, Aspergillus oryzae
tcgacccacgcgtccgaaaaaggaagaggactcaggaatcgtttgaccccttcggtgaggatggcagtctgttctggggtggcgacgaggttctaaggtggcttcggaagtatgtcgaggtgcagcgctcagccgccgataatagcgtatatttgatcaacccatccgaagaagatcgcatatcgtttgggcggccgttgacggccgatggaacagtaaccagagcccaggatcaagccactggtccatccgcgcaaggtagcagcggacagcgggacgcgggaatggatcctttcatgaaagcgattaaggagactaggtggaaggtgcttgagcagctgagcaaaatcacgacctttacaaagcggacagcgaatgagatagccgaaaatccgcgaattcctccgcaagttcgtcggctgatgaagacaccggagatccaaaccttgcaggatgagtttgatagtgccaggctatatcttgctcgatgggccatgagcatatctgaacagagcgaacgcgagaggaaccagcggatatggactgcacgggatgtcctcgagatggaaaacagctccgtgggtgatttcgaaattctcgagcttgaaacgggaaccatgtccattcacgaacgacgcaagacagtgactttaaagaatgggag

SEQ ID NO: 2846 - DNA, 592 bp, Aspergillus oryzae
cattctgcatcagcttcattgcgcccactgttctttcaactttcttgtgtcaagaacaagtggtacaagctgacaccccacagggaggcctgccaccacccttcggccagccctgagtcaagcgaacacttcctatcctaggcaaagccataaacgttcggaagaaacagcataatcactactgcaagccacgtacattgcctttgagctcatgagagaaacctttgtttcaatggtgaagctatgacataccataagccttatagtcgggatatcccaaaccgggacgtcatacaaagaacgttgaaattgcatcgaccagaggagatcactctccatctgatctcagaagcatagaagcttacctacaacggtagacgctcgtaccacccacccatccagaacccaataaggcgtctgcgcccgatgactatgaagacctggtcgcgcgggccttcgttgccatgagcgctggaacgcctcagctgcatctgattcaaaatccgcccggggcgtttcacttctccgcgaaggagacggcgtctatgggtattccgtgaacattcgcggccatgacgcttcttggcttgcc

SEQ ID NO: 2847 - DNA, 496 bp, Aspergillus oryzae
attccacgttaccccgttgagattctcatctcacgacgaaaaccaaccccatttgtcttctctaaacacgccatctatttctcttgactcgttcttcaatcatgtctataactccgatcatcacgttcaaagcgggtatctgtgacttggagacatccggcgataactctacagttaagccaaagcctacccccggttacatttatctctactccgaagatgagctagtacacttctgttggcgccctcggactgctcctcacacggagcccgaattggacctggtgatggttccatctgatggaacttttactccctataagccagccgggaatgcgaatcctacgaacggtcggatctacgtactgaagttctcatccagctctcaacggtatctcttctggctacagtccaagtctcaacacgaaggagaagaccctagctggttcagccccagggatctcaagcttggagacattgtcaacacgctacttca

SEQ ID NO: 2848 - DNA, 448 bp, Aspergillus oryzae
acctcagcaccacaatcgcaaccaccaacccaacccagcccaacaaacaaacaacgggaccaattcaattcaactcaatcaaacacccaaaatgtcccaagatccctacacgccaccccccctccccaaacccttcacaaacacaaccccaccaccaaccctcctcacccaaggcgccgaagcccacctctacaaaacaatccacctaaataccaacacgcccgcagcactgaaaatccgaccctcgaaaccctaccgccaccccatcctcgaccgccgattgacccgccagcgcatcctccaggaagcgcggtgtctggtgaagctcgttcgggagggcgttaatgtgcccgcggtgctggcgttggattgggaaggacaaggtggggagaatgggaatgggggcgcgtggttgcttatggagtggatcgaggggttggttgtgagg

SEQ ID NO: 2849 - DNA, 644 bp, Aspergillus oryzae
cgacccacgcgtccgatcgcgagcggcgccctttttttttttttttttttgtttcctcgacatggagtacaaacgactccattatgaaatgaattggtgaatgtaataatcttgaacaacaagaaagcaatatccacgcatcgaactccggaacctcatacccatacttttttccatttattttgtttcgtgcaaaccatgcgtcatcatgcaaatacaccctgagtatcaaaatagctcataatgagaatatgaatcgtgtgttttcacgatttaagagtaaagcttcttatcgaagctgtgcagaccgtggacgttaccctcggccatggcactggcgcttctcatctcgaagcggacggtaccgttgttaacaccctcatggagggcgtcgagactctgcacgccgatatcctgcagagagtgctgcacaccggcaacaaggtaaggaacgaacttggtgacagagccacggtcaaggacagagcccgaaacaccctgagcaacaaggacacggtccttctcagagaagtaacgagcagtaccggcgttgctagccttgctgtccttagagccggcgccagccttcttgtcctccatggcagcgatactgcccataccacggtaggccttgacaagctggc

SEQ ID NO: 2850 - DNA, 551 bp, Aspergillus oryzae
cagtgattccccatcccacacaaccactaaacgcattttcgtctccgacctttcgctacaattttcttctcgtctccttcagtaatatttctctttcctctcgtgattacttctgccctatcttcacttacattccaccgacccttcgtcattctccctactatttctttttaaaagtctgtttatcctcaggattccagcgtgctggtcccttgtttgtatccaccttcaagtcttaaacgatataacggctctgtttttaccgttttatttactacaactacaccaatatgtcggcatcaatcttcttccagcaacagcagcatgctcaccacggtgccgctgcgcacatgcaaccttcgaataaccaccacggcggacgctctcggcgaggacctaagatggccgctcaaaacgcccagcgccagttccggggtgtaaaaagcatgagggagctcgctgaagctcccgcggtgactgccttccgcgcgaggttcgaggctggacggtctttcgacttggacgacgacttggagttctgccccagtctc

SEQ ID NO: 2851 - DNA, 488 bp, Aspergillus oryzae
cagccttcgaaccagcccgccgtttctgcgtcggctggcccgctcccaacaaccatcagtggggcggagatggctcagatgtctgcgggcactgccccctcgtccaacctagatgagctccacgactcgttggcgatgcctaccaaggcgcaggaacaggaacaggtcttctcgctcaatgctgaccagtacaactccttgaccacttatgatgacaacggcgctgaatacaagccgcaacaggcttcacaattccaacaagcgttggctgcgatgcggggcaatgttgcgcagaagatgccgcacaaagctacctctgatgtctactcgagatcactcatgtgggatcgggttcctgaaaaggtaatccaggacttccgacggatggtccaggaatacggtgtttctcccgtcaaggaagaacagtccggtttcagccagtcctaagtagcatagccgacaagactgaagtcaccgtacaccatcca

SEQ ID NO: 2852 - DNA, 248 bp, Aspergillus oryzae
  modified_base (121)..(121): n is a, c, g, or t
gtcgacccacgcgtccgcccgaatatcctgtgtttccggtacttattgtacacaaccccattatctctgcatatgttatcttgacatcggccggcgttttcgggcgttctactgttgtctnggttatacggccgtgagaatcgttttctctttgtaacttggtctgccttcttcataatctactctggtcaacttttcgcatctgtatctccttgttccaaatcaagcttgggagcttcgagtaacgg

SEQ ID NO: 2853 - DNA, 550 bp, Aspergillus oryzae
ctacaccctacactccacctgtactcactttgaattatcacctaacccttggtcgatattgagatactccttacaagatgatgtctttcatgggtcaccaacctcagagccaggccgtcggctacaccttctctcaaccaacaaacgccccgaacaaagaacactcattttacccgtacactgacaacggtggctccactttgggtatcacaggtgctgacttcgctatccttgctggagacactcggtcggtggcagggtataacatcaactctcgctatgctcctaaggtttttaaaattggcggtgatgatgatactggcgagggtgcccatattattctgtcggtcgtgggcttcgctgcggatggtcaagcactcaaagaaagattagacgcagtggtgaagatgtacaagtatcaacacgggaagcccatgtctgtcagagcatgcgctcagcgattgtcgactattctctaccagaagcgtttcttcccctattatgtgcatgctattctggccggtttggatgaagagggcaaaggagcgtt

SEQ ID NO: 2854 - DNA, 416 bp, Aspergillus oryzae
ctccgctgagctagccttgcggtgcgtttttggagccactatcccattagccggaacgcccttgtacgatacactcggtctaggctggggaaacaccctccttggttttattgcgcttgcctttgcaccgacatcgttcttcttacttaaatatggggaaagcattcggaccaaccccaaattcatgccaaagatgacataattcctttctctctgccacatgtggcttctggcctttttggttgttactatggacatttcttgcatataattagcgttcatcttgatgtgatatgacatagagcatttggattcgggattagactgaattatgtttagcgatgtgcttgatgcttctgtttattgttatctgctatttgttatgagttgatctacatacacgatacaacatagag

SEQ ID NO: 2855 - DNA, 515 bp, Aspergillus oryzae
gtacaaattaacacaccttccttgtttccccccttttattgtttgagaataagttcctattcattctgtgaaactttcaacaagtttaactcgtcccgagacccatggccccgaatagctacaactagtttagagctcttgacccaccgcccggctagacgtcgcttttccatcatgagcatcatcatcgtcgagtaatctacaccgtgtgacgtaactttctgcgctggatgcttctctaagcgatggaatcctccattcagcgtttgctgaatgataagctctatgatcggaggaaacagggagccttggagcttgagaaagttgtccgagatgccgttttcaaaggagcacatgaagatattcaaagaattgtcgatcagttatgccatgactacgcctacgcggtacatcagcctcatgcgagaaatggtggcttaatcgggttggccgcggcctccatcgcgcttggatcggaaggtgtttgcgccgtacctcaaggaaattgtaccccc

SEQ ID NO: 2856 - DNA, 602 bp, Aspergillus oryzae
ccatctttgggctatgtcatttgggcgtggtgaaagccttacacttacagggtctcttgcccaggatcattacagggaccgccactggggcactcatcgcagccctcgttggtgttcacacagaagatgaattgctgactttccttaatggtgatggcattgatttaaccgcctttgatcgccaacggaaaataagacttgatgccggaaacaatccgtggttgccatacactacgggtgacagttggttgtggactttgcttcgacgagttcaacggtacattcggaaaggctattttcttgatgccgaggtcttggaagaatgtgtgcgagcaaatcttggtgacttgacatttgaagaagcgtacgcacggtcgaaacgcatcctcaatattacggtggcgacgtcggataagggcagtactcctaatctgctcaattacctgaccgcgccgaatgtgttgatctggtcagcagcagtagcctcaaacgcatcgtcaaactcgctctatcagcctgttacaatctactgtaaagatgaaaccggctctattgttccgtggggtctttcgcgacatggttcctcccagtcggggcgccga

SEQ ID NO: 2857 - DNA, 547 bp, Aspergillus oryzae
cggacgcgtgggaaaatttttgatcgttccataacaagtttgctaccattcaatctacccagaatatctgctagattcgatcaatatgagtttccaaaccagaggtcgtggatgtttcaactgtggcgatgcttcccatcaggcccgtgactgtcccaagaagggcaccccaacttgttacaactgtggtggacagggacatgttagccgcgaatgcacagtagcccctaaagagaagccctgctaccgttgcagtggtgttggccatatctccagagattgtcctcaggcaccctcgggagatggctacagtggtgctaccggtggtcaggaatgttataagtgcggccacgtgggccacattgcaaggaactgttctcaaggtggatatagtggggatggatatggtggccgtcaacacacttgctactcttgcggtggtcatggtcacatggctcgtgattgcacccacggtcagaagtgttacaactgtggagaggttggacatgtctcgcgggattgtccctctgaagccaggggtgaacgg

SEQ ID NO: 2858 - DNA, 500 bp, Aspergillus oryzae
caagcacatcgatcgctttgtctccttccttttcatctctatttccttataccttctatcaacatgcccaacactcttggtaacggtgaatggctcgaagttggccagagcctttggagtcagaatggccaggttgagttgaaaatgcagcacgatggcaagatcgcggtctacgtgaacgcggaatgtgtattccagaacacagccgaccagagggacgatgtcaagggtatccacatgcaagaggacggtaatcttgttatgtacactcacgacggcactgccatctggcacaccaacaccgccgctccatcgggcgacagcacaaccatctgtgcagtgcagaatgacggtaatgttgttctgtacaagggcacgcctctctgggccagcaacaccggtcactgaatggcttcaacgttaagctgtccaagggcttatgtgatatgacaacgagacaacttgaaggatgaagaaacgggctcttagcttaggggttg

SEQ ID NO: 2859 - DNA, 444 bp, Aspergillus oryzae
atggacgctgctgtccaaacccattgccgtgtaaatcgtcctgattaaaatgagtttaccaccaaagggaagtcattgtacaagccaacatataatcatgaaccccaatattaatactaacagagatcctgaaaggttcggagacgtcctgcccctccgaagcccttcatatgcaacaaaaaagagtcgagaaaaaaagattattaaaaatattcaccgagaagagaatgcttgcggagagaaaagaaggtaaacaaagacacagaagaactcaaaaggtgagaattagaggacgctgctggctaccccgtgcttcgaccccttgaggccgtcaaaggtcgccgtccttttgcgcaaccgtgaccgtgcagttgtctctgctagctcatccgatgagactgtagcggaagatgttacgttctccccttttggtcttggagccaa

SEQ ID NO: 2860 - DNA, 506 bp, Aspergillus oryzae
ggcttatatctagaacagaaccccacctccgatagagggacttttattatttcgaagtattccggcaagccgcctgactcattgaaacgtgccagtcaaccaggcacaaggcatgtttccgggagaaaatttcatacacgcggcgatgcaaggaatatgagcgaggccagctctccttccagatcacctgcaaggaacagtcccaagagccttgaggcgcttttccaagatgtgtcggaaggcattcagcggcggacagaatcttggggagtagccaaggctgtccgaggcgcggtgagtgaagcgaagaggaacatgcagacgatccagtcggaacacaatcctcgaattatgagacatggagattctcccttgagccgtacttccgatgcacggtgggctcaagaatccgatacagtcgctcagttgaaaaccaaggtccaagagttggaagaacgcaataggatgctagcgaggtcgttgggccaggcgctgaatgatatccg

SEQ ID NO: 2861 - DNA, 384 bp, Aspergillus oryzae
gtttcacttgcatttatttgtatatcgaccgatcgaattgccatttaatgatctaattaatcattattgttggtgacgacccgcgtcacaactgagctggcatcaacctcgatagacagcctacccgccggactgacagtacatcaattgatacatacattcccacgccatcccaaactccagacctccaccagtaatcgaccacagaagaaaccaaatggccgccctccaagaagcccttgaatgtctcgccccaacaacctgggacgaggtgcccacagacccctcctccctccgcacctacatcaacgacctctccacgaaagcccacctcatcgtcaactccgtcccagaaccccctccagcaactactaccactaccac

SEQ ID NO: 2862 - DNA, 418 bp, Aspergillus oryzae
ggacttatcgacttaccttgcgatgttaccatcactacctgtgacgaaccttttcttaacagctcatgattcatgattctacttatctcttcgctatggatgttactttgggtgcccgcttgacttctgcttgaactcttattatatctttccattttattcttagtgttttctttttcgaacagatcgcatggatttagatggtttacgagggtctcacctcattcattcctttccccctttgcgttaacattttacgtgatgactgatgattgtttgggcggtgatatacgcatgacgctccctcaattagcccttccctggctatgatggcggcatcgacctatattaattcctttttgtccattctgagatagactggtataatggctcggcgcaggaagcttagtttgtgcat

SEQ ID NO: 2863 - DNA, 420 bp, Aspergillus oryzae
tccacactttctctccacctaatcactcgatacaaccccagtctctcccccaaacaacaatccatcgcctcaatccccaccaaacgaatcaaaagaccaaaggaaaggaaaacaaaatgtccctccaaacaccccgcgtcctccccgcccacctccacgccttccacccctccaacgcaaacccccacgtcacaaacaccgtccgtatactgggcacagtaacagctctccgcggcgacacggcgaccatcacgtgtggagataatggagacgtgacgctgatcctgaagcccgattcgcatctgcagatggggaagttggtcgaggttgttgggaaggtgactgatgttgaggggcagggtcttggagtgagggtgttgggcagctttgattgggggaatccctctgattgcgattata

SEQ ID NO: 2864 - DNA, 545 bp, Aspergillus oryzae
gcaggctgttgaatcggggccaagtggcttttaccaggacttcgtcagcggtgcagccaattcagaagcaatcgaacagtttccggcataatcgtccttttctacaacccgacttccgccgtgttattgtcgtcaaaagttaagagtaatctccggccgagaaacgaacaactatggatttcctcaaatccgccgtcgcatctgcaatcgcgaagggaagctccttcccctattcgctcggcgacagagtcgatatttctgattcgatatggacgcttcataatgctacgaaacgggtatgaaagctaggagactattatcggtgcactggatgtgatcgcggggctaatgaggcgctatcccggttggatgcataggatgacggctcggcatgcagtgttttcacattcgatattgcttctaataagtctcgtctacccctggcgaagaacgcggtgcgcaagtcacgaacgttacgacatcctggtgtgattaaagttttggatactatcgagacagaagccagtctttatattatcacggag

SEQ ID NO: 2865 - DNA, 484 bp, Aspergillus oryzae
cggacgcgtgggcggacgcgtgggcggacgcgtgggttcaccaagcaattgacaagcaatctcttctagttcttagctctatttagctctacttccccatacttctttaaactcaattccatttccacattacgatcatggagcccttcgacaaagcctggcacacagccgccgattctctcaggaacgactaccggtcctctgagcagcaatggacccagcacggcgaggaaccaatctctggaattcaaggcagaggaactgctactgatccttacgatgccggaaaccgttctgagcaacccggcgctccccagaccaaaaagaacacagctctcgtgcccgaggccctctcgtcaattactcccggcgaccgctcctcaaaccttaagtccagcaccaataagacagcaagtggcccagccgctatgcaacccgagttgaaccccatcggcgaaaccgccgcaaagtacggttcccagcc

SEQ ID NO: 2866 - DNA, 560 bp, Aspergillus oryzae
ttttgagaaatctaacattttgaatgcatcgctatctaagatctatggaaagacgagtcggtctgacgaaacgccaggacatcccgtggaaatagaacagctgaccggccaatgcgcgccagtcagactcactctccccagacccgactctctaatatctaatgtcttctattagaagcatggaaaaaccgaaacagttcctggactggggtaaagtccaaggagattatgactgctaggctgcaggacgcgcagacttgaatccccgggcccatgatggaaagattatccaattccttggtggtcagccatcaaaagacattttggctgcgactcatccctcagccatggcgatctcttaagatctaagtgtacttcgtgtactggaaaaataggatcgttctccaagtcctccagcagcctctcaagatgggatagccgacgaaggcgtctttgataacaccgataactgtaactttggtgagatcgatgacagcgatatattggatgaaatgactgcagggtccatatgtgctgagtgcagtggaaggcggacgaca

SEQ ID NO: 2867 - DNA, 600 bp, Aspergillus oryzae
tcgacccacgcgtccgcgccaagctcatcaaggccgtccagcataatgctacctcgttctccgggaagtatgcgttcctgaaatcttacaactactccctcggcgccgatgaccttacgccttttggagagaaccagttggtggattcggggatcaagttctaccagcgctatgaggagctcgccaagaacgtcgttcctttcattagggcatcgggttcggatcgggtaatcgcatccggcgagaaattcatcgagggcttccagaaggcaaagcttggtgactctaagtctaagcggggccagcctgctcctattgtcaacgtagttattactgagaccgagggtttcaacaacacgttggaccacagtctctgcacggcctttgagaacagcacaacaggggatgacgcagaggacaagttcaccgctgtttttacgccctcgattgttgagcgtctggagaaggacctcccaggaaccacgctctccagcaaagaggtggtttatctgatggacatgtgctcattcgacaccatcgccttgacccgtgacggcagtcggctatcccccttctgcgctttgttcacccaggaagaat

SEQ ID NO: 2868 - DNA, 502 bp, Aspergillus oryzae
attgagcaggagtgtatcgatacgcttacggagcgggcgcgcagcgttactaatgccacttcaaatgggggcgtgtgcgcgacgttggagcgcgagctgagaaggaatgcatttgaggagtgtcgggatctcggtggtaagggtagggggctggggaactttaccgttacttcgtttgggaatctttcgaccgtgaggaattcgacggattgctggcctgttaagcccaaatctgatgatttagctctgataacggagaacactgctgtggggaacaatacagcggcttcaatgtaccaagaggcctggaagatcaccccggtgctgaccgtatttattggcaagggcaataatagcctggtggaaaaagcctcttcccagatgacatgtttaaaagtcgtgaccgaagagaaccccgaagaggcggagaacggctcagagagctcggcgtctatgcttagcactaatccgcgcgttgcaggtatagccgtgctaatagctg

SEQ ID NO: 2869 - DNA, 282 bp, Aspergillus oryzae
tgcatacgctggatgatgttgaggatgaggctgtgcgtcgggctagtgtgctgagccacgctcacaaggagttggaaaaagacagctctgaaaacgacagcacgaacaaggcatgagctcaatgccacgtttctacattgatggtacaaaaccatgttttttgtctctggccgggctgaattctggaaggtcagaaatgatgccctgcacgataatatacccagcttttattctgtatttagctttttggtgctgcttgtaatacattttgatctgttgatc

SEQ ID NO: 2870 - DNA, 621 bp, Aspergillus oryzae
tcgacccacgcgtccgctctctgtctccgttgcattttatcaatccttcccccttctcccatttactcatccctcagacatttcatcgcgtttgctggatcatttgtctgtgtttcgttttttttgttcttttttttattttcaagttcctgtcgtcgggcatcgtaagtccgatacagtgacatccgtcgtaccttcaggcctaccctacttcaagagcttactagatcagtgacccatccccattcgccatcaaaatgagcgcagaacccgaccatactcatgataagaagagggtgcacctccaggacgcctctggcgccgagaagaaagaggaactcgataccgcgacagccatcctaaagaagaagaagaagcccaactcattgattgtgaccgatgccgtcaacgatgataactccgttattgccctatccaacaacactatggaaactctccaactcttccgcggtgacacagttctggttaagggcaagaagcggaaagacaccgttctgattgtgttggcggatgatgatcttgacgatggaagtgcccgcatcaaccgtgtggtgaggcacaacctccgtgtcaagcacggcgatgtcatcactgttcacc

SEQ ID NO: 2871 - DNA, 513 bp, Aspergillus oryzae
cggacgcgtgggcggacgcgtgggcgggcaagtctgtcagctggctgcagattatcgatactttatatgttgccaagtagcgagggccgaaccccgatgatgcgagtcatttcgcagtccgttgtcccacgcgacattacggacgagtttaccaacgctgcctcgagtgagatctgttctacctctgtccagtgttaggattgcgaaccgggcagttggttaaagatgagtactttactttgttcgaggcagtgggcgcactggagattatggactcgaaaatggacagcggctatcttggaccgggacaaaccgacgtgcaagcattagaggacgactacgataccacgcgcgagctggctccggagcaggtgatagggataatggatgaactattatgtcatgagatggcatggcatatgggacatccactctcgcaaacacttttcacctctctataccttgataaactcctttggcccataccgaaaacacttgaagaagcacgctttt

SEQ ID NO: 2872 - DNA, 588 bp, Aspergillus oryzae
ctttcaaaacaacacttgagtacggtttagtatctcggagattcaagatcagaacactgccttatcttctgtatcacaatttagccctagtgtggcagtcacccttgcccgctcccattcatactcccatcccgtaccccgccgcaatgtcgacctctgctcgtcgtcgtctcatgcgcgacttcaagcgtatgcaaaccgaccctcctgccggtgtctcggcctctccggtagctgacaatgtgatgacctggaatgccgttatcatcggtcctgctgatactccttttgaggatggcacattccgtcttgtcatgcactttgaagaacagtacccaaacaagccccctggcgttaaattcatcagccagatgttccatcccaatgtatacggcacgggcgaactgtgcctggatattttgcaaaatcgttggagcccaacgtatgacgtggcggccattctcactagtattcaaagtctgcttaatgacccaaacacatcatcacctgccaatgttgaggcatccaatctctacaaagacaaccggaaggagtacatcaagcgcgtgcgtgagactgtcgagaaga

SEQ ID NO: 2873 - DNA, 568 bp, Aspergillus oryzae
tcgacccacgcgtccgggcggcaagaacgtagctggctcgatgtctgttgcggatgtagcatcgcgaacatctcaggcggttgcgaatggtaacgatcatggagaggcctctgaaggcgccctgttcgatgagacagcatccgcatatcgccgcctgaggctccggtctgaatccgtcatcacctcgactctgacatcaaacattcgcagcgcccttaaaccttactctcgcgtttcgacttgggcaaccatttctgctggtttggcttctcctttatctcctacttcggatcttgcgccggcaatgcgcactctatccaccgagatctcattcctttcccgcaccttgggcatcgcacccttgcgtcgtatcatccgccaagtgcttctctcaattcagacctacatctggaataatgttctcacgaggaatatgttctccgctgcaggggcaacgcagctgataagcgatgttgagcatctctgcaatgtagttgatgtagcccttggcccggcggctcaggttagcagctcagcgaatgtgcttaggaaactcaacgagggtctt

SEQ ID NO: 2874 - DNA, 596 bp, Aspergillus oryzae
gttaccaaacatgccgtccaagatcaccgtaggcgttgcccaagcacgcacccacaacactgtcacggagactctctccgccctcaaccgcatcacccgtgatgccgcctcccgcggcgtccatctgctcctcttccccgaggcctatctaggcggatacccacgtacctgcaactttggcactgccattggcgcacgtcaacctcacggacgggaacagttcctgaactacttccactctgcagttgatctcggggatacccccactggagcgggtgacgactgggtacagaggaagttgcccgtcgcagagggcaagaaccatcgcggagacggcaccagagaaactcttgaacggattgcaaatgaaacaggcgtcttcatcgtcgtgggcgtcatcgagagagcggcgggcagtttgtactgttctgcgctgtacgtcgatcccgcgaggggagtgctgggaaagaggaggaaggttatgcctacaggaacagaacgtctcgtctgggcccaaggttccccatcaaccctaaaggccgtgacgacccatctcaacggtgtccccgtgaccatggcagcagccatctgctggg

SEQ ID NO: 2875 - DNA, 586 bp, Aspergillus oryzae
cttggtttttgcacattgcctgacccgagcataaacgctagcagccctccatctacctatatcaaggacggctgtaatgtacttgcggagaccatgccgggtggttctctcgcacattacaacagaggtggtacggcaattcatgaaataggtcactggaatggtctactgcacaccttcgaaggagagtcatgctcatccgataacgagggtgattttatcgcagatacgccgcagcaatccaagcccacagaagggtgtcctgcccaaaaagattcatgcccggagctcccagggtttgatgctattcataattttatggactattcatctgatgagtgttacgattcttttactccagatcaggtcagtaggatgcgaagcatgtggtttgcgatgagggatgggaagtgaaacgaggaatacatcgtcgtttcctcaaggagtgcaccacctctcgtattgggatggaacctgctaatccatactttattctcactctcctatgtgatgctcgatattgctcgtcatgtgtaatgtgccgcgtggttatgctgtccaagagtgggaacggtatacattatat

SEQ ID NO: 2876 - DNA, 577 bp, Aspergillus oryzae
gaagactgttgatatcgctctgacgttggatctctctaaggctgatcatgataaagacgggctcatccgactattgacgccgcaatatttaggagacaagctcctaccgctctcatctagactaaaggttgcgttagaaaccgttcgcaagctagatgaaatcaacacatttttccaatccaaggggtttatgactgatgacgactcacaacgatttgcaagcgagatggcgtactacaaaactactatcgaagggtacagtaaaagcgtggaagtactcgaaggaaaggtgaaaggtatctcggatctgttggcagttgccctaaacctcaagggccaaactgtagccaatgaaattaacgacaagatgctgcagctcactagcgaggcattcgaagataatgctactgtccgggttgtcactctagtcacccttatctaccttcctgctagcttcgtctccactctcctcggaatgaacctttttgagtttggagattcgaatgggcaagggttcacgatctcgaagcagttttggatcttcgtcgtggctgcagtaccgcttacgatgctcacc

SEQ ID NO: 2877 - DNA, 439 bp, Aspergillus oryzae
ccctggcacactgattgcgctttactcgttgagatcaatattcgggttctcccccgacgacgtgaccgctcgtctcataatcctgcaagttgcacggatggccggtgtcccgcctggcacacccaagcgccggctccgtcgcctttcaacgactcctaagagcaaagagaacatctctcatgtcaacaggctggtagagatcctgagcgagcgcaaagtgtctgcactccaggcgcgcgggcttactctcgagactctcgagccgcaggagcgggagcagtatcagctcgatataatgactgaccttttacgtattatcatgggccgggctgctactgaatcgagcagagttgaagatcagattgcgtccgccgcagaagagatgaatgtcctgggggtcgatcttggatcgtcgttggaggataatgaccttttactg

SEQ ID NO: 2878 - DNA, 617 bp, Aspergillus oryzae
ggttcttgtgcccattagcgagcacatcaaccgtttggtcgccatccgtgcgcaggcagatatcatgggcaccgatcttcttgccattgccagaaccgacgccgaagctgctactctcatcacctctaccatcgatcaccgtgaccatgccttcatcgtcggctcgaccaaccccaacatccagcctctcgtggatctcatggtggcggccgaacaagctggaaagcagggagacgagcttcaggctatcgaagaccagtgggttgctcaggctggcctgaagcttttcaacgatgccgtcattgaggccatcaacaagggtgcccactctaacaagcaatccctcattgatcaatacctgaaggctgctaagggcaagagcaaccttgaagctcgcgcgatcgccaagaacatcactggacaggacatctacttcaactgggatgcgcctcgcacccgtgagggttactaccggctccagggtggcacccagtgtgccattaaccgtggtcttgcttatgctccattcgccgaccttatctggatggagagcaagctccccgactacgcccaggctaaggagtttgctgaaggcattcacgccgtgtggcccgagc

SEQ ID NO: 2879 - DNA, 560 bp, Aspergillus oryzae
caggtcggtctgaatatgtccaatgccccgcagaatcagactgtcggttctgtcctgattctggacagtcaacttacgaacacacccactggtgttgtttctgcattcaccgagaacagcattcccattggcggaggtgtcctgattcttgacaacgtcgacttcagcggttctaaggttgcagttgcgggtattactggtaatactattctggcaggcggctcagtcgtgacgaactgggtccagggcaatggttacctccctggcagcgcgaagcagaagcgtgaggcttccgtgaaggtgattacccaaactgtgacagagacagtggaggtctgcactgccgattatacagactctccgtccgcaccaacagcgcttccttcgtctttgggagagagtcgtactgcagggcttttgccgactcttccgttgcctaacatcccactcttgagcggtttgttgtccggctcccagtcatctgccacccagcccgctggggtactgagcagcgaggtccccgagcccactgccactccgtcaactccagaggaggctga

SEQ ID NO: 2880 - DNA, 474 bp, Aspergillus oryzae
cacaccattctgatttcatcccgcttggccgcaccttttttttgaatttgcatttcgggtgtcgagcatcagcgagcgcaccagcagaccaccagggcaacagtccatatagcaggcaattttctctgaaacatctctcccgtcgtccatgtgtgagtgtgccatttcatgtgggcaggatgcacctcttgtgactttgggactagttaggcctcgcttcgccctgagatgggctactatgtgggtgtctgggggaacctgataagtcttcactgcgctccaaaataatgtcttgattacgtcggtactctgtgtttggacatggtgttgggtggatccgaccctggttcaaataaatgtggaagtggatcgttcttggtaccggtggaggtggatgggaattgcgatgaagactcgactttcagtacagtggaaatattggcggctgttgatgcagacttgtgaagtctgtgg

SEQ ID NO: 2881 - DNA, 483 bp, Aspergillus oryzae
cggacgcgtgggatctttttgctttctttctttctttctttcttttttttttttttacttctttcgctcccagaggttacccctccttgtgctttgcttttaatccctgtcattcttcttagggtttcttcatcccaccacagctgtttcttggaaagttgtgttcgccaagtgcttcttcccactacgtcacttcttgtgtctcctcttttgaatcacaaaaccgccccgcttccacaatccacatctcaacgatcattattggaaacacaagataaaactaggccaagtttatcacagaaatatttgaaaaataacaaaaaaaaaaaagggggaggggtgacacaagaccaaagaaataataatatactcttcaccaagatgcctcgtcatcaacaacacatcgtcccatggaccgattccgagtccgactactcatcagagtcggattattccatgcagaatgaccgccgtcggacgacc

SEQ ID NO: 2882 - DNA, 448 bp, Aspergillus oryzae
gtcattctccgcccggcctcggataaagaggcctttcagccacgatgggtgtcatccacgcccgccgagagtgtgggtataatagctggggcgattgggtttgcagaccaagtagctggtatgactggggtcgttgggtagcgtttgccgtcattgttggttgtgcttttatcatattctttctttttgcatgccataacgctcgccgccgtcgcactcgcggccttcaacctcatccgggcacggcatggcttgctggcccgcctccctacggacaacaacatcaacaacatccttactatgccgaccctcattatcagcaacagccaccacctcagtatactccccaaccgcaaacatatggctactttggaggacagcaaacgggcattgagttgcagtcgccgccgaatgcgtatcacaacggacccgatcgggcctaccagcc

SEQ ID NO: 2883 - DNA, 410 bp, Aspergillus oryzae
cggacgcgtgggttcccatgaagatcttcgaggtcagcgacgtagcgttcaaggacctttcgctcgagcgtaagagccggaacgagagacactttgccgccgcatggtatggcaagaacagtggtttcgaagtagtccacggtcttctggaccgcgtcatggccatgctcaagagtgcgttcatcaccggtgaggagggtctcgagaaacccggtatgagcgactctcagtactggatcgaggagcttgatgaggcaacctacttccccggccacgccgcttctgttcacctgcgaatcggcggcaaggagcacgtcatcggtgccttcggtatcttgcaccctacggtattggagaagtacgaactgaaatacccccgtcagcacgttggagctcaacatcgaggcttt

SEQ ID NO: 2884 - DNA, 558 bp, Aspergillus oryzae
ggatagcttgtactgagaaaataagctagtcgagaaagcgatccaaaagaaccaacaataccccgctgatcctggtgaaccggtaaacctcgcattcgaagtgccgatggtcgaactttgctagaaactggtgggcctattgtttattgaggaaacctgaggaataaaggaggctgcttgtaaacggcaaaaatggctggtagatcttctgttactcggggagaggcctcgccggcgccttcgctcctggattcggcttctagaaactcccgacgaagctcttctcgcgcttcaaggaaagcaacgcgagaacttgaactcaatctctctcatccatctcgtttggcagtgtctctacccccaacccctatcacttcctcttttgaagaggcgttgtcgtcaacacagcgtgctaagagacaccgctctgtcaactactacgaaaagacgccaaagtccaaaggagccgagactccggaccagaagaacgcatcgttctcaactcagccatcaggcagcgcctctagaaagagtagtcgtagtcgcaagtccgagaac

SEQ ID NO: 2885 - DNA, 531 bp, Aspergillus oryzae
gcctgcagcttcagcgggcggtaatcggcgacaaccaatctcaagaaacagcgcctctgccgggtctgggacggattttgcttatgtggaagttatggcatgtcccggtggctgtactaatgggggagggcagatacgtatcgaagatgccagggaagccagtactagcacacagtccgtaacggcggtagagaatccatcaaagccaactccgcacgagcagcgggcctggctcgctcgtgtcgatgaagcatatttctcggcagagtctgatgccgaaggcgaaatggacggtcaggcacagcccctcaccatccctgagagggaggctagggtccatgaagctttcgagtattggtctaacctgatgaatatccctctttcgaaacttgtctacacgacttatcgtgaggttgagagcgatgttggcaaacccaaagacgcccctattgatactacccgcgtcgttgagctggccgggaagatcggtggtggttggtagttgcctttcttcttgtactcgctcatttt

SEQ ID NO: 2886 - DNA, 637 bp, Aspergillus oryzae
accgtgaccaatgacggcgcaaccattctgtcccagatggaaatcacaaacaatgttgctaagctgctagtagaactttcaaagtctcaagatgaagaaatcggcgatggaacaacgggtgttgtcgtcctggcggcagccatgttggagcaggcatctgacctgatcgataagggcatccacccaattcggatcgcagatggctatgatcaagcctgcgagattgccgttgcagagctcgataagattagtgacgagatcccttttaccaaggaggacacttccaacctactgaaggttgcaaagactagtctgggcagcaaaattgtttccaaatctcatgatcagttcgccaagatcgctatcgatgccgtcctctccgttgcagatctcgagcgtaaagatgttgatttcgagttgatcaaggtcgacggaaaagtgggcggtgctctcgaagattctatgctcgtcaagggtgttattgtcgataaggacttctctcaccctcagatgcccgatgaagtcaaggatgctaaattggcaattttgacctgcccgttcgagccccccaagccgaagacgaagcataagcttgacattacatcggttgaggagttcaagaagctgcaagattatg

SEQ ID NO: 2887 - DNA, 351 bp, Aspergillus oryzae
ctggcatcaaggccggactgatcgcgagcgataatcttttcacttttccttctcgaatacccctagcatatagtgacggcaaagcatggacctcggttccttcagggacccaccgctttgcgatcggaaaatatttcccattggcgatcttttaggctgtccacattggacttggttggcgttattacggatacggtgtgcaggcgcagtgcaggacgaggcagatcattagctctacgaggcggctgaaaacagccaacagccaatgatttcatttgtgatccctcttttctggacagttactagtttctttctacttcctaaacatggtgaatagcgtcttctgattgt

SEQ ID NO: 2888 - DNA, 470 bp, Aspergillus oryzae
tccttatcccccgctacccctccatattataatccaagatcaccacccgtcaatccataaatactccctgcccaacatgcccgtcacagccatcacctcggcatcacaatacaaagaagtcaccggcggagtcacgcccgttgccattttcttctcctcagaccgggtcgcatcttgcaaatccattgctcaacttctcgaggaaaagacgaaaggcttcccgtcccaattctacaaggtcgacatcgatgctcaagataagattgccaaggacgcgggtatagggttccgagacgtgccgactatcgctatttaccggtacaatcagaagctgggggattgtactgggtctgatccgcagattgtggatagggctattggctcggtcacttcgttttaaggcggggtggggggcggtgaggctgtttttggtgatgtgtggtgttgatagtctttgatagagtggggga

SEQ ID NO: 2889 - DNA, 524 bp, Aspergillus oryzae
ctcgatcatgtctgcaaatttacttccgaaactcaagggcctggaagttctgaagatgccccagccatttctgctatcgtacctgaggcgaaggtgatcaaggttgatcctggtctcggagtctacgtacaaattggatcaacaaaacatgtgggattcgttcatgtgtcgaagctagcagatgggcaggttgaaagtatttctgccgaatacgggccattccggacggattccacccatgaaggaagggttgttggttacagtgccctcgataacttgtatctcttgtcatttgagagatcggttattgaccagcctttccttcgtatcgaagatgttactattggcgcggtcgtcaagggcaaaatcgagaagctgcttatcggaccaagcggattagatggcttgattgtcgctttggctgacggtatcacaggtcttgtcccatcgatgcactttgcggacacggcccttcagttccccgagaagaaattcagggaaggaatgactgtttcggctaggat

SEQ ID NO: 2890 - DNA, 211 bp, Aspergillus oryzae
tgaatatgaggcagatgacgacgagtctgatggttcgccaagagaccgaggtacattaccatccgaggaagttggtgcggggactgggttggaaagtgctgaggctcgcggtgttcaacgaaggcgaagccgcctgttcagtgacggacattcctaacctgcttcgatgtctttcgtaatgattttcaagtcgacgtttttcactgtatag

SEQ ID NO: 2891 - DNA, 529 bp, Aspergillus oryzae
gcgacaccaccgtcctcacagccatacttgtcacaatacccccaatacctttttgaaaactccccaatgttggcgcaacagcctgtcgcaaacacccacggctgggaaaacaacctgcagctgctgagctcggctcgcatgcagcacaaggcatcaccgagtacctcgtcgactcgatctgcacctgcagggagctcgtaccaaagatctaacgcttctacgctgtcgaagcctctacccactcccgtccagacacctatccagaactcgtttctcgccgcgccctatcagcagaactatgacacttcggtgcatgatggtagccaagctgaagcggagatggtgagacgggctgtgatggaacagcagcagaagcagcaacagcaacaaagtcaccatcagcatcagccaagtgattactcactggcaccttcggtatcatcagtgagccacaactcacctgttactcctcagataaaaccggaggaacttgacgaggcctcgaaggcgatggtcaatgactacaata

SEQ ID NO: 2892 - DNA, 480 bp, Aspergillus oryzae
caacatggttcctttctctcttctcctcttccttttacctactccccgtcgactgtctcccccagtctatccaacaacccttctccaacgacctcttcgccgttttcaaacccaccttttcctaccaacaacgccaatatcccctccacaatgcgtgagatcgttcaccttcagaccggccagtgtggtaaccaaataggtgccgctttctggcaaaccatctctggcgagcacggccttgacggctccggtgtttacaatggctcctccgatctccagctggagcgtatgaacgtctacttcaacgaggccagcggaaacaagtatgtccctcgtgccgtcctcgttgatcttgagcctggtaccatggacgccgtccgtgccggtcccttcggtcagctcttccgtcccgacaacttcgttttcggccagtccggtgctggtaacaactgggccaagggtcactacaccgagggtgcc

SEQ ID NO: 2893 - DNA, 453 bp, Aspergillus oryzae
  modified_base (364)..(364): n is a, c, g, or t
cgacccacgcgtccgatcttgcaacacagactacacacagccccagaggaacttcagctattgctagtgtaagtgaagtactaagatctggcaacctattgacgcctgaggcttcccaaggatctcaacaatccaagtcaatcgcatcgcccagcatcgaagaaccatccggcataccagcctgtggcctgcgcggggaagtggacggaattatagagactccgtccgttacgttggccctttcagaaagccagaaatcgttccagtatcctttgtcaagaccttccgattcacaacacatcccctcatcagaaagctgtcgatccgggcttagttctttgatatcccagatactactatctgngaactgcctctcgaaaggccacattaaagctggccgattgaggtctactgtgccagaatcacacccgagtacgtcacaggaatcaataa

SEQ ID NO: 2894 - DNA, 420 bp, Aspergillus oryzae
tgtccctcaacaccacggaagcgttctagaacagctttatctacccagccatctacatccactcgggacggcagcctacggactgccctgtccaacgcatcgtctgacactttagtcatgtctcagtccgacgctctagactcccttcgcggaaagcctctaccctctctgcccgctgttgcgcgcaacgcgaacactttggcaaacagaagagcacagatagtcgttgggaagcctcccatagaggcatctatgatctctcctccttgccgtatcaatcccgttacgatggagcctcacacaactcgatttgatgaagccatgttcatccccgccaatgactgtccaagtcccgttcccagtcctggttctaattcgccttccatggaaaagcctcccccatttggccgcgataggccg

SEQ ID NO: 2895 - DNA, 515 bp, Aspergillus oryzae
ggctgctccgttcacaagtcgccaatttgatgtatcctgcgtgccaactttgattagggaagggagagccgctttagttacaagcttttgttgcttcaaatatatgagtctctactctgctattcaattttccactgtcagttttttgtacacgtcagcgtcgaacttaggtgattttcaatttttattcattgatttggtcctcatattgccaatcgcaatttttatgggatggacaggtccctaccccgtactctctcggaaacgcccaactgccgatcttgtctcgcgaaaggtgctgacgccattactcggccaaatcgtgattcgtatactggttcaacttgtggcctacaaagccgtccagtcacagccatggttcgaacccccagagatcgatttggataatagtaatattgagaactctgagaacaccaccctgttcctggtctcgtgctttcagtacacgctagcaagtgttgttctcagcgtgggacctccattccgggagccta

SEQ ID NO: 2896 - DNA, 370 bp, Aspergillus oryzae
cactgacgatgcctcatccaatttgatagcatgccataaacggctattgtcaattgtttcccccacatatcctattcatctaccacatcggcggcgttaaacggaggagaagcggacaccctctggtggcggctgctggtacccaccgtttaccccaagcttcttgcttcctgctgcttttctccgcccatatggtcaccttccgaccatcgccatgccgtcggacatccaagtctttgtgaaatggaaagatcagacaatattcgccggtgaagatgtggaatgtacaataaccttcaagaacgttgcggagggaaacgtagagagcaacaatggcagacaactctcacctcaaaggaaaccgtctcga

SEQ ID NO: 2897 - DNA, 210 bp, Aspergillus oryzae
cggacgcgtggggcaacggccagttggtccttgatttcgatgcagcttaaggatgtgagcatattcaaccaaaaagcgcttgggggcccttaacaccggctgcctatccttccatcttttacaaagtgcattctgctgtagctaaagatacgggacctactctatgttatgaggtctcttttaatctattttaatgcctgggcattgatc

SEQ ID NO: 2898 - DNA, 505 bp, Aspergillus oryzae
ggcttgaatagtgccccgcgttgagaacaaaccttcatctccagccgtcctgcgaaacgtttctgcctttccactatcaaatcaccttttcctccgcgggatcgggccatccacgacaaagacgcactgaatccctctacctcgcgcgttccgaccgttacgatattttgtcacgtcctttcatgactgacattgcctggatttgcgacatcgcttgaagccattggggacggcactttgaatattgcgccctgatttcaaatttttattttctcgtacgctaattcaacacaatggcatccgaaatcgatcctgtagcgggggtctcaccttcgagggacttagacaacaagtccgatactaccgacgacgacctctccccctccgtgaccactccccccgcctcagtgccttctttgcgcccgaccgataaaatccccggcattactgcatcgtcgacacacttgggccagatcagtgcagctcgaagaggcgcgggcacacc

SEQ ID NO: 2899 - DNA, 424 bp, Aspergillus oryzae
tggtgttatcgtttcgtgtcttttgtcctccatctctgctcgaattgtgtgaaaaaaggtagccatctgtttcttcatacgtgtcgcggctgggttgcccggcggacgttggcaagggctcctacgcctcctacagcgttggagagcctggtcggtgagcttctgctgatgtgcgtttgggtgtgcccctggtcagccccccatgatgtgttatacgtcggttgtcttgcttgtgtctatttggctgcattgtgtctcatttccttttctctggcgggggtttatggcaggtcctggactgggagcgaggcaactcgtgctctcggccaggctggatggagaaaacatttgggtggaattacaggaaaaacgccaagggaatccaaaattagaatatagactccgatcggattagattctcgaa

SEQ ID NO: 2900 - DNA, 525 bp, Aspergillus oryzae
gacgtttggcaccagaccagtcaatttcacgttgtccgctcgcaaagaagtgatcctatctgcaggagcgcttcaatctcctcagctattgatggtgtctggaatcggtccatgcgatgaattctccgaattcggtatcccttgcattagcaacctaccaggcgtcggtaagaacatgcaagaccacatgatgtttgggtcttcgcatcgtgtgaatgttcaaaccgcctctgcgttcggcaatgaattgctagcagaacaattcgcgcagcaatacctccagaatgcctcaggtccgctctctatcttttcatccagttactatggttgggagaagctcccggagccataccgttcccagctatcaaatcagtcaatccaagccctctctgctgttccaagcgactggcctgaactcgaatggcttaccgtcgctgcttaccttggcgacggcaccaacaggcagactgtcgatcccgcagacggttataactacggcactatcgccacagctcttgtcgcacc

SEQ ID NO: 2901 - DNA, 525 bp, Aspergillus oryzae
tgaatgagtagtacaataaaaagaaaagaaacgaagcgaaaggcgctgtaatgctaaatttacgcaacacaatatattcggctgatactaaagctatcaggctattctctgtgatcagcactttattctacaacttctcagtttagcgctggcttgcgagctatagtctcgaaccacggtcagaaatacaagttgactatcccaccgatcttcaagccatggcaatttcacctttaccaccccagtcctcttcaaccgcgacggcagcttccgacaccgcagttaagttcagagctgctcagagctcagccaatcaccagggcaatacatcttcgtcttttatcacgcgcagcactgatcgtgaattaactgaacaattaaatgacgatgtgcggcataagtatatcaaagacaagaagctcggcgaaggaacctatgctgtcgtataccttggtcatcttcgagccgatccttcgtccttggtggcaatcaagaagatcaaagtcaatgctgaatacaaagatg

SEQ ID NO: 2902 - DNA, 387 bp, Aspergillus oryzae
cggacgcgtgggtggcatccaagaataaccacttcgtgctaccggacagtacaccaagatctagcaaattgaccatcaacatagccgggttccgtgtgcacctttacggggtccaggaattatctgcccaacagcgggaggacaccaccgtcttgttccatatccacggccggacaagaacgtataaagacgccgaaccagttgcccaccaacttctgtatggaatgagagaaaggggagactccaacagaggcctcgttgtggcgacgttcgataatcgcaaccacggtgacagaacaattgattcagtcgcaattcaggactggaaagggggcaatatccagcatgcacaagacatgttgtccacgattgatggaaccaccgacg

SEQ ID NO: 2903 - DNA, 598 bp, Aspergillus oryzae
cggacgcgtgggttcgtcttgtcactccggcttcattaatgcaacgatcgcggtcgctgctttcaaatgtcttcaccgcggcccagactcttgcccggccatgtcctccgtccacaatgagggcgccgatttttggggagtgttgattaaccccgacaagagccccaccccgttactcgaacaactgtgcttggggattgcgcaggtaatgacttccttcgacgagttcgcgacaacggacctgacccccgatcgcctggcagcgttttaccgaaaggtcggcggtaactacgacgtcctattcctcgaaacgaggccttctgctctttcgttcatataccagcgcctaggatgtttccacagcattcagcctaccaacgatccctacaaaccaccctctatccccgctttgcagccaaatggctttgtgcgatggcaaacaattcagcttcttctcgaccccgacgagcactcgagatggttacagaatgctgttgatttgtgggacattaagactcccaatggtagaactttccctaagatgatccctagaggggctttcccagcggaacccgatccggagatggtacagtggcat

SEQ ID NO: 2904 - DNA, 352 bp, Aspergillus oryzae
gtgttcttgtttgcccattgttttgataccaaatgcgcgagtcgcgaggtctgctatcgttccttttatatatatacatatatgcattgttacccaacgtgtcttgttccctatcaacagctttttgttttcttttgtcacatcctgtcatcactatttctggcacacttcataagcatctttccctagcctctcatgactctctttcatcccttatcctcctcacctgccgctcattgcatcttacctagggaagtgatgcgacctctgttaaaactttcgattcacctcatgtacaattttcttgttgctgggaaggaccactggctagacttgggctctacacaccttg

SEQ ID NO: 2905 - DNA, 536 bp, Aspergillus oryzae
gtctcttcaaaatgagcttgcaaccatcccgcaatctaaaatagccccaaagcagatgctccatttcgtcgcgcaagcgtgggaccttgtgcttaatctcgaggaggaagcccgtatgttggaattctgcggtgctaccaagctcaagctttctgagattgatgcaaaaccctccctcagggcgagatgcactctgctcgaactaccatctggaaagggatcctcagaagcaaagaacacaggggctagaagagtcgatgttgactttgctgtcaagacgcgtgttcaaagaggaaactctggtgatgttggtgtcctagcattcgagaccgatgtaattgccagcaaggtctatggctttggcacaaagaacaactccggcatgtctgaggatgagatgcgaagacttcttcgtaaggagctcggggagaagtccgagccccagcttggaaacggtatatggagcaaggcagttcagacacttaccgggacagtgttttaattatgagcaacgggatatggcgtcttcaggattg

SEQ ID NO: 2906 - DNA, 679 bp, Aspergillus oryzae
tcgacccacgcgtccgcaaaaatcaaagcgttgaatgatatttgtccttgcgtaggattcattcggcggctacacttttagtactatagcatccccacagacacaccctcaatcaatcgaactttgcccctccagccaacgaattcaggatgggcatggagtttgtctttataaatgtcaaagagccgaaagacgctctgcagctcgctaaggagcccgaaattcgatctcacgtggctcggtaccagtggaagaaaatcgagaatcgcccgtctctcaagcgaaaacgaaatgcggtgctatcgttctgcatggacataagctgttcagcaacctggcagtcacgaagcgattccgaggacgactctcccgagattccggacacgtcctccaccatctccatccctctgcagttagggggactgcgagacgacccttttcggtcctatccagccagtttcaagccgttcatgccggtcctcgtggatcactacctggtgcatatggccgtggacatccccgagctcgatcaaccagggaataaaggccttctgagaaccagctggttccctttggtgatgacaaatcgcgcactcttcctagtcatcatgctactcgcagcatcccattatgcgtctgtgagcgagcatgcccgcaggtatgaaataggaccttttta

SEQ ID NO: 2907 - DNA, 626 bp, Aspergillus oryzae
gccaccacttggtccttcaatccctccgtgggtgtgatttactaccagttgccacctattacagtctctccttatcctctatgactattgttatgtttcgatagagtcaaaaactggttccattttttcaactctgtccccccaccattgcgtgtctgtgtgacaaattgattcatcttccaagcataatccgactacattcacaagatgtgtggtatcattgctctgatccaggcgaacccgtcatcttctgccgccgttgacctgcacgaggcactatacctgctccaacatagaggtcaagatgctgctggaattgccacctgtgctgcaggtggtcgtatctaccagctgaagtcgaacggcatggcggccaaggttttccacgacggttctagggtggcagacctgccgggattcatgggcatcggtcacttgagatatcccacagccggaagcagtgcgaatgccgaggctcagcctttctatgtcaacagtccgtatggcatctgtctggcccataacggcaatttgatcaatgctccggagctcaagagatatctggactttgaggctcaccgtcatatcaacactgatagtgacagcgagctcatgctcaacgtctt

SEQ ID NO: 2908 - DNA, 480 bp, Aspergillus oryzae
gattgcatatgtgatccgacgagtcgaacgcaaccaacgctcgacgtcgaaaggggagtgtccctggtcaattcgccagacaggagtttaccaaaaattgacatatccgcatgatggctcgccaagctcttcggtgtttattttgattgcgccctcccatacagttgagaatgaggtctctctatgcctttcaggaagcgaattcgagggggaggtcatgacgccgcacttctctgttcacgagagactcatctctgatagcctgggaagctggatggattacatggcttggttagagtccgaatgcaagcaaaaggccgaccgactgattgtctgggatgtcgaagaccgagataagcatatgacatacttcaaggtggaagatagacaacgtcttaagcaactgcgagactatataacggatttaattgtcgtccttcagactgctgtgaacactatcggtcgcattgggaagagctg

SEQ ID NO: 2909 - DNA, 585 bp, Aspergillus oryzae
gaccgtcggggggtcttgtgaatgtctctcgcctcgctcctggtgtgcagaaggagcttgtctgtcgctactactacttctacgactgctgctgttacggtttcttcatcctctcccgccgcaccgcctccttattattatcatttttattctacgttttctactgctgaacacctttccacggagtctggtggtcctttgaccgcgtttcagtggtcgcctgttccgtcttcaagcgctgcgtggtcaatctctggtcgtacccgccgtccgctagcagatcagctcccgggtccccagctctgctcatacgccatagctcccgctcagagcatccatcgtcacgagtttgttcggtcgatcgcgtcgctcgcacctcctctcggctctcatccgcgatttaagaatttttcgatcaaagccatggatttgaacggagatgcaggcgcgaaacgcaagcgcagctccatcgtgcccgccgagcgtccagccaaacatctcaagcccgagagctctgcgttaaccccccggagattccactccggccaatgggaccgtctacgatatcgaggatgaggatgatgc

SEQ ID NO: 2910 - DNA, 650 bp, Aspergillus oryzae
tcgacccacgcgtccggtacgacagcattcgccaaccgcccaactcgcgaactcaacggaccgtcgcaatggcctctactgctacgtatgataccctttagcggataccctttcggctgcttcgttttatgagcttgtaagggttgaagttatagtcgtccttctcgctggagatgctgcgatcagaaacggtcgctgggcaccagctcgatttttcccgtgatctctgtcgtcccccatgaacttgcgcctcagtgatatgagcacgagatgatggatggatcgcacaatggtctggggtattgaggttgaaggtcatggttactttctccttgaaagaaattgttgcgagctgcgttcccatactctgactagacctggaatggcttaacagagatgggacgaacggcgtcaacactatcttcctgagcgtaatgcttggggctttgtcggatgagaattaaacgattgtggctgccaacgcggagttgcgaactcgtgctgaaaatgcatcgctagtagcaacgtcccattaccgattggcaagcccttcatgtctcactgattaaatacatgtcgtcgagtgcttctttatttcttgccttcagttgagatgccgtatagctgcagttcttacactcggcgaatat

SEQ ID NO: 2911 - DNA, 457 bp, Aspergillus oryzae
caaaccaaaccaaaaccaacacaatgtccggggctaacacccacatgaacgagcacccctccggcggcaccagaggcggcgccagcgtcgagccaacaccagccaacaacgtcggcggcggccgaggctggggcgattctggattcttcaaaggtggaactggcggagaaggaacgggtcatatctctgacaaaatcaagacatcactgtcatctgcagacgagttctcgagtttaagagaccagaagggtatggcggagagtaactttatggatcggaggaatagagaaatgggtgagcatgaggggacgtgcgcgactgaggatcatagtttcatgacgcagaagcctgggggttcggatactttgcctgggtgggagaaggcgaagggtgttttgggtaatatgtttggttgaatgtgctatgatgcggtgtgatgcagaaaattgtatgaggg

SEQ ID NO: 2912 - DNA, 372 bp, Aspergillus oryzae
ccagaacatttggctgccctagtctgtgcactgaaaccacgctcattcactcttcacagttcagtcttctccaagacaagcttctctcgcttacaaacttctccgagtctaccctcgttcaaaaccaaagccaccatcacaatgcagttctccgtcgccgctgttcttgctctggctactgccgttgccgctcttcctcctgcctctggcactggcgctggccagcaagtcggacactccaagaacgacttccctctccctaaggagttgaccaccaagcaggccgccgacaagtgtggtgaccaggctcagctcacctgctgcaacaagaccgtcaagaccggtgacttcacccaggttgaggagggtctc

SEQ ID NO: 2913 - DNA, 514 bp, Aspergillus oryzae
gtgatgattgttgacacacctgagccgtataaaccctcccttcgccatacagagaagagggtttcgctgcgttcgactagctctcctatcacgaagtcagagcgtggatccctggtctcgaatccagaatcgcagcaccgcttggttcacaaagctgcccgtatttctgaacatgatcgtagaagcatcgcgtcggagatgtccatctctgagagctcaacccagggcggccctcggcagcatgtggaggttgttccggtcgtggtgatcccagagcgtcattcttctttgagatcctcggcctcaaccagcagaaagccatccaacgccagctctcggccatcgagccgccgaacacggacgagatcagggagcagacccgagtcacttgaccgcccgccccaaaagaagcgtaccctgtcgaattccagtgcgcccgcccatcaggacacagacttccgtggtcgcagccttggtcggcccattatccctccacgcagctcgtcgttatccg

SEQ ID NO: 2914 - DNA, 378 bp, Aspergillus oryzae
actgaccacaacctcgtcgttctggaatgtttctgattttcttcagggacaaatcgaaaacttttccattgagtctcgagtcgatgcctccgtaagtgaagaggcactcgtggaactggctaacggcgatgactcctccatctctaggaatgcgctgtggctgttacttctgttgagaatcgtagatctcgcaactgataatcgggctgagattcgaaactgtgcagttcacactcttttgaggattttcgatgcttatggccaacagctatctcctaaagcatggcgtctatgtctcaatcgcgtgttatttcggatgacggaagcgattgaactgggattggaagaagtacggggccaaggcactaagaaagattc

SEQ ID NO: 2915 - DNA, 587 bp, Aspergillus oryzae
aattctcattatcacaaccacccaacatgtcgaacggaaagactttcacgctgagcaatggcgttaagatccccggtgtcggtttcggtaccttcgccagtgagggctccaagggcgagacctaccaggctgtcaccaaggccctcgagaccggataccgtcacttggactgtgcctggttctacctcaacgaggatgaggttggtgatggtatccatgacttcctcaagaagaacccctccgtcaagcgggaagacatcttcgtctgcactaaagtctggaatcacctccaccgtcccgaggacgtccagtggtccgttgataactccctgaagagactccgactggactacgttgacctcttccttgtccactggcccattgcctccgagaaggaggaccaggagaaacccaagattggccctgacggcaagtacgtcatcctcaaggagctcactgagaaccccgagcccacatggcgcgccatggagaagatctacagggacggcaaggccaaggccatcggtgtttccaactggaccatcccgggtctcgagaagctgttcaagttcgccgagatcaagcct

SEQ ID NO: 2916 - DNA, 553 bp, Aspergillus oryzae
atttatttggtatacctgtcctgtttcgttaattctcggtttcttaatggcttagatacaacacaattttctggggctatattcaccttgttctgagtagttccgacaatgttcttgccaaaagccgcgatctcgtcggcatcctccttgcgaaatcctcgaagacgccaacgtacaagctctgatgaacccgtcaaccccccaaaagccaaaaggcaacggtccagtttgcgccatgttagttcagacatcccttcagaggacccaagcgagctgcacgaacatggaggttcaacaactactgcttcccaagactttgtgccccaaaccgcagacaatgctattttccaggagagcatgccaatcagaggttcaaagaagtcagagaggcgaggcgaggctgatgggaccattgtcctctccaaaactgacttttacaatgttgtgcaattaccggccttgccagatcagattcgcggactacaatcagattcttataaatgcttctttggtgcaggcaattgctacgccctagccatgacgaactcccatg

SEQ ID NO: 2917 - DNA, 432 bp, Aspergillus oryzae
ggagtcaaccacgtctctctggcgactggtacaacgccaagaatagtcggatttgaatccagaggttggctgggccgtatgcttttttttttttttttttacaattgctgaaaaatccgtcgaatgttcccatctttaggcggaaggcctggcgaggagggtgggtggagacgataacctacctgtgctcttcttggctacgagtgttgcttggtcttggcgggtgcatgtctgtgccaccgcgttcctcggtacaagtcgatagactcgatacaaaagatggatcggaaatagaaagagaagacgatcgaactggaccatctggaagtgggggtggagggaggcggagcttggggtacggagtatggcgcttcgactatgagcctttgaggggggttcaacgtccggcagagctctactccgcaagcgaac

SEQ ID NO: 2918 - DNA, 548 bp, Aspergillus oryzae
gttcgccgcagccgttactggtggagagaccctggagaagatgtcgacgcaaaatcagaatgaacccttctatcttcgctactactcaggtcactctgggcggttcggacatgaattcttagaatttgatttccgctcccttggtgatggtcgcagtgccgccgtgcggtacgcgaacaactccaactaccgcaatgactcccttattcgcaaagaaatgtgcgtgagctcgtcgatgattcaggagatcaaacggattatcaaggagagcgaaatcatgaaggaagacgattccaagtggccccagaagaacaaggacggacgacaggaactcgaaatcagacttgggaatgaacatatctcctttgaaaccgcgaaaatcggctcgctggtggatgttaccgagtctgcggacccagaaggtctccgcgtgttctactaccttgtccaggatcttaaagctttcattttctctctgatttctcttcatttcaagatcaagcctatctaagactgttacttcacaatggtacgaggctgttcaatta

SEQ ID NO: 2919 - DNA, 563 bp, Aspergillus oryzae
gaatccggaagacaccgagtactttgatgcccgtggagctacgctccaagccttctccgaggagctagaggatggggactcccctcggcctgtaaccaccggaccatatccagatcgcccgcacgatgcccttttcaaggttcgctcacaggtcaatgcatcgaagcgacccttgatgccgctgcatatcccgcctcacgtccgcgagtcacgtagtagacgactgagtgagccttctttggaagatgactttggcagcttttcttttaagaacctcccgatgcttgagaaggcaaacaaagatgtgatacagaaactgcgccaagaggcgatgcaagcacagcagcgcccgttcgcggcttcgggtccccagcaacagcctccaggaaaggaccaggggcaggcgcaaggacaggggcagaatcaggcacagaccccggccccatcttcgtctggtccctccctggaaggaagtccgttaccaatgtcgttgcagcgaaccatgtcacaaaataaaggaaacaatcgaccctcctctccgtcaagccaagcaaactcctccc

SEQ ID NO: 2920 - DNA, 646 bp, Aspergillus oryzae
gataagacccttaccgctcgtaccttgcacggtgtgatgcagaacattcgcgacattgtgaacctcaagaagtccgagttctggaacaaaggtggacccgcctggcagaaaattgttgtcgctctggtctttgacggtatcgatccttgtgataaggacactttggatgtcctcgccaccatcggtatctatcaggacggtgtcatgaagcgtgacgtcgacggcaaggagaccgtggctcatattttcgaatacacgacccaattgtccgtgacaccgaaccagcaactcatccggcccactgatgatggcccgaccaccttgcccccggtgcagatgatgttctgcttaaagcagaagaacagcaagaagatcaactcacacagatggctgttcaatgccttcggtcgtattttgaatccagaggtttgcatccttctggatgccggtactaagcctggccagaagtccctcctggcgttgtgggagggcttctataacgacaaggatctgggaggtgcttgtggtgaaattcacgcaatgttgggtaaaggctggaagaatctgatcaaccccctcgtcgcggcccagaacttcgagtacaagatcagtaatatcctcgataaacccttggagagttctttcg

SEQ ID NO: 2921 - DNA, 249 bp, Aspergillus oryzae
gatatgcgcaagctgtatgaaactgcagggcttggagtagggtttgactatcaagtcattgaagagccgctggtgttcgagagagatggaaaggcaatctccaagactatcttcatcgcccggggccagcgccagtaaactctaatctttggggggatatgcaatctgactatgcatggtaacgagacacgactactgtatgttagactctgagctatacatataataatagacttgtgcatttgatcg

SEQ ID NO: 2922 - DNA, 404 bp, Aspergillus oryzae
ttcaaaccgttcacccatctcgcacgtcagagtttcaccaaagccttcactcatggctatgctcagtcggtagttgcggcgtcgcagtcttcctacgcgtcctccgccacattcaatcaactcgccaatcaaccggccaaggtctcccggagtgcattgcaaaatgtattccaaccctcaagttcttccggcgctggcgccaaagccagccagggcggctcgggctcgggagacttaggcctcgcggcgtattatgccgcgtggcaacacgctcagcagactggcgatgatagtgattggaaacagtttcaggtgaagcggaaactggggtggaaaccgtcgacgccggaagaagcagcaaagtccaaagaagatagcgtgaactcgacgaatccccataattt

SEQ ID NO: 2923 - DNA, 591 bp, Aspergillus oryzae
aacagctttaagtacctcactagactgggccctgccaacctcccgctcagttcgagcttaggcttcccccgccacctttctattccccgcacgtacctcctctgtgaccggagggacgataaagacctgtgcgaggaaggtacctaggtagctgggcgagcttcccaaaattgccttggacggcaccctcttcctcaccctccatctttctttatcctccttcctgtgttcaacctctaccgttcttcatcttcactcaagctttgttgtctctcgtttcctttcaattgcctatatctttaccttaccaggatagcgctcgcagggaatcacaatggccagtgaggagactggcgccgaacctcccaagcgggatgttcgcaaccatatgcttttcgaagttgcgaccgaggtggctaatagggtgggtggaatttactccgtcctcaagtctaaagctcccgtgacgaccgccgaatatggcgagcgatacactctgattggacccttgaaccgtgcttcagcagcggtggaggtggaagaattgactccatctaatcctcgaatgatcgagacgatcaagtcgatgca

SEQ ID NO: 2924 - DNA, 589 bp, Aspergillus oryzae
gagatagcgtccccagtcttcgggcttcgagacatctggtcgatgaagacgacggggagggtgtcacgccagccaacaagctgaacaaggcctctatcctttccaaggcaactgagtatattcgacatctggaaatccgtaataagcgacttgaagatgaaaacactgctcttaagaatagactacggcaattggataaggccgtcgatcagaatgtaacatctgcggcctcagtttcttcaccgagcaattacaccgagtctggagccagctcctcacctagcgtcttctcaaacgccgaggatgttcccagtgatccctctccgacctctcttcaccccccagagggtatgatcaaggtgcccgatgccttcaagcgcatgcgggctgcggctccgagagacgagtcttggtcacagtcttacatccaatacccaagcagcggtaatgcatcccctcagccgggtagccgcaaacgctctcactatcctaataaatacatgctgggcgcgcttgctggtcttatggttttcgagggaatgagttcagaaaagaagacagagtcgacagcaaaaggactcttggctat

SEQ ID NO: 2925 - DNA, 503 bp, Aspergillus oryzae
cttccatcacctccagccttaaaagtactgaccggattgtgttgtgcagatttcttaaattcgataccaaccgctctttcgactgagcggtcgctttaaaagcctctctctctcactctcttatttttttttttttctaaaaaaaaaaaatcacattaccaacaaaatggctcttaagagaattaacaaggaactctctgacctcggccggtaagatatctatatctctttctgtctccatgatttcccctcgttctccattgtgccgctgagcgagacaccccactattcccgcggggggttgatgaagcacttcctaaactataccctcctttgatggatcactgtaccccgaaatgctaacgctcccattcttctgtagtgatcctccctcctcctgctccgctggacctgtaggtgaagacttggtatgattctccggaaacccctggtcctacatatcaattcgttccgttgacggcggtgtcgcggggccaacgctg

SEQ ID NO: 2926 - DNA, 593 bp, Aspergillus oryzae
gcattttgaatttattgtttatttatttatttatttatttttttactttgctgtttagttgcattggtctattgatgtttatctccatcaatcaaggccaacaagaaagaaaaaccacgcatgcggtcatagtcccggcttatcatccaaatcgatatactaaacgaaactactattttgggacccctctttctcacatcccacggtctcacatccttgacgtagtctccgacacttggcgccctatcacagcctctgggagattccgccctcaatgcctgttccaaagcttgacctacaacaaagtagtcgcctgagatctatctcaacgtcgagcaactctcccgttcccacccccgcgttgacgccgacacatcaacgcactttttcacactctaactccaaaaatcggaatgcccgtcatacccggaccacttcttggacatccggtcacgacggaggtgaaccctctccgctagatttccctgcccagcagcgtcgtcgtcgcgagtccaatatctccctcgccgacctttccgagggctcatcggaccgatacggcgacgactccgacgataggatggctctgagaa

SEQ ID NO: 2927 - DNA, 617 bp, Aspergillus oryzae
cggacgcgtgggcggacgcgtgggcggacgcgtgggcgggggcagtcgttcccgtacaagcaagacgaaacgtcgccgacaacaggcgtcagctagcgcaccttcccatgccgaggtccgcttctcgacaagaaatgctgctagggtctccacatacaatgaggacgatgatgactcaatgttcgaggatgacccagatgaattaatgcagaattactgggtgaatgcagtggaagatgatcgtcctgccgtggatattgttctcaaccaccgtctgaaagcaggtgtagactctagtaataccgacctcgatcgtcatgacttcgagttctacataaaatggcaaggcaaatcccactaccacgcaacatgggaaactgccgagtctcttgcaaactgccgcagcacgcgccgccttgacaattacatccgaaaggtcctgtatgaagacattcgtttgaggcaagacgaggatgtagcccctgaggatcgagaaaagtggaaccttgaccgcgaaagagacgtagatgctatcgaggattacaaacaggttgagcgagtcattgctacgcgggaaggcgacgaggggaccgaatacctcgtgaaatggaaacgcc

SEQ ID NO: 2928 - DNA, 548 bp, Aspergillus oryzae
cttcggactcctggaaagccattcggaagtacctattagtagtatccctgccgtcgtccgacttctcctcttctcctctcgctcattcattcctttcattccttcatcttccttcttctcgacttcatctgccgtagtcgtttctcttgttgatccatctccatcccctttgtatcacctccttaaaacaccttcacaatggcctcagctgcgagaaccgcttcccgggccttcctccgctcgactccttccgtcagacctgcggtccgcagcactcgtttcgctcttcccacccaggccttccgtgcttcggctcgtcgcggttacgcttccgaggctggtgaggccaagtccagcaacactttcctctgggctggtctcgctgttgccggtggtgctggtgcatacttctacctgcagggcggcgattccgtcagctccaagaacttcgtccccaccaaggaggactaccagaaggtgtacgacgagattgctcgtcgcctcgccgatgagactgactatgatgacggcagctatggaccggtcct

SEQ ID NO: 2929 - DNA, 492 bp, Aspergillus oryzae
cttcttacacggatggtcgtcgacgcaccaccaccaatgggctggaaggtccttgcgaagaggggttctacagcttgtcacccgacgtgatggtagtcggagttgtccattgtaactgcagtacttaacctttctttccagctttatctgctacacaggccgtcatggagccgcttgcagaaacgccatgggatgtaacaatctctggcaccggacttgcccagtccctcttggcactggccctatcgcggtcgggcaagaaggtactccatgttgatcagaactcatattatggaggttctgaggcagcattcagcctccaagaagcccaggagtgggcttctaaggtgaatggggatcctgagcattacccatttgaggatgcgacggtatatcttcctgaaggaactccccaattgccaacacggtcctatacggtcaccttgtctccacacctgatttattccaagtcgcgactgctacctacgcttg

SEQ ID NO: 2930 - DNA, 370 bp, Aspergillus oryzae
cacaattcacaatgagcgacggaacaaacggtgccccggagcgtttcgctatcggtatctcttttggcaacacctccagttccattgcccgcatcaaccctgagggcaagccggaggttatcgccaacgaagaaggagatcgtcaaacccttccgtcctttcatacattgatggtgaggagtaccacggtactcaagccaaggcccagttggtccgcaactcccagaacactgtcgcatacttcagagattaccttggcaaggacttcaagtcgatagacgccacaccatgccataactcggcgcatcctcagcctcacgagtctaccgttgctttctccattgtggactctaccaacgagacccccagc

SEQ ID NO: 2931 - DNA, 550 bp, Aspergillus oryzae
ctccgcgcaactactacgtagtagtgctctatatactttggtcgcaattcccgggtaaccacctaaactcgttcgcgaaagctccttccaactcttattgaccacagcccctcggggcatcaacgtgggttgctcctgccatcgccgccatcgtcacgactccgccagggacagcagctacgaacaatggcacctccccgccgcaatctacttcccaaagagcgattcgcattctcatttgggagcctcaagactcagagctatcatgaccctattgcgcgaacgcccggatctcatacaatccgaacgatagcatggaaccctaccggccagcttatcgctacaggctcagcggaccgtacccttcgaatctggaaccctgagcgcgcgcaagtcaaatactcgactgacctccgcggtcacaccgcggggatcgagaaagtcttatttaacccagttcgagactcggagctagccagctgttcttctgatggtaccgtgcgcttctgggatgttcgctcgaagacttgtgtgagccgtctagatgtcg

SEQ ID NO: 2932 - DNA, 650 bp, Aspergillus oryzae
gacccacgcgtccgacggccgtgacctgatggcttgtgcccagactggttctggaaagactggtggtttcctgttcccgatcttgtctcaggcattccagaacggtccttccccaactcctgccccggcatccggccagttcagctacggccgtcagcgcaaggcctacccgacatcccttatcttggccccgactcgtgaactagtctctcagatcttcgatgaagcccgcaagttcgcttaccgctcctgggttcgtccctgcgtcgtctacggtggtgccgatattggatctcagctccgtcagattgaacgtggttgtgaccttctggttgccactcctggtcgtctcgtggatcttatcgagcgtggccgcatttctcttgtcaacatcaagtacttgatcttggacgaagctgaccgcatgttggacatgggtttcgagcctcagatccgccgcattgtggagggtgaagatatgcctcatgttaatgaccgtcaaactctgatgttctccgccaccttccctcgcgacattcagatgctggctcgcgacttcctgaaagattatgttttcctttctgttggtcgtgtcggctcaacctctgagaacatcacccagaaagttgaatacgtcgaagatcacgacc

SEQ ID NO: 2933 - DNA, 570 bp, Aspergillus oryzae
atcgaggtcggctccatcagctttaacttctctgccgaccagaatcaagcccttgttttcctagcccagctcgagtatagtcttcaagagcgggaggccatgtctgtcagcatgaacgagatttacacttcactggtgactgaatatgtctatttcgaaaagctcagaactgcgatgaagtcgaagaccagcagcttccagagcacgttgtccattgtctgccgcctacatagtgtactgctctccagaggccgtcaatccactgccaccggactcatcgagaaattcacccactacttcatatctgcggagcgcgataatgtcgatgtcaacttttcccaggggagggtcttcgtcaccacgcttctagagtacttcaaatcccactcatcgcgcgattacatcagctctatcgccatcgccagctacaaccgagtaactcaactcctggcctccaagaactaccatactgcatttgacttggcgtcggtctcattcaaatacttccgggcgcattacggcttctcctcgttgactgccgtcaagctggcattcaaattaggtctagca

SEQ ID NO: 2934 - DNA, 570 bp, Aspergillus oryzae
gacaaagtcattaaaaagacagaatcatgaaaatgagctttaagcacccgaaggaccctttgccgtatcatcatcttcgtcgcccttcccgtccgccttgtcttttcgacgctgcacgacgtcccagttatacacacgagcggtagcaacctccatcgtctgcgaccagttagcaccgaaccacacatatataactctaaggcaccggaacagcggatatatagagagtgggaaatgaacgggaaagaggaaatgcataccgtaatctgctccctcaaaaactccaaatcctcatcacaattcgccagactcaactccgccgtagacaacttctccgtcaacatagtctccgcctccccaatcggataagccaacataacattcgccccgagccaaagatacacctcctccgtgtccgcagggtcgaccgtcgcacgcgcatagagcgtatcgttcaattcgaagttcgtctccagcgggtcggcgttattatcgcggcgcatcttaagaaacttgaccatttccagcgtcttcttgatatccggaatcttttcacggaggccagccgcc

SEQ ID NO: 2935 - DNA, 540 bp, Aspergillus oryzae
cggacgcgtgggtggatattgagatggcaattgaagagcactaccatgagatgctggaggttttagatgctgtgatcaagaatatcctgaaaggcatttatggccgcttccgtcgtgagatcgagaccgtgaagcagcaattcccgtccgacgacgtcgtttggctcgaagaaacgccaatcatccggttctccgacggtatcaagatgctcaacgactccgggtggcgtgatgaggagggaaatcccttgccggtagatgatgacctacatactcgcgatgagattcgccttggcgagctcgtcaaggagaagtacggcacggactactacattctcgacaagtttcccaccagtgcacgtcccttttacacgatgcccgatcctgatgacaaccgcttcactaactcctttgacatcttcattcggggccaagagatcgtctcaggcggtcagcgtatccatgatccccaaatgcttgaggaaaatatgcgccgtgtgggcatcaatcctgatactatggaggaatatatggaaggtt

SEQ ID NO: 2936 - DNA, 562 bp, Aspergillus oryzae
catcgctcttgccctggataattctgcataattgggccctctttcgtgaccatgaggcgtccccatccccggcttcttgcccttcgtccatggatctgcacacagtgcagcagagcccgttactcctcggctgcgtcaagcaaaactatgcgcgccggcaacaaaaagacgaatttgcctgatttccccgcgagaacccgattcgcaccgtcgccaaccggatatcttcatctaggctccctgcggacagcattgtttaactatcttttggctaagcggacaggaggacagtttctgctacgaattgaggataccgatcagaaacgcactattcccgatgctgaacagaggctttatgaggatcttcaatgggctggacttcagtgggacgaaggtcctaatgttggcggttcctacggtccgtatagacagtctgaaagaacagccatctatcgcacacacgcccgtgatctaatcaacaatggacacgcataccgatgcttttgctctgcggaccgactcgatgcgttcgcaagacatcgcagtcaagccggactacccc

SEQ ID NO: 2937 - DNA, 667 bp, Aspergillus oryzae
tcgacccacgcgtccggcacaaagtgcgcttttcaagtccgtcaagctgcttgtggatcgtaagatcccctacgcagctatttttggcaatcatgacgacgagggcaatctcaaccggtcggagcttatggccatattagagcaactgccgtattcagtgtcgtcggcttggccccgaggatatagacggtgttggtaactacatcgtcgaggttcttggccgtggtaatagtgcacactcagctttgaccctttatcttcttgattcgcattcgtattcgccggatgaacgacaattccgaggttatgactggatcaagcccagccagatccgctggttccagaacactgcccaaggccttaagaggaaacaccatgagtatacgtacatgcacatgaacatggcattcattcatattccactgcctgaataccgtgatccaaataacctgttcattgggaattgggacgaacccccaaccgctccaggatttaattcaggcttcaaggatgcactcgaagaggagggtatcctttttgttagctgtggacatgaccacgtcaatgactactgcatgcttaacaataacaaagacgagaagccgtcgctctggatgtgctatggaggaggtgttggattcggaggctatggaggcttttaaaggat

SEQ ID NO: 2938 - DNA, 613 bp, Aspergillus oryzae
tcgacccacgcgtccgcttgccttgatattccttctctatacctcaacattgtttcaattgcattccatttttttctcttgttttaaatctctcaaaacaactcataaacaatgtcttacaacaaccgcgacaatgacttcggctccagccagtctggcggttatggtggaaatgatagctatggctctcgccagggcaatgactcttacggatcctccggtgtaggaagtgactcgtacggttccaagaacgacaattacggatcctcaagccgctcaggaaactctggcctcggcggttctgattcctacaactcatccagccgttccggaggaaacgactcctatggctcctccggtaacaacaacagctcctatggctcgtccgaccgggacaactacggttcttccaacgattcttacggttccagtaaccgcaaggacaacgactcctacggctcgagccacaataccagcagctccaagcagcacggcaacgattcctacggttcgaagaaggacagctatggttcttccaccgattcctatggatcgggctcgaagaatgatagctacggctctagccgtgataatgacatgactcctatggctc

SEQ ID NO: 2939 - DNA, 409 bp, Aspergillus oryzae
tacacattatacaggacaattgacatctgctagaactctaactcttccacttccatcccacaatccacacacttcttgactccgattccagtctctggattttcaatggaccgaccccattggtgcacatgtctcccaccattgcccaggtcatcaccgaagttcccccccgctgctccctgacggctacggcggtatgcatcgactcgggtgcgcttcttcagatcttgtagctttgacttgaatttggcctctcggcgtcgcttcttctcattctcgcgtcgctcaaactcggcatctagtgcttcagcagagccccacttcttcgccgaaaaggcatattcctcaacctgatagcgaaggtaaagcatcatgttgttccacgtcgacttatgagggttgggttttt

SEQ ID NO: 2940 - DNA, 562 bp, Aspergillus oryzae
gaaactgacctccattgcattgctcttactttgttgctggggccgacacagcttacccaacatggctcaagaccctcgtgttctgctccagaaagcagacaaagccctgcagggcgccagcagtggtttcagcttctttggtggacggtcagagaaatacgaaaacgcagcagacttgtacacgcaagctggaaatgcattccgggttcagaagcagaacaaggaggccggtttagcattcgaaaaagccgcctctatccaaacacagaacctgaacgaacctgatgacgctgccaattcattacaggaggctttcaaggtctaccgcaagtcggaccctgaagatgccgcccgtgtgctctcaagcgctatccaacactatgtactaaaaggcaacttccgtcgtgctgccactcagcagcagtatttggcagaggtgtatgaggtggaactgggtgatcagaagaaggcgctggaagcctacgagaaagctgctgagtggttcgacagtgataacgctgaagcccttgcaaacaagcactatctcaaagctgctgattta

SEQ ID NO: 2941 - DNA, 263 bp, Aspergillus oryzae
atatgcttcccagactgcgatcaggaaaaatggacttataaccggacaatggaacgggtactcttcaaagaaccctataggctgtcttccatctcgttaagccatactggatacttactagcgacaatggatagccggtcccaacggcggactcaattcctcgcacccacgaatgcttccccgatcccgaacgagggtggccgattaaccggttggtcctccaagctttttccacccagttcgcctccgcatggcattaatcg

SEQ ID NO: 2942 - DNA, 472 bp, Aspergillus oryzae
ctttgtcccacattctcttatatagtcaagatatatacgcctgttccggctgcagacctaagtgatcgcatctcttttacccccttatatctggtccttgcgcataccgtcccaaattcttgaatactatccttccacgatgggtttgtgcgggcgtcagacggttgtccgccgaaagatggtgctgctaggcgacggtgcttgcggcaagacttcggccttgaacgtgttcacaagagggtttttcccaacagtatagtaagatacacactcttttcatatggttatacactttgcgatattgacttcgcgactcccactcagtgagccgactgtttttgaaaactatgtccacggtaatcgctttcaccccttccatgtccaattcgtatattcatacgtctctagatatctttgtcgacaatgtacacatggaattatcgctctgggataccgctggccaggaggaatt

SEQ ID NO: 2943 - DNA, 438 bp, Aspergillus oryzae
aggcactcgtggaacacagaaccaaggagcaggtccaagcgatgactgccattcagcgacaatcattcatgcaattcccacccctcgttggcgattcaaaccttctcttcatgacacacaccaaccaacacaaagccaggtacttcgagactgacttctcagctgctgttgttgcgaccggtgtgcctctcaccgagagacctcatgctctgggtagaccgtcttatattaacgacattgaacattgtcgcttgtacccgactcgcaatgtttgtagggtgatcggcaaggatgctgctggtgactggtggcttttgtttaagactcgctctgaggcatggccttcgattcacaggcagttggcgactttgctcggcatcgaccaagcggaggcaagggacgtccctaatgcagtggaccaggtagccattacccaca

SEQ ID NO: 2944 - DNA, 458 bp, Aspergillus oryzae
ctcttctcctcctcattacctctatctgcaagaccagccaatccaatcaacacttgaaacctagtatccccatacactttacaaaatgagattccttaccagtatcctcgcactcacagccattgccggtgtatctgccgtgccgacatccaacagcgccaccacaaacacagtcatcagtggcgagttcacctacaatggtgaaggagtcgacttctcagttcagtgcagtggtggccttacgccaccccatgcagattgtgtacctgggaaatgtcagtgcaatggaaattatggttgctggtcatgcaacggtggacgcatgcagtgccagcctggaccgggctctggaacttgctggacctgatttggggattgtggctagctagatatgtatgtatctatggctgttatgtgcctttctggatgtggtggaaggagggttgtggggaatgttg

SEQ ID NO: 2945 - DNA, 484 bp, Aspergillus oryzae
cgattccccagcgttctggtagccgtgccagtttcagcaccgctggttcgcattcttcgaaccccagtcagcgaaattcgacattcatcaatggtctacgctggggtaatccagatgcgctgttgtacgacaatcgggagtaccgaacgaaaacggcggtcacagcattgtataagggcactacgcgcaacggatccgctgtactcttacgatcttacgactcccgaaaagagccccctccagagtttaactgtacgatctggcaagctggtcgggcaacgtcagccactgggcttgcatttaaaccaattcagattggacaacacgtctttatcgacgagggcgctggtacctataatcctgcgccgcaggtcctggatgaagcgactgttaacgagtggcccggtcgcgaagttggagtgtctataagcgttggtacgggtaaacgtccacctggtacgaataatcgacagcatgaatggtg

SEQ ID NO: 2946 - DNA, 273 bp, Aspergillus oryzae
  modified_base (125)..(125): n is a, c, g, or t
  modified_base (143)..(144): n is a, c, g, or t
  modified_base (150)..(150): n is a, c, g, or t
  modified_base (207)..(207): n is a, c, g, or t
  modified_base (233)..(233): n is a, c, g, or t
cagctgtaaggaacttgggttgcatgattatcattttccattaaatttgcatctctttctgtttccctgaattggcagagtccggcgttcattgttggtttgggtgggtctctccgtgtctgatnggcacgctatctacgagnnacgccntttgaagctgttagcacactatatatatatctatagcaaacggcagtctaatgccgncccaaggcgcatcgattctgcatgangggtatcgaacaaaatccaactgtttatcttcaaaaaaaa

SEQ ID NO: 2947 - DNA, 526 bp, Aspergillus oryzae
cgacccacgcgtccggaccctgctcccatccccacccctcacccctcggagggaagctaccactggacctttgaaagagccatctccgccggtcttgtccctctcaccattgcccccttcgctgctggctctcttaatccggtcatggacgcagtcctctgctctttcatcgttctccactcccacattggattccaggctgccatcattgactacttccccactcgccgtgtccccaagactgccacattttgcaactggctcctgcgcgcattcactcttaccactgccgtcggtctgtatgagttcgagacgaacgacgttggtgtaacagaggccttcaagagggtgtggaaggcatagatcgttgcattgatatatccctgtttctcattactttctttttgaactttccttccgttcaggcgttttgcctatgtacatgctgtttctgttaaagtaagccagtccagctggttggccgctcttggtattgagctaaaagatatgtaactgttcgaatgga

SEQ ID NO: 2948 - DNA, 553 bp, Aspergillus oryzae
gcagccaagagctcgtcctccggtgagggaatcagtgccacggacctgctctcttcctctaccgcagacattagcaaagcgtccccggaatcgccaacacccgctacctctaggccgtttgacgccattatcgccatcggtgtccttattaagggagagaccatgcattttgagtacatcgcagatgctgtctctcacggattgatgcgtgttcaattagattcgggcgtgcctgtcatttttggggtgctcaccgttttgaccgaagaacagggcttggaaagggctgggctaggcaagaaaggaatgcataatcatggagaagattggggcagcgccgccgtggaacttggagcaagaagaagagaatgggctgaaggtagaattgcctaggtctgtttcgaaaacttccagggaattgttcgttaggatttgatgagacttgtaagttagtatttcagtaacaggccctcatggtcagaggtataggacttactatgtatgcgcaacaatatactggattgacgacttgctggaaaaaaaaaaaaaaaaa

SEQ ID NO: 2949 - DNA, 583 bp, Aspergillus oryzae
  modified_base (352)..(352): n is a, c, g, or t
cttttatctctcaggttaactcgcatagcatatccttacgaatcaagagccatggctccagtccccgcatcgctgttgcgtgctctctccatccccgatccctctaaagcaagcttgtccactgctggcttagggtcgggtttcaccggtacaggagccattcgagcaacagtgccatctgcggatggacagtatgaagaagagagacgatactttgttaaaacatccgcagacggtaaagctgctgaagagatgttccgaggggaatatgagtccttgaatgctattgcgacctccgtaccaggattttgtccccgcgctctagcttggggtcctctggaagaaagcaacngaaagagcttctacctagcgactgaattcctagacctagggggtggtggccggacaggccaatctctggctcaaagactaggaaagcttcattcgaccccggccccgctagatcctgagacggagaaacgccggttcgggttccccgtgccgaccttctgtggtgatactaagcaacccaatcgatttcacgattcatgggcagacttctacgccaatgaacggttgatac

SEQ ID NO: 2950 - DNA, 617 bp, Aspergillus oryzae
cggacgcgtgggcggacgcgtgggcggacgcgtgggcggacgcgtggggagaagaagattctcatgttcctcgcttcagctcagggccaaggcgccttctgtgatctccgtaccgcctctcatgtctcagtatctcaacttctgcacgcattcccctcttcccagccgcctttggaccatcttctttccgttctcaacactttaatgccccgtttctactctctgtctcaagaccccctcctctcgtccgcccaaaagggtggccaatcccgccgtctcgttgaagttgccgttagtgtggcagaatccaaagactggaagggcgggttgcgaaccggtgtaggatctgggtaccttgagcggctggcacggcaagttatggaggcggagcgtcagggcatcgacccttcaactctcaaccttcatgtccccatgttccggggcttgatggctaacccattggctaagcggttccattcggacggccccatgctcctaattggtgctggtgtgggtattgctcccttccgtggttttgtccagcgccgtttgcagtcagccaactgtgccaacaaggtgtgggttctgcagggtgtgcgtgattccctcctggacga

SEQ ID NO: 2951 - DNA, 659 bp, Aspergillus oryzae
tcttaatctcttcatgaatgaccttctcgctccgggactatcttcgtctgtcttgcctttgtcgttttttcttttctacattccctgagcaccagaagcctgggctgccgtatacttcgggtgacttttgtgagcccctgcgggtttcatgatcaactttgatagttaccactggggttgccgctaaatgcctggaactgcttgctgttttgggagatttatgtcagttggacttttgtgaatacttgcgtacttttgagggctcctgaatctgtagcaaagataccccattacgggacgtggaaaaaggacttcgggtttattctttctgcattaccaaacagctctgattcctgtttcttttgtctaccttggttgtctgcctgtgcttgcatatctagtcattttggtatatgttcgtcgggctacgtcggttgtggcacattcaagatgcagtcaagatctaggtggcagtctgcgttcatactaaccgggctacttgttgcagaaacggtatattcagccccaacacctacgcaggaagcgaccacttccttcaagactcagtatcccccgtctgctgcaaacgccagattactgttgcccgagacgcaaggtactacccaaccagccttgaccggaaggccatcaattggcaa

SEQ ID NO: 2952 - DNA, 640 bp, Aspergillus oryzae
acgcgtgggcggacgcgtgggcggacgcgtgggcggacgcgtgggcggacgcgtgggcagttcaggatgatctaaggtcaattatcccagctgtcatacctagacatagtgatacaccgatggagggagctaattgcagcaaatacagtcgcgattccgatatccctagtcaggccagtccacctgccgctgaagaaggctctactatcgaaaagaagaagcgaaagaaaagacattccaagcggggtagtggtactttcgatgactccgtttctgtggcatcttccccagccagagttgaagagactagtgaccgcggcagaagtacggatgaacagacaaaggaaaagagggcaggtggtatcttaagtaatatattcggctctaaagtctctgagccgctagcaagcagaaagtcatcatctgatagctatccatctcgcgaggttcaatccgaagtcggaccaccggattctggggagtctagacgtcaacggagagaggaaaagcggcgacaaaaatacggggaattagcagactcgggtaaaacaacggaacgtgagaaggtatggttctagctgttttcgttgtcgtaaactgtgatttgctcagttattcctatattcgattttaagcaagg

SEQ ID NO: 2953 - DNA, 641 bp, Aspergillus oryzae
cgccgtctcatgccaagtcgcccgggtttgctttccaaggagccatgtccccggctggagtcgaccctcagcaggctgcacaacactcacgcctgtctcactccaggaacctcagtcaaacatcgcctcccatgagcgttgcccagtccgataccactgacccgaagtctgctctgtcgggcggtgccggccccagaggaccccgtgtcgcttcggcatattacccatcgccattccaaaagcactatgatcagcttgaacaagagtatgacgctcaggccgatctaatcgatgaggagcatgagtcgtccgtgggcgcctcgccgtacgtgtctggctttaacaatgccgcatcggttcctggctctcactccatgggccaccatagtcttccacaattcaatccacattcgggggaaggatccaatggagcatataacaacacgaaccagctcttgggaaactatgagcccatgctcgatgcagatccctttggcttgagtgcgagcatgcacttccagacccccttcagctacgaacagaataatactcgtcactaaacaccactttccgctctctactctcggtccgatacttcggctaccccgtgttaattttttcccctacttcccttttatcct

SEQ ID NO: 2954 - DNA, 257 bp, Aspergillus oryzae
caaacctattccaaaaactccaatacatttacggacgatgggccggagatagagctggataggatgcaaaagatgcctgtataataacgctatatgtacactacactatcagtaacactcttcaaaatactcaatgagagagttcgctggtacgaatgatagttgcttgcacctcatagaaaaaaaaaaaaaaaaaaaaaaaaaaaaaaaaaaaaaaaaaaaaaaaaaaaaaaaaaaaaaaaaaaaaaaaaaaaaaa

SEQ ID NO: 2955 - DNA, 477 bp, Aspergillus oryzae
gtttatttattgattgggatttgattgtagtattaatatttggtttacattctacttctacatctactacttcttttcttctcatcacatcaactttgacagttgatctttttgaactaccacccccagcaagaaaaaaacacacacaaaatgtccccaaaaccaatactccaagccccaaaagcaaaccccctaacaacaaccctccaactcctcaccttcctcctaatcctttccatcgtcggtaaaagaaccacaaccctcgtcctagcctcggtcttcaccctgtggttcaagaccaggttcaacctctaccaggactatgtcgaagagcggcggtctactcggcgggaacgagagcgccagcgtcggagtcaggaggttagggttatttcggcgaggattgtggaggaggttatgaggggttcttctgctgcattgagggatggggatgggcattttgggggttttactggg

SEQ ID NO: 2956 - DNA, 645 bp, Aspergillus oryzae
cgaaccgtcgctgaaaagcagacaaggaatcacacgcgatgaccttctgctctcgattgcgaaggcgggcacttcgccgaaaactcgggaggagttggacgggaccatgccggtcaaagtttccgggaaagttgtcgaaatggagttgaaatggttgaaggatcctcgggcgctgtccgaccgagtcggaagacttctgaaggccgatgatgtgctgttggctgtggccttggtccgcacggcgcagagagagcatatggagtgtacggtggcttggaatcatctcatggagtattgtatggagaaaaataacccgaaggccgcgcttaagttctacaatgagatgaagaagcgaggacgaatgcctaattcggtcacgtatacaattatgctggatggcctgtccagagtaagcagggacaccggcgtccaccctgtcaagaccgcgctctctatttacaagtctatctttgcacccaattcaaccgtaacgccaaatctcatccacaccaatgcgatgctcaatgtctgtgcacgccaacgtgatatggacagcttatggcgggtcgctggcgagcttcctgaagacgggccaggttctccaaactgcacgacatacagtatcatcctgagagctatcttgga

SEQ ID NO: 2957 - DNA, 594 bp, Aspergillus oryzae
gttctgccgaagtagcttcttcgttctttcgccaaccattccaggctggcgtaaagcacccgttatccatggctgcgttgatgcaatcgaataacgaacctgttaccatttctaactcgttgcccgggccctccgcctccatcatttcaagctcgccggagtctgtcgccttcctgaagcatacgaaaccagactcgagtcttacctccattgctagtgccggcttaaacgtctcacgatcaagagactcgttgccacccatgacaacgactacacagccagttggttcggtggatcgactagtagaacatgagaaggatcctgagcaaaacagctcccaggtagcaagggaagctctcggtgcaaccgagaagcaacaactaaatacaatcaatgattccgtacatatgtccgatcagatgcaggtcgattcgcattcgacttcaggcaatacggcggatgcctttggaacggcagataacagcacgtcccttatgaatacctccacagttgcaagtccgggcccaatagaagattcggcttcacaggatggggatcgtccacgtcaaagggatgaaatggacttgcaggatg

SEQ ID NO: 2958 - DNA, 629 bp, Aspergillus oryzae
tcgacccacgcgtccgcttatcacggtgctgctgttcatcatgagcatcatttccttgctcgcgttcttctccctggcgctgggtatcaacggccttccccatgcccgttcctcaagcccttcgtacggcaagccggtaaaccctatcaaggacactccgattaagaacgtggtggtattggtcgaggagaacctgagttttgacgtgtttgctggtggcttgacatacaacgccaaaattgatgggttggtcaaccgcgagtactgcaacccatcaaacgcttcagatccattctcagagaaggtttgcgccaaaccgatcgcgaagaatgtggcccccgatgatccggaccacagcattaccggtggtaaccagcaggtgtatagcacctatcaccccaacgcgaagaatgacatgcctggcatgcagggcttcgtaacagagcagattgtctcttacgggctcggctccgatttgagtcgcgctgccgaggtcattaactactacacgccggaccacgtgccggttttcaatgccatggccgagaactttgtgctctttgaccgctggttcgcagcggttccggggccgaccaaccccaaccgtgcgtatctgacttcgggcacct

SEQ ID NO: 2959 - DNA, 621 bp, Aspergillus oryzae
agcatccattggcacttctcaaccccctcagataacgtcatggcggcattctctcagtaccctctatctacgggatggagcttcaaagatagtgatgaccagtcgcctgaagcgtggatgccggtgcctgtcgttccttccgtggctcatcaggatctacaagccaatcagaagctgaagaatccatacattggtttcaatgaactagatgcccgatgggtgaatgacaagtcatggacctatcgaaccgttttccagaagcccgctgtcgccgctggatcgtcgattatcttagcatttgacggcttggatacctttgccacagtgaagctcgatggcagcgtcatcctgcaaagtgacaatatgttccttgctcaccgtgtagatgtgactaaggcgcttgaggcggaaggagaccatgtgctggaaatcgatttcgactgtgccatgcgcagggcgcgagaacttcgagagaaagataccaagcataactggggcttctttcaatggcgatcccgccagaatggctgtcagaaaagcccaatatcattggggctgggactggggcccactcttgtcaactgcaggcatctggcggaggtgcggcttgaggtatattcc

SEQ ID NO: 2960 - DNA, 213 bp, Aspergillus oryzae
cttgttatcgtttaggaggaacatttggacctcacgctgttcgcttgcgatgggtgttcactcttcttggacacttcttccggccaccctacccctccatgacgttttttatacaagatcttattcttatatttgtttttctttttgtggcgctatcggcaattctgactcacttttagagccatcaaaaaaaaaaaaaaaaaaaaaaaaaaa

SEQ ID NO: 2961 - DNA, 594 bp, Aspergillus oryzae
cgtcggataccgctactacgaaaaggtcgatctggcccctctcttccccttcggccacggtctctcctacaccaccttcacccgctccgacctgaccctcaccaccactcccgagaagccccagtacgaagaaagcggcgagcccatcaccgcaaccgtcacggtgaccaacaccggcaaggtcgccggtgcagagatcgtccagctctgggtcgctcccccggcaacggaagtcaaccgtcccgtccgcgaactcaagggattcactaaggtcttcctgcagcctggtgagcagaagaaggtcgagatcgtcgtggagaagaagctggcgacgagttggttcgacgagatgcgcgagaagtgggcgtccgagaaaggcgagtatgaggttcttgtaactggtactggcgagggtgttcttaagtcgtccttcaaggtcgagaagactcgctactggttgggtctgtgagttgtgatttgtatctagatgtggatgtggataaagtcgctggacgacgttctttttgttacatacgctttatggttatgattagaagcggggatttaaattgtatgctttatgatgtcaaaaaa

SEQ ID NO: 2962 - DNA, 623 bp, Aspergillus oryzae
gcgtcagtccagcgctctcggggtcacaggttccattagccgcccccgcgctattagcacggatgagagtaaccgtcgtgcagctatggaagctcgcgcccgtgctattatggatcgtactcgggccaacagcccagctcctcctcggaagcacagacgggatcgctccagcggtccttcggaggcaggccgcttcccagtcaatgtctccagcccgaccgagaggcgaacggtcactcgtaacagcctagatgtccctagcagcaacagctcaccgaccgctcaggaacaactgtccaacgtcaacattaacgctgctactgaggctgcggccactgaggctactcccaacggcacatccagtgattcctcggcttcagctactgctaacgaaactccctcctccggcacttcgacccccccacccattgcggcgccaacagcaccagaggactctcctacccctactcctactccagccgccgatggcgagaaacgcacttccatcgctcgcgcctcaatcacccgcaagcccgggctcggtaaccgatccagcttccctgtcgtcccaagcggtgaatccgggacagatagcaagcgcaacagcctggccgacagcgaac

SEQ ID NO: 2963 - DNA, 596 bp, Aspergillus oryzae
cattagcaactctttggggatgccccaacagcgggttgtgtttcaagggcctcctatttctcctcgcagcattgacacgaaacgatctttcgacgaggcggcttcccgtcgccaggctcgggacagtctcgtgggcagtcgagtattcatgcctgaggcgttgtattcgcagacttctcttcaccagcgacggtatcgctccctctcatggtggcgattgcggcttcggtttggttccgtgcgcagcttccgtaagcgtttaagacgcagttggcaacagcgtggcgagggcaagcgacaggcccgacgtgaggcactgaagcagagcattggtgaggctgtcctcgtggactccagcatgcagacgcggagtatggtgcagtaactcttacgacatgatcgacgatgctcgagtacgaccaacacgacacgacctatatgatggatgacgatcatgcatgaacgatcaatgttttttctcttgttctttatatgttcttttctttaatatgtttatctttctgttgcaactatattgatgcttgacgagtcacgaatgatggacccacggaacacgagatccagcacgatgattg

SEQ ID NO: 2964 - DNA, 584 bp, Aspergillus oryzae
gcaccccctcccttcccagacaactcacgcaccaaaagcgcctctcatcttggggagcttaacatccactgacgacccacccgcggccaatctggataaggcagtgtgggtagtgtgtgggacgctggcccttataacgtcgactgacccttcaatcctgcgttgggagagaaggcaatcttgaaacagaaataaaagagaccagtcgggcggaaaaatccttgctcattttcgcacttccgtttgatttctctcacttcccaaatcattcgagtttccccccaacccaattatcgcacaaccagcacttttttctcgtaactgatctcgccacccgtcgaaacgccatgtcgaaaacaaaggttttgcttgtcggagcagcgggtgaaactggtggttcgattgcaaatggacttctggaaaatccaatctttgaactctacgccctcgtccgcccccggtcggtacagaagcccgccatcgtttccctccaagatcgcggcatgcaaatccgcagatgcgatctaaaaggccctgaagaatctcttacagaggcactcgagggaatcgatgtccgcatcaac

SEQ ID NO: 2965 - DNA, 627 bp, Aspergillus oryzae
gtcttcgattcattctcctctcgatgttgaaaagaaccactcattagccttgaagagcgttttatacatttccttatctgtggtacccaacttcttttcagatgataatatagttatcacccaacgatcagttgtattatttatttgttactgcctccgcctcgtgctcttcgcaagcttctttccaacacttgggtttcctggccatgtcacattgattttttagtcgacctatgtctatttatggcctgtgcgacgtcagccagacgaattccaaagggctttcctgctgtgactatatcacaatatagccagccgttgatatacctgaataacaaaccccaaacccctcttcaggagcgattcggggtacccctgctgtctccgtaaatcgttcattacaacatgagtctggatcgtcaggaatcggttcgtcacgatgaatcgaagacttcaagggacaataccttggccaagttaacccagttgccaccgagttcggcttcgatcaaggaagcgtcttcgggaaatagcagcaaatttgttggtaaactcaagggcagaatcgcggaacctgtcgtggcagctttcgttgctgggggcgtagcaggtgcggtatccagaacc

SEQ ID NO: 2966 - DNA, 624 bp, Aspergillus oryzae
agatcttatagtgtattaattcaaactccccttgtagcgggaaatccatttgttcaattaaaccaatccttaagctttcctcaacgcgaccactgttaccattgtcccccatgtcagctcccggggttggttttgaatatcctcctcaggaggtctcctggcttaagcgcgatgctttgttgtttgccaacagcatcggtgctaaggctgacgagcttcatttcctttatgaacttcatcctaacttcgccgttttcccgacgtattctttgatccttccttttaaacacactgatcaagaaaccattgatttctatgcacgtacgcaagcaactcccatccccggcgtcccgaaattcgactctcgccgtgcggtagatggccagcgcaagatcaccattctaaaacctttacctcctacgagtgcgggcaagaaatttcagttgcgtaatacggttattggagtctacgataaaggcaaagctggctcggtagtggagacggagcagtccatcgtggacgagaacggtgaggtgtacaccaagacggtgagcagcggcttcatggtaggacagggcaattggggtggacctaagggaccgagcgccgtcaactatccccctc

SEQ ID NO: 2967 - DNA, 595 bp, Aspergillus oryzae
tcttaattctcacgaagagactgacgcctgagtttcattagttgcgactcttcacagcagactgtagtgctctctgtgcgtctaatcccgttaggctctcagttcaccatgccttcacaagttgctacgtgcctgcgccttgcgcggcaattctctgcagacccgagcaagcatcaacgattccttgcgcgtgcattttccagcagcgtccgtcgctctgagatcaacaaggtcgtatcttctgcagaattagcaatcaaggacatgaagtccaactcgaccgttctggcaggtggatttggtctctctggtgtaccggacactctaatcaatgctgtgcgagcgaacccttcgatcaccggattgacggtggtcagcaataacgccggtgtggacggagctggtcttggccttcttctcgaatccaagcagatctcgaagatgattgccagctatgtgggcgagaacaagacctttgagcgcatgtacctaacgggcgagattgaattggagttgacaccacagggtaccttggctgagcgttgtcggtcgggcggtcacggaatcccggctttctacacacctgccgttttgg

SEQ ID NO: 2968 - DNA, 620 bp, Aspergillus oryzae
aagaagaagacaaccgagccgtcggagccgagtgcgttggtcgactagcactaattgatcctgtagcttacataccgcatttccaggaatgcctgtctaactcggacccgacaattcgtggggtggtgatctctgcattccgttataccctgtcagactcaagagatacctacaacgatgtattgagaccgttgatcgtcccacttttggtcaatatgctcagtgatcgtgacttggaaaatcaccgacttgccttaacaaccctcaactctgctattcataacaagatggatattatcctccctcaccttaacgaacttctacctgccgtgtttggtgacacacagatcaaaccagaactgatccgtgaagtgcaaatgggtccattcaagcatagagttgacgacggtcttgagttgcgaaagagtgcctacgaaacactttatgcctccttagacacaactttctctttgtcgcatatctctgaattcttcgaacgcatattagccggaattgatgatgagcaagatattcgcacaatctgcaaccttatgacttccaaactaattcaacctagccccagaggagacgcagaggtctctggatgcgctctaagagcg

SEQ ID NO: 2969 - DNA, 29 bp, Aspergillus oryzae
tctagatcgcgaggtcacaaaaaaaaaaa

SEQ ID NO: 2970 - DNA, 579 bp, Aspergillus oryzae
tcgacccacgcgtccggtctaattatccttttttcttttgcttcaatcagaaaaaagactaaccctcttcgttcctttttttttttttttcttcttttcctgtttaatcaatacatcgcttttaattacaatctgcctctctctctgtgcatcgcccccatacctaacccccctccgcctcccttccttactactctttggagggctttgttcgttcctttaaattaccattgttcctttgctgagtcgctcgtggccggaaacgactttttctttcaccttcagggagtctaacagaaccgggagagaagaaaaaggataagggttcctccataactttcgattgcgctttctcaaccttaacgatcacctttagctgccattgtcgtccaagagcacaatcctcttgtggaaggctcatggttgcgacgtaattgctgttagggttctcttttccgcacgctgtaccagcttgtttgccgggtttgggaaagagcaagctttgtttttgtctcaatccctttacgagctctcgacctccttactagctgttcgacgcgaatttacgactgtgggtat

SEQ ID NO: 2971 - DNA, 708 bp, Aspergillus oryzae
agctccggggcaatcaattgctgtcgcatgctttcatttcctcatgtctttcagtagacatgcttacaggcatgctgtccctccttcttcgcactctttagttgatcatgtatggatcagcgaagatttcctcgcgtcaacgttccgacggttcgcaaacggtcaacgacgctatgagagccgagtgccgggacctttagaggcaagaagacggttagcaaaaaggaggaacactgcactggctagtctagcagggtcaggcccactggatgacattgggtgtttgtttgggcgcaatgggcgggagcacatgaaatgggttggtgggcaatcacggaacgcaccgcgggaggctcaagggtctgctacttacgcaattggctcgtccgcttatcctttccccttctacaatgagaccaccgaatcgaatgaattcgccagatcatctgggtggccgggatcctcatatatagccaacaaggcgtctctcgaacaatgcttggcggaatccctgaaggactgtcagacaattacggctatcaaggatgttgtccgtaaattgcgaatcgatcttcagcaggagcctgcctatagccggtcaatattcgagcatctagtgtcgcaatcgattgaccacaagtgcgccgccgacgagctgttaggttctaaaagatccgatctgacactcgggagcaggaattatctttg

SEQ ID NO: 2972 - DNA, 679 bp, Aspergillus oryzae
ctccttttcccctctctcatattttgtcccctccggtgctgactgaatatcgctgatttgattcactttccttttgttgttttccctcccctctcgatgagtgcccgctttatcctccttcgacgaccgtccgattggtcatagctctcagtcaacaacaaaaaagagccctcgcaccgaactctgaaactctcctggaattctcgtggattttcccctccagtcagacacaggtagtcttctggttgttatttctcacaagagctcaactatgcgaccgccacgtctgatctttcttgttttctgtttcatcttctttccgatcctcctcactctcttttctgttcttacatcatcgtctcgtgtgaccacccccagttcgttcgctggtcgagcgacgggacttcatgcgctcttttccttcaacataccctcgtcactgttcccaccgtctgctatcatcagcctgaccgatgataactcgacattcttcctggcccggcccgagcgtttggcccgctccttcctgacaaggggctcagcggtcagctatggatcggcagcggattggagatagaaccactgccggagcggaaggcgaattagggtgttcagatattccagggtggggtgagggcgacggccacaggcaggatatacccgcggcggcggatgcctg

SEQ ID NO: 2973 - DNA, 410 bp, Aspergillus oryzae
cggacgcgtgggcgctcgctgactatcagctctaagggaatccgtacgtgcgacgtctgctgttgttgagcagcagtagtcaactcagaccagtgaagacgcacgtattacacatgcagtcaccctacatatatagggacgtccgattcattccggacgaccatcgtttggtcgaaattatacaagctccagagagcagctgtatcgtgctgacggccttcaggtttccgcatcgcttcaagtacaagttatcatttgtacggcgcgagggcacacacactgtagttaaactatcgcaaggactttgtgacatgtacacatagctccacctacaccaaaatatcctaataatatgtacatacatcattgcaaaacctaacgcaccatagacaaaaaaaaaaaaaaaaaaa

SEQ ID NO: 2974 - DNA, 600 bp, Aspergillus oryzae
cggacgcgtgggctcgtctgttattgtggttggtttcgccactgccctttttcatcattgttcgatacttttgaactgtgtatatcatactatctggctactatgagacgccaggcatctatcagttaatcagggacgtaacgtcggcgacgcggcatgcgaaattcatcgtattggtgggcttctgattcccctgatgctagattgtatcgcgtcctccagggtcaagttttggaccaccagcttctggtagcatttgtggccttttctagtgtttcccgcacagcagcccgaggtccgcacatttcattcaaatgctgactgcaaaccggggggtgatgcgccggctcagatcgcttttctacaacaaatcccaacagagagtctcaatacactgacggtgtcaagtcacgatgcaggctggttaagcttccagtctttctattgtaagtgtaaggccaggttctcttctcagacccttgcgctttttttcacgaatcgactattgtccattcaaactcacactggattgttgtcatcaattctgcctaatcaaaaccgcaagcagtcttatcacgattgtcacgtcgcaagtttccc

SEQ ID NO: 2975 - DNA, 635 bp, Aspergillus oryzae
gtcttaacccaaccaaactatcacagccactccatacgatatggccaaatccgcaagacgagccggaaaggcaaaggcctcagtcaccccctccgtatcatcatcaggtgcttcaactccaagctcacaaccgggaccccttcctccgtttaccaaagcgcccgcgtctctccagcccttcctcgaacagctctccccgaaggaagtgtacctcgttcacatcgacacctctcccaaagacctcaagacacagacctttttcgcacccgccgtactcaatgttgtgattgccgctctcttagctttccggacctacatggtccgcaacttctacccggcactattggccccgttgatcgggctcaccagcacggtggcagtagacacgtcaaccatgtcatggggtgaaatggcaaacgtaaccctgcgccgaacgggtaatatcgtgatcgactactttctagtgacggtatttctatcttggccaattggtttcgtcaagggccctgtcaagtggcgctccaagatcggcttccgtgatcaggagatcattgtgcgccgcagccagccactttgagccaggattggaccgcagtcgctggatcaggatgatgaagaaatgagggacaagattg

SEQ ID NO: 2976 - DNA, 667 bp, Aspergillus oryzae
gccagattagagggcaagcggattgagaccagcgatacgagtatcaacgctactgtcgactccaagcctgccacattccctcttaaccagccattgtatatggacatgtcccacgatgatgtgattgtcggggtcctggccgctctgggtctcaagtacttcaactatggatcaaagggcttgcctgacgatgtggctcatgctgtcccccgtaacttcaagctcaatgaggttacacctttcggagcacatctgatttccgagatctggacttgtcctgaaaagactaacttccacgaactggatggcgcgctgtacaagaacccggatctttcctcgacatcagacaccacagatgttattcggttcgtgcttaacggttctccggtgtcgcaggaaggcctagatggatgcgagacctctatcaatggcttctgtagtgtcgaggacttcctgaaaggtgttcccaagctgaaggtaaaggccgagtaccagtatgcttgttttgggaactacacggccggtcaccaggttggtgatggacgccctgagtgatctgtggctcttgatgtgcaatctatatgagtgaccatctaatgttagtgagttatgctactcatgtacatcccattttggatacatataccatgatagcctatgaatagaa

SEQ ID NO: 2977 - DNA, 408 bp, Aspergillus oryzae
caaaacatgaatatcgaagaacagatcagacatcttcacgagcgttaccggcaatgatcaaatatccgttgggttttttggtgattggaccgttcatcggcgtttttcatctggagttatcggtcttctttcaaaccattcttatcctattgagacgtacgtctaagcagatgtaaaatatcctttctgccttcttatatctgatgatcgtttattgaagctcgctcgaattttcccaggcgggaactcaacaacagtagatatttataccagaatgccattcctcagtatgagttaaaaacacctggtcccacagtctgtatttagtaggctctaatctagccatcttgaaagcattgccttaagaacaaaaaaaaaaaaaaaaaaaaaaaaaaaaaaaaaaaaaaa

SEQ ID NO: 2978 - DNA, 668 bp, Aspergillus oryzae
tccctctcgtattccttcccccgcatttctttatctccctctctcatctgatctcctctccgactcgagaccacacactccatttcactctctgctctcgacatttcgagagtgaagagttgctggttcccgtacagctcgtatccaccacttaatattctccccagttcccttgccgtccagcttttctctttctgtattcatacccccgtatttcgtaattcgccgccaagatgtcactacaaaacgctcatcttcaaccgcgcatttccaagaaggcccccttttcagtggaggttcctggcgttgaggcgaaacctggagagactgtcccccgtcggctgccggcggcaaaggatggactcatcctgaaacctgtggaggatgtcgcaactacctacgatgtcttccgccgttctgcgcgcgtgtttggtaacgcaaaggctgtcgcaagtcgccgcttaatcaagactcacgaggagaacaagaaggtcaagaaggtcatcgatggcgtcgagaaggaggtcgacaagaagtggacatacttcgagatgagcggttatagctacaagaagcttcgtcgagtacgagcaaatggctctccaacttggtgcgggtctgaagaagcttgggctcgagacgggagacaaaatccatctttacggtgc

SEQ ID NO: 2979 - DNA, 188 bp, Aspergillus oryzae
cttcgtttttaagttccctagcctcttgtgtgaactgtgtcgctggcccgagcgcatgaaaacgatcttattcgattcgtacggagtagcaaccctgatctatgaggggatattttctatagtcgggcgtagtatgacagttgtcaacgtgctgcatgtttggtacctataaaaaaaaaaaaaaaaaa

SEQ ID NO: 2980 - DNA, 608 bp, Aspergillus oryzae
tcgacccacgcgtccgaggttccatgtgaacagcagttggacatgggttagtcgatcctaaggcatagggaagttccgtttgaaaggcgccctcgtgcgccgtgtgccgaaagggaagccggttaacattccggcacctggatgtggattctccacggcaacgtaactgaacgcggagacgtcggcgggggtcctgggaagagttctcttttcttcttgacagcctaccaccctgaaatcggtttgtccggagctagggttcaatggctggcagagccccgcacctttgcggggtccggtgcgcccccgacgacccttgaaaatccgcgggaaggaatagttttcacgccaggtcgtactcataaccgcagcaggtctccaaggtgaacagcctctagttgatagaacaatgtagataagggaagtcggcaaaatggatccgtaacttcgggataaggattggctctaagggtcgggctcgctgggccttggggggaacccctcggagcaggggggcactagccgggcaaccggccggcgccccccagcaccgggtgggggacgcccttggcaggcttcggccgtccggcgggcgcttaaccgaccac

SEQ ID NO: 2981 - DNA, 540 bp, Aspergillus oryzae
  modified_base (197)..(197): n is a, c, g, or t
cggacgcgtgggcggacgcgtgggcaattaagcccattggaagtttgcttggctgcatttcaccattacttgctctcttttttctccctccctctttctcagggacccctctctcgctccgatcctttcgtttcttatccttcgcaagtccgttactttgatgctgatcgtctccccggctgcggctcgaccccttntccttccgttctgatattgcggtccactcctccgcggcttccaccagctacgccgtcctacactctctttgaccaagaactcggggataagctccattacctgtcgatatttcgccctggatatattacaactctcgcttgatactactccgtctgccctcgagctgtatcgggtggcttgctccttgattcttagcctccgcatcacgctgcagcctacgtctcgatccctctctactcagacaaccgttcttaatgcgctgggtcctttgaatggcagccacacacgaactacaatcgcctgaaacaccatacaggttcaagaagcgcattttcgtctccg

SEQ ID NO: 2982 - DNA, 552 bp, Aspergillus oryzae
aaatccttacatccattccataatcttaacggtgaacaaccactaccacaaaacgacactcccaccaccaaaccaacaaccaacaaccaacaaaccaaaagaagataaaaatgtcctcccaccaaggcggcaccctctccgaaatggctcaaaagggcacaaccatccccaacgacgccggcaaacaaaacaccattccctccgtgccgcgccccgaacaacgatccgagaaccccggcttcgataaccagggtctcggccagccttcttcggcctttgcggctgataatgaagctactttgccccgggggccgagtgatcccggtatgactggggaggttgttactgggacggggaatacgttgccggcggagggggagtcgaagtttaatcaggttgggacggatcggccgggtgttaggggggatacgaggaatttgaagcatgggactgttaagggaggggtttttggggatgagtaatttctttctttttattttgttgtctgcttttggtagagggggttcgatattgtttgcttttgggatgatg

SEQ ID NO: 2983 - DNA, 647 bp, Aspergillus oryzae
cgacgacagcgactagtagatgtatcagaggaaagcaataatgagcggcagtcgggatcaaggcgctcgcggactcgttctaggagcccgactagtcctgcaggatcaactagacaaaggaagcgaaaatccaacccgatgcggcctgcaaaaagccccgaaccacagacaaacggcggagcgaagcccaatggtttcttatcgccgcttgcgaaagctgacggcatcgcgcatagcatctcccgatccccctcccctatggggcttattcctcttcatacacggtatcgcagtttcattcatcgccatgaaataccgcgcaaggtcctccacgtgtcaatcggcttctttacacttcatctgtatagccgtggtatccaaacaacccaaatcactccctggctgttcggggccctagtaccaatagctgcagtggatgtggtgcgtcaccgctcggagacgatcaataagctttacgttcgctgcgtcggagcgctgatgcgggagaccgaagtgcaagggtataatggcgtgatctggtatttactcggcgcatacgcagtcctgcgctttttccccaaggacgtaggagtcatgggtgtattgctcctaagttggtgcgacacagcagcttctaccttcggcgt

SEQ ID NO: 2984 - DNA, 654 bp, Aspergillus oryzae
gggtgtgcggtttactgactttcatgctgcggctgcatgctctcccacccgcgccatgatcatgaccggcacagaccaccacatcgccggcctgggcaacctcatcgaatggaccaacatctccggccagaacggccccaaaggctccgcgatgagtaccgctccacagcgcggcatgccaggttacgaggggtatctcaatgagcgcgttgtggcactccccgaggtcctccgcgatgcaggctaccacaccctcatgtccgggaaatggcatctgggcctgacacccgagcgttcgccatttaaccgcggcttcgatcgctctctagcccatctccctgcctgctcaaaccactacgcctatgagccccagctacagggcaccgatgagacacccactttcctggaagctagctacatcgccctgcacatggaagacgacaagtatgtcaagaagctgcccgagggctggtactcatccgatggatatggcgacaagatgctccagtacctccgtgaatggcacgaccgctccgatgagcgtcccttcttcgcctaccttcccttcacagctccacattggcccctccaagctcttcgcgagtatatcgaccactaccgcggtgtctacgacgacggtccggaagcactttc

SEQ ID NO: 2985 - DNA, 480 bp, Aspergillus oryzae
gttcgcctcctgtcgaagatgatgaaggcgaaggaatttagaatcaacgaaagcgttttggacaccttcttgcacctccgactgctctccgaattttcttccaaggcatcaagagaccgggtcgaccgtgagccagaggagaatacattccgtgggaagaagaagcaaaagaaagaattccgcactaaacgggaacgcaagatcgaaaaggagcggaaagccgtggagaaggatatgaaggaagccgacgccttagtatcccacgaggaaagagataagaaccaagcagagaccttgaaacttgtgtttggggtctacttccgcattttgaaacttcgcattcctgcttttatgggcccggtactcgagggccttgctaaatacgcgcatctgatcaaccaagatttctttggcgacttactcgaagccctgaaggacttgattgggcacgctgatcgggacgaacttgaagacgaccgt

SEQ ID NO: 2986 - DNA, 652 bp, Aspergillus oryzae
tcgacccacgcgtccgcgaggtctttaagaaagaagccgccagcctggatcggatatactatgctcgatgtcgtaatatcgcagggccacacgtggcgcacacagctactgcgccgaagaacaaacacctgaggataaaggggagtatacgagacgggctgtctctcgacgaccagcatggcgagcggctgcgccattgccttctccaggaggttttccttggcgaggatttgactgaggagcgtctctccctaagccgatttctggcatccttagggtgtcatgacttgggcctgatgcgcgatacactggggcatcccgatgccgtttccaacattacagtgaatgaaccattctactcggccgtgttctattacaatggcagcgttagtcggggtcaccatccgtttactttgatatacgaaacaggaaccgattccgttcctcgatgtgacgcacacctagctctctatggtaataccaagaccgtgagcatgcattatgatttaccttacgcccaaggcaagccatcacgggtggttgtggaaacagcggatggcaaggggaatctgaaaagaacggagagtgttagtagctgggaggatgcgtttaacgccgagcttaaggcgttgcatgcgtacttggttgaggg

SEQ ID NO: 2987 - DNA, 673 bp, Aspergillus oryzae
atcgatatccatccaaatagcataaacaaatatttaacaaaaaatgccacagcaaaagaaacaacacaccgtagccgttatcggctccggaaactggggctcaacaattgccaaaatcctcgccgaaaatacagcctcacaccccgaactcttcaccccgaaggtccaaatgtgggtattcgaagaacagattcagatcccgtccgactccccccaccactctaaatacggcgacaagccccagaaccttaccgaggtgatcaacgccgtacacgagaacgtgaagtacctaccggggatccgactcccagagaacgtggttgcgaacccgaacctcgaggacgtggtgaaagatgcaacgatcctggtcttcaacctcccgcatcagtttatcgagaagacactggatcagattaaggggaagcacttgccgtacgcgagggcgatatcgtgcgtgaagggcgtagatgtgacggatgggatggtgacgttgttttcagagctgattatggagaagctggcgatttattgtgggtcgttgtctggggcaaatattgcgccggaggttgcggcggagaagttcagtgagacgactattggatatgatacgccgccgatggatgtcaaagccgaggatggaagtccggaggacattagattaagattgatgagc

SEQ ID NO: 2988 - DNA, 365 bp, Aspergillus oryzae
ctcattactcttggcgcaccaagtgaggggattcatcctatggtgtttagagtgggattaacggactttgctcgtaagcacggcgatttcagtcttgtgcagtttctaccttccccccctttcctcgtaacttttggactgttgttgatgggaattccttcttcgctatcattgttgcatttcgaacattgtcacttccaacccttgatcacatattcctgtctgcaactccatacttactgcgtcatttcaaaggcgtgagggtctacatagtttggtgctttatgaatctgggctttcttttttcaggagactatcgaatgcattgtggaataagttctgtcccaaaaaaaaaaaaaaaaaaa

SEQ ID NO: 2989 - DNA, 650 bp, Aspergillus oryzae
ctgcctcgctgtcttccccttaccaaaagaaacataccaccaccgatcaacgttcgcactgttgtcggttttgctttaatcgctattcaacccggccacgtcaaggtcccccaaatttcaaacctcaccacttttagggcttgacaagctctcacaaccattcattatggctaacgacgagtatgattttctcttcaaggtggtgcttattggagactctggtgttggaaagtccaaccttctgagtcgtttcacccgcaatgaattcaacctggacaccaagtcgaccattggcgtggagttcgcaacccgttctattcaggtcgattctaagacgatcaaggcgcaaatctgggacactgctggtcaggagcgttaccgcgccattacctctgcctactatcgtggtgccgtcggtgcccttcttgcttacgacatcagcaagcatcaaacctacgataatgttaaccggtggttgaaagagctcagagatcacgcagattctaacattggtcatcatgcttgtgggaaataagagcgatttgagacacctgcgcgctgtgccaaccgaagaagccaagcagtttgccagcgagaacaacctctccttcatcgagacatctgctcttgatgcgagcaacgttgagctt

SEQ ID NO: 2990 - DNA, 551 bp, Aspergillus oryzae
gtccggtatgggtaggctcgaggctctagttgctgttgcaaccagtgagaataaggggtctgcaaagttgtttgcatgaaatttaccgcccgggatgtttaccaatgtgtcggaaatcgaccaaaatacataggtccgcgatgcccgaagtggtctcgcgaaatcggcagatgttgccacctttcccgttcgcctgaccttttttccattcttttgtgatgttgacccagtgttgtatatcacaagtcacctggccttctcttactttctcctctacgctatcctggatatagttatggcgttttagatcctcgatctaccgaattcctgggagctatacaccaccgctcgaccgggaatcgttatgaagtgatgactgatgaatatgatgcataagtgactcgattaacagggaggggttttgactcgtggctaccagtctctttcgggtgtcttcatttcctttcccgcagtttccctgtctctctttttccatcagggtcgcgatggtttttgcatgttcgcatgttcgggcgttgtttaagggtttg

SEQ ID NO: 2991 - DNA, 609 bp, Aspergillus oryzae
cagacccagtccttgcgtcaagctcagaactttaacgtcgtcgatcctacgtagaatgcatgaaccgcattccaacaacatttcgctcacgcgagacacttgatacataatacagatacatacctgttccatgcgcgacctggaatggaaccatgtgacaacgacaacttcccgtggggctctttttccatgtccaaggattccttttgattggtggattttccgaacgaatgggcacggcgggatttccatttgagtcacttggaaaacagccaggccgataccctgctgccgagaggcagggaaacaatatcagcgcatcaaaaatcatcttcagacgaacaggaggatcctaaaatttccccggatcttcgataaggttattgacaaaggttactcacgtaagaggctgcagagaggaggaggcgcgcgcaatctttgccacctgtcacaacggttgagggaatcaaaattgtggttatctcatttatttgttcggttgatcatccatcacatcataggaaccacattcttgaggtgggtggtcgacgtcagtgcgcagaaagtgcttatgtgccatgcgcatggaagttctagaagatgatcaac

SEQ ID NO: 2992 - DNA, 430 bp, Aspergillus oryzae
cggacgcgtgggcggacgcgtgggttcgtcgggtgcttgcacaggctaaagccaacccaagacctagtcgtcgttctgaggagagagctggatctgaaaacaaagagacatcgtcccgacgagtttctgctgaaagtgcacgcgaatcgccacctgttaatagacaacgtagcccgccattcgctacgacgaaacgcaaaactgtccgaagcgaggccacacggaatgacctcttgtggaccacagctactccagagaacttacaagctttcgctgccaaaggagatatcgtgggggttgccaacatcctcaatgtggggcaaaaggctgatcctgagtctatgattgcagctgctaaaggtggtcacgacgaggtgatctcgcttctgctcggtatgggtgacgcagatcccgatcccgatccggtgca

SEQ ID NO: 2993 - DNA, 672 bp, Aspergillus oryzae
cggtattgggttttgcttataagtctgcgccctactagcaaaactcatcgcatcagactcccgtccccaaatctatcaccgctatcagcaccgtgacatatgtcctacgacagcgtcccaaaagaggaacatgatagcccagatgcggagcagcttgctataaagacaagggatccgtcgggccgattgtgcgatatcaacatcgttcttgcactggtggcagtttccctgtgctttggcatgggggtattcatgttcttcgatttggcctacgaccagatgaaacccgcggagacaacatcagcacctcaattccagttcaactgcggcagctcaacttctgaagcacgagctgcaggttgccgctttgacttgaccacgttcacttgggtgccaccagcgtgctttgacgagccgctaatggaggaatttctcggctcaaaaaactggacctggtccttggatgagttgggaatacagcaggtgaacgaaagtttcgcgcgagaaggcgactttgagagcctctacactacaatggactaccatgttacacattgcgcatacgcgtggaaaaactgcaccggtcactctttagcggggatcttagtcacattgatggctatacagcagtattcaccacacagaacactgttgggcatgctgctggaaagt

SEQ ID NO: 2994 - DNA, 663 bp, Aspergillus oryzae
cggacgcgtgggcgctggacggatgatatggaagccttgccaacctacctcgaaagtttctggcatagtggaggaggtaccatgggaatttcaattttggttatgctgtccacattcctggccttgggaacaatattcgtctacagaatctggctgcatccgctctcagggtttcccggccccaagtgctgctctgtgtcttcgatacctgttgcatgggctcagttacgggggcggaatcatgaatttgtctcttccctccatagaaagtacggaagtgttgttcgtatcagcccgagtgagctttccttcatctcgggagcagcatggaacgacatctattcgcgaagcaagggtagaccggccttggagcgtgatcggacattcttcaatgacatgttagtcgacccggagacaattaccatggctaacgaggccacgcatagtcggataaggcgcgctatggcaccggccttttcacctcgcgccctcctggagcaagaacccatcatccaagccaatataaagctgctcatggataagctcgaagctcgggcagggagtggaggagctccacggacctgcgagcatggtttaactacaccacatttgacctgattggcgaccttgccttcggggaatcatttggctgcttgccacttc

SEQ ID NO: 2995 - DNA, 682 bp, Aspergillus oryzae
gtaactctcacacggacgttgaaccaccatggagtccaagtcctgggaaagtttgtcgaaagcaagtcatgcctcgtcagggcaaacgcttttagccgacgatcctaaggctgagacgtgggtagagccaacgggggtggagcactcggatctgcgactggtctccgatgacatctctctggatatattcctagtggccgttgcagagctggccgagagatttacttatcggtcgataacagcaccaatacagaattatattcaaaatgcacgggatgatccattgcacccgggagcgctgggaatgggccagacactagcgaccagcatcaattacatttttattgcgtggtgctacctatcccctgttctaatggcgatcatagcagacagccttctgggtcgattcaaaacaatcgttctgggaactgggctatctgcatgcggagtgctgatcctgtttgtaacgtctctcccagtcagtctggagcatggagcgggtctccccggactcgtggccgcgttgaccttggttggactgggaaccggtgctattaagagcaatgtcgcaccactgattgcagagcaataccagtatatcgaggcgcgagtgaagacattgccagatggtgaacaggttctggtagatccaaatgtcacgattcaggcggatattgcccca

SEQ ID NO: 2996 - DNA, 667 bp, Aspergillus oryzae
tgttctttgtatggtgggaaatacttcggttttgtggtatcttgattcaagcctaccatggcgggcgatatcgaggatccaaacctagcttcggatagcgactgggcctcggcggatgaggggtcgctagatgtaactacattggcatcgagtgttctcaattacgagtacaagaatggccgacgatatcacgcctaccgctcaggcgcatatttaatggtattatgagtcgcatcctcatcctctaaccaggcaagatggcttagaaaggttcagccaaacgacgaggaggagcaggaccgcatggacctcctccatcacatatacaccctgattctcgatggcgagctgcatatggcgccgatcaagtcccatccagagcgagtcttggatttgggaacgggaaccgggatttgggcgatggattttgctgatcagtataaatccgcggaagtgttaggaaacgatctcagtcccattcaaccaagctggatccccccaaatctccaatttgaaatcgatgactacgaagcagactgggtctattcacggcccttcgactacatccacggtcgcgagctagcaggcgctgtcagtaacttcgaccgactcttccgacaagccttcaaccatctaaaacccggtggatacctcgagatgcaaactt

SEQ ID NO: 2997 - DNA, 394 bp, Aspergillus oryzae
caggtgggactaaacttccaccgtgtgctggcctttgtggaaaacgtggggatctcgacgttgcattatctggatttggccgatgagcccgccgtggacgaacggttcccgcggacgcagattcggtcgattccgttgcaagagctgaagaagttggcattttggcagtagactacagattttacgacgcgttgatgttagatctggagatacagttgtgcatgtctggttgaagctatatcgagctaccctctgtagctacttatcaagttggttccctttgctgggtgagctttggatttgaatatgatatcctatgaaccaaaaaaaaaaaaaaaaaaaaaaaaaaaaaaaaaaaaaaaaaaaaaaaaaaaaaaaaaaaaaaaaaaaaaaa

SEQ ID NO: 2998 - DNA, 681 bp, Aspergillus oryzae
gtccagacaaaagccacgcaatggaataagcccgtggagttgatgacgcccgtcgagcgtgctctggcaaatcaaccatggaaagagtatactgccgatggtggtcgaaagtactggtacaatacggagaccaagcaaagcacttgggagataccagatgtctataagaatgctttggcgcaagctcagacggcccaacctccgcccgcagcggggccaacatttgtcgcgggcggtgttagctcgttttcctcctatccacagcaacgtgaacgtgacgactacgaccgaggatatggcgatcggcgtggtggatatggctccggtgatgccaatgggcttgtggctgcccctatgctgggggcgactacagagccagagtacagttcagttgaggaggcggaaaatgcgttcatgaagatgctcagacgccataatgtacaaccggattggtcttgggagcaaactattcgcgcaacggttaaagatcctcagtaccgtgctctgaaagaccccaaagaccgcaaggcagcctttgaaaaatacgcggtcgaggttcgcatgcaggaaaaggatcgggcgaaagaaagattcgctaagctcagagcagatttcaataccatgctgaagcgtcatcctgaatcaagcattatagtcgctggaagacattcggcccatttt

SEQ ID NO: 2999 - DNA, 666 bp, Aspergillus oryzae
ctttcagggccactttccatctcccgtgcgtctcttattctctaccggtctttaccagccctatttgtcggttcttttcgaaataaattaatcaaaatggccttcgctggccaggcacccacgatcatcgtgcttaaggagggcacggatgcctctcagggaaagggtcagatcatttctaatatcaatgcctgtgttgccgtgcaatctaccatcaagagcactctcggtccgtatggaggggacttgttgcttgtcgacggcaacggcaagcagaccatcacgaacgatggagcgacagtaatgaaactcctcgatatcgtgcaccccgctgcccgcattctcacggatattgcccggtctcaagatgccgaagtaggagatggaacgacatctgtcgttgtgcttgccggtgagatactcaaggaggttcgtgaactggttgagcaaggcgtcagcgcacagactatcatcaagggtctacggaggggaagtgctatggccgtcaacaaggtgaaagagatcgcagtcgacatgattgaggctgctggaagcgaggagaagaaggtcgaaactctacgacgattggccgaaccgccatgaacagcagcttatcaagcgcaactcagacttcttcaccaagatggtggtggatgcttggccttt

SEQ ID NO: 3000 - DNA, 645 bp, Aspergillus oryzae
gtcgcttgttcgctatgcgagtccaacttggtggaagactgcatgccgcagaggagtctaccgcccgtacctcagctgagaaagcagagcatgctaagtctcagagagctgcagctgcactatcattcaaatcgccatatgtgcaggcttccgccaatgtgagtaaatcgagtgccgaggactcgagctctgcgacacaaaacagctcctcgaacaaatccatgtgttgggaagcgaagggtggcgacaccctactctgcaatgatccgcctgcatgggcatatacagttggttcattctacaactggcgtgttgtcaagcaatccagtgtgctcgccattgaagacgtaatttcgtccattccgggataccaggacaccaagcagatatttgcagatattcttgataagaattctaagaaggaagcacctggaaagactgagcagaaacctggcacgatcggcttccagttgcggagcaagatggtcgacaagtatgtgacaatagggcagcaagccacgaaagacgaagttgctaaacatatctctgaacttaccgctggaaagcccactactaaaaaagattgcatttcatctcaaggttatctgcctctatcaccgatgccggtcaattacagtttgagac

SEQ ID NO: 3001 - DNA, 407 bp, Aspergillus oryzae
tcgacccacgcgtccgcccacgcgtccgcccacgcgtccgcactattgatgaactttgatattgggtcgtttggcacgatatcttgtggaaggcatgaatgaatcaagacgtactctcgtaagatctgccgctcgcggcttgaaatggaaaatgaaaacctcctatcctaagaggaacccttacaacccatcctgcaagacatgaaagatacctggccatctagggacatagaaggtttcccgccacgcgttctgccccgttcattgccacgagggtgtcaacaacagggaaagggaagaggtgactattgtgataaacagggaaaacaaggcgaaagtgggaggacatgggtgcaggcggaacaatcataaaatcacaaggttcgtttcaaaaccaaaataacaga

SEQ ID NO: 3002 - DNA, 415 bp, Aspergillus oryzae
tcgacccacgcgtccgatctcacccaccccaaaaaccaaagtccaggttcaagtacaactcacctccctctactctctacactcgaaacaacaaatccaaaacaccaaaaatgtccgcccccaactccggccgccagtctcctcccccggagaaacaaaccggcgcccagcaacaggaccccgttgcctcgggtcacacccagcatggcatccatggtgattctaagggagcgtcggaggatactaagctccatggactcgagagtaacccgaaacatcccttggaggatatcgaggcgaagaagtttgagaaggggacggggaattaatagactgatgtgtgatgttgtttacatatatgtaatttttcatgattgggttcctttttcaatatgagtgaatggattagaaaggc

SEQ ID NO: 3003 - DNA, 641 bp, Aspergillus oryzae
cggacgcgtgggtcgattctcagtggacgttatctctgcccaacaacttcctcgccctcgcagcattggccccgatgataacatcaacccttacgtggagattgaaatgtttagtgctgacgatcgtggtcagagcttcgtttatggtgagggtggtatgaacgcatccgcccgtaatggcatgtcgggcattggatttccgcaccgtcggcgcacgaagatcgagcagagcaatggatatagcccaatctttaatgatcgctttaggttgtcgttggagactaaatatcctgatttggtattcgttcgctggactatctggagctcacaggatgggcgcagtgcaggaagtaatagcagtgtccaacttgccacgttcactgcaaagcttagcagcttatcccaaggataccgctacttgcccctgtatgacggcggcggagaccaatatctgttctcaaccttattctgcaagatcaccaaagaagacccagtgtctgttcagcggcttgacgcagaagaactgcgagctgagcggatgggtattcttcgacaaattggccagactgtctttaagcgcacgtcgtctacggagcgcgagaggggtaatgacatggcaacgagcgcagaggataaggcag

SEQ ID NO: 3004 - DNA, 626 bp, Aspergillus oryzae
ccattgcctactttttctgcttgcaattaccggtggtagtgttagtttcaaattatctcgttttgcgtcgtcggtcctcggtaacaaggttttgtacctgattgagccttatcagttcctgccagctgccggaatgggtacctcccaagctgtggatagctccccgccggatggtacaggtgtcatacagctggacccttggctggagccttttcgtgatgctttgaagcagaggtttagtttcatcgaaggctgggtgaaggccatcaatgagacagaaggaggtcttgaaacgttcagcaagggttacgagaggtttggcctcaacgttcaatccaatggtgacattatatacagagaatgggctccaaatgctgtgcaagcacaattggtcggagaattcaacaattgggatgtgacggccccccaatgacaaagaatggctttggcgtctgggaggttacggtgccagcagttaacggcgctccagctattccccacgatagcaaaatcaagatatccatggtcatccccagtggagagcgaatctatcggatcccagcgtggatcaagcgtgtggtgcaagacctcagtgtgtcacctacatatgaggcggtcttctggaa

SEQ ID NO: 3005 - DNA, 614 bp, Aspergillus oryzae
ctcgttcgcaacctccgtggtggacaatgcctgaaactaatgtcggcgaggtcaatggacatgcggtggccccatcgccttcactagactctagcaaacctcttccgagctcctcgtccgatatcttcaatgccagctctctcgcggaaatcaaggctactttatcgcaccttcacgaacaggagacgtcggtgacagcccgattagatgcccttgtcgcctctcagaaggatttttcacgtgaattgggtcgattggatttgctccgtgcgcatctcggctcccaaaccaccaccacccggtccatcagccatggcatgctctcagaggccgcggccaccgcagagagaatatcgagcgcagtccgccgcctggatctggaacaatctagggtaaaatctactttggatgtagtggaacaggtttctgaacttaaggcctgtgtactgggagtcgcgggctccatgggtgccccgcaggattgggaaacagcagccagttatctgaaccgggcatccaaagtcccaccagaagttgttcatggagctttcgcggctgagatggtacccacggcggaagttccggacccgcaaatgtaaccttggataatgcgg

SEQ ID NO: 3006 - DNA, 563 bp, Aspergillus oryzae
cccgagaggtactacccggtcgttatatctcatcgccccctcccacattcgactacaaccagtggaaggtgcctgggcctcttaagcaggacattgttgaggccaggaatctatggtatgggcccgcgagcgcagattggaagatgacgaaacaccgaatttgctgggacgctttcaccactacctctgattttatcatttctcctcactctgcctccaagggtctctacatcgccacttgtggttcgttccacggcttcaagttctttcccgtgctgggcaagtatgtcgtacagatgcttgagggcgagttagcgccagaattgatcgagagatgggcttgggatcggcagcgtcctgattcgtcccaaaacgttgagtatccaaacgctgagatgaagcatcttttgcagcctgcatcgaagctataatggaagcttggaaatgcttttgagttgaattttgggcatggtggtattttcttgatacttagatctccttggttgaattaaagcagagtaacgtatatattaaatctcgaatacattcccttttaaaaaaaa

SEQ ID NO: 3007 - DNA, 509 bp, Aspergillus oryzae
  modified_base (477)..(477): n is a, c, g, or t
agcacgtcctgctgagccccgaggagaaggccaaattgttggcgcgctatcgtctgaaggagtctcagttgccccgtatccaggtgtcggatcctgtcgcgagatacctgggtctgcgcagaggccaggtcgtcaagattatccgcaggagtgaaacggccggtcgttatgccagttaccgctgggttatttaatcgcgatcgtgacgactatggcttgtatggttatgctatattaacggacggctgtttgcttgagggagttcatcgcgcttttttccattcaaagacgccaaaagaacatgtcgagttcgctaagaggttcctgggcaccttcctacggcgcggtttctcctgcaccatagcctacgccgtgtctcactctcgaagtgaacatataaacgagtggatgggatctcaagaacaacagagaagcaaaaccagaggaggcggcaaatcacgggacaaaaaagaaaanttcagacgaaagtccattgcaggcattatggg

SEQ ID NO: 3008 - DNA, 618 bp, Aspergillus oryzae
tctacttattatactgcttactacgtctaccatttgcgcttatccattcacaagtcatctgccgcccggtcatgctgtggctgcctctacggcccagtgcacctctcagggcgcaccaccacctcattctccgctatcggcgcgcaccgagttcaattgttcgcctcacacaacgtggcttcgctagctcttctgcgactttcccgacactttctcaattcagtcgatcagatttctcaaatcagccctggagtggtagctatgaaccaggactgccgactgctgggcccttgggctcgaccccggctttcggagctccccggattacgcccaaaacgttaaagcaatacctagatcagtttgtagtcggacaggatcgtgcaaagaagatactaagtgtcgccgtatacaatcattaccaacgtgtgcaagaattacagcggcgtgatgaggaagcagtcgagctgctggcgaagcgcgcgcggcgcgagtctgttgaccgccatcctgtagaggatgaatttccagggcaacaacggactagccgcccaccatttgatccaagttcgtcgttgaaccaaaccgagctcacagactcatcgacatacaactggagaa

SEQ ID NO: 3009 - DNA, 643 bp, Aspergillus oryzae
tcgacccacgcgtccgaacaaaaagatgcctcccaagaaagctgttgtacaagagaaggtccttctgggccgtccaggaaataacctgaagagcggtatcgttggtctggccaacgtcggtaaatcgacgctcttccaagccatcaccaagtccaacttgggtaacccggccaacttcccctatgccaccattgaccccgaagaggcgcgtgtcatcgttcccgatgatcgtttcgactggttgtgcgagcattacaagcccaagtcgcaggttcctgccaacttgacggtctatgatatcgccggtctgactcgtggtgcctctaccggtgctggtctcggtaacgctttcttgtcccacatccgtgccgtcgatgctatcttccaagttgtgcgctgcttcgatgatgctgagattattcacgtcgagggtgacgtcgaccccgctcgtgatctggacatcatcagcgaggaactccgtgtcaaggatattgagtttgttgagaaagctctggagggcttgacgaagcagacgaagcgcggtggtcagtcacttgagatgaggaagctgcgcgaggaggaagctactgttgccaaggtcctcgagcacctgaagtccggcaaggatgtccgcaaggccgat

SEQ ID NO: 3010 - DNA, 638 bp, Aspergillus oryzae
gaaaaaatactcggggaggagcataaacacaatgttatgataacgtgatgataaccaaaaggaaaggacaatttcctctcagagcacagatcacagcctcacaatgcagaccaaaaccaagaggaaacgattgagtcgcggtggtcgctggacggaagacgagcgacttcagctggtacgactgcgtgatcgtaataagcatcttgcttgggatcagtttcagaagatatactttccacgacggtcctatatggctttgacgaaggcttattcggatatgaaattgaagcatactagggacaacgcaatggtgtgcactccatccctcgaccataaacagaaacagcagttgcttaaccgggcccttgtcccatggcagaccaataacactagcaatgagacgacactcccatccaagaccaacagacctaacaaacggccaaacattgacgagcgctctgtcaacgaacgggccaataaacaggctaggacagccgagagagattcgacctatgtgcctgaggaagacccagaatctccggataacggagatattcatgaggatggctcatcgagccccatgcatggtcgaacgagaagttcggtgaactccttggcaaagcttagagcccaaacag

SEQ ID NO: 3011 - DNA, 384 bp, Aspergillus oryzae
  modified_base (21)..(21): n is a, c, g, or t
gcagctttatcaagggcacanccgcgttccggattccctggggtctgcagatgattcctgctatccttcttttccttggactgatgttgcttcctgagtctccccgttggctcgcccgcaaggaccgttgggaggagtgccatgctgtccttaccttggttcatggtcacggtgacccggactctccttttgtccagagcgaattcgaggagatcaagggcatgtgcgaatttgaacgtcagaatgccgacgtgagcttcatggaactcctcaagccgaacatgatcaaccgcactcacgtcggtgtcttcacgcaaatctggtcccagcttacgggcatgaacgtgatgatgtactacattacgtatgtgtttgcgatggccg

SEQ ID NO: 3012 - DNA, 462 bp, Aspergillus oryzae
ccgagtcagactctgatagcgaggagtctcccaagaaggagtcttccgattccagtgactctgactcttctgagtctgagtctgaggacagcgaagagtctgccaaggactccaagaagcgtaaggctgaggaggatgtctctgccactcccaagaagaccaagactgaggagcctgctgccggtgcatcggccaacctcttcgttggaaacctctcctggaacgtggatgaggcctggcttcagagtgagttcgaggaatttggtgagctctctggtgttcgtatcatgaccgagcgcgacactggccgctctcgcggattcggctatgtcgaatacactaatgctgtcgatgccgctaaggctttcgaggctaagagggacaccgaaatcgacggtcgcaagatcaaccttgattacgctaccggacgtcccgccaacagggaacagggtggccttccaa

SEQ ID NO: 3013 - DNA, 630 bp, Aspergillus oryzae
aattgacctgtctcgtagagtgaggcaaacggcccattccacacaaggatctattgcttctttagtggggaagcggattgcccgtttcttaccgaaagtaattggagcatggcttgccggactctatgacaatgaccgaatggtccatcggtccgcatttgagtccttcacacgggttttctcgactgaagaaaagagaaacagcgtgtggaagatctatcagagttctattcttgattttgtagatgatgtcatcctccagcagactccacagactcttagcgatgagaggactgtcaagtctgatgatgcagaagcaaagtatgctcgcgttgtaggaactgcggttttactatttaatcgaattataggaagttcgacacgcgaagttcttgagaaggatatagccacggttgaaaaccttctgggtagtaaatcgctatggtccttatgttatcatgatgatccttttgttcgcagatcagtctatgtcctccttcgatccgctgtctctaaagacccagagcagcttgactggaagctcatcagtgccgctatcatcggcaaatccttgcacgtatctcaattaggatcttcctcggacctatccgaattactgctgcaagtgac

SEQ ID NO: 3014 - DNA, 690 bp, Aspergillus oryzae
caccctccttcacctaccctggaagggaacatgctcctgggaacagccgcctaattctacatttgtcgcatattgctttcctacccaggaacctatttatctcgccgcacattgcgtgtctgacggtcacacgttgtcttatagtcttgcccatcgcgggcgaccgtgtcttctgtaaatccacttcaccatgtctacagattacacctatgacgaacagggtcaattcttcccgttcttcatcctaacccttacgggtcttgttacattcccgttaacatataatcttctcaagccgagcaaagaactcgagaacaccgcccctcgaataaaatcggactacaagccggaacatggcgatctcattgaggcgcagaagcgtaaacgtttacgcaaggagcgcaggattaagcgcatcgttaccgttgtcttgggatatgcagttatggcttggatggtttatttgattattgttactgccagaacagtgcccaagatttgggatccttatgacatcctcggcatctccaggagcgccgatgaaaaagcgatctcaagacactacaaacgtctatctcttatctatcaccccgacaagattcggccagaccccgcgaagaatgagactatcgaaatgctcaacgagcgtttcgttgagctgaccaaggcctacaaagccttacgatggag

SEQ ID NO: 3015 - DNA, 606 bp, Aspergillus oryzae
tcgacccacgcgtccgcacacaccaccccccaattgcctttccctggaccccgggaaccgctcaacactacggttaaccaattgcactcgatcaagtgcattgttctttttttccccgccggtcccgtccgctcaaccgtctcgcgaccaccgttcctgcgaaaagtttcttttaacgtccgactacttcctaaccgtttcctatcacaatgactacccctcaattctggtcgacgcctctccgctaccttcgctgggcctctcatgaaaagcccgctatcttctactcgcttgtcgttggtgccatgggccccgtcatgctggtgactcttcccccgatcagacgggccttcggcgacgttgacccggaacccattcccctcacatatcccattccccagggaccccgggttatcccgcagggctacgatgacgagtaaatccgcctgagactgtgaatggagtccgtgtcgattttcagatttgatttttgcttggtgtatttagctgggaactcgagtcaattcaaaagactacctacctactctgtcggacatctccgattacaccgcctatcgcctgaggctgggcaggagattgtgtgtt

SEQ ID NO: 3016 - DNA, 597 bp, Aspergillus oryzae
gcgggagacaatcgatttacgaggcgtcataaattctggggcaaagtcatttactcccagcggtacatctatagtctggtcgctctcagcatggtgctgaatgttctgttgatgctggtcagggtattgccgtaccattctcgggtcccttcatcgcgagtatgggagatctggaaggagagaaagaacatcatcaggggcttgaaagatgacttttacgccgccattcatacatcaagagatagccgagaaagcatggcggagaagacacggacgaaattcccattttggaaacgggtatcgcgatttttcaccctacgtgtgataggcttgtgggccaaggtagcctttgatgtcatcattatctgcgcagtactattcagcattgtgatcagtccactcaccgttattgcgttcgtgtgttggattgaatactatatctatcacgatgggccgtcccaggagacaccacagcaggttggccagtggtcacctctggtgccattgcgctgttgagtatctctgctggaatctacaaattgaagtactgggtggctcctcgtcacgaaatcgagcatgatatcgaagagctgaaaa

SEQ ID NO: 3017 - DNA, 424 bp, Aspergillus oryzae
gggtatgttcgtcaggcctctggcatctctcagaactactaccccgagcgtttgggcaagctctacttgatcaacgccccttggggtttcagcggcgctttcaacgccgtcaagggcttcctggaccccgtgactgtcgaaaagatccatatacttggttccaactacaagaaggaactgttggcacaagtccccgctgagaaccttcccgaggacattggtggtacctgcaagtgcgaaggcggctgtgaactgagcgaccagggcccctggcaagatccagagtgggccaaggcgcccaagtgggctactcccaaggaggaccaaaacgtcgtgaagaacgaggatcctggtctcgagcagaaggttgagacgcaagaagcttctcagcctcagcccactgcgtagaaacccgatttccttt

SEQ ID NO: 3018 - DNA, 635 bp, Aspergillus oryzae
ggaggacgaaagcgtttatgacgatgaatccacaacttccccagactacgctagtacgcatgggtccgtctacagcaaacgttctactaaatcgatacctaggccgagaatgggcgtaatgaagactgtcggaacggagcccaggagggatctggtcattggtgatgctcactattccgtcgacgaaccatcacaaaaacataaccctgatatccccagtgttgatttcggtccaacgatgactctcatgccaacgactgggcgtccgactacttccgatacattgaagaagctcggtcaccagaggagtgactcggaatccaccgaaagacagcgatactctcagatggaccgaggccactcacggtcaccaagccaggatgagttccgacgaagtgtcttgtggcagcctgggatggccgccgcacgtccaattacacctggtctcacgccagagcagttcgtgcagcagcgtgcagcacccagcccaccactccatgtacatcaccggacttcttctgcgaccccaacaaccccaccggcacggcctgtatccggtgattggatggctcacaaccgatctcattctcaaatgagcattggtagagagagccaagggcgaccccgttctcgcg

SEQ ID NO: 3019 - DNA, 627 bp, Aspergillus oryzae
  modified_base (471)..(471): n is a, c, g, or t
gtggccgcattgtttggtgatgcactcatgtgtatcagtcctcgagggctatgggatttggataccggcaaacccaccggcgaccacactgtggaggctcaaaaagtgatcgaatcagcaatggcacagggcatcgaaggtcgggatcacccggcccattgccatctctacattcatttgatggaaatgtcaccaatgccggagcgagcattaccagcctccgaccgattacgtcgcctggtgccggatgctgcgcacatgttacacatgccaacgcatatcgatatggcggtgggtgactatcgccgcgcggtcgactccaacgaggaagccatcatcgctgatgacaagtatttcaaccgcgaccgtggatcagccctgtacgtcgcgtatcgggtgcataatatatgtgccaagttgtatgcggccttcatctcgggtcggtttgaagaatcgctatcggctgcgaanaagctcgaacagattatcgatatcaacgtgctaacaagcaccagccccccaatggcggactggactgagagcttcctaggcaacctggcccatgtgtatgtacgctttggccgttgggaggatatcttaaacctagagcttcccgctgaccgggcc

SEQ ID NO: 3020 - DNA, 627 bp, Aspergillus oryzae
cccacgcgtccgctttctttcttttcttctcttcctccaaaaaaaaaaccctttctgctgcctcaaccagcaatcctttttttcttcttatccctcttctacatccctccccttttctttcgaaaattgtcgaagaaaaaaatttaaaaaaacccgaaaaatctagaaaaagacatcgcccggtttctatactttgaggcgactattttcccaactttcttcggactgtgcgctcaaaagaaataaaacctaaaaatcatcaaaatgtctgccgacgcctctaccacccccgctgctgacagcaatgtcaccagcacccccgagaccagcaccactcctgctgctcctgctcccgaggtcactgctgttgagagcaccactgctcccaatgcttcccagccccactctgcctctctctatgtcggtgaactcgacccctctgtgactgaggccatgctctatgagcttttctcttccatcggccaggttgcttccatccgtgtctgccgtgatgctgttaccagacgctctctgggatatgcttatgtcaactacaacaacaccgccgacggtgagcgtgctctcgaagatctgaactacaccctgatcaagggcaagccctgccgt

SEQ ID NO: 3021 - DNA, 382 bp, Aspergillus oryzae
cgcgtatacgctctcgcaaaccctgacggagattcaccagctcctgacgaacccagaacccgatagtccgttgaatgtggatgtggcggtcttgttgagagacggggatatcccggcttgggagagtatcgtgcggtattggacggaagaggagaggtggcagggtcccgagtccgcttctttttcgcgggcttagatttcttgcatgttagtggtttgaagtgaaaccggggaaatgttggtgaaagatgggtggcaccgattaatttcagattattttatttgtctctctccgtttagttatgtcgatatcatgaccaagcatatatatatatatactacgtaccagaagaaccatttcatttgcaagtcgtcaaaaaaa

SEQ ID NO: 3022 - DNA, 609 bp, Aspergillus oryzae
cgcccacgcgtccggcgcaacgatgccatcgtctgcaacattggtcacttcgacattgagattgatgtcgcttggctcaaggctaacgccaagtccgtccagaacatcaagccccaggttgaccgctacctgatggccaacggccgccacatcatcctccttgctgagggtcgtcttgtcaaccttggctgtgccactggtcactcctctttcgtcatgtcctgctccttctccaaccaggtcctcgcccagatcgccctctacaaggccgaggatgctgagtttggcaagaagtacgtcgagttcggcaccactggcaagaagcccgtcggtgtctacgtcctccccaaggtcctcgacgaacaggttgctctgtgccaccttgagcacgtcaacgccgagctctccaagctcacccctgtccaggccgagtaccttggtctccctgccgagggtccctacaaggccgaccactaccgctactaaactcctcctttccgtttgttgatgattggtataccctaacctagattcttttcaacattatcacgatgttacgaataacatagagtcccatttaacttgggctcaaaagtattttgtcttcaa

SEQ ID NO: 3023 - DNA, 642 bp, Aspergillus oryzae
gtgttaagatcaaacatgttattatgctaaaacttgagagtactcgaggcgatgtcttccccttgaagaaggactcgttcatgtggaatcgcattgcggaatcccacaaggataagcagatcccacccgagatccaggaccgtctctccaacctgactcgcactgccgagtggctgaccggttttgatgccggattcgagcataccgattcgctccacgccgatcgcaaagcgtacggtggcattagcgcgcggaacgctcacacgactggtacctacacgctgaagagtctagtgggtacgctgtgtggcgtgacgcctctggtaaccgacttcaaccgcgaatacaagcatcatatatatcagccgtgtctgcctcacgtgtttaatgcgttgagccagcaacacgatatcaccaaccagactgatgactttactgcgtggccgtggcactccgtgtggatgcagtcggtgacggaaacctacgacaaccaggataagttgaccccggctctgggctaccacgacaagatcaccaaggagacgctggaggaacccagctcaaagcacttcccggtcaagtcggaggagatcaactactatggctatgcggataccgaactacgggattacattcgcgatg

SEQ ID NO: 3024 - DNA, 415 bp, Aspergillus oryzae
  modified_base (83)..(87): n is a, c, g, or t
cggacgcgtgggccggaattgcgtaagcatccgcggcgtacaaacagcggtatccagtctaacggcgtgtcctgcgcgcggcnnnnntcctgtctgctgcgtcagtcggagcggaaagtgaactttgtcgacaacctcgtcgacaccgtgtcgcagatcgtcgagaccatctggcccttgtccgccgtagcgctccgaagtgattcaactacaggctgcaaaggtgttttgccccttcgcaccttcatccaggagacgctccgccggtcgcggaccagttatagcacgttgcaagtggctttgtactatctgattaagattaagccgcacgtgcccagtcacgatctggcccatgaccagactcggagtaagcccgtctgccgggctatgcagtgtggtcgacgcatgttccttg

SEQ ID NO: 3025 - DNA, 412 bp, Aspergillus oryzae
  modified_base (333)..(333): n is a, c, g, or t
cggacgcgtgggcggacgcgtgggacacattgcgcaaaagaagaaagccctcatggatgataggtctctcaacgagatattcatggttaaatcctgaataattacgcattatatgtcctctgactacatgatcttgtcaagttaaggagcgtgtggcacattaaagcgcttcttggcgggcattctatgcaggaaaatagtctaagcccctgtatccttgattcccgtgcgattagaggaagctcagcatcacgatgcactgtatttatatacccctttcttcttttgagagacttacgcatctgcaaacgtgataaaggacatgaagttttncgggtttctatgtatatatgaatctccatctttgctgagacaaactatcatgagatactgcctatggctggtcaaaaaa

SEQ ID NO: 3026 - DNA, 665 bp, Aspergillus oryzae
gcctcctggtcgctcgtcaacccttccccccatccagagaagggataaattgccccgtcctcgcaagtcctcaatatcagcggcgcgaaaacctaaacatgaccgggtcaagtcaaaggaatatggccggcgccctagcttgggcgatcgcaaagcgctatccgctgaaccgcagacagcagcgtgggcccaaggcaagcgctgggaggatctgattgaggcggctacgtcggccacggaggcagatgatgaccgacagtcagaggtcggtcggtcaccgaccctcgcacctctgatttcgaacatcacttctgctccttctgccccagggaatcggtcatcactccctcctgccttccagtcagcgggcggattgcccccacccaattcccatcgcccatttccaccacattcttttggtgcttcccctttgcacaagtccttgacacctccaccttatgaaacagcccgcagccgcgacaatgacctggagcctttcccgtctattgagtcttctttggactcggcatcgactgcgtcagggaagaattttgcattctcgggtcatcttgggccattggcgaaacccgattccagcctggtttaaatcttttccccgcagcatcatcgcttctccaacccaactcagcatcgtttcggcaaag

SEQ ID NO: 3027 - DNA, 612 bp, Aspergillus oryzae
ggatgattggggtacgaagctgcgcgtcggaaccgccctgtcgttactagttggagcaaagattctcaacgtgaatgtgccattttacttcaagagcattgtcgactcgatgaatgtggactttgccgcaattggcgggacggcgtatacagttgcgggctctatgatcatagcttatggtgttaccaggattggcgctacacttttccaagaacttcgaaacgccgtattcgctagcgttgcccagaaggcaatccgcagagttgcacgaaatgtgttcgagcatctgttacgactggacctcaatttccaccttagcagacaaaccggtggcttgactcgggcaattgatcgcggaacgaaaggcatcagcttcctattgacatcgatggtcttccacgtcgttcctactgctcttgagatatctcttgtgtgcggaatattgacatatcaatatggcgcgcaatttgctgcgatcacggctgctaccatggtagcatactctgctttcacaataacaactactgcatggagaaccaagttccggaaacaggccaatgctgcggataatcgcggtgccacagtagccgtggattctttgatcaactacga

SEQ ID NO: 3028 - DNA, 148 bp, Aspergillus oryzae
gtcaggacggcgtgaatgtgaaaggtatatacataaacagctcccctctcaatcctcgttagaaagccaagccgacctgactaatcattttctgataataattcgtccacttttcattatataaaaaaaaaaaaaaaaaaaaaaaaaa

SEQ ID NO: 3029 - DNA, 534 bp, Aspergillus oryzae
cggacgcgtgggtcgatcgcgagcggccgcccttgttttttttttttccacattgaacgccataattgattccaacagatatctatctaaatctatctacagccaaggcaacttattaaagatagcatcctgcaatcaataaacggaagaagagataaaaagaaaatcccccggccgacataaatacagatcagaaaaaaagcaacagcagtgggacaagtgaaaaacgacgatgaatgaaatgaacccttggcctttccctagatttccatacaatttaacccaaacttggagacatgcgatttctttcttgagccgacaggaggaatgattatgtgggcaaatgtcatcgtaataataacaacggtattatcaaccagaaggtaaaaaaaaaaaaacgggaaaagaaaaactagtcgcaactttcactaaggaaacattatcacgtatcaacccatctgatataagatcgtctgatgatggtcatggaactctgtggaagggggaagggggaagggtgagtagatattggtg

SEQ ID NO: 3030 - DNA, 554 bp, Aspergillus oryzae
atcatcttaccggtaacacgatacgttgactaaccatattaatggcgcttccgggtgattaagatgactactgcccataactgggttgagagatatacccatctaacgtggaaaatcactagggaaatttttttttcttagttcaggaaccattggattgggagaagatgtcgccacttttgcccacggcttacggagtagtgtcggagcttaactagtcatttatttgttggatggacggtaggatctgagacaatcaataggctagcagcagctgaaaacatgaccaacacgactccgttctccgatggtgtacgacggaggaaaagcgagcacgcaatctgcaagtcgatggaagtcaatgactgacatgatcactcgggtggatctgtgtcctgatcctgacggtcggaacatagcggatcgacagagatatgggataggattgtactcggagacggcttgccgaaggttaagtgaaagggtttgttacgctctcctatattattattttttccccctcgatttgttttcacacttccatgagagaccgg

SEQ ID NO: 3031 - DNA, 618 bp, Aspergillus oryzae
gatgacgctgcttcaatttccccattttttattctcatattattcatagctgcctgattgttcctcttcttgatcggccccaaatgagtccggtaaatagtctgtggttcaagtggaagagccttcgattgccgtggcgaaaatctttcctcgtcggaacggatctctccggaaacacattctgggaatttaaagatgccttgaatgctgcgcgataccgacggatcgtcaagttcaatcctaaaacccattatgcggatgtccaagtgagcccacaatggcaccaatggctccgctacgtccgagccgaacccccctccgtccaagaacaacaacaagacgtccttcgccagattcaaatcaagcaactggcccgactagccgatgagcgctgggccagcaaggcttcttacctcgacatgccacagaacaaacaaccagagccagcaactcaaataacagatgcgaccacgaatgcatccgcgcaggccagcaacgcacatgaaaatactgcccctacacccgaaaccaaagaaacggaccacgtcgagacaccagccactaaaaatgatccttgggctgcagcccgaggagcttctagccaggactggcagccga

SEQ ID NO: 3032 - DNA, 187 bp, Aspergillus oryzae
acacgatttatgatgttcaatagcatttgcatgggccttcgagcaaagcccagaccatgttttctttcggctttatttcgatgcattgttggctagacagcagcgctgtatagttattgataatactatctgaccggtcgcacacttaagaaaaaaaaaaaaaaaaaaaaaaaaaaaaaaaaaaaaa

SEQ ID NO: 3033 - DNA, 645 bp, Aspergillus oryzae
gagactatgatgggaaaagaaaaaaggccaggaggggatggggaaaaacaaagaaaataaaagacagcagcaactaaatgtcgaagtcaaatgttcaaagcatggataccacagaggccaacctgattctatttgcaagaaacttcatgaagcagcggatgcgcgattggcacagccaaggtggacaacagtattactatggagaagttagtggaagaacgaagagacaaacactgcatggaaaacgtactctgggaacacattaatcacactaccaccgatacgcttgtgacagatgccgcatattctttcctcggtgatggtgacgtgtctcattctgcatgattttccgtcggttccttcgccgaccatgagctgcgcttctgtcttgaaattttgagctttctgcaagctggccacaattcgactttcgttcaaggccgaggtggctgcccgcatacggcccttgaaataaaagtcaagttctttaacgggcagtgactcgggaatcagctccaacgctgaacttggtggaagacgagatccgtgctttgccagtatctccagcgcgggcccatatcggcgctcatacccatgaggtgcagtgagataccagcgacagtagccgttagatgtatagaccgg

SEQ ID NO: 3034 - DNA, 514 bp, Aspergillus oryzae
  modified_base (206)..(206): n is a, c, g, or t
cggacgcgtgggcagcacagcactaagcaattggcccacaccaggtcgtgtttcgctctcggtctctttattctctcgacctactgaactttgccgaccccaaacaaagactagggtcgctgctcctttccatttctcagtctctccttttgaatttcacctaccgtccaccctcaccttctctatatactctgccagccactcgnttttccctgttacatttcttcgtttccccgtaattattcacgctgcaacctacactatcaactcggtgttagccttattagaccgagtttggactgggtagagtaccgtgttttatttgaccactctgttacttctcttgtccatccatcacactttgaactggaggagctctaagctatgggtgtgccgaacccagtcgacagcatggatggtgtcgaatgttcggccgtgtatgttgatcgccgtgtagtccaagaacggtgggtgtatcaaagccccactgattcctcaaatacgtcttagttcc

SEQ ID NO: 3035 - DNA, 370 bp, Aspergillus oryzae
  modified_base (224)..(224): n is a, c, g, or t
ctgcgaagaggcacttgccaactgggttacctctaaggccgccgtcaagtccgacgtgtcacagcgcacgcgcaccctatctcagcgtcgccgggaggctatcggcaagaaccgcgatggtgtcgacctctctactcaggaccagcccatgaggggcgatcgggattcgtgggtccctgctgaccagcacccaacctacgttgaagatggtgaggaagtcgctngcaccgtggacggagaggctcggggtcgagaagaagaacgcgagcctgtcagcgtctaaggcggccaattgcagccacaaacatcaacatcggtataggtatgatatgttgatggtttctgccgagtcctcgtcttttcatccttg

SEQ ID NO: 3036 - DNA, 564 bp, Aspergillus oryzae
cggacgcgtgggcttcttagtatttttctcgcattgtgcttacacatcgctggcctgtttttcttgtcccgtcgtgtgagacccctataccaaccggatccgatgtcattccttttctgattcgcctcaatgccgaccccgagtgacaacacaccaagcctgaatgccacatcgatcgctgaagaaatatccactcggacaacatgtccgcctgaaatagagaggctgtcttcctggcgagactcacctgaatctaccgtggcggagagcgatgctcccgataacgccctctcccccaccattgcatcggcgcagtccgtgctgactcggtcggatgatgctataactcgtaccaacccagatgcattaaaagccagtgctgtacctggtgcttctgccaagagtatggaaaaatccgacgaagatgctgctgcgggaagattgagtcctgctggggaatcgccacgctcctccaaccagtcgtcttctgttactacaccttccactagtgcgcttttgagttatgaattctcaaatatacggcttttgccaaattacacatcg

SEQ ID NO: 3037 - DNA, 515 bp, Aspergillus oryzae
  modified_base (164)..(164): n is a, c, g, or t
gacctcccacccgagttcctcttccaacctaacgcgattgatgagctcgtcgacttgctccgtgttcccggcctcattgctaaggacatcagtcccctgcgttgctgtcaacgtttcccctcgccatctctatctggccgacaactgaaaggggaaaagttggnaaggaggcatttcctccggccgctcgtttttattgtatcttttttttcccttcactggccaacattcttatcttttctcgtccaataaacctattaatcgcataagatatcatacactcggagcgtatctcgctagcattagaagtgtggtttgacctcactgttgtttgcatgcgaaccgttcccctttcagcagccccgattttcgctcagataccgcagtcatcgactcagcctccccggatctcacaaaacacttttcatgctcagtggatcctgttaacactacttcgcttgatctcttttgaatcgacgcggtgtgagcagccttgcgctcatggggttgacgca

SEQ ID NO: 3038 - DNA, 383 bp, Aspergillus oryzae
gggtgagcttgctaagctgcagccgggactctttgctatcgccaacgcgcacgtcattggagatgactcgcgtgcgcggttgtctcctgagaagggtgggcttgggtataatccacctatcaataccctagaagggctatgcagggagcttaaggcttggaataagaaggcggacatgaagtcttcctcttgagggtgagatgcatgaatttctttgtgtagtagttctcattggaaccgcgtgtggttgtatgggtattagatggcatatttatgtgaatgatgtatatatcagtttccttgatattaaatttgggagaccgattggcgatcggttgagtcttatactacaaaatgtattcagcagattgacagtgtaaaaa

SEQ ID NO: 3039 - DNA, 612 bp, Aspergillus oryzae
cccacgcgtccgcgcaccgacggttcggtttggcaatgggactactggcaagcaggtatggccgttgtagacttcacgaaccctgccgcctgcacatggttctcgaaccacctcaagcgcctcatggacatgggcgttgactcgttcaaaaccgacttcgccgagcgtatcccctacagaaacgtccagtatcacgacggatccgacccaacacgcatgcacaactactacaccctcctgtttaacaaagtcgtctacgagaccatgaccgaccgttacggaaaatccaacagcctcctcttcgctcgcagcaccagccctggaggccaaatctaccctgtccactggggcggcgactgcgaaagcacctacgaagccatggccgaatctctccgtggtggtctcagtctcatgctctcgggctacattttctgggcctcagacatcggcggcttcgagggcaccccgccaccagccctctacaaacgctgggtccaattcgggcttctctcctcacactcccgtctccatggatcctcctccttcgagtaccctggaatctacggtgaagattgctcagaagtccttcgtgactgcgtaaaacgcaaaatc

SEQ ID NO: 3040 - DNA, 606 bp, Aspergillus oryzae
gaatattcctaacgggatattctcctcttctcaagagaggtaatggctttgggagaaagtccccggacatcctgaccttcttatcggtcaggcattgcggaaacgcgccgccatagaagcaattcgatagcggctgactgccctattccctcccagtgtcctgtttgtatccgacgccttcaaggtggaaacaatggtggtataactgggtgctggagaggggtttatctgggttgctattcgtcgtgtttggatagtcatgcgattgcttggttcccttgcaggaactgggtaactcaatggggctcattcttgaggcgagaagttcacttcttttatcttccagagtctgtagcttatggtaaagcggtgcatcgtgttggcttcacacggagtcgagcacagaagccctgtcgcaggggccggactcccttgtttacatcttgtttcgctgttcctttcactgttcgcatgatgatataccaatcatagagtcaagccctgaaatccctactacggtaaggggttgttgacgataaacgattgttttcatatctggaagaccatcattcttggacactattagagagatatcttctaattcta

SEQ ID NO: 3041 - DNA, 510 bp, Aspergillus oryzae
  modified_base (46)..(46): n is a, c, g, or t
  modified_base (192)..(192): n is a, c, g, or t
  modified_base (257)..(257): n is a, c, g, or t
gtaagacagggttggaggagaacatgttgatgaatctgcataagcntgtttggacggaagccttgcagatgaaggatttccatgaggaaggcgagcacaacgtcgaccgcatgaagcagctcgtcagcctcgccgagggctacgaaaagcgagttaaagaagaaacggaactcagcaaggagcagctcaagncaagatatgtcggaaaggtcgatcccaagaagcacatcgaggatgtaagtcagcagttgattgancataatattgtcgcagtctcgcggcagatgatcgataaggaagcctcagttgccaggcaatcaaatggaaaaggcgctcaaaacggtgccagtatggaggtggatgaagacctatagatgattagtgagtattatgaggagtatcataatatctgttcctgcaacatgagatacaggacagtagtcctgtctcgcaggggcagccatcatgcacggaaacaattataaatgaatgacgtttcaacttgtaaaa

SEQ ID NO: 3042 - DNA, 239 bp, Aspergillus oryzae
ggaaactgaaaatgtcttctttggtttcttgcttctttgcctctctcgggttggattatattctgatataccttggactaacgtgtacatgaagtcttgggatttggccttccaccttgggttgaggatggaccagtgttattatacgataaattgtcgagtattagaatgtggatttaccgacttctttcctgctctcaggagggagtggtattccttatgttacgctcttgaaaaaa

SEQ ID NO: 3043 - DNA, 574 bp, Aspergillus oryzae
atttgcgggttattcgccgcagttgtgaacatgatattggacgtcgcgcaattttggaaagaaaggttattgtcatggtggagatcgaaatcgcccctcagcagactgcgataccgtctagctaacgctcaaacgtacgaagaatgggaggaagctgccttcgagttggatgagcttctgagtatggatctgtggcgccaaaacccaacaagccgtcattatgattatcgactcattctgggccgactggaggccttgatgagtgctcgagaggacgaagatatcctgacgttggtcaacctccttcggtccggactcgtccgcaatctaggcaacatcacctctcccagactgtcgctccacgcttatgctggtacaaagctcctcatagacgattatatcacccaggttgcactttccatccagcatgtgacagctctgcatacggccactgtttctgaaggtagatttagactcccaagctaaattggagctactacacgacacccggcaggcctttggcagaacaacgctccttctgcaaggcgggtccatctttggctatggcatttgg

SEQ ID NO: 3044 - DNA, 612 bp, Aspergillus oryzae
ctccaatcctctagtgtgactgaagaaatcccaagcttgaggctttggcacgtctaacgagtccccatgcatcctgttgacattaaattggcgctgctatccgcatttcgcatccaagccgagtgtttcaacctttcaaccgtgtcaattggtcgaatccttgaaataccgcaatgcgtcttataaatgtacaaacctttgcgctggaggagttcttcaacgagcaagtccctccttacgccatactttcacatacgtggggaaatgatgaagatgaagtgtcatttcgcgatattaccgagagaaataccggggatgccagctggccagttaaattcaagggctgttgcgaacgtgcagaaaaggatggctttacacatgcatggatcgacacctgttgtattgacaagaccaactcagtcgaactcggtgaagccatcaattctatgttccgatggtatagcaatgcctctgtttgctatgtctatttctccgatgttactaccgacgatcgcaaacagttaccctctcaaatatcctccagccggtggtttcaacggggttggacattgcagagcttctagcaccgagtcgtcttcctttctttaaatt

SEQ ID NO: 3045 - DNA, 647 bp, Aspergillus oryzae
aatgggaaagtcattcgatttccatacttcactggtgctgcagcaatggagtctgctgaatgaattgcttcgcggtgctgccgacgatctggtcctcaatggcaccggactagatattcctcatgtggtttatattgccaggtatgcaggcaatgtgagtatagatcctgcttcttacgaatcaatcaatcaaagccaggctgccattgccaagagcctttccaaaggcgatgttatctacggagtgaatactggatttggaggctctgcggatatccgcgcaaacgacgtcttagcactccagcgcgtcttaacccgcgagctgagctatggcgtcttacccccgggtgcgcgtgatcctcgccctccgtccgaccgccagaagtccgcatatcaggcgtttgacctgagtctcgaacatgcagccgagtctcagcacctgccccttccctgggtgcgcgctgcggtcttactgcgtctgaactcgctggtcaaaggccattcgggcgtgaggcctggtatcgtggaccgtctacgggatcttctagtgaagaatattatccctatggttcccatgcgtgggagtatctcagcctctggggatttgagtcctatcgctatatcagcggcgtacttcagggaaagcc

SEQ ID NO: 3046 - DNA, 546 bp, Aspergillus oryzae
cttcaggctgtctctctctcttctctttttatatatcgatcggtcggtctcttcataggtctttccttatcgtattctctctattaattgatcgatttgattatcactgaattaatttttttccccgtccaatattgtcttaccgtgcatcactgccgccgctccatacttcggaaggtgatccatcaggttgacacgacaacctctacattcctcttactcctgctggcaggaattttcgcgactctaccaaatatatttacgttttacattccttagattttgtctacaaggcaaacattgcctctttttatccgttgctctcgctctgttctgttcccctctttccctcgactaaatgcacaccatgacctaccctccgttctataccaccaccacaatggaacaagtcagccaacctgatcaaatgaaccacttccaacatctcaatcgaattgctctccatgagtttgttcgactgccagtctctcgtgagatggtggcgcatttggcgatgcaagcatcgcaggtcatccgctgcgagcc

SEQ ID NO: 3047 - DNA, 456 bp, Aspergillus oryzae
cgcccacgttctttccctaccattgttcaatcatattccaaccacaatgggtggaggcggcaagatcccgtatcccaaggaagtctggtctcccgctggaggctggtacgctcagcccgcgaactggagggccaacactgctattatgggagcggtcgtgattggcattgctgctgtgacatggagcattagtgccgaccgggaacgccgtgacaggatgccagaacccggcagattcttccccagtcgctactggagcaaacagatcatcgaacacgagagacagcaagctgcgaagcaggattcataaagggggagcatgggctacaatgaaacccttcggaaggtttatatggcatgataggtataagtttcatattattgtgggctgtacgacaatagaagggcgttcttcaatcggtcaattgatctgcaagtgcttccggggagaaaaaa

SEQ ID NO: 3048 - DNA, 657 bp, Aspergillus oryzae
gagaagggctcccagggcctcactcgcgctctgctgggattcaatcccagtcagctgtcttggcagctgggtgcgggcgagacacttacctcgccggaatgtgtttcagtctactcaagtgacggcatcggcggcatgtctcgttcattccatcgcctctaccgcaaccacctgatcaagagcaagttcgccacatcggatcgcccgccgctgctgaacagctgggagggtctgtatttcgactacaatgagagcacaatctaccgcttggctgaggagtcggccgccttgggagtgaaactgttcgttatggacgacggttggttcggcgacaagtacccccgtgtatcggataacgccggtctgggtgactgggtgcctaacccggaccgctttcctgatggcctaacccccctggtggaagatgtcacgaagctgaaggcaggaaactcctcaaccgacctccgctttggcctctgggttgaaccagaaatggccaaccccaactcgaccctgtaccatgagcaccctgactgggtgcttcatgccggccaatacccacgcaccttgcaacgcaaccagctcgtgctcaaccttgctttgcctgaggtgcaggactatatcatcgatgagattaccaacatcttaacagcttgg

SEQ ID NO: 3049 - DNA, 468 bp, Aspergillus oryzae
aaaactttccattattgttcgtgtataaatccggtctcctaattctgtctttttttgtcgagtgcgccaaagcaaattccacagccttgtcgtgcgatgagccgaggacgctcccccagtataacccccaatcaggttattgagggcaaatatatgaatccgaagaagctcgttaaattgttaagaaatgaatatgggcaagctaattttcgggtcgagttacgcctggatcaatataagatatacgtgttggaccaagaacgagcacgctctccgggactgactcaggtttgagctttgtgggtgactgcgtgataggaattactaaacttttacacaggagcaaatcaatgagtgtcgagtatggtattagaagattttcatatcaatacgttgtacaataaacatcaaacggggaccaacgaaaagcgctacgcaatggggaagatggtggggtagggtgagggg

SEQ ID NO: 3050 - DNA, 623 bp, Aspergillus oryzae
gcttcgattacttcgaagctctgaaatacacgtgcgtttgtgagataaacctggaattaactgaataactgaatccccacagcaaggagatcgcccatgcattgaacaaagctctgtggatgggttgtttacgtgaatatttcacgcctatacatcgtttttgtttaggacaccccacctacgtggcttgaatataggcactcgatcttacccctcctcacttgtttccccaaacacctgcgtgccatctcttacaactcaactcaacctagtgccggcatagtaatgtttgtaccctgggcttagtcccacaatgccatgctcatcgactgcttggtatacacctgtaggccaggtgtattgtaccgcgttactatatccatcccatcaaaagtctacggcttgtcgaaatgatggggcgcagctctgaggatgaagcacctcatgatctgcagtcggacgtagtttctcggtggacacaatccgatctaggacccgcgagagaggacaaggaaggtgccttgaagagcgatggtatcgagcaaatgccgccggattcagcattgggactactatgcgtctatatcgaactgctcgctaagcagactattgacgacccggac

SEQ ID NO: 3051 - DNA, 615 bp, Aspergillus oryzae
ttcttccttttttagtattattcactcctttctttcttaaccgacaaactagacgtttgttttcctttcattattttttatttgtcttttgtccaagatgaagctcaaccttgcctctctttcctttctcgcgagtatcgccccgctggtttcgggtcattatgtgttttcgaagttgattgtcgacggacagacaaccaaggatttcgaatacatccgcgagaatagcaatgggtaccaaccaacactggcttctgaaatcgtgaacaacgacttccgctgcaacaaaggttccatggactctgcggccaagacaaaggtctataccgtcgctcctggtgcagagatcggttttcagctcgcctatggtgcttcgatgaagcaccctgggcctctgcaaatctacatgtccaaggcacccggcgatgtcaagacctacgacggatcgggggattggttcaaggtataccaggagggtgtctgcgaagacatttccgatggcttgaaggataccgactggtgcacttggggtaaggacactgcgtccttcaagatccccaaggatactccgccggtcaatatcttgtccgtgttgagcacattggcccttcatcg

SEQ ID NO: 3052 - DNA, 659 bp, Aspergillus oryzae
gagaaaactatcttcacgcacgacgtcaaggaaaggtttctcaaatcggccacggtcggatggcagtctgatttgcaaagctatcacgccaactccgtgagtcacatggacggcgatgtcaaaccctttttgtccaatactcccttcactttacaacaacaacaccataaccaccaccataatcaggcaggctggtatcagcctgagctcattccttgcgaatggcagtcactgcagaacaagcgtcataggcggaaccttaggcgcgtgagctccgatgtccgtcgtgattcggactcggattctcctggcgcaacgatcaggtggacggcacttcgacttgggcaaaagaatcttttaaggacttactatgaaaaagcatttgagaacttccaacagctcaactgcagagcaattgcaaaggccttcgtcaaactagtcgagccgcgcaagcaagtcaaccacccatacaatggacgaaagactaccgcaggatcgtctcagcgagtagatccagaattgacgaagccaaaatggtggccgacaggtgtcacacatagggagcccgatcatctcctgaagctgaacgaattcgtctccttgtacacattttgtgcgaattgaaagatagtcatgggataccagcgattaacctcaag

SEQ ID NO: 3053 - DNA, 569 bp, Aspergillus oryzae
ttccttattgagaatccaaactactgcaaatcagggatcaagtcctatgtgcatctaatacgcaaataccgcttgcaccccaccaaaaatggtccctattccatcggtcgagctatccatcagactggccggcccttcactgacaagcctatcggcggtcgagttcgttttcacgacgtgatgcgaaaacaaacctcggacgatcaactccagcaagttgagaaggatgatatccaaaacgatgcagcgttctttatgcccgtgagcatcggaaccccggctcaaactttcaacctagttttggatacagcgtctgttgatttttgggtgcgatctagtgagctccctgcagatacactacccaagggtgaagaggagagccatacctttgatcctgaaaaatcgagcacattcaaaaacatcgaagattcgccatggaaggttacctacgtggacggttcttcagtgtctggttccatcggtacagaagacatcaccattggaggagtggccttcaagacacaacccgtacagcttgccaaaccatgtcaccaatgtttacacaattc

SEQ ID NO: 3054 - DNA, 663 bp, Aspergillus oryzae
cggacgcgtgggtcttgacaagcgcccagccatcctccatccgctgcttgactaccctaagctcctcggtcttggcaataatgagccccttctgcttggcgatcacgccttcgcactggtcaatcatgttccacagatcaatctcgcgcggcgtcgggggcatccctcggagctgtgtctcgtggccggtggagtccactctcgagactgcaggctgcagcttggcggcacgtcggggagggacggccttagcgagagtgtactaggaaagcgccgccaggatggcacacaagacactggtagtgacgaaagcaaggatgaagaggtggtggaactcgccttcaatcaggcgtggcagctgccagtcgtctcgaattatcgcacgcaactctaagccgctctcttgaccgaagcagaagactacttcgagccagtcgcgtcggttcagcttcccttgttcgaaccgtccgaagacgtcgaaacagtggtacgaaagctcctcttgtggcaagctcacagccatgacgagaccgaagacgtgtcaagctgcagggagaaacagaccgtaaacggttgttgcgcagatgaacgacagagacaatcgacacactgttgccagggggcgattgaacgggaagtaccagttcacttacgacgcagacg

SEQ ID NO: 3055 - DNA, 587 bp, Aspergillus oryzae
tcgacccacgcgtccgcagcgaagctttcccctcccacccctcattgaatgtcaagagtgcgcttgatcgtctggcctcacgacagatggtcgaatatgaaacaattgagcgtgaagtcgccgcactgaccaaggaaggtgaagaaatcgccgccaatggtagtcatgaagccaaggttttccaggccgttgtggctgctatggaggggttgaagatcggtgacttgcctggtattgttggaaaggacaacgccaaagttggtcagggaaatgctttcaagaggggctggatcaagaaggatggacaattgctgcgggcaaacactgactcgatcgtggacgagacccgtgagcagttgttgactgtcaagaagactcagaccctggaggaccagaaggccctcggtgatttgaaacgtcgaaagttggtcgccttccagaaggagcttaacttcaagatctccaaggggcccaagttcgccaaggagtttgttaaggaggagaccgaccttactgctgagatgctcatgaacggctcgtggaagacggctcaacttaagccctacaacttcaaggctaagggtgct

SEQ ID NO: 3056 - DNA, 665 bp, Aspergillus oryzae
ctcgcatgatctctcatttgaacgctctctgaatcatgggctcgacgcaatttgggaagttccacgacttctgtcgagattctacattaccagtctgcaatcttttcgttgacaagaaccaaccccctaatgctgccttcggtggttgtccgctcacaggcattacccttagcggtaatcgaaatctgggaaatctgggctctatcttacttgccttcattgccatcctgacatcgcttttgctgctatggagatctgagcgaaaacaggcagcagtcgggagaagagagatacagctgttcttactcggcttcatcgttatcgaaatctgcgaaatctttagcgttggtgctttccctctcgacgcagcggtccggaaaggattttctgcagcgcacatcgccgcgattaccgctacatgttgggtactgttgttaaacgccttggtgggctaccaatttctcgatgatggcacgcctgcgtcgctcggtctcatctcagcatccgccttggttttcttcattggcactggctatattgctttggatacggggttcaactggaccggcgagttcaagcctgacccgtcaaccgagtaccgaaacattgctctctatgtgctgtaccaacttttcccactcgtttgtctggtggtattctcgttt

SEQ ID NO: 3057 - DNA, 671 bp, Aspergillus oryzae
tcgacccacgcgtccgcggacgcgtggggctaaattttccgctttaccatgagcgattcagcttcgaaatccgcaaagggagtcatgccggacacaaaggccctggaagaagggccccggagggccgatggtgtctctcagctatatgagggcaatgtcttcgacgcaacacctgaagaccgccggcaaattggcgtggttagcgcctcgttcctgatcttcaacagagtcattggaactggtatctttgctacgccaagtactatcctgtcgttggccggtagtgttggactttccctgttcatgtgggtgattggcactgtcattgccatggccggtaccgccgtgtacctggaatggggtactgctatcccgaagaacggtggtgaaaagaactatcttgaatatgtcttcaagaagcccaagttcctcataacatgcatgtatgcttcttacgtcatgttacttggctgggctgcgagcaacagtgtggtgttcggcgagtacatcctcaatgccgctgatgtcgaggtcgaccgttggaaccaacgtggcattgggttggcctgtatctctgctgctttcctcattcatgccttcgccttgaagtggggtcttcatctccaaacttccttggtgtggtcaagcttgtcatcatcgtgttcgtcgtc

SEQ ID NO: 3058 - DNA, 663 bp, Aspergillus oryzae
gtttaatcaccgtctctaaggcccttcaatgctaagtttcgatataagtctcgttcatgcttgcacttgaaagcgtgacgcggtcgacttacagggacacaagcagtccaatatccgcctgttttgctgccaagtaagaagacaaacaacatcagctaagctgcgcgccgagtgagctgaggcctggggcaccccccgtgtcagttcagcaaaaaggtggatctgactgctgcacctcgaccctcttgttgctgtgacgaaaggactcatggctggagagactaccgccgccaattattcccccgacctcaccgccccctcattacctgcaccttacagactagacgagggttactcggacgaaactagaagccaggtggacaaggaacttgcggacctgccctcggatgatgtgatgcctctccccgattggcttctagcgaatagcgaagaagatagggctgagattgcctacagtttattacgcacactacccacttctaccgtggccgcggttgtcgaccgccttgcgcctgtgttgcacatggatcccgttgtcaagctcccccccgagatcacctccgagatcttctcctaccttgagcccaagactctcttgacagcttcattggcatctcgtgcctggcgggccgtataaattga

SEQ ID NO: 3059 - DNA, 664 bp, Aspergillus oryzae
cccccacgaaatataatctcctcgttcctctctcacttgccttctcgtgggtcgtgactatctatcttcctttaccctgctcggactaaatggcgaccatgtcgcccatgaccaaggccgcttaactgcgcgttccccttgtcctaactacggcatttgtctctcatccccatcaccagatcccgccgaccacaccttgaactcaacgattaatatactaccctaaacgctcactgaaagcagcagtgggcacctggcacgccgtgcaactggtcggcagcagaatgctggttttgacacccagattaattacagagtctagttaatatatgtgatgggctgtgtccgattaaacggtggaaatgcctccaagccaaggcactgctgggcgcaaaaaggacgccattcatttcgtcaatgctcgaccgtcctcggagagagagcgattaaagatacagcgtttggttagggcccatgtaggcaaatggatttcccaccaaaccaaggatcgctccatagaatccgaagcgaattcgagccgtgatgcacctcgggagaatgcgtcacgcactgttgatctcgatggagatgagccgatgttaaatatatacccaccttcgctgtcctctcgatcatcagcctcgtcttggtcgctgaataagtt

SEQ ID NO: 3060 - DNA, 626 bp, Aspergillus oryzae
cggattttagccagtaattcatgatggtgggcttcgtacacacattgttgttaaggctttggcgtcgactagagaaggttctggcctgtacaggctcggtgtccctagacgatgaggtttacctgttgaatcgcagtcccaaggaatctgccagactcaatgcccagcataacttcctcgtcgacttaattgggggtaaacccatccatcctgcaatcccgatagagaatatcacggctatagcagacgttgcaacggggactgggatatggctttcgtccctcatcacggcccccaaagtgcatcctaccgatcgtctctatctccacggcttcgatatctcctccgcccaatacccattctccaaggatattgcacccactcatgaacttcatctctccactcatgacatgcgcaatcggtttcccccaaagcacagaggccgatatgatttagtacacctccggctcctcgtcggtgccctcaggaagaagattatcttcagtcgatgcgtaacatatttgagctgctgaaaccaggaggctatctccaatgggatgactgcgacacaactgcgttctctaccgcggaatcatcgcccgatccgttcattctccggatgcagg

SEQ ID NO: 3061 - DNA, 651 bp, Aspergillus oryzae
ccgacgacaacagcaaactatattacgaaacccatcaatgtcgtctgcaggaaggtcaacccttgaaacgaggagtcaccgctcgagtggtgtacccacgatatcagaactagacttcctcaataccgatcctatggttagccaagtccgaaaaccgtctcagagggcacgtctccagcagagccagcagaaccgcagaagccgagttatagccgtgacaaggcaagaagagcacctactagaagcaatgaggcaacggaaaggcaaaataacccccagccttttccatgaagctcgttaccaagatagtctcgagcctgatagaaattctatgctctctgtgccttcgcgggactcattctacgggtccgacatctccttccttcgactcagccctggactacctcctaatatgctacggaaagatcaaggtgcaaacaattttgataaagacggttccatttctcagggcacggcttctgatgcagaacagaaaaccactaactcgagcgcgtctcctcgtgttagcttgatctattcggaaagtcttccctcgccagcaaccagtggagcttccccttgacaccgactcttcctatacatcgcttttctccggtccatcacaaaagccggcttcacgcaacccccttc

SEQ ID NO: 3062 - DNA, 612 bp, Aspergillus oryzae
cagttcgtcgtcaaaccacgcctcggttccttggcgctctgcggagcagctccatcactctaggggatgagcccatgactcgaacgctttgatactcccactcgttctatctggcggattgatctacaatcataaagccgctcgtttgtcgcttgccgttggtgaacgttcggaccactcctgtctcggcctttatcaattgacctagtatcagcggaatacatgcgtccatctgatctgtaacccctttacgtggcagttctccaagcaccatcgatactacatttggtcgaccgtctatgccactgcccataccgtcagcttcaaactgctctgagtttcgcattgttcccccaacgaatatcaccatgaatcgattccgcaaggccaagaaggagaagacgaaggaggatgtggaagccatcgagaacacccacaatttactcacctccaagttgtccaagcgaagcaaaaaggatgagcccgaggaaaagcccgaactcgacctatcgaatgccttaccatcgaatgatgacttccgcacgagtttactcatgccaaaattatcggcgcggtttaacatgttgagggaacagacgacccggcctcgat

SEQ ID NO: 3063 - DNA, 630 bp, Aspergillus oryzae
aaaagaactgcggtttgcctgcaagttcctcgtcgattcatctttatatccttagaatatccctaactcagtttccctcactctcaatatgcccgtcgttgcaggtcctcctcaggcccacggcccctctaccttcgacaagatgaagatgggtgctatgatgggatcaaccgtcggcggtatcatgggcttcatcatcggaactgtcaccatcttccagtacggtgccggacccaacggtgttatgcggaccttgggtaaatacatgcttggctctggcgcgacttttggtctcttcatgtccattggcagcgtcatccgtaccgaaggacctcacaacgatgcctggctccgcgctcggggacccccgatgatgcttcctcgtcaaagccctctgcggcccatgcgtcagtagctgcgcagtcaccgacttgtagcggaatggtgggaatgtgaaacttcccacgggttatctgtacaatagtatttatcctgacgaacaatctgtatggccgacggggcacaggcggtcgacagttaatgcaggagaggggatgaaaggaagcagggatgatctctgcataatgtacatacagtctgggcattgggacggactgaagacatttttgg

SEQ ID NO: 3064 - DNA, 287 bp, Aspergillus oryzae
caccgcggtacctcccttcctattattcccttctctaccgcattggatctggttgatctactttttgcagcgtcttagattcgagacgtctcatcgtaaaactaacctagcattggaacagtcttaaaggaaagacctcccatccatccattcgggcttgggtgtcttttgtcaaccctgcaatagagaagatttttcctttttttatctttacatcaagacccactagcagttcataataaatttatttaatataccaaaaaaaaaaaaaaaaaaaaaaaaaaaaa

SEQ ID NO: 3065 - DNA, 632 bp, Aspergillus oryzae
ccgagattcacggatgtttatcaacgggtaaagaagctaacgtatactactctatgttgttcccggatgaggaggatgccagccccattcaccgggcaatcaaagtctacaagaccagtattttggtcttcaaagacagagataagtacgtcactggcgagttcagattcagacaaggctacagcaagagcaacaaccgggcgatggtgaaactatgggccgagaaggaaatgcgcaacctccgaagaatccatgcggccggaattccttgcccagacccggtctacctgcgacttcatgtcctcgtcatggcattcctcggtaactccaagggaattgcatcgcctcgtctcaaggacgtcgaattcgatatccccaaccccgagacccgctggcgtgagctctacatcgatctacttggctacatgcgcgtgatgtaccagacatgtccgctggttcacgcagatcttgagcgagtacaacatgctttaccacaagaaaaagctccatatcatcgatgtcagtcagagtgtcgagcatgaccaccctcggagtcttgaattcctgcgtatggatatcaagaacatcagcgactttttccgtcgtaaatccgtcgatgtcttgcctgagcg

SEQ ID NO: 3066 - DNA, 613 bp, Aspergillus oryzae
ttccctcccaaaattcctggtctatctacttttcaaacaccacctctcacaatgaatattgccaccacttgcaactcttggtccattgagcatcacaggctcgaagaagaaaggcgatgggttactgatctccactgcaaggccaagaaagacaatggggaatggatctctactcaactccgactggatgacattctggggaacgatgatgggaacttcaagtatagtttgaggtatcccgaaaggaacatttcctcgtcaatgagcaatccccgactggaggtaacaggagacggtcgaccgattcttcacggccgccttaccacccgggatgcttatggtcatgacagaagtcttgatttatctaaaattctgtggaataaagatggtcgactatctctcaatgaggacgtggttcgcgcggaagacgatagaagaagggaagaggcaaggcagaaaatgctcgaaaagcgcgtcgcaaccccaaactgatggaacggttgaggcgccagggaaagctttgagaattgacggaaaggcaaggtcatatttgctatacatcgtgtcagcaaatctatttcatgacgatgttatggacacagcagctagttca

SEQ ID NO: 3067 - DNA, 611 bp, Aspergillus oryzae
cgattcgattcatttctacttcatatctgttcgatatgagcccatcctcggctgcgctatattcaattttgatcccacaatccacgacctgaacactatcgtcaatctttccatgtactccgcataattccccactttgactacagctttccccagctggactgaatcctgacactgcaatttttcttggacaaaatgcccgagtacgcggtgtcatataaccctgagttggatacctattccctttaccagcgatacgaagaaccccgaccgaacaaagactggaaaacagccgccctccgtggcccagctcttccagctcttgggaatgcagccgctggtgccgtgggagcggctatatcgaatgtcgctacgtacccgctaagtcttatcattgcccgactgcaaacacagaaccaacgcaaccccaaaaagacagcgaagactaaggccaagggtgaaggggaggagacggaaggtcaggacaaagacacggaagacagtaatgaagaggaggaggaagaatacaccggcattctcgacacagcacgcaaaatctacgccaaagaaggacttggaaacttgtacaccggtcttgctcaagacacaat

SEQ ID NO: 3068 - DNA, 485 bp, Aspergillus oryzae
gaaaatctccatttccttccagctgggcgtcatcgccttcgcagcagctcatatcgcctatatcctggccttcttccaggataacgagaccatctcgtggggaaccttcgcgacaacattcctcgtaacaatggcaggtcgcaaaatggcttggcgtaatctatccaccaccgcattcctcggctcgaagtaatgtgctcgatctcgatcttcctgcggatatgaaaccgttggtcctggtatatgctaccatcatcagcgtgatgtttgctactgcagcttcgacaactccggtagatgtttcgtcccgctggcagtatcagcgagtgtttggtgcggcaatgttcgttgctagcgacgtttacgttgcgaaggatgcgttcaagaaatcacctggaagccggggttgggttcagagtacttttgggtatgggttgtatttttgggggcagatggttatcgcggggttggtgtagggttgattg

SEQ ID NO: 3069 - DNA, 565 bp, Aspergillus oryzae
gttaaatgtgcgataaaacgcgttggatatcaacgggtctgtgtaagtttatgccataaacaaccctccgttcaccatgaggtccatgcttggcctggaagaaactgcttcttggttccccatcacctgcatgatgaagtcgttaggcactcgatgtgaaccttcacgcccaaagcgcgtagtcagggaaatatttatcgtgaatctgccgagcataatccaccaccaccggatattctcgaataagtttctgcgtattcggcgccctacagccaacgaaacagcatcagcaacgtatcacgcaagggacacagaataaagaggaagaggaagaggaagaggaaaagaaaaacatacgcataacaaaccaacccggaaacaataaacccaaaaagcgccgcatcagcctcagtaggttcctcaccacccaaaacccagaacggaccctgtcctccatgtcgcgatctcgcctcaacaagcgcaccattgatacgctcccagatctcggcgcccaaggacccgatctcctccgtcgagaagagcatcgtcccctggcccggtaaga

SEQ ID NO: 3070 - DNA, 605 bp, Aspergillus oryzae
ctttgatcaagactgagatgtttaagaaggatcagctggctcacgttcgcgccgaacgtgatatcttggctgactccaaggataacccatggcttgtgaagttgcacgcttcgttccaggactccgcatacctctacctgttgatggagttcttacctggtggtgacctgatgaccatgttaatcaagtacgaaattttctccgaagacattactagattctacatggcagagattgtgatggctatcgaagcagtccacaaactaggcttccttcatcgtgatattaagcctgacaatattcttctcgaccgtggtggtcatgttaagcttaccgatttcggtctctcgactggtggcaagaagactcacgacaattcgtactatcaaaacttgttgaaaaattctacctccaaggataagaaccgtaactcgggatactttaacgatgcgattaacctgacggtatcaaaccgtggccaaattaatacctggagaaagtcccgtcgagccatggcttattcaacggttggcacgcctgactacattgcgcctgaaatcttcaacggccaaggatatacttatctttgcgattggtggtcagtc

SEQ ID NO: 3071 - DNA, 510 bp, Aspergillus oryzae
gtgaactatgatgcgccgaaccatctcgaagactatgtccaccgtgctggacgaactggccgagctggtaatactggtacggcggttacgttcctgaccgaagaccaggagcggtattccgttgatattgctaaggcgttgaagcagagtggacagtccgtgccggagcctgtgcagaagatggttgactccttcttagagaaggtcaaagcaggcaaagaaaaagccagtgcgtctggtttcggtggaaagggtctggagcgccttgatcaggagcgagatgctgctcgtatgcgtgagcgcaagacatacaagactggcgacgagggcgaagaagaggaagaaaaggaagagaagaacgacgaaggccgaagaacagttcaataaggttctctcatcggttcaatccgccgctgcgccaagcctacctggcgttcctaagggcattgatctggacggcaagatcaccgtgcacaagactgaaaaggacgccaatggttcgaagaaccc

SEQ ID NO: 3072 - DNA, 622 bp, Aspergillus oryzae
ctgagcttcaaactcttttttagtaaagaggcttctcctgatcacaagagacctcttctttcccctttacaagaatcgaccttcttcctctcctccacttgactactaccaccttacttcctcttctacatattcttctcctccactaccgaccttactttctacctacattctactcttattctttttttataaacttcttcatcgtctattaccgttacatccaatcatctggactccctccctcatctctacttgtcctcatttcatcatcaatccaaccacccaaataaaaaaccccgcacgttttttccgtacaatcggattacacaccgcctcttgactactatcacggcgcttgtctccaaacaacctttttcattcttcatttctatcatatacacacatattcacagtcatggcaaggtattctcaaccgtcatttgacttctaccaacaatctccttcaaatttggacgcaaagccttcatttcccgaggaagacgagatgagtgtattggatgataagattctcgactcgacgtcgcccgaactttcatcttccattgccggccaccggcgttcttcatatgatcatgcaccggacgctttctcacatcgg

SEQ ID NO: 3073 - DNA, 637 bp, Aspergillus oryzae
tcgacccacgcgtccggctcgtttcgatcggtactcacgacttggatacgatacaaggacctttcacctacgaggccttgcctcctaaagacatcaaatttgttcctttgaaccagacccaggaaatgaacggagaggagttgatggccttctacgagaaagacaagcacctgggtagatccttcacattattcgcgactcccctgtctaccccgtcatctacgattcgaagcggacagtttgctccctgcctcccatcatcaacggcgaccattctaagatcaccctggacactaagaacgttttcatcgagattactgccctcgacaagacgaaggttgagattgtcaacaagatgatggttgcgatgttctcccaatatacttcggagcctttcacgattgagccagttcaaattgtctccgaccacaacggcgagaccagaatcacgccagatatgtcttctcgtacaactcaggccgaggtctcctaccttaaccagtgctgcggcttgaacctctctgcagaggaaatcgcgaagatcctgacgaagatggcctataccgctagaccctccgagaatccgccgacctgatcgacgtggacatcccacctactcgtgctgatgccctccacc

SEQ ID NO: 3074 - DNA, 596 bp, Aspergillus oryzae
acccagtatgtctcagccacatgcgtcaggcaacaccaaaatattgtttggttgataacacttcggactgcaaccgtatcactgaactttagcacttcgcctattaagaatggcttcggagctagacctcacatctacattcattccatcactgtacaaaccccctgctctactgccaatcgcaagatacaggcaaaatttactgtaccttgttgacacatatcccgttacgattgttgttgggcaaaccggaagtgggaagacgacacaactaccccagtatctagaccaggcaggatggtgcgcagatggaaagtctatagcagtaactcagccgcgccgcgtcgcagccacgactgtcgcagctcgcgtggctgaggaaatgcattgcagcgttggcgaggaggtgggctattctatccgctttgaggacttgacctctgcatcaacaaggataaagttcctaacagacggaatgctacttagagaggcccttgtagacccgctgttgtcacgctattcagtaatcatggtggatgaagcacatgagaggtctctcagcactgacatactcttggggatccttaaaaaattct

SEQ ID NO: 3075 - DNA, 624 bp, Aspergillus oryzae
caaggatttctaccacaccagcgctgccagccttgaggttaagtccaaggctcccaatggcgtcaccttcaacgtgaagggcaagaacgcccacgagggtcccatcgctggctctctcgaggccaagtacgtcgacaagcctactggcctcaccctcacccaggcatggaccactgccaacgccctcgacaccaagctcgagctcgacaacaacattgccaacggtctcaaggccgagatcctcacccagtaccagccttccaagcagtccaagggtgctaaggtcaaccttcacttcaagcagcccaacctgcacgcccgtgccttcttcgacctcctgaacggcccctccgccaacttcgacgctgtccttggccacgagggcttcctcgttggtgctgagggtggctacgacgtccagaaggctgccatcaccaagtactccgctgccattggctacagcgttccccagtactccgctgccatcaccgctagcaacaacctgtccgtcttcgctgccagctactaccaccgcgtcaacgctcaggttgaggctggtgctaaggctacctgggactccaagaccggcaactctgtcggccttgaggttgccagcaagtacag

SEQ ID NO: 3076 - DNA, 525 bp, Aspergillus oryzae
ggctgatatatgagtatttccaatgtgatctctggtactgttcgaggagttccgccatataaatatcaagcatcacatcagccccacatcgaaggacaaggctgactggccttaatctcaggtagccagctcgtttctttcacaatggccacacaagccgatactaaatctaggagtcacaatgaatataccgtggcatggatttgcacgctcctcaaggagcacactgcagcaacgagcatgctggaccagagacatccaagtcttccacaaccatctaacgaccccaacacatacaccttaggatccattggcaagcacaacattgtcataacctgtttgccgagaggcaggtacggcactaattcagccgcaactgtcgctatccagatggtacggacattcccatccatcaaagttggcctcatggttggcatcggcggtggtatcccgcccaaggtccgactcggtgatgtagtggttagcacgcccgtgggtgagtttccaggtgtagtccagtgggat

SEQ ID NO: 3077 - DNA, 438 bp, Aspergillus oryzae
  modified_base (24)..(24): n is a, c, g, or t
  modified_base (263)..(263): n is a, c, g, or t
  modified_base (310)..(311): n is a, c, g, or t
  modified_base (410)..(410): n is a, c, g, or t
ccgattacggtaatcccaaccgtnataccacgtcttttctctatgaatgcatgtgtatgatacacccgctattttgtttgcatacgatcggaaggcttacggtctgccctcctttcgtggttcttttgttttcgttttttttttttttttttttttcgtgttcatgtcaggcgtttgaaactcacctctcacctttcactatatcacattatacctgtataatacatgcaatgatccggtcttgtcatcctacaaaaaacggnggtctaattggcaatttcttggatatgagctacttgcacggcattgnncctgagttttcctttcgtttccttgcttgtccgttgggctgggttgtttcggtaacgggtcacgatgatctacattaatagatgattgactggatcggncattactacgctttcggaaaaaaaaaaa

SEQ ID NO: 3078 - DNA, 478 bp, Aspergillus oryzae
ctgtcttacaacaaccccaatcacttatttatcaaacacgaagcatagatccaagttcacacataagtccgttatggctacttctgagattccacagaagcaaaaggcggtcgtctatgaccagcctggaactgtgtcaaccaaagtggtagagctagacgttcccgagcctggggcaggcgaggtgctgatcaatctgtcccattccggcgtatgccattcggactacagtgtcatgacaaactcttggagctggcttccacacccaacacagcccggacaagttggtggtcatgaaggtgtcggtaagattgtgaagctcgggtctggaaccgaatcctctggccttaaggtcggagacagggtgggaatcaagtggctttccagtgcttgcacgaactgtcaaccatgtcaggctggtgcggaaggactttgcgtcaatcagaaggtttctggatactatacccctggcactttt

SEQ ID NO: 3079 - DNA, 604 bp, Aspergillus oryzae
  modified_base (208)..(210): n is a, c, g, or t
  modified_base (215)..(217): n is a, c, g, or t
gtggtagtatgtctttcttcggaaacctcggcgatacctcaattcgcatcatatgatcgtgctgaccgcgtgattgaaccagaacccagaaaggtcctgaaccctaccgagttccagaaccttgtcttgaaggagaagaatgagatctctcacaacgtcgctatctatcgctttgccctgcctcgccccaccgacatcttgggtctgnnntcggnnnacacatctctctcgccgctaccattgaaggccagcccaaggaggttgtgcgctcttacacccccatctcctccgacaatgaggctggatactttgatctcctcgtcaaggcctaccctcagggtaacatttccaagtacctgaccaccctgaagatcggcgacaacatgaaggtgcgcggccccaagggtgccatggtgtacaccccgaacatgtgccgtcacattggtatgatcgccggaggaaccggtatcaccccatgctgcagatcatcaaggccatcatccgcaaccgcccccgcaacggtggtaatgacaccacccaggtggacctgatctttgccaacgtcaaccccgaggatatcctgctgaaggaagaactggagcag

SEQ ID NO: 3080 - DNA, 648 bp, Aspergillus oryzae
  modified_base (358)..(358): n is a, c, g, or t
gtcgaccatcgcgtccggagatatttctctctctttccttctattcatatcatctttgatatctccataccccagttgttgacagtcccaccccggtgacgtgtcgattgcatggcttgtaccaagacgtagagtgacttttcacttctcgttctttctcgcgattctctgataagcttccatgccgaaggggctgttcttgcttttgtttttgatcaattagatccaaggtagcagaggaaagttctaaacaaaagaataaagcaagaaggatttccctctcgtctttttgagcgcatcgtactcctttcccctctcaattgaacctcacccgaagcactttgatcaaacaccatgntgtcttctactgcttcttcatccccacagccggatgggtacctcaatggcgccaacaccctacccgtgcgcccaggccccaagctctacggcagtaatgatggcgctcaatctggcgctgggactcccattggattccagagacatcctcataacaagtttcttgagaatgtaaccggatcaaatgtgcgtcaaccgtcacctcagcccacccatctgggcttccccggcgggtggtctgcaccgaatcttatcaagaggaggatcccggctataatggtggccaagttc

SEQ ID NO: 3081 - DNA, 226 bp, Aspergillus oryzae
tgacggatgaagtggcggtccaggtcgttgatccaagcaagactcatgaggtattgaagactgtgaaggtcgctgtgaaaggcgatgaggtggttgccgatgctaccggggtgaaggtggttcgggttagacattagtctctaaactatagacctttagatttattattgacacgacagtagaatgtactcatcttgattagtataaaaaaaaaaaaaaaaaaaaa

SEQ ID NO: 3082 - DNA, 641 bp, Aspergillus oryzae
gttcattggagaaatgggtagctggctcgtggtcctactctcattcatttaccaggcatacatctcaccgcgcttttcgaaccaatcatccccccttttagtcggtggctatcaccctgtcgcggaaaatgacggcatcgacgatacggtcgaggataatgcgattggtggggatgacctccccaatgaccctacaaagcccgcgcacgcgcacgacgggcgtatacggctacatggccggaagatctttcttcttgctgccccggcatgctgtgacatcgcaggcaccacccttatgaacgtcggtctgctctttgttgcagcaagtatttaccaaatgacacgtggtgcgctagtactcttcgttgggctattcagtgttctgtttctccaccggaagctctacctttatcaatggatggcactttttgtggtcgtcctgggagttgcactggtaggccttgcaggtgccctctttggtgacagccagaaccacgatatcacacgtgaggatgccatggcagctgtagcacacgtctcgatgcaagcccgcgctcttgcaaagacccctgaagcagttcaggctattaatcggtgttctccttatcggcgcaagcccagaatctttacttgcctcgcaa

SEQ ID NO: 3083 - DNA, 343 bp, Aspergillus oryzae
  modified_base (123)..(123): n is a, c, g, or t
  modified_base (126)..(126): n is a, c, g, or t
gaatattcacgggtcccctggctagccttaagaccattctggcgtctcgggtcttttcctttctagccttgtaagtatgaatgtttccttttcacaattctcttttcccctggttcattaccncantcttatcgaaggaaaaggactccatcttagttggtcagtctaacttccacggggtccaccctgaccaaactgcagtaaaagcggagacagaaataccaacgtttgtatcattgtgaataatggaagtttggttattattatctaggtttctaggtcttgtccttctaatgtctgcctctcctccatacatacgaacttttttttttcttaaaaaaaa

SEQ ID NO: 3084 - DNA, 664 bp, Aspergillus oryzae
agcaacccaagcaaaatgccagcaccgacagcactcaagggacttgatcagacaacaacggccggagtgcccgtcactcaggctgctatcgatgacgaggttctaatcgatgctcagacatcagcggaggaaagtgtaccggtgcttgcccccctaggcgaaaatgcccaagacaccgacatgcgcattgatgaggaaggtcggccagtttttacacccgcaaaggataccaatactgtatatcgagtagaaactcggaaggtgcctgtccctcctcataggttttctcctctcaaggcctcctggagtagaatataccctccgctagttgagcacctcaagttgcaggtgcgcatgaatatcaaaagcagggcggatgagctacgtacttccaaattcaccaccgatacgggcgcactacaaaagggcgaagattttgtcaaagccttcacacttgggttcgatgttgacgacgctattgcattactcagattggatgacctctatatccgatcattcgagattcgcgatgttaaagcatcgcttcatggagaacatcttagccgcgccattggacggattgcggcaaagaccgcaaacttaagcactcatagaaatgctaccgaccaggaatggcctcgaagatcaaaattcccctaatggg

SEQ ID NO: 3085 - DNA, 492 bp, Aspergillus oryzae
  modified_base (356)..(356): n is a, c, g, or t
  modified_base (463)..(463): n is a, c, g, or t
ctgcctcgctcttctccgtgaagaattcagcttaaggataagaagcacaagaaaaaggaaaaatcctcattctcattctgctgcccaaacagatcccaatctaggccgaattatcaaaaattttcagccgtccgagcggaacaggaaaaagatcccttgattgccgacgctctcgctctcgttctctcactcactctcaacaatcccttccacaacaaccccttcacgccaccacaagatcgctttcgctttcctggcaagcgtttccatctcaaccctccgatttacacggcttttcggccattccatcgcatcctctctcccccaaaagggaaaaataatcgtcccgtcgagtnttccgccaaggctcctggtcaacaacttattttttcctttgtgctcatccaccgtctttgaggcttcgtctcatcgcccggaatttgcatcacctcgtcctcaccgngcgtcatctagatctgaaggggagtgttt

SEQ ID NO: 3086 - DNA, 585 bp, Aspergillus oryzae
cggacgcgtgggcggacgcgtggggcattcccccgccatgtcaacaaccccgcaagagctcgttccccagacagagaacatcgctgaggtctatgccacagatgatgcctcggtcacctccgtttctccagagcaccagacccgtttcaatggtctgatctctaaattcagccagctgtacaaccatcgtcccgactttgtcgcccgcagtcctggccgtgtcaacattattggcgagcacattgactacaacctgtacgatgtccttcccactgctgtcagcgtcgacgtcatcatggccgtgaaggtggtgccctccagtggagagccgttcgtgaagatcgccaacgtccagcccgagaaatttccctctcgcgaattcacagtaccccgcgacactgatatcgagatcgatcctaagcaacacgaatgggtcaactacttcagagctggacttttgggtgccttgaagttcttgcgcaaaacaaagcaagatggctcctttgtgcctgccagcgtagaagtcttgtggatgggaatgtgcccctggcggtggaatctccagcagcgcggtttcgtgtgctc

SEQ ID NO: 3087 - DNA, 626 bp, Aspergillus oryzae
  modified_base (405)..(405): n is a, c, g, or t
ctcactttctcccctctccgttatttggatctattccactctctgttgaatcttctgttctgctctgattactattttctttttcttttgtgcttttcatacccatttgcacttagttcaggttctactacaagatggtattcggacgcaagaaggacgacgacgattcctctaaccgccgtgccctcttcggctctaggtcgaagaacaagagccccgcgccccccgccaacccttacgcaaagcccatccctaccgacccttacactaaagccaagattaatgccggagtagctcctttaccagtgggcgaacaaccacctgctcacaacacccccgcaggcggaaacgttcctggggataacaagctccaaggaggttatgctcccaacaagtttgtgaacnaaggtggatatggaggtgatcgatttggtggtgggggtccagccccggccgcttcgcgatatggcccaggtggctatggaggattaggcagcgccgatcccaatgatccaggtgacgctggtagagatgcactgttcggaggagctagggaaagagcgcaacaacaggagccccagggaggtgcaccacccccccgtactccgagggcaatccctatacgg

SEQ ID NO: 3088 - DNA, 525 bp, Aspergillus oryzae
agaaaccgccgcttacggaagaagagttacgagaggagaaggagaaggccgaagccgaacgagccgccaatgcattctccaagagtaaaagtcgctggaagtctgtggaagaagacacaacgacccagaaatttgacccaggtcgacctcccgaagcggaccgtagtcgtatggatattgatcaagaacatattgctcccgggagggaattcgacggggagccgatgagcgatcttgatggagagccaatggaagacagcgatttagaagtcccggatggtgaccctatggaggaagacagcgctttcgtggaagaaagtggctcgaaagagcaaccagagaagcaaccggaaccctcagctcaaccggagcctcaacggccagttcgcaaacctcgaccaaaggcggaagatatgtttgcggattccgattcggagtgagatgtcatgtcatgagtacgatctttgctatgtagcattaagtagtagtaactacttggtttgataccattttttaaaaaaaaaa

SEQ ID NO: 3089 - DNA, 500 bp, Aspergillus oryzae
cgacccacgcgtccgcccacgcgtccggaaaaaaataactgagtacatctatcgcaatgcatcacttgaccgtcgacctttgcaacaccgaagccccaacccgcgatgcgccgggagatgtgcctgctagccttccgtctgcaaaggatagcaagcagcatccacgccggggaggtgacgaaaacgcatcggtgtactttatcgggacagcaacaactatcattgaatgggaagggttgcgggtcatgaccgatcccaatttccttcatgcaggagaccatgtccatctcggtccgggcgtgacgagtacacgcagaacaaatcctgctgtggacttgcatgagttaccccgggttgacgtcgtcctcctttctcattatcatggcgatcattttgatcaaaaagtcgaatcatcactccgtcgcgatctgccgatcatcacgactccacatgccaaatcgacattgacgtccaagggcgaggactcattcacgagagtg

SEQ ID NO: 3090 - DNA, 611 bp, Aspergillus oryzae
cggacgcgtgggtggcgaatcacgacgacaagctgaaaatcctcatcactggggctgcggggttcctcggatccaaccttgcagattacctccttgcaaagggccaggtagtcattgggatggatagcttccaaacaggttctccgcagaatcttgagcacctcaggaaccatcccgactttacatttgtcaatcaaaatatacaactgcccttggaagatgtgggccagatcgatcagatttacaacctagcatgcccagccagtccgatccagtatcaaaaagacccgatctcaacgctaaggacatgcttccagggtacacaaaacgtgctcgacttagctatatcgaaaaacgcccgcgtcttacatactagcacatcagaggtatatggcgatcccctcgttcacccccagcccgaaacatactggggaaatgtcaacccctttgggatgcgatcttgctacgatgaaggcaagagagtagcagaagcactgtgctatgcataccgtgaacaacaaggcgctgatatccggatcgctcgcatttttaacacatatggccctcgcatgaatggcagcgatggtcgggtcgtgtcgaactttatcgtc

SEQ ID NO: 3091 - DNA, 638 bp, Aspergillus oryzae
ctctcccgtctcacctaagagcaatgtctatcgaggtcaaatctctaaatggccaatgggtcggcgtctacacgttcgacaatggcaatggagctaccaacggcgagtctgagttctttctctcatttgatagcgatcccaacgaccgcaccctggcccgcatcaatggacaagggtttgatgatgctggctcattcacgatcgtgggaactcttgactcaaagaacttgataaatttacggaagaactacagtagccatggatggacgtactctgggaaattggatcgagcactgagtgtgctccatggctcgtggggggatattcgcaatggacctatggggttctttgcctttcagcaggtgggcgatgaggatgtcgtatccgcgggggagagaacctggcgcatcaatggtcgatggaaaggaacatacagcgcagccagggaagacacccgttggccgtgtgagttcgagttgaccgcatctcccgggaaaaaggaagaacagatggcgattgtagggaagggagtggacaacgcggtgcgtattggatcaaggggatggtgttatctgcccaccaggtgatttttgtcaaacagtatgcgggacactcggggatctaccgaggccaaccta

SEQ ID NO: 3092 - DNA, 625 bp, Aspergillus oryzae
tccaagtctagcaccaagacatgatatcctcacaacaccagtagctcttcatatataatttaagcatgccttccaacaaacatcccatcctctcctacatactattacctctccttctcgccctctccaccattcaaattgtccaatgcgccccatcagcctgcaatggccaatccacattctgcacccgcaagtactcgaacatcacccaactgggcgcccacgacagccccttcgtcggccctctcccacagcataaccaaaacctggaggtaacagaacaacttgacctggggatccgcttcctgcagggccagacccataaagcccttgacaatgccaacaccatccagctatgtcatacatcctgtctcctcgaggacgctgggaccctcgagtccttcctgggcacggtcaagacctggctggacagccaccccgatgaagtggtaacactgctgcttacaaacggcgatggctttcccgtatcacggttcgacgaggtattcaccagtgccaggattaagggattatgcgtttggacccgagctcatcggccggatgtgcttggcctggattcgtgggccgcattggggagaactggataagtacaggggaagccgac

SEQ ID NO: 3093 - DNA, 697 bp, Aspergillus oryzae
ggcgcgcggaaccagcggacaaagacgtgatccaggaaagcttctgagagaggagaaaatgagaaagaggattgctaaggagctgcctaaggtggaagcggatctgcggaaagaattagaacacttcgaggacgagtttggccggccgttcctcgttcatggagaaagatacctcgatgagctcactccagtcgtcgccaaacctccgcctcgttctaagacgccttctgccgggccaggaagtatcaggggaggatctatgaggcaacaacctccttctcgtcctgctagcgtgatgagagggcctcctccccggtctgctacgaagacccctactggaaatggttcaatgaaatacaacaccatcggaccatcccgagccccatcccgagccggagctaagtctccctcaaagattcccgcccgcgtccccttgagcaacatgcctcatgggagcaattcgcccgcacgcagtggcactccaggcctttattcttctaacacaatgaacggcaaaatcccaactcgtgctccgccaccaaggatgcgagcattgaccggcggagaatcacgagatgagcgaagcagttacatgttcgagcctccacgaagtgctagtgcactgtccaacgcttttgttcggccagtcagcccggaagatgtctatgacgatcggaaccaccgcttgttatgactt

SEQ ID NO: 3094 - DNA, 635 bp, Aspergillus oryzae
cggacgcgtgggcgaaagcgccacaggaggaaggactctggacagataggctacatgatgttattcgtgcctaccagtctaaacgactctacgaaaactacaagctcacctcactttacatttaccgaactgccatctccaggtccttcgagaatcaagttctggccacgccgaattattatcaacgcaatccactcctggtgatattccatgatccaccagaaatcatgggattgcctcaccccgttacgaacaagttggaagcccacaactgctggcttgctgattccctgaaggactatatcggatgggctgttggaaaagggtatgcggtgatggatgtcaatatcccaaagcatgtgacggtcgagccctccgggaagtatgaagatgaggaagagaaccgccctacagcgaccgaggaactggctgcgtacctctgggacaactacattgaacccaatgaagccacggaaatcttctttcttgggatcggcaatgctttctacggggtcgccaatcttctgatcaacagagatacgttgtataaacgagtgaatggcgttgtatcattcgttgccgaaaatccagttcgagcgattgcctctcatactcaggtttggctgtcaagatgg

SEQ ID NO: 3095 - DNA, 596 bp, Aspergillus oryzae
  modified_base (338)..(339): n is a, c, g, or t
aacgcatttccaaatctacctcgcctctggtacacttttttcactctttcaaaaagtgtctcccaaggctgtcactcttttgtctatattgacctaggcggaaaagcgtacatactcccaaacaaccttcctttccaaaccccctgacccttcagtccaatcgcagtcgatctgcctgttgtcggacgtattttctccattcatttcatttactcggtcggatagcttcccggagaagtcgttttctcgatcgaacgcagttgacctgtgaaaacacctctcgcaaaccacctacaagaccaatcaatcgtccccaaccaaacatcatgcggtcttcnntgctgatgggcgctctttgcgcggccggtgccatggccaaccctctcgacaagcgggcctacactacagactggacggtcgtcacggtgaccactaccatcaccgcacctgtgccccctgctgctaccgcttcctcttccacctacgttcccgtccaggaacccgtcgcgagtgtggagcctgcaccggcaccggttgaacagagctcgtccgccgtctttgttgaagtcccggctacttcttccgctctgggcctg

SEQ ID NO: 3096 - DNA, 645 bp, Aspergillus oryzae
gcagctcgcttgcttatcgaaaccggtgttgatgtaaatttcaaatccaaggagggatcgctgttgcacatcgctgcatgccaaaaagacacaagctttgcacgacttcttctagataaaggagcaaagcctgatcaacaattcggagcaggtgaacttgcgttacacgttgctattcgtcatggaaatttggaaacggtgaaagtcatcctcgctagccctcatgatgtgaatattcgaggtcaccacggaacccctctgcatgtagctgcaggtcaagaagacccacgattcgcgcaacttctgctcgaaaacggggcaaaccctgaaagctatgactctcatggaaggaatgccttgcatcttgctgtaatgaatggattcattgagacggcaagggcgatcatcgatggtggtgcagatataaaccagttttcgctgcaattagatagaatattagatatgggacctatccccaggtcagaaacttgcctcatgcttgctgttttgcttgccaacaaggccagtgaaaagcagcaggccctggctaccgaaatggctcgcatgctgctttctaagggagcagatccacattacaaacagcgaaggagagacagtttgcacatcgccgcaatgtgtgggatc

SEQ ID NO: 3097 - DNA, 568 bp, Aspergillus oryzae
tatatcgaccgcatcggccgccgcttcctgttgctatcgggtgccatcacctgcatgatacttcattatgcaattgctggtgtcatggcgagctatggtaatccggtcgaccagatcgatggtaacgagaatttgcgatgggagatcaagggagctccaggcaaggctgtcattgctctctcgtacatcttcgtcggtgtttacggtctcacctgggcccctgccgcctggatttacgcctctgaagtgttccccctgaagtaccgtgctaagggtgtcggtctttctgccgcgggtaactggatcttcaacttcgccctggcctacttcgtcgctcccgccttcaccaacatcaagtggaagacctacatcatcttcggcgtgttctgcacggtgatgaccttccatgtgttcttcatgtatcccgagacggcgcgtcggtcgcttgaagaaattgatataatgttcgagtcgaacgtgaagccgtggcagtcgagcaaactccaagataaatttggagaggagatcgcacggcgccagcagagtgtttcggaagagaaggccagca

SEQ ID NO: 3098 - DNA, 631 bp, Aspergillus oryzae
gtcgagcatcatgtggacccctggtgtctctgcgttgtcctttctagcattggcgacttccgccctttgccaaccaattggactttcgccatacacaaacccgattctgcctggatggcactccgatccctcatgtgcctatgtcgaagaagatgacaccatcttctgcgttacatcgacgtccatcgcattccctggactaccaatctatgcaacaaaagatctccaaaactggaaacaagtcagcaacgtcttcaacagaccaagccaaatcccatcccttagcaacaccacaaaccagcaaggagggatctacgcaccgaccctccgctaccatgacggaaccttttacctgatcgtctccttcctcggtccagagatcaaaggcctcgtcttcacctcatcggacccatacagcgacgccgcatggagcgaaccactggaattctccgttcgaggcatcgaccctgacatcttctgggacgacgacggcaccgtatacgtcacctcagccgacgacgcccgaatccagcactactccctcgacctccaaaccggcgaaacaggccccgtaacctacctctggaacggaacaggtggtgcctcgcccgaagggacccattctataccc

SEQ ID NO: 3099 - DNA, 583 bp, Aspergillus oryzae
accaacgacaacaacaatcctcaacctcacaccaaacaaacataccaccacgaaccctcccgccaaaactaccagaaataacacaatataagaaaaaccagaaatgccccccaccccccaaacaacaaaactaacctcaaccctccacctcctcatcccgcgcctccgtctcctccaaaagaaatccaccgccagctccgtagtccaacgccgcgaactctcccacctcctatccgaaaacaaagacgcgagcgcccgcatccgcgtcgaaaatgtcatcgccaccgacatcgccgtcgaagtcatggaaatggtcgaactatactgcgagctgatccttgcgcgggcgaacgtgctagaccagaacgctttcagcgagaagggcgtggaggcccggaatcgggccaaggaggcgtgggtggagatgaggcggaaggaacagggtctgggttctagtcctgggtctgcggctagtggtggggatgctgcggggagtgggaagaggtcggggtttgggttcggggcgctttttggtggtggggggtccaagagggaggagacggtggctgtggagtctacgggg

SEQ ID NO: 3100 - DNA, 632 bp, Aspergillus oryzae
cgtgaagcacagtcaccagaatgcccgactccaccagcacccaacaggatgaagagaaggctatagaaccccctgtggtctccgagagccctgctctggactcagatctcccaccggaaggcggcgttcgaggttggctatgttgcgctggcggttccctaggtctgttcgctaccttgggcttcttgaacgccattggtatcttccaaaccacctatcaagagactctcttaaaggactacagctcttcggatatctcatggatctttacaatccagctcgctctcatatgggctcccggttccctattcggccgcattgtagatgcctacggaccgcgtccggtcatgctcccatgtaccttcctttgcctcttctcactgtgcatgacgagtcttagcactgagtactatcagatcatcttggcacagggaatcggttatggactcggggctggaggtattttcaccacctccctggtctgcgtgagccagtggttcgtcaagcagcgaggccttgctctgggaattactgttgcgggcagtagtattggaggcgtaatattcccattctttctacgactggttatggaagacgtaggattcatggcatggtacgctacacggactatt

SEQ ID NO: 3101 - DNA, 664 bp, Aspergillus oryzae
  modified_base (243)..(244): n is a, c, g, or t
cccacccaatcgtctcttcaagatctcaaaccttgccaacactatacaagtgctagtccttccatacttccatactaatcgtcgtagccgcaagcaagcaatgacaatgatcaacaccgtcgacgaaacctccctcgccgcatcacccaccgagcgacgcaattccctggagaagcatctcctgaatcgtcctgatccccaggatctcaaagagagacacatcctcctcgacaccaatgttgnnccatctatccaagcagcaagacaggaactagaccgtcagcgcactactgatagtttgaagaaacatctcgagcacagaccggatcgcgaagaactggttgagcgtgcgtatcttgacatttcacccattcacctacgcttcttctctcgcaactgactctagtcatattctcatatattcgaatgctaacttgactcttgtgtacaaaaggcaatatcctcccgcataccaacgcagccccggcgcttcaggctcacgcccgcgaactggagaaacatatgctggctgatcatctcgaccagaagattcagaaccggccgcagccggaggatctcatggctcaggggatcttgacggaagatgaggatccgaggcagccgactatttgactgcaatcttcggcagtggtgacgggtatga

SEQ ID NO: 3102 - DNA, 625 bp, Aspergillus oryzae
gaaacggaagagagttgccgtggtccactgcaaggctggtaaggggcggagtggaacggtcgcgtgcagctacttgatgacacatgcaggatggaagatggaggatgctttgcagcggtttaccgaacggagaatgcggtctgggtttggccctggggtgagtatcccaagccagctgcgctgggtcggatatgtcgatcgctgggcgaaccaaatgggcaagaagtatatcgaacgaccggtggagatcctcgagctgcatgtgtggggtctgcgagatggtgtcaaggttgcagtggaaggcttcgtcgatgaaggcaagatgattcaaaactttcacctattcaaacgcagtgaacgcatcgttgtggacgatggaagggtcaagacgaattcatcacagaagacggacaaaaagaaaaccaatggccagaagtacggtattaaaaaggccttctcatctgttgtagattcatcgagctcgtccagctcgagttcatctgatgaggactcaactacccaaaagggcacgtcagccgtcctcttcgggcctaacaagcccttatcctcccgaccttcgatataacattgattttgacgaagaagcaaagctaccaagaatggg

SEQ ID NO: 3103 - DNA, 600 bp, Aspergillus oryzae
ggagcggctcaaggtcatcacggtcaagagaaaactcggtccctggaacacctgtcaatgaacacagcagtaccccatctcagccccctactccagagtcgcggtcaaggaaacgagctcgatctcgctcgaactctgcatttggacctgctacggccatggcgggtatagttgctggaagtattgcaggctggtcgcctattgaaagagcgccaacagagggagagccattcaagttcgattccactccacacggtggcttggaaaaccagcaaggcattgaaattcaccccaagacagcagcagacgatcggatcgtgggagactatctttcatcgtcgaagacgcccccaagccagaacccagacctcctaccgtactttgagcatgctcctcctgcacgggctccatctagccgcagcataaggtcaacatctgcacacagtcggtccgctcacagccggtccgcatcccgaaacgaaagttgaccggagacccagttaaccccttaataatacctctgatacgttaacggtcttaattattaggaccgcccacttcacaacgatgtattatgatcctgtcgttgatttgcttttt

SEQ ID NO: 3104 - DNA, 563 bp, Aspergillus oryzae
attcccgggtcgaagacgcgtccgctactatcagaaacaaacaaagctcacacctatctcacaataaaacatgaagttcactggtctcgccattgtcagcctcattggctgcgctgctgccttgcctccatttggtgcttcttctacaccgtccagctcggtttctgtttctgtcaccccgagcgcttctcccagctcgtccagcatcgccttcgctggtcttagcaagcgctctgaaaccccttctagctctgcagctccttccagctcctcggtcgcagccccatgggtataccacaagcgtcaatttgccactccctccagctccggtattgcgtccagctctgcaaccccatccagttcctctgttgcagccccatgggtctttcatagacgccagtacgcgactccctccagctctgcaactccttccagctctgcgaccccatccagctctgcgaccccatccagctctgtcgcagccccatgggtcttccacagacgcgagtacgcgactccttccagctcagccaccccctccagctccgctactccttcgagct

SEQ ID NO: 3105 - DNA, 509 bp, Aspergillus oryzae
cttttttaaacacgagttactggttcgtgttgttgtcattcacgatgttttcgatccaccgccaattgatctacattaacacgctgacttcatcgataaatgtcatatagtgtcataagcagcaactgatatttcccgggaaccttactcggtcaattgatcttgtttagagaacgcaaaggaccgtttataaagtcatcgcaactatacagccaaggacgggatatacctcttcggctatttagttgaacggagtatacgacggcaaacaaccaatctcaagccctatatattctctttcgcccttttcttaccacattcatggtggcttactccacgccttcctcatctctacataagccgagcccttataacgaaagtcgaagaatggcgagattccgtccaagcaatatcctcggcgacccgttcgcgcttgcaacgatttccatctcgatactggcatgggtcatcgcattcatatcgtcgattgtctcggcgattaatgcccg

SEQ ID NO: 3106 - DNA, 521 bp, Aspergillus oryzae
atcactaacgaatgcgaactaataagctctataatagtttggcaaacaccctctatctatctacctgaagtacttagcagtgtcttgtcataatattgatttcaaaaaatggctcttgtcgcccaaagcgcaactttcatccaccagtatatctcttcatttctccactccaagccccgtaaatcccccgaagcgctgaagctagggattctatcttcagcgcagatcaatgcggctgcagttatccatcccgcggaaacacatccggatgtaatcttatacgctattgcctctcgcgacgcttcgaccgccgctcaggctgctaaacagtacaacatcaccaaatcttatgggtcgtaccaggaactcttggatgaccctgctgtggatattgtatatgtgtccacccctaatgggcagcattatgaatggacttcaaaggccctccaggctggcaaacacgtgctttgtgagaagccgttcacattcgaatgcagatgaagcaaagggtttaggtgagc

SEQ ID NO: 3107 - DNA, 579 bp, Aspergillus oryzae
cggacgcgtgggcgaggaggcttcaagccattcgtcctcggggtttccgttctcaacgcttaagttgctatactccggctgtccaacatttgcggcgcatctcattctcgtcgctattcagcacaatcgctgctaaatctaactatcgagcagcaggggttcgccttgcctcttccgaaaccacataccgtgtcaacgctctacgaaatccaatggccacggcacggaagattgagctgtccacatctgactccggtgtctactccgctggggttagagaggacgctgctcgagctgctagcgaagtcttgcaggagaatctagagaagcaccatatttactttaacgattccggattccacaaccacatcgtccaccatattttaaccatgtttgccctcggggcttccccggatgagattaaggctgcgtttgaaagaaataagagttaccagaggcctgctttaccggccaatgacagtgtggttcagtccttgtatgaccaggctcgattcaaagaatgccttggcaaacgaaacaattaccccaatttcttggaatatttccacgtgagattga

SEQ ID NO: 3108 - DNA, 628 bp, Aspergillus oryzae
cggacgcgtgggcggacgcgtgggcgggtcacaatgtctcattggagtccgccagctttcctcagttggcacaggccattgactatagttgtcgagatccgcgcctagtttgcggcaagatcctggcgcaaaaacagaaaaagaatgagtttcatgataaatcgaagacttatctgagaattactgtgggaagcaacttggccaactccccaggaataccttatgtgatggaaatttggcccccgggacattcatccccgatccatgaccacggaagggcatcagcagtgatcaaagtcctctatggtagcattgattgttcttggtatgatgccgtccaagacggccgcgaaccgcagcaggttggtaagccacataaactgagcaagggcgatgtcacatggctaggcgacaagcaatttcagattcataagctcgaaaacaactataagaccgtgtgcatcacgctgcagtgctatcagtttgagcaatccgacaatgaacactacgaatactttgacttccttgacaatgacctgcacaaagatcggtttgttccaaatagcgacaggtcctacggcgagttgatagaagagcttaagattgaatgggacagaaagcttgaaac

SEQ ID NO: 3109 - DNA, 462 bp, Aspergillus oryzae
taagcgtctggctgaggagaaggagaaggctcgtctggaagaggagcagcgcaagaaggatgctgaggaggccgccaaggctgaacgtgagaagaacaagaaggccaaggaggccgctaagaacgctaccaagaagaacaagcgtgttgttaagggctccgtcaaggaggtcaactacttcgctgatggcgaggcttctgcttctcaggtcgactccgtcctgaccgacgttgagcttatcatgagcaagattgatgccgaggagcttgccggtctggctgagcgtcttactgctgctggcaaggatgctgctgccgtcaagaacgtttacgctgaggagtccaagaggctggttggtgccggtaagctcaaggagggcgagaccaagaacttctagagtactcatctagaaggtacgactttggtatgaacataatgcgtctctagtacacggtctttgct

SEQ ID NO: 3110 - DNA, 621 bp, Aspergillus oryzae
aggacagcgacgagtgcaacgatttgatgttgtgttaattgctctggctggaagataatctgagtcgaccatatcatagtcaattgaacttggtgttgccagttcaagatgggttttactaaggaagatgccatgattggtatcatcggcatgggtgacatgggcaagatgtatgctcagcgcctgagcatggcagggtggaggataaatgcatgtgacaaacctgatagttttgagagcctgaaatctgaatttgcttctcaacaaggtgtcacaatttacccgaatgggcacctggtttcaagaataagcgactttattatatacagtgtagaggctggagttatcgacaaggtagtggcggaatatggcccatctaccaaggtcggtgcgattgtcggtggccagacctcttgcaaggccccagagctggccgcgttcgagaagcatctcccttcggatgtagaaattgtatcctgccattcgctccatggccctaaagtcaacccgaaagctcaaccactggtattgatacagcaccgcgcgtcggacgagagtctccgattcgtcgaaaatgtactgtcatgcttcgaatccaagtttggctacctcacttggcga

SEQ ID NO: 3111 - DNA, 486 bp, Aspergillus oryzae
atcagatccatgtcaccgaggaagagagagatgcgtaccaggagggagggcaccatcagatccatgtcaccgaggaagagagagatgctatcgaacgtctatgccgtctgggattttcccgagatatggtcatagaggcttactttgcatgtgacaagaacgaagagctcgctgccaactttctattcgagaacactgatgaccctgaagaccaatgattcagcgccagagtattccccgtcgaaggcttcccaacaatacatttgctgcgaacctagtgctgctctttccccttaatgaaaactgctgcatctatctccttgccgagttccttaccgaagccgggttttatcatgactggtacagcttgccgtgccgtttgccgtgcacagcacgcggaaacactagctgccactacttttcctcagtcacatcttctcatccttaccactatctcatggacaacatctgtagccggtattctca

SEQ ID NO: 3112 - DNA, 561 bp, Aspergillus oryzae
ctcgcgacgacctcgctggagatcacaacgggtgttctgtgttatgaccaccggaatgttgtggatttctcctcagaggggttcaatgttagcgcgcatacataaaaacagactgcttcctatcgtttcgtcacctcgtgcaattatttcctctgcatctttctcgtcttcttcgttatcattttctgttgctggtactcaccccaatagtagtgtgactcaatttgccccaatggctcgtctcccttcacaacaaggccgtcaggtccatgcgacctcgacgtcgtatgtgaaccatgccgctccagtagaagccaactatgatacagccaaccctccgtacatccgcaagtacctccgcacgtacggcctgactcctccgcgcgcagaatcctacgaggttcagaaaacaagatgtctggctcaattggccttgaagcaaaccgccattgacaaatttctctacctgagcactcttcgcaagaacaatgtgcatctattctaccgtctggtgacggatcatctgagggaacttacccctctgatctatacccccggtcg

SEQ ID NO: 3113 - DNA, 30 bp, Aspergillus oryzae
cggacgcgtgggcggacgcgtgggaaaaaa

SEQ ID NO: 3114 - DNA, 641 bp, Aspergillus oryzae
ctcaataacaatctctcccacaaaaccaaacctaacaaccaacgactcagccgtcctccaagccctcttcgacgccgaatcctccccttcaaatggcatcacaatcaacccatctctaccccccttcccagctcacctaaacatcgaccccacgctccacgaaaccctcaaggcccgcgaaataaccatcgtccgcaccctggcatcacccaacccgacccccgaaaccatccaatccgccattgaccagctctccaccctgataacagaacacccaacctacccacccgcctacgtgaacagagcccaagccctccgcatgctcatctccacccacaatggcggccaagcagaagaaacagaaacagacctcttcactccacaaaacgcagagaccgtatcctctctcctgtctgatctgggcgaagcgattggtcttgccacgccgcggtcaccggcggatcctgtctcagaggtccaggcgcgtttactggctgatgcgcatacgcaccgggggtatttgttgctgaggttggcgaaggtgaagaagagtggtgaagcgttcgaggggacgggaagatggagccagttgaatgcggatcggttggaggagatggcgagtcgggactttttctttggag

SEQ ID NO: 3115 - DNA, 607 bp, Aspergillus oryzae
  modified_base (324)..(325): n is a, c, g, or t
  modified_base (378)..(378): n is a, c, g, or t
  modified_base (516)..(516): n is a, c, g, or t
attcggtcctacggtgctggcattccagctctacgtcagggcgattgactgtgcgcgatccttggcgcttccgtcttccgtacaccagcttcactctcggcgaagcgcgtgaacggaactttactattccggtcaagacgtcaggactttttcagttgacaatttcgaccgaatcaagattgtcattgggagtggcctcgaaaagaaaaggtcgcgcttgcgggaaccgttgggccttggtacgcgcgaagacctacatcgtagttctttgagtggcacggactcggattgcatcattgtgtcgcaggttttatgggatccgannctataatatcacggaactcggatacgttgcgattcgtctagtgtctcaccttnactatggctcatacccagccatcgcccacgggcggcgtcacacctcaccatggccatcttgctgctcatccgcaggttaatggtcacatgcctttgcagtcgcaaggccagaagggtcctcccatgagcactgctcanaagattgccgcgctgaacgagcaggtgtggcttcaaattggtgggtttaactgaactgatgggagaccttgacggtgccatgaacgcatac

SEQ ID NO: 3116 - DNA, 586 bp, Aspergillus oryzae
  modified_base (329)..(330): n is a, c, g, or t
cagtacattgactttcactctcactccctacttgtttaggtgtttctatgccccatagtgcaagacaagtgaagcatactaggttgccgctcgcacatatctcttgttcaacggcctttcataatgcggccaagcaagaaccaattgagaagggcaaggaaaaaggccttgaaatcgcaggctaccgaagcaacactcgatgaatcacacacaaaatctcagacagaggttactctatcgactgatgtctcacgaggtagtagccagcaaggtcatgatgctgcatctctagatctagaggatccgctatggcaagcatataagcatannattaatcgattcgatgaggtcggggatacctcaacaccggcaaaagagtctgaaaaacccgaaatctattttgatgatgatgatgaaatcccggatgaagaagaaaaggagcccaagctctcaaaaagaaagcgcaaggaattgaacaagctttctgtcgctgaactgaaggcaatggttcgaagaccagaaattgtccgagtggacggacacttcggcccccgatcctcggcttcttgtacatataaaatcccac

SEQ ID NO: 3117 - DNA, 552 bp, Aspergillus oryzae
tgggcttcctgttgtcacatttgaagctgtccccgaggcacttcctgcggcacgcttaggtctccccagccctccgggatatgatcccagacatcctcagtccagacggtacaccggggcctaccacttcgggcataccgccgatcccgtttatatgggaacctgtaatggtgttagttctgtatgcacatggggaggctacgccatggagtcagcatgtcatacgggtcaaatgtgtgtctacgataccgttgaggacaaaggctggcgcgtcggaattgggacgcatcgtataaaggctgtgatctccgatgttatcaaggtatatgacaaggtcccggactgtgccgcggaagaagagtgctatgattgcgtgttatggaaatacttccgcagtaatggctctgaaatcaccaccaccagctcgacaacgtccaccacgagctctaccccaataagtacctcaacctgtaagactcccggatggtggggctgtcttgatgagagcacaactacgacagctacaacgacatccacgtcgacgtccacatt

SEQ ID NO: 3118 - DNA, 637 bp, Aspergillus oryzae
tcgacccacgcgtccgctcccccttcctcctcatccttgttttctttctcttggacattctttcgtcctttaccctcggtctttattgtggaagaggctgtctaacatccccttccttcattcaaacccattcttttaagtcttttgttttctgtttttcatctcatacccgccaaaaaaaggaccgcataatgtcttacaacggtggctatcagcgcgaccagcgcgactcctaccgctctagaaacggtggtggtggtggatactcgaatggctactccaacggcaacagcaacggctactctggtggtggtagtggtggtggctatggaggtggctacggcggtggtggctacggcggcggctatggcggtagaggtggtggcgccggtggtggtgaccggatgtccaacctcggcgctggcttgaagaagcaagaatgggatctggattctctacccaaatttgagaagtctttctacaaggagcaccccgatgtcgccaaccggtctcagcgcgatgttgatgagttccgtaagaagtttgagatgtctgtgcaaggaaaaacattcctcgccccgtcgagaccttcgacgaggctggcttccccaatacgtgctgagcgaggttaaggctc

SEQ ID NO: 3119 - DNA, 648 bp, Aspergillus oryzae
  modified_base (571)..(571): n is a, c, g, or t
gtaaatatgtcaaagcggattcgcctaggaatcgtcggcctttcggctgaccccagtcattgcaccaactacattcacaagattcccttgacaacaacacctttgaaagaaaaatatgagattacggcagtatctatgtcatccccagagaaggccgaggcggcagccattgcgcacggcctaccgcgagagagaggatatcatagtgtggagtcactagccaaagaccctgatgtggacctggtcgtcgtctcggtcaaagttcctcgccgcgcggagttggctatggctgctatcgaggctggtaaagatgtctatgttgaatggccatttgcctcgaatttggccgcggccgaagcgttggcacagcgtgcgcgcgaacggcaagtgaagagcatggtaggcttgcccacgaggctggcaccgcaggtcttgaagatgaaagagattcttcggtccggatccctgggacgcatcctggccaccaatctactcgtgacagacgacctgtttctgaaattccatgccgacaaagacattctcacgataagacgaatggagcgaatattgncacaattgccggtggtcacttactcgatgccatggccttcctcctgggcgagttcaccaccctcatgcacacactag

SEQ ID NO: 3120 - DNA, 342 bp, Aspergillus oryzae
ggcattaacgcactcattcgggaggccatgcaggcctggagcaccggtgaattaagccgtcttgtacaccgccatgggggacgccctattggcagttttgaccttgacttgcctactgcagggagcagtcatgctatagcctctgcaagtactgatagccaggaagaatctatcgctcacatacgcccgtgtcccgtccaagcactcttcatggattgtacgcacgataacgagatgccggcccaaaagcgaacagcggtagatacattacctaacgctgcattggtttcaatgtgcgcctcggctattggaagcgtcatgggttatgatgaagtatatccc

SEQ ID NO: 3121 - DNA, 568 bp, Aspergillus oryzae
  modified_base (455)..(455): n is a, c, g, or t
cggacgcgtgggcggacgcgtgggccgtaaccagctccgagataggacttgcagtgtattatttgaccgaagatggctcgcccatatggagacttgtgctcgtctgaacgagtccacgaagcgctttcgttcctaaggaagaatttgccagtctccttgcaaaatcctaaagttgcaattgtgtgtggctctggtttggggggcctggcaaacactattcgtgatcagccacgggcagagtttgattattcttctatcccacatttcccgcatctaacagttcccggacatgcaggaaaacttatcttcggccttctagatgagcaggtacctgttgttttgatggttgggcgtgcccactactacgagggtcattccatcaaccaagtgacattccctgtccgagttttcaagttgctgggggttgataccctagtgttgactaatgctgcggnggggttgaattcagagtatgcggttggcgacatcgtattattgaatgatcatattttcttagccggtttggcaggcactcatccactccgaggaccgaacgccgaagagttcg

SEQ ID NO: 3122 - DNA, 575 bp, Aspergillus oryzae
gagattacttgaggcatattccttgtttcctggggaccgtcagtaactcggtcgtgtcaaaagccacccccgtccagttccttctgtctctggtggatcgtgcgggtgatcgaccgtcggagcttctgcagcttgtcacgtccagtacctgagattgcgtgcacctgcaatgggctaatatttgcattgacttttagaaaattcggtgcaggttactttccatccaaagcaacgccttcagtaaggggttcacggccgttgccgtatcgacgcaagttcaaaccggctttgatatatatgccttcaagacgacgtcatcaatccgttcatccttacgcggaccgtctcgggaactctggagtagttcgagtctgaacaacaacctccctcttccctttcacttgattgtctcccacactacacttatcgtcatgtctgagactgagattcgcgatgcccgtcggccctctcaggccgagaatcagaccattctcaaatctgagatcccgttgaaagagcgctttttccgtactttcaacatgagatcactgctctgcaagaaccagaatggaccg

SEQ ID NO: 3123 - DNA, 604 bp, Aspergillus oryzae
gctcatttgacgggccctgggcgtgtttgccactttgccttcagaccgtttctgattggtgctgcccttcaaaagggtgaatcatgtttcttagatgaggagccatggcaaaacttggcatcatccttacggaccgaggattcccagaagcaagacgagtgggctttttatatcgacgtctatgagaccatcttcatggagcttgtgaaatgccccggctatatcaaggaagcccgtgcaatcgtttcggtgacctcaccagaggccagatctctggcttatcgtatccgtacaacatgtgatcgactgcgaaggctaagcaaagaaatgcgaaccttactcagtgcacataaccagcgaaagcagggcatcactctccgcttcgtcggaccggagccccaactcttcccggaaacaagcccgtcccttctccttcgtgccggagttgacgccgttcgtatcctcgaacaaatattacatcgaattaccgttcctacacctgccgtggaacaaaccttgataatccgtgatggagcgctaacacccgtgtcaagcccagaaagttctggagatgcggagagtccaccggtcctctcctttgatt

SEQ ID NO: 3124 - DNA, 606 bp, Aspergillus oryzae
cttgttgagcaggccgagggagcccctgaccgtcgtgcccgcctgatccgcggatacgaagagtttccttttgataccgctgtccctctccactcctttaaaaacttgggtggactagagataattgatatagactttcgctcgtttttcggctgggaccgactatccgagcaactacgcacccttactgtgaagagagccaagatcgaggaccccgcggatctgttgacgggaatagtgttggacgacattgacaagcgtcggcgccggtcgtccaagaatcagcaatcgcctgtcctggggtggagtgggaatacataccctcagccggtctacaagtccgacatccctggctccctctctgctcccgggtctccggtggctgatacggcgttcggtaccagcaccagtccccaggcggtccccatgcttagagtaggatccgaaggtgctagaggccatgcacgaacgggaagtatttcgcccacgcgcccgacaagctccaaacactcttcccaccgccatagccggcgcatacgacgtaccggatctggtagttcaaactcgagtgataacaccggtcatcgtaatggaagttcttcgaac

SEQ ID NO: 3125 - DNA, 618 bp, Aspergillus oryzae
gtactctctggatataccgtccgaggtgatttcttctcgttgtggatggtctcttgatactgatatccctcacagtctacgtcatcgtcgatgcagtcgcagtcactgaccttctttttcttcttaaaccattgaaatcaaatccatcaatcggtcactcttcttctaccacgtgcctcgcccatggcgaacctcccattcttccgcaaagctcctcaacggccagagtacggccggagtcgttcgaaagttctctggcaccgtctactgcgctcctttctttatctcatcgcatggatcttcctggttctggtcgtcattggcgatgtatccaacaaacccgtcctccgccaaacgtggttcctcaagatcgacctctccaacatcatcccgctctccgtccccaatgccgtcctgattaacagtattgcgcgatccatcggtctccatgatttctacaccgtcggtctgtggaatttctgtgagggatacaatgatagtggcatcaccaaatgctccaaaccggagactctctactggttcaacccggtcgagatcatcatgtccgaactgctctccggagctaccattgccctcccggagatatcaccgacgctt

SEQ ID NO: 3126 - DNA, 624 bp, Aspergillus oryzae
ggatctgcccgtcaggtctgctcctggcgctcaaggtgccggctcgttacccgatttcatcgttgagcgcaacaacttcttcgaggagctttggcaacaatatctcgaggagaccaagaacaagcctcaccccgaaattaccgtcaccctgcaacccggcaacggcaacaaggaacaggtctccgccaaagcctgggaaactacccccgcccaacttctcaagaatgtgcccaaggaactgagtgccactattgtgcttgcaaaggtcgataacgaactctgggacttgagccgacctttggaaggcgactgtactgtttcctatgtgcgattcgaagatcccgaaggaagggaagtcttctggcactctagtgctcactgcctgggtgaggcttgcgagtgcgaatatgggtgtctgctctcccatggacctcccactccacagggtttcttctatgatatggccatgcctgataaccgcgttgtaagagagaccgattggccagcactggacaagcacgcaaaccgtgtcttcaaggagaagcagagctttgacagattagaagttaccaaagagaacctgaagaagatgttcgcctacagcaagtacaagctgcattatat

SEQ ID NO: 3127 - DNA, 602 bp, Aspergillus oryzae
ggcgaattctctaccactcctttcgcgccggttggcctggtgattgctcattggagaatcaaaccgtcgactaacttgagttcgccgatcacggcacatttggcgcttgagaaggccccatggctcgttcgtctgcgtatgtacaatgccgcaatcatgcgtcattgttacgggggttttatattaggcggctgactgtggtcttcatggaccaaagttaatctttctcaattgttcgcctccatgacaacccccagaatgaaaagtcaatatgaaaaacaacgacctgaaaataaaaaaggaatctccccgactgggagtcgaacccaggtctcccgcgcttgttctcgtatgagatgacaagcggaaatcatgaccgttagaccatcgaggatttctaattatagaagagctttactatttcatcctataaacagaaattctctcctcataccttacttccgacagttctgacgatgcatctgcagaataccacgtcaaccattctagaaccccgtgagtccatacctacaacaaaccgatgcataccaggtggatccagtcctacccactgcaatgcataagaaaacacagtatcccag

SEQ ID NO: 3128 - DNA, 596 bp, Aspergillus oryzae
gcggaccgaaggaacaccatgaattggccattgcctccaagtcaaatgtgaccatcatcgaaggttcggactctggaattgtctcaacgaggaagggcagctctgttatcattggctgggatgtctcttctactcgtcgcatcgttcaagtcggtgacttgagagtgttcctgcttgataggaactctgcttacaactactgggtccccgaactccccacagaaggtacttctcccgggttcagcacttcgaagacgaccgcctcctccattattgtgaaggctggctacctcctccgaggcgctcaccttgatggtgctgatcttcatcttactgctgatttcaatgccaccaccccgattgaagtgatcggtgctccaacaggcgctaagaatctgttcgtgaatggtgaaaaggctagccacacagtcgacaagaacggcatctggagcagtgaggtcaagtacgcggctccagagatcaagctccccggtttgaaggatttggactggaagtatctggacacgcttcccgaaattaagtcttcctatgatgactcggcctgggtttcggcagaccttccaagacaaagaacc

SEQ ID NO: 3129 - DNA, 522 bp, Aspergillus oryzae
cggagtctcccttatctcgacgccgtcatgcgggaaactatgcttgttcatccgggtgttgggctcttgctcgagagaattgttccaaagggtggattcactgctaccggacgggcgctttgtccctgagggcaccattgtcggcatgaatccctgggtcattaatcgcaacagaaccgttttcgggcctgagcctgattcattcaagcctgagcggtggctaccggcggagggcgaacatgacgaggcgtatcagactaggttctcgaagatgaaaggtacagacttaaccttcggtgcagggccccgggcatgtctgggaagatacatttcccagttggagagttacaaatttgttgcgacgctattcacgatgtttgatgtgagttttggctgtttacaagatgtgatatagaatacctgacaagcttttccccaaatcgagctggaacaccctgaccatgagtgggaggtgaccaactcctggtttgtgaggcagaaaaatattcctgttgtgattca

SEQ ID NO: 3130 - DNA, 616 bp, Aspergillus oryzae
gcaatctctgcccgcctacatgacgccaatccgaaacattgcaccaacctgcacgctggatgcaatcctgttggactttctccaccatcgacagcgcgaagcagcttcgggggtcccccagcaaaagctagtggggcctccttatcccagtgtctcctccctgcttaatccagaaagaggtgcttactcacacccgttatcaaaggtgttcactgatatcctgcgcaccttccccgatatttcctcccttccggagcaagtagctgttttgtatgtcatgtttcttctcatgcgatggcagatctatccaacgcctgaaaattatgatcgggtaccggaatggctgactccgcgcccatcgcaacttttaacaccacatcccgcctggattgattacctgccgtggccgcggatgcgcgaccgcgtcgtgatggcacaccgggactacccttttgacaactggtttataccatttacgcgtacactgtcagtcaactggccatatgaggaaactgattgtcttttgtcgacgggagataacgatgacctgataatcaaccccgtctttgaaaggcatctacgcaacctcaacaattggagtctcggctcagcattt

SEQ ID NO: 3131 - DNA, 630 bp, Aspergillus oryzae
cgacccacgcgtccgggctggtatggcctaggctccatgggcctagccatggccaccaatctccaaaaacacctagcgaccaaaaacgctatgaatctaatctactcgaaccggacaatggcacgcggtgaccctctcaagaccctaggtgctaccccagagaccagcttcgccaaactagtcggtcaatgcgggatcatcttcaccatggtctccaatgactcagtcctccaacaactgatcacatccgccattggatcgggacattctctccgcgacaagatcttcgtagactgctcgaccgttcaccccgaaacggtgggtctaactgtctctaagctgaaagaacagcaagcatctttcctggcggcacctgtgttcggcggtaatccgattgcagtggacggaaagctcgtctttgccattgccgggccgaagaaggcctcggaggtggtcaagccgttgatccaggatgtcatgggtcgcaaggtgatcgattgtggcgaggatgcgactaagtcgtcacttttgaaaattgctggtaatatcgtcaccgttaatatgatggaagctgtcggagaagcccaggttttcgccgagcgtactggattaggcactggtccaatggaa

SEQ ID NO: 3132 - DNA, 634 bp, Aspergillus oryzae
ctctgctaaagagaaaagcatccactagacaggtcgatgatgcttccatgacagcgttgcactgggcttcttacaatggacacacagaaattgtggaccttctgagtcagaagaaagacattctagctatgaccaacattgccggtcggtcagctctgcacttggctgtcctgaattctaaatttgccgcggtggaattgctccttcgcaagcgtgctccaatggaaacgcagtgccattccgggtttgctccgcttcactatgcttgtatcactaaaactgattatactgggattgtgaagctcctgctcatctcgggcgccaatatagaagtgcaaacgaaggatcaacaaaggccaattcatctcgccgcagctcgcggatctatagcattgcttaacttactttgcgataaaggcgcatctttgatagctcgagatgccattggagaccgggcgctttgtgcagcatgtcggtatgggcacacagctgcagttcaatgtctcctagatcgggattcacctctatctctaccgtacgacgataagttgcaggaagattctcctctttgtttggccgcaataggaggtcacctgcccattgtaacacttctgcttcagcgtggcgcttccgt

SEQ ID NO: 3133 - DNA, 640 bp, Aspergillus oryzae
tttttgcccaatctcggtatccgcacatataataaaaaatgaatacgatccgatctacctgggtaggctggggtactctctgcgtcgctggcggcggagcctattatttcgctaagaaatcgattaatgcggaccgagctgctcgatatgaagcagagaacaagcgcaaatcgaagctcgcgcagatggaagccgagtaccgacgccagtcgacttacaacgagaaagtcccgaccccgtccgaatcccctagcttgaaacgggccaacatggcgcagttccagagcgcagcagacgatgtagcctcaccaagcgcagaggccagccacgatcctgccccaactcgtcacgagcccgaatccgaagcagaccgggtgctggagaaaggaaaatacgaggctgctcaaccgttccgacctccccgaggcaatcgattcagctgagcgcgttcacttttatacgtaagggcttgtagaggggattaatttttccctgaagaatagagatggcaaaacgtcatatgcgcatgtcgagagtgtgctatggctttggatcatatcgtgctattatatactttgcgagctgctcgacttcttaaagcttgcgaagtttgcggggattcgtggtatatattttgcag

SEQ ID NO: 3134 - DNA, 644 bp, Aspergillus oryzae
cacgtttatcagtggtttttgtcttgccctcgtctgatatagacgctacaggcagacggcaccctggaaattaacctttctttcttgttttccaaagaccatgcgtggcttacttttggcatagcctgtgaagtgctgtcttgattgtcatatattttgttttatttgttttaggtggcccctcccttaaaacccttaaccaaggcctggctgcctggacgttgagccgcccgttgttataccctaagctagctggctttgtgctagtgactgagcaactaactgacactatccccgcgtaaattatgtccccagtctcgggggctggtcaatctgaccagtacctatgtgttcaaaaacacgtagagtacatcaagaatctggatagcgtgcgtcattcttaccatcttttaacgatgggaaagatggttgacaggtgatgctagaggagggatgagcttgaatattggctcacagagcatcttcgacttaatggagtctactggggcttaacagccttgcatcttctcggctgtcctcaagccttgcctcgtgaagacacaatcaatttcggcctctcctgtcagcgtgaaatggtgggtttggggctgcacctggacatgacgctcatatgctgtacactg

SEQ ID NO: 3135 - DNA, 630 bp, Aspergillus oryzae
attgccttcactccaggtcgtcacaaaatgtggcacacgaataaggtcagctttcttaacctcttcacccttatactaggggctgtggaatcctctgctcaatcttcaactcaatggccccaacaaaccttcaagagtaccccactcgaagcaccatacctaaacgtcaccaagaatggcaagacagagctgggctacctctttttctccccatcaaacagtaactggagctatccaaccatctaccaagatgacggacaactcgtctggcgaggtccattggtcaacacctcagccgaacagccgcaaatgctgaacggcgagcccgtcctcgcctactggaatggcgcgaacattaagggcttcggcttcggctccatcagcatcctaaacagctcctatgacgagatctacaaagtcaccctcccaggcgcggaggagaaattcgtcaccgtcctggaccccgtgacatatccctcctacatcgacatccacgaaagccagatcacagaccagggaacaatcctcgtaacagccgtaaacgtcacacagatggacctctcctcaattggcggacccaaagacggctgggtgcaggacggtctcttctacgaaatcgacatcaagacc

SEQ ID NO: 3136 - DNA, 642 bp, Aspergillus oryzae
ctttattttttctttctgtttctctgatttccttttcccagtccatcaatcgaccataacgcaggaggattagagggaaaccgaacaccaaagggaaaacaaaaaagaaaagaagtgcaaaaacgaaattaaaatttaaagaaccagagggctattcaatccaccgggagcattcttgaattgctttgtccggagtattggttgccttcccaactttcgcttaaccgacgcgatttcaccccccgaaactctttgaccctctctgctatcctctcctctatccgttatctctttgctcacccctgggttgtgcctgagtatcgttgctacttgtggtttctctcgcgctgtcgtttaccccccgttttttatcgctgtgttcgggatttagcgtttccgatccccattctggagactactcctcgttccaacgccgtcgattttcgccaagctacctccagcggaaacacagattctcgatctggggttaatcgctagaggtagttcgaccagctgcgattgaatttgcaactacttgtgctggaaactgagaacccactctggagacgtggaaacccgccacatctaccacacttttcgttcccccaaattcttcgagggaaaaagccaccacccagccta

SEQ ID NO: 3137 - DNA, 576 bp, Aspergillus oryzae
ggaatatccggctttgatcaggacattttggagagtgtcgctcttcccgtgattgaagggctttcgcgttgcgtttcgcatgcaggccttttggggaatgaaatcacaatttcgcctgatttctggtcaatccttcagaggctgcatcagcacaaagagtctgcccctttcgtttttggtctcctccaaaccattgtgaacgcgacgccacccatcatcactggggataattatgagtccgctgtaagccttgcaaacgatttcgttagcgcaggtagtgtaggctaccttgaggaacggcaacgagatgcacactctcggcgctccaaaggtgttaagccgccaaagtccagcactgaaaatgaagtcgttactcgtgggttaacagccattaatatgatctatcatttaagccaacgggcccctgcgcttatcaagcagtcgcatcttgaagaagacgaagcctggtccgcctattggtctccgattttccattctttgacggcacagtgcattaacccttgccgggacatccggcacaatgcagtgtcgactctgcagcggtcgctccctttc

SEQ ID NO: 3138 - DNA, 590 bp, Aspergillus oryzae
ccaacagcgtttatgacgcttacgaaagaatattatcgaaaagccgaaactccgagcaggccaagaagctcttgcatattatagtcggagcagcgaggcctctcacggtccaggaaatgggggtagcgttaagactccaagaaagccacaggtcatatcttgatcttgatattattccagaagagcgctttcgcgacactatacgcgacctttgtggtctcttcgtgaccatacttgactccagactatatctgattcaccaaactgccaaggagttcttgatttaaggcgcctcacgaaactctctacaacgcacatatgacacgttcgaatggaaacactcactgagcccacaacaatcgcatcatatattgttcaggatatgtgtctggttcttgcagctaagggaagtagaaatggcacccctcgatgcaaagaccgatttgtgcatgtacgtcgacgcctatccttttcttgactacgctgcgacgttttggacactccatctgcaaggtgcacatatcaatgcggacacaataatgcagctactccgaagattttgtgatacaggcttgaaggactcgcgattg

SEQ ID NO: 3139 - DNA, 586 bp, Aspergillus oryzae
tcgacccacgcgtccggctctgactcgactctctcaaccaccgtccacctatacctacccatcaccatcttcctctttccttctctttctccccctctctcctatcacctatctttcctctcctcccgtctctcctctgcacattgctccttctccgttctccatcgtccccaacacagcttccgtcgccacccgttatcgccaatctacaagtgtcctcggacgtccctaatcgcctcatcgctgcagcaagagaatattaggtttaaagcttagactataccagcgtcagctcctaatccgatctactgcccaagtttctctcctcagtccaatccgacctgatattgtagtgccactgtcctgtgcctgccctttcgaacacctcgggtgactcatcctcaagccaacgtgtaaggtcacttcggacccacgactctcatccatctgccgaccgaagtactgctacgtttcatcttacacacattgagactacgtgtgagggcgtcgacttgcaagactaagaccgacgacttagttggcctagactccaccgttcgcaacctgagccggttgctggattcgg

SEQ ID NO: 3140 - DNA, 604 bp, Aspergillus oryzae
aggcgctaaggtcgtcattgctgatattgatgctgagaaagccacaaacacagcaaacgccatcaatgccgcgagtccgaaccgggccattgctgttacgggagatattctcgatgatgcctatatcgagtcgttggtgaagaaggcggctgagttcgggaatgggaagattcatgttattgttaataatgccgggtttacgtgggatggggtgattcataagattacggataaacaatgggatactatgttggctgttcacaatacggcgccgtttaagctggttcgtgctgcggccaagtacttccgggtgaaggatggggagcctcgcgtgatcattaatattagtagtacaagtggaatccatggcaatgcaggccaggctaactacgccctcgccaaggccggagtggttggactcaccaggaccatcgccaaagaatggggtccccgcgttcggggtccggtcgaacacgattgcctttggccatgtgcagacccggctgacagcggccaaggagaagggcgcgttcattaccacaccggatggcacccaaggtggcgctgggcatcccgggaaagcagttggagtcgcgccagggcg

SEQ ID NO: 3141 - DNA, 577 bp, Aspergillus oryzae
cacaaatcttgtctcatcttcttccttcttcttcctctttcctctattgactcccatctcagcctcttgttctactctaccaggacttcagaatgtctaaactgtttatcgggtctgtttaacccccctccttcctcccatccccacaccggcccccgtatcagctgtcatctatttcctacttgaatatttcactgacactaccaacagcggcctggcatggcacaccaccgacgagagtctccgttctggtttcgagaagtacggtgctgtcgaagaagctatcgtcgttaaggatcgtgacactggtcgcagtcgcggattcggattcgtccgcttcagctctgaggctgacgccgaagctgcggcgcatgaaatgaacaaccaggagtgagcattcatttatctactgtcatcccctctatcccacaatgctgtcgcaacttctccgcgttggatcgaaggtttacatatctaggtttgacggccgtactatccgcgtcgacaaagccagtgaacgagctcctcgcaacgatggcggcttccaatgccgtggcgggtacaaccaggcgcggaa

SEQ ID NO: 3142 - DNA, 579 bp, Aspergillus oryzae
  modified_base (566)..(566): n is a, c, g, or t
cgacttgggtgacgccgatgcagatagccagacccagcaccatcagggtgttggtgatcttgacagcgctggggcaatcacccccggtatgctagccaagtatcacctaccagagatcatgctacagcacggacctctcgccatccgccatgtcatgggctacctgacgacttcagtgcctggattctcccgaatccctcccgctaaagcacggcgactagtcgttgcagcattggaaggccggggaagtgatgagaaaagtggcggtcctgcaaatgatgttatctttgagaaagtcggatggggtcgttgggacgcacgacgtcgcggcgaaccctcacgggatgtgcagcatcagaacttggcgccaccctcgagcttctcgaactcattctctcagcgcgggatacagattcctgggaagagaggcagtctgcagccttacgggtccagtgtgactggcgactcggctggcttctcatttacggaaatggattatgctgggcacatctcggagcatgaggcggacaagatgtcactcgatgggaatgaaccagagtattggncatctttccgagg

SEQ ID NO: 3143 - DNA, 545 bp, Aspergillus oryzae
tcgacccacgcgtccgaagactggtcggtatgccccaactcatgatgcgattagaaagcgagctcgcgaggctagacggtggttgaaggcgagacctgagaaggagattgttgtcgtgactcatggtggattcttgcattatttcactgaggattgggaggatggcaaccaataccaaggaacggcctgggctaacaccgaataccgtacttacgaattctcctctgaggcccacaagactgatgtggaaggtcatgagctcgagggcgaggacgcaaccttggttgagactatctcttcgcgcgaacgtcgtggcaaagaaggcccggcacctgaccgggaggctcagaaggctctgtacaagaaaggaatccaggggtgggatgaccagggtttgcaactgagcacggctgaacgtaaagcggccaaggttccagagggcaaagaagttgatggtgtccgtgtatgagttgtagggaaatatcctctccctgttcgatatctttttgtagatagtgttagatgctttgttcatggttcatata

SEQ ID NO: 3144 - DNA, 527 bp, Aspergillus oryzae
aatcgcttcactccaaatcgcccgggactccgtgttggcttttcattcgcttgtgtggcacttgttctccatctttcccccgttcctttgcttttaaacaggcacaatgtctgactacggtgaccacggtgacgaggacaactatgacttcgacgccggtcaggactacgatgacaatgagcccgaagacttcttgaaccccgaggacattgagggcgtggaaggcgcagaagcatacggagaggatcactacactcccgcagtcaatggagatcgtgttgtcgtttcgggcgaccccagcgccggatactcggggaaagtgatggagcaagtgcgggaaagaaaggtgccgaacgaccagcgcacgacaaccccctacatgaccaaatatgagcgggcgcgtgttttgggcaccagggccttgcaaatcagtatgaacgctcctgtgcttgtggatctcgaaggagagacagatcctttgcagatcgccatcaaggaactgaaccagaagaaaatccccctcattg

SEQ ID NO: 3145 - DNA, 657 bp, Aspergillus oryzae
ccggtcggtttcacacgagcgttgctattgattctatcggtgttactcgacataaacatggagccaccggcgaagaagtcgcgaaagcttttcgatgatgacagctccagtgattctggagatgagtcaggcggagttcctgtcaacaatggagttaccttcaaagtcaatgaagagtatgcccgtcgatttgaacacaacaagaagagagaagaactgcagaaactggaatcaaaattaggtaaaggttcagcttttggaaagcgcggcgacgatgaatccggcgactctgacgagtcgacctctgaagaagaggacgacgacggagaactggctactgaagcgcttgatgcagaaattatggcgacccttaaggcaattcggacgaaggatccgcgtgtgtacgaccagagcgctacattctatagtcaagccgacgacgaccagccagcaacttctgaaaagaagcagaaaaccatgacactcaaagattatcaccgagagaacctacttagtggcgccaacttagcagaggaagatatatccgaagctccaaagacctatgctcaggagcaagaggatttgaagaatgcaattgtcaaggaaatgcatgcggctgccgacaacgaggatgcatcagctgacaaggagagtgac

SEQ ID NO: 3146 - DNA, 612 bp, Aspergillus oryzae
ctcatgtccttgacagggtaacgcgtctcctcgctgcagacattcatccctacaaaatgagtggcatccgcaaagactaccctcgtccgttattggttcgcagagccaatgtctaccacttacagcgcctgaggcacaatgcagcacctcgacggcggtctcagctagacgagatcctgctcctggatatcgcagaatcttgcgtctccctctacactgagactcggcgcaatgctcaaagtgcaggggagtctgctctcaaagctgtgtggggggctcgccttcttgttatcccgcctctaattcaggctctgcagaaaggcatcaaagaaaacgaccacgcccgaatcaaaggtgcattgttttctttacttctgagcagcgtcgcgaagaccgtaggccgccattggaagtatgcccccaccttggtaagaactttcatcgacgcaagtgcagtcgacaaaccttccgtacaaaagatctgctcgggcgtggtttatcagatcatggactatggccgcgctatggaaaggatggccattcttgaccggaacatcgttgaggcgatcgctccgaagaaggatgttcaggacgagatccagcataagcgca

SEQ ID NO: 3147 - DNA, 240 bp, Aspergillus oryzae
cgactcagtcgatcctgaagaattactgatggagccgcctggtgtgcccctagacgattcgtggtatagcttgtctattggagacgcatatcttgaaggaccctcgggattcgaacccttagctctgtttcagcaaggctggaggatgtttaattaagtatgtttgatggacccgctgaaaccgctggtcaatatgttaaatatgccccaagagaatatttttgcgtatcaaaaaaaaaa

SEQ ID NO: 3148 - DNA, 566 bp, Aspergillus oryzae
gaggcgctgtgcccaagaacaaccattgcgtatagtgtgcacccgcagcgaagaagtaaatgcaagcgaaacggctcgcgactgccgtgacctcagggcgcaaatcgagcagctacagaacaggcttaagcaggttaataagcggctcgtgagggaacggaattctaggcggagacgcactgagatactacaactcatggaaaatcaggaagacgcaaagctcgagcttgatcgtttcctggttgaaagccgaaatctgagggttacaaaccagttacgccgaaatcacggtgctgaagtccgggtcttttgcatcagtaacgaatggtattccaagtaccgccaggatgcgaacagacacaccgacacctatatcgagctcagcggtatccgagaacttcgtcgctattgtcaattagtcccagcagaggctcagtttcgttttacagctgcgtttatagagcatcgcgtgccggctgttgtgaggtccgtgaagcaatgggcccttgctggctcagatgatgtaaccgcagagagagccgatgcacttcggcaaatattaccgg

SEQ ID NO: 3149 - DNA, 621 bp, Aspergillus oryzae
  modified_base (449)..(450): n is a, c, g, or t
cgttttaagacggaggattgccattctcttgggccagtgggtcccagtcaagtcgagcgagctgaacacagaagccatctatcaaatcttccagcaccttcttagcaagcaagacccgttgaacgacttggtagtccgcatcacagctggtagacaactaaagaacgtgctttatccgttcgagttctcccccactgggtttctaccctatgctccctccatccttcatgacttgatgtccttggttcaagaggttgaactctctgaaacaaaaatggggcttttagatacggtccgcgtggctgtaatcaagatggaagaccatattgccccgttctcagatcagatattgtcgctgctacccccgctatgggaaagttccggggaggaacatctcatgaaacaggctatccttaccttactgtcatcgttgatcaactcccttaagnncgattcggcacgataccactcactcatcctacctctcattcagaactcggtggagccaggctctgaaacactggtatatctgctcgatgaggcactagagctctggggggctatcttgacgcaaactccagcttcagcttctcctgaaatcctttctcttcttcctgcatt

SEQ ID NO: 3150 - DNA, 651 bp, Aspergillus oryzae
cggacgcgtgggcggacgcgtgggcttcccagcaccattccgccatacatccatagcaatccgcttcatgatgcagtcagtcaggattatacctacctacatcgagcgtgccccaggcgccccagccacgggaagttcccttcacagtcacgggcattggatgcccgagaatgtcgagcttcgtcgagcttggctttcaagcctgttggacaagaccaaggctgaaatccctcggaagctgcgtgataacgtggaaaacccagttgaaacgttccgaaagctgattgagaatgactcaaccctttacatgctcgcccattccatgttcgacgaagtccccgagaaggccccgtacgatagggacccgactactctcaagaagcaggttcggaactacaagaccatgctatacctcttcaataccctcctcactgaggtgcctgagtactttttgagagacaacccaaacgtacccagcggtctcatcgggtttccgttcaacatcattgttgactggcccatgggtacgccaagtggacggcaattcttcttggataccagagtgaacaagtgtctcaaggatattctgaacaagtggaatgagtttctcaagaccctacagcgcaggtaatggtaataaggaggcaacca

SEQ ID NO: 3151 - DNA, 645 bp, Aspergillus oryzae
gtgaggtattacgggtccgagtcagatcgagctttgaagatcaaagctgctgaactggccggcgcggtgggatgcatcatctactctgatccctctgaagatggctttgttcgaggaccagcctatccggatggacgctttatgccggaagatggtgtccagagaggcggcgtaagcttgatgtcatgggtggtgggagatgttctctccccaggttttgcatccacaccggatgaaaagaaaagacttaaaccagaggaaagccaaggattgaccagcatccctagcttacccatcgcctggcgcgatgctcagaggctcttgcaggttatcaagggccatggttctcaggtgcctgccaaatgggtcggtggtgttcccaatgtagaccaatggtggaccggagacggaacgtcccccaaagtcaacctcatgaacttacaagacgaggaggaaaggcagcctatttacaacgttctcgggagaatcatcggtttggaacaaccggagaagaagatcattgttggaaatcaccgagattcatggtgtttgggaagcgcggacccgggcagtggcaccgctgttttcctcgaggttgtgcgagtctttggcgagctcctaccttttggctggcgtccgctccga

SEQ ID NO: 3152 - DNA, 346 bp, Aspergillus oryzae
  modified_base (281)..(281): n is a, c, g, or t
attggcgaattcctgtgtgatctgcactgcggaccgccgcccgtcccggtcacacaggaattcgccaatgggtagtccaggtcccagtaagggccgagatcctttatactggacaaatgaagtccacaacccaacctccaataggcagacgccaagactatagatatcatgctgcatgctatactcctcttctgggtgtaggccttgccgacggggatgacgatagaggttgcgctcccacttagcgtcaccggtcatatatgttcggccttcggatgggngaaagcgctcgaaaccgacgaggaacgggacacccaaccttcccggcgtagggaagaggatgatg

SEQ ID NO: 3153 - DNA, 553 bp, Aspergillus oryzae
  modified_base (107)..(107): n is a, c, g, or t
gacgatcagataccgtcgtagtcttaaccataaactatgccgactagggatcgggcggtgtttctatgatgacccgctcggcaccttacgagaaatcaaagtttttnggttctggggggagtatggtcgcaaggctgaaacttaaaaaaaaaaaaagggcggcatgtcgttgcattggatccactaacgtctttccactctatctaaagtttgtcgttgacggcatctggacaaccgaccacagtgttccggaagaagacgacggtaaccataatatcaacaacgtgctctatcccgatcagattcggaaagaaaacaccaccaagagtttacaaaacggcaccgcagtaatggctggcgtagcccctgattctacaacggctgcactggctggcgaagtccccaaagagactcgcagggatatcctgggccacgctgccttctcgtccaccgttcctggatcgactacagcagagctcgccaaacatgcccctttcgagcagcgagcgaatgtgcctgggacgttcccagcgacccaagcatcggtagttga

SEQ ID NO: 3154 - DNA, 478 bp, Aspergillus oryzae
tcgacccacgcgtccgcgccaaagtgcagcaggactcggcaccttttctgggcggaggttcctcccgcggtcgtgacaggtcacctggcggcaccccttcaaaacatacctggtggtcgatccattattatgcgcaattcttcgatgtcgatacgaacgaggttctaagacgatgcgtcgcggcagtgtacccgcgcagtaacttcctcgatgtcctggaaggcaacgcggacctgtacggcccattttggatcgccacgaccgtggtcgtgatcctctttttaaccggcaccatctcgcaatggctctcaaacaacgatgaggagcatttcgcgtacgactttacgcttctctctggggctgcgggcttggtctacggatatacgttcgttctaccaattgccctgtggggggcactgcgctggttcggtagctccaccgcggacttgattgagtgctgggcgttgtatggatactc

SEQ ID NO: 3155 - DNA, 524 bp, Aspergillus oryzae
gtgacggctaccctcaagtcctaaccaactgatccctttctctgtttatacagcaagcagtagatgagattgccaaggcttctgagagggtaatggctaactactgggttagtgttcctgttgcgacatatatacttgacccacttctcggagtccgctttataccacgtactcaacaacctcaaacgatatactatcccctgttactcaaagataggcttaaatatgggaacgatggatcatcgtcccctcaatcgcaaagagaagcgctctaatccttgggattacacgttgagtgaggatcagccttcggctagcccacaatcgcggccctcttccccaggcacccaccttcctaatcgggtaacatgtatacccttatattttttagagaacaacagaatgacatcggagacccagatagtgcagtggtagtcgtcctggcccaacgatggctacagcacgccaggagcgctctgttcgattccgtcccttgacgtcctttcccaggccagggaaagcgc

SEQ ID NO: 3156 - DNA, 595 bp, Aspergillus oryzae
ggaagagattcccttccgcaacccaactcctcgtgaatgtctccgcctgttggaccgacgactcgaggaggaaggtgtccggggccctcgcctgtacttgaccgaccctcgcgaggtaactcaccgggagttcacccgagccattcagatcctgtccatgttcccctgctggggtaacgcccgggatattgggctccttgctcggtggatggtatcggtcgctgtgaaggatctgccgctggacggcacaacccttcccgaggtccgtctgaccgacgaacaggcgatggcctgtatgatcaaattgtttaacctgaagcgcgaccgccttcgctttaaccaggatcctaaggctaggactcttcctcgcatcctctctcagccacggaccacggaacgtggcggtgttcgatttcccgtttgacatagcagacgatcagactctgaattgaccgtttctatgctttccttttctattctcgtcctattgatgctcatctaagatgtatcaacatactttgtgatccagccacacagattgaccatagcattggctttttggctctagaattatcatgactggcgttggggtttg

SEQ ID NO: 3157 - DNA, 518 bp, Aspergillus oryzae
cgcgaaatgaaagaaaggactacgcatcaaccgattctgagcagacctgggaagaggctaccccacgacgcaacaggcaatctcgtcgaagcttgcatgacagtcctaatgtggaacgccggcgcttggcttcccctgtctcgccttctcctgcagtcaagtcactcattccaccctcctcgccactgtacactccaacacgtgcaagaaatgctgtggttgtttttgaagatgaaccgtctcccgtccgccgtaaaagctcaggggatgctttgctatctgaggcgagccttcagtctacctccagtataggggatctcttgcagagctcacaatcgagtgacctgagtgatctcagtaagcccgatgacttgtcggaccacgatgaagagaatgatcccatcgttcattcctttggaccctttggagacaatctcttgccccgtatggcttccttcactgctgatggctcaccactgcgcccctcgcgcctcgtaaccagcaccccgctgaaccgt

SEQ ID NO: 3158 - DNA, 451 bp, Aspergillus oryzae
caacaatctgcctaccagaactcctacaatcaaggcggccatggtattccggcccgtcctcccgatcaaccggtctccttcggtcaaggcgctccccaagaatacgcctaccggtactcagcatgcaccggcacgagaaaggctttgctgattggtatcaactacttcaatcagaagggtcagctgcgcggatgtattaacgatgtcaagaacatgtcgacgtacttgcatgagaactttggctaccctcgtgaaaatatggtgcttctgacggacgaccaacaaaatccaaagagtcagccgaccaaggccaatattttgcgggccatgcactggctagttaaagacgctaagcccaacgattccctctttttccattactctggccatggtggtcagacacccgatctggatggcgatgaagacgatggatatgacgaagtcatttacc

SEQ ID NO: 3159 - DNA, 484 bp, Aspergillus oryzae
  modified_base (172)..(172): n is a, c, g, or t
taatcattgggatctatttgacttgatcatcaaaatcgtcaattgtctttttctgtgcactaagtcttcgagctcgacttgttcattttgattaagcatccgcctcggctttacgtcatacatctagaaccaagtactaccagtttcaaggcaaagacttcttttcttagcngttctattgttaccaaatcgacgagaattcacaatggttcatcctacttccacctgttgtaaaacctcaggagacgggtcctgcgttcgcgcagctcaagccaagtgctcctgcggcaaggagagcgctcttcattgcacctgcaacaaggccgcaaccgaaaacactatctctggggctcggtgctcatgcagtatgtttttcctcaccaaatttagcagtgtatgatccctaacgcttttcaaggggccccgccccgctggacaatgtaccctgtgaacgcgcaccgagtgagaaccatccccgtatcgg

SEQ ID NO: 3160 - DNA, 617 bp, Aspergillus oryzae
  modified_base (479)..(479): n is a, c, g, or t
ctgcttttcacgggtgtcgttgtttctttaccttgcattaacccgtgaaactgtacaatatttagcccttgcgttgcaatcatgatcgttgataagatccatgtaaccggcgatctccgagtcgagcgccgtttcgctgctatcaacggcaagacatatggttatctctacagtgcgcccgatacaggcgtatgtagagcgactatctttcttcttcatggcttcccggacctgtcaatgggatggcggtatcagattcccatgctgacggatatgggtctgagggtcattgcgccagactgcctaggatacgggaggacggacgccccagaagatccacatcattattctcacaaaagttgcgccaatgacatcaaagaactcgcgttccagcttggtattccgaagatcattgtcgccggacatgattggggcgccgctctcgcataccgtgtagccctctggcacccagaactagnaacacacatcatcaccgtctgtgtaccatacgccgcgccaacgaggcgatactttcccctcaaagacatggtagaaaaaataacgcctcatttctattaccaactacaggtcatcagtggagagctgaataaatacgt

SEQ ID NO: 3161 - DNA, 472 bp, Aspergillus oryzae
caaacgtctgagagaaactttttccaaagacatgtctcttgcggagcaagagggcacggcgttgaactggaagtcggtcaacaagaaacgcaaatctcccagtcctgggttaactgatggagtttcttcaagcgcactcgctaacggacttgttaacgtgcgtcttttactcaaagaattacctctgttcgccggtcttccaggggacatccttcatttcttaggccttaacgcccaaccccggtcgtatcctcctttcaccgacattatcaagcaggactcccaagggcgggagatatactttatagttcgcggcgaagttgaagtattgactgaacgtacacacacagaggatgtctcacactccgtgccgaacaccattgaacacccgggctttgaagtgaaagccaggctgaaagcgggacagtactttggtgaggttgtaagtctttctctggcgccacgcaggact

SEQ ID NO: 3162 - DNA, 455 bp, Aspergillus oryzae
gattcacgttttggacaatcttttgatgacgattgcgttcggtatcagtgtcttagtcttcgtctcattcgtgaccagcggctttggcacggtgatcgctgctggtgctacctctctgctatccctgagtttcgtcttcgccaccaccgctcaagaagtccttggttcctgtatcttcttgtttgtgaaacatccttttgacgtcggcgatcgggtggaaattgacagcaagccatacacggtagaacgtatctcgttgctcttctcggtctttaccagcgtgacggaccgtcgaaccactcaggttccgaacgtcgtgctgaacacgctttggattgacaatttcacccgttccaatgccatgcatgaaacattgaccattcccatcaagtttggcacgagcttctccgatatcgaacttcttcggcaagaaatggagctctttgtgcgtgaca

SEQ ID NO: 3163 - DNA, 561 bp, Aspergillus oryzae
  modified_base (38)..(38): n is a, c, g, or t
ccacaactgactcatcccctcgtacttccttcctttcntttgactcaacctgtcacggtttggggcgaggccttctggttacattgaaggaatcaggaccctgttaaagcagctccttccttccgaactgtcgtcgtgctcagctcctgcacacatcccccacttgagtcgaaaaccacagctccgataacactttgactggcgcaattcatcaagagactctcgcgtctattacagactgtcaaattcaaaatggtccagcaggacgtcggtgaagtctcgcagctggtccaggccctcgaggccgccagcaagaagggtaagggcaagggcaagcagtctttcacctgcaaaaagtctacttttcccgtggtcggctcggataacatctccgtcgattcgtggaacttcatggattgggattacaaacgtggcgaccttcctacctatgcgcgaggcctcttcactacccggagaaaggacggcgcgcccgagatcgcagtgcgcggatacgacaaattcttcaacgtcgacgaagtgaacgacaccaagtggaggaat

SEQ ID NO: 3164 - DNA, 549 bp, Aspergillus oryzae
gtcatgtctgtgctctcgtctatgcgttactgtctaggagacccccatgactacggtgctatctggtctgcgcttggatttatgcctttcgggcttttcttcgattttatggatggaaagattgcaaggtggaggaagaagtcatcgctcatggggcaagagctcgattctttggcagatctgatttcctttggtatggcaccggccgcggcagccttcgccctcggagtccgcacaaatgtcgaccacctcctcctagcttttttcgtcctttgtggcctgacacggttagcccggttcaacgtgacagttgctgtacttcccaaggacaagactggaaagtcgaaatatttcgagggcacaccgattccgacaacactttccattgcgtcactcatggcttactgggtttctcagggatgggttcaagaagacctaccgctgggagttattgcgcagggcacagcttttgagtttcaccctgtggcgctgttgtttggtctacatggctgtctgatggtcagcaagtctatacatattcccaaaccc

SEQ ID NO: 3165 - DNA, 627 bp, Aspergillus oryzae
tcgacccacgcgtccgcccacgcgtccgcggacgcgtgggttgcgctatgaatagacgttgcgagacttgggactttcgttgaggagggttctcaataccggcctttttcaaaggtacccattagcgttttggttctgcctgggcttagctattttctcaagttctcttctcctcgctagtctacctataaatctgtccttctttcctagtggattagttccttctccaagtttctattagcgttacgttgttggcatgccgcatttactccaccacagaagacgccattcctggccatactgtggaccagggccccgtcgcaacgttccacttttgcgagtggcagagcagcagactgaactcgaacaacagtttctcactccgcttgcttcgggcgactatatcgaagatgatgctgcgtccgcaggaatcgttcctcccaaggccactcgcccccattatcgcatttggccccattcgaagaccacagtcgaacacaccatccccagcaccggccgcagctatggctctggctctggatccttgcggcgtatgatccgcccgccgttggataaggctcggtcgcttttcgtcctgcccaccacgactactgccggtcagaacgt

SEQ ID NO: 3166 - DNA, 513 bp, Aspergillus oryzae
cgccgtcgactttctctctacgaaccagcctgccatgctgggcaacaccactggcggcggcagctaccacggcaacgtgcgatcctccatatcgacactccctggaagcgaaactccagctccctttgtacagactgcgtggtccttctcccaccctaataggcacatccctccacagtctccttccacttcgacgatctcaaatgcacacaatgtgcgtcggacgcgcttggctttccctacccagaaccgtggagtctgccacggtctggctggttactttgagaccgtcttgtaccgggatgttgaactttcgaccaatcccgttaccatggatagtaagagtgccaatatgatcagctggtttccaatctacttccccctcaagacacctcttaatgttcctgacaacggtgaggtggtcgtaacgatgtacaggcaaacggatgatcggaaagtgtggtacgagtggatggtcgaagtctttgcccttgaaggccacatggaaccccc

SEQ ID NO: 3167 - DNA, 622 bp, Aspergillus oryzae
tcgacccacgcgtccgggcgacatgaaaaaccgtgctccacttccggttccctctgggactatccagaacggccattcccgcaatctttcaggctttgacatggctgcccgtagccctcctaatcaaagcaatactaagcacgtcccctgcaaattctttcgtcaaggagcttgtcaggcgggacctgcctgtcctttcttacattctaccgatgctgcgattgactatgcgccgtgtaaatacttcacgaagggcaactgcaagtttggagccaagtgcgcgctggcgcatattctccctgatggccgacgggttaatcgacccaaccctggtgtaggaatgggcggtagtcacctcaatctaggtggcagggttaatccccaagcgtatgtgaatcaagattcagctttgacgaattctgtcctttcgcaacagcgaatgaacggtcaagagccccgatatggccctcaagttcattcgcaagaggaatatgctaccacacactctccacaacaaccatatgacgccattcccaccatcgacgcgggcttggcttaagacgccgggtctaagtacggttctccgattgatgacatgcgatttcccatgtctccaaatcac

SEQ ID NO: 3168 - DNA, 476 bp, Aspergillus oryzae
aaaatacatgctacattgaataacttttgaagtattcttccggtttctctagacaaataatctgtccaaaacatgacgtacaagccccctaaggtcgaagaagactactccgacacatccgaacctcaaaagcgcaagcgcgatgaaaaataccctgagctggaaccagcaactcctcaacaagaattcgagacagaaaaacaacaaccgcccagcaaagcacctaggcctgatgagacgcctgtcgaggagggtaagataaatgcagaaggcgaggtgaatgatgatgatgaggaggaggagcttagtgatgtgtatgaagagggcgaggacgagtttgaggaggggaacgacaaaaacgaagatgacgaagaagtagaagaggaggacaaggaagacgtcgaagataatcaagtagaggcagacgatgaagtagaggaagaaaaagaagaaaaggagaaggaagacactggaaa

SEQ ID NO: 3169 - DNA, 443 bp, Aspergillus oryzae
cggacgcgtgggtagttttggcctgggtaccaagcaggccgcagataccgagaaagcgtcagcgacgaagaccctcggctttggcgaagaagaatctacccggcggaagttggagaggttgccaactcctccgctagatgacgccaaagactccaataaggaagaagatgtgacggcagaagacgaagacgatgacgttgacatgcaggatggtgacactgaggaggaaaatgcggctgcggcgcgggcagcagcagagaggagagaagagcgactgcagaatgaggctcgtgattctcaatcaaatggcgatgtacagatgagcgatgcgtcgaatcaaaaagcgcccgacaagatggaagtggacgcccaagaagaggaagaagttgatcccctggatgccttcatgtctgaattagcagagtctgcccctccgaaaaaaa

SEQ ID NO: 3170 - DNA, 520 bp, Aspergillus oryzae
tgtgagaaggattcatcactcgtgcacgccctgtccgctgcatgcgccggaatagccaccggctcagccacaaatccgatctgggtggttaagacgcgacttcagcttgataaggctggggcccgacgatacaagaatagcctggattgcgccagacaggttatgcaacaggagggaccaaagggcttttaccggggcttgtcggcgagtttcctgggtacaattgagacgacactgcacctggcaatgtatgagaggttcaagtcaatgatctcgaagaagattgatctcaatgagaagagcgagacaaacggatttgttcagggtcttgccatgagtggagcttcgggtttgtcaaagttgatcgcgtgtttaattgcgtatcctcatgaggttatcaggactaggttacgacaggctccgatggcggacggtcgccagaagtacactggaatccttcagtgtgcgcggttgattctgaaggaagagggtgcagcagcgctgtatggaggcttgacgg

SEQ ID NO: 3171 - DNA, 561 bp, Aspergillus oryzae
gatacctccagtgcacctgatgacgagtactcaaaggacgctcggaagctagtagacgttctgcccaaggcattccccgagaggacagagcctattctttctggagaaccaaccatcttccttacgggcggtactggattcctgggcgcgcatattcttcgcgacctccttacccgtaagactcccgcagcaaaggttgtggctttggttcgaggaaagtctgaggagcaagcactggagcggatccggtctacctgccgagcatacggcttctgggatgcagcgtggaccaaccggcttcagtgtgtctgcggtaacctaggagaccctcaattcggcctctctcaagcgctgtgggatgacctgacgaatcgtgtcgatgcggtgatccacaacggcgcccttgttcactgggtgtatccttattccactctcaagcctgccaacgttatgggtactatcgacgccctgaaactttgcgccagtggaaagcctaagcagttctcctttgtcagctctactagcgtgcttgacagcgatcattatgtcgaggagtctgaa

SEQ ID NO: 3172 - DNA, 653 bp, Aspergillus oryzae
tcgacccacgcgtccgctcaccctcccgtctctgccccatcgctcgtcgtgcagaggcttgttctactataattatttggttttatcacacttgacacctcctgtcttttgattcataagctccaaatttctcgatagcacatagatatactttgacgccagttacccgtcagaatggcgaaagaaggcgagcggtcagctcccgccgacaagggcaaaggcaaggtcgacgatgtgaaggacctgcccggggcgaagaagtccccgaccgatgaaaagccacaagcggatggaaagaagaaggatgaagagcccaaggaagaagagctaaacgaggaggatcagcaactgaaaaatgagctggagatgctcgtagagagattaaaggaacccgatacctccctttacggtcccgccttagatgccattaagaactttattaagacctcaacctcttcgatgacagctgttccaaagcctcttaagttcctcagaccacactacgatgagcttacggagctctatgagaactggtccgctggctcagttaaggactccttggccgatatgctttcagttctcggaatgacttacggagacgaggagaactggagacactgaagtccggctgttgaccaagtcagaggaccttg

SEQ ID NO: 3173 - DNA, 255 bp, Aspergillus oryzae; identical to SEQ ID NO: 2639

SEQ ID NO: 3174 - DNA, 605 bp, Aspergillus oryzae
aacagatcggcatgatgagcggggagattgatgcgctctatatctacgatgagcataataatcctctcgtagagcaggtctatcgctcccgtccgccctccgcagctactattctacccctctacctcgcgcatccagctccgcggccgtcgcttctttatatccctaatgctacgccccccgtaaccgttttttcaattgttcagtcaaacttgctttttttggcgctttccgaagttgacacggagccactcgttgcgctagagttcctacatcgtgtagtggatgtacttgaggaattcgtcggagcaccgttgatttcacacaagatacaggcaaactatgaagtggttgcacagttactcaatgagatgtgcgatgcaggtgtcgtatgcaatacggagctaaattcgctacaggaggccgttgagatgccggggtggatggggaagttactaggtaatgtcggcttgtctggatcctctacacctatcttggggccttcgaatacgctcaagcggtcaatctcagccaatgcggcgactcaaggacctgcgataccatggagaagatctggggtgcggcacacttccaacgagctatat

SEQ ID NO: 3175 - DNA, 526 bp, Aspergillus oryzae
ttttgaattattctctccttttcgttcgtttgcactgctttggctctgctatcttaagcgcacgctttgtcgcttgtctttgatccaatcgctctgtcggcttttcactcccaaaaaaaaaaaaaaatccattgaagaaaaattcaactatcaacgactttgtctacaaactcgtcagaacagcctatcagaaaggaaagaaaaagaaatgtctcccgccattgctcaggccggctctgcctccaaggatgtcaagaaggagtccgcgactgctcgacttctgggttccggaaccgctggaattgcggagctgctggtttttcatccggttgatacaactgcgaagcgattgatgagcaatcagacccgaatcacgtcaatggaaggtatgaaacaggtcgttttcaaagagtatgccaacgcttcccttggacgcaagttcacctcacttttccctggtcttggttacgctgccggctacaaggttctgcaacgaatctacaaatacggtggccagccattcgca

SEQ ID NO: 3176 - DNA, 316 bp, Aspergillus oryzae
cgcacgtcacgacatgctgcatgatgaacagtggcccatccgccacaaaagttgattgattggttacatttcttttctttcgtttcttttattattccgtctattttacttattcccctcgtgtgttacgactcacaccggcggctgtttgatgatttgaaatttataatccgtctctgattggatgtgaggagtgttatttgtgtgcgtgttccagttccttgggcacgatgaccctgtcttgcgaggcagcagcagagagaagtgattagcaagagtcatagagagaatggctaataccgcgaattgacgatgg

SEQ ID NO: 3177 - DNA, 552 bp, Aspergillus oryzae
aatttccctcccatattttctcaaaaatgagggaaaatattgctccaccgaggattggagtatgcaccgactggcaaactccggaggctgatgaaagcctcaattattagatcgacatctggtgggcatccaatggggccacccatccctttttgttgagtcctgtgggtctagatccacctcatcgcatgcatcctggatcagcctccgaaatccacttaggaaattgactgtttggcttcgcaaactgccgccattcaaccgcgcttcataaaagtatcggagggtgtggggctcaatacccttcttcccaccgatcaagcccatcagtatgggaaacagccctactccaatagcagagagacgccacaataaacgttctgtcggggatggaaagtgtgagttccacgctattacatgtagaccagcgttcagaaccgcagtactggctgaggccaactctgctcgccaatcgaaaagcatggtgatatcataggcggcgcgaaagatcatatgggttattgagctgtgactcgtcctctctgtgatgaa

SEQ ID NO: 3178 - DNA, 456 bp, Aspergillus oryzae
tctggggtttgatactagtctggatgtcctgaaagccttgcgggatgatgagaaagaagaggatgttattagggagacatgtgacatcgccgttgacagaattctttgggagaattcggaagagaggaagagcgagaaactgaagcctagtgattttacctcgattgacccagccccaccactcccaatggcgtccagccagccttctatttccgacttggaaaaaacattgcttgacacaaagctccctttgttccaaagataccgcgctatgtttgccctgcgcgaccttgcttcgcccccagatcttcctacagctgtcgaagctgtcgaagcgttggcaaaaggactcaaggatccgtctgctctcttccgccatgaagttgcctttgtattcggtcagctctgccacccggcatctgttcctagtctcacagaaaccctcagcgaccagaa

SEQ ID NO: 3179 - DNA, 586 bp, Aspergillus oryzae
gagtatttaccattgcactgttattcctttcctgcacaggttcgctgtcctatagagcagcgcccgtcgagttcctaacccatccattccacctccttttctatccctcgaccccaaacatcaagatggctgatcagcaggagaagactgcttcttcggctgtccccgaaacccagcctcctagccagactgccgagaccacaacccaaacaaccgcaaccccagctccagaggtccaaacagaacagacgcaacccacggagtctggtccgagcgccgccaacactacaactgagcaacccaccaacccacctgccgcagaagcttcgaaggaaaacgcagctccggctccggccccggcagcggaagatgcgccatcggaacctgcgcccgcacaggagcagcagaaagaggagaaacctgcagacaataagcctgagtatctggccaagaaccctgctttgagtcagctgttcgatcgtctgcctactgtgctctccaacagtggtcatgatgaaatgtggggtgtccccctcagggattccagcgatgttccgacggtcaacgttctgatcaaatttcttcg

SEQ ID NO: 3180 - DNA, 588 bp, Aspergillus oryzae
caaaatttctgtatagatgctagataggacatgtcttacatggttcttgggctcgccatcggcgtcatattcctatactttataagatcatttttagctagaaccaagtcgtttgcaccactccctcctggtccccggccaaaaccaattattggaaatctctgggatcttccaccgcaaggcactcgggactggttacactggttgaaacacaaagatctctatggcccagttagctccgtcaccgtgttcggccaaacaatcatcattctaaacgaagcgcgtctcgcatatgagctcttggagaagcgttccgccatacactcatctcgaccgtcgtgcacctttgcccatatggccggctatggtgatattatgaccatcctcgagtactctgaacggctccgcaccacacgcaaagttgcgcaccagcagatcggctccaataaagctatcagccggttcagccatatccaggatgcggaggtttgtcgatatctcttacggatgctgagggatcccgggaattggctcgaacacattaagaaggagaccggcgcggttatactgaagatcacttacggatac

SEQ ID NO: 3181 - DNA, 593 bp, Aspergillus oryzae
tttgcgaactgaaatatggggtccgcccacgactcacgatcggcgggcaaccggatgccacctttgcgcacgttcctgttcatgtcgaatacatactcacagaactattgaagaacgcattcagggccgtggttgaagcgggcaatgaacgcgaacctgttgaggtgacaatcgccgctgcgcctgacgttccgagaaaccatgtgcgagggccgtactcggtgtcggcgggaacatatcccagccatcccaactcggatgtgggattcgaaatggacagcgtcgtaggaaccgcagatgcgaacgaatcaatcaagttttcatctccctccacgcaaagcattacgatcagaatccgcgatcggcgtggtggaattcctcccgagattctgcccaatatctggtcctacagtttcaccactttttcagatctcgacttgcagggatcagagaatgggaatatggatgccctgaatgccatgtcctccagcagtggtcatttgagtagcatcgcaggactcggatacggattgccactgagtagggcatatgctgaatactttggtggcagtatcgccgtacagagcctgtgg

SEQ ID NO: 3182 - DNA, 577 bp, Aspergillus oryzae
atatcagtcatacccctctgtctctgtcaaatgttcattcaaacaagtgttctacaagataaactctaagctcatcaattgatgtctaacctcagaagtatatcgaaacctcttcttaccatgtcacccaccagagcagctcaagtcgaagaatacggttggacagcggtgtcctgcgaccctcagcagcgagctgctacaaacccacctaccaagccttctgttccccagttggtcaaagatacaactcttcccgatactcctctagtcaaagatgccatagaatatgttaaggcagagctacccgctcacacttttaaccacagcatgcgtgtctactattatggccttgcaatcgccagacaacacttcccagaatggaagttcagcgatgaaacctggcttctcacctgcctcttccacgacatcggcactatcgacaagtacacccaagacgtctttatgtccttcgacatctacggtggaattgtcgctctgaacgtcctcacggagaaaggtgccccagcaccccaggctgaaagtgtcgcagaagccatcatccgtcatcaggatccgg

SEQ ID NO: 3183 - DNA, 620 bp, Aspergillus oryzae
gcgtccgggacgatcttttcgtctggtggaccaccccggctaaccgcgacaagtatggtcacatctctcacactttcactcatgaagagcagaacaatgccacctacaacgacgtgaagagggagatctctttcaaccaggcttggttgagacagagtggtttctatgatgccaagtatttcacatccaacggtatcatccctcccgccattactgggttgcacaacggcgatgccttgcgggcctggtacgaaaacggcatcaccaactgtgttggtgataacactcgcacaccgctcctcaaccagcagaacagtatgtggccttacttcactacctccgcatcggatggattcgatggtatgcaggtgaacccccgttgggccactcgcatctactacaactgcgatacccctgcctgcaccgttcaggaatggattgacacctccgccggcagcggtgacttcagcaacctgctcgcgaccgagaaggccgacaccatgcgccatctcttcggtcttcatcgcgacccttacatgttccaccaggccaatcttcgcaatgtcggcgttgacccggttgagatcaacggtgagactggccatggtccatcatgcagg

SEQ ID NO: 3184 - DNA, 587 bp, Aspergillus oryzae
aaaaggagagctctacatctccgatctgaacaatgtcgcaaacccatacagactcggtaccgctgcccgtgcggatgatattgagtgtttggattggaataaaaaggttgcacatatcttggttaccggtagcagtgcaggatttgtcactgtttgggatgtcaagacgaagaaggagagtttgactctcaacaatatgggtcgtaaagctgtcagcgccgttgcttgggatcctgagaagcctacgaaactcgttacggcgacaccattggagtcggaccccatgatctatgtttgggatctccgcaattcccatgctccagaaagggtcctcaaaggtcacgaatccggtgtcttatcgctttcatggtgtagccacgatcccgatctgcttctttcttctggaaaggacaatcgcacgctctgctggaacccacaaacaggtcacgcctatggcgaattcccggtcgtcacaaactggactttccagactcgttggaacccccacaaccccaacttcttcgccacagcatcgttcgatggcaagatcgcggtccagactgttcagaacaccagcactgacactg

SEQ ID NO: 3185 - DNA, 397 bp, Aspergillus oryzae
cacgaatgtcatgatattgtatggtcacgaaatgttttccagcagcaaacgatgagcgcaaccgagttgccgacgtatagtggaggctagttcccgcttcatgacgctgctttttttgcatttatgtgcctgattagcgtatgtctgtgtgtgcatgtgtgtttccgttgatttatcttgattactgctcttatcattctgatcgtgttatctattatggggattgtatctcaatatcggagtgtgggaagggttgtgtggcatgaagtttcactcttattggttttcctttcctgtttttaatccaaattagtgtgatagcacactccgctgcccttggttgccttgaagccagagccaagtcacagggtaataaatatcaattcatatacagacc

SEQ ID NO: 3186 - DNA, 262 bp, Aspergillus oryzae
ggcctctcatcaacttgccattgcgaaggcctcattctctgcggggcttttacgcccagatcccacgtccgtcccgcgcgacgagatcacaacattccatacctcattcgacagggcgctatcgcattgctcctcagcaaacatccagacctgcaaagaatggcttctcgagtacgttgtctcatcgtcaaatcgagtgaatgtttgggcaaaatacctggttgcgctgtctggttcgttcagcgaagacaggcagcaaccg

SEQ ID NO: 3187 - DNA, 548 bp, Aspergillus oryzae
gtttcaccagagtcgctatatcgactcccatcttggaggttccactcctcttatccttctctcaaatttctcacagtcccgttcgccaactccgtcttccatccattttcgagaacccctcccccgcaatctcactcctctcggggtgtagatcgtcgagacgctctacgccatgacgcagactgcagctgggaaatcaacgggaggtgttctccaaatccctatcgcagcgacacagaagaacaccgccaacgctgccgccgctcccactcccaagaaagcacccaaaccagctgcaccacggctcaagctcctggtgcggagactgcctccgggactaacacaggcagaatttgaggttgctgtaggccctgaatggaaacttggagcgggaaagatcgattggtttcaatataagccgggcaaggtttctaaggacccagcgaagccgtcacgaccctcgcgtgcctacgttcacgttgtgtccagcgaccatatcatcccactctcgaataaagttcgtcaggtatctttcacagacgctcgaa

SEQ ID NO: 3188 - DNA, 564 bp, Aspergillus oryzae
aggtcaactgtttaacaagaggggaaagcaggaaaaagttttccaacaagtcaattggtttcattcttccttcacgtatctccgtttcttgcgcaaaggcaacccgcactccaccctgacccgtgacctctgatcagcttcttgagagagaaccagtgtttcgtttcttggagaagagcccaagagttcaactctgcaaaacgtgctccgtccctctgacaagagaaccgcgatacaatatgtcagcaaatagtgcgagtgctcctcggacaagttggcaggaccaacttaaagcccactgcaagaaccataaactcgacgcacccctatttaacatctacaccgaacgacgaggtggtcgcacggcttggacctgcgtcgcctctgtccaagggaggcagtatccggctcaattctggtacgacggcaattacgtcaataatgccaaagaggatgctgccgaaaaagccctgaatgtactcagtccacagccgtcccgtaataacaccagttacccgggccaaatgtatgtttgcccgcctcgctgagcgacactcctggttt

SEQ ID NO: 3189 - DNA, 467 bp, Aspergillus oryzae
  modified_base (274)..(274): n is a, c, g, or t
ggttggtcagctttttatcatcatctcaaccagtgaggccacgaccatgtctggacggcgctggaaagaagccatcgcaaagtccgcgaaagacgtgctttccgtggcaaatcccttggtggtattgggtgctccgtcgaatagttacgctcattacgtggcgaccgaggaagaataccatgtacaacgctatgagggtgcctcgactctctacggtcccaacaccctcgcggcatatatcaacctcacactcacatatcttccatatctcggngacagctccagcctgccagcactagactcgaaagtgaaacctcctatcaacacggataagtctctatcgtttattccaggcgtcttgtatgacggtagccccatcggaaaaacgttcggtgatgtcatttcgtccgtcgacaatgccacatatggacctggtgacactgtgaatgccaccttcgttggagcta

SEQ ID NO: 3190 - DNA, 518 bp, Aspergillus oryzae
cccacgcgtccggttcgcttgactctacaccaatcaaatttaattgatccgattcgtgacatcagaatgcctttgtccggccactgtctgtgtaaagccgtcacctataaggctgacgtcgaggcgccgctcatcaccgcatacgatcactgcgacgattgccagcgtcagagtggatcaacctattctctcgtcgcggtagtacctaaggacaaactgacgatcaatggacccaccaagagctacgcaggacagggatcatcaggcaaagcagttcaccggattttctgttcggaatgcggctcccctattgcccacgacccagaagctgccccggagatcatcgcccttaaggccggcacccttgatgtggagatcaagaagaacctgaagcctgacaccgaaatctggactgtcagcaagcttccattctgccaggaacatctcgcgaagcctttcgagcacatgccgtaaacacaccatggcgaatggatgatttttatagggcacaatgattt

SEQ ID NO: 3191 - DNA, 517 bp, Aspergillus oryzae
gaggttagttccgacaaccttctcaaagaatacatcaagggtgtgcagggacacaaggacaaagtacagggcttgcagaaggaattgctggcgaaacttgcagaactcgagaaggtagaaagcagcaaaaccacgagtgattcgatacataccggctttgacacatcctttgtctccaagaacgattctaagggcaaaggaactgaaaccaagaaggcggaatccgttgagctgctgaatcctaccgcggtatcggggtcttcgtcgcagaaggcaaccgctgatgaagaggaagaggatccggaaaacatgaaggctagtgacctggccaagaggctcgcaaagatcaaccgtaacgactaccgtgccttgcttcagttcatttctgaacatccagaaatcgtcgcagagaaggaaacggatggtttgctagtcgaagcattcaatagccaaatggaaggtaaagaggactatgctcgtacatgcgttcaccacggcctgctgctgcagtattgcc

SEQ ID NO: 3192 - DNA, 595 bp, Aspergillus oryzae
aatcaccgttcataaaaagcttgtggagcagaccaagacagaacgtatgatcctagagagtgtcaaccgccatccatttgttgtcaagcttttctacgcttttcaggaccatgagaagctctacctcatcctggaatatgcccaaggcggcgagctattcacgcacttggccatggagcgtatgtttgatgaagatgtggcggcattttatatggcggaaatggtcctcgcgctcgagcatctgcaccagaacgtcggtgtgatctaccgtgacctgaagcccgaaaattgccttttggaccacgaaggccaccttctactgacggatttcggtctcagcaagatatctgccagtgatgatgaccgctgcaactcttctctgggcaccattgaatatatggccccagaggttatccagggcaagccatacggcaaagcttgcgactggtggtcccttggggcattggcatacgatctcctcacaggatcacctccgttcaaagccaataacaacgccaagctgcaggagaaaatcctgaagcagaagttaaccctgccctacttccttggcccggacgccaaagacctgttgacc

SEQ ID NO: 3193 - DNA, 520 bp, Aspergillus oryzae
caaagatatttcttctcccaaccacggcggtttaggcccttattttgagatttctggccggctctagtcaagatgtcgtcagatgagattgtctggcaggttatcaaccagcaattctgttcctataaactaaagacaaccaaaggccaaaatttctgccgaaacgagtacaatgtcagcggtctctgcaatcgccagtcctgcccgctggccaactcccgctatgccacagtgcggtcagatcccgaaacgggcgtgatgtacctctacatgaagaccgtggaacgcgcgcacatgcccagcaaatggtgggaacggataaggctgtcgtcgaactacgcaaaggcgctggagcagcttgatgagcgactgatctactggcccaagttcctggtgcacaagtgcaagcagcgtcttacgaggctgacgcaggtggctattcgcatgaagaagctggctaaagaagaggagagactaggagagaagattgtgccgaagatggcgcctaagattcggcgga

SEQ ID NO: 3194 - DNA, 585 bp, Aspergillus oryzae
tcgacccacgcgtccgccgatggctacgaaattgtctcgggcggcggagatatacttgtgtttagaaagtctctcgtggagaaagcgaagagcgagcttggtgcctatgtgagagacgaacccttgttcagcgatgaggcttcacgtcgatcaattactgccgacaccgctagccctgcatctggtcctggtcctgatcgctctgaaaccaatgtacctcctccaaagagcacaagtagagctggcaaaatcctacgccggatgctcatcggtgggtttgccacggcagcaacgtgctatgccctcggtgttgtcagcgaatattttcgaaccggtggacaagatggacgaggtattgacgggtttaccgaatttgaatccgaaaggcggcacagggatcgaggttaggaagtttttgtgacgtgttgctgtggattatatgcaataactacacatgggatattacgagcttctctcagttaagggccttcgaaaatcacgtcggcatcatctttggcacatccatcatcatgcttggcctccagacccagtcccaccacggttggcgaaaatctttgaatcctc

SEQ ID NO: 3195 - DNA, 666 bp, Aspergillus oryzae
cccacgcgtccgccacaacgacctgacggctcttactttgttcccaccgtcaacatgtggacgaccactagcggcctgagtggtcggtcgctccgattgagcatcacctttgccgctgtcgtgggtttctcgctttttggctacaaccagggcatgatggctggcctcctcaacggcgacgagttcgtggactcttttccaatcctcaaaatgcctgacaatccgactgcgggcgaaaagcactacatcgacgtcatccgtggtgctgtcacatcctgttacgagcttggctgtttcttcggcgcgttattctccatgttcttgggcgacaaactcggccgtactcgcctgatctttatgggtgccagtatcctgatcattggggccttgttgacaacggtctgcttcactggtcattgggaagttggtcagtttgtcatcggccgtgttgtatcgggtattggaaatggtatgaacaccgctacaatcccagtttggcaatcagagtgctccggcgctcacaatcgtggttttctggtgtgctttgagggcgccatgatcgctggtggtactttcattgcctactgggtggtcttcggtatgtcgcacgccgccgattctgtccaatggcgattccggtggcgctgcagatccttttcgcgttgg

SEQ ID NO: 3196 - DNA, 605 bp, Aspergillus oryzae
cagcacaccccatccaagatggcgaaaatcaagaagaagggaacttctggccaggccaaaaactatatcactagaactcaggcagttcgcaaacttcagatttccctgcctgacttccgtcgactatgcattttcaaaggcatatatccccgtgagcctcggaataagaagaaggccgccaaaaactcgactgccagcactactttctactacacgaaagatattcaatatctcctgcatgaacccctcctccggaaattccgtgaccagaaagcgctctcgaaaaagattgctcgctcccttggacgtggtgaagtgagcgacgcagctcgcctggagaagaaccatgcgccgcagctcactttggatcatatcatcaaggagcgctacccaactttcatcgacgctctgagagacttggatgatgctctgtcgcttctgttcctctttgcgaaccttccttccactgcacatgtacctcccaagacgatcgcgctttgccaacgcctttgccatgagttccagcactacctgattgtcaccaactccttgcgcaaatcattcctttcaatcaggggtatttactaccaggctaccattcaggg

SEQ ID NO: 3197 - DNA, 581 bp, Aspergillus oryzae
ggacggcacatctaagattccaattatggcgccagcaagtattacattaattgttgagccccggggtaaaccgatcaagaaactccctaaggaaattcagatcaaccccaatgcccccgcccaggacatctatgcggcgctcgcggcggcctccggctcttccatccatcgcctgagaattaccaaaggaagcgaccgcagtgtagtacccaattcgaaagagaccaaagtcgatgataccggtctgaaggagagaagtgttgtccatgtcaaggaccttggtccccaaattggttggcgcaccgtattcatcattgaatatttcggccctctggtcatccctgctctgttcctctaccctcttcgtccatacatctattacaacttcgacaagccgcttcctgaaccatcctaccttcagcaactggtctgtgcattactgtccatccatttcctgaagcgagaattcgagactatcttcatccaccgcttcagcaatgctacgatgccagcacgcaatatctttaagaatagcgcacactattgggtcctggctggcttgaacatcgcctattgggttt

SEQ ID NO: 3198 - DNA, 494 bp, Aspergillus oryzae
gatccaagatctgcagcacaacctccttatcaaagcttcttcaaaaccgagcaatccgggagaggagcccgacctcctagttgaggatccaataattgcgtcgacaatagcgctcagtttgaacacgatatgtgaaggtgaaactaaaggggaataccggatgcatatggatgccgcaaagcatcttctaaagcaccagaaaccgaggaacgaaaaattccggcagttcattgttgagttctttcaataccacgatgtttccaactcggtcacctcgctggaccgacgaccggcccatctaaatggcgaccttcgactacccgactttgtgccacacgcacaggcgggaatgtttctaggggtatttgatgggctcttcaactacatctccgaagtgaccaggttgcgagacaagatcaggcagcgacacaatgaagggtatgagcctgcggttgactaccagatattgagtgaggccgtctcgattgactccg

SEQ ID NO: 3199 - DNA, 280 bp, Aspergillus oryzae
  modified_base (47)..(47): n is a, c, g, or t
ctcaatctgtgacagcgtgatgtctggtcgtttcgtccgttcctctnaataccgacacgtcttcgggcggaacacaagaaaggagcaatgttatgacaacctccgcgtgtccgcaaatgcctgggacagcaatctcgtcaaggtcaaccccaagtacctgtctgtaaactgggcagctggtggaggtggtgcttttgccgtcattcccctggaagagcgtggcaaattgcctgagaaaattcctctgttccgcggtcatactgcagcagtcttggatacc

SEQ ID NO: 3200 - DNA, 534 bp, Aspergillus oryzae
actacttctagatcgcgagcggccgcccttttttttttttttttttgttattgatacaagtaacattattatgatatagatctcatagtaaaaaggtacagttggcataaccatgtataacaaatgcgggtatttgtacatacaatcgcttgacgataatcaaaagtaacaaatgctgtctcaacatatgcaaggaagagataatagaaggaaacattcaaatgccgacctcgacttaaccagaagctcagagactcggggcgaatgaccggaaccaatccaataatcataccgtgctcatagtagttttcagatagcgcagcgagcaatcatgtcaacataagggtggtccagcgatagaatacaacataacagttagaccagcctcccatctggaccccggccacattagctccattcaggatagatccatatcaacctcttcgcgcctacgaaggaaggtgggctcatcgaaatcatcaacgtcaatagtcgcttgagtcttcatggcaacaactgacgtcgctgctgccc

SEQ ID NO: 3201 - DNA, 375 bp, Aspergillus oryzae
  modified_base (163)..(163): n is a, c, g, or t
  modified_base (168)..(168): n is a, c, g, or t
  modified_base (297)..(297): n is a, c, g, or t
accagaccgacccaacgcacatgttttctgaaggcatccatgaccgtgagagccccagtccagaagccgaccgaagcccggattctgaatcggaaatcaatacgaatccttctattatccaaggcccaatcggaggaggcatgcatggaggtaactgggcatntgagnagacgccagataaccgtggccagtcgcctatatttgacaatgctggctccgctggcaatacaggcccggggtcaggtgaccaaccggattacggtcatgactactatgaaacgaacgactacaatcccnataactaccttaatcatcagtactcaagaggtccgttgtttggaacgccgccaggcaaggatgagggctatgtgtccg

SEQ ID NO: 3202 - DNA, 565 bp, Aspergillus oryzae
cggacgcgtgggattgctagctacgcaacagaaggcagaacatgacgccgaggatgactcttcaaaactgcggtatccattgcgcacactggatgatgacgaactgaaggctgtgacttcttccgaggatttcctggacttcgtcgaacgttccgcaaaggttattgagcgtgctctcgatgaggaatatgacgtactagcggattatgagcttggtggacttgatggcgacgtggaggaagatgacgaacatggaaagaaaaggagaggcatcagagaggtttgccagttttgggacgaacgatggagcaagaagcgcatgatcagcgacgtgagcttttctccaaagttcccagagcttgttttagctgcatacaccaaaaacccatctgctccccatgaaccggacggcctggttcagatttggaaccaacacctgcaatcccgccccgagtatgtgttccattctacatccgatatcttggcggccaagttctccccattccaccctaatcttatcgtcggcggttcatattccgggcaggtcctgctttgggatactcgg

SEQ ID NO: 3203 - DNA, 523 bp, Aspergillus oryzae
gccagggccagactcggaaagctcttgatattcttcgcgagatgcggacacgtctcaaaatggcacgtgggtggttccgtacactcaaccgactccatagttatttctccaaggtcaaacaggatttccgccggcactcccgcaaattagactcgatcccggaggttatggacatacaaaccaatggtccccgacctgtccgtgaaggtggagtgggtggcggtcttgaagaattcaaaatgctggaaaagttgttccttgactttggttctatcgaagaccagttaccagaaaacggcggcgatgaggatggcgcggcaggagtcagtgatcgtgtgaccaacatcagcgacgccggcagcaacactcttcgcagtgatccaggagaacctatggagatgccgctagatggcgccggtggacgccgtgaatcctgggtacccatcaacagtcccggtatgccccttcctggaccagatggcgaacgacgtcctagtctcccattacctcccggccggtcttt

SEQ ID NO: 3204 - DNA, 371 bp, Aspergillus oryzae
cttcccccctcttccgaaaataaaatatcttaatacaccatcctcaatcacttagtcaaacaggaagtgctaaaaatgggtgcgccacccaaaaccgctcagaacttgtcctttgtcctcgaagggattcataaggtcaaatttgaggaccgaccaatccctcaactgagagatgctcatgacgttctcgtggatgtcaggtttaccggtatttgcggtagtgacgttcactattgggaacatggctcaattggtcaatttgtcgtcaaagatcctatggtactaggtcatgaatcttctggcgtaatcagcaaggtcggctcggctgttacaacattaaaggtgggggatcgtgttgccatggagcctgg

SEQ ID NO: 3205 - DNA, 531 bp, Aspergillus oryzae
agtcacatatacgagggcacatcatacgatcaaaatttgaggagaagcgtcgatactaccgggagaacatggaaaaggttatcaaggctcaaagctttgtgcgaggtaggattcaaggccaggcatacaaaagtctcacaagtgggaaaaatccacccgtaggaacagtcaaaggctttgtacatctgctgaacgatagcgaattcgatttcgacgaagagattgaattcgagcggatgaggaagctggtagttcagcaggttcgtcagaatgagttggcggaacaatatatcagccagcttgacatcaagattgctctcttggtgaaaaacaaaattacactcgatgaggtcgtcaagcaccagaagcacttcggtggtcatgttggaagtctgttgccaaacagagaaatcgcgtcaaaggaccccttcgatttgaaagccttgaacaaaacgtcgaggaggaagctgagcagtatcaagtcttgttcttccttctccagacgcagtctcagtaccttgccaaactttt

SEQ ID NO: 3206 - DNA, 410 bp, Aspergillus oryzae
ctttcaagctgcacttctgctcattgcagaagtgctccttaagcttaatctatcagatgtaatcaccattgctcaaaagcactatgtctcctgcacctgtcgctgcctctcagcagcaggactcacaacttcaaaccctggccaaagctttcgaagctcttctgctaaccactcagcaatatatctgcaaggagagaatcttgcaacaaaggctggaatatgcttatgacgagtatatgaagctcgcaggtcgacttcccggcggtcttgacactcatgccaagattgtctcagagaagatccgcggtcactcctccgaatccgagaaccaagaatccgtgtctttcagtcctccggatgtagtaagagcactagcagagtctgggaatgtaggcgaccagactctgaaa

SEQ ID NO: 3207 - DNA, 368 bp, Aspergillus oryzae
gctcttctggcagttcaagcgattcttctttcgtggaatcgagcaagatgtagtcggcttgcaaaagaagaagaatatccttaccggcgacatcgaaatgacccatgcccacgccaaacattatgataacagaactgagtacatgtactccttcctgcaggtgctgacagcatccactgcttcttttacccatggtgccaatgatgtgtccaatgctattggtccatatgccacgatttatgacatttggcaatctggaaagctcaactccaagagtcctgtcccttactggattttggcctttggaggtgctgctatcgccattggtatctggacctacggctacaatatcatgcgaaatctcggta

SEQ ID NO: 3208 - DNA, 272 bp, Aspergillus oryzae
cggacgcgtgggcttcgcaagagtattccgtccccttatcggttctccatttcgattccagaatcgttccataccggtccaagcgcaacacatccgagccatgcatatccaatcgattccgatgtggacggggaagggcaataattatgcctacctggtgacagacgagccaaccaagaagtctgtgattattgatccggccaacccgccagaagtagcaccggtgttgaagagtcaaattgaagatggcaagattgatctgacagctattg

SEQ ID NO: 3209 - DNA, 601 bp, Aspergillus oryzae
gacccacgcgtccgctttccaatctcatcggtggcataggctacttccacggtactgacattgttgaccgttccgccgcgccagagtacgatgaggagaatgaaggcttctgggaagaaacagccgaggcaagggctcgagctcaacctgtccttgagggcccgaaggatctctttacttgtgttccctctcggcctttcttccccagaggatttctctgggatgagggtttccacctgattccggttgttgaatgggacacagatcttgcgctcgaaatcgtgaagagctggctaagcttaatggacgaggatgggtggattggtcgggagcaaatcctgggcgctgaggcacgcagcaaagttccacctgagtttaccgtccagtaccctcactacgccaaccccccaacccttttcattattctggaagcgttcctcgataaactagatgccaacaaaaatatctcggttcaacaatctcctgaggatatcgcagagcgtctccgttctgcctatgtgcaacagccggagttgggtgaagcttatatccgttcaatttacccactactgaagaacactattcctggtatagaacactc

SEQ ID NO: 3210 - DNA, 674 bp, Aspergillus oryzae
cgacccacgcgtccgcggacgcgtgggttcgactgctctgaatccgatcagatcctctacggctcattctgtgggtcgtcccgttcacttccagccaactgcggtaccgcattcgcatccggcgtcattccagacagcaaccctctcctgctactgtcactcacattccacaaccttccggaagtcttttttctcttttttttcccgtcaagaaggatccaagtatatcatctctactccctcgctttctcgggaagtccaccatggactatacgatggaggatactcagaactccgcacctgaggcgcttgaggcgtccaagctgaactcagcaccccagcggaatgacagccaaagcgtaactaaacgcctccaatctgaactgatgcagcttatgctctcgccttctcccggtatctccgcatttcctgatgctgatggcaacctcacttcctggactgccaccatcagcggccccaacgagactccttatgagggcttgacattcaagctctcgttcgccttccctaacaattacccttactctccaccaaccgtcctcttcaaaacccccatttaccaccccaacgtggacttctctggacgtatctgtctggatatcttgaaagacaagtggagtgctgtgtacaatgtgcaaagtggtcttctggac

SEQ ID NO: 3211 - DNA, 547 bp, Aspergillus oryzae
aggatgctctgaacctggtgcagttgcttggcaacattcaacagaacatcgtcgatgcggacgacccgcagtctcagtatctgctccactgctggggccgcatgtgccgggtcttgggtcaggacttcgttccttatctccctggtgttatgccccctctcctctccgttgcggctgccaaggcggacattcaactactagatgatgaggatcagattgaccaggttgagcaggatgaaggctgggagctggtacctttgaagggcaagattatcggcatcaagactagcgcgctggaagacaagaataccgccattgaattgatcaccatctatgctcagatcttggaggctgcctttgagccgtacgtgctggagactatggagaagattgccgtacctggccttgctttcttcttccacgacccagtacgggtgtcctcggctaagttgatccctcagctcttgaactcgtacaagaaggcccacggtgaccaatcacctgggttcgcacagatgtggaacaaggtggccgagaagattatcga

SEQ ID NO: 3212 - DNA, 393 bp, Aspergillus oryzae
  modified_base (156)..(156): n is a, c, g, or t
cgaggccgcggctcgcggtgccgttttggtcgccaagggcgaggtcgctcccctcaaccccactgaggatcgcgatgctcagatctttgtgtacaacaatatcttctattccttcggcgctgatggtgtcggcactttcgcttccgagggcggcgncgaagctgctcgcgtagccgtcggtaaagacgttgtaggtattaaggcggtcaaccagctagatatcaacggcctgttcacacccggaaccgtcgtcgtggactaccttggaaagcgtattgtcggccagagtattgtgcctggtatcttcaagcagcgcgaacctggtgagcaccagatcgactacggtggtgttgaaggcaaggacgtcgtggctacccaccccgactttgtccc

SEQ ID NO: 3213 - DNA, 557 bp, Aspergillus oryzae
cacaccctcttttttctatttatatttttctgcatccaacccgcccattccctactatggattaaccccaccgatagcgcgcctccgagttccctcgatcctcttctgttttcttgtgaactctcctcccctccctccaccaaccgcacttgcatttcttcatgacggcccggacccctaacagggcgactggtgccccagaaaatgcaaatcccactgttcgagaccaaacgcagcaggatcagggggaacggagtgaatcgccagccatacccagccttaccaacaagaaacgcccgcggtcccaaccagacaacacctccagtcctgcctgcaatcagtgtcgcacacggaagattcgctgcgaccgacagcaaccaaagtgttccaactgtcgccgggcggatgtcgaatgtgactttgccactaccccgaagcgcgtcgaccgcaccaaacaactcctaaatgatttcagcggtgtcgtggcccgcctcgatcgggtggataattcgctggcgaagctatcggagcagctgcagcaacagcagccatgtcgg

SEQ ID NO: 3214 - DNA, 532 bp, Aspergillus oryzae
aaaaggcattcattctgctcctgcaatcacaatccctggatatcttttatccttttcttgaatacctgcatattttcagataattgtccaggcctgtgagatcaactaacccatccgaaccagattaccctttgcgtcgatgtaagcatgatcctcctttccctggagtctcttacggtcttcctggccgtttcatccgccagctatggtcttcaaccttcacaaatatcttcagacactcctctctcgtcgttgatcgcatcggcgaagacacatcttgctggtggctctccccgcgatgcgttactctatttcgacgcggctgtgtcaagggatcctacgaactacatcactgtcttccagcggggtgcggcttatttgtcactgggtaaaaactcgcaggtatcagatgatttcgaccgagtattgcagttaaaaccagattttgagagtgccctcctgcaacgagctcgccttcgagctaacactgctgactgggaaggcgcattgaaggatctggaaaaggccggca

SEQ ID NO: 3215 - DNA, 484 bp, Aspergillus oryzae
cggacgcgtgggcgaatacgagcggcatggacagcgccacgctgaacaagattcgctctcggagatcacatcacaagtcccggctcggttgtaaaaattgcaagaggcggcgggtaaaatgtgatgagaagaaaccatcttgtggaaaatgcgtgaaccattccatcgaatgtgacttctccgtatctactccgacgtcgccatcaccatcaccacctgctgcatcgtcagctcatcagcggtaccgattcaggcaatccaaatatcagactttagcttccccagcgcccaatgaagcacaacgccctggcggcaactctatcgccgtccaatgcgatttttccgccaatattagtgctatggtcgggatttcgtttgcggatcttcaactctttcatcactatctaatctcgacatatcgcaccctcacagacgaagcatccgatccatatgatgtttggtcgatccacatcccacagtgggg

SEQ ID NO: 3216 - DNA, 595 bp, Aspergillus oryzae
cggacgcgtgggtgattatactcggtcgccgtattactcctagacagaatgtccgctgtggaaaccgacggactcaccatcacccattcttccgaacgaaccggaacccccgatcttcgtctcatccattacaatgatgtttaccacgtggaaccagggtctgcggagccagtcggtggtgtttctcgattccaatccgtaatcaatcattatcgttccgatccccgattcgccggacaaccggacgttctcaccttcttctccggagatgccttcaacccaagcctcgaaagcacggtcaccaaggggcgccatatggtcccttttctgaataaagcgggcacagatgtcgcatgtgtaggggtatgttggctcgtgtacggggagagtgccctacgcaaaatacgataagggcaatgaaggtctgacgtgtatgggtgatagaaccatgacctcgatttcggtgttgcgcagctgcgtcacctgcgtagccagtgccagttcccctggctgttggccaatatcctcgatccagccttaggagaggatgtaccaattgcgaactgtgagcggacccggatgttgacatcatcga

SEQ ID NO: 3217 - DNA, 639 bp, Aspergillus oryzae
cgacccacgcgtccgatttactcctcatgaggttacctactcgagtgacaacttccagcgcttatatgaccttgccgagaagttgattcagcagggcaatgcctacgtctgtcactgcggtgaggctgatcttaaattgcaacgtggaggtgaagatggcaaatcgccacggttccactgcgcccatgcctctcaggatgtggaaaccaaccttaccaaattccgtgatatgcgtgatgggaaatacgagcctcagacagcctttttgcggatgcgccaggagctcctcacgaacggaaacccccaaatgtgggatattgtcgcctaccgtatccctaagaaccgtaccccccatatccgtactggcacgaagtggtgtatctatccatcctacgacttcgctcactgtctctgcgatagtttcgaagggatcacccacagtctttgcacaacagagtttgttactgcccgtgagagctacgaatggctgaacaaaacgcttggtgtttatgagcctatgcagcgcgaatatggccgtttgaatgttagcggtactgtcatgagtaaacgagttctgagagaacttgttgaaaagggccatgtgcgcggctgggatgatcctcgctttataccttgatt

SEQ ID NO: 3218 - DNA, 550 bp, Aspergillus oryzae
taaaaaatttatatcttcaatttcctcaattgctttctttcccgaaatcactatcctcattcattccaccatcagctctctccaacaatgtccacaaacatcaccttccatgccagcgccctgacgcgcagcgaacgcagcgaactccgcaaccaacgcggtctcacaatctggctcaccggtctctccgcctcgggcaagtctaccattgccgttgagctcgagcaccagctcctccgagaccggggtgtccacgcctaccgtctcgacggtgacaacatccgcttcggactcaacaaggacctcggttttagcgaaaaggaccgcaacgagaacatccgtcggattgcagaggttgccaagctcttcgccgacagcgcctctatcgccatcacctcgttcatctcgccctaccgtgcagaccgtgacaccgcgcgcaaactgcacgaagtccccaccccgggtgaagagaccggtttgcccttcgttgaggtcttcatcgatgtccccattgaggttgccgagcagcgtgaccccaagggtctttata

SEQ ID NO: 3219 - DNA, 500 bp, Aspergillus oryzae
tttttctttccccatatcccccccaacactatgcaggcactctggcgacgcggcacatctctcttctcaacaccatcggggtcccccaaagactccggggctgccgaagaattccggacagcttcaacccccgacaagctattcaccaaggtcgaccccgccgtcgacggagaagaatgtctccacgactgcgctacatgtaccgttcggtacccggctaagttcgatgtggatcaggaagacaccctatatggaaatgtcaacggatggtcaacacatctgctcgtcgcgaccgggaaaacagattgggtacgagatgtagcggacgaagagggcagtgtgatggaagcgattgagaagggcgggctcgagccgagtaacgggaaattgaaactatcggcctccaacatgcccgttccggacgaataccaccaccacgacacaggaaagcaaccaacaaccgtcctgctcctacccagcttcaccatcgtggaccacgt

SEQ ID NO: 3220 - DNA, 638 bp, Aspergillus oryzae
  modified_base (168)..(168): n is a, c, g, or t
  modified_base (475)..(475): n is a, c, g, or t
cgaccccaaaaaacttgattagggtgatggttcacgtagtgggccatcgccctgatagacggtttttcgccctttgacgttggagtccacgttcttaatagtggactcttgttccaaactggaacaacactcaaccctatctcggtctattcttttgatttataaggnattttgccgatttcggcctattggttaaaaaatgagctgatttaacaaaaatttaacgcgaattttaacaaaatattaacgcttacaatttaggtggcacttttcggggaaatgtgcgcggaacccctatttgtttatttttctaaatacattcaaatatgtatccgctcatgagacaataaccctgataaatgcttcaataatattgaaaaaggaagagtatgagtattcaacatttccgtgtcgcccttattcccttttttgcggcattttgccttcctgtttttgctcacccagaaacgctggngaaagtaaaaagatgctgaagatcagttgggtgcacgaagtgggttacatcgaactggatctcaacagccggtaagacccttggagagttttcgccccgaaaaaacgttttccaatgatggagcacttttaaggtctggctatgtggcgcggtattatccccg

SEQ ID NO: 3221 - DNA, 483 bp, Aspergillus oryzae
acgacgctgttcctaatgcctcccacgcattggcacgcattcttatctccgtgaatccgtcacacgtgttccctccgtctggattcccgcaggttacttcagctatccgacccttaactgcgcttctggtggtccctgagacttcagcggaccagccacgcgatcttttgcccatttttgaaagccttcttgcgctcacaaatctcgcttctcatccggatgaaagtgcgccggatgccattgtccgacaggcatggtcagtgatcgaggacctgctgctttccaacagtcccttgattcaacgggctgcatgtgagttagtgtgtaacctgatgacttgtgaggctgggatagtgaaatttgcggacggctctaaacgggcagggcaacgcctgcatattttgctagctctgactgacgctgatgatattgcaacgcggagagccgctggaggtggcctagctatgctcactgaatttgatt

SEQ ID NO: 3222 - DNA, 420 bp, Aspergillus oryzae
ctggggtattatccgctgtattatcctcattcttcattctatagagtgtttataatctagtctttacttcctcttttcacagttacaacttttccgcttcccaaatctcttcaatatgcatacctcaacattgctcttagtcctctcctcgcttggtgctcaagcaattcctctcctccgtcctaaggcaaatgatatcctcgcgcgcagggaggtgccatactctgttgtgaatgttggcggccaacctagcgccgaagcgacccccgtcgttgaaactgtcactgtcggctctcctccacagactccggtgacaatcactatcacccacactccatcatcgtccccttctagcactccttctccctcgtcttggagcgccgggccattgccaactggcattcccagcggagagtcccc

SEQ ID NO: 3223 - DNA, 567 bp, Aspergillus oryzae
  modified_base (461)..(461): n is a, c, g, or t
tcgacccacgcgtccgcaactctattctctacagcagctactctcatatagccctttcgacctccatagggcaagttttataccgaatatcgacgactccttctttgtatcgccaatatggcgggtggaatggcctctcaaggcatctctgccaagcgcgcagagcttgctggaggcagagtcggatggcgcgggctggtcagcagcaagaaagcgtttggtattgcgctgttcgcctcgctgggtggtttggtctacggatataaccagggaatgtttgcccaaattcttaccatgcggtccttcattgatgcgacccaaggatatgcagaacacacaggtaccgctcagggtatgctcacctccattcttgagctaggtgcctggttgggaacactcgcaaatggatatttggccgacgcgttgggtcgccgtgtgaccgtggttgtggccgtggtcgngttctgtgtgggagtcattgttcaggcgtgcactacgaacccagacttcgttatgctggtcggttcgtcaccggtctgggcagtcggtaacctggagtatgaattg

SEQ ID NO: 3224 - DNA, 620 bp, Aspergillus oryzae
  modified_base (49)..(49): n is a, c, g, or t
  modified_base (302)..(302): n is a, c, g, or t
  modified_base (429)..(430): n is a, c, g, or t
aattcccgggtcgacccacgcgtccggagaattatgactttttctcttnaaattacagtcaatggctgggtaacgacgatcaaatgttctggggtctggcagccatctcggcctctgaggctggattccccgagcgcgatggaaaaccctcgtggacctccctcgcgcgtgcggtcttcaacgagcaggtcgagcgctgggatggtcaaacctgtgggggtggtatgcgctggcaggtctggccctaccaagctggatatcagttaaagaacgccatctccaacggcggtctgtttgaattngcagcgcgattggctcgatttaccaaaaacgagacctataccgaatgggccgagaagatttgggactggtcggccaagtcggggctgatggacgtcaacaagtggataattttcgattcggtcaacnngcgacgatcaatgtaagagtccagacaatcttcagtggacctacaactatgggacctatttgtcgggagcagccttcttgtacaattacaccaatggtgatgaaaaatggctgaatcgggtcaacggtctgctcggcacgactctcaagaccttcttcccggaaaagtacggcggcaatactatgtccga

SEQ ID NO: 3225 - DNA, 381 bp, Aspergillus oryzae
cttcagtcgttttaacaagatgaaatcgtctcctttcgaaaagatcacggaagacgtctccgaagctgagcctccagcgtacggtcaggttgaccagcctcccctagtattaccgccgctggacctgttccaaacggccggaccacctgtttgttcgacggtcacccaagaccaatgtattgctcatctcaggttcttagcagcactcgccgatctacgcgacaacataaccaacatcaaccctctatttcaaatcaatgatcctgacccagctatttttggagatagtacaaatgaggcatttgctcgtgtcaaagaaaagcgatgggcttgtgtacacggccagggcggtcgaccgtacacgacttggtggcaggagtg

SEQ ID NO: 3226 - DNA, 531 bp, Aspergillus oryzae
cggacgcgtggggactagttctagatcgcgaccggctactgctgccgccccgtcgccgggtccgtctttagtcttctgttatctatctttattgacttagattgactgcctccggaccaactttttttttttttcccttttcttttttctgagaaaaagacatcacggcaagctccacagactactctgtactgacctcgggcagtctgatccactcaacaactccttcatagcacctatcactatttactacaagtgattgctttccctcgatctaccttcttcccctcctctcaattaccttctgtttcctttagttctttgttacctattactactactatcactactacttatttttcttattactatcgtgtacttcatcacatggacttcgaaccctttatgagatctcctccttagctcctaacgcgttctccgcagtcattgcgattacgctcttcacccagagttgattgttccaactacctatctccctcaacatctcctttcctggtttgattcgcttcc

SEQ ID NO: 3227 - DNA, 591 bp, Aspergillus oryzae
tgcgttcactccatgccgggtttctctcctttgcagtcccatacattcaatattccgtcactttacattcatattaattcacatacggcaaatgcatgaatgaaaaacgatgaaccagtcacagagtcctggtgctacggttgttaggcgtgcgaaagcctgcaccacctgccgacgtaaaaagacgaaatgcgatggcaggcgccccacctgttcaccgtgtaaagcattcaatttgccgtgtgctttccaagatgttttgaggcactccagtcgaactagccgagcatatgttgaagagctagagaaacgcgttcaagacatggaaatgcagctacaagaccgaactctagatagctcatggcgagggttcgtatcagaaaacaagaggaactctcctgccccatcttcggcagccgctggtacaagcgacggcgcaacttttgaacttaacgctatagagagtcaaccctattctacatcaccttccaggtcccagccggaggaaggtaatgctcagccgaatgtggacggtggtgctagtcaggctccgtatgtcattaacgccgagggcacaaagatgcgattttt

SEQ ID NO: 3228 - DNA, 571 bp, Aspergillus oryzae
ggaccgttcaaccagtttggggtgccagcacttaaccgtgatgatcatattgcctatctgtatgactcgctagaggactatccggggagctttgtggcccttgatgccagtcgtccctggatggtttactgggctttagctggcttagccctactaggtgaagatatcagtcagttccgtgaacgggtaattacgtcgtttagacctatgcagaaccccactggtggatttggaggagggcatggccaattgtcccactgcgcacccacgtatgctgctgtgctatcactcgccatggttggtggcgaagaggctttccaattgatcgatcgaaaggcaatgtggagatggctcggaaggctgaagcagcccgacggtggctttagagtctccgagggtggggaagaagatgtgagaggcgcttattgcgcgatggtgctcttatcgctccttgacctgccacttaccttgccacccgatgctgaagctcggaacatgggttcgaaacgttcacgagtggcctgtcagattatctatcaagatgccagacattcgaaggtggcatctccgg

SEQ ID NO: 3229 - DNA, 92 bp, Aspergillus oryzae
catctatctgtgtctttggtgggaggattctttttcagcagagacgtgcactgtacgatattgagttagaagcattgatttcaattcccacg

SEQ ID NO: 3230 - DNA, 508 bp, Aspergillus oryzae
agaaaatctatgatgatctttttcggtcatgggatggatttcataagggcttcattggtggtgatactgctatcgaaatcatggggcaaagtgggctggatcagaaagatctcgagcgtatttggacactggcggacccccacaacagaggccggctcaacatggatgaattcgctgtggcgatgcatttgatatacagaaagctgaatgggtatccggtccccaaccgtctcccaccggagctagtgcccccatcaacaagaaatctcaatgactcgataggcacaataaagtcgatgctctctcaagatgcggaaagtcgaaaggcgtccggtgcttttctacaaccacagaaaaccggtgtaagttatctcaaagatcactcattccgtgggggcagtggagtgtctcccgggtttggccgcaaagatgccactttgttcaagaacaatgacgaagctgcctctgggtatcgttctagcgcccgtcgccgtgttggaaataatgg

SEQ ID NO: 3231 - DNA, 522 bp, Aspergillus oryzae
  modified_base (7)..(7): n is a, c, g, or t
gacccangcgtccgcctgtatagccattaccgagcccgaggcgggtagtgatgtggctaatattacgaccacggcgactaagtctgctgatgggaagttttatattatcaatggggcgaagaagtggatcacaaacggaatctggtccgactacaccacaatggcggtgctggaccggcggacccggcgcctcaggcctgtccgtgatggtcgtgccattgaagggctacccgggcgtgacaatgcgccgaatccacgtctcaggcacaaaaaccgccggaacaacctacatcgagctcgacgacgtcaaagtgcccgttggaaacctcatcggccgcgaaggcgatggcatgcgtaccatcatgacgaacttcaaccatgagcgtctgaccatcgctgtgcaatgcacgcgtcaagcccgtgtggcgctgtcctcggccttcgggtactgcttgaagagggaggcgtttgggaagacgttgatggatcagccggttgtcagacatcggttggcgaaggcgg

SEQ ID NO: 3232 - DNA, 667 bp, Aspergillus oryzae
gacccacgcgtccggatgaagtcccgtcgaacgaggttcggaaacagtttgctaccatgtactacatattacatgaaatgaaagagaataacaacttgctcccggcaatccaatggtcaagggataatcgggaagcactggaagccagaggaagtaaccttgaattcgaactgtgccggttgcagttcgtctggcttttccatggtgggcctgataggcagggacctattcccacagggcgacaagaggctttggagtacgccaggcgcgaatttcagagtttcttacccaggtatctccgggaggttcaacagcttataggagcaatggctttctgtcccaatctgcaagactctccttataaagccatcttcaacaatccgtctgcgtgggaagatgtggcacactcttttactcgggaattctgctctctcctcgggttatctgctgattcgcctctgtacatcgctgctacagccggtgcgatagccctgccgacgttattaaagctgcaaaccatcatgaaagcaaagcgcacagaatggaccacagaaaatgagcttccggtcgaaattccgcttccaccgtcgtacctcttccattccattttcgtctgccccgtttccaaggaacaaaccactgatgacaatcccccgatgatgatgcc

SEQ ID NO: 3233 - DNA, 467 bp, Aspergillus oryzae
aagtgctttgcaagaaaatactgccgaatccgacaggcaaccgatccagaaacccccgacgttgcggtctcagacaacccccgacactcgaggacttagacaatccgctagcttcaccgctctacacaaccgtatggatgccctagttaatagaacggatagcgatcgctcgacgaacactaagcgatattccgatgagggaaatggcactaaaccggtggggagaagtaagaaggccagcttttccagctttgtcaacagcatgctaggttctcctcgcggtatcaagatttctgcaccggaaaatcccgtccatgtcacacatgtcggctatgataaccagacgggccagttcacgggcctgcctaaagaatggcagcggctgttacaggaaagtggtatctcaaagaaggaacaggaagaacatccgcaaactatggttgatattatgagattctacgaaaaaa

SEQ ID NO: 3234 - DNA, 626 bp, Aspergillus oryzae
ggtagattcgctgcaagcattccagtgctctaagccagaatagcactgcgcatacgattatttcaaccacctgagctcctgaatccttatctgatatctatcagacccttatcaatgagcggaaattcgtcttcgggcaacccgcccgacctcgaagcccaccaaccacctgcgaaagcctctttctcaacatggtggacacaatccgtggacgtcaaatataccgatctcatctgtcttctgctctgtttcactaccggactctgtgacagcagcgcctacaatgcatggtcctgtttcttggcgatgcagaccggaaacacaattttccttggtctaggagcctccggccaaccaaccagtaaaccctggggctggttgaaatcgctctgttcaatcgcattcttcttcatcggcgcctttaccctcgccaacgttacccgccgcgccggagcccgccgccgtggcacgctctttttgtcattcgtgttccagtcccttctggtcatcattgccgtcgccctgattgaaggcgacctcattccacacacctcggacgatgcctctctgacaggtggtcctctcttcctggagctcatccccattgcgctcttggcgttccagtc

SEQ ID NO: 3235 - DNA, 517 bp, Aspergillus oryzae
gtgcattccccccacccaccccctctttctttttatagcttcggtccatgggctctaaagtcccttcaatttctataagtcccgcttcgccatccactcggagtccatgacatcgcccggagatgctgctccggtcagacctccgccgtccttctcgcccggcgttccgcgagtcgcatccaagacgagatatccagatcaacgccgcgattcgtctccaaatctagattcggacctagtagactcaagaattgccacgtcccccccgcaaccccctctatcggccaccgctgcggagctgccgattagatccgcatcgccccatgctcgatctataagatcgtcaacgccgcaattgacccgatcgtcactgggttctccgacggaaggacgactggatggttctgaagatatacgctctttgattatacgctcattctccccggtagtcggggtttactcgtcggtcgatactgatgaactagtcagacagaaaggcttcgcgggcggcttttgg

SEQ ID NO: 3236 - DNA, 392 bp, Aspergillus oryzae
ctggaagagattgctgggaagttctccattaagaaagaccccaatgacttgcgcaactctcatgatgggctttctctaagatccggttccctggcagaatcgatcggtctagactccgaattcaatggacatggacaagcacctgctgtctgtgtctccgaaagtccttgtgaatacgatatgagcccaaatcgggggatgctcacccccacggaagaacctccggtggatgcggaattctctcaagtggatctcaatgaatggtacccccggtattgggcctgcatgcaacattttctcaatcaaggacaacactcgcctcaggtgcaatcattggccgcttttgtcaacattcggcttccatatcaacgatctaccgtgccagtcatcgg

SEQ ID NO: 3237 - DNA, 641 bp, Aspergillus oryzae
cgacccacgcgtccgcggaaattcctacagaaggcgctgacggtgatgaaatgtcgtcggaggatcatgaagggtccgcagatgctgttttcaacagccagctttacctattcgaagccgttggcattatttgttccaccccgactgtcgctgccgacaagcaggtcctgtatgtgcagtcagtactaaaccctgtgttcatggacatggagaaaaatctggcgccggcgaagtccaacgacgagagggctttgttacaaatacatcacgatattatggcccttggaacattggcaaaaggcttctcggattggatgccaggaaccagttctccgacctcgctacccgcgcctgaggtttctgaggcattcttgcaggtgtctgaggctactcttgttgctcttgagtcccttaaaacttctttcaatatcaggacagccgcccgattcgccttttctagactcattggtgtccttggctctcgaattctcccacagctcccgagatggatcgatggcctactaacccagacttccactcgggatgaaatggctcttttcttgcgtcttttggaccaagtcatcttcgggtttaagggcaaatctacgcgatactcgatacactgttgacgcctttcctac

SEQ ID NO: 3238 - DNA, 587 bp, Aspergillus oryzae
ggttgctttggaagataatcaagaacaggaaactactccaacttcttccgtgtcggagtctgttccacctcctctctttgcttccaaacaacagaatcagcaaccaggctcacagaaccctgaaactgctggaaaggcccgtgatgcttcaagccccactaactctgctgcagaggtacaaacaactgagggtgaaccacgaaaacagttgcacccagacattcaacttgaccccaacggtcagcctgttgtaggggattatctcaagctgatgtttgtggagaatcgagttgtacctactattttgggcttcttcttccgattcccgtggaacaacttccttcacaatgttgtatacgacgttatacagcaagtgtttaatggacccatggaacgtggttataaccgcgtcttggcggttgacgtcttcgaaactgggcggataacccaggagattgtagaaggacagaagcggagtgatgaaacgcagcggaccaagcagatcagacttggctacatgggccatttaaccctgatcgcagaggaggttgtcaagttcagcgagcgacacccacctgaattgcttt

SEQ ID NO: 3239 - DNA, 619 bp, Aspergillus oryzae
cgacccacgcgtccgcccacgcgtccgcggacgcgtgggtacatattcaaattcttatccctttttaagttaatatatcgctccgccagcatcccaattctgctaataaaacgagctggcagtcacagtcgcttcttttatatctcacagtagggttgttggtatttaaccatacccccttctaaattggatcaacacgtatacttccaaataccaccttccgactttttggatacatcacccttaacgcgctaccctactagcacgcgcaatttcttcatctaccatgtctcaatcaaagattgaagaacaaaagaaggcggttgcagcggctgcaacccagcagagtgataatatagcgcatgcattagctggtgctggtggtggaatcctctccatggtcttgacctaccccttgatcacactttcaacaagagcgcaagttgaatctaaacgtgctcattcaacgaccgccgatgccatccgccgtatcgttcaacgggaagggattagtggactttattcaggtcttgagtcagcgctttttggcatcagcgtaaccaacttcgtctattattactggtatgaatggacccgctcggccttcgagaaggctgct

SEQ ID NO: 3240 - DNA, 524 bp, Aspergillus oryzae
gcagactcaaaggataatgatgggttgactccgatatcctgtgcagctggaggtggacacgaagcggtggtcaggctattgctggaccgaccagatgttgaggcggattcaaaggataacctgggtcggacaccgttgctatatgcggcctggcgcggacatgaagcggtggtcaggctattgctggaccgacaagatgtcgaggcagattcaaaggctaactggggtcagacaccattatccctttgcagctggaggcggatatgaagcagtggtcaggctcctactggaccgaccagatgttgaggcggactcgaaggacaactcaggtcgaacgccattattatatgcagcctggcgcgggcatgaagcagtggttaggctactgctagaccgacaggatgtcaaagtagattcaaaggctaactgggatcggacaccgttatcctgtgcgactgaaggggggcatgaagcggtggtcaggctactactagaccgacaagacgtccaggcggactcgaagg

SEQ ID NO: 3241 - DNA, 628 bp, Aspergillus oryzae
  modified_base (300)..(300): n is a, c, g, or t
tcgacccacgcgtccgcaagtttctatttggtcggaaaactactaggtctctgaactatcttaatgagtctagcttgctgaagacacgcgccagattactttaatagggatttacgggtcactatatggaatctgcgccgttccaccgtttcggcatcggctgtgcaggtgcgctttgactgcaatatcgccgcgaccgagatttgaatccgaagtgtgtgggctatgtcgcaaacgtccggcgttgcttccctgatcgcattcgacctaaacagtttatttatttttttttattacganatacggtcacctgtgtctggttgttgggtttcaaaattgtgacagcatttttatacggcgagtgcaatcttgtggtggtcctggttcagttttgtttctttccatccattatgagtgggcagatgggatggtgtgtggcttttatccggcgtccgacaaatagacctgggcatgtgtttcttgtgtttgttcctgttcagctttgcatcgtttttcttgcaatgtgcaccaaaagatttcgtgtgggatggcctctgtcgactcttcgttgcgattcgcattgtgttctgtttcattactggtcgacccccgagcgcgccggccgaac

SEQ ID NO: 3242 - DNA, 325 bp, Aspergillus oryzae
  modified_base (162)..(162): n is a, c, g, or t
cgatacaaagccccagcactgtacagatctttgcttgcgcaaaggtaattgaagagatgcagattgtggaagaacgcagaacctcgctggggatggtcgaactgcaaagactagtggtagaagaactttaaaagaactcagaccacaccctcaccactttcntatcgcagatatccctgatgcctacttgataagggcgagctatccaaacggaagccgacagctctctaaaagagcccttgatatagtgatcgtgaatccttcagtatcgcgtggcgttgaaggctgccatgatgcacaagaaacaggaaacgcgaaagatacc

SEQ ID NO: 3243 - DNA, 593 bp, Aspergillus oryzae
gagacggttgcggttaccggtgatggaacaaacgatgcccaggctcttaagacagcagacgttgggttttccatgggaattgctggcaccgaagtggcaaaggaggcgtcagatatcatcctgatggacgataacttcacctcgatcatcaaggctatggcctggggtaggactgtgaacgatgcggtcaagaagtttctgcaattccaaattacagtcaatatcactgcggtcctcctaacattcatctcggccgtggctagtgacaccgaagaatcggttcttacggcagtacaacttctatgggttaatcttatcatggacactttcgcagcgcttgctctagcgactgatccgccctctccacatgttcttgaccgcagacccgaacccaaatccgcgccgcttatcaccctcacaatgtggaaaatgatcctcggccaaagtatctatcaaatggccgtcacgcttgtcttgaactttgcaggaggccacttcggttacgaaggccaggtactctctacagttgtattcaatgccttcgtttggatgcagatcttcaaccagtggaactctcgccgcctggacaatgg

SEQ ID NO: 3244 - DNA, 396 bp, Aspergillus oryzae
atcaaaactggcgctattatgatatggacaagcgctggtgctcgggattagtgatcatctatgataccctctctttctgtgtttttgtttcttgcgatttgattatcatttcacatctcggtatacggagaaggctcctttcatacatcatcctgttcgctcttgggggcctcatgactttgattattctaggcggttgctacttttcatgcaatggtttttcatggtatcttcggaggataggttcttcggtatcacaagcatggcgtttggctggtctcatttactgcacgttatattctcctttcctgtatctatatagctggtagctgtgctgtactgtgcagctagtggaatcctagttataatagcattcgccttctagaaggagggttg

SEQ ID NO: 3245 - DNA, 511 bp, Aspergillus oryzae
  modified_base (369)..(369): n is a, c, g, or t
cgttgccattggggaggtcggcggcatctacggccactacatgttcaaaaaatgaaggcagaaactacctttgctgtcccaatccttcatgggatgaatgattataccctactgtgttacaatttttgtttgttggtggcgcgctttgttcatctatttcctctcctatcatgggcgcttcttgtttggctatatccgggcaaattgtacagggaagcatgagcgatcaaaagtcggtggattcgatgttatgcctcatgtttagcttttgcttgagttgtctgcatagcgggagcgatgttcttttgagcgttaggatttgtctgagtgtggtcttgtgtttacgtattttctggtgttggcgatatncccattcttctggttgcgtttgggtatcacttgcttttgctcatttgtttcattgtttggcaaggcgaagtatggctgtttctgatattactgtattctggtcgcgtcgattcaataatgcattcaggttataattagtcgt

SEQ ID NO: 3246 - DNA, 612 bp, Aspergillus oryzae
ggcgaaaaggtttttctcgttctgcaatcgatgatcgggataccgtgaaccctacccccagtccaactctgttcttgccctccatctgatatcctctccgcttcatgatggatcccagatctcatccgtcacggcccccatccaccagcttaccccaaggctccacgcctctcccgactactatctcgagtatgccaatgcctcagtacaccatgcaggctcagtaccctgtgtcccagcctcatactctccccccgctgcagcctcatcacagccaatctcctgcccctcattcctacatgagccagccgccgtacaggccggatctgtcgaggtatcccacttctactcacgatgtatacgcgtcgtctaccgctcctatcatgcctcacaccaccgtgggtagcctgcctccatcttcgttcctctcccaccccaatccgcaggcgcagccccagccttcgcaatatcctccacctcacagcgtgctgcctccggcttctagcgcgcagacatatccgcagccgatcgcgccggcacccccgcgggaccgccggccggacttttctggcatgccttccggtgctttcagctactcagatggcagggctc

SEQ ID NO: 3247 - DNA, 512 bp, Aspergillus oryzae
tcgacccacgcgtccggagaaagccttctacaatcttgcctcggaaattaagaaaggcatggacacatctaaatctgaacagcctggttcgcaaggtgtcagcatagatcagcaaggcccgggaccgaatggcagtacaggaggcaagtgttgctgatgggcttgttagtatattctcctgctttaaccttcttgatccaccttacaaccctaccccccttctttcttaactccgacaaacagctattctgccatggacgcgaacaagaacaagttagggctttcacgctccagtggacgctgagatgcctaatctttttgcggaacacccttcatgtatgtccataaattgcggccgtggggcaggccgccgttctgttacagtcgttcgaagtatgtttggtggcgttgtttaatcttgtgttacgctatacttggtatttgtgttacgggaagtgacttgcgtgttgccatcaagtatcagcataatacatcaagtattttgatttggc

SEQ ID NO: 3248 - DNA, 450 bp, Aspergillus oryzae
  modified_base (270)..(270): n is a, c, g, or t
cgggacgctcatgggggcccgaaatcggcttcacgcttttggtgcacctgttggcaaagatgcctttgatatctctaacttaaaaagaggaatcagtagtttccagaaatctcaaaagctaaaacgcacccgcagattggaccgtcaaacattggaccgactccatcgggtcactgccaaggccgcaaatgcggagggctggaccgatgccgttaagtccaccatggctgagttgagtggccatggaggcgaaatggtcatgggtatggngcggggccgggaaaagggcggcatcgctgatattgaaaccctagatgttgacaacttcgcacatctagtcacgggtgaaagagcaaagtggctttggagaggaaaaccacgcaagggcggcgttggagatagctttgctggaggacatccaggtgccgacatgatgtttactacagatga

SEQ ID NO: 3249 - DNA, 568 bp, Aspergillus oryzae
gtacccaccttttatcttgtcaaccgcctatcacttcctctgaaactttcgccgagaattcgacctgggaaccattaaaagtgaattgagagcattccacccgcgctcctggcgcaatctctctccgcaacttccctgttcgaggaatccgcgccgattggaacgattgttaacccgaaacacgatcgtccaacatgtcgtacaatcgcctgggagagtcttatggggaggacgaccatagtcactctcccatgatgaacccccaccaaacgaacaatcggtctccgtcaccgggtcggccattgaatgcctaccagctctcagatgtttcttacgggccacaggagcgccttcatatgccttcgagtgatttactggccgagcaaccaacgtattcagtggagagattgcctaactcttacggtcataacgaagcctacgaacagcaccaccagcagtcttaccccggatacgagtatgcagtggatcccgaggcacatcacgacgcctattatactcaaccttaccaacctacagtcacgccacatgatgattatgacttaggaca

SEQ ID NO: 3250 - DNA, 550 bp, Aspergillus oryzae
aacaagagcattgactttggtatcgcgtggacatcatgatcgtgcgcagcacttactgattgagacccgcagtatcctcaagggtcttggtaaagggagccttcccccgctccctcctggcgctgttaaaccatcaagtatcagcgactctggcagcaggggtgacacgcctacatccacttctccaaggtcttctactttcggcgatagccactcctcagctgtctcagactcggccacgatcacaccaggagccgcggttgatgcgcagaccatgcaggcgctggatggtgacctaaaagcagcactcgagtggatcaatcatcctgcagtgtttggccgggattcccgcaaggctgtactacagggtatcggcgtgatttcgtcgcagcgggcgtacaccttccgatcaccctctgaggcgcactgggcccagcgtgtggctggagttcgacgactgaccgaacggtctaaggagtggcgtgagaccggcgatgacgcattgactgaagaatgaacgcaccgacatgactctcgcttacaagctttt

SEQ ID NO: 3251 - DNA, 518 bp, Aspergillus oryzae
gctcttctaatcggggacagttcgccatgttcttctcactgatcagtattaacaattcctcgctgacaacatgaaaaatctgtggttatggcgtttcttgcctttggcgtttctgctactgcaggcgcttgcagtggaatccaaggcgcccactgatgtcgctcacgaatcccaccagcattcaaaccagtctccaggtgggccagaaggttctggcgctagacctggaagccaacacgttgataccgccctgaaaattctccgtaactcaaaaatcccgaccgtcacgtccgagaaaccgtccggcatattgggaaacacattacattactttagagaggctttccgcgtcctgttcctgaatggcccgccgtcagataatgctgagcgccagaagatccacccaaatgtcgccaaggcggttgatgaactcaagatcgctgcgcaaaaagatcagaaccccgatgcgatgttcctgttagcggagttgaatttctacggcaattacacgcatcccc

SEQ ID NO: 3252 - DNA, 658 bp, Aspergillus oryzae
gtcgtcaggtcttggagagtggtaaaaccatctctcgcaaagctgcttcgcgtgaaggttctcgccgcacttcgcgcacaaactctgcgcaaaattcccaccaatcttctcgaaatgcaagcaggcatccgtccgacgaggaggactctgggaatcttagtgatgacaccgcgttgagcattggctcgctggacgatttgacagataaccctgaggttgacagcaacaattgggctcaagagctccgcgatgtcattcaagaaatcggggaccgcaaacgtagcagcgtacagagccgcgaagaatgctacgctgcattctgtcgtctgctgaaatgccactatgtcgaggaacacgttcgaagtagcctcgacgaacttttagacgccttttgccggagcatcaaacttgaatccagtgtgcgtgagactaccttggcattgcgagcgcttgaactccttgtcatcaccgtgttcgaagacaccaattatagaaatgttgaacctatacttactcgaactattcgagactcgacatccaatcttgttaaggctgctgctattcattgtctaggcgcatgcgctattttcgggggtgcaggagaggatgggatcctagaccagatgacattcttcctggacattgcagcttctgatgg

SEQ ID NO: 3253 - DNA, 673 bp, Aspergillus oryzae
tcgacccacgcgtccgttgcagacgaaacgtcccaattcaacggcgaaacggagaagactgagaaggatgtcgccaagagcaagatcgatgatcttccattctactgcattggcttcaagtcagcagctccggaatacactcttcgcacgcgtatttggtcttccttgcgttcgcagaccctctacaggaccatttccggctttatgaactacagccgtgccatcaagctgctttaccgtgtcgagaatccggaagttgtgcaaatgttcggtggtaactctgagaagctggagcgcgagctggagagaatggctcgtcgcaagttcaaaatttgtgtttcgatgcagcgttatgccaagttcaacaaggaagagcgtgagaacaccgaattccttctccgtgcataccccgatttgcaaattgcctatctcgatgaggaagcgccggaaaatgagggcgatgagccccgcttgtactcgtccttgattgatggacactgcgagcttctggagaacggaatgcggaagcccaagttcaggattcagttgtctggaaaccccattctgggagatggcaagtccgacaaccagaatcattccattatcttctaccgtggtgaatacatccaggtcattgacgccaaccaggacaactaccttgaagagtgtttgg

SEQ ID NO: 3254 - DNA, 615 bp, Aspergillus oryzae
gagatatagtatagtactacatatccatccattcgttacaaaatgcttcgtaccctgaccagagcctaccacggtgccctggggacgtcgatccggtcggctgctcctgcgctttcgccactcgccaatatcccatacctccaagccccaaggcttgattccgcccatgaccaatcgcacgttggcagcgtccaacgccaccttcaggacgcgggcgttctgaaaatcagcctcaacttcgacgacaacgactcccactacctcacaaatctcattcacggcctacacaaatggcacggccacggtcttcccatcacccactccgcccaccgcggctggtactgggatatccgacccagccaaacagtcttccaatgccccgaccaccaggccaggtcagaaaccatgaatgagttcccctggcacaccgactgcagctacgaggcctccccgccgcgcttcttcgccctccaagtcttgcacccagaccaatgcggcggcgggactctctccgtactgaaagtcgacaatctcctcaagctcctctcggagtcgacccgcgtcgctctccagaagaaagactatctcatcaccgtgccacccgagttccggaaa

SEQ ID NO: 3255 - DNA, 511 bp, Aspergillus oryzae
caagcgtacaaatgatcccaaaacagtataactgaggatatctgcaatcaatccacccccggctacttccctcttagttactacaaccgtaaactatcccaacttttgtacaccacaacgaaaatgtccatgacaccaggctcgaaatccaggtcgtccaccccgactgttttcgaacagcagcgggaggaactggtgagagagatcgccgtgggtatggaacaagtcctgcaaaacatcaaccgattaaaccgaaaccttgaaagtatcgttgcagtgggcaatgagtttagctccgtcgaagctctctggtctcaatttgagaacttcatgggacgcccagaggaagagaaggcggagagtggtgtgaagaaagaggagcttcatgaagaccataccgaactgcatgagcaggaactcgccgatgaaaggagcgagttagacggttaagatacatgaggcatgatccaggatgttcggtgcatggcttggtgtattggagtttaaattt

SEQ ID NO: 3256 - DNA, 656 bp, Aspergillus oryzae
attctatgctttgaaatggaagctgcggggctcatggaccagcttccatgcctggttattcgagggatctgtgactattgtgactctcacaagcacaaacaatggcaaggatacgcggctattgttgctgcggcttatacaaggaatatgctagaagttatcagagatacgaggactacatgcgatatcaacaatccgagggccatgaacaacaatacccgaatgatctctaagcaattattctgggatgcatatctgctgcctattctcaagaaatacaatgccgaaatggaagtgatatgtgaccgtccacattgctttgtggagattaagtggccaggtctcaactggtcgtggaaatgtgattggagcattgggaagaaggcaggtagaacatacgactggagaccgtggaataataattcatggttctactcttcatttgaaggcagaaatccagaaaagaaaagaagaattacgaccgatctcatagagccatatgagcataaatgtaccactatgacctctgattattgctggggcaagactaagtcatggtgtgatacggagctaagcttccagcctggaaccaaccaattcactatgaagggcgagtcaggccttcatttctggatggagctgcatgactggagaca

SEQ ID NO: 3257 - DNA, 70 bp, Aspergillus oryzae
cggacgcgtgggcatttgcctacacgaatgagagttactgcgtgagatgaatataaatagttagctcact

SEQ ID NO: 3258 - DNA, 583 bp, Aspergillus oryzae
tgacaccgtgttagatggtgttgaaccgtccccagctactagaaacctcgaacaaactactgaggtacctcaaaacccaagtaccgggaacccaattctcaaccaccatctacccagcaaatttcaacataatcagcgtggctcatcattcacatcagaacgggatcaaatagttacacttactgccaggaagtatatgcagaacattccggatacagcggatgcctgtcactgctggaaagagcttacgtatattctcgggaagcttgagctaaaggaccatacactggaacccctggaacaatcgtatgtggagttagtgttgtcatttcagcgaaaggcagtggaaaagtgtaccacaatgattgcttgcaactgctgtccactatccactgagaggatgatgcttctcggcttgatagttgagaaactggttatggcatttaaggacctgataagggtatgccaagaaaatggactattcggaactctttcataccatcatccaaactcctgtcacgatcaaccaacctcgtccctggtgagatcccaagactcagcgtccatttccagcagtcacttt

SEQ ID NO: 3259 - DNA, 517 bp, Aspergillus oryzae
  modified_base (388)..(388): n is a, c, g, or t
gcggccggcttggctccttttcaaaacctgagcatggattacgaccagactgagggaatgggcggtatttccgtcagttcctacgatagcattgaggatgaacggaacccgatcgatgtgagagggtatccctatcatgcagctgataaacacatcaactactccctccccgaccaaatgatctcatatccagctcacccgatctaccctccaatctcttatggacctgatgatctgggtcatgccccgggggctctgacaccctcggacgtttcatcatccatatcacccccgaatggtcaactcggacacaccaagtacagcacgcagatccctggtgatcacctcgcttctgcactttcgcaagaagagcatgttcgtcgtgctnctgaagaagaccgccggcggcgaaacaccgcggctagcgcccggtttcgcatgaaaaagaagcagcgtgagcagacgctggaacggacagtgcgagagactacggagaagaacgctactctcgaggccc

SEQ ID NO: 3260 - DNA, 548 bp, Aspergillus oryzae
gaaaaagacatgccatttaatgacccaatttttatgcttgccagtgggactcttatttaacactgttctctctttctttatcctcgttgcgccccgtcgttgttcatctttcttcttttcttattctttgttctcttatcggtgtgactacttacttatcgacgtcatctcccaccgcatattcaccgtctgtcgttgacaaacttttgtcactcaattgaactgaattaatgacttgaagacctccactacacaacagagagatagaaaagagaattgcacaatccctgtcacaatgcaaggcccattgtacatcggtttcgacctttccacccaacaactcaaagctctagtcgtcaactccgacctgaaagtcgtctacgtctccaaattcgactttgacgctgactcccgcggattccctatcaaaaaaggtgttatcaccaatgaagccgagcatgaggtctatgcccctgtggcattgtggctccaggccctggacggcgtcctcgagggtctgaagaagcaaggcttggatttcgcccgtg

SEQ ID NO: 3261 - DNA, 463 bp, Aspergillus oryzae
atcttgtcgaagcgctcagcaaaagctgctgaagcacttgtgatttcttgggtaagaaggtcagatgtcacaggctccggcgaggacccagacgagaataggatatcaaactcaaaggcacccttgaaaaccttctgtacaagctgaacattgccatcacctggcgtattcttgatggtgaagacttgcgatgggggaggggggttttcagctccatacttttcgatggtttcgctcacaccctccttcatctgcgaaaacagaatcattttcgtctgccaagcgtgctccgggggtattgtcaaactggacaccaaggtacggtccagtggcttgtcctcatagcttgggtgttcatgctcagggtactcgttggtcctagggccctcagtcacatcaattgtaaattcaccaagatcagaggtataaccagccagcttcacatcgccctcaaaaccacgtg

SEQ ID NO: 3262 - DNA, 485 bp, Aspergillus oryzae
cggttcctgttccgcattcccctcttccgaaatcagtccgatgaaaccaaccatcatggcaaatagagtggatagccccgcgtcgtgcaccttcctccgaagcagtgactgcagtaaacattgtttcatccgacgcttttcgcaatggctatggtcatcatggtttatcagtcccgcagaagcccgtcccgcccttgcggagccgctgagccgtcaaaaagacaggaatttttcttggctgtcagagccaagtccggacgctggacggtgcgaagaagcaggcgaggacacaaaacgttcaacatttccatgtaaggcgtgtgaatcgcggggtgttgcctgcgatcttcagcaaccgcgatgcgcacattgcttggatgagcaactattatgcttctatgtggcgcccctacctcccttgcgggcgactagacgttcgaaaaagccgcgctccacacatacagaaacagtgttgcgctcacggg

SEQ ID NO: 3263 - DNA, 477 bp, Aspergillus oryzae
atccacattgtttttatgcaatggatcaaagtgagaaacgaaagttcgagcaaccgacaccatatcccgaatatggtcttgacaatactgacaaacgacggagggtagtcggaccaacattgcctttatcaaatcctgcagacgatgacacactagactctaatggcgaaaatgaaagcagtgacgacgatgacatcggtccgtgtttaccaccctcgggacctatggagaccaaattagttgatgccaagacacatggcgacactccatatgacccattgactgagcaaggtcatgctggcgaagatcgaagtcatcgagatgagtggatgttacagccaccagggtcaagtggaaggactgcaagggtggatccaaccaaactgaggagtagaaagtttcaaagtggaagatcagcatcaaattcccaatcaggggaggtagattcgtcttggacggaaacgccagagcaaaaaa

SEQ ID NO: 3264 - DNA, 544 bp, Aspergillus oryzae
gccgaatagcaaatatgctggacagagtacccaatggcactagctattctcagcccatggtcaatgaagaagaagacgacatacgtcaagatgagactgcgagcggcgttggaaatgctcccggcaacagagaatcaaacgaggatccctgccggacgaaagagttcttcaagacacccacaaatgtcagtaacgccggtgcgttggcctcaaaaacgttgtcgctggtccgcaccagagaatcgaacagagaaattgggcctccgcccgacggcggtttcctggcctggtttcaggtcgccttgggccactttgtcattttcaacacttggggctacattaatagctttggcgttttccagacctactatactgaaacactagggcatcctccatctgacatctcctgggtaggaagtattcaaatattcttgctttttttattgggactttctctggacgtgcaaccgacgcgggatacttcaaggtcaccttggtgatgggagcggtgctggagttgttttgcatttttatgacatctttg

SEQ ID NO: 3265 - DNA, 511 bp, Aspergillus oryzae
ctttgctaccgcgcctttccttttcttcttatacttaattagatagcaaaggctgctggttcagctttgcgattgccccacgatacccctaaagatacccgcaatagctcgccaggcgactgaaaactggtcactttcgcaacctatcgcaatttatatcggagcgcacggacgatcaatatcgcaatatcgtccctcgagtcactcgccaaaatgccgttgacatcgaggaagaagacctcttcgattaaaccggctaacaaagccgccacagactccgctcagtcctcctccagcgaaggcccttccacagggaccacgggaaagacaaacaacaaatcgcacaagagatctcgctctggctgttttacctgccgcctccgccgaaagaagtgtgatgagcaacatccatcctgtggtgcctgcattaacctttgtgtgaaatgcgagtataagcgccctatttggtggggtaacccagagcacagacgagtgcagaaggagcgcatca

SEQ ID NO: 3266 - DNA, 481 bp, Aspergillus oryzae
ctaattacttatgtgtgctcttccttaaagtctcttgtctgtttgctttctattccattgattttccaatgccaaattgcaccgattaccacactgagtaatcatttcgcacacctttctacttccctcccacgacctcctcatctgcggccagctagtataggcctgaactagccatggcttactcccctgcaccggcatcgcctgtgcctggtggccctggtccaagtttggtcaataacttacactccaggggtcgatcggcaagcccaccgaccagtgtacctctttctaagcgagacaagcggcgcagcgcgctgcaagagcgcctacaagaccttacggcctccttcagccaaaaccgagatacccagtttcgccagcagctccatgccttgcaatgtgatatgaccctcatcaacaatgccgatccatactcgcctggtcctctgccggactcgtcggaagagatcgcgcattt

SEQ ID NO: 3267 - DNA, 559 bp, Aspergillus oryzae
gcatctttctcctctctttctttctccttaggtctcccttcactatcgcatgagactgccacttcctatcaccgctcacctgaagcagtctcgtcccgtttgggaatctagtccaattagttaggagggcacagtcgcaagagcttccaagatgggtcgcaggtatttgggccttcagggcaacgccctgcaaatcgccatcggtgttattgctggtatggactttctactattcggttatgatcagggtgtcaccggtggtcttttgacccttcagtcctttatcaaatatttccccaccattgcgaccagtggtgcgtactatgatagtctcacccaggccgaacagagtacccaatctactcgccaaggtattgttgtcgctgcgtacaacttaggatgttttgcaggatctatcccgacaatctgggttggaaattggcttggtcgacgtaaaactatctttctcggttctttcatcatggtcattggagctctactgcagtgtaccgcgtaccagctgccccaactgatcgttggacgtctggtgactggattc

SEQ ID NO: 3268 - DNA, 543 bp, Aspergillus oryzae
cgcaagcatagcgccgagggaacatcaggtttacaactgcgatgtctttacttgacagtcatctggagcagattctgctctcctccaatgccattgctgagctgcctttccccccaccacggatctttacaaacgctctcttaggcccccacgacatcaccgctcttattcgcgatacagagacccatgaacgcgctcttttccaaactgacccatctgtgaaggcaattaatgcttcacagcgtcggtcaacccgccgaggaacagtatttccatcggagacagagggagagtcaatggccagtcggatttatgcagccaggaatagcaaaagccaatccgctgttgcaagagtcttagggtctgatatgatggaagaaattaaacgctcagcaggcacttcatctagagggcgtggcgaggtcaacgtcgacgtgcttctccgaggcgcagaaatcctctgcaacgtctatccggtctccggggcgcaagaaaagatcgcgagtctccgttatcgccatcaactagttactgactcgattg

SEQ ID NO: 3269 - DNA, 578 bp, Aspergillus oryzae
gttgagcgcgacatcgagtatgacgaaaccgagtggaaagtgcggactcacatgggaaaattgtttgatcgagcatggttcaacaagtttttcatgtacttgaaacaagagccacgggaccctactgctgacaagttccgcatgccctgcgcaatgatgcttctgtatgccttcgagttaatgctccgggatgggctgaccgctgcgacattcaaggacatccaagaagaaatcgaggctgttttcgaagacggtagtgataagcaccaacacagagctactgcggagatcctgggtgctcttataagttctgttgccgatacaagtgtggagaaacggacattggtgtgggaatacgccttcccgattgtgcgtaagatctttactgatggactcactccggaaaactctggctactggacgactttccttcatatgatccttcaatgtcgtgacccacgaagagcgtggcccttggttgattggcttgcaagcttccgactagatatgtcgacgaacgctgctttcaaggaaagctccaagatcaatctgctccatcaaactatcatagatgcagg

SEQ ID NO: 3270 - DNA, 368 bp, Aspergillus oryzae
atcttcgcctccaataccggggacgtgctatgggaccctacccagtacgcccttgggagctcctcgaagatgccgcaccaatcgtaggggtgaacgataccgctgtgaacctcaaatacttcgatgccagacgagttcgggcttagattttctctgcggcttacgtctctggcctacgaccatcctctaacatctacgtacataatttcctttcttatggttcctgggttgttgttctgttcaccgcttgataccatctccatctgcatatagctttacctctgaccttacaacacgatcgtacctttgactcacgaaggcatccagttctattatgtttcgcgaccatggtccatttgcatgtgtgg

SEQ ID NO: 3271 - DNA, 481 bp, Aspergillus oryzae
cggacgcgtgggtttgccccaggccgattcatagtgatgtcagtcctgatgatgtactcaacaaccactattgaaatatcaccttttaatccacgcatgcaccatccataattgaagccgtaagttaatttgagagtgctttaactaattcaatagctcaaaatggccgcatcccaagctgcaaatatcgtggaaaaggtggttggacataatgataatgccaccgtcacaaccgatgtgagtaactataataagggagcttatgggcaggaaacgggagagaaaatcaaggccacgacatggcagggaaagaacagtgtccaaatcgtcgagatgccaaaaccaagagttgtggatgagggcgatgtgatagtcaaggtaactggtagcacaatctgtggaagtgaccttcatctataccatggtgtcatcccccaattagagaagggcgatgttctcggccatgagttctgtggtgttg

SEQ ID NO: 3272 - DNA, 462 bp, Aspergillus oryzae
cgtcggtagaagacagcctatgcgtcctctccggccgtcgtcttcgactcgcttctctctccggcgcatacaattcatacaattcgctcagtgctaccaccacaccccgcgacacctatccgccatgagttcagagaatccaacagctgaccatctcgccagcccgggagatgaccatgcgaaacaccccagaaagctaatctttgcaccgggtgacatccaagtaccgacccccaatgatcaaacaacgcctccccacaaaccggacgcagctacacctgccaatatttctcgactcgtcgctgaggcccttcggtcggagacctccacgcccaattccgttaccgaaaaccagatcgtctcccaccccgctcgcgcgcatcagttcgtgaccaacccaccgctcactgtctcccagatgcaccccaccaatccgcttcatcagttccacacctggttccg

SEQ ID NO: 3273 - DNA, 530 bp, Aspergillus oryzae
cgacaaagaccgtcgtgcacgactaaacggtgccgtcgacgaaggcgcactgacgaaagatatttccgacctcacactcgacgacgttgcgccggacgccggcaaggccgtgggcgtcaagatcgacaaggtgaactggttcagcacctaccacgttcaccacagggtagctgaagcctttcgcagcggacgggccttccttgtgggggacgcggcgcacattcacagtccggtcggaggacagggaatgaacaccggtatcggcgatgccattaacctggcctggaagcttaccgcagttattcaagacaaagccgacatgtctctcctggatagctacgaagtcgaacgtcgtgcgttcgcggcacttctggtcaacacaaccgatactgcatttaacgctattgcctcagaggggtacctgtcctattttatccggacatggttcattccttacgtgtctcctattctgtccaagattggtctcgtgcgacaaaggatgttccgtggtgtatcccagattatgctca

SEQ ID NO: 3274 - DNA, 539 bp, Aspergillus oryzae
atccgccacaaagccgcagccgccggcttcccctcgacccgtacccccgccggttcggagatctttcgacgaaaggagacctcacccgaatgcacttggcttgccggagcggccacaacctcggcggccatccccgagacctacacgagacacgaaacccctgatggtacaaattccgtcgcggcaaacctctcagcaggaaaccatgtcggctataccacataccgcccatcgtttccagagtttcgacagccctagagagcccccgggcttgcccccgcggcagccgtcgatagcacgtcgaggtgctcggtcgccaggagcgcagcttgatcgtttacggagtccggtccagcctgagtgcccccctcggccggaattgcgtccacaccctacaggcgaagtccataccccgagacagctccagcgacaaccgtcgttttcgcgtgagaccaagcctggacctccccctgccattccggagcgccctgttgttgatcggccggttgtggagaggcaacctgtgcgtccagttccgg

SEQ ID NO: 3275 - DNA, 521 bp, Aspergillus oryzae
gcgacggcgtctattcacaatggacgacccagcgacccgtgtccccgggcagttgctgccgcatatgcacctggtgtcgcgacaccgattcccgctgatgcatatgatgcccaccgacaccgttgtcgaatacctccttggcgcgcctaagattgtacgggaggcgcagccgatgcattggactttcttggatggacctcaagatgggactgtcatgctcacctggcagcccctgaaccatttaggaacgaacttcgccagtgatggttacgtgtgggccgatgtcgaacaggccttcaccttcgaagctcgcggctacttggtggaaatgtggctgcaccgcagtggctaccacccgccaaacgagacaatggcgatccattgccgcagacgctaccggttgctgccttcgaagaaccccaacccgaacatgcccccgcccgacccgtcgttatggatcgttcactactcaagagcacctcctaccgagcatattccggccaatagaattcatgtgctcc

SEQ ID NO: 3276 - DNA, 525 bp, Aspergillus oryzae
cctccttctctaattcgccctttaatcaacagctcttccttctacttttccgtccggcttacctctcttttcgcactcactaatcgtcttgaactcgaatacgtttgctgtgccggtactggtcgacatacaattcgccattttcctttcgtttgatgaacatgccaatccgtcgttaaattgatgccacgccctcccggctggtggcttcgctcgactcggggactttgtacttgcatctcgaatcctgccattgatcggtcgctgccactcttctatcccccttcctttcctcgctatcttcactcccgtcgtcggccggagagacagtcgaccccggttcccgcccagcacgctggctgtttgctgagcttaataggcccacgcaggtctcacgtcaccgttctatcccctcctttatatacacatcggtcggcgcttccactttgtgccggagtcgaaacctagcgaccatgccatccttttctaatgatagctcttatcagacggccactgccacggcta

SEQ ID NO: 3277 - DNA, 111 bp, Aspergillus oryzae
cgaacaatgagtggaaaagggaaggcaaattccgaaaaaagtctgcggcgcctacgatgaattgaattatgcatttgtacatatacacgtactaaaggagttttcttgttc

SEQ ID NO: 3278 - DNA, 621 bp, Aspergillus oryzae
tcgacccacgcgtccgcaagctcttcaggcatttgccagttatggatgagaaccaggacatttctggtgttctcgatatcaccaagtgcttctatgatgcgatggagaagctggagcgcgcgtacagttcgtcccgcaagttatacgatgcgttagaaggtgttcagacggaactcggctccagccagcctcagcagatcatccagtatgtcgaagctttgcgttcgaagatgtctggtccgaccctcgagactgtccttgatggcctgccgcccgttacagtctccgttcgcacgtctgtgaaggacgctgctgctatgatgaaggaacaccacaccaccgcccttctggtgcaggatcagggatcgatcaccggtatctttaccagcaaagatatcgtactgcgtgtcatcgctcctggtcttgacccgtcgacatgtagtgtggttcgcgtcatgactcctcaccctgattttgcgcccgccgatatgagtatacaagctgcgctacgaaagatgcatgatggccactacctgaatctgccggttatgaacgagacgggcgagattgttggaatggtcgatgtgctgaaactcacatatgccactttggaacagatca

SEQ ID NO: 3279 - DNA, 502 bp, Aspergillus oryzae
gtctaagtttgttatatagtcgtatccacggtttccaagaaaaatggaccacacggctgccgcgaaagacttccgccgtttcattcaggagctggaagatgaaggagagctcctgacaatcaccaaagaagtcgacccccacctggagctcgcagccatcgtgcgaaaagtgtgtgaaactggcgagcgagccccattgttcacaaacccgaaaggccgtaaggatgacgggttgtttcgcgtcatcggagcatccattgggtacagcaagcgtcctggaatgcagctttgtcggttggctaagtcgcttgggcttccatcatctgctactggccacgagatcgtccagaagatcaatgaggccaagacgaagcctccaatcccatgtcggaaactcgagtcaggccccgtcaaagaccatattatccacggtgacgatatagatctgacacagttgcctgtccctcttttgcatgagcatgacggaggcaaattcatcgaa

SEQ ID NO: 3280 - DNA, 344 bp, Aspergillus oryzae
agcaagcacagtaaccaccgaactaaccgaactaaacgccctccaccgcggcctcatctccctcgacccgcccaacatccccccgcccccgctccccatcaaccccaagcgcagcgcccaaatcaccaagctccgcgacagcgcaaacaccgcctaccgcaagaacaaccacgccgaggcagtccgactgtacacatacgccattgagatgggaatcgcacggcccgggtgggaacctatgagtctggccagggaggaactggcggggttatttgcgaaccgggcgcaagcgtatatggcgcagcaggcgtggccggagggattggtggatgcgaaatgtagtg

SEQ ID NO: 3281 - DNA, 438 bp, Aspergillus oryzae
  modified_base (355)..(357): n is a, c, g, or t
aaggagtggggacattcatggtcacatccgttggagttcattcaacatacgggaaaactatgatgtccctccaggacgagggccagacgactccgctgcagtcgaagctgaatgtccttgctgaatatattgccaaactcggtcttgccgccggattattgttgtttgttgtgttgtttatcaaattcctcgctcagctgaaaacctatgacggtgccgatgagaaaggtcaagctttcctgagaattttcattgttgctgtgacagtcatcgtagttgctgttcctgaaggattacctctggctgtcacactagcgctcgcctttgccacaacacgcatgctcaaggacaacannntgctgcggctgcttcgggcctgtgagactatggggaacgcgacaacgatttgttccgacaaaacaggcaccttgacggaaa

SEQ ID NO: 3282 - DNA, 538 bp, Aspergillus oryzae
ttctctttttcggagtcaattgcgtccaattcgcaaatatggatatctacggctcaaaaaagcctgtggtcgacatcgaccgaacaattgaccaattagccgggcaaaagcccaggctgggcttaacggccggcgatgtcggcatcttcaaatcgaccatcctcccctcattcaccttgcacaccggactctcaatcgcgtcttttatcgcagctaaaactaccgacaagggcgagatcaaggattggtgctggccatcaagtcaagtgatcaacgcctggtggagcgccgttggccgtcagatgttctatgaaaatgtttctttctcaaccgcgtggaaagctatcccctggaccgagaaagtgctactcagctgcgtgacgatctggggtacccgactgttctaccgcatctcaaagagaaccattacccgtggcaaagacgatccaagatatgatgagatgaagtcgaaggaacctggattctggaaatccgctttcttaaagcagttccttcccgaggctgttttcttaactct

SEQ ID NO: 3283 - DNA, 486 bp, Aspergillus oryzae
attatctcgatccttttgcgagaacacctcttgtccgagaaaggtttgaagtgagaaatttcggtccgcaacagatctcgtgaaaacctctcctttctatgtactttcagccactatggatgcgagcgtacttttactaatagagctgcgtggatgagacatgtcgagactgagcatatacgaccaggagtctatcgttgtgatgttgagggatgtcctgaatactactaccgaagagctaaactcctcgaccaccagcattagctgcatagaaaatgcccaaacaagcaggctgttagggatgaggtcctgcgcagatgctggcatgaagttcgcaaaccaccagcgcaatccagctgtcccttttgcaaacagaatttcgcaggtcctgattcttggccaaatagaatgagacatgttgggaaacacctggcgaatggggagtcagttgaccaaacagtggaggatattcagttgcgagagtgg

SEQ ID NO: 3284 - DNA, 510 bp, Aspergillus oryzae
tcgacccacgcgtccgcccacgcgtccgatttctaggtcacgtgcgactgtgcgttaacctcaaggaagacaacagccggctagaaggatggttccccttgtctgctcgcggcgcaggtgactctgcagtatctggtgaaatctacatggaaatgcgttttgagcataccgagaagaaacaggtgggcccggatgattttcaggttctgaagcttattggcaaaggcacattcggtcaggtctatcaagtgaagaagaaagacacacgccgaatttatgccatgaaagttttgtcgaagaaggtgatcattcagaagaaggaagttgcacataccttgggagaacggaatattctggttcggaccgctatggctgcctctccattcattgtcggtctcaaattctcttttcaaaccccgaccgatctctacctcgttacagactacatgtcagggggcgaactcttctggcatcttcaaaaggaagggcggttccaggaggcccgtgcca

SEQ ID NO: 3285 - DNA, 449 bp, Aspergillus oryzae
ggcaacctgtctgattcagatttcatcacactacggttcccgtcgtcaagaagctcaacggctgggccgaattctgcgagctaagcgtcgtaacgacgagggcttcaatgcattcttctactctcttgtttcaaaagatacggacgagatgttctattcttccaaacgacaagctttccttgtcgaccaaggctacgctttcaaagttatcacccatcttcaaggcattgaaaatctggagggactcgcttacgcaacccctagtgaacgacgcgagcttttacaggaggtcatgctgcaaaatgaaacgtctgcggatgttgaagccgtaactgatgacttgttctctgaacgttctggtggtccaagggctaagaagggagccgtcaaacgcagtgcagctacccttagcggcttggccggtggagaggacatggcatatattgagt

SEQ ID NO: 3286 - DNA, 367 bp, Aspergillus oryzae
cattgttccttcatctttgatcacgagtgttggtgctactcagtcttgcaaccagctaactctttctgctatgtacccaaaaagctcgctatagtagcctacatttataccgcctaacaacaattttccgagtcaagaagatcgtctgtttcccggcatcaaacagagggggaaaaatgaagattgcctccataagtgccatccttcttctcccgaatgcagctatcggtatcccacggtcagatctagccgaagatgtggtctttgtgcctaaatctcacgaacccgtgtatttagaaaaacggcgtggcggtggaggaggacaaggggggggaggcagcggtggtgggagtggcgggcgaggagg

SEQ ID NO: 3287 - DNA, 438 bp, Aspergillus oryzae
aaaaatcctatatctcgacttccaaagaatttcaaaaaccgcctttgtcttcctcggcgcttgtctcacctgttgatctcgtcccacttgaactagtagtatatccgcagcagacgagccctcattcccccgcggcgcattcccctcatctcacgatacaaaactattctctgaccgctcggttttgcgtagtgttcctgggctgcgagctcacctttgacgcctgaccacccatccgtaaaattctcacaactgccccttttatatcccgtttctttacctcacacaacttgaaaccctaaacccaaaaccatggcctccaaccgatcccggcgtatcgcaaaggaaatagccgatatacacgccgatacgcagtctgggatcacagccgaaccagtaggcagcgatgaagacctcacacatctacgcggtacattt

SEQ ID NO: 3288 - DNA, 421 bp, Aspergillus oryzae
caccgctctgtcttcttatggtggtttctggcttgctttcgccatcatcctgaccccaggtggatttgagattgcggacgctctcggaggcgctggtacaccacagttcgataactcttttggattgttcctctttggatggttcatcttcaccactatcctgctgttctgcaccttgaggtccaccgtagccttcttcttgctgttcttcttcctggacctcaccttcttgctcctcggtattggttatctccaccgtaactccgagggcaagcccaacccccccgtcatcaaggccggtggcttcttcggtctcttggcggcatttgcagcttggtataacgccctcgccggtattgcggacaacagcaacagcttcttcatcctccccgtcgcccatttcccctggtctcccactgcc

SEQ ID NO: 3289 - DNA, 363 bp, Aspergillus oryzae
atcgacgacatgggcgttgaggtcttcaaggagaaggtggaggctcttcttccagacggcctacggtttgctgaacctcgtcctttcaagtttgcttccaacgttgatacctttggctggctgaaggacgagaagggtctcaaccacttcactttcttcatcgagaacgggcgaattgaggatactgccgacttccagatgcgcaccggtctgcgtgaactggcgaagcttgacaagggcgagttccgtctcaccggtaatcagcatctgattctttccagcgtcaaggatgaagacctccctgcgatcaaggaattgatggccaagtacaagctcgacaacacctctttcagtggtatgcgt

SEQ ID NO: 3290 - DNA, 394 bp, Aspergillus oryzae
gacacacatcgcatgagataaatccacttcccaagaaaccggaccaactaccgatgcaagccgatcataagaaacgcagacacatcgcatatgcatccaactttgacaaacgcacggacatgccaaccatggtaagggggttgacccacgctcccatccgaaacaagggatttgcactgtcatatcgccgtctctcgttctggttggagatgtctcaccgctggtctatagtttattggctcagtgctgtggggagatgagatgtcatattttctggttgcctgaagcgggaggtgaggcgtttgaggtatatttaggcatttaacggtcgagaccgctggtttgggggtggatattactgggtttgtggttattgatattagtacggtggatg

SEQ ID NO: 3291 - DNA, 452 bp, Aspergillus oryzae
cggacgcgtgggctggaactcgcactttgcacccaagcaggcggacctggaaagactgaagactgagtacgaggacatcaatgtcatcagcttcgaggatctccggacgttgggtgaacagaatccggtggaacctgtcccaccgtctcctgaagatctctgctgcatcatgtacacctccggatctaccggcccaccaaagggtgttccccttacccacgcaaacgtcatcgctgcaaccgccggtatcaatacaattgtcggaccatacattgggccctccgatgctctcttgacttacctcccccagtcgcatatccttgagttcatgttcgagaacctctgtctaatctggggtggtaccatgggttatggaaacccacggacgttgtcggacgcttcgatgcgtaactgcaagggcgacattcgtgaattcaagcctacgattcttg

SEQ ID NO: 3292 - DNA, 441 bp, Aspergillus oryzae
attccaacaggtcctcgatggtaaccataaggcattcgacacttggccgtttgctggagttccggacagactcaactatcgggtaacgagctatcaggcatgtgcccatatgtataggtttaccatatagcgatgcgatttctttatgtgccgtgatgatttaatgtactgcgttgaagtagtacatgacgtgatgaaataaaatatggataacgtgtgtttaaaaagatggaccacggttatctccggggttaggctgggatggagaacaagaataaaagtcacttaaaagacctgcatgcatgaggaatgatcacgactggattgtccaaaagcaagatgtctgtacagaaatggatttcaagtggctgtggtcgatgcctatagttatgcttgttaacgatacttgcgattgagttcaattcattggatttctttgac

SEQ ID NO: 3293 - DNA, 255 bp, Aspergillus oryzae
atttacgcgtcatctcgtcttcgccggcgcgatggccatacccagttgttcgagatggcgcctgcgaccaattggtctcctctacctgttttacctcgtgggatttatgagcttcgcttgtattgtcgctatctggtatggcgtcaattccgaccgagactatattcatccgcttttgacccaactcatccccgccggacactgtgcgtgccaaacttcgaccaccttccagtgctccacctgcctgtcatgctc

SEQ ID NO: 3294 - DNA, 477 bp, Aspergillus oryzae
ctctatctgccactgggaccaaagagaataatctctacttcacataataacaatggagtctccttcgcatcctctcgctgatcgctccaccaacactcatctggtcaacaccgagaaggccaacgagcttaaggctgcccccgccaagatcgaatcaatggaatatcaccgacaagtgctccagggcaagctggagagcggagacaagcaacaagccagctatgtatcgccctcggatgatattatgagcccgtgctccaagaaattgagcgacttgaagggcaagcgattcaagaatgctggcaaaccccaatcactatttgccaaactaggcaagaagaactttgagcaatcagctgccaaccatagcgccaacagtgaggccgagatgcagaagtaatcgacgttccaggatcgcttacgtctcatgcgccggtcgcatggatcttttggatgatacctggatctgatcatcgg

SEQ ID NO: 3295 - DNA, 489 bp, Aspergillus oryzae
acatatttaaccatccaacattccatagttttagtccaatctaaactacatctaaagctcgattgcagagcgtgtccgacgctgctcaagattaataaccatatctataccttcacataatcaagatgcgattcctctgtttacatggctccggcacgagcggggaaatttttgagatccaatccggtaattaattcaacatctagtggccctggagaggaagccgagatgaccatgacatttcgtcccacaaattgtcagtactaaccacaaacaggtggcattagccaggctctggaagctaaagggcatcgcttcacatatatcgatggccgattagactccgaacctgagccagagctgaagggcatcttggatccaccattttacaaacactacccacgcgatatcgcacccggcgaagacctcgctcgtgcgatcgagtacaccatggatatcattaagaagaagggtccattcgacgctgta

SEQ ID NO: 3296 - DNA, 507 bp, Aspergillus oryzae
atattttgcccgggaacagtcgttgttaagactgtatattcaccatgcttctcgaagaccagagattcatccaccaggatctggagagactagagcaggcgattgcggatcgcgttgccgatgagcctcgtaacatcaaggatcgcttagctcgcgaccatgaaatcgctcagtttctggaccgcatagacgaacagtcgaagagactactagacatctacaaagacgcggacggcgcacgcgagaaggagatccaggctatctcgaccggcgaccaattcgaggagttttatacgcaactaaacgagatcaaagattttcacaagcgctatcccaatgagcccgtggagaacttggagcgagcatacaaacgccatgagggcgagccgatcggaatggacatcgataacctgtttacgggtgaagaaggcttcggacaatttttggaccttacaaaagcgcacgaagattacctgaacctgcctggcgttaagagattaacgtacg

SEQ ID NO: 3297 - DNA, 236 bp, Aspergillus oryzae
ccggagtgttgtcgatgtccacgaaactgacgatgcggggtggcgacggcccgccgatgccggtgggtcgtcgtcggcgttctcgtctcctgcttcgtcgtcgaagaataaggggcggttgtcgacgcccgataggacgagagagaagggcaaggcgtcgactgcgtctagttcagtttctgggtcggcgggtcgcgagcagcaattgcgagagagggagaggaggaggagatgga

SEQ ID NO: 3298 - DNA, 436 bp, Aspergillus oryzae
ccatcttgcacggtcctaaatcgtcaagccgttgttttgttctagccagcagtgctgtgcgcatagtgtcttctgttctcccttgataccccttgcgtggtttcatatatattcacctccacgtccagctagctggattcacttttcctcttttgacctcacttgttaattctctgtcgcaccagacatcaattggacctattgtgaatagatccttcaatccgtgagcatcatggccgctgaacaagatccccaagcgttcgagaaggacttcggaaacaactccgatggtatcaacggagctgctcccacccaccagctgtccgctgaggacacagccagggctgctgcgcgcttcggatatggccctctcgctcacgtcaacaccgctgaggctcaactgcgtcccttcggaggtgagttccaacccggtctg

SEQ ID NO: 3299 - DNA, 554 bp, Aspergillus oryzae
  modified_base (322)..(322): n is a, c, g, or t
cggtaatcgtactggggtcgcgtcggagccctaagccaattaccttgggtcgccttgtgggatacgagagaagctgaagctgagctgattgaacaatgagctttttgcaattgggtttacacatcaatgcgatcgcagactaggtggccgacccggatcggcctcgaagacccctatatattccctgataccttgctatgagcaatgtgcctcacacagccaactgcttcaaccctctcccatatcgaaccctatccataacgcagaaagtccacaaagatcgcaactaccatgggttcaatcgataaacccaagaaacaantcatcctcaatgcatttgccatgcaatcaccctctcacctgaacccaggtctccaccgttacccaaaggaccaaggcggcgcctacaaatcgctccagcactgggtaaccctagcacaaaagctcgaggccgccaaattccacgcgatcttcttcgccgatgtgctaggaggatatgatgtctacaaaggtccagccaacctcgatccaaccatccctgcgggcgcgcaatt

SEQ ID NO: 3300 - DNA, 504 bp, Aspergillus oryzae
  modified_base (278)..(278): n is a, c, g, or t
cccaagaatggcttgcctccgctccgcttggaaccgcctaagccactaaatatgccatccggcgagccacgctcgtccgatccgaacgcatatcattccgtggctcaatcggcggcaccccggtctcagacaccgtcatccagtctggtgccttcccttccgcccctcaaggctctatcgggggattatcccaacaacctctctcaatcatccagcagtacctctcagagccccagtcacgatctcggcgctggcaagaagttcttctgggatacggncgccagcctgtccaagcggtcgtacgaagattcgtttggccatgatgatcgtccactctacaacggcatgcgccccgatacggaaagttatcctcggaggctgtcagatgccagtcggaacttctacaacgaaacgcgcgatgaaatggcgtacaaacgagccaacgggagaatggccacgaagatatcccctgcactccagtaaaacaagttgattcctgctttt

SEQ ID NO: 3301 - DNA, 465 bp, Aspergillus oryzae
ctagtgtatttattttatgaactatcattgtacgtggtcaaggtagtaaagggacgatcgagaacaatagatactcgtctgtggatcattgagatagatctcagtagatcttcccaaagttcctctcctttaccttgtcgtatctctttcgtcgctcgattccggccccgtctctgtagcgactccttcttggttcatttttccagtgcttctcgtttcatgcgggattcttctcagaatcttgaaaatggtagaccagatgacccgaacccttctccaagtgaggtcatcaaaagcgttcctcgtcttcgcagtttgctttgctatatcgacagacatgatgttatacggactagtgagtgaagagcgaagcctcaggacgcatgatgctgacaggcatagattgttccattcgctccaacagcgctacacgaaaaagctggacttcctctagatgatgtaccg

SEQ ID NO: 3302 - DNA, 508 bp, Aspergillus oryzae
gaatcctctacagagtaccgccgaagtcaactcggtcggacaacagtcagaatcacaaaataatgcccttcctgggcaaattctcacaggaaaacaagaacattaccttaagcgcgagctcatcgcccgccaagtgcaaagcgaaatcgccgagttaaactctcccacagccctccaacgtttcggtgccccattcaggtcagagtacggagaagtcgccccagttgactcagaactccctatcctacgatatatcttcgttcatcatgtgcgcaattttccttttctcgaccaggcccgcgagaaggagttttggcaggataaattacaagtgttcctagaatccttcgcgaagaagcatgtttcgtcgtccgaagatcgcttggaggagacaaagcgcagaaaattagcaaggaagtgcgagaagctcgtggagctcatgatggtatctggtatcccaacggcatcgggatatgaagaacgaatccagttttcggaaatcgaggtt

SEQ ID NO: 3303 - DNA, 437 bp, Aspergillus oryzae
  modified_base (72)..(73): n is a, c, g, or t
  modified_base (79)..(79): n is a, c, g, or t
  modified_base (215)..(215): n is a, c, g, or t
atcatttttagcaggctctggaacgatgctcagagcaaagataagtcaagtgaagcaggagcagtcaaggannctgccnaggagaagaaggagcaaaagaagttgacgattgggcaaaagatcaagaaggaagcccagcattattgggatggcaccaagcttttggccacggaagtcaaaattagttccagactagcattgaagatggcagcggnttatgagctgagcagaagagaacaccgacagctccaacgaacggtcaaggatcttggtcgcctggttccattctctatgtttgtcattattccgtttgcggagttgttgctccctgtggctctcaagctgttccctaatatgctgccgagcacatacgaggggcagaaagctcgcgagaagaaggcattgaacctgagctctacacggaaagaagtttctgg

SEQ ID NO: 3304 - DNA, 555 bp, Aspergillus oryzae
ccttcccagacatctaatctatatcatctctcggccccagttccaagcgccaggcttaatctgggcttcattccacttcctaaggctgtcacattcacatcgcatcgttctcttgtgtcctgcatccacccccggtcaatattacaccaccttcccgctagttacaagctcccttctgatatccccaccatacactttctgttttgccctctcttgtttttctttattttctttttctttttttttttattatttccctaatcttttgccctttcacccccagtccccaattccatatcagggatagctccctttctctgtcctgacgcctgtcagcctgaaggatggacctccagtgcagctaaataacaaccctggaaccctctacattacactggctcttgcagcacacccttaatctttcatcaagagatcccttgccttcaagtctagagctatagcccgacgaggcactaccctggctgtcagccgctcgttggtttttggcccgtgcaattccgcagctgtggcctcttcgaaaaagttgtcgtctcc

SEQ ID NO: 3305 - DNA, 494 bp, Aspergillus oryzae
ggttccgctcgataagcgtttggccgcagatggtcgtggtctgcaggatgttactattaacgataagtttgctcagtttgctgaggctttgttcactgccgatagacatgctcgtgaggaggttagactgcgtgctcagatgcagcaaaagctggcggaaaaggaaaaggcgcagaaggaggaacacctgcgggcacttgcccaaaaggcccgcgaagagagagctaccagcagccgccgcgactcccgtgccgtttctcgctctcgttctcgttctcgcagtgtcagccgcagtccgtctccgtactctgatcggtctcgcactcctagtgatgacgaacaagctgcccgggagcgcgagcgcatgcgtcgcgaacgccgccaggaaaacgagagacagctccgtcagtcgagaatgggtacagagagacgtattcaggccatggcccgtgaacagaatcgtgatatctcggagaaggtcgctctgggattgg

SEQ ID NO: 3306 - DNA, 473 bp, Aspergillus oryzae
agaaaaaaaaagggaaaaagaaaagaaaagaaaaaaaaaaaaaagagacgaccagccctagaaaacttcccttgacgggataggggatttattcttcttcgacgacctaaattgtggttatcagccagctatcagcaattttcttcttttcggtgatccaactcgctctacaaccaactacatcatcatgtattcttgtgccaattatcctcgcggttgccgtggccgcgttaatattcaaggaggaaaatgcgccgattgtgtgcaactgaaactccgtcgaccatcatctacgtccccctttgcccagtcacgagattaccggagagcgttgccctcggagatcttgaatgactccccttacagggcgatcgctcgggaattgctgtaaacctgcgatactgcttctaaaccgagacggcacgaaagacctccaggacttcgaccggatatccagggtcctgcaggttggg

SEQ ID NO: 3307 - DNA, 652 bp, Aspergillus oryzae
gacccacgcgtccgcccacgcgtccgcggaactgatccatcaacaatcccattttcgctgcgttcgtcacccacggacattttcctctgtttttaaaaagggaactattgacgacctgagcgcaggaggaggttgagtggattattcgttcacgagctcatccttgcagagcatttccgatcgatgaatatcctggagatggaaatcctccgatccttataaaggatcctgttattcctggtctctcctctcgcacgactatccctctcttcctctctctccttctttctctctcttgttctctgtctccatcggtcggtccttcgctccctctcgacctaattaatttaattgattgattctatgctttgattgatttcgtttcatccatcaatctctcacgttgcttcgtccctgttcatttgctaccgtcccgtgtgggtgagctgtcgatcgtattagtattatttattattcttcttctatttagtatctcacttgacatcgtgactgtccttcgtttttctcacccacctgagatgactcgctggtgatcccttaatccattcatttggccattactttgcgatctacacctcgatccgtcaatcattcagattcattctacgtgtcacaacgcagggcccatccg

SEQ ID NO: 3308 - DNA, 580 bp, Aspergillus oryzae
ctttggaccctatactgcccaactcgagctcctccttctccatcaaccgaacctcatcagcaacgatgcctacctcaacatccaaaccacctcccctcgacccctccaactaccccaatggcaaaaagtctctcgccggaatttcactacgtgcattcctaatcggcacgaccctcggcctctccatctccctcaccattgtcctccgcttccttgaaacgcccctttggcgtatcccattcttcctcgcctccctctccctcttccacttcctcgaatactatgtaacagccgcctacaacacccgctacgccagcatttccgccttcctcctctcttccaatggctgggcatacaatgtcgcgcacatatctgccgccctggaatgtctcctagcccatcgcttctggccgaccgccgcctacctgaactggggaattctcgcaccaggcctaaagattcaggttgtgctaggcctcgtcttcatgattgttggccaggtcgttcgcacgttagcgatggtgcaggcgggaagtaactttaaccatacggtgcaggtcgagcggaaggaggatcatag

SEQ ID NO: 3309 - DNA, 531 bp, Aspergillus oryzae
agcatatttatcgtgcttgtcacccgcgcgattctcagttttgacttgaacttctatatccctatccaacgcacgaccgaaaatatggaaacggcccatgcgcgaaatgcagtcttggaccgaaagttctacttccgcaaggatccattctctcctcgtgcacgtagaccgcacccgcagtcttctactaatggtgaagtgtcgtctgccacatcatccgccgttaatacaccacccccgtcgcctccacttaaaccagtagagtcggaatatgagctcatgactatctcagatatcatcaacggttctgctgacggatcgttccccggattgatcccgcttgtcgaatcatacttgaacagtgtcaatgtggacgttgaaacgcgctgcttcctggcaacctacctcgacctcatttggaaacgggcaaacggaaccctctggactggggcgcggtggatccgtgaatatgttgcttcgcatcctgcatataagcatgatagtgtcgtctccgaagaaatatgctacgat

SEQ ID NO: 3310 - DNA, 519 bp, Aspergillus oryzae
cgacccacgcgtccgtaaaaatgttctcttccaagtcctattaaggagagactgtgttccgagcatcatggcatggctgtaacatgccacgttgattgacattgcttgacggatggggtcaacccatctccgtaaaattgacgaagtaaaagattccacgaagtgcatgatttaccgacgcacaacaataccctggcgacgaacaccccggcgggcccggcggtactcctcgtcactgtcggactcggagcagctagcctcagacgactcggtgacatagccacaacgactaccaccgcagtcgagcttgacgcggtcgcccttccgagtgatgccatagcgctcgcagcggcagacgctagctgggtcactcatggaagacagcgatgagggagaggtgctgccagaggaccgagaagaccgagaagacagggatgagccaactgagctggggggggctgttggaaagggagtactcgtctgacaggcgggatcccgcaaagcgcatggagaggtcct

SEQ ID NO: 3311 - DNA, 556 bp, Aspergillus oryzae
cgaatgcacagcaaacatttaaacttacctgaagaaccactgtgagatggctcccccaaccaaagcgggaaaagcgtcccgcatcacaatcgcttgcaacgcttgtcgtttccggaagcaaaagtgtagcggtaaaaagccggtgtgtacgcaatgcctccagcacaatcgagtatgcgactggcccgaacagcttaaacgtggccccgcgaagggatacatagagtccttagagcaccgtctacatgaaacagaaaccgtgctgctgaaagtgctctctcggatctcggacgctcaactgtccgccagtataaaccctgacaagcagcatagaaccaggagcagtattggagacttgttgtattccccatacccccgactggggaaaagaggggcagattattggaaaagattccctctggatactgcccacaatgttcgggaatggcaggatgattgtctaagtcaccaagacttgcgcccatcgacccctggctcttctgatcgcaataccactcttctgtcaccagggactggggttactgaggaaacaatt

SEQ ID NO: 3312 - DNA, 553 bp, Aspergillus oryzae
aatccacttattattctccctgaaacttgtcatagtttattgatcgattgatcttatcaagctctaatcttttatattcctcaattgtatttcctcttacctccacacacccacttcgacatccgtgattgttcctcatatttaccgcttcttcccaaggattcctaagcgacttgagtctactaccgacttgtcccacctcattggactacgacctgccggacgcttccagacccttcgacccactcattatcgcagttgttcggggataaagataatcggatcttgggccgttggaacttttatttgggaggcttggtgccatacctagtacttaaactctggaacctcccccagtggcgaatcctctgaacttccccatccactccggcgtcatacccttgacgtccatttgttgaaagagaacatgtccatgtacccttcgatacgcaataagggttttatcagtgaaccaacatctacccccttcatcaatttccaagaccccgttttcatccaggacgagttccttcccgacttgtcgcaggaggcc

SEQ ID NO: 3313 - DNA, 514 bp, Aspergillus oryzae
ggttctgtccttcgccatctccactcaccctctatactagaaatacatctataaaaagtcacaatgttgttgaatatgccacacctctcccccatttcctcaaaagccatccttagatctgtctctcagcagggcccgaaagtcgcgggttcgacgggaccttgcaggtatctatctacgacagcacccgcacagaagaatgtaacgctactccaggataagaagaacggattcggattcgcacggtccaaccctagaccgccgaagccgaggagcaagggtgtcactgagatcagagggccgtactacacggtgatgggaaagagatacctagctgatgtgcttgaaacaatggggactcatgtggatggcctcaaatttgccggaggctctttttcactatttcaggagaagcccttgagggaactaattgacctggctcacgagcatggcgtttatgtttcgacgggtggatgggccgagcatctcctcactcaccctgacacaaatgctg

SEQ ID NO: 3314 - DNA, 548 bp, Aspergillus oryzae
gaagatcgtcattggtcttatggaccgcttgtcggcctatgcggcacgtgagaccgagtcgtctgctgatccagaatctagaaagcaaagcgaagaagaagcggttactaaactgctcgaaaacctcaaagtcgcagaggagtccaagaaggaagtacccgccgatgccgatgccgatgctgatacgaacgctgcccaggagaacggcgtagagcagacctcaaaggagtcagatgaggccgcaactacaaaggaagcagaggcagaacccagcgctagcacgaacggcgacaaagatgagaaggctaaaatcccgacagacgtcaagctttacgatgtattttacgggcaggtggtcaacctaatcaaatcgcgtggcctccccatccaagataccatggctctactggtttcactcgttaatcttgcgctgaacacgtatcccaaccaactagaatacgtcgaccagattctcgatttcgctacccgcgagactgcggagtatgctgatcacgcagatttgcactctgctccgacacagcagaacc

SEQ ID NO: 3315 - DNA, 506 bp, Aspergillus oryzae
cttagttgaagtcgagaagaatacctctgtgcttccggacgagtttcttgcccaccgactgggtctcatccctcttaattccaagaactgtgaccaggacgttgagtacactcgcgactgcgagtgtgaggatcattgcgcgcggtgcagcgtgacgcttactttacatgcgcgctgcaccggcgatgacattatgcgcgtgtatgcgcgggatctggtggtcagcggtgagcgggcgaatgaatgggtcggaaacccggttatcactgatccagaaggcaatggacccctgatctgtaaattgcgacgtgggcaagagcttaaaatgacatgtatcgccaagaagggtattgccaaagaacacgccaagtggatgcccaccgcagcagttggtttcgaatatgacccgcacaataacctcaaacatgtggattattggtacgaagaagatcctattaaagaatggcccgtctctcacaatgctgcatgggaacacgccgctcccc

SEQ ID NO: 3316 - DNA, 607 bp, Aspergillus oryzae
cgttatcttccacttttcgaacaacacctcactgtttagtctttgtccgactgtttgttaggcaagacaaaggaggtctttataaacaggttttcaacgcggttgcgcgactgcgagtgattgggcagctttcttcacctctcttcgttatctttcccctcgggccggacttcgactgcctgaaatctacgccatgactacggtagttgctgttggtactccccttgcggaggccttgagtaatgtcatccagccgaagctggtagagatgggatggagctccgacggcggcgatgattcagcgttgaccgaatatgtgattctcatgcttgtcaacggcaagacacaagaacagattgctggcgaactctccaacgatctcctcggactcggtgaaggcgatacacaggctctggacttttcacgatggctctttgaacaggtcgaattcctcaaccaacagatcaacggcgggggtattcaaccatcaattgaaaccgaccctgcgcaggccattccatcctttaacgatcaagaggctgccaacaaccaagcgatgatgactggagatggcgctatggatgccgatatgagtatgggcgatacc

SEQ ID NO: 3317 - DNA, 531 bp, Aspergillus oryzae
gttgtttttctttttcttttcttttctctttttttactgcggctttactatagagatttgaccacagctctgatgttctcttactccccattcctttactatattcttttttggtctcctcgcattcctttctcccaacagccacgcgccgttcccctcactctaaaagcacatcgactttactgtgcttgacatccaaaacaacctccaaccgttcccggtgataatatccctatccacaactccgggctagaattttcaacccacgtctttttcctgagatgctcccaatctagacgtgctaagccagctggtcctcctcgtgcataataatgcagatgggtcgtcaactacatgtaatatcgatgttgccactttgagcttcatggtgcttgacactattctcggcgcatttaaggatggagcatatatcaactctttgtgcaatcagcactgttggtattgcagcaaccggctttgctctcggtcgcgtagatcgagattcacccaagccggcgcgcttccgaaaaa

SEQ ID NO: 3318 - DNA, 573 bp, Aspergillus oryzae
gtgcggttaatcgtactgcgacgcagttggtgagtaccagggagtaattctcactttttaattattttcctttttctttcctctttttgccttcctcgaccgaacccactttttttctttttacgatcctcccttttccacagcgcaccttaaactgtcaacctgcagctccgactgtcggcctaccggagataattgcctgtacttcacttccgtgacttttcccccatcaaccgcttccaaagggtatacaatcatctcttcgcctgatactatcagtgcgacttcttcggatagccgtcgatttgcctccgcccgttgcccccgtcttgttgtgccggttccagcatacatcaaactcgtgaatgaatggtctagattgcaaacaggctttctactagtctttcacgtgccgagcctgcggatcgagtctcctgacccaactgtcccttggtgaaatcagccttccgcttaccgtcacccaatacccattgcaaccatgtcatcgtcgtcgtccaacgtggtgggtgtccactacagggtgggaaagaaaattggtgaaggatcgttcgg

SEQ ID NO: 3319 - DNA, 428 bp, Aspergillus oryzae
ctttctttaacttcatcccgtcatctccttgcgtttgttcccttccttccattgtccttggtcaaagaccttttttttttttcccttctcatatcccccacctagtttgccagccctcatcactacgctagtttcactggaaagtcccggtttctgcacggtaccctcaaagatacgattcttgttcctcaaccctcccctctgtctcagggggaaggcctcgtttgatccgtacccggcgcttccgattgacatagacactcttaatttttttttttctgagaatttttagtcatttccagcagcaagtgcctcagagaagaatattcacagccacttgacgtcgacatccacgatttgttggatgggactggtaggatacggcgaaatagactgccgaccgccgacatctacacacggacaggctt

SEQ ID NO: 3320 - DNA, 447 bp, Aspergillus oryzae
atcgaatatcgcggtgttcatgttcctggccgcaggcttgcttccagatcccgacgtgccgttttcaccatctctgtcgcattctcatgcatggattgcagggattatcatggaggcgcttcaattggcgatgttctgtaaccaacaaagtccagtctctgttctctcgagagttgagtaccttcaactgggactggtcatggtgcgactggtcctgttcgtcgccatggttgcattgtacttccagcccatgtacgcatggtcgcggatccagctggatgaaaccgagccattactgggggaagtggattcgaagccggtccgagatgcgcagcatggtggatggctggactatgtcgttgggttcagcacattgttcccattcttatggccatctgattcccgacgcttgcaactaagagccatcttctgtttcgttctgctcgt

SEQ ID NO: 3321 - DNA, 537 bp, Aspergillus oryzae
ctcccccagtacgatcggacccatccagacgtagtgagacgctactgggaagaaatcgagaagttccaccgccactgccacgagcatattgcttataaactcttccggctgcttgcaatcatcctggaactcccagaagaccagcttgtggacggacatcgctatgaggcagaatgcgacagcggtctccgctacatgtgttaccgggcccgcacacccgaagagaacgagaaatacaaacatctctactcccggggacataccgacaacggcaccatcaccttcgtgttccagcagcccgtcgccgccctccaggtcaagaaatacgatgactcggaatgggaatacctccccatccgtcccggcacgctgtcggtgaatgtcgccgatatcatgaccatgttgtcgaacgggtggttgaagagcggcgtgcaccgcgtcatcgtgccccctgaggatcagcaacactacgataggctgggactcttgtactttgtacggccgagcgatcgcttgaagttgaagagtgtggatagc

SEQ ID NO: 3322 - DNA, 530 bp, Aspergillus oryzae
gccaaaggtccccgcagaggtgaaaagtgtacgaagccgagaaaattgaagaaattattcactgttgattgagagacactcgaacgtgttgcaaacagataatacccttccgccattggctccttgagcctgtagggcagtcggatatcttccgttttactacattccgacggtatctactcccgccacgaggatcgagtcccatatggccaccgttatatagcacagcacctaagacatgtgctctgcattaagcaggtccgggcttcgtcctattgcgacatgctcaccacgtaacttttgacctagtcagatcacacaagcccctgcatcttgtctttcagtttgtgtttctcgatgcccctttcgaatctctgcctggtcctggggtgggttctttcttcaatagcctgaaacccttctttaggtggcattgtgatcaaagagccgttgacacgtttgatattgatgcggatgaggtagagtgcgaaagggagacggttcgaagagccctgttaatgcggttaaaa

SEQ ID NO: 3323 - DNA, 529 bp, Aspergillus oryzae
tctcctcctctctttcgcttagccttaatcttgccatcttaatatttctctgactgcaacaccaccctcccttcttttttcgttttaattcgaacatttcgtgtttcatcaatgcatttgtgcttctcgctctcatcatgggttttctaagccgtcttcgcaagcgatcgaaaagtcatagccgtgcggggaatgcggccagctatgagcatctccgcactcaccgcgaggatgttcctccactgcccatcatgggcaccgattacaccaagaggctaccgcgacgtgtcttaatccgcattttctccttcgtttgtccccacaccgaagataacagctatgatacgtccgaggaatccatgaccgaggatggctgtatgctttgtgacatgcgtgacctcgcgcattgcgcgttggtgtgcaagcggtggtccatcgatgcggacactcttctttactccaatgtccgcatcgacgccgtccactactgtgagctcgaggttcagttatccgctaaacggaaacgccg

SEQ ID NO: 3324 - DNA, 561 bp, Aspergillus oryzae
  modified_base (314)..(314): n is a, c, g, or t
gacccacgcgtccgcaaaacacaacggaaaaacaatctgaacaagaaggaacgtcttcgaaagccacaaggaatactaccgcaatgtcctcatcatcccataacccccacaacaccccaaccctccccaacttcacccgatacatcacaacccacgacgccaacggtaccgcgataatccacagtgaaacggaaagtacattcagagaatacgacaacggtagcctccgctttaatgtccccttcacaacctcccagttccctgccgaactaagcggtgacgccgatatagccgcccacgagtccttgatagcntctggcaacctgggtctggttagctttagtggaactgtctgccgggttgtggactttgcgcctctgaaatcgggaggcaagggattgatgcatcggactcagagcttggattctgggatcgtcctggagggatctattgagatgtggttggactcgggggagatgaagctcttgaagaaaggtgatattgctgtgcagagaggaacaatgcatgagtggagaaatgcaagtgagacggagtggacta

SEQ ID NO: 3325 - DNA, 265 bp, Aspergillus oryzae
cgtcgggagtgaggagtggagggagattccggtcgagggtaaggtgtatggcactttgtgttgggcttgaagatggttaagtgttctcgtatattggacctctcggaattgcagggggtgtggcaagtgtatatctcgttgtacttatgtgagctagacgcttgtagcgagcacggtatatacgtgtaattgcgtgcggaagataacatatcctcaacaattctaaattagcagtttggatttaaatccaacgagcgacacgatc

SEQ ID NO: 3326 - DNA, 478 bp, Aspergillus oryzae
  modified_base (198)..(198): n is a, c, g, or t
cgaaaataaactgatacacaaccgtttcttacttttcccttttgtatcaattgactggctagtttcggtgaatcctcaaagacagccaccatggttcagccagggacgtcacagtcctcctgggtggacttcatcaaacaccctttcgtgggcaccttcacctttttctatctcctgtttcaagcggttctcaactgnttctttgctcctgcccctccgccacccgcttcactcgtcaatggccttcccaagaagcgagtggctgtcattggtgctgggttaacgggcgtgtccgccgcagctcactgtgttggtcatggattcgacgtgcagatcttcgaggcgcgttccaaggcgaagggattgggcggtatctggagtagggtgaactccacgtcctccttgcagattcatagtatcatgtaccgattccatccgtcggtgaaatacgataatgcgtatccgacgcagggagaga

SEQ ID NO: 3327 - DNA, 555 bp, Aspergillus oryzae
aaagggcccgattgagacagccgcaggctagtagctttgtcattgatatatccgatttggaaacatgctcacgcagcttttgctcctcggcctggccggccttgtttgtgtcaaatcagtcaagcctcccttgaccccagcgccaccaacaccgtcaccacggccgtggtccacttttgcagagaatatcatttaccagcctgactcaaatcactccgttctctatccccggcaggttgaactatctgatggaagtctccttgcgacagcttcgtttgcgggcgataagactccatacttccccatattcaagagtgcagatggtggtgttacctggtcttggatctccaacctgactgaccaggtgaatggattgggaatgtcagctcagcccgcgctggcagagttgccgtttgctgtggacgactaccctgccggcacgattttggccagtggaaacagctggggaagcaagagcacaaacattgatatctatgccagtaaagatagtggtcatacctggaagtttgtcagtaatgtggcgagaggaagtgg

SEQ ID NO: 3328 - DNA, 652 bp, Aspergillus oryzae
cgacccacgcgtccgcttcctcatctacctccgttaatgagatccacactcacacggtggcccataagaagccttccgcaaatgtgcttgaacgagcacgctctccagagcgccgtttgtctttcgcggtcgatcatctaattcaccctcacagggatcacagcaaggagaagcgccgcagtcatgggcgttcatccggttctaaagagcgtccaggcgatcatggcgttagtgctactgccaagttggacgttgtcgttgaatcaccaccgctcgtctgctacggcagcccggctaactcgactggtgcgctattctctggtcgtttgaagatcactgtctcggaagcggttgactccattactctcgataagtttgacatgagattgatgactagaatgactacgaagaaaccagtctcgagagaatgtccgaactgcgcctctagaaccgaggagttaaaccactggaattttttgacagaaccgcttcacttgaagcctggcgaccacgaattccctttcagctacctctttcctggtcatttacccgcctcttgcaatggatccctgggaaagattgagtactacctctctggccatgcacaaaacaccaccggtgaagaatacgatttccagatgcctttacacat

SEQ ID NO: 3329 - DNA, 538 bp, Aspergillus oryzae
atccaaactatcggtctttcgtttcgtattcgtttcacctactttacttaacgtgctctggtctaaatcttgattactgtgctctccatctcttcagccagtagctgacacgataaggagtccgcagccatggttgtctcgtcccttgttcgccgaggcatggagctggcctccgacatgcccatgaactccaaaaaatcctgaagtaccttccattcatctgtcaggatggctggctggtctttttgtcttctctgtcctagctttcttttttgttgtcttctcgatcgaatacacctatggaatggtggttgcagctctcgccgctgtcgaggaaactaaccccgatatctatatccgcgtgaagaccgactccaatcccgacaaagatgtcgacgcggctgagcccgaggcagatattcttcgccctcagcctatcactagtaaactgcgcaccaccattaaacatctccgtgcacgcgccggcttctggtctcgtttccgcggtttcggtctgttcttcacatactctctggcc

SEQ ID NO: 3330 - DNA, 202 bp, Aspergillus oryzae
ttctcgttcatctattccgtgttcatgtacaggttacatggtcaggatgatcggtcagtcatagaggttccccatataacgtatacgtttctctcacgatggattttcaataataggggctctgggggttttatgagatctttaactaggtagatttatctcaagcgctacacaatgcagcagagaccttgtctcacttaaa

SEQ ID NO: 3331 - DNA, 550 bp, Aspergillus oryzae
tttttgaccttctacttttctaattgctaattgcgccaagttattgctgccttctccatcattctcactactcaattcccctgttcttaaccgacctataatcaggcacccttcttttcctctcgcttgtatacggtgagccgattactgtgatctcttctgggtcgcttggaattcaaggacgtggtgatcccttcttggtttttcctctccttgtgtcttgtttctccatctttgtcttgatacccgtcccctggcggtttcagtccaaccggttactctctacccgcgacaacgcatctagtaatttcttcttatcttcttttcttgtttccattgttcattgtcgtatctatcgcgagcaatttgcggccttgaggaatcgtactgcaatggccgaacaaactcagctggccttcaatggccaatcacgcgattcgaatgcacaaatagatgtaatctgcgggcccttaatcaatttcaagaatatggatgtcaacccgtcctcctcgatctggcgtggaagtgttttgattgtgacaaaacctgg

SEQ ID NO: 3332 - DNA, 538 bp, Aspergillus oryzae
gttcgagagcgctgagaccgaccgactaagcgaatatgatattaagttgatggacattgaccaggagcacctggcaatcccagagaccgagtatgccgctaccgtcgagatgccttctgcagaattccagcggatctgcagagacctgaacgcactttccgagtctgttgtcattgaggctaccaaggaaggtgtcaagttctcctgccagggtgacattggcagcggatctgtcaccatccgtcaacacaccaacgtcgataagcccgaacagaacgtttccattgctctctccgaacccgttgccctcactttctccctcaagtacctcgtcaacttctgcaaggctaccactctctccagcaaggtgagcctctgcctgtcccaggaggttccccttcttgttgagtacggtctcggcagtggtcacctgagattctacctcgctcctaagatcggtgacgaggagtaaattaatcaaaattaaaagccaaacataccacttacgacgaaggggcaggaaatgatttctttgcgg

SEQ ID NO: 3333 - DNA, 488 bp, Aspergillus oryzae
  modified_base (257)..(258): n is a, c, g, or t
gttctttcctttgggttgggtcaagtcgtatcggacgtataagtcggactgggttgggaggcctgttatgccgccggatgtagcggttgatgagggttcaaagacggtgtttgttagttggaatggcgcgacggatgtggccgggtgggttctgcagagggtcggcagctctacagaggacgagtttgagacggtggattatctgcccaagacggggtttgagacggccattgagatgggtgaggctggtgggtatnnggaggttggttgcggtggacttcaccggcgaggagttgggctatacggaggtgtttggtgtggaccattcggagtcttggagtctctcttcggcgttggcggaagatgatggtctgctgcatatgcttaccgctgcttgtgcggtgggagctgtactggctgctctatggcagaccaggaagaggatctcagtggggctgcgttatcttgcatcactacgggctcgacgg

SEQ ID NO: 3334 - DNA, 489 bp, Aspergillus oryzae
gcaacaccttttgacaaaagtcggtgactctacgggaatcgatccggtaccgcaaatccctcacatagcgagcgacagtgcttatcttaaatctcaacacttttctgataacggcaatggtactttggtcgaactaaatccaaatgtgggacgtcagggggatgagagccgaaagcctactgcaaggaatgcgcccgttgaggtagtctttcagttggcgaaaagcgacagcgaactccccgatgagcggtgcaagatactatctgcaaatggccttgaatgtaccatctgcggtctccggttcacccgacgctctaactgtcgcgaacatatgaagaggcatgacccaagcctcagaaagtcgtaccactgcgagttctgcgataggccattcggaagaaaggctgaccttcggcgacatgtaattagtattcatcatggaattcgaaaattcggttgtgaggactgtggccaacggttcagtcgaca

SEQ ID NO: 3335 - DNA, 600 bp, Aspergillus oryzae
gtgacatctactcctcgggcggcacgccctgcgtcgccgcgcacagcaccactcgtgccctatacagcgcctacaccggcgcactgtatcaggtgaaacgaggctccgatggtagcacaaccgacatcgctcctctctctgctgggggtgttgccgatgccgccatccaagactccttctgtgcgaacacgacctgcctcatcactatcatttatgaccagtccggtcgcggtaatcacctcacccaggctccgcccggcggctttaatggtcccgagtccaatggctacgacaacctagctagtgcggttggtgcaccagtcacgctaaacggcaagaaggcgtacggcgtctttatgtcacctggtaccggctatcgcaacaacgctgccagcggtacagctaccggcgacaaggcggagggcatgtacgcggtcctggacggcacccactacaacagtgcctgctgcttcgactatggcaacgcggaggtcagcaacacagatacaggtaatggccacatggaggctatctactatggcgacaacactgtctggggaagcggcgctggcagtggtccttggattatggccgatcttg

SEQ ID NO: 3336 - DNA, 584 bp, Aspergillus oryzae
cgacccacgcgtccggattcaccgtggccgacgatgacaacattagtaagaaaggtgttagccacaagggtcgcagaatgaacaagcatgaattcgtccagcaactccgcaatcttggtcccagagctcgtcgcgagctggtggaagagacggatgtgccccagcatgtcaaggaggttgcccgggacgaagctcgggatgcggagcgcaaggaatctcttgctggcggttctgcccaagacacacaacatggaacaacgcctgcccgacctgcatctatctcgagcagcgagtcaagcaacgggtctgatataggagtgcctggtgacaatattgctgcttcattggcccggttcacccgtggcacggccgcagaggagcgtcgcagtactctcaacccctccactcgtcctcgctcacgcagagactctgaagacgatggtactgagcgtgtgcccccggctcaacttcgagaagcagctggcctgtcgcctccacctcagcaagatgacgacgacacgggagaaacacccgcggaacgccgtcgtcgtctcgccgctcttggtgaactgaacttggacgat

SEQ ID NO: 3337 - DNA, 520 bp, Aspergillus oryzae
cccacgcgtccgcacccatccactactatatacatcccttcacaatcgtggtatcacaactgtcaccatgtctctcaagaacgacgctttcccctcctccgctgctttcgatgcgatcaacgccgctctccagagcgacgctgctgagcgcaaggaggctgtcgacaaggccaaggcaatcgtcgctttcaacctgaagaatgacaagggccaggaagagagctggtacctcgacctcaaggagaagggtgaggtgggcaagggtgctccttcggggggtaaaaaggctgatgtgactctgtccctctccgactctgacttcgcttccctggtcagcggcaaggccaacgcccagagactcttcatgggaggcaagctcaagatcaagggtaacattatgaaggcgaccaagatggagcccgtcctgaagaaggcccagggcaaggccaagctatagatacccagtttcgttgtgtagtgtttcggttaaatgtacatttccatccatcttatgaaaaaa

SEQ ID NO: 3338 - DNA, 336 bp, Aspergillus oryzae
aggccttccacgcgcccttttcagcgcgacccctccatttggggtctccatcacccatttagcatcgcgttgggccaccccccttcccttattactggttctttccgatcggtcgcctaccgccctgtatcttcccaccccaaaacatcacgaaacttgtcgccaaggtctagatacaggccgctatcagtcgcatccatcgatacaaggcgcccgccgctcctccacgtctgcaaattggcgcgctttctcgccctatagctacgaattatcgttcactcttaccaccttcgttttccacgtgttaccttagctgcttggtcgcggatcttgtcg

SEQ ID NO: 3339 - DNA, 580 bp, Aspergillus oryzae
atcgatcaagagggaatggacatgctagagcaaaagaaggatcatgtttgggtcgctccagctctgaacttcttctatacaacatgcaccggcgaagcaactccatggggcttgaccgccgaggatgcagcgaaaaaaggccttacgtacgaggtggacacagcctgcaaggcgatgcaagagatgcgcaaaaggggaattcgtgtcatgcccggtggtgactatggttttgcctgggcgccccacgggacgtatgccagagatctgaagcatcttgtggacttgtttggctacaccccgatggagagtattattgctgcaactgcttggggaggagagatgatgggatacccagacgatttgggcaaggtagcaccgggatactatgcggatatgattctggtggatggagaccctctgtctgatctggagattttgcaaaaacaggagagattgcatgcaattattatcaatggtcatatccataagcatgttgtaccctcgcaagctgtttatgcttaggagaaccacacagcagtgactcgatattggctaccatacttaaatcggcatttctaca

SEQ ID NO: 3340 - DNA, 528 bp, Aspergillus oryzae
gagcggatggtcgggtggtggcggtatggcttggtttacttcgctagtggtatctgggggttcgtccttggaggtaactatgcggctccattccaaccgtcttcgggctgctcaggtgccctgtttggtatccttgcacttttcatcttggatcttttctacacctggaaagagagaccgtctccatttgtggagttgattatcatggtccttggtgttggaatttctttcgtcctaggtctgctaccgggcctggataatttctcccatattggtgggttcatcatgggcctggccctcggtctctgcattatgagatcgccgaacgcacttcgggagcgtattgggctcgcccgtaacccctatgtggcgatgagtggtggtgctggtcccacttccgatgacgagaacaaaaccacgaccggcccaagtttcgtcaacctcttcaagggacggacgggccccaactcgtcttcagaaacggctggtcccttgggcttctttaagggccggaaaccactgtggtgg

SEQ ID NO: 3341 - DNA, 567 bp, Aspergillus oryzae
ctttgtcaacgattccgacgcctgcgctttcaccatccttcgataatatcgacttagttttgtcaaatcttattttctgaatcacttcaaaaatggcacccaaggctgctgagaagaagcccagcactggcggcaaggcccctgctggcggcaaggcccctgctgagaagaaggaagctggcaagaagaccgcggctgctgcctctggtgacaagaagaagcgtggaaagaccaggaaggagacttactcttcttacatctacaaggtcctgaagcaggtccaccccgatactggaatctccactcgtgccatgtctattctgaactcctttgtcaatgacatcttcgagcgtgtcgcaaccgaggcctccaaactggccgcttataacaagaagtccactatctcgtcaagggagattcagacctcgtacgtcatcaatgtcgattctatgctatttggctaactttgttctagtgtcagacttatcctgccaggtgaattggcgaagcatgctgtgtcggaaggcaccaaggctgttacgaagtactcctcttctgccaaataag

SEQ ID NO: 3342 - DNA, 581 bp, Aspergillus oryzae
  modified_base (559)..(559): n is a, c, g, or t
gaccccgcgtccggtggcatgcgggagcagggccccaagaaggcccgcaccatccatcacgttcacaaggtcaacctggaggacatctaccgtggaaaggtttcgaagttggccctgcagaagtctgtcatttgccctggctgtgatggccgtggtggtaaggaaggtgccgtcaagtcgtgtggcggctgcaatggtaccggtatgaagactatgatgcgccagatgggacctatgatccagcggttccagactgtttgcccagactgcagtggtgagggtgagaccattcgggagcgcgatcgctgcaagcgctgcaacggtaagaagaccgttgttgagcgcaaggtcctccacgtccatgtcgacaagggtgtcaggaacggccacaagatcgagttccgtggggagggtgaccagatgcctggcgtcctacccggagatgtggtcttcgagattgaacagaagcctcacccccggttccagcgtaaggaagatgacctcttctatcacgctgaaatcgatcttcttcacaagctcttgctggcggtaccatcancatttgagcacctcgatgaccg

SEQ ID NO: 3343 - DNA, 544 bp, Aspergillus oryzae
tcaaggccatctgcctgcagttgaaaatatggtgatggaccaggcctggacctggatggctcttgtggctatcgcgggactcttctggataactaggatcttttatcgtttatatttccatccgctggcaaaaatacctggccctaaactagctgccgcttcacatctcctggagttctactacgatgtgatccttgggggcaaattcctattccaagtggagaaaatgcatcagaagtacggccctattgtgcgtatcaatccaaaggaggtccatatcatcgatcccaccttctataacgagatatatgcatcagggatgcgaaagcgtgataagtatgaggggtttgtgcgctctctcgctgccgacgagtctactgtctccaccgtgggctctgaaaagcaccgtttccgacgcagcatccttcagaactttttctccaagcgctctgttatggaattttcatcagcaattggtgagagggtagagaagctgatgcggcgcctggaggtattcgagaaaacccagaccccagtggctctt

SEQ ID NO: 3344 - DNA, 530 bp, Aspergillus oryzae
caggaacacatgaagtttctagcaaaagaatgctttgaactgcagcagtctgggctgataaatcacctaagaaaatttacctaccaaggacatgaacatgttacctattttgagaagttctataagcaacttaggaaactgagtctgactatcgacatgacttctcagcttcttgactctgctatctctctgcgccaagatttagccaatagtcttgcagcagaaagcataccgtcctccccaagcctgccgattccccttcttccacgaaagctgactatggagggcatcgcaaatcggatgttttctgacccatcggcacgcgataatttcctccagaagctccagcggacggcgcgaccagggctaatccagaccttagtaaattactcacaggaagttctcactgaagtccaccccgagcttctcgtgataaactactttgacacgctatcagatagcggtttcattgacgaacgtgacaaatatatcggatgtacaaaaccaagttgtcatctatgtcatctttt

SEQ ID NO: 3345 - DNA, 408 bp, Aspergillus oryzae
atctacggcatgcacgatgatgttgtcctctactgggcacaccatgaaaagctttgcgtcatcgatggcaggattgcattcatgggaggtctagatatgtgttttggccgctgggatacaaaccagcacgcactcgccgatgtccacccggaggacgtaaacgagagcgtgttcccaggccaagactacaacaatgccagggtgctcgatttccaggatgtggcccattgggagaagaatcagcttgaccgaaagacatcctcccgcatgggttggtcggatatctccgtgagcttgcacggccatgtcgtggaggatttacgacgacacttcatcgaacgttggaactttatctacgatacgaagtatgattcacgcaaagatgcgagatactccaggctcgcattg

SEQ ID NO: 3346 - DNA, 590 bp, Aspergillus oryzae
cgacccacgcgtccgccagctcctacacataacctaaaggaaggatacagccacccaacctccccacaatgtccttccccttccgaataatcgaacataccatcccaggccaacacatccgcgaatccccccgtagcatcagaggccgtcaagagacgcccattaaaatcgccataaaacaatacatccccaacgatgccgacaggccagaccccactcccgacaatgcaattaccataatcggggtacccggaaacgggtccccgaaagaaatctacgagcctttatgggaagacctctacaggcagctgaagaagctctctgtgccggtgcgtgggatttgggtggcggatacgtcgaaccagggtgctagtgctgtcttgaatgaagaggttcagggggatcagactaattggtatgatcattcgcgcgatctgttgcatatggttaatcattttcgggatgaaatgccgaggccgattattggggttgggcatagtatgggttgtgctcaattggtcaatctttcaatcatccacccacgtctactatcaaccctggtcctgatcgaaccagtcatcctggaagta

SEQ ID NO: 3347 - DNA, 486 bp, Aspergillus oryzae
gtattcttccgttttctcataaaccatttcctactacatccattctcgtccaactatagttttcacaattaatcgagggagcaatggctgacgattcgaacgccatattacgtcgccgctcgtctctccgtcagcagcgtcgtctgtctctacaactatctacgctggtctatcgacattacgcgaggacgatacattgacaattgcaatcgccattcgcgataccacctatctcctagacttcattcaggaatcgctcaccttaaaagatgaccagtcgttatgctccgtgctggagaaattcgtgatagaccaattgcaagaatggagtgacgcccatatggagaagttcatcggcttggcgatgccagagcgcatcgcgaaacaataccccagcctgtgctcgaggctctgggctgagctggatatcatacctctagtcctccccgaaggaagtagaagggagggtgatgacaagttcacttt

SEQ ID NO: 3348 - DNA, 611 bp, Aspergillus oryzae
accacttatatcccctgcttcccatcgtacaccgcccgtcctttcgtcgggctctccgagaagaccgggattgtgaggactcgggcttccttggcctgttccttgcggtcgcggcagtagttgtggccaccttacccagtcgatttgaacattatcgttccgtgagccctcccctgcagtttcagtcacgacgggagatgatcagatactgcgccgatcgtattatgaggttgcggaccgccacctacttcgatgagatcaactttcagaaatttgccatttcatatctgctctatgcagcattcctgcagcttggggatcataatcgagcgcggatgctagatgtagaaacaatgcagattgcccgcctcttaaaccttcactgcatctcccaatataacggccttaattgcatcgagacccagctgagaaagaaggggttctggctgatattctatagcttcgttcatgctcgacttcagaacatgtttggagaacgactattatacttggaccctgctttgctacaaaccatcaatcccgaggacatgatgccgctggaagtggatgacgaatttattatggagaatgaggacctggccccaaggatt

SEQ ID NO: 3349 - DNA, 547 bp, Aspergillus oryzae
ctctcctctccctatctttgtgctgctctcttctcccccctccccccctcttaattccactgtttcttcggctcattagagaagtgtttcttttcttttgatccgtcatcatgagctccctgagcttgcggagcctagctcccgcatccaagatttcccgtgccttgagggatcagagacgtcttttttcctcaacccggcccgcagcccggatttttggcagcaacccattgcgcgctagggaagccactggcgctatcgccgagaagtacccgatcattgaccacgagtacgatgctgtcgtcgtcggtgctggaggtgctggtcttcgtgccgccttcggtctggcggaagccggttttaacactgcctgtgtctcgaagctcttccctacaagaagtcacactgttgctgcccagggtggtatcaacgctgctcttggaaacatgcacgaggatgactggagatggcacatgtacgataccgtgaagggttctgactggctcggagaccaggatgccattcactacatgaccagagaagcccc

SEQ ID NO: 3350 - DNA, 483 bp, Aspergillus oryzae
cggacgcgtgggcggacgcgtggggcagtgtcgcgcgtaacgattcacttttgcttacccctcctctatctcttataaaaatagaaaacatatattctctctccccttttcctccagcctcatcgactttcccaatttcctcttctaaatccgtctccgcaattaacttactttgactttcccatctccacatccataccgagctataaccaacaaaacccatcatgactgcccaagcttatctcgaacgatataaacagttgacttcaatagaagacataaaaaacaatctgattgaggaactgctgcaacgtgtgacggagcttgaggatgcatatcaacaagagcggttggaccatgaacgcgagacgcgctttaatcgggacattcagctccatgaaatggagttaatggatcagatatcaagaattaagactattatggatcgggaacccttcatagttgtgctactcgatggtggtg

SEQ ID NO: 3351 - DNA, 484 bp, Aspergillus oryzae
cgtgtatctgttcctggcgcacatatgtctcatgaacatgtgcccgcccactcggagccggaagagtcctgggacgacgaggatgacgaaaatgaagaagaggatgagtatatcactgctcgctcctatcgatcccgtggcgaaaacacaactggcgcgactactacaatactctttccgaaatatacgcagcaagtgagacgggagttggcactggccaagcaaatcgtcgaggcaacacggacagtggaggatattgaggacgaatattgggatacgagcatggtcgcggaatatagtgaagatatattcgattacatgcgggaacaggagatcaaaatgctgccaaacgcgcactatatggacaaccaagcggaaatccaatggtctatgcggtctgtcctgatggactggcttgtccaggtccaccatcggttctctctgcttcctgagacccttttcttgtgtgtcaactatatcgacc

SEQ ID NO: 3352 - DNA, 389 bp, Aspergillus oryzae
attagaaatcgatctgtccatgcttatggtatgcggatacgacccgacgattacggcggttatggcatatggtatatacgaatgattctggtttagcatacaatttggttgcgtttacatgcctgatccacagtagtggatcttcttttcacaacccttgataccccctatgcagtgtcagcacatcgtcattgactgtttttccctttccttctcgacgcatacattatgagtgtatgtcggttaagtacatttccttcaccctgtgctcgccacttatgaacgtatgattgcaatgccttgaaagagcgtttatgacttgctggatacacgacacgtcattcttccatacaagcaggattaaaagcatacactaaagacttgtatta

SEQ ID NO: 3353 - DNA, 546 bp, Aspergillus oryzae
gttgagaccaaggagccagtgggggaacttccgcactttatggagacggtgcgcttcttctcgaacaagtctactcagccgaaggatcgcggcacgctagtccatggcgattacaagatcgacaatatgattttccataagactgaaccccgcgtcatcggtatcctggactgggagatggctacggtggggcatccactatccgacttctgcaacctcacgagtccgtactatctggatggcaccgaccacacgaccgaccagttccaacctggccggatacctggattgcccaggcgtgaggactgcgtgcggtggtatcgcgaagtggggggatgggacccaaccccggacctcccctggggagacgccttctttgcctggaggctctcgattatccttcaaggagtcaaggctcggtatgcattgaggcaagccagcagtgcccaagcgcacgagcatgcgaagaagaccaccccgttcgcgttggccgcctgggaacgggtcaaggccgtccagaacacaatgcgtcaaaaaggcaaactg

SEQ ID NO: 3354 - DNA, 499 bp, Aspergillus oryzae
tctaccctcctcccttcatctcctatacctcatagtcctccaagatgtctccagccccagttggtgaaaaatggtggaaaaactccatcatctaccagatctacccagccagttttaaagactccaacaatgacggcatcggcgatatccccggtattatctcctcccttgactatatcaccagcctgggggtagacgtaatttggatctccccaatgtatgacagtccccagtacgacatggggtatgatgtctccgattatgagagcgtctacccaccatacggcacagtccaggacatggaagttctcatcgacgagtgccaccgtcgtgggctgcgcattattctggacctagtcgtcaatcacacctcgcacgagcacaagtggttcaaggaatcgcgatcatcaaaagcaagccccaagcgggattggtatatctggaagcctgcaaaatacgacgccaatggaaaccggaagccacccaacaactggcgcag

SEQ ID NO: 3355 - DNA, 389 bp, Aspergillus oryzae
cattctttctctgtgggctaaaaagtcatgtccatgcttccgtccctttctccgagcttattgccaatctccgtgctactcgcatatgctggctttctcggtcactgcaggcgcagtagaatgtgatagtgtcgccactgctcctcaaatctaattttcattcagaatggttggcgttcctcgcagcaaaggctgttcgctctgtcgcaagagacgtatcaggtgtgatcaaagccgaccgcattgctcgcagtgtcgcaagtatggcgccgtatgtcccggctacaagcgctctctgaagttccaggatgagggaccccgtctgcatggactgtatctcattacctccccagacacggatgggagcgacgagggatcgagtccaattt

SEQ ID NO: 3356 - DNA, 556 bp, Aspergillus oryzae
gttagaaagcaaaacctagacatgctgtatgtcgtcggaccggggcacggcgcaccaggtctacttgcttcgctatggctggagggctcattggggaggttctacccacagtattctcgagacatggaaggtctgaagaatctcatctcgacttttagtacctctggcggtttgccaagccatattaacgccgagacgccaggagccatccatgaaggtggcgagttgggttatgcgttagctgtatcctttggtgcagtcatggataatcctgatctcattgtcacatgcgtggtcggtgatggagaagcagaaaccggtccaacagcgacttcctggcatgcaatcaagtacattgaccccgcggaatcaggggcagtcttgccaattctgcatgtcaatggattcaaaatcagcgagcgcaccatctttggctgcatggacaacaaggagttaatctcccttttcacaggatatggttaccaagtgcgcattgttgagaatctagacgatattgatactgatctccattgctccatgaattgggccggttggg

SEQ ID NO: 3357 - DNA, 535 bp, Aspergillus oryzae
tacagaacattatacgtcggttacccaaacaaaggcgaacgggattgtttagtgcaagtataagcgaagccgttgatcagattgtgcgggttggtctgcgcaatcctgtcaaggtcatggtcaaggtcaaagggacttcaggtgcccaggacaagcgaacacctgcaagcttacaaatgacctaccttacgacacccacgattcacaaatttgacgccttgaagcatattctccattccgttgatccaactcctcagaaaaccatattcttcgcctcaacctgctcaggagttgattatctctctgcgatcttaccattgatacttggtgatgatttccagttaatttcactacatggaaagcacccggcgaacgtccgtgaaaagaacttcaaccgattcgtgaattcatacagcccagcaattctactaacaacggatgtcgcttctcgcggcttggatatcccatcagttgacctcgtcgttcaaatagatcctccatcggatcctaaaacgttcattcatagatgtggccg

SEQ ID NO: 3358 - DNA, 417 bp, Aspergillus oryzae
tgcacgtgctttctacaagggtatcacacctcgtgtgatgagagtggctcctggtcaggccgtcaccttcaccgtgtacgaattcctcagaggcaagctggagaggtccaactgggccttcgtgggaggcaaattcgaggagtaaatttggcacccctggagggagtggccgcggcgtgttctcgaaagcatttgataccatgagcatggtggcgttttcgattgcaatgcgatctctgcatcatcagtacatatcattgtcgttatcttctgggctttttgacggccgttcagatctgatcctatagcgtggactgtacatagttcttttttcttcttctgttagtttcgttgttataccttttcctatgttcaataattgaagatattagacaaattcaggaccaggttgccttg

SEQ ID NO: 3359 - DNA, 573 bp, Aspergillus oryzae
gacccacgcgtccggtccgctactgtgcgtcagcaggctgcagacctgatttctcgcattgcaatggttatgaagcagtgtggggaggatgcactaatgggtaagcttggtattgtactctacgagtacctgggtgaagaatacccagaggtccttggttccattctgggtgctctacgttccattgtgaccgttgtcggtattaatcagatgcaaccacccattcgagacttgcttcctcgtcttacacccatcctgcgtaaccgtcatgaaaaggtccaggaaaacaccatcgatcttgtcggtcgtattgcggaccgtggtcccgagtctgtcaatgctcgcgaatggatgcgtatttgtttcgagttgcttgacatgttgaaggcacacaagaagggtatccgtcgtgcggcaaacaacacttttggtttcatcgccaaggcaattggtcctcaggatgttctcgcaacactgcttaacaacctacgtgtgcaggagcgtcagtcacgtgtttgtactgctgtcgccatcggtatcgtggctgaaacgtgtgctccgttcactgtgctt

SEQ ID NO: 3360 - DNA, 535 bp, Aspergillus oryzae
aacattttcgtcagcctccatccagccccgacagttagcctcaatccgataaataagtccagctctttcaaaaaaagcaataatggctactttccaggatcgtgctcagcacgctattgctcagcttgacaaggaggtgagtccttgtttgtgcgtgttgatattcgtatgaaagaaatgcgttggcattgattgcttgtgtcgggggcgataacgatgattctctgttgcttttttgacttcggacttcttcaaacacatttatttggtggaactggcggcaattgaccgttgcttgtctttttgttttcctgttttattttccctttgtattcggatcgaggaaggctaatcaaaacatttcttgtgtgtttcgtcccacagctttccaagtaccctgtcctcaacaaccttgagcgtcaaacctccgtccccaaggtctacgtgatccttggtctggtcggtgtttacaccttcctggttttcttcaacattgccggtgaattccttgttaacctggccggcttcatcatcc

SEQ ID NO: 3361 - DNA, 539 bp, Aspergillus oryzae
cggacgcgtgggaccgagtaccgtgtctggaaccctttccgttccaagcttgctgccggtgtcttgggtggtctcgatgatatctacatgaagcctggctctaaggttctgtaccttggttctgccagcggtacctccgtcagtcacgttgctgatattgttggacctactggtaacgtctacgccgtcgagttctctcaccgttctggtcgtgacctgatcggcatggccacccaccgtaccaacgtcgtccccattgttgatgacgcacgtcaccccctccgttaccgtatgctggtacctatggttgacgttatcttcgccgatgttgcccagcccgaccaggctcgtattgttggcctgaacgctcacatgttcctcaaggagggtggtggtgtcatcgtctccgtcaaggccaactgtatcgacagtaccgccaagcctgaggttgttttcacccgcgaagtccagaagatgagagaggagaggatcaagcccaaggagcagttgactctggagcctttcgaacgtgatcactg

SEQ ID NO: 3362 - DNA, 542 bp, Aspergillus oryzae
gatgataaaccggccactgatcaggcattgcatttatatgcttgagggtctctatgaaacgataactgaagaggaatcatcaaagctttacctaactatgttcgagccggcattcattgagacgagtaaagtcttctacagggcagaaggacggcggctgctagagacgggagacgctgctacattctgtaaagctgcctccgaccgcatagcggaagaaggggcgcgctgcctctcaacactgtcaccactgtcggagccgaagattaaagacgtactagataaagagctgatcggctcaaacattgcagaggttattaacctggagggcaccggtgtcaagaatatgcttgacaatgaccgcatggatgttctgcggaatgtttatgtgctaagcgcaagggtagacagtaaaaagatccctttgactgctgccgtccaaaagcgcatagtggagatgggtgatgagattaataagtcggcagcagcagcagcacaagctcaacccactaaatcggcagaaaagaccgccgagggtggaa

SEQ ID NO: 3363 - DNA, 453 bp, Aspergillus oryzae
tcgacccacgcgtccgccctaactacgctgctaagtacgagaatgatcaccgaccggagatcaacaagggtcctgtgatcaagatcaacgccaatgctcgctacgcgacgaactcccctggcattgtcctacttcaggaggttgcacgcaaggcagcagaagacggtggagaaggcgttcctctccaactcttcgtcgttcgcaacgactccagctgcggaagcacaattggtcccatgttgtccgctgcgcttggtgcccgcacgctggacttgggtaacccacagctaagcatgcacagtatccgggagactggtggtacatatgatgttgggcattctattcggttgttcactagcttcttcaagcattactccaacacgtcaaagacaaactacaaagaccatgaaatgggcggccggctctagaggatccaagcttacgtacgcgtgc

SEQ ID NO: 3364 - DNA, 406 bp, Aspergillus oryzae
tggagtttggacaagagcatccttctacgttgacaagtatcaataacttagcatccacactatggagtatcggagagtggagtgaggcagtcacccaatttaaactagctgtgcagttgcgcacagctctgctgggacctgagcatccctctaccctaacaagcatgagcaatttggcggcgacatatcagagtttgggacggtggccgatagcgaacgaaatctaccttaagttgtccgaccttgatgtgagagtcctcggcccacatcatccctccattctgatccgtatgtccaactgggcggtgctcctctgggagacgagaaggttcagagaggcggaagagcttgagaccagggtcttggaagcccgccggactactttaggccgagagcatcctgatac

SEQ ID NO: 3365 - DNA, 585 bp, Aspergillus oryzae
cttgtttcttattcttccctatcacttccttccctcgttacatacctctttggatacttttttttttttatttcccgcaattccattccacggctcagtgtttcagccgtcagtcactcgttgtagtatatatactcttctagactttctcaatccactccgcgattgttatttcattaattcgacctgatatcactgggtctgcagatcaagttgatcaatccctcgttgtcttccgctgcagatcattaactgtcgtcgctgcggctggtatacgtttgaacgactgtcaatagattctcatcatgaaggccgcatttgctcttgccggggcttcgctcgtgggcagcgtcctggcgaccttgcctgccatcgagtcgaaggggaacaaactcttctattccaacaatggcactgaattcttcatccgtggtgttgcctatcagcaggaatattcttccaatggcaccagcagctccagcacaggctacggtaacgaatccaacggcgactacaccgaccctctgtccgaccccaagaagtgcgagcgtgatatcccttacctgaaggaactgcggaccaacg

SEQ ID NO: 3366 - DNA, 588 bp, Aspergillus oryzae
tgattgtttgtctcctgcggggtagaatcaattccacccccgaccatgacactcaaagaaatggcaacacaagaacagggctcccagggaacccaacagtctcacagcatgacgaagagagccgtcgtctcttccttcatctttcactttcctccgggacagcctaccaagccgtccgtagcgttgttcaaacggagcgagaaagtgagaacgtaccggtacgacgcgactttcagaccaaatcattcttggtaccactatagtaacagaactctacctatagtcatcaccttgcccctatctccggtagcatcgatcccgatgattccgaccctctcgcagcggcgtggcgtgaattgtgcgaagaaacctccctcaccgcatcggatctcagcttctggcgcactggcaagccattcaccttcagcgacccgtccatcggtcgagaatggaccgttcacccgttcgctttccgtctcaaagatcccgcagaaggggggacaggggggaggaggctatccgcactgactgggaacatgaagagtggcaatggtacgatcctcgcacggtgctcgaagacgaaagcct

SEQ ID NO: 3367 - DNA, 488 bp, Aspergillus oryzae
gacccacgcgtccgcggacgcgtgggtgctgcccccgcttctccggccgctgagactcccaaggacaagcgccgcacctctttcttcggtaacttcggtaagaagaagggtgactccgacaacgaagctgagggcgagtctaagcccaagggcaacaagcttggtggtcttttccgcaagcccagcaaggccgtgaagtctgagcccaaggagcccgccgccgagactgaggctaaggccgagggtgctcccaaggaggccactgttcccgagtccgctgaagagtccaagcccgccgagcctgctgccaccactgaggaggctaagcccgtcaacgtctcttccacctctgctcccgtccaggccgccgcatgaagtggttcttcaagccgcgtcattgagtatgaaaactggtgggatcaatatggagtacacgcttagtgttcctccctcccagtgatgagtgcccatgggcgcataattttctt

SEQ ID NO: 3368 - DNA, 528 bp, Aspergillus oryzae
cgggattcacactaggccgtgttgctctggcagacatcactcactattttggagaacgtcggatggtgttcgtctacctcactttagcagttaccatgcagctcctgttttggctggtcccaaatatcgttgtaattgctatcgcggttttcctattaggattcgtcatcggaccattctatcctattgggctctatgttcttacacaggtggtgccggaggaccttcgaattggggctttaggactcaccgctagtttgggacaggctggcgccgctgctttcccttttatgacgggagctatagcttcccgggctggggtcgaggttatgcagccgatcatgctgggtttgcttattgggattggcttgttctgggctttgcttcctagacaacgggcaatcagcctttagagactggggcgagctatgatgccctagagaacaggtattactacaacatacggtcggattagacgaggagcgaaattatttaataaagataacccgaattaatcggttgtataac

SEQ ID NO: 3369 - DNA, 538 bp, Aspergillus oryzae
gccgtcaccacaaccttgatttattcgtatgcacccaataaaaaaagacgaaagagaagaaaggagaagtgaagagaaaacaagcccacacccaaacagcgagggctcttctctttccaccccggaaaaaccagtcttccgcaccacccaatcccccgacaggaaagcattcagtgaacgcggccgacacacgcccggcaaactagacgaacgataggctccaccggaatctcctgcgcttattatctatatgcgaatcctgctatctttcagtgggccagaccatctgattctgactgcctccctaccttcatttatttaaaccagatgcagttgaagaagtttacatggctgggtcccgtaggagtccggtgctgagtgaccagtggagagcgtccagcaacactacagaccaacgagatcgggaaaggcacagatctcgaggatcgcaccgcgatagggggagggagagatatcgtgaacgacaacgtcgtcgccgacccaaaggggggcagacccgatcatccaggacggtcgc

SEQ ID NO: 3370 - DNA, 568 bp, Aspergillus oryzae
cggacgcgtgggtctggacgcgtttaattcggcatgcattcttcactgacattcttgacattggccctatgtctattcgcctgggctaacgggtcgaaccaccatgtgcgcaccaccggaaacacggtgcgattcaatctcacacttacctgggaagaatgggccccagcgggcatccctcgaaagatgatccttggaaacggtcaactccccagtccgctgctcgagttgcgacaaggagacgatgtcgagttcttggtgatcaacaatctgcccactaatacatccgttcacttccacgggatcgaacaacatggcactccctggtctgacggcacgcctggcttttcgcaggaacccattgcgccgggtgatcactttctctataaatggcgcgcgacacaatatgggagttatttttaccacgcccataaccgagggcagattgatgatggcctctacggagcgatttacatacatccggatgagtccgtcgagaaaccatttggcttgattacgaacaagagcagcgagcgccaggccatgcgagcggccgaggagaagacgc

SEQ ID NO: 3371 - DNA, 596 bp, Aspergillus oryzae
cgacccacgcgtccgggacattgccaaatatacctccagcctgctggtcaggaatgcgagcgcccccgttcagcctgtagagacgcctacagacggtcctgcggcgaagaaacgaaagctacagaatggagatactgcaggacaggcacaatcgccaggcgatttgaaagccgatgcgcccttacaattctatatgcaggatatttccttcgctcttccgcaacggaaaaagcttacactcgagattacggccgggcgcggttttcttcgcgcaaggaatcagacgtcgaaggcagtggagtttggcatccacgtggacaaaatacaacatgtcctttgccttcctgtcccggaaaagaatcagaaacagttcaacttctgcattatccctcaatatggcgatggcataaattcaccaccggagggcgaaactgcccccgaggcgatggtgtggacggtcaatgacggtcctcccagggctgcattctcgggcaatggacaacagatgggaagcaacgacgggcaaacagctgagaatgttgtaaggcaaatgctgaatgagaacctatcgcagacaaaggtggtgcgtccagatg

SEQ ID NO: 3372 - DNA, 568 bp, Aspergillus oryzae
cggacgcgtgggcggaattgtgacttgttctcaaggactgaatcctatttctttgaactttactgcgtccaaccactcctacgaggctttaacataatgaaggtcttcgccccattactctccctcagtttagctacctccgtagcaggccatggctacatgtacatcccttctagccgaacccgtcttggtcacgaggccggtatcgactcatgccctgagtgtgcgatcctcgagcccgtttcctcctggccagacctcgatgcggcaccagttggccgcagtggaccctgcggttacaacgcccgtgacagtatcgactacaaccagccaaccaccaactggggctccgacgctgtgcaaagctacagccccggcgaagagatcgaagtacagtggtgtgttgaccacaacggtgaccatggtggcatgttcacgtaccggatctgtcaagaccagagcattgtcgacaagtttctcgacccgtcttacctgcccaccaacgacgagaagcaggctgctgaggattgtttcgacgcaggtctgctaccctgcacggatgtcagtg

SEQ ID NO: 3373 - DNA, 604 bp, Aspergillus oryzae
acaggctgcactaacaataacggagaaatgttccctttttctgatcgtcggacagaatgtgttcaatggtgcgcgacagctcgccctctcaatctctcatggttccataatctcgacaccgttgtcttgggcctgggatgtcccagcctctgtttccactgataatgaaccaaaactactagccgctgtcgcagctactattttagctttcgcgatcgccgatctcgctggtccgtcttcaacactttgggtacatgaagcacaggcaatggggccgacattcatggatgcgctggtgtctgctgtgtctgatagacaggacatcaagaatcttaccttgactacatcacaatgtgggctgtctgatacccgtgtgcacttcgttcatccgcacagctccacaaaaaccctgtccagcgtgctaccccggaatgtctcgtctgcggtcctgttcgatgatggacgactttctcggcgatcaagactagtgctacctcgctgtgctaacttccggagcttttcagacttctttcgaccctcctccattatagaagagatagacatacagtccgttgctactatattgaatagtgcctgtgctttt

SEQ ID NO: 3374 - DNA, 582 bp, Aspergillus oryzae
cggacgcgtgggtcacaattctgtctccacattttcactgtgtctgcttgcacaagcatatgagcaagcctacaaccttcttcaagtctttgccgagcttgaaatgactgtcaataatctgatccaaatcgataagctggtccagctgttggagtctcctgtcttcacctatctccgacttcaactgcttgaaccagaaagttatccatatctctacaaatgcctctacggtgtcctcatgcttcttccacagagctctgccttcgcggctctaaagaatcgtttaaacagtgttagcaacattggccttctccatacacctcgactttccacgatggtttcagcctccggctcaggcgcctacgatcgctcgacaggcagccgctccaaacgcgaagagaactccatccgctgggtcgaactacttgaaaaattcaaaaccgtacaggaaagggcccgccgagccctacgtgcaagagagcgtcccttcgacgatggcgtggccggcttccagggtcaatcgttagctgccgccctctctgctgcagaccaagcgcggaacaaggaacgggcaactctccc

SEQ ID NO: 3375 - DNA, 377 bp, Aspergillus oryzae
ctgaagaagacggacgacgttctctccggtgcggcagtcaagggaatcgagaagggcgagcaagtagccgaagcaatcagaggcaccgccaacaagaacaccggagaattaaagggagatgcagcggagctcgctggtcagggcaagagcaaggctgaagaaacattgggatctgcaaagggcaagaccgaggagaccctgggctcagcaaagggcaaggccaaagaaactctaggcgaggccaagggcaaggcgaaggaaacagtcggcaacttctaaaagtctcaaaaagaagcgacttgaagacccggaatgactagaatgattgctgcacgcatgtatttaccattttcgcataatactttcctataatgtac

SEQ ID NO: 3376 - DNA, 468 bp, Aspergillus oryzae
acccacgcgtccgcggagtctcagccccgtcggaaggtggattcaggcattagctttggctcggcagataagttccacgccccgtctgttcacagcagaagtggctccgaagacatgctggacaaacccttgccacccgccccgaaggaagctcatcagaagacgggtggctccgcattagagcggctaacacgagagctgcggaaactcagcgacgctggaaaggtcaagagcctcaagaaaatgaagtcctcgagtgccctcgctatgcgaccggagaatattcccagccacactcctgataactcatctttctttgagattgatgaccagaaacgaaaacgtctgatttgggaggctacgagccgcaaaaggtctcatagcaaacagcccagcaacgactcacattgactgtgattcaatttgattcgattgattgtacacttatgacatcattttttaaacttc

SEQ ID NO: 3377 - DNA, 494 bp, Aspergillus oryzae
atcgcagcttccaagtctggccaacccattagtcctgaaaatgtctcctgcggctcaccagatcgatgactgctacactatcgccgatttcgagattggcaagcggctgtttacaactcatatggccgtgcagttagtcgtggcctcacctgaaggtagagaaattggctccctgtcccagttagacgccctgatcactgggtatgactttgaagaagctattgccaccttggtaaaagctggcttggatgttccccgaacgaatttggtttgtgatgagacctatgaggacgtcctctataaaatcataggacgtaccagactaggtgactcgaaagaatcctttcccacattgttggggcaactcccgttgttggatctatcaactgatggggtagacctcacggtcactgccaccactcaacgggtagcgaatgggcttaaccttagtcccccaggttcagaggccgacaattggaagtatacatgtcgtt

SEQ ID NO: 3378 - DNA, 490 bp, Aspergillus oryzae
ctgtttctcatatcgtcccgttgtttccttctcgtcacagtggccttaatcgtctgagaaagactttttaccccttaaatcttcgatcaatctccgcgctcataatgcttcaggacatcgggggccctgtacctcctaatactgaccatgcagtcagtgtatcgcttccaacatggaaagcaaatgtcggttatgaagaaggagagccgtgggttatgagtaagatgcaatgcggttatcctcgattcttcgtgcacccgacgattcaagaacttgcgaaagagatcgtgcaatgctacggaaatcccaacacagagtctgccatgttgtttccttccgccaaaactgcgcatatttgtcgttcatttatcttgtcaaaatcatctgcagacgactcgcatagcgtgcgggttgtagattttgtcccttctccacgtacaaaagccgagtcagcaaacatcacttcgtttttgtcaagtgtgatatatcc

SEQ ID NO: 3379 - DNA, 559 bp, Aspergillus oryzae
tcgacccacgcgtccgcgaatgttcggctctgacacagcgtaatctgaagagcgtcttcgacgaagctatccgtgctgttctcaatccacgacccgccgcgaagccgaagaagagcaaatgtctgattctgtagatcgattcttataattttctcccgactataatataaagaactaatacggcgtctgggttgctggggaatctattccctatgatgacaatatctttcaattctcttgttccttattctctggctgcatttttccatccttggctcgatgctacgattttgatgttgttttgggagcccagatgctctgacccctcatctctttacctctcctttaatacagtataaagatgtaacacgccatacaatatcatgcaatgaatgtcgcttgatggggtcgtgacttgctttttctctcctgttgtttcggtacttgtctcgagtggttgggtctcatagagggatgtagcgacaaccgcaatgcatgctgcgggtgtgattgcgatggatgcatctcagcgaacgctagtcatttggaaatggacgat

SEQ ID NO: 3380 - DNA, 509 bp, Aspergillus oryzae
atcaagtggttcctccctcgttcgcttgggcatgcacaccatattttagtgcgatccacgcacatggcacaaccatagtcgcatcctgaggtcctggatgatacgatccctgtagcccgccccagaaactgggatgtatcacattcatctctccgatgtttatgcttgtcatccccaaggacgcactgcccccctccctcggacactcactcggttactatagcaagcacatgatggcttccattccagacccccagcctaagaaacgagagtcccgtgctgggacgcgaaaggtgacgtctctctcagctgaacaactcgaaataaagcgcgccaacgatcgggaggcccaaaggactattcgtcagcggacaaaggagcacatcgaacgtctggagcaccaagtagcggagttaaaatcgaaaggggaacaatatgatcatgtcgtccgaagaaacactgctttagaaaacgagatcagggctttaaaacaacagctatctctggca

SEQ ID NO: 3381 - DNA, 529 bp, Aspergillus oryzae
  modified_base (353)..(353): n is a, c, g, or t
  modified_base (399)..(399): n is a, c, g, or t
tcgacccacgcgtccgcctctcaagccctggccgacggtcgcatttgctatattgcatggtatcggccaatatatacctggttttgtcatattccctaaccgctcccttctcataattctccaccatgtttaagaaaaagcctacgatcaaaaacctatcacctttacggtcttctgaccgtcgaaaaatcgccgaccaaatcatcagcgactataagatcgagatcccttccagcgcgcctgccggcgaagattcgacgccgtcgaaccccgcgccgaacctttcatctattcgaaatgccctccttcctgataactccttgtcagcacgctttacaacgactgcaggtccncagcttcgagaggtacagggcaccgtatacgtggggacacatccangaggggaggaacgcatcttatggttcaagctcgaacatgggcccggcgccgacggccgtctctaccctccggtctataccctatggaataatcctgatttagtaccgttgctatacacaccggagatggt

SEQ ID NO: 3382 - DNA, 329 bp, Aspergillus oryzae
gctcttttttcgcaatgcgttccttgtcgtctatcgcactcctgtctgtggtgggagctgcgtctgcccaggctggtccttgggctcagtgtggaggcaagtccttctccggctcatccgagtgtgcctcgggatggaaatgtcaggagctgaacgagtggtttagccaatgcgtacctggcgccgagtccacgactcccaccgtgtcgagcactcccacgcccactgacgctccttcggtgtccattactgcatctgtcaccacgggcatcaacaagtcgatctcagtttcatcagcgtcgaagtccactcccctgccgtcttcgtcg

SEQ ID NO: 3383 - DNA, 582 bp, Aspergillus oryzae
gcgcagtcgttaacccgaagagtaaaacgttgatctatgctgtgtgatcgggttgtctcggtatatctttcttgaatccttctccaggaacatccattggataatatcacgctctctgagctcttcaccccatcaaagaaagcatcttatcccagaaatgtctggcaaatacgcctcagacccgacatgggcctctgttgagccgatcccactcaatgatggctcggaaacagggacccttccactggcgactatcgcctactcagatgaatacctcgaggctacctcgtacttaagagcagtgatggctgccaatgaaatgtccgacagggcactgaaactcactgacgatgtaatcgctatgaacccggcgcattatactgtttggcattaccgtgttaagaatctttttgctctcaaaaaggacctcactgaagagtttgaatggctgaacaaaatgtcattgaagtacctcaagaactaccaaatatggcaccatcgacaggtcctcatgtcatccagggaaaactttccgacactcccgcccaatgagctggatttcctcatgaagatgtttaagca

SEQ ID NO: 3384 - DNA, 557 bp, Aspergillus oryzae
cttcgtgaccatcttcttcatctggggctgggacggcacccatggcaaccgcgaagctatcggccaatccttcagctacttcacctggctgacatactggggtctgggcttctaccacattttcgcatgcatccacaccaccctctatgcgctgaccggtcgctcggtgctcttcgatcgctggccccgtggcctgcgcgccctccacagtctctactatacgactatcacgacgttcccatttctcgtgacgatcgttttctgggcgattctgcacccttcttggttcgacgtgacttttaatgcctggtcgaatctctcccaacacggccttaactctctctacgcccttctagaaatcatcctcccggctaccaacccgcacccgttgatgaccttcccgttcctcgtgcttctgctcctcctttacgtctctctcgcctatttgacgtttcatactcagggattctacacgtattccttcttggatcctggtgtgaacggggagaagagtggcaaggtcgctgcttattgttttatcattcttgcggcaatcg

SEQ ID NO: 3385 - DNA, 424 bp, Aspergillus oryzae
ttttttttttttttttttttttgaagacatacttgcctttcaaatgcctgtctcataatacttataactatcgactaaacccaacgagcagaataatcgtaatactcactccaaaacagccctccacccccgtctaggcacaaaaccctccacaccctcatcctccaagacatctctccccaacctcccagtaacaacactgctctcaacctcaggcccccgaacataaaacggctcaaaccccaacaattgccccgttccaggatcccattttctcacccacctctttctaccaggtccagacccagcctcagccacgaatcccgaattcacccggtcaagagtaacaaaccatctccgctgatgaaccgacccaatggagttaaccgccccaggataggcattattagcccgaatctgttcg

SEQ ID NO: 3386 - DNA, 547 bp, Aspergillus oryzae
gattgaatggaccctaggcgaaaggactgcagtttgaaatgccgaaacgcttgttcattaacctaaatgaaattctccggcacgccatgctttccctgttcaaatctgcggacttctccttctggaagtgatcagaggtgggcgtgtcaactgccaggcacttcgccggttgaaggcttagaggggcccggctctttctcttgaagccgagtctgttgtggacattccatccagagacgatcatcgacacgttgcagattatcatcagcgttgctgatacacagggtctccgacctatactacttacgagtaatcggagggaccggcagttgtagcgatgtccacatctactccgtatttgcgccaaggacaaccttcttcctaagtcagtctgtcggtcatctgttacactagctttctcttcccttctattatcctctccttcttgtggcctaggagggtggtcatcgcctccaccctagaggaaccatctttgcgtcgggccttgaactgtttaacattaattaagactgttccggaccacttg

SEQ ID NO: 3387 - DNA, 468 bp, Aspergillus oryzae
cggacgcgtgggtgcgatcgcaattgctattgtcctgaccctgtagtacttacttcctattaatccccccaacttgtaaccctaagtcatacagacacaagggaagaaaatggaacgactccgacagcacatccatcgtcgtcgtcgcagcagtacccctagcagagcacctcctcaaggatcccaatctcccagcctcagcagcgatagacgcaagaaaagcaattctgttttgcgccgactctatgtcacttcagacacggccgacttcgacgcggacattctccggcgattcgaagcggagggtttcagcgtcgaatatattccattccaagggtccagcggagatttcgagcgagaccggaaagacctggataatttgatccacgagcgagaggacgatctcgagccgggggagagatatgcgattgtggcatacaacaaaccagcctaccttctccttacatc

SEQ ID NO: 3388 - DNA, 199 bp, Aspergillus oryzae
ccacgcgtccgctcgaagggttgtgatatgacttgtggatctcgctcgggaggtccctagcttttgttgtttacggtgtcgatcctttttaggattccattgtattgcttgagatttgatgaacatttgtgtcacgttaaactagcacgaggttctggtgtcgggatattgctttatctagctttttatattgttctgc

SEQ ID NO: 3389 - DNA, 490 bp, Aspergillus oryzae
cccagagcttgacctacttgcaccatggagaacagccacttccctttaactgaggatcaaattcaatcctataatgagaagggctacttggtgatccagggcttcttcaacgctccggaaaccaagctacttcagcggtggactcaggaagtccatgacctgccccgcactccagacgcatcatacatgccatacgaggaggtaaatgcacaaggcaaacgagtcctctgtcgtacagagaactacgccaatagtcatgctggctttaacagctttcttcgcggccagcgcatgttgagcgtcctcgaacagctggctgcggagccaatgctactcttcaaagaaaagatcaactacaaactcgcaggaagtggtggcttttctcctcacatcgatgccaacgcctatacccatgtcaagaacatcaagcatttgactgtgcttgctgccgtggacgagatgacccccgaaaacggtggtttggatgttg

SEQ ID NO: 3390 - DNA, 402 bp, Aspergillus oryzae
ttcaatttgaataatttattgccgaacatccttctcttttctcttctttctcttctttttcttcttcttcttcttctttttctgtaatccactccgtatctattcattaattgtcttttcatgttctttcctagtttctctcggttgctccaaaagcggccacttcgtcattgatcctgattcagatcggcccaccgtctcggcatcatattattccaaattgctctgtgctaaacttcctcgtttggagatagccgcctctcgaattgtatcaaaaagacagaccagaacccgtccacaaaacaagtcaccattgtggttgagcatttggaccctgaattgggggcttggtcggccttggaatatggctgcatcgctcgcgaatcgcataaggctggcagc

SEQ ID NO: 3391 - DNA, 435 bp, Aspergillus oryzae
cggacgcgtgggattcgattcaaacggagttggttgcagattttggacgacggatcagatcaatctgctacaccagcatcggcttatcacggacacggcacaagttacagttgcaaagaacgggattcttaaactgtggcctgatcagacacccctcgaactcgaccggggagcctactactagtgcggatgtcagcaggcagatgtctgctttgttgttccttgggttatcaggtcacctagcttgcgaggaacaaatgcgggcaaggcagcatcttacgcattctggccagtttggggatctcggacccgagcccaactcctgttcagatccacaataccgttgaagattcgttttatatgccatgctattttctgtgtcttctttttcgagtatcttgtcctgttttgttacgtttctacttgctgttagaa

SEQ ID NO: 3392 - DNA, 523 bp, Aspergillus oryzae
cggacgcgtgggttaaaacagaatcatatttttaaaccatgagcacccagacggaggtttttacgggcacggaaggcagttatcttttgcctcaccatgtcaccgaggcggatcgtctccaacgtcagcatcgccattttgcagccgcctcggatgaggcctattttggcttcactctgccaccgtcaacagggcgtccactgcgaatcctcgatagtggatgtgcggatggggtctggttgcacgacatggcgaagcgatatccggaacattcctgggatctccacggcgtggatatcgcgtcccatctgttcaatgacggcgtagatattgactttcgctatcacgacatacgacagcctttcccgtcggactggaactgggaaggctctttcgatattatccatcagaggttgctagtatgggctctgaaaaaggaggagtggccccaagttgtacgaaatttgcaagcgttattaaaactcggtggcacaatccaactcgtcgaatgtcaatggctccg

SEQ ID NO: 3393 - DNA, 541 bp, Aspergillus oryzae
agatcgggctcgttggtgaagagtttgagagtaccttcgactttgagcattttggctccgatgtgtccgctttaaaatcgactcttgcaggaaaattcggtgaaaagcttgcctccgccaaacgccccatgatcatcgttggtagcgctgccgcagagcacgcggacgccaaagcgatttttgagacagtcggcagctttgtagagaagcattcgagtacattcaacacccctgagtggcaggggtacaatgttcttcagcgcgctgcatctcgtgctgcagcctacgaagttggcttcactacaccgtctccggaagttgctcagaccaaacccaagatggtttggctcctcggagcggatgaagtcggtcagactgagatcccgaatgatgcttttgtcatttaccagggacatcatggtgatcgtggtgctcaacttgccgatgttgtcctcccaggtgctgcctttacagagaagtccggcacatatatcaatactgagggacgtgtacaagttactcgtgcagccacctcgttgcc

SEQ ID NO: 3394 - DNA, 464 bp, Aspergillus oryzae
cgcaggaaaagacttcgctcccgagttccttcaacagatctacgactctattaaacagaacgagattatcttgccggatgagcatgataataaacatgcatttgactttgcatggcgggagctcttgttaaagtcaactaccgctggagaactggcaatcggtgagacaaacatctacgacgcggaaatgtttgaagcgacttggaaacccgttgttgctaccctttcgtacgtctttatgtctgcctctgacgatgctgtatattctcgtgtcgtcacgggcttcgatcaatgcgcccaaatagctgctcgatatggactgacggaggcatttgatcgcatcgtcttttgcctcgcctccatcagcacgttggcgacagacaagcctccaagcacctctcttaacacagaggtacaggccggcaagcaacgtgtcatggtcagcgagctggcccgtgaagttt

SEQ ID NO: 3395 - DNA, 424 bp, Aspergillus oryzae
  modified_base (252)..(252): n is a, c, g, or t
aagtaccacaattccaatagagaatctccaagatgaaagcctccattggagacaggatcaggtttaaagactcccgcgtagtcggtaaagagcaagtagccgagattatcgatgttctagggcctgatggagctcccccataccgagttcgcttttcggatggtcatgagacgctggtttttccggctcctgaatctgaagtaattcctaaagggagtgattagggttatatgacttattgtatgggtgatntgtggtcgtgttctcagattgggattgaaatatttgttctcttgagggtgaagctggatgttggcttgagaggatgtcttggggagttagggcatgggtatagctcgtgacaatgccttgattcattggtcctttggcaatgacttgtagtagaactgtctgggtactatat

SEQ ID NO: 3396 - DNA, 465 bp, Aspergillus oryzae
gccatcatgcctcctgccgcgaccgagaatgttccagctccggctccagctgcagctgcagctcctaagcctgaagcacagccatatctcagcacgatgccttcttcggacttcagctggcagattaccctcgcgaacaaagtaatcgcaattacgggcgccaaccgcggaatcggtttgggaatcgcggaggtctgtctcgcgaactcggccaagttcgtatactctttcgacctgatggagcctggagaggactttccggagctccagaagagatacagcaacttccgctatattcaaactgatgtgacgagcgaagaaagtattgagaatgctatcaacaaagtgattgaggaaacgggtcggatcgatggcttggtggccaacgctggaatgaccaagcatcagcctgcactcaagtttgaccgtgaacaattggataaactcttcaatctcaatgttttt

SEQ ID NO: 3397 - DNA, 419 bp, Aspergillus oryzae
tgcgcggatacacccttggacacttaatgtatatagaccgccatgaacagcatataatctcacattgacgcgctatttccctaaataatccttcagcgcgaccgccccgggttaattcggacgtcacgcagaatcttatactgaaagcatcccgactctgaactcaagtccaacgccatatgggacaacgatttctgcgatggcttttgcccccgccttgctactcgggtatcgctgtgttaaagccctcgtagttcgacaggcattcaaggatatcctattacacaagcatctccgtgtttgacttcggccataactgattagtgattctcgacatatacatttgcggggggtgccttaggctcctaggaagtgaaattacccggtcaagtgactcaattccgaatgcctgaaggcaa

SEQ ID NO: 3398 - DNA, 520 bp, Aspergillus oryzae
gaaaagccgtacagtttctctttccgactcggcaactgctaactgtattctcgggttaaaagatcttccgcgctctcccccgcgagggcctgcctcggacagaagacacgattactctagagaccgcccggattccggacctcgttaccgcagtcgggaccgtgatgagtatcgacgacgctcgtctcgatcgcccccgccccggcgcgggaggccggcatatagagatcgcgaccgggagggttatcgctcgcctggataccacagtcggagcagaagtcacagtcggagtcggagtcgaagcccgcgacgaggccgttactacggacaagaaagcagagaagtgatgatggatggcttgccggtggatatgaccgaagaagacattacgaatgaactcagagacggttatcatattgagggccttgaggaagttcgggttatccgtgatcggcagactaaaatatcccgacagctcggctttctccgattccgagacctcaattcttcgcgcgctttt

SEQ ID NO: 3399 - DNA, 396 bp, Aspergillus oryzae
ggaagtaggaggagtcgcttcgcaagcggttcaccgaacaagtcaaggtcgaggagcagcgtttccgacagtgggagcagaagctcattgccgagagagaccgtctcaacaaggatctggaggctacgcatgcggcgatcaaatcactggagcaggaaatcgaatctttgcagggctcatccacccggagccatggacgtcgctaaggcacttttggaccactgccaactgtggtctttcgaccaacagtgggaaaagcagacttatgcattcgtcaactttaattcatgttcatttgactaccccttgaaattttctttaactttcctattttcggctttgtgtactcgagggagacaatttgcatagggcatagacgccctgtcctgagtttcg

SEQ ID NO: 3400 - DNA, 576 bp, Aspergillus oryzae
gacccacgcgtccgttcctggcaattcctcagttctctaatctaacaccccctatttcctcttccaatattcaaggactgggcagcgtacttaccaccatactcacatctttctgtgcctccaaacatccaactttttttctagccatcttcactcctctggtggctgcaagatgaagcttacctttaaagacttgaaacagcagaagttcgtaattgatgcagagccctcagagacggttggacaagtgaaagaaaagatctccaaggagaagggctgggaggtcccccaactgaaactgatctactccggtaagatcttgcaagatgacaaggcgatcgaatcgtacaacatcgaagaaaagggcttcatagtatgcatggtctccaagcctaaggcctcctcgtctacagccacgccttcgcaagctccctcgacgccttcgagagctgccacctcgaccccagctgcgcctcctgccccggctccatctacaaacgcctccgaaacagcaccaccggcgactccttcccctgctgcggctacacagccatccgacgctgctttcaatgatcc

SEQ ID NO: 3401 - DNA, 366 bp, Aspergillus oryzae
  modified_base (88)..(88): n is a, c, g, or t
caccggcaaaggaggtctagaagatgcagtgagcatgggtaagaaggtagacgaatgcgatggactcaatgagcccagcactctcgtnatgagcaccggtgtcatcggtcaacgcctcccaatctcaaagatcctcaagaaagtcccagtagcccacgccaatctctcttccacgcacgacgcctggctcaccacagcccgcgcaatctgcacaacggataccttccccaagcttctctctcgcacattcactctcccctcctccccaggtcgcacctacagcctcgccggcatgaccaagggagccggcatgatccacccgaacatggccactctcctgggcgtactctgcaccgacgcaccaat

SEQ ID NO: 3402 - DNA, 370 bp, Aspergillus oryzae
  modified_base (117)..(117): n is a, c, g, or t
ccctgtgggtatgtttgtatatcctttccttctacaaaactttccagctgtacacgaaatataatgggaccagagtggctctgatggttccactctggatctctaagcgaacagagngcagagggatcaacactgatctttcgcaccggcgccgactattagggctaagctcccccgatagtcaccaagcatcaaatcacagcgccacagcccccgccgacccgctatcgcgacttcggctttcaccaaagcttggcctatcatatcgagcacacgtgtcgactaattgcataatggcaacagcagaagagaccatcagctcagctcacccactcatcaggggggcaacacgggactgcgaaaagacata

SEQ ID NO: 3403 - DNA, 592 bp, Aspergillus oryzae
ctctctctcccttcaacactctcttgtcctctgcttcttaaatactgtagtttccctgcagcactctctccttctatgcttagcctcgcccgcagaaccctgaaccgcgtccccagcttccaggatatcctacaaggcaggatgacccacccagacatttccgttgacgttctcgtcattggtgccggccctactggtttaggtgccgcgaagcgtctcaaccagattgatggcccctcctggttgatcgtggacagcaatgagactcctggtggtcttgcttccaccgatgtgacccccgaaggtttcctctacgacgtcggaggtcacgttatcttctcccactacaagtactttgacgactgcatcgacgaggctcttcctaaggaagatgactggtacagccaccagcgcatctcttacgtccgttgccagggccaatgggttccctacccattccagaacaacatctccatgcttcccaaggaggagcaggttaagtgcattgacggtatgatcgatgctgctcttgaggctcgagttgccaacaccaagcccaagaacttcgacgagtggatcgttcgcatgatgg

SEQ ID NO: 3404 - DNA, 309 bp, Aspergillus oryzae
gccatcaacagcccgatgattcagaccgtccgtggcaagggtctgctcaatgccattgtcattgacgagtcgaagaccaatggacactctgcatgggacctctgtatgttgatgaaggagaagggtctgttggccaagccaacccacgagaatatcattcgtctcgctccaccgctcgtgatcaccgatgatgagatcaagaagtccctagagatcatcgcggaggccgtatcggagcttcccaccctgaagggtgccgccgaggacaaagtgatccctcccccagagaagaaggtcaagatcggcgtt

SEQ ID NO: 3405 - DNA, 360 bp, Aspergillus oryzae
cggacgcgtgggcggacgcgtgggcggacgcgtgggcggacgcgtgggaaaaacatcaattatctacagtcctacaacatacattatgagcagcacgcagccaccttactattcctccaccttcggtgatcccactcaacaccccagctcttctcagccgattggcactcaggttggaggcgttgaccctagtgatcctcgtactggacctgctccacacacagctggcccacacaagttcgacatagccaacaagctcgatcctcgtgtggatagtgatctgagcaaggagaagaagtcaagcaacgctggcgttggtggtgctggtggtgctagcgatacccatacaggatcttctca

SEQ ID NO: 3406 - DNA, 544 bp, Aspergillus oryzae
atcggaatatgtttgacgccagcgttacaacagatcgaccgcgcggagcgtcgttgatggttctaccgttgaatttgatcgcgtccattatctcccacttagaagatcctggcgaccttgctcgtctatgccgaacatgtcgagtcctcaactacatgacgctcccgcagctctacaagagcattaccctgacatcctacgataggatccgataccgtggggatcagccggaagggatgggaagcgcaagccctttctcaatgggccttaacgccattatcacccgtccttacgcatcgctggttcggtcgctgacgctccggggaaactggcgggagtcggagctggaagagcatgcgcgcattggtcgggtgacagattcctccatgatgctgaatattgtggtgcgggcggctatcgataagatgaaagagctggagagcttcagctgggagctcaataccaagatgctagaaaccgtctacctcgggctggcgcaacaacctaagctgacttcgctgactatacggttcccctcgagccg

SEQ ID NO: 3407 - DNA, 529 bp, Aspergillus oryzae
  modified_base (265)..(265): n is a, c, g, or t
ctaaccaactacatggaagcctatcgaagtggaaatcaccaatcccaatgatttccggagtccgggccgcatttcttcccttacaactgtgttccccataatccatcattgcatttattgtcctttaccctgttcttcccctccccacactatcgtccggaggaatctcacataaatctgtccggttgcccatggcttccccagggtccaaccatggtctagtgaaatcgacatgcgctgatactccttcctctactcctacggngctgtctgctccggtgtcctccacatcatcatcgtcctccaccccgctgtccgattccgatcgtccttcttcctcaacgtccaccaccaccgtcggaacctccctccttcgcgattatgcatgccacatagacccttcgcagacaccgaacgacgtacatgcgagcgattcccacccgggatcctgtagtaacagtgcttcgcagaaggctgacctccgggacgacgccgccgtcttatcgttgccctcgtcgcccttcctccc

SEQ ID NO: 3408 - DNA, 72 bp, Aspergillus oryzae
agtatactgcgtctgcacagaatgttttccattggctcggcagtttgattgaatgcgaatttgcacccgaag

SEQ ID NO: 3409 - DNA, 310 bp, Aspergillus oryzae
aggcgtttgtaaatggtggtcgtctgttgcctctgcgtaccgcacagaagagcacacctactacaggctcagaagtgatggatgccatggtttctacaatttctgagttgggtaatggagtgcctagtatcgcggcaggagttggactcgtgtacgcccatccagctgctaggttcgagctgaacttctctttaccactggtgctaaggaaaggcgaagaaggccgaaaaggtttgcagcttggaatcggtattaatttcctgtagaaagtcggagtcttgttgtaattaatagaagtcttctttatggt

SEQ ID NO: 3410 - DNA, 267 bp, Aspergillus oryzae
  modified_base (68)..(68): n is a, c, g, or t
cggaatcagtatcatcaaggatataggtaataaaaagattgacattcccataatatcgtgggtctggnagaagatcatatcccgcgggcggccgttgacactgctcaacttctatgctgtgttgattgccattcctactacaatcctgtacaaggccaccaccaagtccgcgcctcctaaactgagcggccgagtcacgaaggacacctttgctcagccacgtcactggtaaaggtagcgccactctgtccaaagacattactaatt

SEQ ID NO: 3411 - DNA, 455 bp, Aspergillus oryzae
gttcggggttggattatgagcggtgtctctggcgtggcttgtatcttggggtccgctgtcatatgtgttgacgttctactccgccatttctccagaggaaaaggtttccagatcgtgaataataatgcctttctttcggcttcgttgtgtcttagtgctggggttatgctctttacttctctctatagcatgctgccgacctctaaagagtacctcacccgtgctggatggtctcccgctgccgccgcctactccctgatcggtctctttttggccggcgtcattgtcattcggttcctgtctgcgcttcttcatcgttatattccctcccacatcgtcggctgtgctcatagtcatgagccggatgcaaactctgccgacccggaacgcggccacggtcaccatcatgcacatcactcagaagatcatcatggctggaccgagcggacaccttt

SEQ ID NO: 3412 - DNA, 455 bp, Aspergillus oryzae
cgctcagtcccgcgccgacatatgctatacaaccggatggatcagtatggcaagtgcccccaacacgacctatgacctatcccccgccgccagacatggctgcggcaccgtaccccaatcctggccaattccagcaacctcccccagatatgaaccccgacatggccagcccagtgcagcctttcccgggcaaccatgttaatccgcagagccctctaccgacggaccttcaggggacgccagttgcagtaacatacgctggtacccccgcagcaatggggtttcctgcctggcaagacgtgaataatatgtcgcccatgaatgtcgttcagtatcagatgtatgctggggacgctgcacaacaagcgtcgtttggtagtccacccccaatgggccatccaggccaacgacagtctccccggtaatgaactagcacgtcggcattgatttcagca

SEQ ID NO: 3413 - DNA, 511 bp, Aspergillus oryzae
tcaacatgtcgactctccctaggggagtcctgaaaccatatgctgctgaattcctgggaacagccctcctgattgtccttggagacggagtggtcgcacaatgtctcctatctgattatcagtatggcacttggctctctatcaacatgtcatgggcagccgctgtctgcatctccggctatctggccgatcccagtccaaccattaatcccgccgtcaccatttgtacggccctcattcgtcctacaccagggcaatggaaaaaattgccgggtaaactgttcgcgcagtttctgggtggttttgttggtgcggccctggtgtacatcaactaccggtcggccattgagtcctgggatcctgagtataccattccaggcggatcaattttgagccctcaaggacaccactcagcaggcatcttctcgacttatcctgcctccacgttggggtcgaattgggaggctgccttcaatgaggtgcttggatcggcggtgctcatgtttggagg

SEQ ID NO: 3414 - DNA, 297 bp, Aspergillus oryzae
  modified_base (147)..(147): n is a, c, g, or t
  modified_base (201)..(201): n is a, c, g, or t
gatggattccactcctacttgatggaacacacaagaactcttcctataggttcggcgcctattcaacgctacttggcgatacagattgggtaccttgctcgccagagaaagaggctccaatgcatagactgaacgatatagcgcggnttcaaatctatcggctgtcccgtgcaagcttacgtccctaataatggttactgncggtcaacttaaccactcagaagctccggaaccaaccaagcagatagggaccacttatgtcaagcctataaagccccccgggattgtaaacaatcg

SEQ ID NO: 3415 - DNA, 289 bp, Aspergillus oryzae
ataacggtgaccttgccaaccttcatcgcgaagcagagctcctgaaatcaaacacagagcgtgatgctttttcggcggtagcggaacaggagaaggcaggggaagcggaaaccgtacagctactgcttcaggctcaattcgaggccatatctgcaattgaggatatcatgcaaatgagcgaagaggaagctgttgaggcggccaagagtattctttctaagatgcttgactcctgctctactgcaacatctagtcttgtgaaacctgatggcagcttaccggcagctca

SEQ ID NO: 3416 - DNA, 593 bp, Aspergillus oryzae
gcacgcacaaaccatcgccaacgaagacacgtcgagggtcaggtgtctcactgtctggaggaggaaagctgggcttcgtctctatcacggcccctgttccaccatcattccctactgattctcctacaaagaaaactccttccaatccatatgcgtatcccgttacgtctacaatgtctatgccgcagtcggctttgttcacgatatttcccagcgtcaatcccgacaggctctcaagacagagtcagcccatagacgagccacccagtgataatttcgcggattttcctgagccatcattccactccagggctcaatcgaaaaggacgctcatggatgcggcgccattgaaggagcggcccgcgaaaaagccgaaacgcgaagacaccaactcgatgcgtttacccgagccacacgaaatgcctcctatagaagacgacggcgtgaaaccaccgtatagttatgcaacactaatcggaatgtctattctacgcgcaccaaataggcggctaaccctcgcacagatctataggtggatctcagacacgttctcatattataagaacagtgatcctggctggcaaaatagcatc

SEQ ID NO: 3417 - DNA, 403 bp, Aspergillus oryzae
gacgacatcactccaggttcctgagaagtccgccattgctacgctttcccttctaaaccaagtagcgaagcatcacgcaaaccgtatctcttcattgtggcacagtgaggagcgtaaaggcgatggtgtttataacccctacgcaacagatatagaagcaaccaatgtctttgccgggacggtatgggagggagaattactgcgactacactactgtccccaagtccgtgatgctgccgtggatatggagaagatgatctcgaggaagtaagacattgtcattatgactatctgcaatgtatcaacatgaccttccattgccctttaaaaaaacacattcctcatgttcaatccttaaaccgaaatgttttcctttctcttctgatatttttatgcccttttt

SEQ ID NO: 3418 - DNA, 592 bp, Aspergillus oryzae
tgcagcctcaagcttgattacaaccacaactccacccattgtatattgctctgtcatttaaccgattctgctgggagggattgccattacaagcagtttcgctgattactcctgagaggacctactagtagtacaatactctcactccccaagtgtcgctatggcctctatgtcgaaccccgcctccggcgccgccaacccctcatcgcggaaaacattcaccgttgggacgcgcaagtctaaacttgccctttcgcaaactgaccttgtagtctcggcgcttaaaaaggtttaccctaactatgaattcaaaatacactcgcaggaaactgctggcgatttgaacacaaccattgcttttcgagaatttacgacaaagaacctatggacggaggagttagaggaacacttgatggccggcaatgtggacttcattgtgcactctttgaaagatgtacccactaccctaccccccgcgtgtacgctgggccctatgatggagcgtgaagattccagggatgtactggtcatcaagcaagggctaccgaacatgtctttatccgatttgcctgcaggatctgtcgttggcacc

SEQ ID NO: 3419 - DNA, 537 bp, Aspergillus oryzae
cgcaagaacgaggcctttgttgacgtgatcgaagatgtcaatcttttaatgtccgcgactggcaccgtactccgcgccgacgtcaacggccagatcgtcatgcgcgcctacctctccggcacaccggagtgcaagttcggcctcaacgatcgcctactgctcgacactgatgcggctggtggctcagagtccggtcaacggggcatgacaacgaagggaactcgcgccgcggcgggctccgtcacacttgaggactgtcaattccaccagtgcgtgaaactgggccggttcgacgcagaccgcatcatctcgttcgttccgccggacggcgagttcgagctcatgcgataccgcgcgacggagaacgtaaacctcccgttcaaggtgcatcccatcgtgagggaagtgggtacgacgaaggtcgaatacagcgtcgccatcaaggcgaactatagctcgaaactcttcgcgacgaacgtcgtcattcgcatcccgacgccgctcaacacagccaaaaccaccgaacgcaccagtcaa

SEQ ID NO: 3420 - DNA, 361 bp, Aspergillus oryzae
attaaaattgcacaggccgaatcccaacgattgcggtcccgtgagactgctttatcacaacactccgactcatcagatacctgtgagtaccaacagtatgcccttggttgggatttcggattcaaggatgcattgaacttttttggtgcattgtcacaagacgttataaccggtggttggaatggaggagaaaagatcggggcaatggagctatggattcgaaaacgatttgctgataccggaaagttgaatgaggactttgctgaggaatgggagaatggcttcaggaagggcgtcagcgacttttacgacttggttagtatcaacacttacagtgttcattgagatacagtaatgtgat

SEQ ID NO: 3421 - DNA, 593 bp, Aspergillus oryzae
ccacgcgtccgctatcatctagaccctgtctcaaagttcctctccattctctatctcgttctcactctagcccaccatgtccttctacaccaacacccgtcaggaagacaatgagcagtacgacgtgtccttcgaaatcggcggtcgacagatagatggtttccccacaccatgctctaatctgagagctggtgggcttgtctacctccgaggccacccttgcgagatcacggacatccacacttccccagccagccggtccgtggtccagattgtcgggttcgatatccacaccggacaattcatggacgaccaataccctctccgcgaaactgtctttgtccctcgcatcaacaatcacactccgtcctcgagtggccgcagccaagtgagcagagcgagttccagaggctctggtagccagatggtccctaggtctcgccagtccagcaatgctggacaatacctcaattattaaatttcggaatattctcgaggtgtcccttcgtcggaccttgcgagtactctgtttgattagttcgggacaagatggttgatccatcgatgggcttaagttggagttgatatggttc

SEQ ID NO: 3422 - DNA, 155 bp, Aspergillus oryzae
caccgtgtttgctagtacatagcaacagtatgacggtgacgatgaacttgtaacgatgctatgatcgcaatagttttcagtactttggcctgtatagatatatggtacacgagtatatattgacaagcatggaatataaattgttatggcttttg

SEQ ID NO: 3423 - DNA, 594 bp, Aspergillus oryzae
cggacgcgtgggcgcgagctagatggcggcgagaactatgtgtggattgccaactcatacacgctggcgtcggccgtcgtgcagcccctgatcggacagatctccaacatcgtgggccgtcggaatcccatgatcatcctcatgtgcttgttcgcgctgggaagcggcatctgtggcggcgcgacgtccacaggaatgatgatcgccggtcgcaccgtccagggcctaggagccgggggaattcttctgttgctggaggtcatcgtgtgcgacctggtaccgttgcgcgaacgtgcacaatatgttgggattgcgttgtcgacatgcgccttggggatctcactcggcccgctggtgggaggcgccttggttcagcatgctacttggcgatgggtcttctacatcaatcttccctgtgctggtgtggcccttgtggctctggttctgtgtttgaatgtgcagcataaacgggaggtcagctggggacgcgcgttggcccgagtggactgggtgggaaatacgatcttcattgcggccatttgcgccattatgtacgctctggtcatcggcggatcagtccacccatggtcatcg

SEQ ID NO: 3424 - DNA, 604 bp, Aspergillus oryzae
cccaggcgaccccgcaaagattagggcatacttcactcaatgtacagagcagaggagaccttgcattgttgacgtgtgggcaaggattttggcaaatatcatgtgcacatgacagtatgatgccggactgtactcttcagaggatttggatcacggaccagaataatcctgcctaccacccaagaagtatccacagcttttcagtcgccaattttgcgaattcagacgtggaaggtctctctaatacgcttttctgcattgcagacgggcagcttatggtttgtactatacagcgggaggagaagactgtccccaggagaatagggttgccaggcagcgccactaagctggcatattctcagtatctgaagagcttggttgtggcatacagccgaactgaattcgacactgacgcggatcctatcaagcgcttcacgcggtctcacattgagttcgtcgatcctgattcacagcaagccatctgtggtccggaggataaactcaggccctggagaccgcatggagcagctggagagaaaatcagttgcattctagagtggacacccaagaaaggtgatgaggaatatcacttcattggtattgg

SEQ ID NO: 3425 - DNA, 539 bp, Aspergillus oryzae
cgaagctttcactacgccgacaagctttctgcgtgtcacaacgggctcttctatatactacctagttgcaataaccgatttacccaagtcgtggggaaacagaaagcaattgttacgagtacaactctcccgtcttctcacaggatctctatgcaagggatggctatcatgaagacaagtagcgtggttttgtctgtcgatcaaggtatctaggtaatacgcctgcatgatgaccggtgttcggcaacgctgtgacacagagatctgatgcaatatgcccggccatgactcgcgtgtttcttggcttgttgtctccgaacctgggtacagatgatgtggcagcagttgtcgttctgagaatatacggttgaacttgatctggataattccagcgaaaggactcatgcgcgcttttttagccctcagtttcttcatgagctgatactaactggatagtaacagcatgtcctcggaacctcctctgtctaccctaggggtaaactctgaaaaagaaccgtcaaagactcccttcactgacc

SEQ ID NO: 3426 - DNA, 547 bp, Aspergillus oryzae
  modified_base (284)..(284): n is a, c, g, or t
ccacgcgtccgcctaccttcgagattaccggtatggataacgcggcaaaggccttcgtcgaggccttctactccagtgagaatacgcatacgcataccatcttagcggttacgtgatcagtgatgtgcttctgatctgggaaatacaccgttcgacaccgttcgcccgagctgccgtgacaaagctgaggctgtcctttttctcaacatccgtgtctccgttcgcaattcagggcataacatggtcacatggaccatatgcgacgactaccttccgcaataatnatggctaaagagccactcgaccgcacatcactttgtgccataatccagcggcctgtaaggacgccggtgaacgccctccagcctcgttgaacgtctatcgtcaatctcgatctctcgacatacattttccttccatggaaattgagaatttagcaggtcacttcatacttgaacaaaaacgggaacccagcgaccgttgtagaccgcctcaccgctcacctccttctgcctgacaaaagcgctgcttttaccaaacaccaaat

SEQ ID NO: 3427 - DNA, 321 bp, Aspergillus oryzae
  modified_base (49)..(49): n is a, c, g, or t
cgacccacgcgtccggaaagacgcgctcgtgagattctcgtcactgctnaggagaagggcatcaccattattggacccgctaccgttggaggtatcaagcctggtgctttcaagattggtaacactggtggtatgatggacaacattgtggcttccaagctctaccgtaagggctctgtcggttacgtcaccaagtccggtggtatgtccaatgaattgaacaacattgtctctcagaataccgatggtgtctacgagggtgttgccattggtggtgatcgttaccctggtaccactttcatcgaccatttgctgcgttac

SEQ ID NO: 3428 - DNA, 497 bp, Aspergillus oryzae
tgacaagcacgtcagtatccagcaaacacagtcggcgacatgtcgtcgggatccaatggtgccaggcgcatagcgtctgttttgcggccctcgattgccgaccccaaagtgtgcagaagttgtcaagagacgcttgttcgccgcaattattcctcggccgctgcacagccttcttcagaatctacctctaccgctacaactaccttccccgtcgtgaagcccgtctacacaatcaatgccggcgtggccctatcccgcccccctcagattacccgcgacctctcacaattcgagaaagcatactatttctaccagaagcgactgaacgagcgtttggcgcttccatttaccaagtacttttacttcaagcgaggaacgccggcggacgaagactggaagcgtaaaatccgggagcgccagacggctgcgcgtgacatcggcaaatacaatgcgtactcgaaggacgcatggaacgatgaacttctcgtcggagccgt

SEQ ID NO: 3429 - DNA, 531 bp, Aspergillus oryzae
atccatcatctatccctgctctgatgcagacatcatcactctctgatatcctgataagcttaattaatacccacaattgatcttatccgttatcatgggtggagacattccgcgacaagctttcagctctctcccccgagctccaagtggccctgtcggtcaacgcattcatggaatctatacagatcgtttgagacagtttacggctaacggccagtacgagggacagaacctcgtttctaaattttatgaagccgtgaactctgacaaagagcacgttaagctctccgtatactcggtcccgaatttggagcgccctacgtttgaagaggcaacttcacatgacttcaagcccacgcatatcggcgcttcattcggtcctagttggtctactcactggttccgcatccatctgacggtcccggaggacttacgccagaaagagcggctggagtttcattgggatgcgaacaatgagggcttagtctggactgaagatggtcatccactacagggtctgactggtggcgg

SEQ ID NO: 3430 - DNA, 527 bp, Aspergillus oryzae
ccgccatatatctccagtagaccagtgcttacttgcggatttagctccggggacccccagctctgtagacgaccatatatgcctccagcaaaacccccataagatcctggacacgttccgggatcgtctcgagaaatatcccgacccatatcccaaaccaattccacgcaatcccccagcatctattcacagtcacacaaagcggtactcggactcaatgctcctcaacataaaaaagcccaccacaaccatcatccatcaaggtacatcgttcgagatcctcaatccccatgaatcactccacttcgctcgtatcgtctcgtacatcgaagacgtcgacagcttctccacaggccacaacagggactcctacatctcattcacagaagacaccgtgatcatcgaatcggacccttggtcctacgatcccccaccgcaacctcacatccacacccaaagccacgctgaagaagccttcgaagacgaaaaccgaaagtcccaactagacattggcgacacccaaggcc

SEQ ID NO: 3431 - DNA, 418 bp, Aspergillus oryzae
cgcccatttgagtttgacgaggatattcgaattttgcacaacgactggccgtacggaatcgagaaagatatcgtccatttagtagtgtggaccaagttcgagctggaagatgatccggtgaccgacgatctgacaccgcgggccaggcaagagattgataactatgtgaagaagacattttgctcgcgagtaccatcagagaaagtcatctggttcaagaactggaagtctctcaagtcagtgcatgcggtcgaacattttcatgtcatgctatataaaccggatccagaattcctgaaagaaatcactggaagggatgtaccgatggttgcaaggatgtgagaattgattcgtactagtagtaccagtaggtacttgactgtttgttgctgcttcagagcgagagagatcccttttt

SEQ ID NO: 3432 - DNA, 538 bp, Aspergillus oryzae
gaaagatcgttatagtgacatcttaatcaaccttgacgaggacactattaatatcacgtcaccctctctacgaaatgcactggcactatctgttgcagacagacgctggatcgatcttcttacccagattatcaacgatacgtgggatgaggcgcacccggaacaacccaagacccatgggtatatgggctccgaagaattcatcaggttacagtttgaagagtatctgctcgcattgctttcatgcatgaaataccatgaggagctggattccttcaatgcgggtgacccaggccggaggagcagggagcaattggaagcattcaacatagaaggcgaccctgcgctggaattcaacgccgaatttctggcacagtggcaaaacacctctaattatgagcttttcaaacgcctgacctctgatgcactgttgtactccatcgttgagcctcgtcacccttgtgccggaggcctcaccatggacgatgttcaacgtcggctatcgcaacaagtcgcggagcttcatctggatgaacgg

SEQ ID NO: 3433 - DNA, 520 bp, Aspergillus oryzae
gggtgcggcaaattcctgagagcccgcagcacctccacttttactttcttttttccctcactacttattactcataacgccagccttgtcttttgtcttctcgaaacactgaccttctcgctccccttccccttccagactcccagacgtaggccttgaagctgccgcatgctggttggcaagatgttctcccttcgcaccgccgtgcggagagcttcaaccagcaagcccctccgagccttctccgcaccgcacgccatttcgtccgcaagactaggcgctcgtaactccctgaaggcttccgccgttccgttgctgcagggtcgtcattattcccgcgccactgacccccagctttcgtcgacccgctctacggtcgttcagctgctgagcaacatcggctcgaagcgtgaggttcagcaatatctctctcactttacgtcggtttcctcccagcagttcgctgtcatcaaggtcggcggtgccatcatcaccgaacacctccagactctttcctccg

SEQ ID NO: 3434 - DNA, 579 bp, Aspergillus oryzae
gacccacgcgtccggagtcaagatggaggccaacgatagttcacacgatgtcgcggtggtgggtatgggatgtcgtctacccgggaacaataacacccctgaagaattgtggcggtcaatcctccaaaaagtcgacgcctcaagtgagatacctagaatgcggtgggagccataccagcagaacgcacagaacgcaaggagtatcggtaaagtgccccgtcggggctatttcgtgaagaatttagaaaattttgacgcaggcttttttaatatttcgcccaaggaggcggagcagatggatccccaacagcgccttgtattagaagtgacgtgggaagcgttagagaatgcaggtattcctttgagtagcctgtccgggtccgacgctgctgtcttcatgggcgtgaattctgatgattatggaaagctgctcctcgaagacttgccccacgtggagccatggatggggataggaaccgcttattgtggcgttgccaaccgaatatcttaccatttgaacctgatgggtccaagtactgcagtagatgctgcttgcgcatcttcactggtcgccattca

SEQ ID NO: 3435 - DNA, 556 bp, Aspergillus oryzae
gcaggcactccacagccttcaggcccgtacggttacccgtcacaaccgcagcagatgtggggtcaacccccgccccaaccgcaaccgtcgcccttgtccgccgcgggtccgcaggctgtgggaataccacagtatgcctcccaactacatgcacagcaacaacactcgccttcacctctcgcacaacatccgtcgcagtctccgcggaaccaaccccgtccgcctgcgccacaaatgccgcagtctttcccattacatcatccgcaggcacctcaacaacagccgatggcatccatgggctttccaggcggcactgcggccccatatgctgcgatgacagctgcaagaggcatgtacccttcgacacaggggcctggtggtcagcagtttatggcaggagcaccacagcagccaggccttgccatgggcatgagcgcgggaggtgccatgcccggctgggccccaacacctggcggaccgatgcaaccgggacatccacagccaggtcaatccggagctccacttggatggtccggttactaaaagcctacgaata

SEQ ID NO: 3436 - DNA, 227 bp, Aspergillus oryzae
gttgtcgaataaccatttgtcctggagaatatgagatgggtcggatctcttgacgatgagggattggtccttcgaaagctagaggcataagtacttatgcttattccgctgcatgattacactgcttctattgatgaggcagactgtctttttgtcggtgtagacttgacatccagactgctagcatttagagctattccataatagtgtcacgatgttcccatttc

SEQ ID NO: 3437 - DNA, 597 bp, Aspergillus oryzae
gacccacgcgtccgggaaaatcagtcattgtatttctcgtaagtcaatgtacaattatagtaacgttatcggtggatctttcgaagcttttccctttttcctggcaggccgatcgccccgtcaatataccgtgatatagatttctcaagcgttcgagacaaagtgattcactcatcccactatttaaatatacgctcttcctgtctatcctccttctttctcctcttcttcactacactcgttcaactttagattccctcgttttaaatatacttaatacttttatcctttcggatctataatcagtcaccatgcgtctctcttacgccatctctctcttgcctctggctgcttctgttggagctctccaggtcacttcccccaagaagggtgaggacgttgacctctccaagtccttcaccgtgaagtgggatgccgtcgataccgacccctcttctttcgatctctacattgtcaacaacgccgtctaccccagcgttgagcagaagatcgcctccgacgttgactcctccaagggctcctacgatgtctctggcctgtccgacctgaccaacggcaagggctaccagatcaact

SEQ ID NO: 3438 - DNA, 542 bp, Aspergillus oryzae
agatattcttcttccttgttggtccatttacttgggctgttagacatccaaatccaagtcgaagtccgttctcagcgctggcggctcggtctcgaaacagaaaatgaacgaagatccttcaaagctgctcgaacaagcgacaacgctcctccagacaggtcagccagatgtagcgcttccggtcgcccaacgggcgctcgaccttacgccggccaattcccccgcccagctttcggcgttgaacatagtcgcggagatttacgttgagctgggagagattgatgttgcgagacagcattttatgcgcgcggttgagctggatccgactggcgcaattcctgaaagccagggaggtggcgctgaaaagttcttatggcttgctcaattgagtgagctcggaggaaaggacagtgttcaatggtttgagaagggtgtttcttgtctcaggcaagttattcaacagcttgaacaaaacccgggccctgcggaagctattgagttggaggagaagaaacggaagatggcaaatgccctatgtgccg

SEQ ID NO: 3439 - DNA, 188 bp, Aspergillus oryzae
ggccgttttgcgttcatgaactgtttttcgggtttattatgaaggaattgcataattgtcgattactgcaaatcgggggaggaagaaggcacgcaactacgcatcagcctatgaatcacggtaatttacgagtcatgtccacaaaaagtgctatattaatcatagccgagcaaatcaatgtataattc

SEQ ID NO: 3440 - DNA, 587 bp, Aspergillus oryzae
agctttccgagaacatccctgaggagcagaagtctcgtgctcgtgatctcgctggcaagacaaagggctacctgtcgaagaagatgcccaaggaacgccgcgagcaagctatctggcgcatgaagaagatgatcattgagatccagggtcgtgccgactatcaacgcgcgatcgagaccttgttatctctcgcggagaagtatggcagtactactagggatgtaacccaacagggtgctggaactgttaagggtactcggggcactgataagatcagcagaatggagaagaacctacgggttttgatcgagcgtttcgcgaacagcacgtctttagacgatctctttgactcgctggagaatatctatcgagatgcagacagagatcctgagctcaagggatggttcaaaaacatggacacattcattcggaaatctctccaggaacaaggctacgtcatgcaggaagactgggaccgtcattatgatcagctctccgaccatggccgttatttgttgcgcgaacgctacagggaccatacagaccgcattcttgacgaagtcaagtttattggtgatcagttcgcc

SEQ ID NO: 3441 - DNA, 585 bp, Aspergillus oryzae
aactttgcgggcccgtgacctcattcatcattctttatccgttgcaaaactaaagttctccttccattacaacataacttacttcagggcactccttcttcatatatcatcagaacttgaattcaaaatcaagctgctactacccgctatttccatagtaaccaactgattttgtatatccttcttagtcgatgaacttgctagtgaagagcgtgcccgattcatactacgatcactccagcttgtccttattacccgtctgccagtggaaactttggactgctgctcatttcaaatcggttaccgattacgataaaacgctccgaagacgggaagtatgacttttccatgtcatctggcggcttggttagcggtctgagtggtctatcgaaatccactacgtttcaatggtatggctggcctggcctagaggtccccgaagaagagataccggtggtgaagcaacggttgaaggatgaatacaatgcggttcccgtatttatcgatgatgagctcgcggaccggcattacaatggattctccaattcgattctgtggccccttttccattatcatcctggtgaa

SEQ ID NO: 3442 - DNA, 557 bp, Aspergillus oryzae
gaacttttactgagtacacctgcagtaaagcattccccacaggggaccgaaaacaaaaataaggaacaaaaggcaaatggccaccatttccatcaacgcaccgggagcaacaggcttcctatacaacaacgcctccggtaaagcgcgactgtgcatttcggctgagacgccggatttcgacacggagacgttgcggaactggcgcgatgagggcttcgatgtgatctatgtcccatatgatggtgaccaaagagagtatgttgcccgactaaagagtgtaaaggaaggactgggggtcggagagaattatgccgtgcttgccttcggagacgctgcctcattctgtttggactattacctgaaacccaccaactgtagtcgactttgcgctttggtcacctattatcccaccaacattcccgacacccggtcgcggtacccaccttccgtccggatcttgacgcatttggcggggaccactgtcgacgtgacaactattccgactttggtgggactgcaggggaagaagaagcggagaactcgacagatcaatccgg

SEQ ID NO: 3443 - DNA, 372 bp, Aspergillus oryzae
cggacgcgtgggacgaacgactcagtcagctgcaccaaagtaacttgcagaatgaagagctgacatctaaggcaatggggaagcttatcaaacatggtattgcccagcaaacacctgagtaccgcgaccgtgccagggagcgccgacaggcatttggcagctccaaggctccagtcaagaagagcgcgcctccaccgaaagaggaagaagaacccccagtggagtcaacgtcgaagggcgcttctcttctcagtaagatggggtggtctgctggaacggggcttggtgcccagggcactggcatgactgctcctattgccactgaggtctacgcgcaaggtgttggtctaggagcacagggaggcaaattgg

SEQ ID NO: 3444 - DNA, 515 bp, Aspergillus oryzae
caccgatttcgatcagtatgtctgcggggggtggagagaacggcacgacatgcgccctgaccaaggcgccatatttgcggggactatgatgagtgaaaatgcgcagacacgccttcgtcacttgcttagctcctcaaaaccttcggatccagctgactcaaacaattttgagaaattgaaggcagcatacactgcttgtatggacgagtcgacggtcaccaagcggggaagcaaaccgcttgataacatgctggccgagttcgagaagatatacagccgagactcgatctcacttaaaggatcggatgccgacctaacaaaagcaatactctacctcatggaatccggtgtcgaggccctggtatccccgtttgttgcttctgacgatcgtgacccggactcggtcgcaatctttgttaatccacttggtgagatcggacttccagcaagggaatactataacagtacggaaactgtcaaagaatacactacggtggtggagaaagtgcttgggg

SEQ ID NO: 3445 - DNA, 536 bp, Aspergillus oryzae
ttttccgagctttcgatcgcgtcgacgctccacccgcagggtcttgtcacccacgcccaaccaggtgccctgcagcctgcgccctggaacgaacaaccgtccatgcgatcgaatctcgtcaattttgtgagtcccacgggtcagccgcagggcttacacacgccactgcccgatcagatgtgcgccgtcttgcatagcccggcgggggacttgcacaccccgaccgtggagtggaacctgaccagctcgccctcccgctggacacaaatgctcagtggccagacgattcgttcccaggatgaccctctacccgccaacatcgccatgtttccctcggtcgacccgagccaggtcttctccaatgcgaacccattcgccccgacgttcgatgagccacccagcgtcacgcgctattttgatcatgatcaccgggaatacatggccccggatgaatgcgatcggaaagagtcattcgcaacctccgtccgggaactctcaacggatcactcagtatcgctggcgtcgaatgtgccgga

SEQ ID NO: 3446 - DNA, 228 bp, Aspergillus oryzae
atctgccctcgggatctgagcgttggtttgtgactgctgtctttgctttgcctgcccatggggatggggatgcatggcggcagaagtgggaacgactgccagtcattccggagtggttgaagcgggttatggagagtggtggtcagtgaaaccagtggtcatagatcaataagttggatcagctgattcgtagttttcgaacttgtccgctgcatccttttgcttttg

SEQ ID NO: 3447 - DNA, 612 bp, Aspergillus oryzae
ccacgcgtccggaggcgtacagtaagcttgaacaaactactgacggtacccttaagctagatcaaagtaacacggtagctcatgtcatgagagtttgtcgagaagagctcgggttccccatctcaagcccggattctgacttcttttcagagggagttgatagtctaaaagcaatccatctgcgtcgattgatcctgggagatttcaagatcacagacagcaagactattggtcagaacgtcgtctttgaaacggggagcgtctcccgcttggcagagtatattcaagccgtgcaaagtggccaagatacagaggtggaagacgaggtgtcattgatgcccgggctgattgaaaaatattcgacgttccgcatgcacacacccaatcccagcatcgtctcaaacagcaggagtgtaatccttaccggtgctactgggtccattggcgcgcacacgcttttcaaacttttgaatgatgatacagtatctgccgtgtactgcctgacacgacggcagcagccaaaagaagagatcctagatgctctcgcaaagaagggcctagaggtgatgcctttccgcacaaagaagatcatcgcgctcaatagtgcgctgg

SEQ ID NO: 3448 - DNA, 440 bp, Aspergillus oryzae
ccgaccaacgaacttgccggcagctccgggagtatctggggacaatgcatgcccatgtaaatgacgaaaatgaagacgacaaagacatcggtgacaacatcaagaagggctctgcacaggtcatgatgcgcaggaggctgcgggagtacctcaattggaagacatctctgtctaatgtgacgaaaaatttaacttcaaaaccaacaaatgacgagtcccaggctgggaaaagccaagactcgcctcgaccatccgctccacagggacgagctcctccgaacaagcgacgccgagtacgtggtggaggtgctgttacatctgcctctggtcgcgtaccaaatagtagtgtacagacagatgttgaattacctggccaagtctcgaacttactggaagagatccaacccacagaaatcgaagaggtccagaaggaggacata

SEQ ID NO: 3449 - DNA, 502 bp, Aspergillus oryzae
cgatcctcctgacgtcaataatcaggtctccttcgcacatcatggctactgcaactgtcctcgaaaaggccaacattggtgtctacaccaacaccaaccacgacttgtgggtcgcagaatcgaagccgacgctcgaggaggtgaagagtggtgagagcttgaagcccggtgaggtaacagtccaggttcgcagtaccggaatttgcggatctgacgtgcacttttggcatgccggctgcattggtcccatgattgtcacgggagaccatatcctgggtcacgagtcggccggcgaagtgattgcagttgcctccgatgtcacccacctcaagccaggcgatcgtgtcgccgtcgagcccaacattccctgccacgcatgcgagccttgcttgactggacgttacaacggttgtgaaaaggtgcctttcctgtctactcctcccgtggatggtttgctgcggcgctatgtcaaccaccccgctgtctggtgccacaagatcgg

SEQ ID NO: 3450 - DNA, 606 bp, Aspergillus oryzae
tgaacatgtacggctttcataaagtgagcgatgtgttccacactggatcgccagactcggcactttgggagttcaagcacgggaatggcaatttcaaacgtggtgatctgattggattacgggagatcaaaaggcgagcctctcggcatgcgttgatccatcgcgactcgtttccgggccacaaagccgctgcctcccagcctggcacaccggctgaaccagtccctgatgccactgaagctcgcttgatgaatctggagcatacgttgtacgacatgcacaaccgcttgagtcgcgcggaggaaggcaatgcggcactcaatgcaagatgcctagccatggcggagagcctgagcaggtgctatcattggacacattcaatatcgcgctttttgcaaggtatgattccggatcgtgaaggtctcctgtacagagatgcatgcaggcagaactggagaaacacctcgacagtgtgcgagccctcgagcatccccctgatccgtatctatcaattcgacagccctacgtcccaactgtatcgattgatccaggtccacctctatctccgcgtcaaatgccacaggaagacagtcgtcggccttcggt

SEQ ID NO: 3451 - DNA, 563 bp, Aspergillus oryzae
catgaactcgtgatatcctcaccaacacttaaacttggctccctcccctcgcgtcctcgcctaccttgtgcgaaaaggcaggctccctgcatccaccatggctctcacgcccgtcgacacaacgctcaaggtgcctcctccggaccctgtcgaagaaccacctaaagtggctgtaacaccctgcgaaccacccacaggcccctattacttcgagggaggatttcgtcgcgtcagtccataccattacacatacaacacattctgcaaagagcgatggaggggtcgggaactagtcgacatctttatctccgagtttcgcgatcgcccaccagagtactacagagaggccctggaagccggcagagtctgcgttaacggtaaaccagccggaccggatacgaaagtgaagaacggcgatgtcatctcgcataccctgcaccgacacgaaccccccgtcacaagtcaggaaatcggcatcattcacgaagacgatggtcttattgtcatcgataaaccggctggtgtacctgtccactccgccggtcggtaccattacaactccg

SEQ ID NO: 3452 - DNA, 421 bp, Aspergillus oryzae
tttttgcatattactcagaaataggtatatactcgtgagaagaatggaatgcttaagtacagaatatccaagtcggcgagtgcctccaatgcaagtaataaaagtatataacacaattttttcacggacataagacacaagaagaatagaatttttggctttctgttcgccagagcctcatttcatcaccaatatgtgaaaaattaagcctccgggcatcaccgggagttaccttccagtccagcccggacagcctccaggatcatgtccttggcctgctccaagctttccttgtttcccttgacctcgatcgcttcacccttagcctgatccttgggcacattgattcggcaaccagtctgcttacggatagcgttgatctggctacctccttgtccaacaacgaagcggtatgtcttgg

SEQ ID NO: 3453 - DNA, 324 bp, Aspergillus oryzae
acgagccagaatatcgcagttgtctttgctccaaccatcatgagaccgcagagtttggcccgtgagatgacggatgtgcaaaagaagaatgatgtgttgaagtttttggtggataattgtcaagaggtgttcatgggtctgcaatgatagaatatccctcttcttgcaagtccgttcaaagcttggtctggcatcaggcttcgaggcttttcgtttttatttcctttcttcatttttggacaatgtttctcgatttctcttctgccattagaataccccaacactcaccagctcgacctatgtacatatatggcgatttctgtc

SEQ ID NO: 3454 - DNA, 616 bp, Aspergillus oryzae
tcgacccacgcgtccgcggacgcgtgggtctggttcatctttcgtttgtcattacactgcagggcagtcaacatgtctagcatctccagaaccgccaacctcctcttccgcgctagcagggcctccctgctgcgccctcgcgctgtcaaccctgtgcagcatgttttgggtaaagacagactggctgcccgtggtatggcaactgccttcgagcgctccaagcctcacgtcaacattggtaccattggtcacgtcgatcacggcaagaccaccttgactgccgctatcaccaagcaccaggcttccaagggcctcgctcagttcctcgagtatggtgctattgataaggcccctgaggagcgtaagcgtggtatcaccatctcgactgctcacattgagttctccaccgaggacaggcactatgcccacgtcgactgccccggtcacgccgattacatcaagaacatgatcactggtgctgctaacatggacggtgctattgttgccgttgctgcttcggatggtcagatgccccagacccgggagcacttgctgcttgcccgtcaggtcggtgtccagaagatcgtcgtttcgtcaacaagattgatgccgttga

SEQ ID NO: 3455 - DNA, 341 bp, Aspergillus oryzae
gggttctgttcgacaatggctatatatatgtactctggatgtactcgccacgaaatgcccctcctatgtatcctatccatctacatcccttttactcaaaacagcatcccactttctctactgtattcaatcccccattattcaagtccctcctttagaacctgagagctttacaatctgaatcacagaacaatgccgcattcaacccaagcgccaaaccatcacgtctcaaaacactcctaccgtcatcaaccgtactctcaaaccaagtcatccatagagtccaagtcccaaccaaaatctaaacaatccagtacatataatagatgctgggattggat

SEQ ID NO: 3456 - DNA, 481 bp, Aspergillus oryzae
caattatttcatcccttattgtccccagtaattcatcatggcccccgagaatatgaagcagtggaccgtgcagggcaaggccaacggctttgacgagcttgcctacaatgacgcgccggttcccaaggttggcgataacgatgtgttggtgaagttccacgctgcttcgctcaattatcgcgaccttatcattccacggggtatgtaccccttcgccatcaacttccctgttgtgccgggttcagatggagccggtgaggttgttgaagtgggtcctaaagtgtctcaattcagcaaaggtgacaaggtgatcacattgttcaaccagctacaccagtacggtcctgttgatcccaaggctgccggatctggcctgggtggtgttattgatggtactctgcgtcagtacggcgtcttcaacgagaacggactggtgaaaagtccgaagaacctcacccaccttgaggccagcacgctctcg

SEQ ID NO: 3457 - DNA, 413 bp, Aspergillus oryzae
cggacgcgtgggtgcggaggctacccgcaagaactgcccaagccgtcgctatagcatcattctgggggaacttagattggaggcacgtagacagaccggttcatatctacgttcggatgctcctgcaaatacttcacagccgcttgccactacagttatccaaggtcaagcctctatggtccaaaaaactgcaaaccaagcagatatcccacaaccgctcccgtcggcttctcgctctgcaaataacccagaaacctttgcacctccggacacagtggaagaaacatttgattttggcgaggactttggacttctggataatttggaaggactgaattggtggactcagttagactcctgggcattctccaacctttcagcagagccctcgaacctgggtctgtgatcatcgg

SEQ ID NO: 3458 - DNA, 580 bp, Aspergillus oryzae
tcgacccacgcgtccgcgaaaagtggtccagcacggtactcggcaggctaaacctaatcggtctccgaatcccgttcatcaactaacggttgtgacgttaactccgtcattatttcttattttttttactctcgcttcctcaacttctcaggtcgcgtatttacttcctgttttcatgtttgggattgttggtagaggctaaaccattcttttgccgcccggttggggcttcttatggtctggaaagaaataccaatgcttcccattctgcttttcccgattgtctctaccctgatcggcagtgtcctcgccatacccatatcagaccaacagccattaggcaaccagctttggcactcaaatggcgacctttacagcattgacaagccaccggactcctcttctagccgaggactcaccggccgctttctgcatataacagacctacatccagactcgcactacaagaccgggagatccgttgacgaggatgacgcatgccattggggaaaaggccctgcggggtactttggggcggaagggagcgaatgcgactcgccttttaccctcataaacgaaa

SEQ ID NO: 3459 - DNA, 525 bp, Aspergillus oryzae
gggatgcttcgaggcgcacatcgagttactgagggggggaagggattgggggtaaatcatattgaatttttggatgggcagccggtgatggtctcatctgggaaggataacgccctcaagacatggatttttgacgagctacccttttcgcctattcccagaccacttcactcgaggagcggtcattctgctgcagttactaccctcgagttcttaccttccgcctcggacggttctgaattcggcggtaagtggctgctgagcgcaagcaaggattgcagtctctggggtttcagtatacgaaaggatagccagaataccgagatatctcaaggagctgtggaacacaaagcgaaaaaacttgttggttcgaggacggtgacgggggcacaggagctcaaagcaccggaagtaacctgcatcgcctgctctcttaatcgcgatggaggaatgggcgttacaacatccggtccgatctgggcaaacccaaaatcaatcaatacggatgcttcaactaagacaggc

SEQ ID NO: 3460 - DNA, 531 bp, Aspergillus oryzae
ggtgacattccagacgctggcaactatagcagagaaacgtttagcagggtctttctatgtactgtttccacagggatcaggcggcattgaagaagaatgtcaggcggttgttgaatttctcaaagcccaccatagtgagaaaaacaaggctattgtatactctaaccgcactcctgaagattgggaaaagttcactcaagcgaagaatggggtcgttttgattcatgaaagctctctggatttctacaagttgcagggccttaataacttatgtcgccagtcaacattcaacttctggtctttcattttaaacaaagaattaggtgacaaccgaccgtatttccagcgcatgttccaaacgggtggagttatcttgattaccgcagactacatgctaagcgatccaagaggtacagtcgttgtgctatcttggttcgaagattatgcgaagagcaggtatcctgggacatggaaattaatgctccgcccggatgtattgaattggctgcaaaagcagattgaggtcgccgg

SEQ ID NO: 3461 - DNA, 136 bp, Aspergillus oryzae
aaagagcacctgttcgtcatacagttaatcatgggaccttgcattctcgttctcgcctgcatggtcgccattgatgccattcatggtgactactcgaaagaaataaggatatggcgcacattgttcaagcacacct

SEQ ID NO: 3462 - DNA, 403 bp, Aspergillus oryzae
cggacgcgtgggccctgattcatagttacggactttgagcccccaccccaatagaatagcgctacaatgacccaaacttcgacctccaagggaacgataaaggttgcggactatctgttcgcccgactctgccagctcggcatccagtctatttttggggttccaggggactacaacctcagactacttgatttcgtggagccatccgggttgcactgggtcggaacctgcaacgagctgaacggcgcatacgccgccgatggatatgctaggatcaacggtctgggagctctgatcaccacgtttggtgtcggcgagttatccgccatcaacggaatcgcaggcgcgtatgcggaaaaggctcctgttatccacattgtcggtacaccatcgcgtgcgttgc

SEQ ID NO: 3463 - DNA, 574 bp, Aspergillus oryzae
gcggaactgtttgagaaagcattcacagagctcccgcaacctacacaagaagagctcattactggactgaacgtcgacgggtgcaatggcgaagacgcggtaatcctctactatatgcccgcgatattcgcagaggctctaagggtcacccgtactgcatcagatgtaaagaaaatccaagttcttcagagcctcatgtcattcatggcacgaacatacaatgatacaaagccagttgatggacatcccggcgtcattcttgaacgtgacgtgtctggggcgaaggactatatacgaatggacggtttcatcgacgatcccaccattttggatcaatgcgttcctccagtagcgacgtattaatgcaagcctcctgcactttgctttgtcccgagagactccctaatgttaaggttcaatcagcattgatcagccgtcattcgagattaacgagaaatgaactcatgactttcgactattcttactccaaaccttgacgattcgaacctcgtgatctactgccgcacggaataagttgttcgtcaattcttattcgacttgccttatggatatt

SEQ ID NO: 3464 - DNA, 481 bp, Aspergillus oryzae
cggacgcgtgggtgcccgactcgactcgactcgactcgacctgccctgctttgcctcccccctctccagaccttccgcatgggcttttaatcaccccataactgctcaggtcggtgatatggacaaacaccgccgcgatgagtcaccttccggtctgtcagatattgtcgagcatgacggtcttctagggaccggcctgacggtaagtccctacggacctctatctctgcctgttctctccagtcgcccaatgatccgctgatagacccttccggtacgcagaccagacatatcgaggccttcgggaggaaagtgacgtcgacagccgggcatttaataggccctacgggcgacggaaatcccgcccattaccacaatgctatggcggatatccagcgcgagctgcggcggcccaatacgcagcgcagagtattcgccttgacccagactacgccgacggatctggtccgctccaagctgt

SEQ ID NO: 3465 - DNA, 507 bp, Aspergillus oryzae
ctacgtcaatggcaaccactaccaagtccatctagactgcgtcggcaacccaggtcgcaaaaccgaagatggagaccgcatacccacagttttattggaaggtaatcacgggccagtcgaacacaccttgcaaccatttatcgatgatgcgtaccgcaacggctccatcgaacgctactgctactgggaccgaccgggatatgcctggtccgacaacgcgccatccccttactccgccggcatggcagccgactcactgtccgaggcgctcgctctcgccggcgaagaaggaccctgggtcctggtctcggccggagtaggcggcatctacagtcgcatttttgccagccgacatctcctcgaagtagatgggatcatgctcatcgacaccctgcacgaagattacctggacagtctgggctcaccgggacggggcttcatcctttggattcggggtgttctctctcctctgggtctcgatcgactcgctggagccatcttcaaggg

SEQ ID NO: 3466 - DNA, 542 bp, Aspergillus oryzae
caggaacaatgcatgacctcgggtcacgagaaccctgggaatgccgacgcttcggccatggaaaccgtgtcggcataataatcatccagcgaacggcgtgagtacgctagagaagatccttgatgatcgctgaagtatgtatgtaccatgctgcctgtgggtacgcatgtaatttaactcaatctctcccataagcgcatccaatatagggccataagcaagtctgggcaaaaccactttagactgcagtgcacaattcaatcgccacccgaggtccaaagcaaggcatttcgtcaaatacctccaacagtggtcatatactttctggtcatccgaccattcattccaaaagtcacatcttcactcggaacggccatcccgaggccaaaacctggcagtaatcatggcagaccaacaatgacgtgcctgcccagatctgcgccggcaaataatctccggcgcaatcaatgccccagctaccgacggccctgtgagaggtccgacactggtcagcgtcaatactagcacctatcttgctgatg

SEQ ID NO: 3467 - DNA, 485 bp, Aspergillus oryzae
gtgataaggcctttgaaggcaaggccggttctagttctttgttgtcatcgtccgaatcggatgggtggaacggtcgccctaatatgccttggagtaccgtcaatacatcttcaaatgttctctccagagcgacaaataacagtatgacaacatcgcctatccaaacacgggcgggtgacagaggaacaggtagccttgcagaggccggtgactcctcgtacttgacactaccccgatcggcggcaatcggtggcactgctggatcaacaaatcacaaggcctatctcaacaccggatcggagggtatttctccttctggagatggtatcgcattttctggctttgggaatttcagaaatacagagagccggcggcatgccaactcttctgccttcggcggcagccctgttggatctgggttccccatgaaaccagggttctctaccccgctcgagagtaccagacccgatgaaatgccatctatg

SEQ ID NO: 3468 - DNA, 608 bp, Aspergillus oryzae
aggagattgtgcgggaaacggagtcgaaggtcggccgcaatgccggtatctcccctgcgcctatcaacctccgcatctactcgcccaacgtcctgaccctcacactggtcgacttgcccggtttgactaaggttccggtcggtgaccagcccaaggacattgagaagcaaatcagggatatggtcttaaaatacatcagcaaacctaacgcgatcatccttgcggtcaccgcggccaaccaagatcttgccaactctgacggtttgaagttggcacgggaagtcgacccggaaggtcagcgtacaattggtgttttgaccaaggtcgatctgatggacgagggaaccgacgtcgtggatattcttgcgggcaggattatcccgttgcgcctgggttatgtgccagtggtcaaccgtggtcaacgtgatattgagaacaagagacccatctcatacgctctggagcatgagaagaacttcttcgagggccacaaagcctatcggaacaagtcctcatactgtggaacgccgtatttggcgcggaagctgaacttgatccttatgatgcacatcaagcaaaccctgcccgatatcaaagcccggatttcg

SEQ ID NO: 3469 - DNA, 443 bp, Aspergillus oryzae
  modified_base (220)..(220): n is a, c, g, or t
gctgtctggtccaacgttacgttgagcgcctagaacccccctttccgtctgctccgccgagggtgtttttgaccttcgatcctcttctcgactctcgcggcattcttccacccctaatccttctcgccgtgaaataatatattgagtcttgtgaaagacttgccgcagagatgaatcccacccttccgtcatggaaggatcggacgcaaaatcagttcanggaagcttcaaatccaagtaccatggcgctcaatccagctcctggtgccgcatcgcatgcgacggaagattcggtcgaagctgaggagtaggatatcgcccacctcgtcgatatcctctttgcaaacttcgttctcgcctgtggacacgctccggtcgctacaaagccatcggtggacgacatacgacttccaatatttgctattgttgatcgtcgcgatctt

SEQ ID NO: 3470 - DNA, 290 bp, Aspergillus oryzae
gaacaagttcatgctctctgtcaaagcgcgcttgaaaggcattaatgttgaaagtgtcattccaaagctggcagaagattgcaagcgagaagttgaggccctaaccaaaaaggctaacgaagatcatgccgctctgatcaaacaattgcaagacaagtatatcaactcccgttattgggagatcacacctttgaacgaagtggcacgttttgctcaggagaaagttgttgaatgggataccgcatttgcggaattcgaaaagaacttctttccttccgagaaggatatta

SEQ ID NO: 3471 - DNA, 482 bp, Aspergillus oryzae
  modified_base (328)..(328): n is a, c, g, or t
cggacgcgtgggcacgggttccattaaaacccgacgccaaccctatcagcacctttgaccttcaccttcatgaaaactagggtgtagccaggaattttgtgacctgcgttgattgagataatatccaagggcttgtcagtatcagcaaacaacatggattccgggtttattcgcgacaatatcccggccatcgcatcgatcgctgtgttggtatacgttctctcggtcgtataccggtcgcagagaagtcacctaagctacctacccggtccctggtataccaagtttaccgacctccctctccgataccaagtcgtcaccggccagnggccccgatatgtccacgctctgcatgataaatatggccccgtggtacgaattggacccgacgaagtcgatgtttccgatattagcggtgcacgcgaaatccatcgcattggaagtggtttcctcaaatccccttggtattccctcttgaaccg

SEQ ID NO: 3472 - DNA, 483 bp, Aspergillus oryzae
tttcattgagacggccaaggaggacgatgacgaagaggagctcctgtttcgcgttattgcctacaaccgaggcccctgagccggctcccttgcacatcattccccatgtgtggttccggaacacctggtcctggggctacgaagatcaatctcataagccttccatcgaaaaggtcgcccccctgacagccaaatcctaccacaaaaaattaggtgaaagatatgtacggttctccccctccccagcagcgggaagcaaccaggaggatgtcctgccaaagatgctgttcacggaaaacgagacgaacaacgagctgctttggaagtctgagaacgatcagccgtacgtgaaggatgcattccatcgctacatcgtcaacaacgaaagagacgcgatcaaccctgagaacaagggtaccaagtttgctgcctggtacgccttcaatgagggtgagggaattcccccaggcgagtgtgctgttg

SEQ ID NO: 3473 - DNA, 570 bp, Aspergillus oryzae
gttgaaacaggcgaaagccgaagcgaaaaagtctggggttaaagcaagaaagactgccaaagaggagcagcaggatacggacaggaaagcttcactgatggctatggatgctggtatcagttctggtgacccacaccaagcgcacactctcgctcaggtcttgcatcatgatggctcagaggatcatactgcgccagggaaacgaagaagactgaacccctttgaccccgccaaggaggccgcaggagccgtcggtcatggtgtgggcaagctaggaaagtccgtccttgaaggctttaagaaggttgaaggtggaatagatggaaagttggctcgatctggtggttttgtaccagacgcctcgattactcatcgggacggctcgcgctcactagattaccctcgatctgagtcagatagcgtggatgttgcagactgttcgcaagcgcgcacaaatggcacaacttcgggcgttccagacgcggctggatccaaatctaaacggcctttctggaagagtacaggatcaagcaattctaaactgagccacaggagcgagcctgacgagtt

SEQ ID NO: 3474 - DNA, 504 bp, Aspergillus oryzae
ttttttttcttcattcaaaagaacacatccatttgcagtcttgtcgtacaagactttagtgctcaaaagtaagtccagaaggtcttcaacttcttcatgtggaacattattgagatcaatgtaactcgcaatttccgaagctattttcgctgaaacgccgatgttccccagcaacagctttacgagagtaagatgaccattcagagcagccactccaactgtgctcagccccaattctgtgcaagcgttagccccttgtgagagaagtctctcaacaacattctgcattcccattccacaggccaagtagatgggcggctcaaaggagaaaagacctctatcccatgagctcattgaaaagttatctcgagccacacgccgccagtttaagtagactatgcgctcttcaaacaggcgatgtatctttttctctaggtcccagaatttggcatcagagtcagtaagctctgaaaaatgtcggctccaatgtgctgcggcatactt

SEQ ID NO: 3475 - DNA, 387 bp, Aspergillus oryzae
cggacgcgtgggtctcacgcacgcgcttgagactgtcgagaagagctgggaagactaggggaccctacatgtgatattggttatttctcttaattgttttctattcccttgtctcggtatgatttatctgtgggcttttatgacgaaacaaatattgtctgctcatgtcaaaaggtgacagcatactgccaatggtggcggacacgccgttggcatgacttgtccttggaggattcacacgccgtttgatgacatgcacagcgcggggtttgggcgcctggtacatattctccctttggtctctttttgtggataatcgcatgtttcagttgcgaggtgcataatgcattagcttaggatgttttctgcctcaattttgccttgctg

SEQ ID NO: 3476 - DNA, 97 bp, Aspergillus oryzae
agctttgtttattgtatgtacatacatagacttatgagggcatcctcccctgtatatgcgttagtggatagtagtatatcattgtttctcaacccac

SEQ ID NO: 3477 - DNA, 307 bp, Aspergillus oryzae
ccaagacaatcctgtctttgcttcaaatactacgctgtttccttttcttgatatatgtacctcgtgcaagcgggacttctacgatctaggtacatgtatctccgaaggagcttcacgtgtctgaaagcataccggtaacatggctacacctacgaacgacctaaacgcgcggactccgacaggttcaaatggacctccacccatgagaattcgtcgccccaaggcagcagatcctttagtacgaccgaaaaaaaaacttgcagccaaaccaggtatttctgtctccggaaatggaccagccttaaaa

SEQ ID NO: 3478 - DNA, 456 bp, Aspergillus oryzae
accatgcgcaagtatccccacgcggaatggttctggtgggtggacctaaatacgtggatcgtagagtcatcctattccctgcaagaccacattttcaaccgtctgggcgacatctcgtaccgggatatcaatgtctacaatccgttgaacatcagccacccgccgacgggggcgtatcttgatgacgtttcacgctcaccggtgggcgatggagacccatcatcgatccagatggtgctgtcgcaagactgcagtggtttcagcttgggttccttcttcatgcgacgatcagtgtggtcggagcgtctactagacatctggtgggatcccgtcatgtatgaacagaaacatatggagtgggagcacaaggaacaggatgccctggaatacttgtataccaatgagccgtggatccgcagccacgttggattcctacctcagcggtatatgaattcg

SEQ ID NO: 3479 - DNA, 576 bp, Aspergillus oryzae
  modified_base (469)..(469): n is a, c, g, or t
cggacgcgtgggttggtcgaggctctgcgcaaaaaccgatctctgaagtatcttgatatctcgaaagcatccctgccgtacgatgcagggccggaaacgtgcagagcactgcagttaatgttcgaagagaacgagacgttggaagatttggatatcagtggagagagtgcccacctagatgtagcgagatttggcattggtctcaatctggcgctgactggtctcaaaaagaacaagtccttgaaagtgctaagaattgagcaccaaaaactcgggctacagggcgcgagtacactggcttccgtactggaggagaatgactgtcttcgtgaggtctattgtgaaaacaacgacatcaatttacagtcgttcaccgttctagttaacggcctgcagcggaacaagtctctgttgagtctatcatacatggaccgcgataggatccagtcacttgacaaggtgcgccganagatcgaaagcgtcaaacgtgatatgggcgtcgcgcaaggttccactacgagcacgatccgtcgatcactaaacgcggcaaaacatgcgacagtgggacataaatca

SEQ ID NO: 3480 - DNA, 595 bp, Aspergillus oryzae
tcgacccacgcgtccggtcgaactattccagatatatctgtggtccatattatatttatacgtaaatttctcaccgccacccatgactcaaggcaacttttcttttaaccatcgacgctctcattccggttcgtatgccccgaagctgagaacagcccggccggcactacatcggaagggcacatcctttgtgaatcactccatctcgaagctgggtgcaggacacaccaggcacagtgaatcagataacgattgtcaatccgagatggcggccagttttctcaatttttgtgccatgtgcgagagacagattaccataccggacaattctcgcctttattgcagtgaaagttgccgtcgcaaggactcccacaaaccactctcagcttccttctcatcgaatcacaccatgccatcttccaccactcccccatcttctcctcctatgtctccccgaaccattgtaccacctatgactcccaccaaagctcctatcacatcgactcaggccatccggatactgggtgagttccatgactccaagacggatcaggacccgtccgaatggaagccggtaatacccatggataccggt

SEQ ID NO: 3481 - DNA, 582 bp, Aspergillus oryzae
cacgcgtccggagctccagtgctgacgctaaagcctctccatttgtgatcgccatcaagaatgctggtatctccgtgctagactctatcatgaacgtcgttatcatgattgcggtcttatccgtgggtaactcgtcagtttatggctcctctcgtacccttgcagcccttgccgagcagggacaggcccccaaattcctgtcatatattgatcgcaagggtcgccctctctgggcaattctaattgcttctgccctcggtttgcttagtttcttggccgcatcagacaaacaagaagtggctttcgagtggatgatggccatatccggtctctcgtccatcttcacttggggttcggtttgtttggcgcacattcgcttccgtcgtggctggaaggctcagggccacagtctcaatgaactcgccttccaatcacaaccgggagtgatcggctcttggatcgggttcttgttcaactgtctcgttcttgtcgcacagttctgggttggatttgcgccaatcggttatgcgacgaagaccgctggtgagcttgttgaggcctggttttccgtatacctagctg

SEQ ID NO: 3482 - DNA, 275 bp, Aspergillus oryzae
acccacgcgtccgcgcgctgctacaaccacagattaagctatagtgctcttcagaagcctttcctagtctatcctagagctcaattctctgcgtcagcatctaattgttttactactacaacattccgaaacgtgtctgaagcgatcaagatggaggccaaggcacgcaatgagaacttcaagctggagaacctctttaatgttaagggcaaagttgcccttattacaggaggaggctcgggtatcgggttgatggccactcaagctctggccgt

SEQ ID NO: 3483 - DNA, 282 bp, Aspergillus oryzae
cgcaaatctgcttaattatcggccggttagtgtttagatactgactttatgaccaccgttgctcccgttgccgtcatcccgaccccgtactgtcctccataacctgcttggagcatttcctctcgtttcctgtttttattctgcatcttgtacactatctctctcttttccttcccctcatcctccactcgttaccactcgtctccttcatcccacctttggtgccgtgctggatgatcgagatgcttatgcttttctagtgcggtacctaatctattttaa

SEQ ID NO: 3484 - DNA, 470 bp, Aspergillus oryzae
cgctcctgcagtatataagtctgaagcaaaagtcttctgtgccttgctatactttttagctattcaactccgtacaaacaacctcagaaatcttgtgtttgaccgtatccccaaactttccccgcaccatctccatcttggaaggcgaagaaacgaccgtacacggaagtcggctttttttgatcttcctcgcatcatatttataatcaggcaggggatattagctcggaccatggacaggcttcttcgtccagtatcacggcaattgctcagatccagaccccgttatccatttacaatcccaccaccagtttacgctaagagactatacagtatgggccatacggtgccgccgctgaaagatcaatctctcttcattgagaaggcatatgtcaatggggaatgggtaggtgcccagtcaggggaaacatttgaagttcacgatcctgcttcaggaaagctcattggaa

SEQ ID NO: 3485 - DNA, 389 bp, Aspergillus oryzae
  modified_base (248)..(248): n is a, c, g, or t
aactaggcttagcagattacaacattacatcacaatcttcaacatgtccgaacaacatgggtcccggacagccccatcctatcccatcccgtctcgtcgcatcgtcactgtcgagcatccggcgattatcaagaatgtcgataaagccatcgacacactccggggtaacacggggatctccaagatcctaaaccccccaaaagccgatttcccggctaatctctacctccgaccagaggatccaatgncaagacctatccaatcaaccagcttgccatccaacaacatcctcctgaaggtgaccgtgcctagacggaccggtcgtaagcgtaagcgaggatcagatgagccgttcacgggtgtccctgtctcgacacttggccctgagt

SEQ ID NO: 3486 - DNA, 366 bp, Aspergillus oryzae
gtgcagatcagctcgatggcggcattgataccacaagcgatactttgatgttcacaatctggtccctttctcgccctgaacactggggattccaacagaaactcatcgacgaagttcggagtatatcggagcacgatctaaatccagaagggatcccccgagtagaagcagctgacaaactgccctatgtcgaggcagttatcaaagaaacgctcaggctcttcgcacctctgccagcatctgaaccaagatcctcgcctgaagcaacaacaatagacggttatctgatccccgcccgtaccgtggtttcaatttcaccatatactttgcaccgaaacgcagaggtgttcaagaacccgctggaat

SEQ ID NO: 3487 - DNA, 378 bp, Aspergillus oryzae
cggacgcgtggggtcgacaactcactcctgcttatcggactagtccacacggagcaactacgccgttgccacacttactccaccgcgtgtctagactcgactcagcccacatagccgatgcgaggaattcaggcactaaattggagcccgtcaggtgcaaaatttcgtccgcctatgggattggacatggccctcagatcggctgtctcttccgcagctgtcactggctgattcaacggttgctcggaaagggtctgcgtgtctcgaaaatgcgaacaccgaacgatgaagctcatgacaaatacaatgtgatggactcctctggggcataatacagtagaaacagccgcgtcttttgagccccaaagataggcgcct

SEQ ID NO: 3488 - DNA, 513 bp, Aspergillus oryzae
caggctcttaaatgcttcgaggagtcttcaaaggccttcgggggtcgaaatgtgatggcgattcttggtcgcgcaaggacacagtacatgcttggaagatatgcagaggcactggagggttatcagaaagttttgatgaagatgcctggtttaacagaccctgatcctcgcattggtattggatgttgcctgtggcacctaggctttaaagaccaggcgaaagctgcgtgggagcgagctctggcattgaaccctgactccaaagttgccaatattctactcgccgtctactacctctacgatagttcccgacacgccacgacggatcctgcgtttggctccttgtataaggtggctatgacccagtacacacaaaaagctttcaagttggataaagaataccccatgactggcgctttgtttggggggtatttccttttgaggaagtcatactctacggtcgaaactttagcacgcagagcgatcgagcacacggacgtgatgcaaatagac

SEQ ID NO: 3489 - DNA, 457 bp, Aspergillus oryzae
ctcttctctcaaccttctcccctcttacctatattttattgtgtctttcttttaacatggctaccacaaatgattttcccgctagcgatgtcaacagctatgactatatcatcgttggaggtggcacggcaggctgtgtcattgccagccgtctggcgcagtacttgcccaacaagcgtgtccttgtcatcgagggtggccccagcgacttcaacgatgaccgggttctcaatttgagagagtggctcaatttactgggaggagaattggactacgactatcccactaccgagcagcccatgggcaacagccatatccgtcattcgcgcgctaaggtcctgggcggttgctccagccacaataccctcatctctttccgtccttttgaatatgactgccagaggtgggaacagcaaggttgcaagggctggtcctttgagaccttcacccgcgtttt

SEQ ID NO: 3490 - DNA, 510 bp, Aspergillus oryzae
acgagagtcaactttctccttcgactatgtacccccacgtcagttcggtcgcccacaatacacctacgccacggtcgtcattcgatatagccatgtcggatggccccagggaggccgcccgcagaaactatatggatacctcgttggttccaaatgcacagcggatggcaaccgagctttttgctcagatacaagaaaaccctcagtcgtacgacgcgcatgtaaacttcgttcgactactccatgcgggattcgtcaaccatgtatacccaccgaacaaccccgacattcatggcgaccctcggaaatatgacctgctcaaggatatgcggaccgctcgcgaagagatggacaagctctttgccatgggtgaagacctctgggcagagtggatacaagatgagagcatgctcgcacaaaccgtggatgagcgcatcgtagttatggagctttgccagcggtcggtggaggaagagtacggcagtacgaagctttggagcatctacgggg

SEQ ID NO: 3491 - DNA, 247 bp, Aspergillus oryzae
cggacgcgtgggcggacgcgtgggcggacgcgtgggatatgtggcacctgcatgaaagacttggtgacatatcatgtttgctctatacctattttcctcatcttctacctctctcccccctctttcggtattcaatggtcttgggatttggtgttctttctttctcatgtttgctatcgggctggttcataaatagtgcccttgtataattgagacacgcactcctttggtgttgggagtacgatag

SEQ ID NO: 3492 - DNA, 521 bp, Aspergillus oryzae
ctgatagatcagacgtcaccaaagtcagccatttgtttttaactcctcatcccgcaaatcctgctatagactactcctctttcctttaaaccccacagcctatcatctcctattgtcaaaaaccccacccattcaacatcatgcagaaggctgcacagcagtcttgggagctcgaaaatgccatcagcctcatagatccccaacgagacgccctctaccagtacgatcaagaaacacacaaagccctcagcgcggagcgcccatgggccaaagacccccactatttcaaatcgataaggatctccgctgtcgcgctactgaagatggtgatgcacgcacgctcaggcggatctctcgaagtcatgggcctaatgcaaggctacatcctgccagaaacctttgtcgtaaccgatgcatttcgcctcccagtcgaaggaacagagactcgagtgaacgcccaagacgaagcaaacgaatacatggtgtcttatctccaggcatgtcgggatgcgggacggatg

SEQ ID NO: 3493 - DNA, 515 bp, Aspergillus oryzae
gtcccgaacaacttcaccaactttggcctcagctttgcaccttctcctccgcaaagcaacatgaagtcggaaacaacgcagcgtcatgttctaacggttcaccctacatccctcaagtcgcgcgtggagacacagatccccatcaggttaactctattccctctgccttccggcgtgaagaaaatacgtttgccaagtcacaccatctccaagccaaaattccttgccccagcgtcggccgaccgcgccccggacaccgtagagctgcacacaagtcttgtttgtacgagtgcaatgcaggatcaggaaaagttgaagaaggcatttgcacgagcaagaggagaaccgcgctaccgttcctccagctcgagtcctcatcctgtcgatgacgtacaggaagatgataaacctttggacggaggagaggtaaagatttgctctggatgcatacagcgggagcggaagcgagcttttcgtaaaaagcagaggaaaccagaagaggatgagctcttcca

SEQ ID NO: 3494 - DNA, 518 bp, Aspergillus oryzae
ctttctctccttctctccctacgattaattcctcctttcgtttggtccctttcctcaatccctttacccatttttaatcgtcctgtggtgattccccttactttcgttttctgtggtcctttttcataatccgttgttttaatcgtcgcgaaatcgccctggcttcggtcgtgatattgcgtcctttcgtcccgtggtaggcagcgtcaatcgcgcctccagtcgttgtcctggagtttcgtctccctttcctcaatccctttacccatttttaatcgtcctgtggtgattccccttactttcgttttctgtggtcctttttcataatccgttgttttaatcgtcgcgaaatcgccctggcttcggtcgtgatattgcgtccttccttccatttttgatcgctaattatggctcctccgccgcgcttgcgcattttatcagtcggcagcaatgccatctcggccttcctctcgtggagacttcaggcgacgacctcctgcgacgtgacactagtatgg

SEQ ID NO: 3495 - DNA, 514 bp, Aspergillus oryzae
gaatccccctctaccaaaatgtcgtcccaagcccctcaccccaccttgttgattcccggacccatcgaattcgatgatgctgtcctccagtctatggcccactatgccgagagccacgttgctcctggctttgtcaagaccttcggagagacattgaccttggtgcgcaagctcttccagtccaccaaccccgccgcccagcccttcgtcatctccggtagcggtacccttggctgggatgtcgtcgcctccagcttggtcgagaagggagagaatgccctcgtcctgcacaccggctacttcgccgattccttcgccacatgcttgcaaacctacggtgcgaacgcaacacagctcaaggcacccatcggagagcgcccctcgttcgaggagattgagcaggccctgaaggagaagccctacaagatcatcaccatcacccacgtcgacacctcgaccggtgtgctcagtgacatcaagcgcatcgccgagatcgtccgccgcgtcagcccca

SEQ ID NO: 3496 - DNA, 501 bp, Aspergillus oryzae
ggagtttctaaccagatttcatgggtctgcattggagtggcatctctccgtttcagatctgctattcgccaccaaggccttgaacatctcctcccttacaagaactggacatacccagtcgggcctatcatcgccatctgcctcaacagtgttctcatcctcgtgcaaggctggaaatgcttcagtccacacttcaagggcgtcgactttgtttcctactacattgaaatccctgtcatgattgtgatgttcctggcctggaaattgttcaaacggacacggtttgttcatcgcggcgagatggacctgatcacggatcggtacaatcttatccacagcactggagtcgacgtgaatgactcaaacgaaggctcatcaaatatccacgacgataatgcacctcaagcagatgggtctagcaagaagaaattcttctcgtgggacccagaggacaagagcgtcctggggaggattaagcaggttggaatgtggttgttcttg

SEQ ID NO: 3497 - DNA, 346 bp, Aspergillus oryzae
gaggttttcactgcagccaactattactttgtcgtccctctgttcgccccaattatcggctgcattgtgggagctgcaacctatgactccctcctctacgagggggagggctctcatattacggatgctctcgacaaagtaggagatcgggatggatctctccgattggattgagtaagctacgtgaccggcgaccgatgtctggtgaacatagcgatgaaggaatgacgtgttatttaacggggcttggaagattttgagaaacaggtatcgatcgggtatcttccttagaatttgacgtgatgttttgtatggatattactgcactagaagttgcttgactttt

SEQ ID NO: 3498 - DNA, 434 bp, Aspergillus oryzae
cccacgcgtccggtcacactacgaagtctcatgctacggcaatgtcactatcggcgatgataaagatcattggttggttgaggtggttgatgatgttgcatcgaaggatagaagtaaaatccgtacacttaccactgcgttccgcctgcgacatcctgtcctgggttgttatttacgagcaggcaacgtcaatctcccccagtggggcttcaaacagattgaaaccacatgcgtgaaggagaacaaaccgagcgatgtttacacacattggaatgtcgagtctcatttcaatgaccggctcccacctggtgatccaggatcctacaagtcgcctttcttgaaagactttattcatttgaatgttgccatgatgacgtccaacaatgcgttggttcctgacccagataaacaagatgatctcgcctcgaaatttt

SEQ ID NO: 3499 - DNA, 402 bp, Aspergillus oryzae
cctggtatatacgatcatagaacttgtgttgccgttagacacatacagctacaatggataaacagcaatatgaatgcgaagatcggataccgcttccagaattgggacaacatgcacattcgcatcacgtgaatgacaatcgagacttagcacgtgttggcaagttgcctagtttacagcggagatttggattcctgtcaatcttgggattcagttgtactgtcctggcaacttgggaaggtgttctctcgacatttgtccttccattgaagaatgggggatcggcaggtgcggtttatacctacctctttgtgtggttcagcacgctgtgcacccttgctacactatccgagctggtgtctatggcaccgacctctggcggtcagtatcattgggtcgcaa

SEQ ID NO: 3500 - DNA, 364 bp, Aspergillus oryzae
ctgaggattctttacacatatcaaaggtgactttgtaccagattgtcgacttgtatctccagttgtgccacaatgatggaattgatgaacctgaaccgctttatctcactctcaacacaaaactgactatatctgcggaagtatctgaccttctcctagctgccagcgaaggaaaagggttgtctgaaatccattcatgggatggctatcaagaagtggaagcagcttcagcagagatatttgaaggagacgaccgggaagcgagccccggcgaggaacagcaagacatctctggccaacaaaaacgtcacccctctgagacgcaggaagtccatggaaacgagtcacatgtccacgagcagca

SEQ ID NO: 3501 - DNA, 416 bp, Aspergillus oryzae
caagagcatggacgacctcgagaaggaactgagcctgccctcatcccagctcctggccatgttcctcaagatcatccgtaagatgtcaacccacttccgctctgtcatcgagggcgccgtcgccgagactatgccatctgagcaagtccccgtgacccaggcttctaccgatgcgcacgacgacgtggtcgccgacgagcgcttcaagcccctggagaccggtctggatgaggagctccgtgagggaggacagcaggtggacgcggagttgcgcgagaagcagcgggccttgattgacgctcttcctctcgacaaatacgagatcaacaacggtagtgctgcgtgggaggatgctgagaagcagatccgggctggaggcgcctcgacggttagcattaagtcgtccaagcccagca

SEQ ID NO: 3502 - DNA, 454 bp, Aspergillus oryzae
ctagccacacattgtcatacacccctcatcatgcggatattggaagtgggcattcttgccatgtcaatcttatgcttcgtcgacgctcatggaaacttatccaacgccgacctagaggcgcttcttcaccccgacggtgataccaacattcaaacgatccttgcgcctctcctccggcctcgagttccaggaacacccggctcagagttagtacgaaactatatcatccaatttttcaactcagctcttccactgtggacgacagagctgcaggtatcgtcatccaagacccccgtctccggaagccaaaggatcccattcgtgaatatcattgcctatcgtagtcctccaggattaaatgaaaccgacgttggttggctcacactagtcgcacactacgacagcttgaaagacccggaaggattcatcgggcgcaatcgatagcgcagctccg

SEQ ID NO: 3503 - DNA, 481 bp, Aspergillus oryzae
caataaacagcaagaaatacaatatggaagatccagtatccgaaatccccacggtaatccaacacctcacgcaatcacccccggcgcagcaagcccaaaccatcgacaagtacttcactccagatgcttccttcgttcatccattctgccggatccagcatttccgaggcagccgctgggtcgtgaagaagatctaccaatggtataaagtgatgtcgccgcgcattgagttgaagattcattctgttgcatatgattcggacaaccaaaagctctacgtgaccatgtcgcaaatcttcacaatctggattgttccgtttcatgttgcgcctgtgacgcttacgacggtgttatcgctgactactaatccacatggatacttatcttcttccgactcatcaactgcggcctctgaaaaagcacacgaaccaaaggaagaagaggaagcaagctacgccgatgtcgtggccaacggcaaccc

SEQ ID NO: 3504 - DNA, 474 bp, Aspergillus oryzae
cggacgcgtgggttctgtcaaggccatgtcccccttggtacaggcacggccagaaggtatcgatggacgactgtcagtcgcgggaacacctgctcgcccctcacgtcgggccttggatcaagccccagctgtcggtgaacttggacctcccttgtatcccaccgtctcgcaaacttcctctcctctgcatgaaatgctctcccggtcaactttcagacagaagcatgtgctctctgtcggccagttcactcgtgccgacctacacttgctcttcactgtggctcaagagatgcgtcttggggttcaacgccagggcgtcctcgatgttctgaagggccgtgtcctttgtaccctcttttatgagccttcgaccagaacgtcggcttcatttgacgctgctatgcagcgtctgggaggacgtaccattgccatctctacggaacattcttcgacaaagaagggtgagaccttgca

SEQ ID NO: 3505 - DNA, 316 bp, Aspergillus oryzae
aaggacactgctacaaagcttttcaatgcgtacttgagttctgtacatccatcgtttcctataatacggaatttcgacatttgcgtcacaattccaagctttcttccataacccgtctctgaagccagggaacaagtggcttgccattttgaaccttatttttgctattggtgcaagatatgcccatttgaccaatgcagaatggagaagagacagggatgatcactattcatacttcataagagcaagaaacatgagtctcgagggccaactgctacaccattctgatctacaacagttacaggttgaaggattg

SEQ ID NO: 3506 - DNA, 480 bp, Aspergillus oryzae
atcttctctttttccttactttctctcttctccccggtgtcgtcatcattatccttctttgtgtgtgtatactgggtgtctgactgttttgccttttgtcttttgtcttcattttagactctcccaagaactccttacatgttacatccatatctcggctacggcacacgactaatcagtccttttcctcgatagcagatctcacccttcgttcactgagatctctggcgcgtccctcccccacacttatcttggtcctattttaattccagcgtccctcatccctcccgacgctgtctccgaacgccccgaatcggcttctttcgttacacatcccgtctccacggcttctcacatccccgccggttctcattggcaagcgcctgctccggctgagtcaacctaggctgaaacctcccccctcgccattgacccttcatttccggtcagggacacaagccctatcagtacctgcaaagc

SEQ ID NO: 3507 - DNA, 437 bp, Aspergillus oryzae
cggacgcgtgggcggacgcgtgggctaaaatcatcctgacactacatcattacaacaatacaactaacatccatcctgccatctaatatcaaacaaaccacacacaatgtctggcatgctacacaaggttaaggaggctgtcactggccatcacgactcgacctccgacaccacccataccaacaccaccaacaacgccaactacgctgagaaccctaaatcctccaaccacggccctcacggctcggcaattgcgaacaagctcgacccccgtgtcgacagcgaccgtggtaagtcaccttaggcacctgagcctgggtcactcaacatggaatactgaacacttatagacaaccgcgctggtcatcacaccaccaccactaccggccctggtggcacgactaccacccactccagcacccatggtcctcagcaag

SEQ ID NO: 3508 - DNA, 540 bp, Aspergillus oryzae
agagaatccatactctctctcaataaacatccgctgttcaggaagaccaacacaaagcaatggcttctacttacggggacttccgtcacttgctacctagcaattacaaacgcctgattacttcctggctcgaagaggactgtcccagttttgactatggcggtttcgtcgtcggggagtcagatggtgaggcaaggttgttggggaaagctaagggagtcgttgcaggtgtccctttcgtcgatgaagttttcgctcagttaggatgcacagtggaatggcacgtccaagaaggcgagcccattgaacctatcaaacattgcgccacagtgcgcgggcctatccgcaagatcctcctcggagaacgtgtcgccctcaatatcctcgcccggtgttccggtatcgcaacaaaaagcgcctcgctagtagctgctctccgtgcccacggatggagtggaacgcttgctggcacccgtaaaaccacgcctggattccgcgtggtcgagaagtatggaattcttattggaggcgccgatccac

SEQ ID NO: 3509 - DNA, 409 bp, Aspergillus oryzae
cgcaagatccgtctgggtatcgagcagggagatggtatctccaacatggtcaaggtgtctgagggccttcaggccttcaagaacgccggcttcgaggtccttcacaatgaagatttggctgaccgtcccgacgctatcccttggtattaccctcttgctgggtcattcaagcacatgacctcgccttgggatttcttcacgatcgcccgcatgacatggtggggacgtggcatcgctcatcgcttcgtcggtgctttggaaactattggactcgcccccaagggcacccagaagaccgccgacagcttggcgttggcaggagactgcctcgtggcgggtggtgagaagaagcttttcacccccatgtacctgatggttggacgcagcccgagtaaatgcttcttagaat

SEQ ID NO: 3510 - DNA, 560 bp, Aspergillus oryzae
cccacgcgtccgctcttgtaacagcatcttttcctaatacttcatgctaatcttaatcagactccctacttctacttcttgctcaatgtactgaaatgtctttgctaatcaaccctcgcctgttgaccaggactggcaagcaatcgctgttcgcagtgcccgctcgcagcatcgctttgccaagtagcccagacgttattgataaatcaaacttcaaagtttctcagagcatagctaagatatcaccgctctcaacggaacgggaccaacagcctgcatcatgtaccaaaaattgggccgagcgcctggacggtatcaacgctaaatcccggctgccacgaagcgtgcaagcggtgtatttgcggcctctccgacggaaagccgaatatggattgccggtttgcgaccttcaacttcgatcgtatagcgttcgaaatgtggagttcttcgctgatttcgctgtgcgtgctgcctattacttaaaacttcctgtctccgggcctgtgcctctaccacgcatcgttgaacgttggacattccctcgaagcaatttcgtgcac

SEQ ID NO: 3511 - DNA, 397 bp, Aspergillus oryzae
gtgagggtatcctgcttggtggtgacatcaagaaccccgctctggccaagattgttgaataccttcagccattgggctacaagttcttcgccgctagcgcctctgttaaggatcacattgagtccactgccaaggaaagtgttttcgagcaggtgattgagttccccaagaaagacaagcgtgcactgcgcgaggtcttcgagaagtataacatccgcggtacctttaaccttgctaagacccggggcaagaccctgctggatgaggactacgtcatgagacgtaacgccgtcgacttcggtgttcctctgttcatggagaccaagactgctctcctctttgcccaggccatgagcgagaagctgccccgtgccgagggtatgccttctgaggtccg

SEQ ID NO: 3512 - DNA, 528 bp, Aspergillus oryzae
cccacgcgtccggctgctgaaagaacaagatcttcatgctctctctttcggcccctttcatccctgagttcttcaaggaccagttggacagtgtgctgccctacactgactacaccttctgtaatgagactgaggctcgtgcttactccaagagccaccaatgggatacggatgatgtcgttgagatcgccaagaaattggctcagctgcccaagaagaacaacagccgcccaagagttgccattgtgactcagggtactctccctactgtagctgctaccgttaagcccaacggcgaagttgaggttaaggagttcagcgttgttgagatccctaaggacagcatcaacgacaccaacggtgccggtgatgccttcgctggtggtttctgtgctggtgttgtgcaaggcaagtctcttgaagagagcatggacatgggccagtggctcgccagccttagcatccaagagttggggccttctttccccttccctaagaaggcttacactcccaccaaccggtcgtaaa

SEQ ID NO: 3513 - DNA, 56 bp, Aspergillus oryzae
gtaaatagatcgcccaggacgaactctgaacttgaaaatacattgacgatttcggt

SEQ ID NO: 3514 - DNA, 542 bp, Aspergillus oryzae
cggaagggaatttgaattggacttggtaatattgcttttctctgttatatgaatttggcctgcggagcattgaccttcgatttcagttcatggattaactgatttggcctcctggcaacatatcgaagctgtatactattggttattcttgcaaaggatcaacattccttaagtgaacgttcctctttgaagttggaagctgcgcaggtctcccccagtgccatactgcagttcactcattgacctgattggctttataatctactcattttctcccaatatcgagcctttattatggcagcaagatcttttgtgctggcgcctcttcgcgcgtctcgacagtgtcctcgctttttcaatggcattgcacctccgtcaatcggaaacgctgctgccgtgcgggaaggatggtcggcctttcggatggagtttcgcggttcttcaatcttcacattagctggtccgtcgaactcattacgaagcaaatccctgaacaacaacggctgcacgactctgcgcttgacgtctcattggcgccaaag

SEQ ID NO: 3515 - DNA, 373 bp, Aspergillus oryzae
cacttgcatccccacccaccatcggcttgacctgtgtctcgaacatggcgtctacaagcaatggaaataccccaaacttgccggaggaggtgagcaaacctccggaaggtgttgttctgccacccaaagatattcgagcgatcgtggagaagaccgcaggttatgttgcaaggaacggtatcgtcttcgaagacgcgtacgcgagaaggaacgcaataacccgaaattctcattcctcaacccaaacgatccttatgcgagcttttatcagtggcgacttacggaaatcaaggagggcaggggaacttctgtgtctgcagggcgaccgggcgagccagctgtagctcctgagccggagcaacctacaggtccc

SEQ ID NO: 3516 - DNA, 524 bp, Aspergillus oryzae
cccacgcgtccgcttccaggcaacgcttcttttcctctccccctctctctatctgctgctaccgccgcttgacctttcatctggtagacgactcctgtttctttcgtcttttctttcgtctcccctccttgaagagccttgcatttgtcaacagttccccctacaccgtccatcatgaaccctgagtgatacgactatctcttcaagctccttcttatcggagattccggtgttggaaaatcttgcttgctacttcggtttgcagacgacacctacacagagagctatatctccactattggtgttgattttaaaatccgaacaatcgaacttgatggcaagacagtgaagcttcagatttgggacactgcgggccaggagcggttccgcaccatcacgtcgtcttactatcgaggtgctcatggtatctgtgtcgtgtatgatgttactgatatggattccttcaacaatgtgaagcagtggctccaggagatcgatcgctatgccactgagggtgtcaacaa

SEQ ID NO: 3517 - DNA, 496 bp, Aspergillus oryzae
cccacgcgtccgcttctggagggaaagcctggcgactacagagcagaaggcatctttgctctggaacccttctttgatgcagccaaggaagcaggcatttatctgatcgcccgccccggttcgtacatcaatgccgaggtctcaggcggtggcttccctggatggttgcagagggtcaatggcactcttcgctcgtctgatgagccattccttaaagctactgataactatatcgccaatgccgctgctgccgtggcgaaggctcaaatcacgaatggagggccagtaattctctaccagcccgaaaacgaatacagcggtggctgctgcggtgtcaaataccccgatgcagactacatgcagtatgttatggatcaggcccggaaggctgacattgttgtacctttcatcagcaacgatgcctcaccttctgggcacaatgctcctggaagtggaacgggcgctgttgatatttatggtcacgatagctatcccc

SEQ ID NO: 3518 - DNA, 513 bp, Aspergillus oryzae
gccgtagaggatgtttatcagacatacgaggaatcacgacccgccgatggtaaagtcctagccagatggcgtccgcagagcacagctgtacagcaagcacaacccgaacaacaatctaccttggtgaaccgcacagttgaatcagagaacaacactcccgtcgcaaacggtgcttaggcaccaaatcccaaccaacgcgcgcagacagcaaccacagccacaaacatagtccaaaccatcaatacctcgtcccccggcatccctacaccccaaggcctgtcagactgctattgaaaataaaccgaagcgagcgagaattttgaccgtacttttattaggattgatagataatgtcatgtctagtttggacacagatccaattctgtctcgtatacacagactatatgtttgaacatacctacagcggaaatgcaatgcatctgctatggttccatccgtgtactgaatatcagtctagtataggttgcctagttctgtgtcgccttttgccat

SEQ ID NO: 3519 - DNA, 451 bp, Aspergillus oryzae
gggaacgtgagccctggcttacgtcgatttggactctgcaggaaggggtgctgttgaaccattcccgcctggtcgatcgtcacggagccaggcttcccgatgtgccaaaggacaagaggtttcattccgatgaggcaaccgtagtggacctggcgatcgtccccgccaaacttgccagagatatcgctatggcactgttcactggagaagggaatcccgaccctctcttcagagattttacctcggtgcgggaaaaccgtgtttacgctcaacaaattctgtgtgagatcattcgatctggtctgtttggttactatgacaaccctgtgccccttactatccttgcaggcaagggcagtcgccggtatgataaagctaccaatccagaccaatactgggcattgatcggcgccctggatctgaaagtggcgccaaactacaacttgacaat

SEQ ID NO: 3520 - DNA, 475 bp, Aspergillus oryzae
ttctgttcctcccctctacctagttttgtatcttcaagaactaccgctctgtggtcctggagacagccgggatatacgtcttgctggcttgaactccacaaaataccgcatcatggtcgcagatactacgtactacgatgccctgggggtgcctcccacggcaaccgaacttgaaatcaaaaaggcataccgcaaacttgccattgtcactcaccctgacaagaaccccggagatgagaccgcgcatgcgagatttcaggcgatcggagaagcctaccaagtccttagtgacgaagaactgcgaaagcgatatgataagtttggcaaggaggatgcagtccctggtggtggtttcgaggacccatcggagttcttcagcatgatctttggtggtaatgctttcgtcgaccttatcggtgaaatttctctcatgaaggacctcaccactaccatggatatcaccatgcaggagatg

SEQ ID NO: 3521 - DNA, 523 bp, Aspergillus oryzae
cccacgcgtccgtccttgtgttcataaatccctggatataattgccactctctttatttaccatattatctttttttggtgacactgaatttacgttctgcctaaaaatacccccaattcatccattttttttgccccccctcggattggcgaacatcccgtgacccaaacagctgccgatcatccaatctgacggtcggaagtgaactgaaagacggatcagatcctctgctacttctgcgttagcaaacaacttacttacgtattagctacaagtgtgattccaccccgattggaactgtcttggccgctcttttttccgatcctcctcccaatcaaccctcttcgccttctcctctcccaccatcttccctcgatcccacggtcttcccccgttcaataccgccaaagtgtcttccctcgcagttccccgtaccatttccttcccccgggggtggatactcaaccgcaacggttgagtccggattccagcatgtcccagaacaagggtggacggaggaga

SEQ ID NO: 3522 - DNA, 477 bp, Aspergillus oryzae
cccacgcgtccgcccacgcgtccgatttccacagacaccccctcttttgattttcgttcccctccttttctccttaagagaactaccctgaccgatgcaggccggtattccctggacgggtagcctttgctgattgagtcattccttactgtctcgtgaacctccgattttcaaccgggggacaaggtaggaaaagaaacaaaaaaaaatattaggagagggaagaaaaatataatcatacaacaaaaagaaagagaagagttgcgatacccaaaggaacgagacctgagaacgaagccgaagaagataccaatacctaatagtggacgtcactactgctgctcgaactaaggttgagaagcagttaccagcaaaccaaaaccgaaaccagttgaaacggggtacctgcttctgccatcccccacgccttttttggattcttcagagtaagtcaagtctatctcactcccctgttgg

SEQ ID NO: 3523 - DNA, 527 bp, Aspergillus oryzae
aaatacatgtgcccttagactttttgaaggtcatttgatgcattatggaacctagttccgaacgcgaccctgacgggcacgctcaggtccaccctgttgttcgcgaagctctccgcatttccctcagcgccaaggaatacaagatcctccacgaccatgctgttcggcgcgcccccgtgaaggttcaatccaaattgccctctccatcgagatatgaagcgatagtgcgctcaaaaaataaatacaatgaggcagctctccgcgcctctatccgagtcttccttgtctcaggcgctttatttaaattcgttgattgggcacttgcaagaatccgaggtgatttgtccaagaagaaagcacaaacttcttttctccgctcccccaacttccgcctgtcggcgtccctttcgctcgtccttcttttccacagacttctgcatcgcttcttcacccggctacgcgcgaacctccgcacagatgaagcccagcccttccgtaatcggaacccccgagtgtcaaaagcgttg

SEQ ID NO: 3524 - DNA, 464 bp, Aspergillus oryzae
gttgcattcattcagatgctcaaggctactactccggtcgctgtgttgttcgccacttggggaatgggcatggctcctgtaaactacaaggtgctcatgaacgtttccctgattgtcattggtgtcattattgcatctttcggtgagatcaagaacgttctcactggattcctcttccaaatcggtggtatcatcttcgaggccactcgtctggtcatggtgcagcgcctgcttagctccgccgagtacaaaatggaccctctggtctccctgtactacttcgctcccgtttgcgctgtgatgaacggtgtcactgccctgttcatggaggtcccttatgttaccatggaccatgtttaccgcgtgggcgtctggactctgttgctgaacgcggttgttgctttcctgctaaacgtttcggttgtcttcctgatcggaaagacctcctccctcgtcatgaccct

SEQ ID NO: 3525 - DNA, 389 bp, Aspergillus oryzae
  modified_base (162)..(162): n is a, c, g, or t
cccacgcgtccggcgagtctcgagtctttcgttcctcttatactctttgtccctgttagccgctgtctccggtcagagcgtagcggctacgggcggagatgtcgctacctctaaggatgccgcacctaccaagactgatgctaccacaacatccacatcgtnctacatcatcaacttcttcgacttcgtccgaatctacagaaagcacttcgacaactagtgagaccaagccaacgaccaccaaggctgaccccacaacaacatcggaatcagactcgacaacttccaccacagacccccctaaaaccacggccaaccagccgactaagacatcggcatcaaccactagcggacctacaactgatagcaacaaccaaaccacaccggac

SEQ ID NO: 3526 - DNA, 477 bp, Aspergillus oryzae
gacatgactcgctccggtattctaattaacttcggaattttatttttctgtcaaaccccctctataagcaagccccagatagagaatctcccgatataagcaattagttgcttataacgggggtttaccgttatttatttttgtttattaatttcttgtttattttttttttatcttaattccttgctttcaaacgtttgattctcccaggggaatgttatcttgaccgaacatgaaaaagggaaaaaaaaaaaacactcctcatccgttgccgatttatccagccgactctcatgatacccgacgaggcctcacgacgaacaatgagattgtcgacttacctcatcaacgcacccctggcccggaccaagagacgatcgcagcactggagcgacgatcgttttcccattgatttggaatactcttcgttagcgtcagttagcggacgattagtttcgtctcgctcggagtcgcttc

SEQ ID NO: 3527 - DNA, 480 bp, Aspergillus oryzae
agaaaacgcccacagtcccagctaacaatcacaatcactcaaaatgtccaattccaacccccctctaataacccacatctacaccgccgacccctcagcccacgtcttcaataacaaagtgtacatctacccctcccacgaccgcgaaacagacatccaattcaacgacaatggcgaccagtacgacatggtagactaccatgtcttttccatggactccatctccggccccgtaacagaccacggcgtcgtattaaccctttccgacgtcccctgggcaagcaaacagctctgggcacctgatgcggcaaccaaagacggcaaatactatctctacctgcctgcccgtgatcacgacggtatattccggatcggggtcgccgtggctgagaaaccggagggaccgttcacggcccagaagagttttatcgcggggagttatagtattgatcctgcgtcgttcgtggatgatgatggaaa

SEQ ID NO: 3528 - DNA, 445 bp, Aspergillus oryzae
ctaaattcatttaccactgggttagatatatacctagataaccttcaacatgcccaccgaactggaggagcttgtcgaattccttcatcatggaaacactcaaatcagacaaattgcctgcgaaaacctccttggtttctcaattgcccaaccgaacttgttcaaacgccatcagcttctgccagtgcgagatctgaagcttttagtgcgagattacactccaatcgcaaaaaatgccctgacaatgcttatcaacctctcggctgaccaagacgtattggccaatcttgcggatgacgatgcttttctcgagacccttttcacaaaagtgacgaacgtcaaggagccgaatgcggatgatgtgtcgatgcttttggccaacttggtcaagtcggagaaaatgaagaaactgctaaccataaaacgaagggtcccagagcaggtg

SEQ ID NO: 3529 - DNA, 516 bp, Aspergillus oryzae
aaaaaagacaagaacttcctgaatgatcgaccctctcagctgacatagcgccaacgacggaaccatcatcccggtgccgatttgtgccccaggcctaagaggagtcaacaaattcccacctcatcccacttcctcccgtccacccttccgatttgctctcctgctcctaccggtgtcaaacggccattgtcgtttccactttgctaattaagaccattcctcaatcgcttggcttggtcgtccctctttcttctgcacaatccttttataaattcatacccgtccccggaaaagcaatcaccacgtctctggtccctagctctcgattgatctggccagtacctttctttcgagtgatcgccccgttcttgtatcaattacgtaccgacacaatggtgcatgccgttccttcaccaccgccgaggtccacggcggtgtcaaaaacctcttatactcccaatggtgaccatcatgccattccggtgtcgtccacctcgcacccggataacccggtgc

SEQ ID NO: 3530 - DNA, 448 bp, Aspergillus oryzae
caccttctctgtccctttgatttccccacgccagactctttgtctgccgtgcctctagggtgagaagtcgttgtctactactacccttctgcctcgttcactcgtggtagagccgtccggattttttgttgggaggacaatcactccttttttttctcccctgaccatctccgagcggatcatcaattttcgccgcctccgttccgttgcgattcttgccggtgaatatgtcttactacgaacctcaaggttggcaggcgcccgctgcgcgccaggtatcttgggaacaacctgttcccccgtcgcgttcgggatcgagctctgtctctcaacgcgacgaagttcctgccttttcctctcagtttgacgaggtggatcgtgctatcgacaaccttgttaagagcggaaagttgtggtctgctccccggagggactcgatgcccatgat

SEQ ID NO: 3531 - DNA, 455 bp, Aspergillus oryzae
cccacgcgtccgggacggcgccgccacccgctgctcccaatgagatccagtctctgccgaagaagaaggttgatcaggagatgttgggtagcgaaggcaaggcggaatgttcgatatgcatggacccggtggaattaggcacggaggtcacggtactaccctgcaagcactggtttcactacaactgcatcgagatgtggctgagccaacacaatacgtgtcctcactgccggcgaggcatcaacattccggcaggacccgaaggaagcagcgataacccggtagtcattaacagtagtccggagacgtctccccgtcggccgagtggcgctgctcccgagcatagcggacagtcgccgccacggtggaacgggcctggtcccgagacgggaggacaagaacaggatcaaggacaatccagtcggaatgataatcaaggtggaggcttcgccggc

SEQ ID NO: 3532 - DNA, 483 bp, Aspergillus oryzae
cgcatcgggtgaaggcatgtcgaaaacactagcgacttactatcgcatcccgaggtcgcactatgtgtcccgcctactcgacatcatccagagggagaaagctgatatctggattccttgttcgtcgcgggcgagcgtcctggaagacgcaatggccaaacaggcaattgaaagccgaactgcgtgtaaatgtatccacctggacacggaattagtcaatcagtttagcgacacagaatccttcacgcagtatctagtcgaaaaggaattgcccgtggtagaaaactaccaagtgcagtcgcgcgactctatacacaagatcttgcatcggtcgccaagcaaggtctaccatatgcgccgaccagatcttgccgtgagcgacaacaaagtcgtcaccttgccgaagaggaccctaagcatgacttatacggaagtcagcgagatccaaatctcaaaagatcggccatgggtattgcagcagca

SEQ ID NO: 3533 - DNA, 172 bp, Aspergillus oryzae
cggacgcgtgggccgacaccagaagccgcggcctgaaatgaggatttattggttatagaagcggtgggcgtaattgtggccactatggcttttttggatctgtggagcgatattgatttcaaaagcgtgtttcacgtattaagtttttatcttgaattcatatgttttcttg

SEQ ID NO: 3534 - DNA, 444 bp, Aspergillus oryzae
ggaaagttccagagaactgggacaagtgggacccgtcccgattcacagggaactggcaaaccccccatttggtcattcataacgaactggattatcggttgaccatagccgagggacttgctgccttcaacgtcttgcagatgaggggcgtggacagtcaatttttgacgttccctgatgagaatcactgggtcctgaatccagagaattctctcatgtggcaccgcactatctttaacttcatcaacaagtacgttgggttgccgtcggaaagcagggcggatttagaaaatggcgtggctaatatgtctctataatggattgattattttaactcggcgcaactgcagcccgagctttgtgctaccgggtggcgctttcaaagttcaaggacgggatacataatgacctatatagttcaatgcacctttttgatcgcaattg

SEQ ID NO: 3535 - DNA, 541 bp, Aspergillus oryzae
gttctctgaatctagaattcactcgaatgtcgcagttgaccaaggatccaaagtatttcgacgcaatccaaaggatcaccgataagctggaatccgcacaatcacgcacacaagtacccggtctatggcctatgatggtcgatgcccatgatatgcagttcaccgatcctcggttcactgtcggtgggatggctgactccacttacgagtatctccccaaggaacatatattattgggggctcagacggatcaataccgaaaaatgtacgacgcggcgataaactctatcaagaagcggctgctattccggggcatgaccaaggatgggaaggacatcatgtttgcaggcaatatccgctctacttctaaaagtgtcatcgaaccccaatttgaacacctgaagtgctttctcggagggactgtaggcataggagctaaggtgtttgaccgccctgaggaattatcgatcgcgcggaaattgaccgacggctgtatctgggcttatgacattatgcccacagggatcatgcccgaggcctt

SEQ ID NO: 3536 - DNA, 512 bp, Aspergillus oryzae
ccgcactgttcaaccaagctcgtgggcaactgtacggccagtatccgttcgacttccccgttccagccgaccaactaccccaactcgaccgacagtttgtttacggctcctttggcggtctcgatccctccaccaatttcatgccatcggaaaatccgcccatatccaccgtaaacggctcagagccctccccagcaacagccccagacaactccgccatcttcccaggccaactagaccccaacgcccccgccggggtaggcgagtactatcaaccaagcgcctggttcctccccttcaacctagaccccgtcagcgcaggcgtcggcctcgacccaagccccgcacaagtccccggcagcggaaccccggatatgtccaccttcaatggcgggaacatgcccatgggcacatttgacatgggaatggcgagcgtgaatcgaggaccccagatgaacgaataacggagggtaccaacggcgcttgatattagacttaacggcggcattttt

SEQ ID NO: 3537 - DNA, 514 bp, Aspergillus oryzae
gtttttctttctatctttctgctttttgtgcccctgggggttgccattgacccatcatggttcgtcttttggcaacagttcttcgatcctctcgggctgctgtgccttcagctcgccctctctattcccgtggttactccgttgcgagcggtgccgccgaagatgctgcttccctcggaccgaccccaaaaaaagggcccccagggggtctacatgaacctatccgaaatttaatggatcccccagagccccaagctcgcaatacccagccctccacaccctcaatagggcgtcaaggcatcagaatccgaaccgggaagggggatgtctcggccatgcattatctgctacgcgacggctgcaaatgcccgcaatgtgtagaccagcactcgaagcaacgcaacttccgcatgtccgacatccccacggatatcaaaccacgctccacagagtgggacggcagcgtcctgaaagtgaaatgggagaacgacatccccggattcgacgagtcgca

SEQ ID NO: 3538 - DNA, 524 bp, Aspergillus oryzae
cacctctatactcttaatctggggttgacttcccttactcttaacatttttattcccccctatactatcagtctatagctcctcactcccctcttgatcctctcctccatatctctttctagtcctttacccctccaatatgtccgccaagtcgattctcgaggctgatggcaaggccatcctcaactaccacctcactcgtgcccccgtcatcaagccgactcctcttcctccttcctccactcacaaccctcccgctcgtctcgcctctctctacttccctgaagaccgtgccgtcaaggatgtcctcgaccaggccgaggtgacctacccgtggctgttggcctccggtgctaagttcgttgctaagcccgaccaattgatcaagaggcgtggcaagagcggtctcctcgctctgaacaagacctgggctgaggctagagaatggattgaggctcgcgccgctaaggacgtccaggttgagaccgtcactggcgttctccgtcagttcctggttgagcctt

SEQ ID NO: 3539 - DNA, 478 bp, Aspergillus oryzae
ggcacgccgcgaagccgacgtgatgaactacatcaccaagaacctgctgggaggtgttcctggtgggatgttgaccggagatgaggttatgaaggtgttccaggagtatgaagataacgagacgctggaagccaagtacgtacacgatatcgacaagatggagcttctcctgcagatggttgaatatgagcgtacccacgacctcgatctgtctgaattttgccacgtcgcgaaccgtgtccagctgccggaaatcaaggaatgggcggcgacagtgctccaggagcgggaggctttctggaagaagaaggccgccaatggagttcaagcataagagtgcgaatgattgatacggacgatattctttcggttgatattcctttcgggttatgtttaatggcgtcgatgccttacgagttacctttctttcggtttgcttttttctgcttctctaatattattattattatcatcatgc

SEQ ID NO: 3540 - DNA, 394 bp, Aspergillus oryzae
gctcaggcgttggagaggtcttggttgatgttttctcctcagcttgctgctgagctctctggatgatttcttcctgcttatgagggtccttggcgaggataggcaccagatccttggggactggcgtagcaagcttgaagttcttcgagaatttcatcagttcattgagtttgatcgtacgatcataggacgcctggttacggcggcgttcctgcattttctgtttctcgctgttggcgaattgacggaagtgatctagcacttccgcttccacgttggcggtagcattctccgtgccagtccgcttcggtacagcgctggtagctgatggaggcttcgccgaggcagacttgtccgcgtcaggagcggcgctggcagctgtagctgaaggggc

SEQ ID NO: 3541 - DNA, 484 bp, Aspergillus oryzae
gcgagctcacttagctagagcacaaaacatctacagaattatggtaagtaaacatgatggcttagaacgtgctgttctgtaatttatcatagagcattcctaccacttgctgatccagcttatatccacctagttaataatttcaaagacgaagcagagacaaaggcccttaggctccatccccgatgtgctttttcaaatcattatcaatggagatatcggtgtagtgttggcactatgcttggttaacaaggcaacctatgaagccattaaattgcttgaaccacacatttgccgatggttaatgcgcagccatggcatcagcacatttgaccctgtgctcactttgaacccgcggacgggtgaacagagaacactgacggtacacaatctttcgggtttcattgagcgccaggacattgcacacaagctggcgtgccagattgtcccctcagtatggggtcccttctcagacgaagaaagt

SEQ ID NO: 3542 - DNA, 465 bp, Aspergillus oryzae
caagttccacgttaacaacttacacactatgggcgaactgaatgctggattcagcggcaactgcttgaagggtggtcgtggtgttgtggtttttgatcgctcattcgacgaacaaggcccggtcatgagccagccaggcaactgaataccgtggactggtccgggagatgctgcggggtgtcttctccgtccccaagcgtggcgtcaagggaatgaagcctttcatcgaccgtatcattggggtgtttggcgtcgacggcaagatttggattcgcgtgtacgaaatcagagagtccgaagctggaggcaagaagaagtcagaggatggcgaggaagccgcgaagcctgtacccaagggcaaggacggtctaccagaggtttctcttgtcgaggtcggacctcgtttcgttttgacgccaattgtcatcctggaaggcagcttcggtggtcctgttatctacgaga

SEQ ID NO: 3543 - DNA, 506 bp, Aspergillus oryzae
tactgtcctcgatccaagccaattccatccactccgtcatggcagacgccgagcatttcactgatccattctgggcccccgagccagatgagatactttctggtggtgtcccttgttcttataatgcgcctactgccagtattgaaatgaccattggaggcttggggacaatagcggtgagatcgaagacaacagggcagttggagtttattgtccgctccgcaggaccggattccccaaccttaaagctcacggtcacagctgagagctgtgtcctacaaatgaaggataacgattcggagccattcagagatattcccgtgattgaataccgggccgagacgagaaaatcagaaggccccaagaaacttccttacgtttattatccgaaacaacctgagtcggcttacttgaacgtccgatccaagaaggatcctacagtctactggatctctgttgaccggagtaataagcgcttccgatacggtcaacatctcacaaatgcg

SEQ ID NO: 3544 - DNA, 535 bp, Aspergillus oryzae
aaacatttgatcgtttagcctgtgactcattcggcttttatttccatccaacttctagactttaccccactatctatagatatcgtcacaatgtgccctggtgcagacaacgagcccaatgggcacgcggcccctgccaatggcaatggcgaacaccccggcttcactggcatcgagactcgccagaaccctcacccctccgcctcccggaacccctatggccacaacgttggtgtgaccgactttctgagcaacgtctcccggttcaagatcattgagagtaccctccgtgagggtgaacagttcgccaatgctttctttgataccgaaaagaagattgaaatcgctaaggctctggatgatttcggtgtcgactacatcgaacttaccagtccttgtgcctctgagcagtcgagacttgactgcgaggctatctgcaagctcggcttgaaggccaagattcttactcacattcgatgccacatggatgatgcccgtgttgccgtcgagactggtgttgatggagttgacgtcg

SEQ ID NO: 3545 - DNA, 491 bp, Aspergillus oryzae
  modified_base (292)..(292): n is a, c, g, or t
  modified_base (339)..(339): n is a, c, g, or t
cagatccgaccgcgacgccgagagacgacttctccgcaaatgtgacctgcacgttgtccccatcctcactctcctattcatgttcgcttttctggaccgtatcaacatcggcaatgcacgactgatgggtctggaagatgacctgggcatgagtggacatcagtataatatcgcgctatttgtgttcttcattccgtatattctgtttgaggtgccgagtaatatgatcctgaagaaggtgaagccatcatggtggttgagtgggatcatgtttgcatggggtaccatcacnatctgtcagggcgtcacggccagtttcagcggcttagtcgtctgtcnagtactgataggactcttcgagtctggcttcatgcctggcgcggtttacctaataaacatgtactatcgtcgcatgaactccaatggcgactcaacctcttcttcagcgccagtatcatcgccggtgcggtcagcggtctccttgcctacgc

SEQ ID NO: 3546 - DNA, 467 bp, Aspergillus oryzae
cttgctctcctttttcttcgatttccacatcctcagtgttcttcactcactcttcctttcagtctcacattgaaacaaagatctacgctggacgccatatccgggtctccattttaaccgtgtgtccttgccacttttatcgttatcgccttttaccctgccaccacccgtgcggtgaacccactatagtctactacatttctcccgcagcgtgattctgcaaccaacccgcaccgcattcccctcctaacggatccttcgacacttgcttgccgatctagtcatgaccaacgcctttcgttaagctcgtccagccgtttgtcgcatgagacgtagcgtactgattaccagtttatcttggctccctcccccgccccctaccgtctcccattttatctagtaactaccaaagtcaattggaatgtacgacacccgtttggcagagccattggttatcgacactaaat

SEQ ID NO: 3547 - DNA, 330 bp, Aspergillus oryzae
gccctagtccctgtcattgccttagcgtcagacccgcaaacctggagaagcaaatgagacaaggaggatcttcatggacaaggtgctttatctgggtctatccctcatgaatcctggccgtttctgggtctcgagtgacgtttatatttcaactcattcctcagctagctgcccgtgggagttcccctcttgaatgtaccaccgagtactacggcgtacatgagggccattgcggcctgtgctatggttgagtgacttcggttatcacacgaactgctacccttccagatatatattgagattctaatcgtgacggggctttgttattat

SEQ ID NO: 3548 - DNA, 500 bp, Aspergillus oryzae
gttgaggatgactttgcggacttcgtgaaagcacctgagccttctccggcctccatcatcgcagctgtgtcctctggtgttcctgcgtcgagtaccccgggtgtcagcgctgttccatatacgaaatggtaccgagtctgggagcggacgtcccccaaagacttcctccaggaggcaatggtcatgccattcatccttctgattgtagtcttccacctctggggcacgcggaagaaccgtcgcaaggctcgggaatgggcccaagcccatgcaccctctctccagaatgagttcgcggtggtcggtttcaatggcatccaaaggtccgaagatgaggccgccgcggtgctgtcctcccctgattcgatcatcaaggagaagtctcctcaggaattcgtttcctacgccactggtcgccaaaacgtggcctttgttgacgtttccatcaagttgcccaagcgttacaaccctattacgtactggatggacgttgtttttgg

SEQ ID NO: 3549 - DNA, 350 bp, Aspergillus oryzae
aatgagttctactctaaaacaaacaacgccaacctcgataaccactccctcaaggttgatgataacaccaatatcgtgacacccccaccccatcctaatggacatggcggacacggacccgagcatgacggtggtcacggatccgagcatgaacgccgtgacgagcatgagccacaccgagggcctaagtatattgataccggtaacgatatagacttcactttcgagaacgactttgaaagcgaagtgaacaactacaatgaggacaaccacggagttgacatcaaaaagaacactaacattcaagccgcaccccctcatggcggccctccccatggccgagagcgtcg

SEQ ID NO: 3550 - DNA, 389 bp, Aspergillus oryzae
ggaaaagcggttgttccttgtctctgaagaaaacatgatctggtggctagaagagtatgcaagcgctgaaaactttggctttgggaaattgattcccttgtccgcctatcctgtgattcagaacagggcactccggaccaagtttgtgtaccgacactgccgtgcggacggctcattccctggccaggaagttgaaacttatagaccccggactacagagctcagctttgacgacgagtcttctccgctcacgccacttcttcgcgaagccacaggccttactgatctccttaccacaaaggtgtctcattgccgtggcgctatggcagtctcacttgtcttcccgaacggcttcaagctctccttctctggtgactgccgaccatccc

SEQ ID NO: 3551 - DNA, 495 bp, Aspergillus oryzae
atcatcttcactacatctatcttttgattctcgattactttctcttctcacgtcccaccctcaaccatggcttctcctcagaaaatccgtactacccttacggatctgctcaagatccaacaccccatcctgctggcaggtatgaacgtggccgccggtcctaagttggccgcagcggtcaccaacgccggtggcctcggtgtcatcggtggtgtcggctatacccccgaaatgcttcgtgaacagattgcagaacttaagagctacttgaatgacaagaatgcgggtttcggtgtcgaccttttgcttccgcaggtcggaggaaacgcacgcaagaccaactacgactacaccaagggaaagcttaacgagcttgtcgacatcatcattgagagcggcgcacgcttattcgtttcggccgtcggtgtccctcccaagcacgtcgtggagaagctccacggtgctggcatcctgtgcatgaacatgatcggccac

SEQ ID NO: 3552 - DNA, 432 bp, Aspergillus oryzae
gatttatccatcgcaacaatcgtctgtgtacaaggagtacggagtactccgtacatatgtgaagatcatcgcctcgcgttcggcaattgataaaacatattctgatctaccgtattgatcctagtttgtagcaagggacgaggcattgactcttcaattcattggcgctcgtccgctcaattcggtcacgattgcgcaatatcagaggccgtgttgacggcgaactgtacggagtctagtggtccccaaacaggaatctgtatcttctccgggatgcacgtgacatgcgctggaccctcggaacagaaaaccccaattcacttgcgccatttacgtagaacttgagataacatcgtcattgttccactttcagtcaaacccatcgggtaatcatacttactggacaggcaatatcccgcctacccaaagaca

SEQ ID NO: 3553 - DNA, 460 bp, Aspergillus oryzae
ccccttgtgacaccatcacctctgagaccgtcatcgccagcgctactactgatgtggttcccactggccctgctgtcaccggtgttacctccggtgtcagctccggctctgttgtccctactcctagcggccctgcccccggcgaagaggctagcagcactccctgcgataccatcacttccgagactgtgattgccagcgccaccactgacgtggttcctcccgctcccactgacgtcagccccaccggttctgagtccgtgagtgttcctgctgttcctactcctagtgggcctgcccccggcgaagaggctagcagcactccctgcgataccatcacttccgagactgtgattgccagcgccaccactgacgtggttcctcccgctcccaccgacgtcagccctactggctcggagtccgtgagcgtgcccgctgtccctactcagactggccctgc

SEQ ID NO: 3554 - DNA, 451 bp, Aspergillus oryzae
attccatcatcatcacttccttccacctccgtcctacagttatccctctcacattcaaccaacgcaatccaagtagctcgattcttatcaccgatctatccctttctcatcactagcgtgcccgctcccttatctctaggggcatgtttggcatctcaattgatttcaccatctagggaaccctaaaagcatcatgtcgacctctgtgtcccaggcttcttccgttaacccgaataccttgatcacggtgaaggtgctttacaatgacaatactcgtcgcttcaagatccctttaaaagagcttgaagctcgtgttctcccccaaaagctccgccagcttctaggcattccgagagatgtcaacgtcactcttgaacgtttgtctgacagtgccggctgttacatccacctggacagcgaaaacaatgctgtctacaagcaactctaccgg

SEQ ID NO: 3555 - DNA, 366 bp, Aspergillus oryzae
cgctagtgcgttaccaaagggcagtcccttgaattcaaacgtagcgtctagacctgtgcacccattacagcctgaggcaactgctaagccacctggcaaaaggaatcagaatatttcgagtcgaaagaacaaggatcgacagccccagggcctctcttcacccattacaatcttggctagaccccaatccgctaagagagagcaatcacctaatcctgcggtggcatcatcctcgaggacttcatcccgtacccgcaaggatagcaagccgaagagctctgaacccccgaagcctttccagccacaaattctccgccgtcctcaaaatttggaccatatacttcctgtacggaccaaggaaccgca

SEQ ID NO: 3556 - DNA, 384 bp, Aspergillus oryzae
atcatggttgcagtacagcatacggaggaattcccctcggaggcaacgcctctcctcaataactcgcccgccgagtcagacgagagcaatgttcctatttcatttggtaggggattcacaattgtctccgcaatgggactcctcctctttacgcaagctaccaacatgtccatgatgacaacggcacagtcggatattgcagcggatctcgatgcgttttcagaaacaacatggtttacttcagcttatctaattgcaatgtctagtgtcactccgctcgcgggtcgactttctcaaatatttactccccgtgtatacgttctcttctcttgcgtgcttctatcgataggccttttcatcaccgcggcagctcgaaatctagcc

SEQ ID NO: 3557 - DNA, 360 bp, Aspergillus oryzae
taacttcaaagacagactattcataactcctccaagcaaaccggccccatgcccgagaaccgccgcgacagtgaagcaagccagagttccctaatcagctaccggagtgtcgaaaatcaaagcccagggacccctgaaccaggaacacctgagcatcatgctgagacacaagggaacaatccagacagcgtcagtccgaccagtgtgtctccgtctcgccatcgggtgcatttcgggacagatctgagatatgagtatggcgatgtcgacacagagtcagagggctcgcccgatgcatcaccacctgaaagccgccatcaaaggcccacgctgggatctgtagatatcactgaggcacgg

SEQ ID NO: 3558 - DNA, 444 bp, Aspergillus oryzae
tttttttttaccagacgaccgcgtgattgcagtgatggggataacaggtgtcggaaaaagcaccttcatctcacattttaacgaagacgcccttgtaggcgatagcttgatgtcctgtaagtctttcccctccaaatcttaccctacctgtctctaaaaaagcaatcccacttaccaaactcaccaaaaacaggcacaacagaagtaggcatccacaaagcccaaatagacaaccaaagcaatctacctaatcgacaccccgggcttcgacgacaccacacgctccgacacagacgtactcgtcgaaatcgccgactggctccgcttctcctacaactccaacatcaaactggccggaataatctacctccaccgaatcaaagacgtgcgaatgggtggcgcctccatccgcaatctaatgatgttcaagaagctctgcggcga

SEQ ID NO: 3559 - DNA, 417 bp, Aspergillus oryzae
attcctaataccctgcagattgattattgtcggcaagccggtcgcgagagggatcaactgctggcattcctgtgccatcactctccaccatggccgataatgcgactcgcgtaacccctcagggtgggatcttggaaggtggtaatccgtctcactatgacaaaaagaaccccatcgtcatattcatcattcaggccagcattatcatcatcttgtgtcgagcgctgcactggccactgtccaagattcgccagcctcgtgtcattgctgaagttatcggcggtgtcattctgggcccctcggtcatgggtcgcatcccaggctttacagaagccatttttccggatgcttcgattcccaatctgaaccttgtggcaaacctaggtcttatcctgtttttgttcctcgtcggcctaa

SEQ ID NO: 3560 - DNA, 413 bp, Aspergillus oryzae
gcgacattcgcaaaccgggggatgcgatcggagagggcgattcacgtatcgtctatgatttggaacttcccgccaatgcttttgaacagatccgcacggaggtagcctggcagaaaatgtatcacatgtctggagaggttccgcgtctcgtcgctgttcaagggcagccactgtcggatggctcgatccccatttatcgtcaccctgccgacgaatcgccagcattgcagcctttcacggccacggtggaccgagtacgcatgattgtggaacgcatcctacgccatcccctgaaccatgtcctcattcagctctaccgtgacgggcaagaccgtatctcagaacattcggacaagactctggacatcgtccgtggatcatcaatctgcaatgtcagtcttggcgcgcagcgg

SEQ ID NO: 3561 - DNA, 441 bp, Aspergillus oryzae
gtttcccatggattgatcctcaatgtgcttgcataattactaaccacgccacacccatatcatgaagaggaagacatagcggtgaacatggggctcaggcgtcgcaaagagaaactacaaccagctcaaggagcatcctccgtagcgcatacacgctccacctcactgtacatgataccaacagcagcatctacagttcattctctgtccacggcatcaacgatctacagccatgacaacaacacaaccacgtcgcttagtctttccggaacgacccttgtgacggaggggtcgttcacagagtcacttagccaatatgaggctcaagattcaatctcaaggaaacaaagagccagacgctccctcgcaaaatatgggtcctatgcggatctctctaatgcaatctctcagacaaaggccatggccagcgattcaaaatta

SEQ ID NO: 3562 - DNA, 441 bp, Aspergillus oryzae
cccacgcgtccgcttaaatcgaaattaattagggtacccgagaatacttgcgtataaagcgcaagcctccatacccacctcagtcaccatattccatatcgctacatattaaagacatcaccgtggaagctcaaacaagatggcttcaaacgatgatctcaaggcgcacgccgcctccaatcaagatttttacgctctactagacatctccccagcagccgccgaaaacgagatccgtcgggcgtaccgaaagactgctctgaaataccatcccgataaaatcgcgaacccaacacctgcagatatcgacaagttccacacgttacagattgcctacgatgtcctctctgatccgtcggtacgacagctctacgataatgcgcgggaggcgcgacagcggaagcagcgcgagcgggatatgatggatgcggcgaagaggaa

SEQ ID NO: 3563 - DNA, 476 bp, Aspergillus oryzae
catggaggaagacaaagcaaccgccatgaagagaaaaatagccaatgtgaaggatatcatagcagacatggagcaaaggcttgttgacttgaagcgtcccccggtatcactcgaagataaggaggagcagaatgaagctatgttgaaaggtatcttgggtcagataatggggcaacctccttcggagcagatggtacagttggacaaagctacgaagggagctaatgatctctctgcgtttgttaaacggagatcaggtggtaaccaacaactggtatccacacagaagcgctcagctcaggaaagtgaccaggaaagagatgtgaaaagaacacgagtcggcaacagaaatggttccccttcctaagcattcatatattgattattgccttactaactgtctttcttattgcttctgtggccgctgagaaataacgagttagctctctaccacaaaaatttgcagagactacgga

SEQ ID NO: 3564 - DNA, 445 bp, Aspergillus oryzae
agagttccccccccccccccccctcgacaatgacttccattgcagaggggcttttcaaatcccttccaaagccgaaatacaccggcgaggatgaggagattccgcatcacgcgcagcctcgtggtccgcgggtcgtgggcgcggaccagatcgatgagtctcagattgtgttaaggaaaactggccctcccccgtatggaaaccgtaccggatggcgtcctcgagcccccgaagattttggcgacggtggcgcgttccccgagattttggtcgcacagtatccgcttgacatgggccggaaaggctcatcatcgacatctaatgcacttgctgtccaggttgatgcagagggaaaggttaaatacgatgcgatcgcgcgacgaggccacagcgataaccggatcgtgcacgcctcctttaaggacttgattccgctccgacagcg

SEQ ID NO: 3565 - DNA, 393 bp, Aspergillus oryzae
ggggcttcgaaagctgggacctcaacttgggctgcaaacccaccaccagcccgaagagacagttcggcacgtgctcgagccagccgctggtactgcagcagtagactcaatggagcaggtaccggcacccagtacgcagagccatacgacaccagacggagctcagatgacacgggagctgatggaatggttcgaagcagtgggtaatattgaagaccagatcatgtcattggggacaggtgtgcagacatatgaggagccatggcagtatggggctcgcatggggaatggctacacgtttgactttggaggcgagttgtcgagcctgatgaaggattgcttctgatggtactataacaaatggcacgaggtttatttacccttaaaaaaaaa

SEQ ID NO: 3566 - DNA, 371 bp, Aspergillus oryzae
gacgaagcggactttggagtcgccgcaactggaaacccagatgaaatagtaatagacccagatacccaaagatttcagcagccaccaacacctctgaaccgtcaaaatggcccagccccgtacaggggccctcaacagcataaccccttagccgctgcaagaccccattccgccattgccacaccatccaaaccagaaagaccgccgaaccaggcagctgccgctagacagataccacctcctgctctgaatggcagaccaaaccctgctgcacccgcccacaacccgcaacacaaccttccaagcggaagaataccaccagctcaaccaagacctaatcaagacacagccatgcccggtgcaagtggtca

SEQ ID NO: 3567 - DNA, 513 bp, Aspergillus oryzae
ctacaaacacaccgtgaatgaaccactctcaactatcgcaagggatctctgatcatttcgatctctattaccacacccatagagcattttccttctcaatagctctctccctccccatcatggcctgtccactgaccgtcagcaaattcgtgggcaccgtctccctcggccttctaacaggcctctcctactccgcctcaaccgtaaccatcccatccctatccctcctcccaacctccgccaacgcctcccgcgctctccacgaagtaaagcgcctaaaccgcaaacacgggctccgtctcaccaacgtcgccaatggctgcctcctcttcgcatactgtgcctccccgaaacaccgtaaacacccgtacctgatctggatgatcgccacctcgatcaccggcacctacgtcgcagactacttcttccaccggtcgatgggcttcaaggcgtggatccagagtttcgtccaggatgccggctgcgcgtcgttcagtcgcaagaatgcccaga

SEQ ID NO: 3568 - DNA, 448 bp, Aspergillus oryzae
cctgcatctcgcctacctctcgggctcagccatcaacaccaggtaaggtagacgaggaagcccttgcaagagtgcggtcccaagcggagaaatacaagccgaagactcctagtggtctgcgtactacaagccgatacgctagtccattgactgccacgcccgatatcgtcgcctccaagcaaacaactaagaaatccgacttaaatccgcagcctggtaaggctgacgaacccggaaacttcggtgatgatgaattcgcccgtgatgcggaatggctttatcagaattgtccttccggagacctcagccaacttaagtggccggctcgtcaaagctatgaagagagccttggtgtcagctctacctctatgaaactccttgctacgatttgggacgactccgagattgaaccagcgtaccttgcttttcgccagagttttgaggaatt

SEQ ID NO: 3569 - DNA, 452 bp, Aspergillus oryzae
ggttgctggtctgaagaagcctcccccaaggcccgcttcgcggccatcatctactgtctcaaatgcatcggccaggtcggcgtcagatgctccaccacctcgtgcaccaccaccgttgccaggctcagcaaagccgcctccaccacctcccgtatcctctagaaaaccatcaaccccagctcctcctcctcctcctgcacccccttctacaattccagctgcgccacctccacctccacctccacctacagcccggccacctcccccagcgcctgcgcgatctacccctccaccaccaccaccgccgccgcctcctgcagcctcagcaccgcagccacctaacggaaccgctgctgcatcaatagctgttcaagctgcgagaaacgcttttgggcatagtcagcagacaccatccgccccgcccccgcccccacccgcttcatccgcccctt

SEQ ID NO: 3570 - DNA, 357 bp, Aspergillus oryzae
ctctttggatttttattttgtgtgagcgtcatattttagctgtcacaatgagcgtaactactacaaccaccgagccccctagaatcacggcggagaatgtcgccactctcttcccagaggtcgatacttctttggctcgtgaagtcctcccaaaagccgatggcaatccctccgcagctagcagcaacgagctggcgggttatgacgacgaacaggtccgtctaatggatgaagtatgcatcgttctggatgatgatgacaagcctattggaagtgccagcaagaagacctgccacctcatgaccaacattgaccgcggccttctccaccgtgccttttccgtgttcctcttcgatt

SEQ ID NO: 3571 - DNA, 467 bp, Aspergillus oryzae
cccacgcgtccgcgcgattctcactcccgaggaagtgagcttggatacaaggccaatctccttacctcaacttgcaactttacgctccccagtgtggaatatctagcaccatgttcgatctgaacctcgagaccgcgtcaggcccagcggtcgtgcgcatcggcctcccgccctcctctttattaaaatttcccccagacgaactccctaccactctcccagctcctcaggtctctgaacccacatggaaccaacctttcaatatccctcctcagttgtataaccaactgctagatgtgcgcgtccctatcaccattgccagtgtctacgccgtcaccgtttgtctgctcaatcgcgtgaacaagagccgcggatacaaaccctggggattcagtcagacaaaactcttcaaggctttcgtcattcttcacaatgtcttcctcgccgtgtactccgcatggactttc

SEQ ID NO: 3572 - DNA, 429 bp, Aspergillus oryzae
  modified_base (127)..(127): n is a, c, g, or t
ggcagccacttgtgatgcctgtggaggtgcaggcatgtctgtcccaaggggctcggagtgtggctcctgcaatggcaacggtgtggtcaggggcaagaagactgtacaggttgacattccaggtggngtagaggatggcatgcgcttgcgagtgagcaacgaaggagatgcaccacccaccggaacatctgccgcacccggagcccgcacacaacgaggcgacctgtacgtgtccatccgggtctctcctgaccatcgattcagccgttccggttccgatatcctctatacggctcagattcccctcacgactgctcttttaggtggtgaagttaccgtaccgaccctcgatggtgaagttaagattaaggttggcacgggtactggtaccggcgataaggtcacactgtctggaatgggtatgaagcg

SEQ ID NO: 3573 - DNA, 260 bp, Aspergillus oryzae
ggcgtttacatacccctcttgatggtcatggattggcagtggttatgctgtgcatagtggttcaaagatatgaaaggggttgcatagatattcttttttctccctttttttttttccctctctaacttatttcagattccaccaggatctcaattgggtaggatggttacagttcatttgtaattaatgatttgttcatatgttactactatatttccgttgaatgtgaatacttgaaaatagacattgatacacatatg

SEQ ID NO: 3574 - DNA, 519 bp, Aspergillus oryzae
catactacaagcctcgataatatcctattttcacccattcatacacataggtacacatttaccatttactaagcttttcggacaattttttctttcttttcttttcttttcttttcttattttttttttgttgataactctttggtacaaaggctgtattgaaaacaaaatgccgtgtattccccaagccgccgcagctctttcgcggcgaatagtttcgatcgctactcgacacaacactgctatatcgcgctcgttccacttttccccatcaaagaccgctattgctcatccagtcacagcccatggccctcctccgaaagctccctccgctgctctagagtataatgagcttatgagaccacaagatggcaatgagctacacactcgaacggcaaagcctacacctctcaataagcggttctggaagagcgttgacgttaggataaagccagaaggggattaccaagctctgctagacaccagaccggttcgaaccccccacaaaagatgtcctct

SEQ ID NO: 3575 - DNA, 456 bp, Aspergillus oryzae
gtcctatatagtactggtagggttctccattgaatgcgacaagttacaagtgtccctgaccaatttctcacatataatttgaacccaattttttctccatttactatttcatctatcatttagtatttaccccacttgcactacccctcctgtcgagattgtccaaaatggtgctcgattacagcaaatgggatgcgctcgagctgtctgatgattcagacattgaagtgcaccctaatgtcgacaagcgctccttcatccgtgccaaacaggctcagattcatcagcagcgcatgcaacgccgccatgaaattgaaactctaaagtacgagcgtatcattaacgacggacttctctcccgcatagatcaactcctgaagtcactccaacagcatgagggttcctcgaagaaccccgaagaagtggttttccaggtcctcatggaatcggcaagca

SEQ ID NO: 3576 - DNA, 349 bp, Aspergillus oryzae
cccgagcatgatgagcttgaaaatgaggtattgaatcaacttgctgttgatttgaaggagcgttccctagagggcaccctacaaaagttctgtctagtcaatatctctgcagaagatttttctaggacacgcgccaatgaagagtccgtgtcaaatgcaggtctctttttccggcgtattaatgtgaaaacgttttttacattacttcagatccttttggctgaagtggaacggttcgcggtcgaagaatcaaataatagggaaggaaagaatggtcctgataagatcaccgctgttgcacgacgtgttttgcctgctctccgaaactacagctcttggctacttacag

SEQ ID NO: 3577 - DNA, 427 bp, Aspergillus oryzae
ccacagtacatgccacggtcgcaaccgccctcctaccaccataccccgtcatatgcgttgccttttgcacagagcgtatggacaggtcacggttcctcctgcggttgtttgcattgtgctaaacacgttgagcactacatgtgcgctggtgctttcggcggaatgcaaccgatccttgccggctagtgggtggcttgccaggctgctccggaatccgcggtgtacaatgctctttcagttcgatcgactactctgtttttttcgttagacttgttcacttttgtttattgatgataccgcatctcgcaattttcggtctggtgatgacactcctttattcggtttcggttcctactgttgtgtctgaaaagtcccttggatcgccttttccctgaaatatttgaaacaaaaaaaatttcgaaaaaaa

SEQ ID NO: 3578 - DNA, 467 bp, Aspergillus oryzae
ctatagatcaggacgggagattgagtagaagagtaccatcacaatgcagtcttcattgcttcttcgtgctaggggccttccattggccaagtcctcttttgcccgctccagcatccgggcgatgggatcctacgccaccttcaaggttccccgtattgacaacgaacccaacaaacactatgcccctggttctcccgatcgcaagggtctcgaggaagccctggcgaagcacaagcaaagcgctcccctcactgttcccttagtgattgctggaaaggagatcaagagctctgaaaccttcacacaagccaaccccgctacccatgctcctttggccacatactctcatgccaccgcctcggatgtccaggccgccatcgacgccgctcttaaggcccgcgagtcttgggcttccacttcgtttgctgaacgtgccagcatcttcctcaaggcggccgacttgattt

SEQ ID NO: 3579 - DNA, 449 bp, Aspergillus oryzae
aggcttgcgaaaattgtcccgctctctcctcgatgcctccgtccgcaccgataaccgtcaaggcacctatggccagagccataatgacttgagtcgattccatgaccgcatggcggatcatggactacagttcgcggtgtccctgcaacagatggctgatagtcttcacgaattggcgtctaacatcgagcgaggtcgcaaacagtggaaacaaaccggcctgagtgcggaaaagagagtgatggaggcggaggcagcagcggagaaagcgaaagctaagtacgaatcgcttgcggagcaatacgatcgggtgaagacaggggataagcaaagtggaaagtttggcctgaagggtccaaagtcggccgctcagcatgaggaagagctgttgcgcaaagttcaaaatgcagactcggattatgcgtccaaggtacaagctgcccaagcgg

SEQ ID NO: 3580 - DNA, 438 bp, Aspergillus oryzae
gggtggctcaccggcgccaaggacgttctggacaaggtcaatgatccgggtgttgcggacactatcaaccctaacacgtacaagtatcgtatcaatctcaccatggagaccggtgacgagcgctacgcattcttgaacacccttatgtgggttggcagcggttgccgcaggggccatgaagtcatctttgattcgttccgtgtcaattaatctgctacggtattgcagctgttttgtcggttcttcagcgagtaatttttgaggggaaaaattgtgctttagtttcttcgcaagttgtctctctatctgccccagagtatgttgagctttgccagtgtttaagccctgttgatctggatacgtgccttttgcctcccaatcacgagcccgctcgatgcgttcgtgcagcacccatgttctttacgacttcttttcgtt

SEQ ID NO: 3581 - DNA, 559 bp, Aspergillus oryzae
ccatcctcatcgctgcctttcccttccatcctcctcttgtctcctttctcaccttcctttttttttcttccttttgatgcttcaggcattctgcttgctgtgtttgacacactattgcagttgatcctgacatcctttcgttacaataaaaaaaagaaacccaaaaaaaagaaggaaaaaaaaagcccacacttcctaatttatacccgttaaacgctccgctttgcccactccgcgaacccaccgaacgtttctcacccttccgacaaaatcctttgatgctcttttgattcgaatccctcgtcagaactcgaatcccgtagtgcagccactggactggtctgtgcctcgatcatcgtcgcttagagtcaattgtggttgggtttatcacgcttcagaaaagaataagaccgtctccgtccttagagagattgtgcgaattttcttcggccaaaaccggtttttgttgttaacggccgtgcgactgtcaatctagagccctccctctcgatcaaggctcctctcgatactacgcaaactcagcaggcgctgcaggtgt

SEQ ID NO: 3582 - DNA, 427 bp, Aspergillus oryzae
actccgcacctgtaactgcactgttcctgacagttttcatttgattttaaaaatttgtatctttctgaaaatcctggtccctttcgcgcattgttgacgcgaagcactagctgcttttttttttttcttcgaagcactgctggttgttgttagacccacatacacgccgcctcgctggtggatcaggaccattgactgttgacaacgtgcggataaaaagaagttcccacacaactcgattttcctggtgggtgaccgtggggaattcacgattaagcatctcgacctcatcctgacttcttttctgcagtggagtcgcacttgttcctgtacgcccccatcatcgactgcaaggatccttgagcgtttgctggttgaggaattgattgtccgatcgaatttaccctccggacgtctccatatcccc

SEQ ID NO: 3583 - DNA, 546 bp, Aspergillus oryzae
cccacgcgtccgcccacgcgtccgcccacgcgtccgcgcaaaaccacccggtgttagtccctgtcgaataattgacttcactgatttctcccctaccgtttctcccccgctctctcccaatgaccgagtctccgggttcccctctctcttccatcgcctccgacgatatgtcggatcgcgaggaattgaagcagggcttctccccctcggcctcaaatatgcctccttccaaacgtcgccgcaccggcatcgcatcctgggatcgcaatacccccgtctcaacaaccttccaagatgaaatccccccggcctccccatcttcttccatctcctcggacacctcgggcgacatccccaactcccccggcacactggcccttatcggaggcagccaggacgacgactacagcggccaaggcaacgatcaggtcaccgtatgccggtgggaaggatgcgatgcaggagatctgggaaacatggacgacctagtccagcacatccacaacgagcacgtcggcagtcgacagaagaagtattcctgcgaat

SEQ ID NO: 3584 - DNA, 449 bp, Aspergillus oryzae
attcacaatggcttcaccaccccccaccaacggctcccccaccccggccgtggagtctcctgagagcagcaagcccagttctccctttgtggagcgcagcaaccccatgggatcaggaaacgcacaaaccgtcagctccagtgacccgaaggctgtggcccaggctgccaccgtcatgaagaacgttgttcgccgcaagttgactggctacgtcggttttgccaacctgcccaaccaatggcaccgtaaaagtgttcgcaagggattcaacttcaacgtgatggttgttggtgaatctggtctcggaaagtcgacccttgtcaacactctctttaacacctctctttacccccctaaggagcgcaccggccctagccacgacatcatcccgaagactgtggccatccagtctatcagcgcagacatttgaagagaacggcgttcgtctt

SEQ ID NO: 3585 - DNA, 199 bp, Aspergillus oryzae
tcttggcttacttcgttgcctattttgctatccccagcacgggaagcgggtgcctctattccgttttctacaattgagattgtcattgcagaccagaaagcggctagcaatgatagcgctggcatcatttttattgtctcatgtacttaaattccttaattatcattactccatgagggaaatacagttgatacaacgc

SEQ ID NO: 3586 - DNA, 496 bp, Aspergillus oryzae
gaacatctcggttgccctgcggagggctcgactgcccagaccccgctgtttcgttcagcctatcgtctctcgtgctccctctcgcatcgccacccgctcatttagcctcacctccgccgtcaatgcgaccaaggagatcaagtacaccagcaacgcctatcccaacctcaagcgcgaccccaagtttgccgagattactgccgaagatgtgacttttttcaaggagttattgggctcccagtcggccgtgatcgatggtgtgacgaccgatgccgccgatgatatcgagccgttcaacagcgactggatgcgcaagtaccgcggccacacaagactggtgctgaagcctcagaacaaggaggaagtgagccaggtgctgaagtattgtaatgacaagaaattggcggtggttccccagggtggcaacactggactggtgggaggttccgtgcccgtgttcgatgagattgtcatcaatacgtcgcgcatgaacaag

SEQ ID NO: 3587 - DNA, 522 bp, Aspergillus oryzae
cagaccattgatcgtactacatctacacaaacttacggcctctctcttccttcctaaaccttcaaccaagatgggctacaagaccaactatgagccttacaggagtcaaagcctggatatgaggcaagaactttcgtcagaggaacttctctatcctttgggagatctttatccacatgtcgtggcccttcaactacaatccgaggacaacccatggtccaagaacttccctggctattcagatgtcagttactgggccgaagtgtcttcatcgcggccaccttcggagacttcttcgaagcacacaacatgcaggtacagcagcgactccacaacctccagatttgtcacccgcatccggcgacttctcaaccgagatgagttgcgccgacgctcgagagcttaaacttgttttcaccgaaagatctcttacctctcattcgccacttctcttcactgcatcgatgatcgattcgactttccttacttgcatgaatattttctttctttctttctttcttt

SEQ ID NO: 3588 - DNA, 530 bp, Aspergillus oryzae
tggcgctccacgaactcttggattatgtcgcaaataaccgttcggtgatcacggaacccatgtatccccgagtcgtcgagatgttcgctaagaacctctttcgacctatcccgccgcccgtaacaccccaaggggaggcctttgacccagaagaggatgaacctgtgttggaagtggcttggccccatatccaggtggtgtatgagttcttcttacggttcattgagagtcaggatttcaacacgaatatcgccaaggcttatatcgaccatcactttgtattacagttactggagttgtttgactctgaagaccctcgggaacgggatttcctgaaaactaccttgcatcgcatttatggaaaatttctgaacctgcggtcttatattcgccgctccatcaataacgtgttcttccaattcacttacgagacggagcgattcaacggaattgcggagctgcttgaaattctcggatctatcatcaacggatttgcgctcccgctcaaggaggaacacaaactcttcctg

SEQ ID NO: 3589 - DNA, 491 bp, Aspergillus oryzae
gcagctcacccgccttgccaagactctccatgtttcgtgcatgtatgtcgatccctcgtaccacgaggctcgtctgcaagccaagcaggcggcccagacccgcgctgctgccggtgctgccaaggagcatgaggagaccttggctcgccgtgttattatcgacaagaagaaggaggccgccactgacgctttgcagcgtaagcagagagaggaggagacccgcaagcggatccgtacccagcagctccaggaggctgagaagcagcgtctgcttgatgaacagcgcgagcgcgagaagaagcgcatcaaggatgagcaggatcgtatccgcgagcaggaactcaagaagcagatcgaggagctgaagagtggagtgaagggcattgacctcagtgaagttgatctcaaggacctcgatgctaaccgcctccgcgcgatgaagcttgcccagctcgagaaggaaaagaacgagctcaacgatcgtattcgca

SEQ ID NO: 3590 - DNA, 474 bp, Aspergillus oryzae
cggacgcgtgggcggacgcgtgggcgccgatacgttcctgaatctgaaaagacaacccacccgaacttcccgtaaaaaaaaccattcccttggcgcccacctcacctcttgctctcttcctcttctatcctctcatgatcaacttcctccctgttactccatgtgttgattctttcaattgaatagcaaggttctgtaatatagttcatcatggaggttcatcatataacgacttcgcccaagattctcttcagcaaggtacgcaagattgtgccgcctatgctggagaaattccacaaaggccagcatggacgtgttgccgttattggaggatcactagattacacaggggctccatatttctcttccatggcttcggctcgactaggctgcgatatgagtcatgttatctgtgagcgatctgcggcgactgtcattaagtcttattctccgaacctgatggttcatcctata

SEQ ID NO: 3591 - DNA, 407 bp, Aspergillus oryzae
gacagtggctgaaaatgacatttcagcaaaatgaaccctcggccgttccggcgcaatcctctctatccttcactcagggatttcttctcggacagctctccgttgtactactgatcggtgccttcatcaagttcttcatattcggcgaagctcctccaccgccgtcccgcggcctttctcaccgcgcctcaacccacagacgctccaattcgatctacaccatcaaccccaatgagggaacctctagatcactgagggaaaaaccctctacgtccaacgttcttcgtccggtgccgtcgtccgctaccaacactcgatccattcttcggaaaacctactacagtgctatacctacgaatccctcggggaagcacggccgccatagaatccaccattcctcccatcag

SEQ ID NO: 3592 - DNA, 461 bp, Aspergillus oryzae
atttcttttcttggatttcaattcatgtttagtctctagtaatagattatttgatgtagtgttcagcagacaatggaccaatcagatcaataaactcgacatggccacacctcagcatacagtaaccccttttttgttggttcctcccaatgatgtcgtattattcggatttggattgaaagcatctccaagaacaaaggaagtaaagaaaaaagaaaacataattgaaaagacaaaggaaaatatgcaacgtccaactaaaagggtaaaatgtaaaaaggaaagcacagaagataaaatcacgtcaatcggatataatcagagctgttttacagaaacgccgcgaagcgccgacggaggcctccaaggccccatgcgtcagtagccatctaaagacaggagaattagggtgtcaaagggtatcatatagggatacacccgtaatatcctttctcactgag

SEQ ID NO: 3593 - DNA, 508 bp, Aspergillus oryzae
aatcgattgtgcatagcgccggaggttttctcgcgcggaactccaactgattagaccgcgctatgtcgtcctttttcacactacccgcttcccagcggaagcgcaagagggaagaccgcgccggagcccccgcgtcgaagaaacgaggtgttgatgcagatggagtctcaggcgccaagggtagtagaaggactaaggaacgggagcaatcaatctcgggtagcgacctggatgaggatgatgccgagagcattgtatctggagtttcaggagaagagagtgattcggaatccgacgaaggagagacggccgcagaccggaggttaaagcttgctgagagatatttggataatgttcgggaagaagtagatgaatatgggttcgatgcagcagagattgatcgagatttaattgctgagagattgaaggaggatgtggacgagttcaaaggacgcacatatcgtcagatagcctcagacctgtctttatccgcagcctcgcattcatt

SEQ ID NO: 3594 - DNA, 358 bp, Aspergillus oryzae
gcgaatcattgctactgtaaccaactatgcagctgcttttgaggcgttagacggcatgagagatgaaatcgaaggtgcatatcaaacggcgttccctcaattatgacttttaccctgacttctatatccgattgtcttttgtttccttttaactttcgaattcgctctcatacccattttaccgttcttttgcttcatctcggtggggcgcgaaggtttgatatctggtacttcggaatattgggatggatggataaagcggccataacataaacaaaaagcgaacctcttataacattcatatacggcgttatatatctttgggctacgaagcaaggggtttacctgtaccattttt

SEQ ID NO: 3595 - DNA, 491 bp, Aspergillus oryzae
gcgcctgggtgactatgccttcgaagcccgcgatcttatccagtcgatgctgtcacttgatccacggaaacgacccgacgccagctccgtcctgacgcatccattcttctggaatccatctgaccgtctcaccttcctttgcgatgtatccgaccatttcgagttcgaaccacgtgacccaccgtccgaagctctcctgtgtctggaatccgtcgcgtcacgcgtcatgggcccagagatggacttcttgcgtcagctccccacttccttcaaagacaatctgggcaagcagcgcaagtacaccggttcaaagatgctcgatctcctacgggcattacgtaacaagtgccatcactacaatgacatgcccgagcatctgaaggcccacatcggtggtctgcccgaaggatatttgagtttctggaccgtcagattcccgagcttactcatgagctgtcactccgttatcgtggatctcaagttgacgcgga

SEQ ID NO: 3596 - DNA, 454 bp, Aspergillus oryzae
attctgactataaaggatctgccaatcctcccaattccttagtcgattgttgcctttctaatactttgtcgactgctattgtactccaaacctcctccccctctttctttttcttcttcaaacttccccccgctacaaacacaatgcccctcgttaacacaacagaggtcaatgaggacactcgtgtccttggatacgatccattgctgtcccctcagtaccttcagtccgagatcccagctcctgcagaagccactgccactgtccgctcgggccgtaaccaagccgttgagattattgagcagcgcgatgaccgtctgctggtgatggtcggcccctgctccatccatgaccctgccaccgctctggaatatgccacccgtctcaaggagctcgctgggaagctctcctccgacctttgcatcatcatgcgcgcttatttggagaagccccc

SEQ ID NO: 3597 - DNA, 508 bp, Aspergillus oryzae
gatcaacaagcaacaatatgcgaagagtatcgtctccttccaggcagctttgcgactgtcaccgggcgactatcattcatgggtcggcctaggagagagctaccaccattctggccgttacattgccgctacgaaagccttcgagcatgcccaacagttggaggactccctctccaactcagataaggaacaagtctggttcgcacggtacatgctggcgaatgtcaagcgggagcttggagaatacgacgatgctattgcgagatacgaggatgttctaagtatccatccgaatgaaatcggcgtgtctattgcactactccatacactcacggaaagctcttggaagagccttgatctgggtctttttaacgactgcattggactggcccgtaaagcgattctggtagcaacatccctagccctggaaagagtcgacatcttcaatctatggaagggtgtaggagatgcatgctcagtcttctcctatgtcaagtcgaagactgca

SEQ ID NO: 3598 - DNA, 405 bp, Aspergillus oryzae
ctccaacaaccttattgtcaatttccgagataggctgtcaatagaagccttcctacactgtattgttcattctatgctatagcgcctagtttctcagaggagcatcttgcctactgcttccaagactcccccggatatacacgggtccttatctctcagcccgccagctttctctctccaccacgactaagaccttttgattcggcatattctttccagggcaccgtagtgccccgtgagaaaccatggcgaccaaagcaatgattccgttcctggtcacgatgatgctcgtgaccggtgtctgcaataccatcctcaacaagtaccaggcatatgcaatgcgtgcgaaactgtgattcctcggatccaagtgatcgccagctctttgagcagcctgttatccaa

SEQ ID NO: 3599 - DNA, 437 bp, Aspergillus oryzae
accgtgtactggtcgacaaggcacgcaaagtctcccatactggctacaagcgtatctataacgaatacccccctacccgtatattagtgcaagatgttgcgcgtgtcgtacaagaagccacccagtccggtggtgttcgaccgtacggtgtcagtttgttgattgctggttgggatgagggtgtcgaacctgagtcagaggaagcgcagaagggcgacaatgaagacgagcctaaaaaggcaaccggcaagacgggcggtatcttgaagggtggcccgagcttgtatcaggtcgacccaagtggcagttattacccatggaaggctacggctattggcaagcatgctacaagtgcgaagacattcctcgagaagcgttacactgaaggtcttgaactcgaagatgctatccacattgcccttttgacgttgaaagag

SEQ ID NO: 3600 - DNA, 432 bp, Aspergillus oryzae
cccccagaaacaacttactttcattgtggtgggcgaaagcaacaaaaagccagaatcaccatgtcgaaaacattctcccgcgccgaggtcgccaaacacaacaccgaagactccgtctggtgcatcatcgaccaccgcgtctacgacctcacagattttctcgacgcccaccccggcggtagcgttgtcctcaaccaagtcgccggccaagatgcgaccgccgagttctataacctccaccgtcaagaagtcctcgagaaataccgcgacgagctctgcatcggaaccgtagaaggcgaaacccccgagattgcgccccgtgaacccggcagccttagcgaagtcccctatgccgagcccctctggctgcgtcccgacttcaagaacccctattataaggagagccatcgtcggttgcagcgcgccgtgcgc

SEQ ID NO: 3601 - DNA, 555 bp, Aspergillus oryzae
gacttcgcctcttctccagccatggcgacacaagatacttcagcctcgtcgccccacgtcccctatgaaaatcccgcttatcaaccacgaccaccgtccacgggatactccagcagcccccatctccaacccagagcatccccagcgccgccatcagaaaggcgaggatctccggctagtcagatgagtgagcatagccagaaaatggaatcccggccaaaaccgccatcgagagaggccaccgtcacagagctgacgacactagaaagaatatgggggacactttttgaggatggaaagccaaccaagaagctgagccagttcttgcgtgggattgctgttcatttaatcgaagactatgagcccaaaagcagtcttgtcatacttcccgcaaagctacagaagttctatgaagacaccagagtaccaggggactattatccttggaagtgtaagttggttataagatcttttggagagtgggcatagttaacctttgccacctagatatcttcgatgatgagacgtctcacgtttcgagactgttccgagagg

SEQ ID NO: 3602 - DNA, 474 bp, Aspergillus oryzae
cccacgcgtccgcaggattctgctcaaccagccggagtttaaccccacccgtcgcctttatagggatcggacttacttcgagctttctagggaacgtcgagctgaaaactgggaggacgagtacgacctcctccgagatgcatatgacaatcatgtcagaaccaaaaagtcacgcaagcaagaccttcactcgccacgtagagcacgtgataaagacaaggagaacaagcgccctggacgcagagattcgccttcacctggaggccgacccagaaaaaccaatggaagcccgggctatagggatcctgcctccaaggatacagccttgacaaaagagaaaaggcgtgacaacgtagctcatttgaaggagaagtctaatccagcccgtccgaaaccggctcatcctactggtaccgaccccgatagcgctcgtccggatcccagaccgaagcagctgcttccaccaagagaggg

SEQ ID NO: 3603 - DNA, 402 bp, Aspergillus oryzae
ctcgttttcaccttggtgacctgaggtttctctgtcacctctagtccttgcctgcataaggggggcccttgttcttcttccccgaccggtaagacgccgtcgccctttacgcgcttcgttggttcatccctccaaatagcgctgtgccaatctcacccctcttgtctatctgtaccctcgcattctttctcatctccttctttgtccccacttcatttgggagaaattgaaacgttttatttactgcctttcgtttttgttattattattttttaaatcttcctgtctcttataaagaaaaaaaagaaaattaaagggggggaaattcaagaaaggagcctaagcaaacacagtcgtttattccaccgtgctctggaattccttatttcctttttttttttt

SEQ ID NO: 3604 - DNA, 475 bp, Aspergillus oryzae
attcacgacggtcttaattcggtcgtggaaccccgtgtctccgcttcttcgagacactgtttttccgtcccggttgacccttttcccttttggcgtgagaagagcaaccccccgtgatactcaaccaactgtaatcaatcaatcaatcctgagcgatggcaaccgtttcagctcccacccctaagctggatcgctatattgtcatccatgtcgcaaccacctgcgatgaacatggcgtctacgtcaccaaggattcggcagaggtgatcgaattggggtggattttgttggatgccaaaacctgcgaggagttgcaccgtgaaagtgtgctcgtcaagcccgtcaacacccccatcacgccgctttgcagtactttccgcgatgccatcgcccgtttcgacgaattcgccaaggaacacctcatcagcaagaacttggagtttgctttcgtgacgttggattcgtgggaccttcg

SEQ ID NO: 3605 - DNA, 482 bp, Aspergillus oryzae
gtttggtcgtatgggcccagtatgaccgagaagcttggtcggggccttgcgctcttcatgcttgtcatcctggaaggaagatgataccaggagaatcctcaatcttccgcccctcgttatcagtttatctcaaagtcacttgatgtcacttgattccacaacagcttagataataacctgtgggaactgccccgcgtttcgtggtgtgttgtcaccagctgcttcttcaattgatctactgtgacagagtccctatctttgcgaatcaatactcattccttcgttgtattctagtcgggtcgggactgtcaaccacaaagtgatctccgtaagcgaatacgacataatggctactccaacaggccgtcttcaagacaagaatgctataatcactggtgctgcaggagggatcggtctcgagactagtatcctcttcgcccgcgaaggtgccaatgtcctcatggccgacatctctgctcctg

SEQ ID NO: 3606 - DNA, 438 bp, Aspergillus oryzae
aatccacatctcctcatatatttgatccttagtcctcgtgtatctctccggccatggcgtggctgcagattctgggtcttgtattatctgggctcactcacgctcagactggagtgacgtcccccattgcagaggcatgcggcccttcaatggtatgcatcaatcgctatgccaatgtgttgccatatcatttctttcgaaacgtctctactatggatgacatatctatttttggtgataccacagtcgccagtggtactttgctagagggtgtcaactcggccaattttctggtatatgatagggaaaggggtctagagatcctgggtgccaacccaagttataagttcatgtttgccgtctccgaagctgtccacgaggctcctgtgtatatcgcatcgcagaataaactctacctatctcagttggctccccccc

SEQ ID NO: 3607 - DNA, 451 bp, Aspergillus oryzae
actcaacctactggggatatccccctatgatgctaccgaagaatatacaacttcatcaccatgttcgtcgcgtcttcgtccacattcggacaaaatccttcttctccggaacgcccaatccaacccgcttgactcttcccagacgtgccagggagtctgccacattgtccaacaaggccttctcagcccgcgtcaactctgcatcctccgtgtccagggatccatacgtactatccttgtccagtgtatccaaatagttggtatcatacgtagacttccgggtagtgaatccgccctctccatcaactccactcaccaccccctcggcaatgcgcacccggatacagtgcgtgggtttgctgagcagcgtccacaagaagctcacataacttccgggaagtggcgtcacaacatcagccggggtataccgcaggctgacggggtagatctt

SEQ ID NO: 3608 - DNA, 447 bp, Aspergillus oryzae
atggagagaaaagggtgagcctaagaatatccccagctcaaatttcgagcaaggaaagttgctgcacagatgagattaagccagtcgatgcaatctcccgtttcatggtcagcccttgcttggttccgtcgtcaaccgtggaacgcgtacccacaacagtgctgttgatttatgttccaattgtgtagttgtgtaattgccattttccacggaggtccatctccctcatttccgattttgaatggcgctgagattttcaagggagggtacagtgtacacgttccagaagcgtcctaggcctttctgctttagcgcaccgtccgctcgtatcctcacaggccagctccctgagattaaccggtggcaatggcagttgtggacacaggcacgggcgaccattgtggatctgaccccttcgttagtccagaatcctgctgtgccgaccct

SEQ ID NO: 3609 - DNA, 437 bp, Aspergillus oryzae
atggtttgttatgcggggatatgataaggaagcttgcgaggtgcttggtgctcttagcgatcttcctgccgattcggaggaggtgctcgccgatttcaacctgatgaaggctgaccttgctgctaccgaggatagcaaggccagttggaaaacactctttacctttggcaagacccaagagttccagcgtatgatgattggttgctctggccagttcttccaacaattcaccggatgcaacgccgctatctactactctaccctgttgttcgagaacaacctgcacttggagaaacgtctctcgttgattatgggtggtgtctttgctaccgtctacgcccttgctactattccttctttctttatgattgagaaggtcggtcgtcgcaagctgttcttgattggttttgcgggtcagggtctcagtttcattatta

SEQ ID NO: 3610 - DNA, 456 bp, Aspergillus oryzae
cccacgcgtccggcaagcgaaagtcaaccacttggccgctcgacttcccgctctctctcctcttcccacttccacctccgcaagtcggataatacagtctacctgctcgatatcttcattctcccctgttctacccccttttttgttctttagattttcctctttgttggagcgactgtctcttgcatacgctgccagccatggcaagcccgacctcaataaacgtcaacgatcccagcttgatctcgctggtcaataagcttcaggatgtcttcgcgacagtcggagttcacaaccccatcgacttgcctcagattgccgtcgtcggttcacagtccagtggtaagagttcggtgctagagaatattgtcggacgggatttcctcccccgtgggtctggaattgtcactcggaggcccctcattcttcaactgatcaacaagcccgcaactcaat

SEQ ID NO: 3611 - DNA, 452 bp, Aspergillus oryzae
gcttgtcgcaagtgacgaaccatttgcccatggagacggcgaacttctccgatttttactgttcgctcgagcatgcaagaaactgctcagaaatcatgggcctcgaagtcaacccgaactggtattacattccctcagtctacaacggccgcacatccagtctcagagtatcgggccagcctatccgccgaccctggggtgtcatatcgggtccaggtgcatcctctcaggcgacgtggtcacgaagcaagaggctcgacttcgagctcgagatgggtgtattcttggcgaagcctctgccggctggtcagatcctcgacatccggaacgctaaggagcatgtctttggttttgttattctgaatgactggtcagcgagagatatccaaggattcgaaatggctcctcttggtccattccatagtaaagggtttggaaccacgatctcaccg

SEQ ID NO: 3612 - DNA, 404 bp, Aspergillus oryzae
cggacgcgtgggcggacgcgtgggtgcagaaagccagcgaaggctgcatgaaggtgtgtatgctttcgttggaggacccagttacgaaaccagggccgaatgccgcatgcttcacaaactcggtgcagatgtggttggcatgtcaactgtgccggaaattgttgtcgccaggcactgtggcattagagtcttagcacttagcttggtaacaaactgtgctgttctctctcccgttcctcgtggggacgatcgtctcctacagggcaagggtgttgaagagctagacgctattttgcaggagggcaaagcaaaccatgaggaagtactcgaggctggtcgttcagcagccatggatatgcagagggttgtagtgcaaactatattgggcgcgttcaaaagcgatt

SEQ ID NO: 3613 - DNA, 436 bp, Aspergillus oryzae
agagacatatcgaacagcttgctgcaatggaaggggagccatcttaatgtgcgtcgcccgaggaaaggtctccgaaggtatcgattttgaccatcactacggtcgtgccgtgatatgcattggtgtgccgttccaatacaccgaatcgagaatattaaaggcacgccttgaatttcttcgagaaaattaccgcattcgagagaacgacttcttatctttcgatgcgatgagacatgctgcgcagtgtctcggtcgggtccttcgtggcaaggatgactatggagtcatggttctcgctgataagcgattccagaagaaacggacccaacttcccaagtggatcagtcaggccatgcttgaaagtgaaactaaccttagtactgatatggccgtggccacggcgaagaacttcctacgcggcatggctcagcctttt

SEQ ID NO: 3614 - DNA, 503 bp, Aspergillus oryzae
gtcgccagcgccaatcgccattccgagacctcagcaagactattcttagaaatcgtattcgggctgtcttgtataacatttatataatacaacttctgtccggggcctcttgatcaaccctgagaaagaacccggtgttacggagttaaggaccttacttatctggggtagcgctcgggacggagccgacggcggaacacagaagtggccgcgcagaccatttgcggtcaccacatcttcagacttgctgcagttcaaggtctttctttgttgggagcaggcctctgaggaccatgatgctgatgtgatacagccagggtacttgacggcgtttcaatccatggattttcattgtgtctgcaggtgaacccaacgtcactctcttccatctatgcgaaggatcccttggcacctgctgtgatatatctacaatcgttcttcggtgtcgcgggcttgtccttggccacacagctcttttaatacctctggcacaacatataact

SEQ ID NO: 3615 - DNA, 499 bp, Aspergillus oryzae
tgggctggaagaaaaaaaaagttgctcatccatacggtacaagtcgatccatattccatacagtaccgtaccacctattgcagatgtgttaacagtagtactgtagtggtcgactgtcgacgtacagactttttgttcgcttttccctctttctttttttcttcttttcttttgctttttcctattccttgatttcgattttagcttgactcttattttgggaggtctcagagctccctccctgcttctccctttcctgcttgcgatctatatacatcccgtacatacatcttgcagaaagaggatccagattgtcaacccagccggaggattgaaaattcccgccactacgaacccacgaaattttcaaacagcatacagaacagagaaccccacggtcccattcatttccctttctcttcccccccatccaccttgaatcgatttacagccaccaggttcctttcccttgggttatgcagagaaacgcaggatacca

SEQ ID NO: 3616 - DNA, 420 bp, Aspergillus oryzae
gaaagaaggccttatgcgacacaattttggagctcgatcgtcgtgtacctgtgcggtgacttgagcgcacagttattgtttccgtcagataacaagtcggtcaaggatacagcccgagaaaattcagagagtgaagacaatgacgccgcgacatccggagggggatatgccccgtggaggacattgcggcatttgaccgtgggcgcaggatcaagcattccgtcgtataactggttcatgttccttcaccaccacttcaatttcgcatccaaattcctctcgatcctcactaaggtctgcgtgcaacaggccgtgttcacacccgtcttcaacacctacttcttcagtgtccactcgctgctttccggcgcaactctcgaggagacctgggagcgtctgaagaaagcgcttccggtgagt

SEQ ID NO: 3617 - DNA, 536 bp, Aspergillus oryzae
ctttctctcccccttgattttcattctttctgattatcagtattccgatcagacaaggggactatatccactgcattagtacctgctgtattatatcattgcatttctctctatatttattcccctttaaaagctccttattatcttcaacaccatgggttttctcgaggacgaggacaagaagtacttggacgacgtccaggccgtcaaggcctggtggaccgattccagatggcgacacaccaagcgccctttctctgcagagcagattgtggccaagcgtggaaacctgaagattgagtacccctcgaatgtccagagcaagaagctctggaaaattctggagagcaacttcgagaacaaagttgctagcttcacctacggctgtctcgaacccacaatggtcacccaaatggcaaagtaccttgacaccgtctatgtctctggctggcagagctcttccactgcttcctctaccgatgagccgtctccggatcttgctgactaccccatgaacactgtgccaaacaaggtaa

SEQ ID NO: 3618 - DNA, 545 bp, Aspergillus oryzae
tctgcttcttgcttcatttttcttccattgaagaaaccgtttccctcatccatcctaccttataataggccataaaaccttagtaaactcctaaaaaaatcaagcgacttgcataatgcctaaaagcagtgtcaagcaaaaacctcgccagaaattcaagccggcttcacgttcgccgtttgagaatgctaggcctactcaggaagacagcgacatggaaacgaacagcaacttgagcgacggcactgatggtattcctgaaaaggacgaggcggagaaaaaattggaaaggctactatttggtgacgatgaaggtttccaaggcgcattaaagagccaaaaggagcgcagcctcatagctctatcaaaagaaagcgacgatgagggctctgacgcagggcatagggaggatggaaccgaagatcaagaactcgatggcattgctgacgctgatctttttttccttgattctggagctggacctgtttccactgacctcgccgaatcccctgagacgtcttctgaacctgacgaagaagatctgg

SEQ ID NO: 3619 - DNA, 325 bp, Aspergillus oryzae
ttgacagcgagctttgactcctgagaaaccttggcaacaattcgggcttgcgcctggatttccttgaggggcttcgccaactcgtcccgtgttagggcaggggtctccttggacttctcttcgaaaacgaacacactcagcaccgaagcgacttgctcaggtgtaaggttattgaagaaaccgttgaaaagcaattcgctgagcatcaattcgtcacccgtgctaatttcacaggccacacgggctttcaactgcacgacctcggcttcgttgatgaatccaaaccgacgaagcactcgtttacggcactttagctcgtaagctg

SEQ ID NO: 3620 - DNA, 388 bp, Aspergillus oryzae
caaaagtcgatctagcagcaacgacatctgacttggagctgtcccgataccgtgcggtcggttagaagctaattactaggccttgggcttccggagggggtacactgtccttctaagataaattgggtagtgtgatctacccaacatccccgactcgaatacgcgtcgccgacaaattacctgcttggtataacctcacatcaccatggagtcgtctcgcggccctcccagggtcaagaacaaggccgccgcgccgatccagatctcagcggaacagctgcttcgtgaggctgttgaccggcaggaacccgcgttgcaggccccgacgcaacgatttgccgatttggaagaattgcacgagtaccaaggtcgcaagagaaaggagttt

SEQ ID NO: 3621 - DNA, 443 bp, Aspergillus oryzae
ttccttgtctccggttctccgaattttagcattctagctccacctctctactcatttccaactctttccttctttgtgacacttcgtcgagcttgtcgcaatcgctcgccaagtcaccacattcctagcggacttcagccaccgtgtaacccctcatgcgtgcctctcggggctattgtttcatcctcttatcccttcggcaactcgaaagacgatccgttctcgatcgccccctacattgattgtcacttgtgcgacggggctgagggcctttgaaagtataaatctggcgagctacgaaccgggtgcacctgtgcaagatgaatatcgacgagtttcttgcgatggagccgagcagcgacctggacgagattgtcgacctccgctctttggattatgtcacccggtatgacgatcatctcatgtgtgcgatatgccactgt

SEQ ID NO: 3622 - DNA, 526 bp, Aspergillus oryzae
gacccacgcgtccgcagagtcagtccggatacgataactcgaaatcgtactactcagccgctcctccgtcccaccctcaatatgctccccagcaacccttgacccagcctatggctccttacggccagactatgcccgccaatacgtatatcaagaacgacatggcgcctccgacggcaaggacttcagggggaccatcagatgtagagcaagctgatgtgaaggctgaccgttacgcccaaactaatgggcacgttagcaatggagcgggtgagcctgtacccgagcatgagcctgagtacgtgcaacatgatagtgcaggctataacaccaaccgcggatcttacacatacactaccaacccttctgttggaagcttggcgggtgatcattctcaactcgcgtctgatatgtctggctccccctcgcaacagaacgggtccggacgcatgactccccgtactagcggggcgccttccccaatggggcccttcggggaattaccaaattacccgccctttccccc

SEQ ID NO: 3623 - DNA, 365 bp, Aspergillus oryzae
ccgtaccggacgagaccgacgaggatttgtcggagctaagattcggccggcgatggttacgcgaacggagagcgatgattccatgatagatagaaatggtgattcggatatcatgcgtgatgggcatcgggaaattagtgttctttgagacggtctacttcgtgcatttatcggcttgtcttgctttttctggcgcacatagatacctctggcgtgattgtcaaagtgggctgttcttttatatccttgggagtctttttggttttttttttttttttttttttttcgttttgattgttctttctcttcatttttaccgtatggctaccggatctgtcctgaatcaactggcatttgcatcacgc

SEQ ID NO: 3624 - DNA, 443 bp, Aspergillus oryzae
caagagtcttggctgcaagcccgtcgccaacgtcgactctttcaccgaggacaagctgggcactgctgacctcgtggaggaggttcagtcctccggggcccgctatgtcaagatcaccggcatcaagtccgcccctaccaccaaccagaccgtgtcgatcgtcgctcgcggtgccaacaacctcatcctggacgaggcggagcgttccctgcacgacgccctctgtgtcatccgctgcttggtcaagaagcgcgcccttattgccggtggtggagcacccgaaatcgaagtcgcccagaccctcgcaaagcgcgcccgtgagctcaccggcacagaggctatctgctggaaggcctttgcggatgcgatggaaatcatccccaccacgctggctgagaatgccggtctcaactccatcaaggtggttaccgacttgcgtcacc

SEQ ID NO: 3625 - DNA, 423 bp, Aspergillus oryzae
gaaggccttggcaataaatccctttcagagtggtgggatagcgagcgcagcaacaaaacggcagaagctgccgcgattgaggaggctgctctgctccttcggacgagcaatattccggttgcatttcctacagagacagtgtacggtttgggagctgatgcgacacgaagcgatgcggtgcaagggatctacaaggccaagcaaagaccgtcggacaatcccttaattgtgcatatcgactcactcgaaatgttggaacggctactcaacccgcaggaatcgggttctacgagcgcatccgacagcccgagaaacacaattccttccgtctatcaatccttgatcgcccgtttctggccaggtcctcttacgattcttcttccgaatccatctggatcgcttctggcgaaggaagttacttcc

SEQ ID NO: 3626 - DNA, 474 bp, Aspergillus oryzae
ataaaacatgtcataaatgagtgaccgccattaaagaccagacattaacattataataagatcctctcatatgtcctccgagtcatacgtatgatacaaagaagtttcatgtcgttttctccccaaggagctcttttcctttgttcctttttttcttggtattgttggtgtagcatcttctctgttgacgtattcaatactgtcattcttttggtcgccaatcctgtcaaaccgtagcgggttgaaatgatgatcgtcacccctttttcgagtcctcgcacggcccaatcagtgctgatctccccatgaattccggattcatgcgactccatagacctcagtcacagggatagtgaagttcttctgagtggatgtgacgttggcatggccaacggcatagaactcggcctcgccttggaaccaagcgtgttgtacatggatcgtccacacggggtatagttgagacaccacctt

SEQ ID NO: 3627 - DNA, 458 bp, Aspergillus oryzae
agaactcgagggactcttgttgatccatcggttgattataccataaatacctcccttgtattataagtttatacccctccctgagtatttccaacgatattcatcaacctccatcatggggtccttaaaggatgttgaggcctcccatgatgaccacaaggatgctaccgccgtggagatggatgatatcctccaagactccaagggcaccgccgcctttgacgaggctgccatggatatggaactccaacagctagagaatcaactgcgtgaattgaagaagtcgcgcttcgagctcgcgctgcccaacccggcctactttacttatatcctagtcgcatttgcctccctgggaggtttgctctccggcctggaccagtccttgatcagtggtgccaacctctacatgcccgatgacctgcacttgtctgactcgcgcgccagcttggttaatgccg

SEQ ID NO: 3628 - DNA, 434 bp, Aspergillus oryzae
cggacgcgtgggggagcatatcaataacataaaagaaactgagttggtgatgcctgacccagcgagagaggcggtcagatggactcccgtgacatcgaattcaagcggagtctcaaggatcttggatcaccaacgagagaaccaaacgccgcggaaatcttgagtcttggtcaagcttcatgcgactcagggatccccccacttattccaagccttactcggtttctgtggatttttctttctctttgttttatttacccgttcttccgtctcccctctctgactgttccactcaatctcatttggtcctgtcgtttctgttgccatcccagcaaatcacaatggttggaaacaattactcttccctgctcacacaagcagccaccttgccttgtgaacacaagaaaagaacgaaatacgagctactcggattt

SEQ ID NO: 3629 - DNA, 505 bp, Aspergillus oryzae
ctttcttcgtcttcatacaaaacttgcacgtcgtcgccacattggcattgtacaactaattgcatatccctttcttcttgctttatttgtttatcttttcccataacacatcgaccaatgttcagacaatactccaacttcatatcccacaagaggagaagaagcaaaagtacttctcgggtcttgtccgttgcccagtccgaagcagcctcagatgcaccaacagtaaatgagccgattgagatttggactcactcgcagcccatagatgctgctacccagcaacagaatggctgtttcaccactttgactgcacggatacacaaatacgatcatgtggcccaaagaggtagcgatcgcttcttggaggacttgacggccaccctcgacagcgaagaggccaagtcgaagagcagctatctgacctccccggtgggaaattacgctagttttctgtatccagagtgcatgcccgaaaggttggaacttgtcgcctatttgactg

SEQ ID NO: 3630 - DNA, 490 bp, Aspergillus oryzae
gacgaactgctggaggaatctgaagaatggttcaagagagcgatgaaataccgcagacatcgaaaatcgagcactagctccaagggcaccgcttccactccatcattccgtaagcaggttctgtcggaaatgccatctacgggaagcagtgagacgcccgactctgttcatcgctcaacgtcgatccccacggacgatcccgcagcctgtgctattgatttcggtgatgaccctcgctacgaggcagacaatgatacacaccaattcgaacctcaattccgagacttcggtcaggagtccaatgcggtgaagctttccaagaaagaactcaaggccaaacgacgtgagatgcggaagcaacagaagctcgcggagaaggcaaatgaggcgaccgctatggacaacgccaccaatgctcgtccatccttgaaggctcacctgtcggaacctcctctggagccgagtgcatcgcagaagggccaagaggacc

SEQ ID NO: 3631 - DNA, 516 bp, Aspergillus oryzae
ccagcttcctccatacctctcctcgctaccttctgcctgattcacgtccagcctcacacattcgtcatcatgaagaccactgctctctcttttgccctgctggctgccgccaccaccatggtgagcgccgatgtttccgttggtgaatgcgctcaaatgtgcatcagcaacatgaacgccaaggcttccgagcttggttgctccagcggagacttggattgcctgtgcaagagcggcaactactcctatggtgtgcgcgactgcactactgaggcctgccctagcgaggatgctgctgccgtcgtggctgccgctcttgcttcctgccctaacggctcttctgacagcagcgctactggtaccaacggtggtggtgcctccaagaccggtgactcgactgccactggcactgctactggcaccgatgcttccaagaccggtgactctaccgctactggcactgacgcctccaagaccggtgattctaccgctactgccactggtaccgacgcttcc

SEQ ID NO: 3632 - DNA, 136 bp, Aspergillus oryzae
ataggataattctggtgtaagccactttttcttcaccatcatgtcaattatgtcgaaaccaatttcttttcaacctttaacgccagtaccgtggtcaaaagagatctaaaaggaaaatgaatagttcatatagctg

SEQ ID NO: 3633 - DNA, 505 bp, Aspergillus oryzae
cggacgcgtgggctcgactacattgtttcgcttcgcgaaggaattatggatgcttggggtggtattgttttgtcttataagggcaagcctcaagtgacttccctccagccttatgttgaatctatcttccagctcctccacctgatctctcaggatctcaaccggagtgaggggctgatgagggcctcaatgggtgttcttggcgacatcgcggaggcgttcccgaatggagagtttgcggccttcttccgtaacacctgggtcacggacttagtcagagacaccagttacaacagagactttggcgcgaccacagttgagactgctcgctgggctcgtgagcaggtcaagcgtcaggtcaccctgtctacggccgcagctatggcataagcatggaccctcgcactcgcaaagccatctattgctcttgtcgagaccaccctcctcggagcaaggcgccctttcaggcgcactcagagaagttacgccgtggaccacttgctcc

SEQ ID NO: 3634 - DNA, 520 bp, Aspergillus oryzae
gaactacctgcaaaatgcccccggcggcgaggtacccggcgctttgggcctcggccaggcagctgcatccaatattgtgaacgcactgatcattgggtcctatattatgccagttccagcggctgtgctcgctgatagtttcttgggccgatacaagaccatgctctactctgccatcattgaggccatcggggcaacaattttatttgcgacgtcattgcccgtcgctattcatgggggagctgctcttgcaggcgtgattgctgcctgtgtgttactggctgttggatcaggggcattcaaaaccacggtggtcccgtttatcgccgaccaatatgatgcaaccgagtttcgaatccagaccaggaagaaaggagagaaggttgtcaccagtcgtgagctaaccattacgtatatctacaatgtgttctactgggctattaacgtggtgggtttcgtggccgatgctacgccgctgttggaaagatatgttgggttctggctcgcctacttgataccg

SEQ ID NO: 3635 - DNA, 592 bp, Aspergillus oryzae
ggccgcccttttttttttttttttttatgcgtaaaagctgaattttacctcaatcttatgtacaagttcaccgctactgacatcccatttaataccagagggtgatatgggaggcatattgggaatgaggtggcaaaacatgacttaacagtttcaacgataagggagcaaaacacaaatagagaagcataggtgttacaacgacaacgcctagacaatagacaaacaaggaaaaaaaatctaggcatatcatgctttaagtcgcaaggtctcagccgtacagagcttggggagacatttcaccagcagccataaagtttgtctccgggtttcctgtggccttagctgctgagcatcgggccattgttggcgagctccgagaaatggagtcggtaaaatagaagtcatcgataaccttcttgaaaggtgccagggttggctgggtgcccttgttctgttcgaccaattgaatcttgctcaaagagcccagagaagttggctcaacgacgtcgtaccggcgcatcacagggctaatctcttccatacggtcgcgaagtgcttcaatgtcgtcatagggaagaggcacgtcagg

SEQ ID NO: 3636 - DNA, 73 bp, Aspergillus oryzae
cttagctttgggggtaattctcaaaatgtatattacaatgctcaagggtcaatctatttgaatataatttact

SEQ ID NO: 3637 - DNA, 492 bp, Aspergillus oryzae
cttgattcattctttattggagcgttctacaagatgatgctccggaagaaggtgtcgttgcaagatatggagggtgttgacgaagatctgcaccgcaacctgacttggaccttggataacgatatcgagggcattatagagttgacgttcgccgttgacgacgagaagttcggagagcgccgtacgatcgatctcaagccgggcggtcgggatattcctgttaccaacgaaaacaagggagaatacgttgagttggtcaccgagtggaagattgtgaaacgggttgaggaacaattcaacgccttcatgtcaggcttcaatgagctgatccctgccgatttggtcaacgtcttcgacgagcgtgaactggaactgctgattggaggtattgcggacattgacgttgatgactggaagaagcacaccgactaccgtggctaccaggagtcggatgaggtgatccagaacttctggaagatcgtccgcacctgg

SEQ ID NO: 3638 - DNA, 361 bp, Aspergillus oryzae
cggacgcgtgggcggacgcgtgggtgcggaggttgactcttccgtggccgcctcgggccataacactgtctatgatcgcaaggctaaaattatcaacaaggccattcaggatatcggcatgggccgttatcaatgggagctctatattctgtgtggattcggctggactgccgacaacctttggctacagggagtggccctaaccctaaccccgttgtcgatggaattcggcgtctccgaatcttatgttcgcttcaccacctgtgccttgtttgtgggcctgatcgttggcgccactttctggggtcttgcgtctgatctcattggacgtcgattggctttcaacacgacgctcttcttg

SEQ ID NO: 3639 - DNA, 446 bp, Aspergillus oryzae
  modified_base (80)..(81): n is a, c, g, or t
cggacgcgtgggctcgaccagagagaaaaggactatcaacattcatcaccgaagggagtcattgaggattttgttcaacnntggagtgtcgagtccgaccgatagccgttggtgcccttcacccccctaccacacaccaccatggccgacagcatacaccactctcaacgggcgcaaggctcgaacaactttgatgtctccgagctcaccaatgctttcgagcaactgatgcggaataagagattccatcgtctccaggagcactcgagggctcgtactcattctccatcgccgtctccgtctcaggtgtcttcgcccgggccttacgcaccacctcatccctcgcgagcaccaccaccacctccaacggcagctccttttcagccaccccaatacccacaacaaccgcaacaatacccatccaatcaatcttcaatgctacaagg

SEQ ID NO: 3640 - DNA, 466 bp, Aspergillus oryzae
ccccaacgcccgcaacattgtctgggctcaagaagagcctctgaatgcgggtgcctggagctacacccagcctcgcattgagactctgctgaacgagaccgagcaccacaaccgtcgccatgtcctctacgctggtcgttcccccagtgcatccgtggccactggtctcaagggtgttcatctcaaggaagagcaggagttcctcgaggaggccttctctgttcaccaggagcggttgaagggtgagtaagcttgtggataatttagagcaagggatattatagcctgtactaggtgccttgtcttcagagaaatgaggcagcgaatactcgctctggtctcctttgtacgatttcctttgttgacaacatcctaatctacagtcgtgtttgtgttggaacgttagatttctgatttctgacacatgttacatggtccgacctgtttatacctagcaagtgtcttt

SEQ ID NO: 3641 - DNA, 562 bp, Aspergillus oryzae
cccggaactggaaagacggatgttgcaacgcaaatcattaataacctttaccataattttcccaatgagcgcacgctgttggttgcgcacagcaaccaggcattaaaccaacttttccaaaagatagtcgcactggatatcgacgaacgccaccttttgcgccttggtcacggtgaagaagagttggagactgagtcaagctatagcaaatatggccgggttgaatcgttcctcgataaccgtaacttttatctctctgaagttacacggttagcatcatctattggagcacagggcgcccatggaaactcttgcgagaccgccgggtacttcaacaccgtctatatccagcctgcatgggctaagttctgggaccaggcccgcaccgaaaatatctctcttgaagagatcattgcagccttcccatttcatgcttacttttccaatgccccgcagcccgtattcgactcttcgagtcctaaggaagcagtgctagatgtagcagaaggttgccaacggcatatcgacaagatattctcagagctagaagatatccggccgt

SEQ ID NO: 3642 - DNA, 567 bp, Aspergillus oryzae
cttgtcgttgattccggcgaaatattattatggggaggatggtagtgaccaatggaaacgcaagaaacagacgaaagaggaagctcgtgaggcgaaacgggcgaaattggaccccgatgccgcgaagactgctaaagacgtaatggaagagaacgcccggaaacgcaagcgtcaagaagagggtcataatgagactgcatcatctgaggatgaagatctcggctcagaaatgcctaaggaaggcctgaagcgggccgatgcggcaaagaaacagaagcaatccgaagactcggcgaagtcggaagaggcagaagcccgtaagaagctaaaggaagagaaaaaggcacagaagaaagagcaacaaaaagagaaaagaaaggctaaagaagcctctaagaaggaaaagctgaaagaacagcaagacaaggaggctacaacccctactgccgatgctgcacagaagccagagtcgaagcctgccagtgataagaacatgaagccagaaaagccacccgtaaaggatgacgataatgatgacgacgttgatgaagaagagaccgagggtct

SEQ ID NO: 3643 - DNA, 565 bp, Aspergillus oryzae
ggtcactgatgacatcagcgacatcactgtcatcgacatgctcaagaccgttggcaagaagaccaagtgtttcacccgtttctcgaccgtcggtggcgagaagggttctcccgacagcgctcgtgatccccgtggtttcgccatcaagttctacactgatgagggtaactgggactgggtgttcaacaacactcccgttttctttcttcgtgaccctgccaagttccccatcttcatccacacccagaagcgtaacccccagaccaacttgaaggatgccaccatgttctgggactacctctccactcaccacgagtccgttcaccaggtcatgcatctcttcagcgatcgcggtaccccctactcttaccgtcacatgaacggctactctggccacacctacaagtggatcaagccggacggcaccttcaactacgtccagatccacctgaagaccgatcagggcaacaagaccatgaacaacgaggaggccggtcgtttggcctctgagaaccccgactggcacacccaggacctgttcaacgccatcgagcgcggcgaaaac

SEQ ID NO: 3644 - DNA, 553 bp, Aspergillus oryzae
tgaatttgcggaagctcgtagaagagcttggtggatgacgtattactgcgttctccaagggtcgattgtcagcacaactccgctagctattgttgcaaacgatcctcagtttgtaacaccttatccgcgctttgccgctgatccagatggttgggctgttctgatgcaagctcagcaagtgctggtttcagcaactcagttcgtaattgacctgaacaaatgtatctcaacaaggaccaatatgccttacatttacgaacggatgcagcagctcgacacatgggcgagctcagccttggcacaatctaacttacttcctattgttcctccgtccatgaactgtggcgatggcatggaatttacgacagctcaaagtatacgctcaatctcacggatcaagttgtccagcgcacagatcaaaacccaccgctttagagcattctcagacatccctattttcattaagaaacattgtgacctaacagcagctaattccaacaactcagcagcatgtaattctgccaaggattccagagtgcagaatggaattacc

SEQ ID NO: 3645 - DNA, 522 bp, Aspergillus oryzae
gccaaaagcttttatccagaagctactgggcatgggcgatatggcaggattagtcgagcacgttcaggccgtgaccaaggactcagtagcagccaaggagacgtacaagcacatctcggaaggtatctatacggtgcgtgatttccgagagaacatttcctcgatcatgaaaatgggtcccctgtcaaaactttctggcatgatccctggcttgtccaatctcactgctgggctggatgatgaagatggctcgcttaaactccgccgcatgatctacatttttgacagtatgactacggcagagcttgacagcgatggcaaggtctttgtggagcagcctagccggatggtccgcatcgcctgtggtagcggcacgaccgtgcgcgaggtcgaagaccttctgtcgcagcaccgcatgatggccggtatggccaagcgcgtcggtgggcagaagaagcagatgcaacgagcccagaatatgctcaagggtggcaataaagaacagcagctcgccgcgatgca

SEQ ID NO: 3646 - DNA, 417 bp, Aspergillus oryzae
gagactctgtgttttgtgccgttaaataaagaggctacttcacgtagatatttagatacaagtggccgccagaagcctcggatgaacgatctaggagtggaaagaaatcacccaaacatggagatgctttaccgaattcgcgaattcgtgattgatgggttggatttggttgtgagcaataaaatccccatagctctagtcgatgatggtgacaaaaaaacattcatttacaaggaggaagggctttcatctcagttctttgccagcccctcgggacatcaccataccatttcctcggcgagtattgaacgggaagacatccaacaaacaacacaagatccaagttacgctgccgattctaaaagtgtttttggaggctctcagtcagcgtcaatgtcagccagtatgcaccgcatt

SEQ ID NO: 3647 - DNA, 603 bp, Aspergillus oryzae
acgactctctccctattccagtacccactttacttcctcgtccattttcttctctgcttcctggtttcccaattataaccaacacgaccagtagcaggttgttctaatcgcgatccgggagaaagggggaactgtggacgtgtgtgctacagctcatccgtcatggcgtcccaaactccagccgttgtcatggacaacggtactggatactctaaattaggtttcgccggtaacgactcgccttcatttgtcttccctaccgcaattgctaccaaatctggtgctggaagcgccaagcctcctgttgcgaacaaacccggtttcttgtctgcaggtggtggggcaggctcacatttgtcttcgaagcgtggtacagaagacctggatttcttcatcggcgatgaagctttagccgctgccaatggtcccggatatggaatcaactaccccatccgacatggtcagattgagaattgggatcacatggaacggttctggtcgaactcgatcttcaagtacctgcgcgtcgagccggaggaccactacttcttactcactgacctccctgaaccctccgagaaccgtgagaacactgcggagatc

SEQ ID NO: 3648 - DNA, 318 bp, Aspergillus oryzae
cttgaagtttcttttctcgataccagttccacccggcacatcaggtacgacggagactccattcggagggctgtcttatgcggtccgcgctgtagtcacttcgtcatctggggtgaccgtggatgcgacgagggacgtgcaaattctgtcccgtatcgtgactggtcccagtcagactgttcgtcattttaaaaattacaccggcgagcggttgaagtcggagttgtctcttactccggagcagtcaacagatcctaaagtaaagctcgcatactctgcgaagcttgtggcccgtggtactacggcgcggggtgaccg

SEQ ID NO: 3649 - DNA, 549 bp, Aspergillus oryzae
cggacgcgtgggatgacgatgatctataacccgaataatgtggccgttgaggcaagcccattcaccacagttgttgagctgaaagcgggacagcaactgtgcaaaatgtttgggtataatacagacgagaaagctacagatttgcctctctcttggggtcacatcacctgtgacgggaccgtggccaatctcgaatccgtttgggttgcccgcaacctcaagttttatcccctcaccctgtatcaggctatgaaggagggaccacttgggttcattgccgacactttccaggtgaccacttgtgttggagaagagaagctattcaaagacctgggtgtttgggaactcctaaacctacgatctgatgaaatcctaggtatgggggatgctctttataggcagtttggtgtcacatccaaatttctggaggaggccttgagaccattcaccatccaaacgactggcaaggacgtgctagaacgcgagtttccgatccagaagcccatcaagtatttcctcgctcaaacacggcattactcgtggccaaaa

SEQ ID NO: 3650 - DNA, 611 bp, Aspergillus oryzae
cgacccacgcgtccgcttcaatctctttctcatccactcacatctctcccgtcaaaatgtctctcctccgtaacgtcaagggtcttgctccccttctcgaccgcgtcctggtccagcgcatcaagcccgagaccaagaccgcctccggtatcttcctccccgagagcagcgtcaaggagcagaacgaggccaaggtcctcgccgttggccctggtgccgtcgacaagaacggttctcgccttcccatgagcgttgctcccggtgaccacgtcttgatccctcagttcggtggtagcgccgtcaaggttggcgaggaagagtacacccttttccgggaccatgagctccttgccaagatcaaggagaactagatgattcatcttgttcttccgttttccgactggttggaataatccaatcggagtcttgtattatatcacgcaaatcatgagcttctgtcatgcactttaaataatttaaaaaagagccatctacgaagtgaggacaggtgtatgattctgttcctcgatctccgggctaatgttcccttttccttatcttgcatctgctatctaaagcgtgaaatgtgtcttggttcctttgcatactat

SEQ ID NO: 3651 - DNA, 350 bp, Aspergillus oryzae
agaagatgggtgtcaaccagcccaagcgtttggagaacgtcaacattttggtcgccaacacagccatggacacggataaggttaagattttcggtgcccgggttaaggtcgagtcgaccggcaaattggcagagctggagaaggcggagcgtgagaagatgaaggctaaggttgaccgcatcaaggcacatggtatcaactgtttcgtcaaccgtcagttgatctacaactggcccgaacagctgtttaccgaggccggtattatgtccatcgaacacgcagactttgacggtgtggagcgtctggctctagtcactggtggtgagattgcatccacctttgaccacccc

SEQ ID NO: 3652 - DNA, 133 bp, Aspergillus oryzae
tgaagcatgcgtggttcaatgatattcctcggccaataccgtcgaatgctcaatagtagctacaacttgcgttctcttttctttctgttatcctccattgctaagctaaatagaactgacgaggactgtaagg

SEQ ID NO: 3653 - DNA, 537 bp, Aspergillus oryzae
cccctacattttcccatacattgcgctcagctggttctgatcttctcaccatcatatatacctttgaccctaataccttaatcatccgcgatttgactcttctgattcttttgggattgtacctcaagttccacatcaaccttgccttatacccaccagttttcattgacgcacgcgcgcgcttgggaacactcctttttctaccccccaacacagcgaacgagcaactccttgccttccttcttccttgagcggctgctctgccatatcgtacctcttcgcctccacacactcgagtaaaaagataaaatgtcagacgccgatcagggctggaaaccaaatggtcgtcctcagtcgaccatggcacaagctttctcaagcacgctagatagtctctttgcgctggactcggatgtccaccaccttgagcagactgtggatgagaggaaatttcaaatgatcatccaaaaccgagaactggaagaacttcaggcgaaaatccgtgcgaccgaagaacgcttgaaagcacgaaagtcc

SEQ ID NO: 3654 - DNA, 433 bp, Aspergillus oryzae
gatatttcgatcatacgactcctctgctcgccggcgaagagggtcttaatactctcgctggaccttttcatatctaaatctactctgatctctctctccctccgtccccttgtcggactctccctctcttgtgtgcctttttctctcttcgcctccccaaggtctgacatatattcgtcgtcatctggccccttctaactctcgctctcccactatcgtcaacgaccatcctttgagcatccatctgtattcttcgtctcttcgtcccgccaccgatcatcaatatgtcggtggaccaaaccctctacagccgcactccaacagcgatggcagatcccacctgtgccggcccagctgccttcaccgcggcgggcgctttctcacagcctgacctgatggctttctcgctccgagaagaagaaccgatctgggg

SEQ ID NO: 3655 - DNA, 505 bp, Aspergillus oryzae
agcacatcgtcatggaccctcaacacgacgccaaatttcctctacatgaggccgctcgagagggaaggactcaggtggccgagtcacttctaaacgcaaatccgaagcttgccaatgtcaaggatgacgatgagcgtctccccatccactgggccgtagcatataatcggcttcctatcgtggagctactggtggccacgaagcacttcgatccagatgtcgaggacggttcaggctggaccccattgatgatcgcagccagtctaaagaacgccgaaggagatcccatcatcgacctactcttgaaaaagggcgcagacgtaaatgccaagagtaactctggacagaatgctctccacttcgcaacctccaaagccaacctttccaccgttcgtaccttaatagccaataaatgcagcgccagagttaaagataagcgcgggcaattagcacttcatcgcgccgcagctatcggatcctcacctataatcaaggttcttcttca

SEQ ID NO: 3656 - DNA, 452 bp, Aspergillus oryzae
cgcccagatctacagagtctggttggctcgattgtctatcttatgaggggtgcaatcttccgacctggtacgacatcttcgcgtggaacactgtctcttggtgaactggttgatatgtatcacgcccgggcggcaaccaagaaacatgacaaagtgtatgcattacttggcatgagctctgactctcctctcttacctgattacaagcttccatggagtacagtgttccaacaagtcattacttatattttctcagaaaaagcttctatacggatttggccccatcgggatttagctctgattcaaagcaggggacatatactgggccaagtaatagaagtgaaaagtgacgagtctcaacatgacaggacacatagtgcgcattcggaatattacgctacaactagtggtgaccagaaggggtgacaacaggcgtactttgtatgggagaa

SEQ ID NO: 3657 - DNA, 512 bp, Aspergillus oryzae
ggcgaccccctctcttaccatcaaccatgaggtgacgcaggatcttgattctaccaacgccttcgaaggacccgagaagcttctggaggtctggtttgccccgtccgccaatgaattgggctcgtctcaacctaccggcctaaaggctgtgccggaggaggtctggaaggacatgctggatctcgtcaattgccaggtgctttccattgtctcgtccgaggacgtggatgcctaccttctgtcagagtccagcatgttcgtctggcctcacaagcttattctgaagacatgtggcaccaccaccttgctctcggggctgccccgcattctcgagattgctgctctgttcgccggttttcctaagtccgcggctccttccggtggggttggcattgcagctgccccgtaccgtgtgttctacagccgtaagaacttcctgttcccggaccgccagcgcggtccccaccgcagctggagggacgaagtgcgaactatggacaggctcttcttga

SEQ ID NO: 3658 - DNA, 384 bp, Aspergillus oryzae
cccacgcgtccgcccactgcgtccgagacggcctccgcgagtaccagagatttcaaatgagtgactgctagtcgttcgttcaccaccagcattgggttcgcagttacaacaatggcggattcaaagggtccaacagtgaccgcggttgcggtcttttttgcaatctggaccttcatcatcatatgtcttcggctcttctcacgcatctttgttctacagaagatggggtacgatgactatctgattgtttgtgcttgtcttacttcatgggccttttctggcgtaaccgttgtgtcggtgaagtatgggttaggttcgcatatcgcggacgtcgatccgaacaaaatggagacttactccctgatggtttggataagctcgatg

SEQ ID NO: 3659 - DNA, 521 bp, Aspergillus oryzae
tctttttcgtggttttgtccgcgtcacttttcattttgctgtctgtcagcaaggccattcgtttagttattataatcgacctccttatcatttcgtcctcgctagcccccgttttcgccgcttttacccccggccttatctcccccggtttcaaagaaaaactgcggtacccctcgaagctcgccattgattgacctgtaccactccccttccattcgctaattgaacttgccttccgactgtcatgcttgttggagaatcgctattataataatacctaatcatcggttgcaatgggcaaatggcactacggagttgtcctcgacgcaggctcgtctgggacgagagtctacgtttatcgatggttggacaacgctgttgcgcgcaaaggggcagattcgaaggatctgcgatctttgccggaaatcaaaacgaagccagaatggaccaagaagatacatccaggagtgtcttcatttgccgacagaccggaagaggttggatcgcaacatctcgcagaa

SEQ ID NO: 3660 - DNA, 571 bp, Aspergillus oryzae
gaggatttgcggctctacggcagccattcacgaacgccgatcgtcatctgttttctcagtttggttctggctttgcccggctcgatgggcacccagggtgaagacacatgctgttcgaggttttcagctggaaataaaaattcgcgatcgcccagaattatgacgcttggtgtttcttccccctcgatcaacaacctccatctatctgttctcccagaaaggattctggaactcgtggaccatggacgaccccaactcttttaccgactttcaacattcctcaacccaagactacgaactcttcccagacgcggactttgctgattccatgctctgccaacgaactgctgaaatccaacgccagatatcccatgtcgaccacaccatgaagactccgtggctttcctcgtccatgcctttatcgaccccaggtgtgcatctaacccaaactgcttcaccatacagcatggaggccagcgcctttcctatggggtccgacatttcctcaccatttggtggtgcctactcatcgtccggagctgaaagcccccaaagcaataacctggaggaa

SEQ ID NO: 3661 - DNA, 211 bp, Aspergillus oryzae
cccgtaatagattatatctatattaaatatattttcttttttatactattgtataagtaaggtttatatatatcgtacctagatactatcacaagtaagcaagtagagaatacaaaggcgtttgagtgaacaatcattaaggaactcggcaaattgactaccgtaacttcggaataaggttgtggccaacaatttcattgatgattaaacc

SEQ ID NO: 3662 - DNA, 437 bp, Aspergillus oryzae
cccacgcgtccgggaggcgctttgactggcgggctagcctccggagcctggaatgcgagcttgttctcttcctccaagtcttccaccacacggcatttgttgaaatagtggctccgcagtttcttgaccaagtccgcctgttttgtgtgttctttgatacgagcctgaaggtcgtcgtgtgaattctggattcgtgcctcatgctgatcgcaccagcgacggaaaggtgagacaactaattcgcgaatgttcgaggcaatcttctggtgattcttggccgcttcgaccatctcggtgcggacaccttcatatgccttcatgtcgcccaaaagacttagtatacgtagcaccagccatagtcggtgttaacctaccttcctcacgcttgccccatcatcctttgcaaaccctgctcctgtcaaccgatccacggtcgg

SEQ ID NO: 3663 - DNA, 393 bp, Aspergillus oryzae
gaaaggttggaactcgccaagtcccaacagactacgctccctggcggccttactcgcattgacgagcatgatgacggcccgcatttacataaaaagcgaagcattcgcagccttggctaatatcatccgtttggccgtattccacaagatcgatcaatcataacatacgatttgcgatcgggtgtacgacttatttccaagcagttgggtaactgcagatgatttttatttttattgactctgttatactttttaacattacccatatctcgatgcagcatgcctcccttattccctgctttatgggtggccgtttgaatttgacttactgcatttatacgccatgctcgatgattccgtgtttcattaagccaacacaacagtttctgaggt

SEQ ID NO: 3664 - DNA, 450 bp, Aspergillus oryzae
atttccggaaagaatctggctgcctttgtacgctttcttgccttaaacgcgtcagtattttcgctagtctggaatagccaaggaggcgagcatatttcctcttggcgaaaccggttacgggagatcaaaagacttcgggaacgagctttaggttctcagactcagacttctgatgccgcagagggagcttatcccggccaacgccgcaacacgaaggctaacatattctccgaagaactgccatcacgtagtacccctgcacagtcagattttgctaccgactggaatgcgtctgcggatgccaacatcctccaaaacttggatttctctcgatggggacggtgaaaagaactctcactgtctactttgaggttagagtactacatggagttcctgatctggcaatcttcagtgtaggatgaacggaagtaaagggtagggggaaaaaaa

SEQ ID NO: 3665 - DNA, 559 bp, Aspergillus oryzae
cccacgcgtccggcgccagtcgattgatatattcaattcgctgttcattgcaatatcaatcgcccaccatggccccctctcagcttcccccgatcttcaatcccacccagcaggacattgagcagctgctcgctgctcagtgccacctgggttccaagaacctccaggtgcacatggagccttacctctggaagactcgccctgacggtgtcaatgtcatcaacattggcaagacctgggagaagatccttttggctgcccgtatcattgcggctgtcgagaatcccgccgatatctgtgtgatctccgctcgtccttatggtcagcgtgctgtcctgaagttcgctgcccacaccggtgccaccgccatcgccggccgtttcacccccggtaacttcaccaactacatcacccgctctttcaaggagccccgtctcatcatcgttaccgaccctcgcaccgactctcaggccatcaaggaggctagctacgtcaacatccccgtcctcgctctttgcgacactgactccccaccgacttcgttgacgttgctatccca

SEQ ID NO: 3666 - DNA, 422 bp, Aspergillus oryzae
acgaaacactatatgaatcgatcatgttcgcaaggcgcagtgcctcttcagaataattaaccggtttcgccgttactatctgacaacgaatgctaaagattttccatgaattagtgctttatatcaagtctttctcaagaaacctgaccttaccgttgttgatcaccaaaattgtcaatcttggcccgacatctgaaattccaagttcggcaatttgcatcctggaaaatatctccggctgctttgtcatcgttctggcgtatctccatgagctgatctgcggaagtgcccatcatgtacctgcccacttcatcgaaacagctgagataaagttgtccagtatgatcgctaacgctaatgagcattatatagcgatactctggtcgtggatgagttttatcgcaacgttcacaccgccattg

SEQ ID NO: 3667 - DNA, 435 bp, Aspergillus oryzae
cggacgcgtgggttgctttctttacttgattttaatcgcttgccttgtgataccctttatatatatattttaacttaacacagcctcataatactttcacaatgcgtttcttccagatcgcttcgattgttgcctacgcggccacttccctcgctgtcaccatcacttccccccagaatggggacaaggttgacttcagcaagccttacaccgtcaaatggaccactgtcccctcggaccccgagcaagtcaacatcgttctcaagaaccaaacctcctccgagaaagagattgccaagaacgttaagacctcagacggcaaatacaccattgacagcatctgggacattgagacaggcaccggataccagttcaatttcatatccaactctacgaagaacaccggcatcctggcccagtcgcagatcttcaatg

SEQ ID NO: 3668 - DNA, 490 bp, Aspergillus oryzae
catgagccacggactaccagctccgtcgtcgtccggcgatatttctgaagtggaggatttcgcaccattctccggcttcggaaatgcaggcaatgaccttcaagatctcgccagtgggagtgaaggttcggatctcgaccatttccgcataagttccgcatcatcatttattggccttcctcaggcgcaactcttatcgtcaaatcagctggactcaatcaacattgacgacttcctcaagtccgccaatgagtcgacagcagcgttagagcatcaacttcaagccaatatgggcatggaacccaagccactcccgtcgcaggacgcctatgccatctcagacgcccagaccttcaaaccgatgactacccctacgacgagcctttcgatgacgacgtctgctgcggatcccatgtggcccgcggcgctctttgaccccgccgccgcatcggtcgatgacaacaatttctatccgccgtcatgggtgcag

SEQ ID NO: 3669 - DNA, 400 bp, Aspergillus oryzae
tccggatcataccagctgtaaaatcggcactgagtagcagcggtgcaacaccaaaccgcaaccttactattgcagttgcaactctgtacattaatgtcgctgtttatctcacctctgaaggtagggggtctgccccagagtcttctgaacgaggtcttgtgctcctcgccgaactggtgcagatgatcgtcggtgagaaggactccgcagcggtttatcggagccttgtcgccttaggcacattgatcaaggggcttagtgaagaagtcaagaatgctgctacagatgtctacgatattaaccaagtcataagggacgtgttgtcctcgggtcccgggaaggagcccagggtcaagggcgtcgtcggtgagatcagggagtcgttgcaataaggcaaaga

SEQ ID NO: 3670 - DNA, 250 bp, Aspergillus oryzae
tgacgtcggcttggcggggcgaggcccggaagatgattcccagacggtcttggtcgtatcgtggcatggagacatgcatcatttcgatgccacagcaggcgagggcgaaggtgagaggccagagggaaccttggcgggcccagttgatgagttggtcggttgttgttctgtgtatgtggtttagctagctatgctgggatggtctagatagatggggatcgtacaggaaatattcgagtttaccgttatc

SEQ ID NO: 3671 - DNA, 480 bp, Aspergillus oryzae
atactgatgagtggcgtgaggatcattactgcttactacaactatcagcagatgccctggaatgcttttccctcactggaatgtaggtatcccttatcgaagcggggatcgcttcgatatcacaacaaataccagccgactgtgattttggaagaacatcggcggacatcagcattacatacaaagcctcactataaggccgaacatgacccaaacttctcagttctcttcaccacggcttatacctgttcacagttcgaaaccatctaatttcgattgtttcaaatcaagaagcatggcgttgcttgccaaggcatcatccctagcttgcctgcttgttctggcctttctggctcttgcctctatcagccactcgcgccccgtcacggaaatctccagatctgggacgttgcatgcgcgcgatccggatccgagattgataccaggctccaatgatctagtcagtgatattctcgatag

SEQ ID NO: 3672 - DNA, 539 bp, Aspergillus oryzae
agtagctgcagcatcttcatggaattagcttcggacgtaggagtccgtcattctgtcgttctctccaatctcaacattcaacatttggtcgacttttcaccggcgaccgtctcaattgtcagagagatccgctactgcgtgatcgccattgtggttgggtggaccactactcgtgttgtctccgcgctattgaatcgaagagctgctcctgatcagtgacgcttttgatacccagtggtcaatattttcttgctctctgttcttttgctttctttatttgcattatttgaaaacgttttgtccgccattcccatagatcgacagggcacttccataacgagtagtgatacgtgattgattgtatagacactatgaagttctcagcttctttaccattgttcgctactctcgctgcggcacaaactgtgatcgaaggctctagcttcggtcatggtcaaacgctatcacccaccagggacaccatcccgggatggacaattggaggagaaggacattctccccaagttctctccaacaag

SEQ ID NO: 3673 - DNA, 463 bp, Aspergillus oryzae
gccaacacttataatggacattgtattacgcgatggccttggtttaccgtctgcttcattcccatgatcccactcgcaacaaaaaagtacaaggaagtcacatgttacacatgccgcttcacccaagacctccgtgatcgccccgatatcacgccagagaccaggcccccggcaggtgcaccggctggcccggcaccacctccacaagcctattggggacctcctccccaggcttctgggggaggtggatatccccagccccaggccggggcaccgccgcagaactatcaatataagtgagtctgtgttggtgctaacctttgttttcttattttattatgctgagggctatgggggatggaactttggtctggttgagaagcgatgttaatgatgtgtatattctgttgttgtacgatacctttggttctttttctacttgacttttttattttaattatgg

SEQ ID NO: 3674 - DNA, 568 bp, Aspergillus oryzae
cccacgcgtccgctttccactcctccctctcccccgaatctccccgcagccattgggccagctatcacactgatatctcgagcggcggctccctcgtcttcctccctcgccaacctttcctcccgctccctccgagtccagggccaggctgcccgcaccttcgcgaccgtccaggacaacgcccccccagtacggcatcatggcggtctgcaggaccaggaccggattttcacaaacctttacggacaccatggcgccgatctgaagtcggcaatgaagtacggtgattggcataggaccaaggatattgttctgaagggcgatgactggcttatctcggaactcaaagcttctggtcttcgtggtcgtggtggtgctggtttcccctcaggattgaaatactctttcatgaacttcaaggactgggataaggaccccagaccccgttatctggtcgtcaatgccgatgagggtgagcccggaacctgcaaggaccgtgagattatgcgcaaggacccccagaagctcattgaaggctgtctcgttgtcggtcgtgcgatgaacgcca

SEQ ID NO: 3675 - DNA, 499 bp, Aspergillus oryzae
gtttttcttgaacgcgtcttcttctggcgctctttgagctgccatctattgaagaaggcgtagatcgcagatcttggccgcataccagacgccattgtctcctttccctgctgcgccatacctcaacaccatgccttgtatatcatgaccgtcttcgtcctttttgggaccccattctcttctgccctctggctcgatcggttacacgattgatcgatactgagagagtatcttcttattcattatatttgattgatgaaattatcggattatattctttccaagcaattgaatcctccaatcctcgccgtcgccacgatcctttccaccgttcaccatactactacctaccgaactgtctctctatcctcacttaccttgtttctctcacatactcttttgtcgtcagtattaatttaatcgtaaagtgatggccaacttccgtggtggtgaccgacctttctcgtcgatacaacacatcttgaagatgctactctca

SEQ ID NO: 3676 - DNA, 544 bp, Aspergillus oryzae
cgccagcatcaccaactcgctctatgaaagtggcttgctgggcgccctcggcggtggtgctcgcgctactagccccggcgcaaagtccgaggtgggcgagaagaagaagcgcaagcgcgctcccccggaccccaatgcgcccaagcgcgccttgactcctttcttcctttacatgcagcacaaccgcaccaagatcagcgaggaaatgggtcccagtgccaagcccaaggatgtctctgacgagggcacccgtcgctgggccgagatgcccgaggaggagaaggagcactggaagaaaatgtatgcggacaacctcgcagtctacaaggagaagatggcggcctacaaggctggtcttccttacactgatgacgcgaaggctgccaaccagctgcaacaggaggcggaccgtgcggaaaccacccctgctgaagagtccgaggaggaggaggaagaggaagaggaggaagaggaggaggagcccgaaccagtccgggagcctacccctccacgcgctggcaagcgtcgccgcagcgaggctgct

SEQ ID NO: 3677 - DNA, 554 bp, Aspergillus oryzae
caagtacgacacgccgtccttatggccgtgctttaatcaccgcttttaccctcttcggcacttagatggttcttacaggcgtgtatgtaccgtgctgaccgccctcgatataccggatcgtttccctgttgagcatcgccggcttttttgatagcatctcactctttgcgttttgttgttgctgagtacgaatacaaatataacgatagtatcttgatgtccctataaccgccgacgtcgccgaagtcgagcccttatcagcacaaggagacgcgtcttccgtgcacctcagctagacatagttcattggaccctcgatatattcgcgctggacatacaatatggacgatcaagacaataacagtgggcttgataatgtgccaaacaccggctctgtcggtcaattttcatttgcccccgctactcgaactaccgttgtgaccacaacgactactacgactacgactttccctccgttatttataaagccaccccgcgcaacgcgagaacttgaccctaagctatatcctctagcatcatctcccactccttcg

SEQ ID NO: 3678 - DNA, 447 bp, Aspergillus oryzae
gtcaaagcttgtcgagcatgcagaggaacgagaccagcgaaatttctggaatctagttaagatggggacgcgccggggtgcgaccttccttggtccgctggatgaacatccgccgcggctcttcggtctctcatcgccacaagtggtcctaaacctactacgggatgatgcagagtgccagatcgacgccatgagagcaatcgtacgcagctcccctgacgtcggggatagcacgatgtttattggatatactcacgagtgccagcgactcgggaaatggcaggaatttactaccgtcgtaccaattgcgactaaagaagggaagaagaaacatgtgcgttgggtccccgcggatgtcgcaaaggtgaagcacaatgcatggttgagacttggggaagattacaacacaacgcgattcgatgaggttatttctatgggggaggtttg

SEQ ID NO: 3679 - DNA, 428 bp, Aspergillus oryzae
cacaacagcaaccgcaaccgcaaccgcagcaacaacaacaacctcccccatacggcaactatccttccaatcaagctcctccacaatcggcagcatactccaactcagcagctgccatgacttacgcgcgaagtgccgctgaacaagccgcactgatggagaggaatagaacccaacttgcagctcacgcgcgacagagctcaacaccacaacccccaactgaaggcagctcccaggatcgaagcgtaacacccggtaacagacagaacggcaacgcggtcccttcatgagtcgagcaagtatcgtcaacgttttggagttgtctttccatgcttatgttcgccattgtctttagaaaaaggaaggctcggttaatggtgttacacttttatgatttgtacttgatcttttgtgactttgtcctcttg

SEQ ID NO: 3680 - DNA, 213 bp, Aspergillus oryzae
tgaagggcacacggcatgcggccaatcggaaccgcagcctaagcatgctatgaaggaaaaaatgttctacagagcggatacatatgtggttcccctcctttcatgtcttgataattgtattatatactacatggtttggctgttcagggtttctttatatctgggtctaattgtacagcgattcatcgcaaaatagaaaaaagaatgagactc

SEQ ID NO: 3681 - DNA, 393 bp, Aspergillus oryzae
gttgacaacacgcccacccgccaattcccttatctgctcgggctcatactcctcggcgcatccatggtcatcctatcaattgcgcatacagtgggattattcatcgtcgccagattactgcaaggcggtgcgacggcaatggtcaccgtcgcaggtctcgcgctcttgacagactccgtttcgttcgacaacctcggccaggtgatcggctacctaggctcctctgttgcgctggggttcctgcttggtccgttgatagggggaattctctacgagaaatcgggataccaggcggtgtttgcgatggcgttcgtgattgtcggcgtagacttgctcatgcgggtcgcggtgatcgagaagaaggttgcccgtcggtggctccttgaggactcg

SEQ ID NO: 3682 - DNA, 483 bp, Aspergillus oryzae
ttctaatgccctaggcttcggtgactatagacaatcatgaagctcgatgcgaaggcgattcgttacctcacttctgaggatttccgtgttctctctgcggttgagacaggaagtagaaaccatgaagttgttccgaccccattgatcgcaaatatctcaggtctccgaggtagtagtggtgtaaaccgagctatttcgaatttggctaaaaccaatcttattgcgaaggtgaagaatgccaaatatgacggatatcgtctcacctacggtggtctcgattatctagcactcaacgctcaccaaaagcaaaaatgcatctactccgtcggaaaccaaatcggcgtcggaaaggaatcagacattatcgtggtcgcgaaccaccagggaacacagcgcatcctcaagatccatcgtctcggtcgcatttctttccgaacggtcaaaactaaccgagactacctacgacaccggcaaactggctcg

SEQ ID NO: 3683 - DNA, 523 bp, Aspergillus oryzae
cccacgcgtccgagtaaacggagtgtttactatgtctctcttccgcagttgcaggactgcctccgtgcaagcccgtggcttcacctcctcggcctctcttcgaatcggaccagagtcgcccaatttcgtcgatgtccctcgtaccattcaaccagaccttccttcaaagcaacatgtcaagggtaccctgcctgtccctcgcgaaatcttccccgttcgccgagcggacaagccgtccgaggagtatattgctgccgcaacaccccttccttcgaaagaaaccaaagccgacccgaatgatccccatgcccaatacatcaactggaagcgccgaatggcagagatgaggagacaaaacctcagagaaggtctcctggagttgcacagccggaagcagcggacggataagtcgatgatgcagcggagtgtcgagaagcagaaacggcgggagcgcattttccggcagccggagagagaggatgagcgattgacccgtccttcggtcatccaggagatgctgcct

SEQ ID NO: 3684 - DNA, 410 bp, Aspergillus oryzae
ggaaaagtcgctcgaaccaagcacagcagaggtgccaacggcccataccagaagcccgaccagggcccactgggtaaagcgacctccgcaattttcaagttcaacaccgacctcggtcaacatattcttaagaatggagcgatcgccgatgccattgtcgacaaggccaatatccagcagggccagacggttctggaagtcggtcccggtcccggtgttctaacgaatcgcattctcgcaaaggccaagaaagtggtggcggtcgaagtcgatcctcgaatggctgctgaactcaccaagaatgtacaaggcacgccggcggagaagaaactccagattgtccttggtgactttgtcaagacggatttgagccagttgcctccgttccagatttgcatcagtaatacccc

SEQ ID NO: 3685 - DNA, 508 bp, Aspergillus oryzae
cccacgcgtccgagcctcttgagaggagcgcggacgctgtacagaggacaagatcaacaaacatacttcatacgataaactcaaaatctcaagtagttaacttacctccgcaaaagaaggcatgccgagaagagtgtgtcgaactgccctcccctatctttcctcttgttctttgtcagtgcggagttaacattgcgtcctgatactacccgaccaaagaaaaaaaaagtagtcaagcccgtgacgacagcccaagccgagcctagtttttccgaccgcctttgcccgacagagctcgaacatcacacccgatttcatcacctcctccttggcttgaatattccgcgaatataacccttgactgcctctttgtgtccctcgtcacaatctatcgcaatggccgactccaacgaatctcagccgatcgtccgggccaccaagcccgtcagtgaggcattgctcatgagaaggtactaatcgcccgctgaatcttctatatctctttttg

SEQ ID NO: 3686 - DNA, 430 bp, Aspergillus oryzae
tatttacgaggtctgagactgtaaccgcctgaagattatcgcgcgaaactcttaggagccccacgccagactccactatgttctttttgacctacctgtattacaaagtccttgccgtgttaatcagggctctcgctagtcgcggcaggcatcctatttctaacccggatgacgtcgtctatattcaatcgcgggaggcagcgcgaacaatcaaagcacatgtctaccgatcggcatcggcgccgagcccaacccccattctcattaatttccatggcagtggattcattattcctatgcatgggagcgacgacgaattttgccggcaagtcagccgagaggcagggtacacggtgctagatatacagtaccgcttagcaccagagaatcccttccccgcggcactccacgatgccgaggatgcggtgaa

SEQ ID NO: 3687 - DNA, 296 bp, Aspergillus oryzae
gcaagacgtccatcgacaagaatagtacccagaacatcgaaaatggcttctaccaccgctacagctctcgtcaccaaaggcggcaagctgtccaaggaaaccattcctgtgccgactccaggcgaacatcaggtgctggtgaagatttcctatgtcgcccagaaccctaccgacgtccaatcactcgacgccaatgccttcggtgatgatgcggttctcggttgtgactttgtcggcactgtcgagaagactggcgacaaagtgagcaggatcaagactggcaccgtgattgctgg

SEQ ID NO: 3688 - DNA, 407 bp, Aspergillus oryzae
tgaagaccaggtaccatgaggccatcatggagttgcagtattattggcgatttgggtggaagtgatgacgttagtactctgggcgtttttagcaatcagaacttatagagatgacacgggaatagaaaacaaacgacgaagaagcaaaaagaaaagaattgcattagtcgaaaagaaaacagggcaggtatccaaaccttgcatttatatcggatgtaaatactcatagtcccaggagtggatcagcgtcaacaagggaagaagcaggtgacagtgaggaattgattgttgatttgcaatagttagggatttgaactctttcattctgaagccacacgaacaagggataatacccaacatagtttgtgtgaagttcatttgttgccattcgaccatattgggttccc

SEQ ID NO: 3689 - DNA, 327 bp, Aspergillus oryzae
cggacgcgtggggcggaaaaagaaaatcacatttctttttccgcttgcgacagaagtcacaggcggaaaaagaaatgtgattttcgctatccgaactgttccgcatgtactcgcgccggcgtacgatgtacgatccctccgccgggtccccaagtcgccagtgcctccgtccctcgagatcagcttgagaatcttcagaaccgcgtacgatggttagaagacattctgcgacgcaagacgggcctctccgtcgccgacaggccaacagggagtgcgctggacggggaaggagatctggactggtaccaggtaccaacagtgttaatg

SEQ ID NO: 3690 - DNA, 470 bp, Aspergillus oryzae
accaagaagagaagttgagacggttccttgcgcgcgaagaggaggaaaacgagacccgcagtttcgaaggcacggacaaagataataaccactacacactgtctgtgtcacctcttgtctctgtaacggttacctgtcacgaaacggagactgcccagacgcaccgcatcctcggtatcacggagttcccagaacgatttctcaagggcggaaacgggttcacgtcagaaacgatcgcctacctcgagacgcttcgactcgcgagcggattcaatacctccgagcttatggaaacgcatgttgctttgtcgcgtgatgccctgcagaagggtattcatgcagctttggtagaacataatgccgagacacttacatccttgcttaagatcgatgagtatcatttccgttgtaggaatacgaacgttgcggtcacgaatagtgtgccgtatacgattccagcggaacatttt

SEQ ID NO: 3691 - DNA, 526 bp, Aspergillus oryzae
cgcctacagaggcggctgccccggattcgcatcgcactgaacaggtgcaggcgcagaagcctgggcctgtagcatcagatgaccaagctgaacgacgccagacgtctcaagcgattagtgatgcggaacaaaggaagcgcaagcggtctccatcgcccgatgtgattcccaacccagccggatctagctatggattggacctggattatttctgttatagctctgaaagtgaagatgaggcggcagaaactccatctaagcagagcgaacgcaagaaagccgatagtctagcaaagtctgtggcccgcagtgccctccgtacggagagacagtcatccaaaaaggtgcgctttgatgcaagcccagaggacacaccttctaagcttcgctcgcgtgctcgctcgactgatccctatcgcggaacacacttcgtcgggatgggtagtgattcaccaacaccacctgctcgcactgagcagccttctcagcgacatgcgggattcgtccccaatacacagggtacttt

SEQ ID NO: 3692 - DNA, 391 bp, Aspergillus oryzae
gtggtgagaaacaaccaggtagaaccgccagtgaattttgccgaatgcaatcggcgaaacttgattccagatggtgctcaccacccagttgccaaggctggttgcgacggcgtttcctcggcctcggatttgcatcggcatgacttcggccatgtacaccctggagaggtttgttgtcagtccggctggcatgagctcacagtgtgaaggatacgagatacaacataccaggcgcatgatccgtaggagaaggagaaaatcactgtgatgcagaaaatgaaaaacacgccggcaatgctgtaactcgtccgggacccgtcttcgttgaccgaggtcagtgcggcttcacagatcaggacgatggtgacagctatcgagccaaacagcatgg

SEQ ID NO: 3693 - DNA, 410 bp, Aspergillus oryzae
cagaacagtttcggtgctgcgcagaccttgtaacggctcaaggaagagagactcgcgattacaaatattcgacatggctgcgcaaatctcgactgtcgcggagaccaaggaactccgtggcttgaacctcatcgctgcccattcgcatattagaggacttggtgtcgatgccgattctttacaacctaggacctcatcgcagggccttgtgggtcaggagaaagcgcgaaaggccgccgccgtaatcttgcagatggtcaaagaaggcaagatcgctggccgcgcagtcttaattgcagggcctcccagcacaggtaaaacagcacttgccatggggatggcacaatctcttggctccgatgtccccttcacaatgctagcttcttcagagatcttttcaatggaaatgt

SEQ ID NO: 3694 - DNA, 506 bp, Aspergillus oryzae
cccacgcgtccgcgttttctcttcttgttcttcactcggaggggtttgtctcctgttgctttctttaagatcaattctctttctattttccatcgtttccccccttgtttttgtttaagtcaaacatattgacgattacatcaatatattcccccctcgaaattctccgagtcagccttcgttcgcgtccgtaccagttcgctgttgctgcgtgtgatctgaccgaccttctaaatttcctgttaaggacgttcattaaactcctctcggcagaaaggggcgcttgaaacgtccggtcttcagagtcttccccgcctaagaaccacccttgacaaacccaacattctttcccatcgtcatcgcattaacctgacttcatcaactatccttccactcgtcaccggcccttgatcagctgtgcctttgatcgactgtgtcacgtttaataagtcgtattgtttacgcgaacctgacccctcaaggtcatcgcggccattttgacgcct

SEQ ID NO: 3695 - DNA, 532 bp, Aspergillus oryzae
cagcttcctccatcacctctcctcgctaccttctgcctgattcacgtccagcctcacacattcgtcatcatgaagaccactgctctctcttttgccctgctggctgccgccaccaccatggtgagcgccgatgtttccgttggtgaatgcgctcaaatgtgcatcagcaacatgaacgccaaggcttccgagcttggttgctccagcggagacttggattgcctgtgcaagagcggcaactactcctatggtgtgcgcgactgcactactgaggcctgccctagcgaggatgctgctgccgtcgtggctgccgctcttgcttcctgccctaacggctcttctgacagcagcgctactggtaccaacggtggtggtgcctccaagactggtgattccgcctctgccaccggcactgatgcctccaagaccggtgactcgactgccactggcactgctactggcaccgatgcttccaagaccggtgactctaccgctactggcactgacgcctccaagaccggtgattctaccg

SEQ ID NO: 3696 - DNA, 336 bp, Aspergillus oryzae
aaaatggaccattcgctacgggctcccttccccctcacagcacactacgaccatccactcgcctacctcctctccaacttcgtgcccacttacatgcctgccatgttcttccgcttccatatgcttacgtacctcctctacctcaccgtgatatctatcgaggagacattcgccttctccgggtactctgttatgccgacgagcttcttcctgggcgggatcgctcgcaggatggatatgcatttgctcagtggggcggaagggaatttcggcccgtgggggatcctcgattggatttgtgggactactgtgggaggagatgaggatgaggaggag

SEQ ID NO: 3697 - DNA, 499 bp, Aspergillus oryzae
cccacgcgtccgcgattttagagaatcgccacccgcttttagacccctctcaacctgcccatccgacgaagaaccgcccggaccggagccagacacctgatattgcacggggccaagcatttgttgaagcattgggactcgccaatgcacgggatctcacaaagatcctgcgctggaatgaccgctatggaatcaagttcatgcgactgagtagtgaaatgttcccgtttgccagccacaaggagtatggatatagattagctccttttgcatccgaagttcttgcagaagcaggacgggtcattgccgagcttggtcatagggtgagcgttcatcccggccaattcactcagctagggtctcctaagaatgaggtcgtggagagttcgatacgagatctagagtatcactccgaaatgctgcagttgcttcagctgcctccccaacaagatagggatgcggtcatgattctccactgggcggtgtgtttggcggataa

SEQ ID NO: 3698 - DNA, 556 bp, Aspergillus oryzae
cccacgcgtccgctctttcctgtcttgtcccttatatccctctgctcgacgaagctctccgactgtcttcctcaccaatgagggcctttcgtcgagcagagctactcaatcatgacggatgttccaaccggtggcagaatcgtgcccgtaatcgaggcccatcagcattactccagtagtcctgccgatgaggccgtggccgaccaacaccccccaacacaacagctcacaacccaaccaccacaaccgcaacaagaagaagatagcgatggacgttcaagccagaagctaccatctcagtcgcaagcgaaatcgtcaaaaagcacgcgcagcaaaaatgcggagacggaatgcctggagcttccgtgtctcagcaaactagggctctatgctcttcctacagagggtgatggcaattgcttatattacgccctctcggatcagctctatggagatttcactcatgccgacgaaatccgtgtccgtctcgcagatcacatcgctgccaataaagactactttatgaattttatagccgccgttggtggagagcgca

SEQ ID NO: 3699 - DNA, 537 bp, Aspergillus oryzae
gaccagcaagaagcaatgaagaatgattacgaagatcagaagcgacagatgcaagaagcacacgacacgttgcagtcgaacttcgatgacaaggtgaacgaattagactccaccaagaccgatctcgagaacaagcacaaggagctcgaggagactcgtgtgcaacatgccaatgaagttgaactcctcaacaacacccatgcggaccatgtggctgacatggagaggcgctgggccgatgagaggggcgaactggagcagcgcatcacggacaagtgcgatgaactcgcccactgtgagcgcgaaaagcaaaaggtggaagaggataatgtcgtcaaggagcaacaactacaggcagcatctgacggcatgcgcctcaccattgataatttgggcaaagactgcgataggttgagaaagacccttcacagccttggagaagccactgacctcaagagcacgaagggagatccattcttgtaagtgtgacctagtgcattgagaatgtgttttagtacttgactgtctttcaaaaaa

SEQ ID NO: 3700 - DNA, 423 bp, Aspergillus oryzae
agaagagaccggcttgacgattcctcaggatgaactgatcgatatgacctcgcttgcattgcaatcagctgcaagccccgaggacgtagagacattgcaaaaggctgtatatccatcggctggcggaagcgatgagtttattcctttattcttgtgtcagaagcgaatgccgcgtaaggatattgaaagcctacagggacgattgaccgggttacgtgagcatggagagaagatcactctaaaattaatacctttaaaggaattgtggaaagaggggttacgagacggaaagacactcgcatcatgggcgttgtataaaggactcaaagatgaggggaaaatatgaactagacctggcgaccgcatcatcgaatcgccgttgggcctttaacagagtgttgaatggataccagtatgcatcac

SEQ ID NO: 3701 - DNA, 570 bp, Aspergillus oryzae
ccatgacgtcggtcaactcgtcctctcggtcagaccgaccataccatctcgctacttgatccgtttctgtaaacccttggctctgacgttgtccccatcgactggacttctgtgcggcgagtcgctttgccacctcgttcgcttcatttaaggtgactagcttccgcttttccggtcggccgctagctctttcatgacatacgtcgcgcaagctcttctccggtgggcgtaagtcaggaaggaaggactctgggtccacatcaaccatgtttgcatccgttatccagcggccattccaagatcgatcgcgagttcgaaagctaggtggttccgaggttgctttaagtgtccaagcgtcctcttccagctctagtggtgtgtttccagtggcattctcacgataaagcaagtcaggacgacggtccatcatcagctcgagaatctggacgagctcatgctttactgcgtagtgcacaggtgtattacccgtgccatcaagaagttccaagtgtttctgtcctgtgctctcggcaaactcaaggagaatgcgtgcgatatcaatcagcctat

SEQ ID NO: 3702 - DNA, 547 bp, Aspergillus oryzae
gatcagggaatcatccccgcggaagttgctgaactccccgacctcggcgagatccccgaagcagatcctctcccggaggaggaggaggaagaagaagaggatgacgaggacgacgaggacgaagaggattcggacgatgatggtcggcggaagaagaaacgaggccctcgtcctggaagcaaacgagaaggtggaaaagatgacggccacaagtccaacgatcctgagctaagaaaaaaacgaggacgaccgccgcgtgtggacacaccgatggaggccagaatcaaagctgttttgaagggaattcgaaagctgaaagggccaagcggcgcactcaaagttcgtcactttgagcgtttgcctgataaggctacatatcctgactattatgtggagatcaaagagccaatcgctattgacatcattaaacgaaagtctaagcggaagaagtataactccgtcgatcacttcatgagggatatggacctgatgttcaacaacgccaaaatatacaaccagccggagagtcagatctataaagatgctg

SEQ ID NO: 3703 - DNA, 496 bp, Aspergillus oryzae
ccgctctcagaacaactccggtcctgccggaagcccttatcgccctgctcctcctccgcctcccatgtacccttctatgggcatgccccctgcccaccagtatggcggctttgcgcctatgaaggttggtgaccctgaagctactgcatgagactccgcggtacctagtgcaggctagattgttaacgaaaatatctagtaaaaaaaaagcgttccttttttgaaagccacagcaggagttttgcgtcatttcaatgatgggtcttttgtgttataacaagtctgctatttatctctgcgaaagctcccttctatagctctggatgggcattttctcctgtgctacgtatttcattacatctgagcgctttttcattttctttccacctttttgttagcaagatttgagctcttatttcacaaactatcctgctatttttcttcttgatgcctcgtttaacaaaccccttaccgaattcgtttacgttctcctttt

SEQ ID NO: 3704 - DNA, 580 bp, Aspergillus oryzae
tgcctctcccagaaatggcactgcttggtcttgaatgaccagtgctcccctcctgaggtcgatgcaggcctgatgccgcctcaacatatccagacccaggaggagatcaatgtgcttgccttccatcacggtaaaagaacatggcaagaacatacttccgatcttgatttgagccgaatggacgcgccccaggatattcgcagtgcccactcctttagcaattcccccgtatcgctggtctaccagacgcatgatgttgcacgcggtcgcacactcgggggacatgatagtgacctgggcgccagaatcgacgaatgcattaagtttgtggccgttgacttcgactggtatgtacaacatggtcacgcgaccgaacgctatggcagttagcaaagtcattctgtcgcaggagggagagggctgaacacacattccggatgatgctccatggcgttatggaggttctctgtcaccgcattctggcgaatgatctcttcaatctgccgctggttttccgggttgaacggatctgcgttcaacattgcaatccgggcctccttctcagcctctaactgagcct

SEQ ID NO: 3705 - DNA, 494 bp, Aspergillus oryzae
cacgaagtcatgaagaagaacgaggagaagtaccagcaagtcgagaaccccgaggagacggccgatatccttggtattacttccgtcatggtgcaggacatgtctggcaagcgtatcaacggctatgatttcaacctggacgctatgacctcctttgagggtgataccggtccttatctgcaatatgcccacgcccgtctctgttcgattattcgcaagtcggagctgaatgttgaggagctgggctccgcgaacctggatctcttgacggaaacccacgctacggaccttgcccgtatgctggctcagtggcccgacgtcctgctgaacaccacccgcactctggagccgtgcaccatccttcaatacctgttcaagatgactcacaccctgagctccagttacgaagtgctcaaggtcgtgggcagtgagcctgagctgaagaaggctcgtatggctctgtacgagtccgctcgccaggtcctttacaacgg

SEQ ID NO: 3706 - DNA, 590 bp, Aspergillus oryzae
cattcctctgctttcctagaatctgtaacgaatctatattcaattacacacatactacttacaccatggccgttgccgacactcgattcaagctcaacactggagcagagatccctgcattgggtctcggtacctggcaatcccaacccggtgaggttgagaaggctgtcagtcacgccatctcggtaggctacagacacatcgatggcgctttctgctaccagaaccaagaggaggtcggaaagggcatccgcgatgccctcgcctctggaaaggtgaagcgggaggaccttttcgttaccaccaagctgtggtgcacttaccacagccgggtggaagaggctctggaaaagagtctgaagaacttgggcttggattacatcgatctgtacttgatgcactggccattggccatgaaccccaacggaaaccaccctctcttccctaagcatgaggatggatcccgagacatcgaccactcgcactctcacgtccaaacatggaagaccatggagaagctcctcgcaacaggaaaggtcaaagccatcggtgtctctaactacagcgtgcgttatctggagcaattgctt

SEQ ID NO: 3707 - DNA, 577 bp, Aspergillus oryzae
gtgacgaagaattgaagtccgttcaggctgctattgaagagcgcgaggcggaactccagcaactcattccgagtttcaattccgcaaaagaccaggaggatgctgtcaaggcacaactgaccgaggcagagacttcccgtcggagattgtatgccaaacagagccggaattcccgctttagaaacaagtccgaacgagataagtggctgcaggccgagattaaggacaactacacgtccatatccacagtacagggggtgatggcacagactcaggaggatatcaaagagctcgaaaacgagattgccctcctagaaccggaaacagaacgtttgcggaagcagattgatggtcgaggagacaccattcagtctgtggagcaacaagtccaagcggcgaaggatgagagagatcgcctaatggaccagcggaaggaactgtggagagaggaagcaaagttggattcgattctcgtgaatgccacaaatgaagtggaccgcgcagatcgctccctatctcagatgatggatcacaacaccagtcgtggcattgcggccgtccgcagaatcaagcgcca

SEQ ID NO: 3708 - DNA, 458 bp, Aspergillus oryzae
cggacgcgtgggcggacgcgtgggcggacgcgtgggtcgacccacgcgtccgagctggccgaggaccagctgaccaaggcgttgcagtggcgcaagcagacacgtcccaccgcgttggttgagggtcgatacagcgccaagaagtttggcggattgggatacttgagcacgtacaaggacgccgacggcaaggaaaccgttatcacctggaatatttatggaggtgtcaaggatcttggtactacgtttggaaatgtggatgagttcatcaactggcgtgttgcactcatggaacttgccgtcaaagacttaaagatggaccaagctacgtcggttatcgactacgaaggcgaggatccttatcagatgatccaggttcatgactatctgaacgtcagcttcctacgcatgaaccccagcgtcaaggccgctactaagaagaccattgacgtgttcgc

SEQ ID NO: 3709 - DNA, 546 bp, Aspergillus oryzae
cccacgcgtccggccgaatactttacttccctcatccgcaccgcaactcctcctaccttctacccttcactccctctcacacagactccgtacacagtccaccatggccgctcctagttcgaagtacgacaactatgactttcccaccactgcgccggttgcccaacctggccaccctggccacaccaccccagagcaggatgcaaaggtagaacagcttcggagtgagctggagcagctcggctacaccgaaaggctggatacgttgactttgctccgctttctgagggcgagaaagttcgacgtcgccaatgctaagactatgttcatcgagtgcgaaaagtggcggaaagagttcggcactgacgacctgcctcgcactttcgactacaaggagaagccggaggtgttcaagttctatcctcagtactaccacaagacggataaggatggaagacctgtctacatcgagaactgggcaagatcgatcttaacgccatgtacaaaatcacctccgccgagcgcatgttgcagaacctcgtcact

SEQ ID NO: 3710 - DNA, 563 bp, Aspergillus oryzae
agacaatctgtctactggggaagtagaagattgggaaggatgggattgggttgaacagacggttcaatatctaatcagtgagaagcaaaaacaacagcaggaatacaatagaatggatgtgcagactagccctgggggtgatgaaccagcacctcagccacagtcaacctcatcccattcacgcatgacaatcgcaagcatcatctaatatcacgggatctatcgctcataatttgacactttgcgactctcccgcatacccttgtctcccatgtcgagacccactctcgcggcgtcagcttgtggaatgaccatgaaacgtcggttctatataaaccgtgtcctgagaaccgacttagagcagtcaatattgtgcagattaacaacttacgagagaaaccaaggacacagacgcccagggcaacgaaggctttcttcgtcaggaaggaggtggactgtattatctatttgtattatttgtctagatgatggtctgggtccagtggagcatgtgaaacgagatatgtcttacgaccgaatctttgatatccatacgatacgtt

SEQ ID NO: 3711 - DNA, 557 bp, Aspergillus oryzae
aacatcccattccagatgttgctccgtggtgccaacggtgtcgcctactcttccctcccagacaacgccatctaccacttctgtaagcaggctaagaagtgcggtgtcgacattttccgtgttttcgacgccctcaacgatgtcgatcagctcgaggtcggtatcaaggctgttcatgctgccgagggtgttgtcgaggccaccatgtgctacagcggtgacatgctgaacccccacaagaagtacaacctggagtactacatggccttggtggataagattgtagccatgaagcctcacatccttggtatcaaggatatggccggtgtgctgaagccccaggccgctcgcctgttggtgggctccatccgtcagcgctaccctgaccttcccatccacgtccacacccacgactccgctggtactggtgtagcttccatgattgcctgtgcccaggcgggtgccgacgccgtggacgccgcgaccgacagcatgtccggtatgacctcccagcctagcattggtgccattctggcctctcttgagggcactgagca

SEQ ID NO: 3712 - DNA, 521 bp, Aspergillus oryzae
cccacgcgtccggtatagccgtcaaattggcagggatatcgacatccggggaatcgctggtcgattacctccgtgccgagcgatattccccctcatattcactttttacctgacatagattggatatataattagaagccgataaagaagccatccccacacgaccgtcaaactatctatcgaacattctcttgacggaaactaataaatctagccctgatccactttctactattgattcaccatataatcgttcagtcatccatagacacaatggcaaccgaagaccttgtcaagcttacttaccaagaccgaattgcaatcatcacattcaacagaccggagaagctcaatgccctcaaccaagacctctattacctacttggggaacgtcttcgggaaatcgacaagcgcgaggacatcttcatcaccatcctgaccggcaaaggacgattcttctcagccggagcagatgttacatcgacccgtccaagcggcgacctgagcagcaatgtccgccg

SEQ ID NO: 3713 - DNA, 395 bp, Aspergillus oryzae
accgcctagttcaggaattaagtggctcgatgatgacaagtggataagacgcgagataacgtttgatgaacctatcccgtcaagatggaggattgttcgaaaaatccatgacgcgagattttgcaccttgaatgggaggtgaaaaagagggactggagggctgaaggacgtggtgttttcctttgttccgatactcatggcaaaaaggccgtagccaaagttcggctgcagatcccatatatggggacatatttttcctcctctgaagagagagccgaacaagccatacacgatatgggcgaaaacactcggcttgaaattgacgctctacgatgtttaacgcaagcaggctgttcatcaagcccagctttgctaggttggaagcgtgaaacaca

SEQ ID NO: 3714 - DNA, 445 bp, Aspergillus oryzae
attgaatggtcgccggtgcttactaaaagcaatgaaaggatattaaaactgggaaatctcttggtactgtcttcgccagctgtgcatagcccttccaccaagagtgggagtggcgagagcgaagcgccgaaaaagttctcccgcttcttcgggggaagcacaacgaagaagcggcagaggctggtcatggtcacctcctctgcacgtattatcatggctgcggctggtggagatgagaaaaaggcaaagctggagatttctctgctatctccaggaacacactggcgctcctcaacggattcgaaaggtttctcttgctgggtcgttgacacgcgtgacaaacattacgttttcgaagaccctaaaccatcatctagcaacgcaggcgcgactgctgccaactcgcaggaatgggtcgattctctggatcgtgcacgagagatgg

SEQ ID NO: 3715 - DNA, 486 bp, Aspergillus oryzae
gcagaaattcgcaagtggtgaattgagtgcccgaatgctgttgaatgcgagcgatgaagagcttctcgagaagctgacggctgttcggggcttgggcaagtggtcggttgagatgtttgcttgctttgcgttgaagcgcatcgacgtcttctcgaccggtgatctgggtgtgcaaagaggatgcgcagctttcatggggaaagatgtgagcaaattaaaggcaaaggggggcggtaagtttaaatacatggcagagaaagatatgttagagctggctgcgaaattcgctccgtatagaagtttatttatgtggtacatgtggagggtagaggacgtggacatcgcggtcttgactacttagaggagagtaaaatcttggcttgtagtatacgatatcgttggtatatattgagcggcctggtagtgtgtaccacggatttgaaaatagcaggtatcctgctaaacggagtgttttcccagatttca

SEQ ID NO: 3716 - DNA, 487 bp, Aspergillus oryzae
atttatctcaatatttatctgacccgcattcgcaacctgtcacctcccactcaccatgtcctcgcaatcctggaaaccagtcagacctgatggagcgttctgggaatctcttgaccctgtcatcagcagcactgtggccgagtgcctctcccccgccgtgctcgatgacataaataaccattccaccctttccaacccggccaagttcgagctcctcgagcaggccttgacgagaaagcttctatctcttgaagagagcgcgaacccatcctctctccatgacacggactatcccacttggcaacgcctcaacttcgcccttttccacgtcctccgcggcgccggcgatgctgcaaggcagaaagaaaccctcctcaagctagtcaacaaccctggcccaagcggacaggatgtagcagcgttgcagaacttggctacattatacgaggaaacaggcgagcatgcacaggcagagaagctcgctaag

SEQ ID NO: 3717 - DNA, 187 bp, Aspergillus oryzae
ctccactttacgcatgtttcgtgccactgctatatttcacatgcatatctctaagtttgatcaccagagacaagtgcatcatcagcttctccgaagctgttatgtagcagattttcctgcatgccctaataatgggttcttatagaatacatactattgacaattttctctaaaaaaaaaaaaaaaa

SEQ ID NO: 3718 - DNA, 485 bp, Aspergillus oryzae
attattacagtcactgttacagctgttcatcgttgcccctaggcatttcggagcactgttccttaatttttattctcctgttagcagccttatttgattccctttccttacttccacctgaccgtctcttctcggctgaacaacatcaattttcgtcattttgcattgttggtcaactgcccgtctcgtgaacagaatcatcatcaccgctttctactctcgttgacttgtctattggtcacttaccagtcctccgcctcactatcacagagctgtacttctgattcatcccttcgagtgggactcatcgggaccagcctgttagttcgtatgccccttgatgaaatttccatagtccatctctctgcggagaaacacggggagtctctacccgcatcacttggtgatctaccttaagtcaaacatattacctactcacctttcaacgcaagaagggctggtaattgcagcccatcacgaccggc

SEQ ID NO: 3719 - DNA, 552 bp, Aspergillus oryzae
gaagtcactgatcagactctccccttcatatttaacgacaacaccctcgtctctatccaagactcaaagggcaccaccctaaaggcagacacagattataccgtctccggttccaacatcacattccctgcctcgttcctctcaacttactactcggaaaccagcgagccaggcctcctccccaacttcaccctcaaattctcatcaggcgcatcccccgtcgtccaactcgtccaatgggacaccccgacactctcaaagacctccgctgctgcctcatctatctccggatccgacctttccatccccatcacatggaaaggacttcctaaactcgccaccgtaaaggccctcctcaacaacggcacatacttagttgatgacttcacccaatggttcggaccttttggcgaagccagaacaacatacagcaaccaatggaactggggatgacaagaatgtgattctcacacaggctacggttgaggctgttgttgctgcgggacaggatacggtctttacgttcgagttctttccacgcgttgacacaac

SEQ ID NO: 3720 - DNA, 470 bp, Aspergillus oryzae
ggcacgcagcaaaggaggttaatgtttcgtcagaagtatgccgaccgtctggaggaggagcccgtcagcgtatccgttggcgaggatgaagagccattcctgctccgccctatggacccgcaatcaaggccaacgaagaaggaaatcgtggatgttgtcacactcatgcagacgacaaaggattggcagaacttgatccctttcttgtccggattacggatgtcacatcgtgtcattaagaccgaccgttgggagtggttggtgcgccgggctggccaggctgatgctcttggtattattctcgaagccgcgaagcagagcgagcggactggtcttcgtctcaacaatgtgaatattgtacagcgcattttcttcgaactccaccgcaaggcccaaagaggggagttcaaggatcccgaggtgtcgaaggctttcacattggcgaagcaatttgtctccctgatggaagc

SEQ ID NO: 3721 - DNA, 489 bp, Aspergillus oryzae
gcacatcgtgacgggattcagtacgcagcaggttatcatctacagaggatgagtatcttaaactgtggctgcttcattgtcacttaattatcatttttactttcactcttcttaccgttatttttctgtgatccattggatcctgtactcctgggagatctcacaatgccccgcgtagcgaatcctaagcaccgtcgctccggtggtgcttctactccccataagaactcacctattaaaatcccgctcaatgatgacatgggcgagaaggcggctcgtatggaagcccgacaggctcgccatgaccgtcagatggaccagatcaaagcagctgtcaagacacctatgcctcctcgaagatacactggccatgagcgtggatccagcatgagcccggtcacaccgcgcggatcaggacacagaggccgcgaaagcgatgtcgacggtcggagagcggtaaccccgatgaaacgtgtacctatcttagcc

SEQ ID NO: 3722 - DNA, 507 bp, Aspergillus oryzae
gcaagctcccgtggatgcagtatatcgaccacatgtggtacatcataccaatatgcctgagatgaagttcgttgctacacgaggtagaagtaagcgatacttcgctgcagaagacgttttctagcattgaggcggtttagttgtgcatgatcttgtagctaggtgagagtccaacttcttccaagagctgccgaatactggaaacatgccacttttgaaggcgtcgaccttaggcgggtcccagatttggatctcaacgctccatttggatgaaatctctgttaaagcctaccatcttccccccccccccccccccgcctcccctttttttttcgttttgttttgttccttcttcgagatgtacagatatggaaggaccacgagctgtggggttgttgtggcgtgacggagtctaaatttgatatccgggcctcttctcttcgtctttactgatttctggctcccaataactttttgttttggtctttattctttatctttatttgg

SEQ ID NO: 3723 - DNA, 228 bp, Aspergillus oryzae
cttggaaagaatgttttcctttctgtttgatacccacgtggccgttgctggtctcctcagcagcaaccctgagataacatggccctaactggtctgttaatacttaattcatatatgagctgcgattacgatggatgctttgacagaacctgtgatgttgattagttgatgtcttgaatatgatctgtggttcactttatttctaaaaaaaaaaaaaaaaaaaaaaaa

SEQ ID NO: 3724 - DNA, 441 bp, Aspergillus oryzae
tccacgcgtccgcggacgcgtgggcagcgatctttaactgagcttcctgatatctttgttgtctcgtccgtcacactcggaacctcgggtgagcctattccggctactattgcggaagcagaatggcaatacagcgaggaatatgagcttcccagtggacaaaagggaaccgtatatgtttatactcctcaggctgacaaatgcccgcgttgctggcgctatgttgtcccagaatcacaggctgaagagtctgtttgtgatcgttgtgaggacgtcgttagtgagcttgatgcgtctggggcggctaaggcggccgattcgtcgtaggcctgagtgaccaggtcatatctctaatcttgtatattaacagtgtagtatatcccaaaaggagataatgttatctataccataatcccaagggaagtagttgatatcgcaaaa

SEQ ID NO: 3725 - DNA, 484 bp, Aspergillus oryzae
cgacatttggcgcgtctttgaagagctgaaggagctccatgctacacagttcgagcaggcggagcgaatcgcgagactggagcggcgaagggacgaggatgcgaaattgaaaagcgtctggggccctctgtcaccgtttccgacatccgttgcaggcacaatacccacagagcctatcttccattcgccggctgacgccttcaaaggtttcgatcagggacagcatcacggggttggggggaccatgggcatagagagcgaagaggaaccaaggcgagggacatccagagcgaatagtgtccgctttgatgaaagcgctatccacagctactatggacaagctagtcggtctaccagcgagctcccactgcgaacggggagtggaatggggagccatccgctgaccgagcggtctttgtctcaccgatctgacggacgactaagctcatccggacattcccatcactcggcgcgtaccaacagt

SEQ ID NO: 3726 - DNA, 516 bp, Aspergillus oryzae
cggacgcgtgggcggacgcgtgggtacggccatccctaggcaggggctcaagaggaaagcaatggatgcggagatcaattcccaggatgatgatagcgtcgttattcaggatacttacccctgtactgagaacaatcgctcagtggatgagagacctacagaggaagaggatgattcatgttttcctgatgcccagccacaaatcactgtacccgaactgggaaacgtaccatcacagctcaccgaattacctgccacacacgcttctcaaaagcccgatagccattgcctttctatcccagacaacgggagaccgtcgaagcggttgaagacaacggcaacagcaaatctcaagagtcatgctgctactgctgccctaggcgcaattgttggtgcagtcggtactattgctatccttgcctcgctccctgcggattactttgcttagaaatccagctggttgcttttgatacgagttggatctcgtcttggccattgcatgacttttacgattat

SEQ ID NO: 3727 - DNA, 633 bp, Aspergillus oryzae
cccacgcgtccgctcgctgaaaagcgactgtcggcacatcgcttccaacaaatccctgattactctggcgacggcatggccaacccaaacgatgtcaccattgaaattcctctgaaccctgtccctagtcggggacaaacgggcgctcgcaagaccagtatcaacccaacgagccccgaccccaatctgtatgaaccgccgggagagagcggcgctgaagaaaaggccgccctggtcaccggtccagggcgtcgcaaacgggttgattcggcgcgagcgcggtcggtggatgacccagaagatggaaccttgacgcgcatgggacgcatctaccaagccatcttcaacttctccatcatcacgagatacctcatctatgtgtctcccctggcgctcttgattgcaattcccatcattgtgggtgccaccgtccgtcaagatacgaggattggcggcgtacccttgcattggtttttcacctggattgaggttgtctggctcagcttgtgggtgtgcaaactcgtcgctcatttcctcccttatgtcttccaattcctggttggtatcgtcagttcaggcacccgcaagtatgccttgattctccagagcctgcaatttcccatcgccaccgtg

SEQ ID NO: 3728 - DNA, 628 bp, Aspergillus oryzae
aaccgcatcaccaccacatagaccatccacacacggtcaccaatccattttctacaaccaccatacttgttaatacattataattccacacacttcaagttaattacaatcgattaatcacaatgcatttccataaaatcacgctgggcgccaccctggccgccctcctgagcctaaccaccgccctcccaaccacctcatattccttccccctcaccacccgcgacgacacccagtgccctaccggaaagtccttctatcgctgctacaaaaacaacttccgcggctgctgctccgtcgacccatgcgatctcgatgacggctgtccagacaatgacaccccaacctgcacgccgggcaaaatctaccagcccaagatgcaaacctacctcctcccctcctcggacccgatctccaccccaaaccttaacgtctccaaatccgccaccgccgaatgggaccagacgatgacgttctccgtgccccagggagctaagacctgcacgctgaattggggtgtgcccgccgagcgcaacttcaagggccggcattaatgcgctggtgagagtgtggcagggggataaggtcgagggggaagagtattggcgcggcggactttaccaattgg

SEQ ID NO: 3729 - DNA, 609 bp, Aspergillus oryzae
gtttacaattccagacccagtcgccggaatcacttttcatatcactcataaagggtctggtctgcggtctataaaaattcagggctgtgtgcggagtgcgtggtcagtccaggaactttgacgatatctccgtacccacacagtttttaccttcaaaggattcactttttctactcattcattgcttaggtagttgcaatagccagaggaagctccaaccacgatgccgcgtaaggcgattgattcgcgcattcctgcgcttatccgcaataacttgcaggagaagaaacgaagctttttcgtcgttgttggtgaccgcgccaaagatgcgatcgtcaatttgcactacattatgtcgtcgcacgatgtcaaacagaacaagtccgttctctgggcgtataagaaggatcttttgggatttaccagtcaccgcaagaagcgtgaggcaaagatcaagaaggaagtgaagaggggcatccgtgaaccgaaccaagaagaccctttcgaattattcatcactctcaaccagattcgttacgtctactacaaagagacggaaaagatcctcggtaatacctatggaatgtgtattctccaagatttcgaagc

SEQ ID NO: 3730 - DNA, 559 bp, Aspergillus oryzae
ctttgcaagttgaatagcatcaatatggctgcatcgacgaaccggctacgatttctctattcctccgcgaggaccgttcctcaaaccgggtccattaccccgatttcccgccgcacatatgccacaactgaaccttcaccgtctgccaccggcgccccggcaacagcccgtaaacggacaaacttcacagataagctgaatgccggtccttccttcgcagatttcgtctccggaggcgaagacaacgctccgctcgagccttcagaagcatatgccctcaaaactgccatggtcggccccgccggccgcaagaaggaaatgacccgtttgccttcttggctcaagaccccgatcccagactccaaaaactaccaacgattaaagaaagatctacgaggcctgaatctgcacactgtttgcgaggaggcccggtgccccaacatctccgattgctggggcggtagcgacaagtccgctgctaccgctactatcatgctcatgggtgacacctgtacccgtggatgtcggttctgcagtgtgaagaccaaccgcaggcctt

SEQ ID NO: 3731 - DNA, 573 bp, Aspergillus oryzae
gtgggacgtaggagagacccactgatcgctccttccactacagaagagcgcatgaaggctctctgcagtatggcggattctttcatttatcttgtgtcccgtatgggcgtcaccggtgctacggggaccctcaacacagagcttccggcgctcatccagcgcgtcaagagcctctccggcaatgtccccgtcgcagttggatttggaatcagcacgcgggagcattttctaagcgtgacctccatcgccgacggtgctgtcattggtagtcaagtgatcaacatcctggctgacgccccagccgggcaggccgctcaggcagttgaggactactgttcaaagatcacacaaaggaaagtctctgcagatgcatcgactacaatcagcgggacaaccgaagcaaaggcggtcgccctaaccgatgacgcagaggcagccgtggccgatggaccaggacggttcggtattttcggtggtcaatatgcccccgaggccctgacaacgtgtctcgctgaactcgaggccggtttccaggcagctctcgatgacccgaccttttgggaggaatatcgg

SEQ ID NO: 3732 - DNA, 574 bp, Aspergillus oryzae
gccattgtagccgcaacaatgtcttccccactttccaccgaagatggagacatcttcgagcgtcttcaacagcgtgctgacccgaaagtgctcgaggagcaacagcaggccgtgaatgagcgaatacacgcaatctaccggaaggcgcagaaccgtcttggggaattgatcgaccaaaattccactctcccatgtgccatttcgtctgttcaaatcctcaacgcacaccacacgcgcaggggctttcttgaacggattttcaaccctctcttgagttctaatcagaagaggccctacacactttctgaagctttgcgggaagtctcggcacgtgccgataaattaagtagattcgacatttttcagcagccagtgtctgtgtacttggataaatcgccggaaggagacccacaaacgggactcccaactcttgacgtgtatgtatcggtcaaagaaaagtctcgtgttctactgaagaccgggaccgacctcggcaatacggagggatccgcatatggcaatcttctctggcggaatgtgtttggcggtgccgaaaatctaaatttgaaccgct

SEQ ID NO: 3733 - DNA, 571 bp, Aspergillus oryzae
cggacgcgtgggcttgccccgggaagtttataatgaagcggacacacaggtcatccagccaatcttctaaacttgccccgggaagagctcgaatcggtcgaacgtatatgtttccaggttgaggaagcacaatggttctacgaggatttcatccggccgttggacccggctcttccttcgctgtctttaaaagctttcgccttgcgtatcttccaacattgcccgcttatgtcacaatggtcacattatcatcatataacagcattttcggagtttctggcatataaaacccgtgttccggtgcgcggggccataatgctcaaccaagacatggacgaagtagttttggtcaaaggctggaagaagggtgccaattggagtttcccacgagggaaaatcaacaaagacgaaaaggatctagactgcgctattcgcgaagtgtatgaagagaccggcttcgatattcatgaagctgggctcgttaagaacgaaaagacgtcaagttcattgaaattactatgcgagacagcacatgagattatatgtctttcgtggggtacctcgcgatgct

SEQ ID NO: 3734 - DNA, 414 bp, Aspergillus oryzae
ggcacatgtcttattgaagcgctcaaagcagagggactactacaaagttttaggtgtcagccgagatgctgatgaccggacaatcaaaagagcctaccgtcagcttactaagcaacaccaccctgataaagctaagtcccagggtgtaacgaaagaggaagctgaaaagaagatggctgctatcaatgaagcttatgaaatcctttctgaccccgaactcaaggcgcgttacgacagtggtgatgaccccaatgacccggaatctcacaggggcaacccgtttcaaggaaacccatttgggccaggaggcggtcaacacttcttcttccagcaaggctggacctcagttcaaattctcgggtcaaggattcaactttccaggggggttcccctttcgctgatgttgacagctag

SEQ ID NO: 3735 - DNA, 512 bp, Aspergillus oryzae
  modified_base (39)..(39): n is a, c, g, or t
cgatcgagagagtatatggctgatgataagatttactgncttggccagtttgttttccacgatagacagctaagctttgctgattagtgaacttaccaattcggttatggagttagcagccgaggttcattcgtcgccttgtcttagcgaccgctgagtctttgtcaatgttcactcttagacagaagatatcctccctttatatgtctattttcctccatttacccactcttgattattctaaagtcctgtgaattaaccattgagttcgaccaaaatgcctatcaccaaccgacaagccatctacgccaatacgccctctccggcaatcgatccctccttgtcgaacggtaccttcaagatctcaaccacaacaatctccgacaatgtccccgatgacaaagtccttgtgcgcgtacactacctttcgctcgacccggccatgcggcagtggctcacagcgaaacgatcctacatcgcccctgtcgaacgtggtagcgtcatgcgcggcc

SEQ ID NO: 3736 - DNA, 456 bp, Aspergillus oryzae
gtagaagaggctgccaagcttcagagcacagaggaggaacccgtaccatcgtcaacaaaggctgctaagaagcgcaacatcgaagaagcgcttagtgatgacgaggaggacgaagaagcaaagaccttgcggaccaagagagcaaaggtcttggaagaaaagctgaagcgtgaacgcgtcaggaatcgggctcttgtcggcgtcaccgctgcttttgcacttgcggcttcgattccttatttcttttagaggttctactaccaaatgtattgggcgccttcctatggaacgattgtcccgagttgaccgtcgcgtttcccatcgaagaacatctctcccgaacctcttcaccccttcaccttaggttctagattgttccctcctttccccaggaaagggatctagttctttcgacctgtataccctcttcctgcatcccctcttcgatgtgcattg

SEQ ID NO: 3737 - DNA, 533 bp, Aspergillus oryzae
cggacgcgtgggcggacgcgtgggtagaaatcgctggaggccgacagtctccaagaacccatacccatcgcttatcggaccaggttagagaaaacttctataatgtcttccgggatcttgaaagttaaaggcaacaaaattgtcgataacgacggcaatgaagtcctccttcggggtgcagccatcggaggatggatgaatatggaaaacttcattaccggatatccaggccacgagtcgcaacaccgtactgcaatgaagaaggttctagggccagagaaatatgagttcttctttgacagatggctggaatatttcttcactgaggcagatgccaagttctttgccggactgggattgaactgtattcggatccccttcaactaccgacatctagaagatgatatgaatccgcgtgtgcttaaggagtccggatttaaacatttggatcgggtggtagacttgtgctcaaagcagaatatctacaccatactggacatgcacacagcacctggaggccaaaatggtgactg

SEQ ID NO: 3738 - DNA, 560 bp, Aspergillus oryzae
cggacgcgtgggcaagttctttaagccataagagagatgctggtcgatctactaaatgctcttcaagcctttggacctcagtaccgcacttcgtccctcgctgttgcccgatgagactctgctcttcgtccaggatgcggtggggttgtacgagggcaaatacaagatcccacattatcaggacggccatgcatacctcacatcccaccgtgtctgttatgtcgcggtggaggagccacgcaaacactctgtcgctatcgacttgaaagatattgatagagccgaataccaagcaggcttcctcaaatcttcccccaagattacactgcaccccaagccacccaagaacagctccagatcgaaaggcactggtctatcaaggtcgcagtctcctcgggtacaaaactctgcaccagtagtgaaaccatcagcatcagcattggtgaatgccacatggatctgcccgatctgcacgttctccaatcccataccgtccaacttcgacccgttcacggcgacggcgacaaacataccgccttgtctgacttgcggtatcaagc

SEQ ID NO: 3739 - DNA, 568 bp, Aspergillus oryzae
cgcactggctgtgctggcttcggtagctattggttcgagctatgtcatcaccaagaagggtcttgtacaagcggcggagaaatatggcttcagtggagaaggatttgaatacctgcgaagcccattatggtggtgtgggatgatcatactgatttcgggagaacttatgaataccgccgcttacgcttttgctccggctgtgctggacactccgctcggggcgctcagcgtactcatcagcgccttgatgggcgcatactttctcaacgaggatatacaagtccttggtaaactcggagccgcaatctgtctcctgggatctatattattagtgctccatgcgccgggcgacagggacattcagaccattgaggaaatcctgcacctagcgattcaaccgggcttcctcatctattgtacccttgtcaccgtgtttgccagttacatgatctacaaagtcgccccaagactaggccgcacgaacccgctagtctatctatcgatttgctccaccgtgggctctatatccgtcatgtctgtgaaagcattcggaattgccatcaagctc

SEQ ID NO: 3740 - DNA, 565 bp, Aspergillus oryzae
gccagctggtcaagtcgcttctgccattctgaaatacgtcgcacctcgcgtcctgtacgcttgggaaaacaccaacatctccgatcggcaggttgcggaagattgcctccaagtattccatcatcccgctctgagggatatgcgcaacgaagcacatcggaccatgtacgaagcagtcgaatcttgggtgcagtctaggccggatcgtggctccgaactgaacgatattctcagtgccgagggtgtgaaggctggaaagaaccagacaggagagggtggccactcccatggacacggccatagccacagccatgcagctcagcagtcccatactcagtcaggacagtcacagtaccgcccaccccaataccaacagcaacaaagctcatctagccccttcgaccaactttctagccttcccattcctggtatctctaagcttagcagtgctttctctagcttgggactgggtggcttctcgatgggtgacgagacctcgcagcagactgcacctccgcctgaacctcagcatcaacaatctcatcagtcttaccatgaactatct

SEQ ID NO: 3741 - DNA, 578 bp, Aspergillus oryzae
ggcacatctgtccatatatgaggacctctatcttgcgctgtactcaaggctgagtcacgttgtactggttttccattgtcccgcagtatccaccggtcacgatgacatagaacctatgcccgacccgtttgttttggatatcccgttggagtctgaatatgacgtcgagtctcaaccgagtatggcacaattttcatcactcgttttcaaaaatatcatgcatctaccatcgacgactgggagagatgattatgatccgggcctaaagcttataaagctctttgtgctagactcacgcctatctatccatgaatcaatatatgctgggccttccgataccggtgcttcagataggcaagacctagaaaaggatatcatccggttaaaaagacgctaccaaacgacacgccaagggaatttgcagtcatcacggtcttacggggatttcatagttgatgattatgacgagtctgtagcgggccctggaacgcctactttcccagatactgggatttctaatattacaccacttgcaatttccccaatggagtatcgacttctcgcaggtttatgagggt

SEQ ID NO: 3742 - DNA, 271 bp, Aspergillus oryzae
gaaaacatgggtactcttccattctctcatttgaccagggacactcgaactgcgcctggccggtacatctgagccaatcgggctgatgtgcgcacttctcgcatctcggtgtctcgcggttacaccgcgacctaaaaattgattgacgcggcacatagatgattaatgaggtcatgtctgcttacatagttgaagcatattgcgacgcatgtagcaagcattttaatgaatgaacattgatacaagttactaaaaaaaaaaaaaaaaaaaa

SEQ ID NO: 3743 - DNA, 531 bp, Aspergillus oryzae
  modified_base (418)..(418): n is a, c, g, or t
  modified_base (476)..(476): n is a, c, g, or t
aaacaaggagaatagggagccggatctgggtcagagcaagggtatgtttagctcctttggtatcaacgtgggtggagggtccaaatttgttgagcatgatgattggttccatgaccgaaagatttacctggacgccttggagaatcagttgaaggccctgatgaaatccattgacaccgtagttgcacaacggaagggtctagcagaagctgcgggagacttttcggcatccctccatgcgcttgcagctgttgaactatcccccgccctctcatcccctctcgtcgggctctcagacctacaattgcgcataaaggaactctatgagcgccaggcccagcaggatgtcctcactctcggcatcaccatcgacgaatatctccgtctgattggaagtgtcaagacagccttctctcancggcagaaggcgttccacagctggcatgcagccgagtcggaaatgcagaaacgcaagnatacgcaagagaagcttctccggcaaggaaagacacagcaggaccgcctaaatca

SEQ ID NO: 3744 - DNA, 325 bp, Aspergillus oryzae
ttttttttttttttttttttcagaagtatgaaatagaagaccagtttagacacctacaaaaaaggggggtaaaggggatagaagaaaaaaaagccatcatatctagcttgacatctggattatcaaaaattgggaaaagaacaaacaaaacaagtccgatctcataatgcaggactcgttgcagggtacgcctcctgacatgacaacctcctccattaccatttgcaacttagcaacatgaagggcatatcagatgccaccgaacaattaatctccgcgctatctttgcaacctcttgagggaactgatgtggtctagatcgcga

SEQ ID NO: 3745 - DNA, 440 bp, Aspergillus oryzae
  modified_base (305)..(305): n is a, c, g, or t
gttccctgcgtttcgatgacaagcctgattactcgtaccttcgcaagatcttccgtgaccttttcgtccgcgagtctttccagtatgactacgttttcgactggaccgtctacaagtaccagaagaatgccgcgatgattgtggatgccagcaacaagaaggacaaggaagcggaggaacagcagcgccgtcaaggcgtggcagctgccgcgccgatgggcacccccggtgctgctgctaagcctggtgctatctcaagccagcgccgcaaggtcatcgaacgtggaactctcgagaacaccccngacaccaaccgtgctgtgggagggagtgacaggattcttcggcgttaggctgctttctgcttccaaggttgctgcttcaggtgcttatggacctaccggtagccgctcgaagcgggacgatggatacggtgctca

SEQ ID NO: 3746 - DNA, 546 bp, Aspergillus oryzae
caaggccaagaaggcccttattgaagaggccaagcatgcccaagaggtcgctcaagaggtcgccctatcgggcgcctacatctatcctttcaagggcatagtgtacttcgcgtaccacaaggacctctggcgtccgctcctctcgcaggtcggacaaatcagtagtctcggtttcagcgtgacaggcgccatgttcttcttcacatacgtaccacaggtggctatcatgtcattcaccagcggcccctttgcgcccatttccgccgctctgctcattctcaccgaaagttccacgatcacaaactttcttgcccgctctttcctcctggaagaggcattgacggataccttcgacggcacgctcattgcctgcggtcacgaatcgcttgtggcagagggtcgacagatcaagccccaggcgggcagagatgccattgcccgactgggcaaaatggtgaagcgccctctggatcggatgaagccgcaggcgttgctgcattcgctgatccttctaccgttgaattttattccggtggtgggaactgc

SEQ ID NO: 3747 - DNA, 544 bp, Aspergillus oryzae
gatggtcttcgcgagaagaacgacgagcgattgcctcgtgtcctccgcaagaatgacctcgaagaagctcaagagctgaaggatttgtcagaccctgctgagatacaagcggctgcatcattcagaggcctgaccttcgcacatgtgacaaatcagatctggcatttctgctccgtggactacggtccgagatatacatgcattggttacaactctttatttgtagtcccgaacgttgaatccccaaatgggcagggcctacctgacgggagacgattatggtcatggttaatcttatgcgacgacggcactgttatttccatacaagagaacccgtaccctggcctttctaagccgtcggagagagagctgaagtcagtgctcggtataattcgcagaaatgtacaacttatcttttccggcgtgtctaagcggcattccgctcagtcggagagcgattccttagtgaccattcgcgtacgacctgctcacggtgatggcccagaacaggctagtataaaacaagaggatggccctagtttac

SEQ ID NO: 3748 - DNA, 536 bp, Aspergillus oryzae
tgctcatgttcggggttattgcgctcggaaactcgggagcacgcatgcaagtcgccttcggtgcgtcgtatcttttgctcaatgctgcgtactggatggttgcggccttacctgagagattacactgggattattcggcgcttcacattcaggaagttgggcctgtttcccaggcgcctagggagaagcggagcttccgacaggcgctatggaatgcgattaaattgaccgggtcgactaggtgggtgaagactggacgtatcgcaccggatacagaggcttgggattgctggttggggcaagctcaacttgctgttaacggggaggatgggttgaatccggacacctgggaatggtcggacagattggacgattgtctcgggttgtttaatgatagaccacggaagcccgttcctgaagaaagggcttgcacggtttagtatatgggtcttggaaatctttcggactatgtgtaccatgctttgatgatgatgatgatgatgatcacgattacgatgattattgcatgactgtga

SEQ ID NO: 3749 - DNA, 493 bp, Aspergillus oryzae
gacggttacaaaacctgttgtttgtatgcagaccgctgtacttcatactacatgcaatggtgagaggagaattcgcgtcttgactctggctcttcccaccacccagagccttgcagatgtctacgcatcggcggaccagcaggcgatcgctacttacttcagccacaaggctgttgaacgggctctcggaagtggcctggaacccgcccgtgaagccctgcaggccaaggccgtggagcttctggccacctaccgaaaggagcttgctggtggaagtgtgagcggcggaggcctgcagttccctgctaacctgagagggcttcctgttcttttcctcgcactgatcaagaatcttggccttcggaaatctgcacaaattccgactgatatgcgctccgcggcgctctgcttgctctcaacgctccccctccctcttctcatccaatatatctacccgaagatgtactctctacacgacatgccggataatgct

SEQ ID NO: 3750 - DNA, 582 bp, Aspergillus oryzae
cggacgcgtgggcgggaaggcgctgccccagctgagattgatgcctatgaaatggactgggtcaagagccacaagcttgtcacattcgacgaagccgtcgacgcacacctcgaaagagaaggagccgctcaatccgtcagggatgcatacaaaaagcgagtccaggagaacccagatctctccattacccgccggagagccctcgcaaatgactacaccaagacccccgtggtctggtcctgggatattccccggacgcgggaaggctactaccattacaaggctggcttcccagcagccaccaagcgagccaaggaattcgcgccctatgcagacctcctctgggttgaaaccggcaatccgaacgtcgagaaggccgccaagttggccggagacgtgcggagcgccttccccggcaagaagctggtctacaacctgagtccgtcatttaactggatgggacagggctttaccgaagagaccctcaagtctttcatctgggaccttgcgccacacggattcgtgctgcaattgatatccctcgccggcttacacaccaacgctaccgtgacaacagagctt

SEQ ID NO: 3751 - DNA, 598 bp, Aspergillus oryzae
gcaaatttctcttaggagcttctgctgactgccccttgggctggcttcggcgattttggattgcaactcaggaaaataacccttaattacaggagaagcaaacgcctcctcagggagtcgaacggggattgttctcattgctcgagccaacggagatgtctttgctgtacggtacagatacctagcgacttcccagtacctgctgatcttgctaacaatgtttagcaaacttctccttgcgctggggctcatgtcccgatttgggatgatgccaatcaggtcagagagtcccaaaatttgctgtagttgatgaatgccttccacaacttccactaaacgtgtaacgacttgatattgggaccacgagtccaggagtttctcgacttccttcgctcttagggtgaaattgtccgcggtctttgacaggtttccgtcaatcaacttccgcctgatgatctccacagctagcagggcttcctgaagcgtgcctttcaaggggcgttttgttgaagttctcgatgtacaggccattccgcaaccgtgacagtatgcgcgatgagcacatggaaaccacggcggtaagaatttgattcccttt

SEQ ID NO: 3752 - DNA, 487 bp, Aspergillus oryzae
aattgacaggtccagggtagcttttgttccttgttattaaacatcaacatgcccaattttgcacgacctatctggccaggttctgacgacgaaaaacgcgaaaatgtcacctgaagagctcgatgccctacttgcagcgccagctctcgcaccaccacccggggtcacaccaaatttcgacaatccttcccgccacaatgactatgcctggggtatcacaacggtctgtatggtcgtcgccactctgtgcctctttctgcgctgttttgacgatcggtgcatatggagcctattggggtactgcatacgctgcctatggaatgatatatactcctggctactacgtccacacatgggaccttcgtaaccgagatcttatcaggccgctctatctcatcttagtttatggctgttgctactccgcaacgctcccactgatcaagacggccattttgctcgactggtgtcgggtatttgtctctgtgaa

SEQ ID NO: 3753 - DNA, 605 bp, Aspergillus oryzae
cgtcggttggatcactggtcatacctatgttgtgtatgctcctttgctcctgggatgctccaccgtcgtctttgagagtaccccagcgtaccccaacttttctcgctactgggatgttattgagaaacaccaggtgactcagttctacgtcgctcctacagcattgcggttgttgaagcgcgctggagacgagcacattcaccacaagatggctcacctgcgtatcctgggctccgtcggtgagcctatcgctgcagaggtttggaagtggtatttcgagaaggtcggaaaggaagaggcacacatttgcgatacctactggcagaccgaaactggttcgaacgtcatcacacctttgggtggaattacccctacgaaacccggtagtgcctcgttgccgttcttcggtattgagcctgccatcattgaccctgtctccggagaggaaatctcgggcaatgacgtggaaggtgtgcttgccttcaagcagccctggcctagcatggcccgcactgtgtggggtgcccacaagcgttacatggatacctatctgaatgtttataagggctactactttcactggagatggagcaggacgtgaccac

SEQ ID NO: 3754 - DNA, 444 bp, Aspergillus oryzae
caagagggaagcgtccaaacgggccgaacaattggagtatctcggacatatcgccgacatgcttgagaagaagagtggaggtgatcctctattatgggaactcaaaagcaattctaatgtgaagcggtccttccggcggatgctgaaacggcctcttgacgagaggcggatatataaggtatctgatattccggagacgatcgagagatgggacgaagaatacgaattagaggtacttctgggtcgaattgatatcaacccgaagtccatcgctgctcgatggaatgagcgagtggccttagggcaaatacgagccgaagatttgccgtgatgtagcatatattccccttttgactttgatctattcctaatcttctttcgttggtgtcttttttctattattttctatctttatagaattgtatatatagagttgcttcaaaa

SEQ ID NO: 3755 - DNA, 407 bp, Aspergillus oryzae
gctttgtttcaacaactcaaagcatgagcatagacacgtcagaaaagctttgttccatatttcttttataatttttgcatgatcgtctataaaaaggcgggttcggcgggataaattcaacatgataccacttttcatctgttgggagggatgttacggcgttatccgggagcgaaagtcttcaacacactgcctcctcaggcttgacatctgcggaccatcagcgtcattcaggaccaggtccgcacagaagtttgtggacgcttgtcgtaagctgtgcttcggacaagcgtccgagaggagatgatctatctatggccggcggcatttgcccagtcatagttgtgctaatctaaacattagcattatagagtaatgaacaatgaaccatttatatggcaaaaaaa

SEQ ID NO: 3756 - DNA, 618 bp, Aspergillus oryzae
gatgaggatggcaaggaaaacaagtatcatttcaacttgattgacacacctggacatatcgacttcactatcgaagtcgaaagagcgttgcgtgttctcgatggagcggtcatgatcctgtgtgctgtttcaggtgtccagtctcagaccattaccgtcgatcgacagatgaggcgttacaacgttcccagaatctccttcgtcaacaagatggaccgtatgggggccaacccattcaaggctgtcgaccagatcaacaacaagctcaagctccctgctgctgcggtccaggtgcctatcggtgctgaggacgaattcgaaggtgtagtcgatttgatccgcatgaaggcaatctacaacaggggacctagcggcgaggagctctttgagacggaggaaattcccgagaaagtcaagagcactgtggaggaaaggcggaagaagctcatcgaaactcttgctgacgtggatgatgagatcgccgagctctttattctcgaagaagagcctaccgagcagcagttgaaggctgcgatccgccgcgcaaccattggtctgaagttcactcccgtcttcatgggttctgctttggcgaacaagtctgtgcagcccatgctg

SEQ ID NO: 3757 - DNA, 576 bp, Aspergillus oryzae
cgatcgacatgcattccctatggaatttgatgccacgccttacctctccaatgatgctgataagtcagagccgtgggtctaccagttacatggcgtcctggtacacagtggcgatctgaacgcaggccattattacgctttcttaaaacctaccaaagacggatactggtatcggttcgacgacgatagggttacccgagctactgacaaggaagtccttgaagagaattatggtggtgaatatgagctggccaacggcgcggccggcgtcaagcaaccttacacacgtggtctatcaacgaagcgctccatgaacgcttacatgttagtttacattcggaagtcaaggttggacgatgtccttcttcccataatgaaagaagacatcccatctcacattgagacgcgtctgatcgaagagcgcgtggagctggcacgcaggaagaaggagagagaggaagcccacttgtacatcaatgtcggagtcctgaatgaggagtctttcaagtctcaccacggatttgatctgacgagccttgacctacctgctggagacccagcactcccgaagcaata

SEQ ID NO: 3758 - DNA, 527 bp, Aspergillus oryzae
caaagataataaaacaaatcaatgaataaataattcaataaataaataagttagaggagatcgattagtcattgagctgaatcttcctcatgatcaaccctgatctctttgcctaaaacggtctactttataccgaatttctttttctttctcctccgtttcttcggcccttaagtccggggagacaagacaaaagggttacatatcagtctacatcggtttaatatgacacgtccgtcggcgtttagtccggatgagaaccagcatcctgtcgaggatgtcaggtccgagtcggtagccaaatccagccctcgcagcctgttctccgcggtgtttggttggagtagaaagcaccgagacaacacccatgaagctgaagatgaacggagacccttactgggatcggattccccattgtcaccgtcaccatcaacgtcatcaccatggtgggaaacaacgtgggattcggcacaggaactctggctccagggtaagggaatgatccttgtcatgtcagcccagttctt

SEQ ID NO: 3759 - DNA, 593 bp, Aspergillus oryzae
cgatccctcaccttccaccacctctctacccttcccttaactactcttccttcattcacaatggctaccgagaagccccgtgtctgtcttgcctactctggcggtctggataccagctgcattcttcgctggttgatcgaggagggctacgaggttgtctgcttcctcggcaatgtcggccaggaggaagactgggccgctgttgaggagaaggccctcaagatcggtgccaagaagatggtgattgaggatctgcgccgggagttcgtcgaggagctctgcttccctgccatccagtgcaatgccatctatgagggtcgctacctcctgggaaccagcttggctcgtcccgttatcgcccgcgcccagatgcgtgtcgctcagcgtgaaggctgccagtttgtcagccacggtgctaccggcaagggtaacgaccaggtccgtttcgaactggctttctatgccatccagccctccatcaagatcatcgccccttggcgtgatcccaagttcttcaagcgtttcgctggccgtaacgatctcctcgactatgccgcccagaccggcatccctgttacctccactaaggccaa

SEQ ID NO: 3760 - DNA, 601 bp, Aspergillus oryzae
gcgccatcattgtctccgtccgctcccctccggagactacatccggggagttgaccaactacttccgctcgtaatcgaattcgctatgtcaggggccaggcacagcactgcttttatcgctggctaacgaggattcgccggaccaccactgtcgatcccatattgaccacgttacgcacaccaatcctgcgacaacatctcactctcctcctcgatcaacgcacctttcacgtttcccccggtcctcaacaggccacgatggccgtcgcacgcccaatgcgacgcacaagtcccatcaccttcttcctggcagccttcctcgccttcggattcctctttttcctcctctccccgtcatcctccgccaccaccgcaggagacacctcccagcaacgccgcgaagacgccgcagaccaccctctctcccctccgacaaaacccttcctcaaatcccaacccgtccgcaatgacggcctcaaagcccccccaccagtcgtacactacgacctcaacaaactcaccacaaccagcgactccgccgacaaaggcgaacgagtcctcatcctcacccccctagctcgcttctacccagaattctggg

SEQ ID NO: 3761 - DNA, 139 bp, Aspergillus oryzae
cggacgcgtgggcattggaggaccaaggtgctccatcttgaattcatgtcgcattacctaacgaatccaacaaatatgatcttggataaactggtaccagtttcacagacaaaaaaaaaaaaaaaaaaaaaaaaaaaaa

SEQ ID NO: 3762 - DNA, 618 bp, Aspergillus oryzae
cccacgcgtccgggaagaaactgcagcactacttgtgaatccggaacttatcagtgcggacgagaatctaagtgttgagctatgggattcagaccgcaacacagcagatgatattgttggtaaggttgagctgccgatccgtgagatgatccaacatccagcgcggatgtatccccaagtatctaagctgcagggtctcaacgagggcagcgagatgcccggtgagctacactgggaagtcggcttttttggaaaaccgaaactgaggccagagctaaggactgacggcaaaaagaaagacttacccgagaacctcagggataaccctcaatttcaagatgataaaggagtcatcaccaatgaggaggaggatgctgtcactcacacgccaccggacccgctctggcctagtggcattcttagtattgtggttcatcaaattgtgaacctgcaacttgcaaatatcaagggtagccggtatcgaaaaggaagagaatatgaaccggcgaagccatatggagagaatacggaagaagagggaggagacctgccaaccagctattgcaagattatcttaaatgatcagctggtctatcgtacccggccgaaagctgtcag

SEQ ID NO: 3763 - DNA, 546 bp, Aspergillus oryzae
gcgtccgcttaggtccgatgcagcagcggaagattcaggctccgcaatcctagcaaacctcagctcacgtcatggcaaacgatttaccatcagtagacgaagccaggctgctagatcatccagtggatcacaattatcttatcatcgatccgtcctcgctttatggccttgatgatattgacccacaggccactggacgcctcaccaccttaaaccctgaacctcatacattggacgaattggcaagcaatcgtgtattgaatcctaactccaacagacctcttgaatatagcaacaccttaccagaagggcaagcgacttcttggcctactgcaagccttcaagacgtgccgtggcttcaaaataatgagtggtatacaggctatactccaaatgattcaccatctcactggttaaatgagacttttgccccgcaggcgcctttacttccgccaagtgagataaacgatggacaccttgacaacaaaaacagttggcttcagcagtcgagactgcatctacttgtccactcggctcaaatgacag

SEQ ID NO: 3764 - DNA, 573 bp, Aspergillus oryzae
gccggaacgcttagcggacggcgatcacaagtatgagctccagtttggtggacggggcttcgacctgtaccagcactcccaccttggatatggtctcatggctgcacgtgaagccattcacaaagctgtcgttgagggtaaaatggcctccagtggaaacgatatggcttggttgaatcagcccatccctaatccttgtattgcacctggaatggagcgcgatgtggaggtgaagtttgacaaggaacacccacttggatcaaaagtgactgtcaagatggttggcccgcaggatggatcttcttcgcctgccctgtgccgcggcttcgcggagaagattctcaagaaggacgctgaatgcaaacttgcaccttgctctttcaatggtgttcatcagccctcgcttgagaagacattttccagagaagacgtttatatcttttcctacttctttgaccgcactaagcccctgggcatgcctgactctttcactctggaggagttgcaccagctcacatccaccgtctgtgccggcgaatcgtcatggaagattttcgaaggcatgggagaagc

SEQ ID NO: 3765 - DNA, 571 bp, Aspergillus oryzae
aaacaattgaacatgcgaagtctctgtatctaacggcagaagacgcaaaccagcgaatcatcgcagccgagattttacactctacgtctaagttgtccaatgaccggttcatggcatttgctgcaactgctttgcctttcatatttgtttccaagtacgatactgatgaacacgttcaagaagcatttgagaagacatggcaggataatgtgggcggtaaccgtgcggtatcgctatatataaaagagatcaccagccttgtttcagacaatctcgattctcctcgctggatcgtcaaacatactgcagcattgggatttgcgaatagcatcatggcactagactccgaactggatcttgccactagcgagtacctatggcctattctggagaaagcattggctggtaaaacatgggatggtaaagaagttgtcgtgaaagcatttacgaaatttaccagccaagcaaagacgctatggctagagaagcctcgaattggtgatacaatgaaggccatcgccatcagggaagctaaacggattaaccccaacatatcgcccacatgctatca

SEQ ID NO: 3766 - DNA, 584 bp, Aspergillus oryzae
tgcaaatgggcggtgatgagatgctcactcgagacttgaagaagtccaacgataatcttgttgtgcatggcaaactcattatcaatctgtccaccaacctaagcacacccaataccaaccaagcaaacggcttacaccggtcacatatgcagccatcaacttccagcgggcttgtgccacaggtatcggcatcgactccgcagccgtctcccggcccaagtcaagctgaccccaccgcgtcaaatccatctctccacccgcagcgtgtcccatcgactactaggccaagcagtacgattgtccctgccaatggcccgcccgctccgcccaatggtcagcagggctctcgcacaaaccttagctcgttcgaagatagccaaggacggctgccagccggctgggagcgacgagaagataatttgggacggacatactatgtggaccacaacacgcggacgaccacttggacccggccatcgaacaactacaacgagcaaacgtcacgcacgcagcgggaggccagcatgcagcttgagcggagagcccaccaaagtcgcatgctcccggaggatcgtaccggtgcg

SEQ ID NO: 3767 - DNA, 519 bp, Aspergillus oryzae
ccactctgtgagccgctatactatccttgtcattgttcatcaaggtctcccagggtatatcaatagagcacacaatggtcgcactttggaacaagaaaaaggacgaccccgacagggaggaatcacagacaagggatgaggaaagctcttccagaaaccatcgtgaaccgcagtatcgagagccagatgagcgcacaagacttttacctcgcgatcatgccgcttatctgagacccgatgatcctgcagtctctccgtataacctctggagcgttcgagctctacgagccctctcttcactcttcctcgtgataagctttatatggtgggccttcttactcgtctccatcttcgtcagcccgcccatgatgcacacacgggggtccggcttcttcagtttcgcctacacgtcgttaacagtcggctacctgataatcgcgctccttttcttctccgtaccgtcaaagccaatgacgatatgtggcgcgatcctatttggctttctcttaagttgatatg

SEQ ID NO: 3768 - DNA, 556 bp, Aspergillus oryzae
aattcaaggaaagcaaggcagccgaaccgacactggcaccgacacccaagcctcggagacaatcgagcactcctcgtctagacgataaccgtgcgtccagggtcatgaaggacatgagccccgaactggagcagcatctcctaaacatcggtaatgggcacaaccgctctctcgctcgtctaagcataactgatgttgcagatcgctacctgcgggacaagaccgacgcgatctccgacatcatccgcagcatcagcgaacagtgcgctgctgccgtggagggcctgcatttggcccaggatgcggaggatgatgactcagacgagtccagcaagacactgaatggaaacagactggcccctgaggatcagtcctcaattcgcgagggcagcgaaatgggcgacgtggataactcccttcacgcccaccgggcctccagtgttcctcccacaccagacttggtacataaccggtcgagtacctcaatgtccatggtgagctattcaacctttccggaaaggtcgagccaacagtatggaccaggtgaggtgcccac

SEQ ID NO: 3769 - DNA, 630 bp, Aspergillus oryzae
cccacgcgtccgcacacactgggttaatgagtcaagagaccccaaagctaccaatggcgcaaagagcggcaaggagctggccctggagaaagctggcgccaggctccatccgctcacacctgtcgctgccaatggggaaagacccagagccggcgagaaaggacgggatggagccgtacgctttatgctcgacacggagtgtgcggatgcagagaaggcgcgtgtttccgagtatttcaaggtcgaaatggaggagtacgaagtggaagaatgagctgtcaaatccctgcatcatagatacattgccccatacggctaccacactgcgacgagtgcagaacggcgcactgtctgcgcgtctgattttatcggtccgccagctacttttgcggcaatcgctggcgccgaacaaaagtacaccggcctctacttgggtttcgagaggtggaagagtggcaccaattaagagggtaccatctaaagctaggccaaaatgcaaacggcaaagcatcccgtcacgctgaatggcaaagaagataggatgggaaaagcggagcgattgaccctacaatgatatgacccaacgatttcgataccagtgtgcatcggatattccgtggagtctgccac

SEQ ID NO: 3770 - DNA, 505 bp, Aspergillus oryzae
tagaaagggtagtgttaggaaaagacttacgggatcagcgactcgcgcatgacctcccgtcacccacttgtcctaaccatggataggcaatggtcagacatggtccaagctagtcaactgccctgagcgtctacaggatagacgtttctacgtgaagatggttgcttttctcttcattatctctctcgtggggccttggcgcgaatttgcaaaccctccctttttgtctgctcaatgacgaacagctcgcgtgtcccatggaaacaaaccagtcccttcgagatcgtgccatactggtcaacatcactccgctcgaaggaacaccatatagcctgctcgtcagattagccaaattcaaaaccgtttccgaacccgacgcagcgcggttgaaaataagtgccacctcgaatcttgcccagctagatttcccgtttctgtttcgagaaaagtgcaaagcttcagattgcggagactatggctacataattcaacaaccgccacactt

SEQ ID NO: 3771 - DNA, 412 bp, Aspergillus oryzae
atgttatatgtccaccgtcaggccttgtaatggtgaattggggaacagatgcgtctttgactcgatacactatatttacgatttttactgccgattgttgaatcgtctcgcccttgaattgtggttgcttctcgaaaccgtggaccggatcattcgatttctaatcgacttattaagcgaaaaaataattcaaaatggagggagttgggaccgttgatgtcagctggctgcatcatacgcagaaagacaatctatccaggtgcaaatctgcgtcatctacgcacagcgataagccgaatatcgatacagaccccaccgtcgcaccacgaactaaaggaattcccgtcgagagaacctcgccacctcctccatacgagcctcccagccctgctgcagcacctacaccggacgc

SEQ ID NO: 3772 - DNA, 567 bp, Aspergillus oryzae
cccacgcgtccggtcttcttacaacatcgtcgtctttggcggagaccactgcggtccggaggtcaccgctgaggccatcaaggtcctccgtgctgttgagaagaactgcgatgttactttcaaccttcaagaccacttgctgggaggagcgtcaattgatgccacaggatctcccttgaccgacgaagccttgaacgcagctaagaacgctgatgctgttctcttgggtgccatcggtggaccgaaatggggcaccggcgccgtccgccccgaacagggtattctaaagctccgtaaagaaatgggcaccttcggcaacctgcgcccctgcaacttcgccgcaccctccctcgttgagagctctcccctccgcgccgacgtctgccgcggtgttaacttcaatatcatccgtgaactgacgggcggtatatacttcggtgagcgcaaggaagacgatggcagcggatatgcaatggacacagagccctactcgcgcgctgaaatcgagcgtatcatccgtctggccgctcaccttgccctgcagcacgaccccctcttcctgtgtgg

SEQ ID NO: 3773 - DNA, 593 bp, Aspergillus oryzae
aaagagaagaagttgagtaggacaaagtgcacagcttgtccgacctctttgaaggtgtctgtttcgtgttggtgccgccttggcgacgaatccctgcagcttctcctcatttgctgcagtgaaattgatttgcttgacacggcctgaacgcgacagcttttgctttaggttcaattactaccctcggctactgctacagtaactcctttcaatcttccccctcttttccccctcttctctttcattcgctcaatcaaaaaaaaatggccgacacggaagatgcgggcaccacgtccgtttccgaacctttggatctggtgcgcctctccctcgatgagatcgtttttgtcaagcttcgcggcgatcgcgagcttaagggtcgtctccatgcatacgacagccattgcaacttggtgatgggagatgtggaggagaccatctacgtggtagaggaggatgagaacgaggaagaaataattcgaacgatcaaaagacaggaggaaatgctctttgtgcgaggagactccgtcgttttaatatccccgcaagcctgataagattcgatcggatggacaaagtggatgatggacttg

SEQ ID NO: 3774 - DNA, 500 bp, Aspergillus oryzae
  modified_base (242)..(242): n is a, c, g, or t
cccacgcgtccgcccacgcgtccgcgtccttcgaattattccacgaccgtgcgtctcaccactaaaggagacggccattttttgaaccccgcgacgctttccggtccgaattacctgaaaatccgccaatatgtcgcgtttcttctacggtagcggtagcgacagcgattccagctcggatgaggaagagcttctcaccgatcgcgaggaggaggagaagtccgaggaggaatccagcgaanaggaggaggagacttcggaggaggaatcctccgatgacgagggtgaaaccggtgccaatcgtttcttgagggatgcatcggagagcgaggagagcgaggatgaggagaaagtaacggttgtgaagagtgccaaggataagaggctggaggaacttgagggcatcatcaagttgattgaaaatgccgagaagattaacgactgggctgtatctcgtcagagttcgataagcttaaccgccaggtcgtgaaggttacgca

SEQ ID NO: 3775 - DNA, 489 bp, Aspergillus oryzae
aaaagaaacaaaagaaaaatgacaacccccctccccctcccagagggaataaccacccgcttcatccccacaaaaaccctaaccttccacatcctcgaatccaaccccgaccccaacaccccacgccccctcctactcctcctccacggcttccccgaactcgccttctcctggcgcaaagtcatccccccactagcagcagctggctaccacgtcgtagcccccgaccagcgcggcttcggccgcacaacaggctgggacacgagacccttctcggaggtcgacctgaatacattcacgctcacgagcttcgtccgggacatggtgaccctggtacatgcgctggggtatcggtctgtgcagtgcgtggtcggacatgattgtggagctgttacggcggcgatgtgtgcgcttgtacggccggatttctttaggagtgttgtgcttttgagtcatccttttaatggggagtcctgtgttgccgtttgg

SEQ ID NO: 3776 - DNA, 510 bp, Aspergillus oryzae
tccaaactgaggatgacttgcgagcgcttcggagacaggatggcactccactcattggcccaggtgtgccagatggagatgtcatccgggctgctcaggcattccaacagctgtcagagagggcggatgaaattcaccttgatcaaaaacaaaagctcgcagcatataagttggcagtccgggagctgaagggccaggcttcaggtggagaaattgtaccgtttggcttctttgatgatgcgtgagattggctcacaggggcctggaactgggtcgaagacaaggtgaaggatgcaattgactggggtgtcaagcttgtcggggatgtctggaagttcatcgttaagattggagaggaaatattcgaaattgccctgacaaccattacttccatcgtcaagggtattgtctgggtgtttaataaggtcggggccttcatcaaggatgtaattgagtttctgggattcctctttggttggggtgatatccttgatactactgatagtatcg

SEQ ID NO: 3777 - DNA, 546 bp, Aspergillus oryzae
atcgtccgctatttattgattccgcgtcgctgtcggtgctcttggttgttgcgagagtctccgtccctgaaccacgacgcatccccaacaacacacgcgccaaggccttgtcagctccctcgaggtcaaccacatctctccctttccccccccccgactccgattcccctgtatggactgcgggagtactggtacggctgcgggcattgaccccaaaattctggataattggcaaaccgacgctactttttcgatctctccgtgggaacatccgccatacgagcagccgctagagtgggacaacagccaagactcgacccaggacgatgctgatatcgtcgagttgaatgcccttcatgggtctctggcgaaaaaccattccaatgccgcctatttagatcaatcctgtggtttccgcagtggtgagagcagcaagactacctcaccggagaaatttagtatccctgatggaccgatcgagggcacagtcagcggcaccgtcagtccgagaaccttgccatcctcggccgacgataacttccagct

SEQ ID NO: 3778 - DNA, 557 bp, Aspergillus oryzae
gatggcttaatggaatgcaactcaaaaacacataggcccatgaattgtcactcatgcagacatcatttttttaaaggttatctaatgattgccttttcttgtcatatgcttaagagaattgtggaaggagctgtccgcgctggtcatgaaaggaaagaaaaaaatatgccaacgtgacattcaaagaaacccctattctctaaatctctccatacaccttccaaaccagtcatctcagtgatggaaggctgattgttatctaatcttcatccatttgagctcgaatctgagcatatgattcaaacaggatgttttcagcgaggcatttttccgtgcgtttcttggacaccaatgcttcagcctccgtgacttccctgtcgatgctgttgtaatcactgacttgctgctgcaacgacaacgccatctaaaaccaatcatctatcagtttcagagaagcagaaatcatgaatgtaaatacttacgcggaggtttctttcccgcttactcggagtgctctcatcccgcgctctgttgcagaagctgttccacacaagagt

SEQ ID NO: 3779 - DNA, 448 bp, Aspergillus oryzae
cccacgcgtccgcgcattgaacgcctcctctaagcgacgccgtcaaattaccttgcggtttggtgtttcccaaccgctttgttaaggctgcaatggccgagatgatggcgggatgggagcatattccgacaccgtcactgcttgaggtctacaatcaatggggccaaggagggtggggtgctctacttacaggaaacgtccaagttgacatagaccatctcgggagtcacttcgaccctgctctgcacggtgaatataccggcaaagagggtaacgaagccctcgttgagacctgggccaaatatgcccaagcatgccaacaacatggaactcctgccatcgtacagatcagccatcccggtcggcagtcactccgcggtgctggcaaccgaggtctctttgcgccgactatagcgccgagtgcgattccagtgcagtttggggatgg

SEQ ID NO: 3780 - DNA, 590 bp, Aspergillus oryzae
atttgagaaaactttctaccgtatccttatccttacttacctctctctttgctctttgcatgatcaaaatcacttgttaccctcattctcttctccatcgcgacatcaccaaacttaccttttgatacccactacatccccccaccccacccattgttttcccaatgcttcaagtaccagtgcgggaacataccaacgtggcctccaccaaggctattatcttggtcggtggtccatccagaggaacccgtttcaggcctctgtccctcgatttgcccaagcctcttttcgaagttgccggacatcctatcatctatcacggccttaaagccctcgcaaagatccccgatatccgagatgtgtacctagtcggctactacgatgaaacggtctttcgcgacttcatcaaagactccaccaaggagttccctcaattccgcattcaatatctgcgcgaatacacatctctaggtaccgctggcggtctttaccacttccgcgatgccattctcaagggcaaaccggagcgcatcttcgtacttaatgccgacgtctgttgctctttccctcttggggagatgctgaggctg

SEQ ID NO: 3781 - DNA, 617 bp, Aspergillus oryzae
gaagcagacagcttagtggcatctcttccctcgctatctattgccgttgaagcggatatgtcattagcgacatccccacagaaactagtagatgctgcggtttcaaaatggggtcgaattgatattgtggttaattgtgtcgcgctagccgtgaataagccatttgaatcacagaccctagaagactgggacttgttggtcaatacaaacggacggagtactttcctcttgactcaggcaagcctgcctcatttgacgaaagggcgtgggaggattgtgaatatcgtcagtatttctggtcgtgggcctccgccaaaccagaccatttatgcgggaacgaaagggatggtggactcttttacaaaatgctgggccaaggagctgccacctaaatacggctgcacagttaatgctgttagtcccggtcctacaaagacagaaggcttttcggctgccggtgaggaacagatgaagattctgcagccaattattgaccaaaccccggttggaccgaggatggcggagccagaggagattgcttttgcggttgcatttctatgcgaggagcgtgccagatggatcaatggagctcatatcgtgcatctggtggactttta

SEQ ID NO: 3782 - DNA, 619 bp, Aspergillus oryzae
atactcccatgtcttctgcttaagccgtccgatggtatgtggtatgtggcctgttgaaccaatatggtgtagttgtaactcccagcaccggaagttcacggtgctcaggtgctcccgaggattccgcgaatatgtttgccttaacaatcatttgaccttccatctatctctgctcctatcccactatctcactatctctcgagcattttgcccctcagcagtgaatgcagtattgtttgtcttactaatgttgaactgtgtctctttagtcatcaaatgccgatggcaatactaggcggtttataaatcccagcgccacgtcctgaccattcattttgttactatgggacaatcctcctcaacacatcaacgccacaacagttcttcgaaccgtctgtcatttataaaccgtggtcatcgcgatagggatagggataggaatagggacatgaacaacgatcacaatttggagcaaaacggggtgtttaggccccaccaggggcggataatggcgatacgctacccgatcaagccagctcaggtgggagacatggcgaccggccgaggggcaaacgagcggataggacacatgggaagcattcagaagaaatgggccaca

SEQ ID NO: 3783 - DNA, 467 bp, Aspergillus oryzae
cccacgcgtccgcacacttaccccaatcgtcaaagatccacaagctgctataccatctgaccgcgtcttgcggaccatcaaaactctagccgcagactcccgcaacgcagtatggattatcagtgggcgcgaccaagcatttctcgacgaatggatgggtcacatacctgaaataggcttgagtgccgagcatggttgcttcatccggaaaccacgctcggacgactgggagaatttggctgaacgatcgaacatgggatggcagaaagaggtcatggagatatcccagcactatactgaacgtactcaaggctctttcattgagaggaaacgggttgctttgacatggcattatcggcgggcagaccctgagtatggtgcgttccaggctcgggagtgccgaaaacatctagaggagactgtagggaaaagatgggacgtggaagtcatggcaggcaaggccaatt

SEQ ID NO: 3784 - DNA, 611 bp, Aspergillus oryzae
cggacgcgtgggtgagcctacagcaccagatgtcaccactgctcaaagctcaccggctgttccgactgcctccgaagaaaacctgactgcttcttctgcttcacctaccgcaacagctgatacttcgtctgagacgactagtcatgatttctcgacttcgcctacttctcttcctgtaatatcttctgcttccgataccttcgcttcccaaatacctctctcgcctgtgagctctagtgagatgcctcagtcatcttccagcactatagtctccaccacaacgagttcttcatcctccagttctagccaaacttcgtcaacgtctagttctagctcaggctcatcttccagcacaaccacgaaatcctcaacttctacatactctacaacctctaccacgtctgagcttactacaacttcattgccctccggcaccggaggcggcgcctcatatggatgggatggaggatcgggaccgacagctaccgaacagacacctttgactactggaccgactacttcagcgacaagccccccttccagggctctggtgctctcgacagccaaactaaaggcaaaattgctggtggtgtagttggtggtgtggcccg

SEQ ID NO: 3785 - DNA, 619 bp, Aspergillus oryzae
ggtcctgcctcgagtgaggttgcgaaggctacacctgtggttgaaactagtcaggttttcagacccgcttccaccgagactgtgtttgccacggttgtgtccagtgtcagagtccatggtcctgcatctagcgaggttgcgaaggctactcctgcggctgagtctagtgtccgcgtgctcaggccggcatctagtgcccatgtggagggtacacctgccgttgagtctagtcggggcgtcttcggacctgcgtctactgagactgttgaggctacccctgtggctgagtcgagtgtgcgtgcctttggtcctgcgtctagcgaggctgtgaaggctacgcctgtcgctgagtctggtaagggagtctttggtcctgcgtctagcgaggctgcgaaggctacgcctgcagttgtgtcaagtgttcgggtgttcggtcctgcatccagtgctaacttggaagctacacctgtcgctgcatccagcgaggccatcttccgtcctgcttccactgacactgtaagggttacccccgtggccgcactagtactcgggtgttcggtcccgcatctagcgcgaatgcaaaggccacacctaccatctctccagtggaagggtgtcg

SEQ ID NO: 3786 - DNA, 594 bp, Aspergillus oryzae
cggacgcgtgggcgcggcggctcgtttgctactgcggttcttcggcttgcctttgctgccacgactcttcgtcttcacgcggatgcgcgacgacccattatccgtcgctcggtggccttcgaacactaacgagttgttggagatgattttcgttgcatctgccctgaccttggccgcacccgccctgccaaaaagcttgccagcacgaccttgaagcgtcttgtccgcctcccgcagcggtttgccttgagtgctgccgccggcttcacgtttcttcagctgtttcttagctcgcatgacacgtagtttccggggaagcaagggcggaaactgctttccattcagcagaagggcctcctccacacaattctgatcgtagaattggacataggcaaaccccttcgaaacacgggtgacgctgtcgcgaacgacccgaacggactcgacattgccccgacgggtagcctgatctttgggtttgctggtgtgggcattaaaggtccgccaaagtccttcttcgacatcggccggagccttcttcttcttcggcttttcctcatcatcggcgttgccttcctggtccacgaagttgag

SEQ ID NO: 3787 - DNA, 597 bp, Aspergillus oryzae
acgtcaactttcacacctctggtgcaatctcccctcctccctttcattttatatcctctactacaggatttcgtcatgcaggccttccgccgtagcactgcctctgcccttaggaatgctgccgctgtgcagcaacggggatatgccaatgccccggcctacgctgagaccattaacaaccttcgcataaatgcggataccaaggttattttccagggcttcactggcaagcagggaactttccacgctgagcaagccattgcctacggcaccaaggtcgttggtggtaccaaccccaagaaggccggctcgacacaccttgacagacccgttttcgcaaatgtgcgcgacgccgtgaaggagaccggagctactgcttctgctatcttcgtcccccctcccctcgctgctaagggtattgaagaagcaattgaagccgaagttcctttggctgtttgtatcactgaaggaattcctcagcatgatatggttcgtatcaccgatatcttgaagacgcagaacaagactcgtctagtcggacccaactgccccggtatcattgctccggccaatgcaagattggtatcatgcctgggt

SEQ ID NO: 3788 - DNA, 388 bp, Aspergillus oryzae
ctccgatgtgcaaatgacgtcctaagctcgctgatatactactcataattcccatctcttctccccgtacctgaagtgatgcggctgctctgatcccctgcacaacaatccttcaaacctgaggtcttggtggcgctggactcgaacaacatcaaatcaatctggaccaggtcaaatagttctatctaaagagctaccccccaggttatgcgtctggaatgtttctgatacctctatgatcttgattctcttgccgtccaatgctcctggcgctgcctgtctttaatagttgcgttattggggtttggcgcctcctatctgccgacgggtatccaacctttacttaatcgcaatccgaattgaaatcattataccggtctacaccctt

SEQ ID NO: 3789 - DNA, 479 bp, Aspergillus oryzae
aaatgacatacacacacacagaatactctgtccaaaaccccctaaaccgggaaccacccgtgaaaaccctcgtctcaagcttcttcaccccggaagatatttcctatgaccgcaaccatggccccatcccgcatctcaccgcagatactcacaccgtccgaatagacggcaatgtccccagcccactctgcctatccatccatcaactccaaactgagttcccccagcacgaagtcatctgcgctctagaatgcgcggggaaccggcgacacgctatgcgcacactacttaaggaagtccaggggatcgactggggcgatgcggctattatgaactgtaaatggaagggccccagattgagggacgttctacttcgagctggggtgacgtcgagcctggatcgggacttatatgttgcgttttcgtgctaccaggtacaatgtcaggaggatgattggtttggtagtagtgtggagttg

SEQ ID NO: 3790 - DNA, 576 bp, Aspergillus oryzae
cccacgcgtccgtcttcaattacccaattttcagccatggcctattctaccattatactcctctgtgcagccctagctcaagcggtccaagcagcaacccacctgcctggaccatccgggccatgcagggtgcagacaacacacgcgaaactactcgatacctcgcgcgtcgatcccttcagccctacccatgacaagcgagcgatcatggcaacttcatacgtgcctgtcaattgcggacataccaagttcgaaccatatcttcctcctcatacagaagcagtaacagaccagctgtttcgatcctacgggatgcccaacgggacaacaataaaaggtttccggattgagtccgggttcgcctccaatgacacatcgcctagcgacaaacaataccctgtcataatcttctccccaggcttaggagcgtcccgattgtactactctttaatcctcgagtccgtagccagcacaggcttcgtggtagtctccgtggaccatccctatgacacctcgagtgtggatttccccgacggcagcgttatatacggtgtcaacgtctctgcagccgatcct

SEQ ID NO: 3791 - DNA, 601 bp, Aspergillus oryzae
ggcgccctttttttttttttttttgaatgtctaaacgttatcattatgttactatgaaatccattgcaacgttgcccaacagggcagcatcatatctgagatactgttccactcaaagcttgctagcaggtcctgcgctaatatatgacccccctgttctcagcacctccacggcctgctgcaccatttcctgtacgatcacgccggcgggtttaatctgcttgataatacccgagacatcacccatcaggtaaggaatctcgatgtcctccttatcgttgttgaaatcatgttcgatagggacgattcccttagccgtcagctgggcgatctcctccggtcgtttttcccagttcttgatataatcgttgggcagcatccgcagcggccgaccagaaacgaccagggtccgcttcgtctctccatattgagccccaacgacagcctccttgtgcaattgactagcactactctcctccgaggcaacaaaccgcgtgccgacccagacaccgacagcgcccagcatcaaggacgcggctaaactgcgtccatcattgataccacccagcagcccacgaccagggcgggttgacccgtcagt

SEQ ID NO: 3792 - DNA, 610 bp, Aspergillus oryzae
cgcaacggagatatcactttcatcctcacttcgcctctgcgctctatcgaccagatcgaccgtttctccagcgaggaacaggagcaactgagagaaatccaccaccacctggagcagcacggcgatggcgtcaaagatgttgcgttcgaagttgactctgtcgatgccgtcttcaacgcggcagtaagcaacggcgcaaaggccgtgtcaaacccgcagacgttgaaggatgagaacggcgaggtcagggtggctactatccagacctatggccagaccacacatacactgcttgagaggagcaactaccgcggtgctttcatcccgggctaccgcctcgagactgcagaggaccctgtctctaaattcttgcccggtgtgcacctcaaccgcattgaccactgtgttggaaaccaggactgggatgagatggacaaggtttgcgaatactacgagaaagccctcggattccaccgtttctggtccgtcgacgacaagcaaatctgcactgaattctccgctctgaagagtatcgtgatggcctcgccaaacgagatcgtcaagatgcccatcaacgaaccagccaagggcaagaagcagtctcagatcg

SEQ ID NO: 3793 - DNA, 553 bp, Aspergillus oryzae
cccacgcgtccgcggacgcgtgggaaatacagcaataaccatgactggatgcaatcccttatcacctgtcaaacactagagtgtaaggactgttatgataagtgctatctagctatagtttcttccgctgtgcggtttgcgatatcccatacctctgcctcgctcatagaccctctatcctacattccatcgcccccagctccctgtgcattgcgcatcaccctgataatcctgcctcttgatacagaacaatagccattcgttggggcgggccattcgccatacactagaagaaataagtattgcttgccgttactaggagaaaatggtggtagcttctctcgaacgggataacaatggaagctctcgatttcgcggatgcactggcatccgggagtatgagttccttggtaaacttggtgaaggcacgtttggtgaagtctacaaggcgcgatcgaaaagagatggctcaaccgtcgctctaaagaagatcctcatgcataatgagaaggatgggttccctattactgcacttcgtgaaatcaaactcttg

SEQ ID NO: 3794 - DNA, 594 bp, Aspergillus oryzae
acctttcaagccagggggttggagttccgggggctctaatactttcatcaagaaaccgttcgttgccccaccacctagcaagaatgcctatgtgcccccaccaagggaggctcctcccaagatatacaagagagaggaggatccagacgtccaggaaagtgtttcgcgtgagccgcccgcttctgaaagtcgacctgcgccgatcgaaaccaccgagaataaggaggaagaccagcctaagccgacatctctgaaggagcggatagctcttcttcagaagcaacaaatggagcaagctgcacgccatgctgaagctgcccagaagaaagaaaagccgaagaagccccctccgaagaagcgcgcagagtcatacgagggagccgccccagcagaggagccgagtgcggagagaccaggctcgatggaatctgcgcgggatcctagtgttgacactgtgaagcctgatgccttacctgtgccacaaccacctatgtctccgccacctgcacgcgaaccggcgagtgatgccaacgacgctgatgactctgccgccgctgatattgaagatgcggaggaaacttctacaagcaaaga

SEQ ID NO: 3795 - DNA, 586 bp, Aspergillus oryzae
aaggtgacctggacttgacggatggactgcagtgggtttcagatggcttgaagaatgtctttggcagtgacaaggccacagagctgccgtcgaagatacgggttagtgcccttttggctaaggagagagactggaccaagaagcccaagattgaaggtatcgttcttcaagcctttctccatgagatgaagctacccgcgtgggactttttggaattccaaacggtggggatcgagctgtctgctaggaaggaagctgcgaaaaaggacatcgaggacaatccggagaaggaacagaaagaggacacggacaagacaaaagaagaggaggaagatggcaagtcaaaggaaattgtagccaagaaagacaagccctctaatgcccccacgacgaaggatcatgccacggaggaaaggcgcaaaaaggaagaagagggaagcaaagaggagaaaagatggaaggtaggctttggactctttggcaaggtcaatattaccaaagtacccaagtcaccggtgccactggaggcaagatattggattcgtatgggagactggaaagaggagaagaaggaggaagaagaaga

SEQ ID NO: 3796 - DNA, 539 bp, Aspergillus oryzae
cccacgcgtccgcaagcctccaatcattgactgaatccactcattcgagaagcattttctgtcccttggctatttgacattcccttcaaaattttacggtcactaccatcctcgtaacgatgtacgacgctaagagcctttcagccctcctggtcctgctgttggctgccggacctgcctcggttgtttccgtgccagttgctgcggaccaaaacattgtcgcaagacagatcaacagcgaggctgaggcaggatctaacttggtagcctccatccccgagggaccctactaccaaagcggctcttacgcatcttccgactaccatgaaggtcctggcaaaaatggcggctccagcttctcatccggagccgatgcaagcgatgatacaatagtttctattccggatggccccagcgttaacttgggaagctttgcgcactccagctatgagcaaactgagcccgagcctgagcccgagcctacccctaccccaactcccactccgcaagagccccagccttcctctccatctactcaa

SEQ ID NO: 3797 - DNA, 574 bp, Aspergillus oryzae
cagtatcccgccagctacgccgaccccctccgccggcacctcctcgggagccatcccggaacccagtggcctgcccaccagcggcgttatcccaggatcgtccggatcgagcggctcaaccacatccagcccggtcatcccaggagcgtctacgggaactcaaactttcaccccgggaccgtccggctcggtcatcagcccgggcgttcctacatcgaccagtggtgtcgttccttcgaccggctccagtggttcgtctttgccgtcgtcggtctcgtcgactcctctcatcggctcctcgaagcccaccgacgtgcccaccagccaaagcaacccgatttcgacgaacacaccgactcccgcttcttccaccaccgtgaccccgacgagcacggaacagcccagcacgacggagaagtcgacggtaacgacgaaggtcaccccaaccccagagcccaccacgacgagcgacgccactgactgggtgccgtcgacgattctggttgaccctccgaccccgacgacgcaaaacacggccacccacaccacggcgacgacgacgtccactcagacc

SEQ ID NO: 3798 - DNA, 581 bp, Aspergillus oryzae
cccacgcgtccggcttttgcgggtacgtgcgagcttttcgccttttgctgcgcgcacgcagcagatgatcaaagaacagttgggtcaagccgaagacaagactcaacttcccgatgaataccttgagcttgagaagcgcgtggacgctcttaagttggttcatcagaagctccttcaggtgacttcgcagtactctaacgaggcttacgactacccacccaacatccgcgagtcattcaacgacctaggccggaccatcggtgaaaaggttcagcttctgtctcaagcttcttctcctgcggaggcccaggctgccctgactgcccctccttcggccaagccccagccgaagacgttcaaccatgccattgcccgcgcctctctgtccggatcccagactctggcgcagagctccaccggcgaggaccctctggccactgccctggagaagtatgcgctggcctcggagaaagtgggtgaagcccgtctgtctcaggatggacagatccagtcgcgtttcctcgctgggtggaacacgactctcaacaccaacctgatgtttgcggccaaggcgcgcagaa

SEQ ID NO: 3799 - DNA, 563 bp, Aspergillus oryzae
ggggattataagatgcaggcttgagcttagagaaagcttgttatacgtacttaatctaccctacatttgcttgacttcttactattgccttgaccccaaacgtgaggcatacaactgatgaccttatgtgtctgctgcagaattgcgcggattgaacttctaactcgaatatatccctaattcctacttttggaataggagagcagcagcagtcatggagctcaccaataacttcactcaatcgcaagcggatgaaaaggccagcggacatacggacaatagccatgacaaacagggttatagtcaccaagaagatgtagggtcgggtggctacgcggacgagtcgggggagcaagggtctgagcctcctatgacttttcgtcgctttatgggcttcacagctatggccttcttatggactgggagtcagattcctgtctatctgtttggaggaattccaccctacatctacggagatataggcggatcagatcgatgggtttggtttgttttagctaacctcctcgctcttgccggtgtctgtccatttggtggatcccttt

SEQ ID NO: 3800 - DNA, 412 bp, Aspergillus oryzae
cccacgcgtccgcccccccccctttttttttttttttttttttttttttttttttttttttaccaatataaatacattttttctttttctttttgccttaaagaaaaaaaaattttacgcacatgacgccgttcctacataggatcaacttgctcctctcggatccagggaccacttttcccccctttcttttcgagaagtttcactccatcaaccaccattcccttatcaactgccttcagcatatcatacaccgttaacgcagctcccatggtcgcggtcatcgcctccatttccacccccgtgcggccaaggcaactcacggtggccattacgcacatcgccccgtatttcagggacggatcggtgtctttcggagagggcaaggggtcgacgagcgtgacatccacct

SEQ ID NO: 3801 - DNA, 589 bp, Aspergillus oryzae
gatgcgtgtgagggggcatgggatcaaccccgtctctacgctgaaggctggggccgaaagatgtcctattgcattgcattctcgattgatggcgccaccgacgtcacccgccgatatgtacgaagctcggcgaagcatggggcagcacggaaccgcgctcctgaagaggtcgtgcattgggtgattctagaaatccgaagaaagcgtcgggagaatctatccaagactgaccaaaagcgtctgatgaaggaggatgaacgcgaagaaaaagaacttcgccattacacagcttctgcccttgctgcagagttgaacaaccttcttcctcagaaccaaacaaccggccgactggacgagcaaaagacccctgtctcgcggcaggaggcagcagcagagtggcttgccgctagtcaaagaaactctggccattctggtcctgatcactcccagggcggacggtagcactgaatctatttcagagggtctacaatcaactcatcgttttgcgaaccgtcgcccaggctcaatccatcgacggccgactgacaaccaacacgagatcttcgaccgataagacgatccaacgtgg

SEQ ID NO: 3802 - DNA, 487 bp, Aspergillus oryzae
ccatcccccccttctcattcttacttgccttcgtgaatgcctgcttgcttgctaggtcaaggaagcaaagctctcctattaaaaacaaaacagaaacaaaaaccaaaaaaaaaagagcggcatgatactgggtttcagcttattattccatcccatgttatgataaaggtctgcgacggttacatgaaaacacccattgtgagaggcgttcttcaagggctatacactgagatacatttctgggatcctttacgtccggctttggccagttgatttgtagcggattgctctttactcttcctttacttgcattcttgcgagcagcgtggtggtttttattgttgacttggggagcatatctgggttttctcatccggttttcttcaacccttcatttacaatggcagttattggagggaaagaggcgtacctacatcgatttttatcttcatttcgtgggaatttgctcttcgggaccttgaaaaaa

SEQ ID NO: 3803 - DNA, 591 bp, Aspergillus oryzae
cccacgcgtccgcgagatttcaattgtcgatatcttcccacccccatcagatatcatcacaaaattacgactacgtgatctcgcatgaacagacctatcgagccatactaattttatccccctcagcccatggtctctgccattttcgtgctcccaaagttcgcatgactaggtacgggggaatggggaggacgcgccctaaaaagctcacctccaaagcctctattcccgtagtcagggagcatgacatcgatgctatcgaagaagaggtccagaatgccctacaacagattgaaaccggtgttgagaaggccgaggagtcggaattccatcttcaagctgctataaatgctagtgcccaaggaaaagtaaatgaggcccatatcccgaccccagagaccgttctcagtagtcttcgatatgacgagctctaccctcctatcttctcgcaacctgcgacatatatccgcttctcctccactgtggaggactgttgcggatgcccgtataacatgaccgaagaggatgacgtattcctcaagatcatgaacgaaaagcgggatgccgctgaccggtgcaccgaggaccaat

SEQ ID NO: 3804 - DNA, 594 bp, Aspergillus oryzae
cggacgcgtgggtacgcaccctctcatatctttgctggaggcaacggcagtcctcatgtcgcctcgccgatgtctgcagcatctcatgcctctggcttctgggatggtaaaaccgctgcgcgtcgcttgtccgttccatcgggcgctaatccgttcgcatcgcaaccggtcaatgcctacccccctggttacgcaaacgcaggctcgacagctgcatatcacccccagggaggggtttatgcaagcccagtgagctccagctactcgatatcccgggatgagacatcgcacaatgcagcggatgccgatctgcggagacgtacctggcatccatccacgtactccaccgtctcacggcctgctactagtggatacgggaactaccagcctactgagacattgccgcactcttacggcgccaatacacaggacgaacaaccgccgcgtctgccgggaattgagagctttgataaggttgtctcgcggcctctcactccaccggtgcgccggccaagtccgatgcaccttgataacggcaataagccgccacctaactatacctttggggggaggattcaactataacaagccgtc

SEQ ID NO: 3805 - DNA, 477 bp, Aspergillus oryzae
caagagtcgatccccttattgccgagcttattacgggaaccaagaccgccgatgttggcgtcagaaatgccatgatgaaggctctacaagaggtggttggcaaggccggtgctaacatgagcgaagcttccaagaattctatcctggcgctcatcgatgacgacgctagcgatcaaacggattctgtggccatcacaaatgccaagttgcttggtgcactggtgaaggttctccctcccgcgactgccacccctcttatcaagaaccgtgtgcttacgacacaccctacgcatgcatcaattttggggctcaacgccttgcttcttgactctccgtcatccttgacggagaatttcgctgccgaaacgatctcggttatctgtcagggcgtgacaaacaaggataccttcattgccgacaacagtgttctagcggctggaaaatacctgttgatcgacgatgaacatcgtagtttcg

SEQ ID NO: 3806 - DNA, 641 bp, Aspergillus oryzae
  modified_base (619)..(619): n is a, c, g, or t
  modified_base (628)..(628): n is a, c, g, or t
caaatacctcaaccatggtcacgagaccacttgtcctctcctcatcgtccagagagacaattagatcaccattatgaaacacgctcaaagcccagacaagggatgaggggttccgtcgcggttgactcgactccaattgcaccgatcttgaatcacagcgatacgcccaaccaccccctgcatggaatcgctcgattccatcatggatgagacctccaataccccactaccctgcgcctacctaccgtctgccttcaaccgttttgcatcctgctctccttaacctttgcttcccttcccatgtcttggaatttctagtgggctgtgcattagcgcctggtacacctgtatgcacactgtacatcccgccagaatgtaatgcacataccaaggaatatcccccgaattgcctgatttcagcgacatgcagaccaagagccaaagcaactcgaccctttgccgctgggttgtgctttccactggatatggtgtttgcttttgtgttgctgacgctgcataacgggtggggaacttgatcccccgctagaacgttttagcgcatccctttgagaaatcctgatagacggtatcgtcagcgccctgttgttgggatttggantctttttcntaatcgccggctt

SEQ ID NO: 3807 - DNA, 589 bp, Aspergillus oryzae
cccacgcgtccgcggacgcgtgggcggacgcgtgggcggacgcgtgggtttgacttttgtcggaccccaggatactgaggtccatagccagatctacactgacatggagcggcaatgggttgttggcgttgttccgcgtttctgggagttgccttcaattgaagtggagactgagagggctatcatcttcttctacaatgcgatgatgccacatctgtatcattatatctctgtcactgacaagacaacaggccagacgcgttaccacaaacagtacaaaggaggtcctttgtggggcaatgttacgactaccggcggcaaagggggcagctcgcactggagtacctaccgatggcagttggaggcgttcgtcgatgccgtcagaggcaagacacccacatactggatccccggcgaggatagcatttgccagatggagtgcattgatgctttgtatcaagctgctggtctaccggtgcgcggagccccagctaagaaaggatgaagcacgacccagaaggagagatctgagcattggagatacctggtaaacaagatgtaatgatgtttatgactgttaactgggttt

SEQ ID NO: 3808 - DNA, 562 bp, Aspergillus oryzae
tacacctgactcttttccaattctctcccatccaaccaccgggatatccttttgctccatccttctcccgtattatcatctcgttaagccatcatgagaggcgagatttgccacatccacattggccaggctggtacgcagcttggtaacagcgcttgggagttataccttctggagcatggcctcaaggctgatggccgtatcgaccccgaggcgtccgaggaactcaactcgggcgcttcgttcgagaccttcttcagcgagaccagcaacggcaaatacgtcccccgttcgatcttcgttgacctcgacccatcgcctattgatgagatccgtaccggtgactaccgccagctcttccaccctgagctgttgattagcggaaaggaagacgcggccaacaactatgctcgtggtcactataccatcggaaaggagcttgtggacaacgtcgttgaccgcgtccgccgggtggccgataactgttcctctctacagggcttcctggtcttccactccttcggtggtggtactggctctggtttcggtgctctgttgttgg

SEQ ID NO: 3809 - DNA, 554 bp, Aspergillus oryzae
cttctcctcttctctttttttttttaaatccttctcatcatcttcatctccctcataatcctacaccccttccactgatcctctgactgcctcgccattaccgtgcgtacagttataccgttgtccgtcttactctatataactttactatcaccctatcaactcatttgaatcgtcacaatgggtggagttccaccgaacaccttcaaaaagattaaggagagccttaaatctatcttcaagagaaagaagggcgataagaacaacgcccaggccgcggagcaaaaaccagaagatgccgccgccgcaggcgctggtgcagctaccaccgaagcaaccgccacccatgaggccccggctgcggaaacccaggctcctacagcaactggtccggcacaatcgacgcctgccatctccccgggtacctcgataccagagcaagggcagcacaatgatcatgaagcacctgctccgacacccttgccccaaatcccgcccatagagacaacggaatctgccgctcctgctgagacccccgctgcccagccaactgc

SEQ ID NO: 3810 - DNA, 531 bp, Aspergillus oryzae
  modified_base (420)..(420): n is a, c, g, or t
cccacgcgtccgaaggaattgaaagcatctattccgaatatcgatgagaaacatatcgccgcgaagcttaccaaattcggtggcgcagaccctgtacaacaattgagcaaggaagatgagcgcagtgcggcgcttgcgcgcagagcgcagatgggggactacgacgacgagcttatccttgaacaacttgcccgtaatcgtgtcttcctcaccgacgagggtctagagaagcttcgttcatcttttataatagttgtgggatgtggaggtgtcgggtcgcatgctgcagcctccctttcccggtcgggtgcttctaagatacgattgattgatttcgaccaagtcacattatcctctctaaaccgacatgctctcgcgacgcttgctgatgtcgggacgccgaaggtgcactgcatccgnaaacggttggaacaaattacaccatggactaagttcgactgccgaaacgaactcttcagcggatctgttgccgatggtttacttgctccgtggtcgatggacgatagcgac

SEQ ID NO: 3811 - DNA, 530 bp, Aspergillus oryzae
gtccgctctcagcggtatcagctggggtaacatctttcccgtgttcacaaacatgggcgttatcgccctgacatactcctgtatcgcaccgctcattctcggcttcgcctttgtcggcctctacctcgtttaccaagcctaccgctacaacttcctcttcgtctacgacccccgcatcgacaccaagggtctcgtctacccccgagccctccaacacctcctaacaggcatctacctcgcagacatctgcatgatcggcctcttcgccatcaaaggcgcagtcggccccctagtcataatggtcctcttcggcatcctcttcgtcctagcccacatgtccctcaacgaagctcttgctcccttcaacaacttcctcccccgcaccctcgacgccgaagaagaagcccagcaatgcaaagaagaagaagaagtacacttcctcagcccgcgcagcaaatgggaagccgcctggaaatggttccacccgaacctctaccgcgactacgcggctctccgtcggaaggtccgcc

SEQ ID NO: 3812 - DNA, 569 bp, Aspergillus oryzae
cggacgcgtgggcggacgcgtgggcgggacctattgtgattcagagagaggttgttttggcacgttttggtcgaggctgggatttataataggcgtcgcatagctgggaaaggagcgcacacactgctgtcacgactaaaccgctatccggccatttccgccatgcatcgtaacatggctctgctattactcactttgttctcctggcgggcctttgctgcttcggatatcacatattgctctaccgtgaacacgggagcttcgaactccgctaatgtcagtgtatatcaatcaaacggactatgtacggacacgtgtaactccgattatgccttcggaattcttcaagggaagagttgctggtgttcgaacattgctcccaacagagctaccaacgtcgatacgtcgaagtgtgatactggatgtccaggatatcccgatgatagttgtggaagtgcttccaagggcgtttttgcttatatccagatgaacgagcattcgccctcaggaaccgccacagtttcgtcgagtacgtcgacatctacagagtcatcgacgacatcgacgga

SEQ ID NO: 3813 - DNA, 488 bp, Aspergillus oryzae
gttcttatcaggggtcggaacgcccaggaaagcctctcgaatctggtaacacccttgatgataaagatcagaatataggcaggttggtacggcgaggagttagtgggaaagtgtcagatgcgcgagctgggtttggcaggttcaaggatgcagtgggtctgcggtcacacctcccgaagacaaaggacgatgcggatctcgttggtgatgcagcttatattcctccattagagagcgacactgagatagccccttcaaagatcgcttctgacggcggtcgacaacccgaacctgagagcgttcctgacaccgagatgccaacccagcctcacgaactgagtgtcgaaacaccgcttaacaaccttgtgccaaagtcatccgatgtcaaacttccagctataacaatcgaatctgtagcatcaaacgaaccctccgatggctcccagaaggtgtctttaactcgggaagatgaggagtcgcaagatcta

SEQ ID NO: 3814 - DNA, 576 bp, Aspergillus oryzae
cggacgcgtgggtgatcgactgatttacttctttctttcggattcccttctttgtatctttctagccgtcgactttcggtttattcttatttcatttagtcgtttttttctcattccctttccattttccttccaccccctccggaaattacaaccaggccagcgattccgatgggcatctcttcatagctcctttttctggtggtcgaagactggatcacgcttccatattcaacgaaaccttttcccttgccatgtggtgatcgcttggactgctagattaacgtcatgaagctcgccaacaccctgcacgccctccgccagcggtgggttcccgtctttcacaaattgcgctcctcgcccggggaggcattcgatctcttctgggagtttgctcgccgatatttcttctccctcgcgttcatctcgctctttggcgccaaattcctccatctcttcgctcacctacactccctccccgtgagcaaattcctcctctggggcgttacatttttctttcaagatgtcatgatcctgctattgttccgcaccctcgcccagagggttccgtggcgg

SEQ ID NO: 3815 - DNA, 577 bp, Aspergillus oryzae
ccgcctcccatcgctcgacccatgccttcattcgctcccgacttttccggctaccgacgtttaccgtagggatcacccgtccgatccggagtgcacaacagaacattgtcaattctcgaaacgaactatgttcgctgtacggcactccaaagcacgcgctttcacgcgtacttccgcgttggggcaccaggtcgcgtctcgtgaaaggtgtcttccaatgagcagaatgtagcaccgtcgagacgggtgggttgtccaacatcctctctgtgggtggtcggtatgtccatcctgtcggacggaatcccaccacacgagtgaagtgcggcttcatcgaatccaggtagtcggccaacgtctcagcgcggatctcgaacagcgtctgcatatgcacttgagcctccacggggtcgtccgtcaacaacgaagaaagctcggcatcctccagacaggcgcacacacgttgcttgcccgcagtggcataaatcttgctcttcaaggctcgggcaatggctagacatatgcgctctttaccgatactatacgtgccattgacgaccaataattcggccttgcg

SEQ ID NO: 3816 - DNA, 547 bp, Aspergillus oryzae
  modified_base (21)..(21): n is a, c, g, or t
gggttatgcagctgaaacganggataccaagaataacaatcgaaaagacaaacaaaaagtggttccagtctggggctttcgaggacaaacccagctgtcacgcgtggattgtcagctccatccttcattgttactcgccccatccagattcctccgactccgtaatatcaggggcgggcgacacaaagcgggccctcgctgctttttcggagtcgtcgcaatccagaacgtccattcagattggctcacccagcggcggttgtaagatctgacaagcgggcgaagagcgagagacagacacagtgttgagtgagcagaaagtcgccaaatagaacggaaaaagagaccatacgataggcatacatacatccatacctccatacttacatcttcttttttattattcgcattcccctcttgatctccgactctccctctccagatcattatcattattttgactctttccattcattcattcgagtttccctcctccgagtctccgactctcgcccccccacacattccttttctttggattcgaccg

SEQ ID NO: 3817 - DNA, 531 bp, Aspergillus oryzae
cccacgcgtccgcccacgcgtccgtttctctccccgcaagtaattattacaggcttgctatagtatatatagcctttgaagcctaggacaatatggttcggaaggatccaatctttgaggcacgtactaatgtcaagttacactccaaccggctcaaaaaagaggccgctcgcgctgaatcgactttcaagtccgagaaggcaaaagcagataaggccatgaaaagtcgcgagttccaaatcgcccgcatccacgctgcctctgcagtacgcgagaaacgaagacaggtgaccctcaaagaggaagcagcccgggcagatgttattatcaacgagctcaaggcggcgcaaagtactcgtgatacgtctcgcactttagccctggcatctcggggcttggatgctgcgtctaagagtgtgaaccttgaggcgttggtctcccatgcgaacaactttttagcacgttctgaggatttcaaaatcgctagtagtgcaatcgaggatgttgcacaaggtgtctcaatgcgagaat

SEQ ID NO: 3818 - DNA, 532 bp, Aspergillus oryzae
cccacgcgtccggccgattgtcacgacctcaacgactttgcatccatgctctgaggcctgcttgtttcgtcttgtccacccaacgcagagcgatgattagcctcagggtggaacagcactcagattctccgagatcccgtcaagaccattttttccgtggaaacgacgacaccagagccttcgacggcaatgccgattgccagtgagagcagcactaccgtcaaccccgtgactaccaccatgacaacattttccgccccagttaccgcacctagatcgatgcccaacaatcagtctgcgttggcggcatccttcaccaatttcctcaccgtttcaatacaccaaatcttattcctccgttcggtctatccgcgagcgactttcttgcccgttcgggcctacaactatccggtccgacagtcccgtcacccgaaagtgtgtgattatatcaatgacgcgtcaattgcggtcgggacagagatcttaaagggcacaatcaccgcagtcagtatcatcatttcatctctccgga

SEQ ID NO: 3819 - DNA, 415 bp, Aspergillus oryzae
  modified_base (304)..(304): n is a, c, g, or t
  modified_base (306)..(306): n is a, c, g, or t
  modified_base (338)..(338): n is a, c, g, or t
  modified_base (349)..(349): n is a, c, g, or t
  modified_base (361)..(361): n is a, c, g, or t
  modified_base (364)..(364): n is a, c, g, or t
  modified_base (368)..(368): n is a, c, g, or t
  modified_base (376)..(376): n is a, c, g, or t
  modified_base (380)..(380): n is a, c, g, or t
  modified_base (389)..(389): n is a, c, g, or t
  modified_base (396)..(396): n is a, c, g, or t
  modified_base (398)..(398): n is a, c, g, or t
  modified_base (414)..(414): n is a, c, g, or t
cccacgcgtccgaaaaaaataatatatctctcgtcacctcgtactggtcccttgtctggtttggtcttttttttttttaaaccctttaaacttctcacctcctcttccccgttttattattatttaccctttccccctccccctcttggtttcctgttatggcaccttgatcggattcgactactacttctgttactttcgtttttacactcgctcatcgcacgttcgccaccacactcgctttgtgtttttattcgaaactatataacgttcgctacgttggttgacgaagcttctgcctggncntcgaattccggtacaaaatccggacggacctnatttcatcccntgggccgtctcnatnttcngaccaagnaaangaaaagggngccctgncntaagggagggatttgnc

SEQ ID NO: 3820 - DNA, 576 bp, Aspergillus oryzae
cactactacactactacaagaagttttacttcactgtctatactctttcaatactctacaaagataccacaatgtcttttgattcaaccgaggagaaaaccagagggttctcgcacccgatatactcatctcacaaattcaagatgtcacagcaacagcaacactatcctagtcacaatgcaccagcaccacctccgtatactggacaatatcagccgatgccaccaaaccctcaatatggataccctccccagccgtatgccagtcatccacaaccaatgatgggcaatccccagtaccctcctcagccgcatcacacccagagtgcaatgcgctccctgaaaatcgagttctccagttggacatcaagacacctagcaatcaatgatgtcgggcaaggctcgttgctctatacggtcgacctacacaaccgaaacccacagatggaattcaagaatgtcgcaacgaacaataccatcgccacggtgcatatgcggtctttgaagccagaaatggacatcaagctccatggtcgtgatattcatcttcgcgtccaccgctccatgaaacccgaga

SEQ ID NO: 3821 - DNA, 591 bp, Aspergillus oryzae
ctctcctgtatcaaaggcagcatcgccattccagaaggttgcctcccctgtccagaaatccgcgtcgccaaaagttaccagccccctcgcccgccacgcttatatgtcaccgatgatatccccgcacgctacgccacacgctacgccgccagtacagccggcaatggctcctatgcaccatatgcctcctccgagtactgctcctagcgtagctagctatgctacagcttattcccccgtcatgaccactgctgggtttatgccccagtatgccttctatcccccgggcatgcaacccaccccccggggctctatggagcccagcaccgcgacagcctaccagcatttgcgcgatctgacttatgccaacgggaatggattcttcgcccctcagaacggacatcacaatggccataacggtcaccataagggaatgatgtcgcctccggagcaccccgtcgaagaaccaattgaacttctgcagagaatccaagatgccatcccagacatcaaccgcttgttgggcagttacaggaatacgaaaagcaagctgcaagcccgcgaagctgagtttcaacagatgaagaccca

SEQ ID NO: 3822 - DNA, 492 bp, Aspergillus oryzae
tgggttttcttctctttctctctctttctcatttacggttacaagccgtgggcctttatcatgattacaatggctgaacagcgagtcaatgttcatataccgtcccaccccgccgtcctagatagcgtgcgactccgtgacattgagctccctctacctgccgccccagaggcatggcatcggcttgggaagtcgcagccatgcactgcttctctgaaattatcttactcgtcggctgttgcatctgcgaatgcggatgatgtgtctctttctatcgactatgggaagctttaccgccggttagaagaagacattcgcactatggggcagcatgaggaacatccagggaaacggatgattagcttggagggcagtcgacgaaattcgatgatgaagaatgatgctggtcaggatgtacgactgacggcagccattgttgcgaactgcagcctaggtttactcgatgagactacggccggggttaggagaatg

SEQ ID NO: 3823 - DNA, 606 bp, Aspergillus oryzae
aatgagctcccggaagccgccgaagtacatatcgtgtactcgctgccaatccaaaaagactcgatgcaacagagtccaacctcgatgtgataaatgtgaagccatcaatgcggaatgtatctatgtaccccgaaaagctcgggcaaagaagcaaagtaatccctctgaaaaagatcttttacttggacatactcagacgtctcgaacgtctagaggaccactgtaagattaatccagatagcgaaggtcacggcgttgcttccagttcaatatccgtgtcatcggactttactcgaagcaggccggcaagcatcgacctgccacacagtagccagcctcgaaccccaaacacgcaatccgtggtccatagcatgttgaacgggataaaagatgatcgggccaggtcgctacttgcttccaatgtattttgccatctgcggaacgtggaatctcgcctttttgagaacgaaacatgtgtgaaagcggtagaagctgccatggcggaagttgaacgcctggaagtgcacgagaagtcaacgttctagatccttcctgcattactaaaggaaatggcaaagagggtgggtaaaatcattactacgaagt

SEQ ID NO: 3824 - DNA, 588 bp, Aspergillus oryzae
cccacgcgtccggatcagtctgcctgccgagagccaagttgccacaccacaacccatttctaaggcacctgtaacttcccccaaagctgacgttcagtcaactaaccctttccatcggcttgcacagcagcaagagaacgcgaagcctgcatttacagcagcgggaccgatagaacgtgtgtcccgcgcccggcctgaggtggatgacgactggtccgcggcagggtcagacttcgactcatctgatgatgatgagcggcctggcggtggaagtgcgaagcagctcgcaagcatactattcggtactatggctccaccacgacctttgagtgcgatggacgacaaatctccttcgaaaccatctactcctgcaccagacactccagtagccgcttcaacggcacccgaggcagatggaaccttgtctattccctctgcttctatcccacctccacccccaccagtggtagcacaggttccctcaatagcgctcagttctggtcctccagatgctcctcccccaccgccgccaccgcctgtgcctcatatggccccctcggctcctcctccagggattcctccaccacc

SEQ ID NO: 3825 - DNA, 559 bp, Aspergillus oryzae
gccccggagagtgattacgttgtgcatttcaaatttccagatgtcgaaaagctttctccacccattgtacagatgtccgagatttcctttggttattccaaagataagccccttttaaaaaatgtcgatctcgatgtgcaacttgactctcggataggaattgttggaccgaacggcgctggtaaaaccacagtgttgaagctgctaactggccagcttgagccaacttcgggccttctttcgcaacatgctcgcttacgtattggatactttgcccaacatcatgttgatgctctggatctgacgaccagtgcggtaagcttcatggcaaagacctacccaggaaagacagacgaggaataccgcaggcatctgggagcattcggaatcactggaatgactggacttcaaaagatggagctcctgtctggaggacaaaaatctcgtgtcgcatttgcttgcttgtcgttgacaaatccacacatcttggtccttgacgaaccttccaaccacctggatattgaaggtatggatgcattgtctgaggcattgcagaggt

SEQ ID NO: 3826 - DNA, 570 bp, Aspergillus oryzae
tgctattttgagagaaatcgaggtgtcgcacccggcggcaaagagcatgattgagctcagtcgtactcaggatgaggaggtcggtgatggaactacgaccgttattattctagctggtgagatgctcgctcaggccctccctcagctcgaacgtaacattcaccccgtcgtcattatctctgccttcaagcgtgccttagcggatgcccttgccattgtggaagaggtctcgatccctgttgatatcgacgatgataaagcgatgtacactctcatccagtcgtccatcgggacgaagtttgtttccaggtggtccgagctgatgtgcagcctggccctgaaggctgtgcgaaccgtttccttcgatgccggtggtggaaagagggaggttgacattaagcggtatgctcgtattgagaagattcctggtggtcagatcgaagacagtgaggttatcgacggtgtgatggtgaacaaggatattaccccatcctaagatgcggagaagaattgagaaccctcgggtcgtcttgcttgactgcccactggaataccagaagggtgaatcta

SEQ ID NO: 3827 - DNA, 595 bp, Aspergillus oryzae
gttgtaagatgtgccagcggccgtatctggtgaggaagagtcgatagggatgatcaactttgatatcccctcatctgacaccggaaagacgtgtagccttgtcttcctcttccccaagaaggaggatcttgagacttcgtcttattccttcagcggcgacggcaaggttgacttcgcttccctccaatccgctgctacccagtctaccacctacagcaacgccccagcagtcaaggaagactatggggacttcactatctcccccggtaactcctatctcgtttcgactttcgagtgtccggcgggtcagaccgtcagctacgaaatgaagaactccggcagcaccgagctggatttctttgaagattacaacccatcccctctcggtctgtacatcactgtttgctagagtaagcggactcgagttaacagtctgacataatgcgaacatgattcacggactcattgtgtttaatatttcgaaaatattccttatacctcaacaaggtcttttcctttcagtggtcaggctggacagaaatcttcatgaagtattcgaatgggcaaagctttccttagctttgggggtaattct

SEQ ID NO: 3828 - DNA, 555 bp, Aspergillus oryzae
cccacgcgtccgctcagaacaataatcacaatgtctattccaaaccggtgcacagtgcttgtcgtgggaggcggtccagctggctcttacgccgcggcggcgttggcccgtgagggagtggacaccgtcctcctggaagccgatgtgtttcccagataccatattggcgagagcatgttgccatcaatccgacacttccttcgttttattgacctggactccaagttcgacagctatggctttgtgaacaagaatggcgctgcttttaaactcaactccaagccggaagcttacaccgacttcatcgccgccgggggtccggggagccatgcatggaacgtcgtgcggtccgaagccgatcacctcatgttcaagcatgcaggggagaacggcgcccaagtgttcgatggagtgaaggtgaacagcattgaatttgaacagattgacggactgactgtcgacccatcactgtctgagctgggacgtcccgttttccgcaacttaggtcgtgcaaggccacgggccggaaagggatcgatcacctttcgaatatct

SEQ ID NO: 3829 - DNA, 445 bp, Aspergillus oryzae
ggcacctcgagaagggttgggccggttggaggccacccggttccggtttagcggataagttctccgtcgaccaggacttaacaagtcaaaaacacctcagctgaggaggtcgggactgggtgatgctcatcgcccgcccatgattggcccctgtggcggaattggggaaaatgccaatccatgcaatttagtgcactccatgggatcagcaagcaatacagtacacgaagcgttgagaagcagccccccgactaagaaaaatgcaaacatagattaccccagtacctgtatatgactatatttagttcatgcggtccctttgcaggacgcatggtggatgatttcgcagggtcggggagagcgatacagtcgcaatagcccattgtaatacatcagtacaatagccaaaatttatggttggaagaggtagacatggaaaaaaaaa

SEQ ID NO: 3830 - DNA, 591 bp, Aspergillus oryzae
cccacgcgtccgcggacgcgtgggcggacgcgtgggtgcacagtcactttgcggagcctcaggtagttccaggtatacaatatggttagtcgccactatcaagtgtgttgtcgtcggtgacggtgctgtgggcaaaacatgtctcctgatttcgtacacaacaaacaagttcccctcggaatatgttcctaccgttttcgataactatgctgtcactgtcatgattggcgatgaaccgtacactctggggcttttcgatactgctggtcaggaagattatgaccgtcttcgtcccctttcatacccccagaccgacgttttcttggtctgcttctccgtgacatcccccgcttccttcgagaacgtgcgcgaaaaatggttccccgaagttcatcaccattgccctggtgtcccctgtctaatcgtgggcacccaaactgatttgcgcgacgattctgctgtgcgcgaaaagctttctcggcagaagatgcagcccattcgtaaggaagatggagaccggatggccaaggaattgggcgccgtcaaatatgtcgaatgctccgctctgacccaatataaactcaagggatg

SEQ ID NO: 3831 - DNA, 643 bp, Aspergillus oryzae
gccgacgccgagcagttaccgccagacgacgtgccttctccctctcgccctaccctcagtcgaccgtttgctggatcatccccgttccctccgcagactttttacctgtcaacatgtcgtacgaagagcgcgccaatgcgcaccctaacctgggcgacgagtccgatgttgaggaggaagcgctcgtcaacgattaccgcgagcaagtcaacttcgacgatagcatgagcgaactggaccggactacttcccttggagctggctctcagacgcaagatctccaggcacagctcgccgctgccgcgaccccgcttgaataccaggccacactggagaccaagtttgcaagctatgacaactactgcagccttttccactacatcctcaactcggatggccctgttgaattggaggttccttcttactactgggcttgggatgtgatcgatgaattcatctaccagttcgaatcgttctgccgttaccgcaaccgcgtcgctcgcagcggctccaacgaggaggaggcccagcttctgcgtgagaacccgaacacctggggttgctactccgtgctcaacgttctttactccttatccagaggtcccaaatcaatgagcaattggctgctatcaagcgtggagag

SEQ ID NO: 3832 - DNA, 674 bp, Aspergillus oryzae
ggcaagcggaatccggaaactacacaaatccaggacactccgagcgtttaacaagtctaccgaagccaaaggtcgcgaataagttcggagcgaaccagtcgttcgttgggaccaaacctcctctgcctagtggatccatgccaaaaccaacttcagcagttgcgcccgtcggtagcgcaagcagaacttttgcagatgagggaggaaagactcccgcacaactttgggcagagagaaaagcgaaggaacggggacaagctactgcatctgatgtaccaccattggggcacgaggagccctcgcttcaaacacagcacagcggcagagccgagtggaagagctcatacagcggtagaacgtggacccctgttcagaccacacacactggaaagtctctcggcagcaatacatctcaccaggctacggaccctactgcaaacgatgccacggcaacagagcctcaagtcccccaaagtgtcagtgctcttcgagaccaatttgcggacaagtcacttgatgactcggctcccgaggctaggtccgatgagccgtgggatacaggacgttctgtacctctgcccggcttaccaacgggacctgtgcaaccagaagctagccaggagcccgaagctcaccaagtggctccgagccctctgagcagctcggtccctact

SEQ ID NO: 3833 - DNA, 637 bp, Aspergillus oryzae
cactttcgcggagcgcgccggtgcgggccttaccgctggtggaattgctgctatgattggtaatcccgctgacttggccctcgtacgcatgcagtcagacggcctgaagcccctagaggcgcgagcaaactaccgttcggtggtggatgcactcttccgcatttcgaagaatgagggcatcccggccttgtgggcaggagctttgccaaccgtcgtgcgggctatggctctcaatgttggtcaattgactttcttcgctgagtctaaggctcagctgaaggctcacacgtccctgtcggctcaaaaccagacctttgctgcttccgctatcgctggtttcttcgccagcttcctttctttacccttcgacttcatcaaaactcgtctgcagaagcaacagaaagaccctaagaccggccaggtgccgtacaagggtgtgttggattgcgctcgcaaagttgccaaggatgagggttggttgaggttttaccgcggattcgggacgtactatgtgcggatcgcaccccatgcgatggtcacgcttatcgtggctgattatctcaacctcattaccaagtaaacgagtcaacattcattaagcggacgacagttcaacagtctcttggtgtagagaaag

SEQ ID NO: 3834 - DNA, 589 bp, Aspergillus oryzae
gatgcttatggcgacccagggcatgtattactccctcttattgataatgacatgtgttatgtgacccattcatctgtcacactgcatattagcggttggaaaagttgttctttcatctttcgtcaacagggcctttccctattggtccgtgcttccatgactcttttgtttctatgaatgtgttgtcatgacctatttaactatttcttgcttctagcatagcgagctcaatgcccgtattgttctcttagggtcttatttctattttgtttacggttgttccaatctaacttcttttctttatgtctctctttcttcctggcatgcttcatctcatttagaaactgtaatctgggtggtggccactgtcttcttgtctttttactttgatatacatgtttgatacatgtcctattcatggggagctcaacggtatgggtggcgaacgactgtttccctttacaggcacagtgacccttactgagttacacctggtctaattcgccctgccagaaggagggaaggaacggctgcctgcttttagtcgcacaagtgttatgaatcgtgcgggattatctgaaagtgaata

SEQ ID NO: 3835 - DNA, 563 bp, Aspergillus oryzae
cccacgcgtccgcgcaaacgggtctttatagccatgtccgcccaggctttagcccaactgaatggcattaacgtcatctcatattacgccccgctcgttttcgaatccgcggggtgggcgggccgcgatgccattttgatgaccggcatcaatgcaatctcatacttggcatctacggttcctccatggtaccttgttgatcgctggggaaggcgaccaatcctcctttcaggagcagtcgctatgattgtctctctctctttaatatcatattttattttcattgatgttgcagcaactcccacgctcactgtgattctcgttatgatttacaatgctgcttttggcgcatcctggggacctatcccgtggctatacccgcccgagatcttgccgttaagcattcgtgcaaaaggtgccagtcttagcacagctacaaactgggcttttaactggcttgttggagagctcacacctatccttcaggccgtgataaaatggcgcctctacctagtacacgcctttttctgtgcgtgtagttttgtgctcgtttacttcctata

SEQ ID NO: 3836 - DNA, 662 bp, Aspergillus oryzae
agctgccctgtctgagcagctcccgtgcttatatatagctatctgttgtggacagttcggtttttccctttcttcctcaccccacttctacctactacctcctccttttctcttccccgtttatttccacccttctatagaacacaccgtcataatggctgccaaccccgtccaaaatggtctcttcgtccacgaaaacactactccccccgagcaccccagcttgttgagtatgttctctctgaagggcaagaccgccatcgttactggtgctggcgccggtatcggtcttgctgtcgccaacggtcttgcggaagctggtgccaacgttgccctatggtggaacaccaacgacaagtgccctgagcgtgccgctgagatcgcctccaaatacggtgttcagagtaggttcctgctcacccaccacatctctcttaaccgatctgtgtcgctatcatgacctggactattactgaatgtattcagccaaggcttaccaggtcaacatcaccgatgccgaggccgtgcaaaaggccgttgaccagacggtgaaggatttcaacggccgtctagacgtcttcattgccaacgccggtatcccttggacccaaggtcctatggttgacggccctctatcgcactacaccgacgttgtcagcatt

SEQ ID NO: 3837 - DNA, 611 bp, Aspergillus oryzae
cgaaaagaaggcgcgcaatctgaagaagaaactccgccaagcacgcgacctacgggacaagaagaaccaaggagaagccctgcttcccgagcaactggagaaggtaatcaagatccaggaactgatccgccagcttgacgcactcggatttgattcgaacggtgacaagaaggacgactctgcggagaaggaagagaaagtctgaatccgatatgacatatgatcgatcacgtatgttatgttaataccgcggttcttccggcggccgttcgataatggacagcctacctattggtatcgatgttgatagtcggaaaggacttttcccgcgaaacttttttcgagttgacttgcgcctctgtggtactacacaaccgctcttatctggtgagacggtccttggccacatcgcgggtggaatttcaatctgaactgcatatatgcagctaccagcgtactaccgcctatcaactactcgaggaattctgatatggaaaatcccagtgatcgccttgtcactcatacagaggcactgacctatgaattagagtaataaaagactctggctatccggctcatattctatgtggcacgtggctggtccttacttt

SEQ ID NO: 3838 - DNA, 358 bp, Aspergillus oryzae
cccacgcgtccgggaacggagaagcaagaaggacctgtctaccacaatggcaacgctgagccacaaggattcggccatatctgtgttgctgttgacgatctcaacgccgcctgcgagcgcttcgaatcattgaatgtcaactggaagaagcgtttgactgacggccggatgaaggatgttgcctttgtgcttgaccccgatggatactggatcgaagtgattcagaaccaggcacttaagcgcactagcaattggtaatcacagggtagctgttgagctctttactgattgaggtatcgcacctgccgtcgcgcgcatggtacttttagctattaatatatcttatcaatgttagtgt

SEQ ID NO: 3839 - DNA, 624 bp, Aspergillus oryzae
gcggaaccaattaccggccacgtcggctaagacggatgatagcaactgcaatgtcaagtgcgctggatggcctgatgtgatgtgcggtggtaacaatgcgttttccgtgtatctcacgggtatcgaagatgatgtggatagctactcatcctcatcctcatcctcctcgagctcctcctctagcaccgagagtggaacctcgacaaccaccaatggagggactgtcgttactacttctggtggacaaacagtgttcaagacgtcggaaagcgaaatgacaacacaggaagccgacgcaaagaaggagaaaaattctggatcgaatactgctgctattgccgctggcgttgtcgttggagttgttggtttctgtgctttggtgggagctatcttctttctatggcggtttaggaagcgttccaacatgcccgagcagtatcgcaacaacaatatcgacagctttggcgccaagcccatgtctcaaagctccatgtctgattccaggtttgacggtgacttcatggcccagcggcgccagagcaatggcagcatcgatgatgatcaagacttctcccgtcgaattctgcaggtgaccaatcccgatcgccgtactaaactcaacat

SEQ ID NO: 3840 - DNA, 477 bp, Aspergillus oryzae
ggaatctgccagccagatcttaaatcgaagtgatgtttttcaatcccctacaatccacaccttgcgacaacggcatcccagtggagacagaacaggccgtcggctttcagacggaacggcacggtcaacgcatcccaatgctgccgatgcgaacagaaatgggcaggaaatgcagtatgctagcagtgattccgaccagggcatacagcacccatctaaggtgaactcatctgcgccaaccttgaatgaactggtcaaagctggtgcttatccccttcagcgcgccgccggattcgcggagtatctgagaagccggtcgaggcaaatgagtaatcttttggcaagcgaatcaatgggttacattgagaaagtctccgggatgtgggccggtggccgcagacattatggagaaacccgaaggcgtgctaccagatgatcaggatgttgatcctgaagacaggacgatggtgtttaaac

SEQ ID NO: 3841 - DNA, 494 bp, Aspergillus oryzae
caaagagctacgagaacaggatgttgatatttccgcactattgcgtccaggggctacccccaaacgttcgcgttactactacgggcaaagcagccccccaagtacagaaaacggacgagatcccgagcagccacagccaaccgcggtaccctacagcgaggaggcaaaggaggatgaatacgaggaagaagaagtacagggagtgcggcaggatgaggaggatcacttacttgaacctccgcagtcagatgattatctggagtcaagccctcagagagccccaggggaagagacattccagctggatccaactacgaattttgaaaatgcacgacaacactcggatttgtggctagaagggtatggtgatgggaatctttcagatgcagcttaacctgaaccacagaccgctcacgagacacctgtcctcacccccgaacgccagcagccctccagtaccagaaaacaagcatcatcctggctccaaaagatta

SEQ ID NO: 3842 - DNA, 610 bp, Aspergillus oryzae
tttcattgtcaatttactgtcctttgggcgtgatctgtcgagactctgaattctgtattaatcgtactctttgctgcttcccataattgcatgatacccggtagaacgactcataaacacgcaccgccgcaatgcgattgaccgtcgagctcatccaaaattccctgtcgtacatcaacccgctcaaggatcgcgaattagatctccgagggcacaaaatacccgcgattgagaacttgggtattgccaaggatcaagatgcaatcgacttcacagataacgatatctccacccttgggaacttccctttctttccccgcctccacacccttctcctcgcccggaatcgagtcaagcacatccagccctcgctagcaacttccgtgcccaacttggccaatcttgtattaacatcgaaccatatgaccgaactcgccgacttggatccgctgcgcaacctgacgaagttgacccatttggtgttgttggagaaccctattacccggaaagagcactaccggtattgggtcatctggaggatccctagcgtgcgcttcctggactaccagaaggtaaaggacgctgagcgtgagaaggctcaggaactctt

SEQ ID NO: 3843 - DNA, 504 bp, Aspergillus oryzae
ccttagtcttgattacaaaaaggcaccagaatatccctacccgtacgccctcaatgaatgttatgacgtctaccataccattatcacaacgcgcggacgttgcgtgggattgagcgggaatgtgcgaccgcgtgttgtgctttcaggagatagtgctggtggaaatttggcagtgggcactacgctgatggcccttcaatcaggaagctcagatgctccccgttggcaaggcgaccacatgctccctcgtccagatgggctcgttttagcatatccagcgttgaacatgagagtggaaagctggatgacggaggagcaaatgtcacttatacaagacaagagcgtgcgccggacgaacgagaatgtcctacggcagaaaaacatggactaccagcgtttgactccattcacgtcccccggaccttccacagaagaccttctccgcgactcatcttctgacctggacctcgaagccgacgatgtacctcagggtgcttcttaaga

SEQ ID NO: 3844 - DNA, 371 bp, Aspergillus oryzae
aattcttgctgaggaaactcaacgcggtcggccacacctccgaagatgccgttttcatgccaaccaacgacaagaacatgtccgaaggtttcgcctttgtcgaatatgaaacccccgaacaagccattgccgcagtcaagcagctgcacggaacacctctcgacaagaagcacacccttgccgtgaacaaattgatggatattgatcgctatggtcgtgaaggacgcatcgatgaggaatataagcccccaactgtcgaacctttcaaggagaaggagcacctccgctcatggttgtccgaccccaacgcccgtgaccagttcgccctctaccgtaatgacaaagttggcgtgttctggaacaacaagaac

SEQ ID NO: 3845 - DNA, 389 bp, Aspergillus oryzae
  modified_base (169)..(169): n is a, c, g, or t
  modified_base (239)..(239): n is a, c, g, or t
ccgaggaaccctcggcgctcagcaaagaagatccaggcgagccgtcagaaacgacagttgccagcagcgatatcgaaaaccaaagcaagggccggtcgggattacagatcaaaacggcagatgttgaggagaccgaggatatgatgcagccacctcagcgggccggggngcaggatccggttggataccataccaatcctccgcccgtggggcgtccagtgcgcgtgtatgccgatggngtctttgatttgtttcacgtgggccatatgcgtcagcttgaacaggcgaagaaggccttcccagatgtgcatctgatggtcggtgtgactggagacgaggagactcataaccggaagggtcttactgtcctgagtggtgcggagcgcgca

SEQ ID NO: 3846 - DNA, 562 bp, Aspergillus oryzae
cccacgcgtccgcccacgcgtccgcaaccgtggccttcgtgtgatggctttcgcccgtgttgatgatgtgggagccaaccccctcctgcgcaacgcccagacttccgatgattacgctcaattggaacggaacatgactctcattggccttgccgccatgcttgaccccccgcgtgtcgaggttgccgattcgattaagaagtgccttgctgctggtattcgggtgatcgtcatcaccggtgatagccgaaacactgctgaggccgtctgccgccatattggtatcttcgctgaagatgaagatcttgccggcaaaagctttaccggtagggagttcgatggcctttctgatagtgagaaactcgaagctgttaagacggcctctcttttctctcggaccgagcccagccacaagtctaagttggtcgatctccttcagtctttgggccatgtggttgcaatgaccggtgatggagtcaacgatgcgcctgccctgaaaaatctgatattggtgtagctatgggtaccggtaccgatgtagctaagctggctgctgatatgg

SEQ ID NO: 3847 - DNA, 580 bp, Aspergillus oryzae
cccacgcgtccgtctttttctattattgtcaattcttatctattttttttcttctttccttagtttatacaatgtcttgctaccggactctttcacacacaagcattcgtcatcttttacgataaccggcgtttatttcttgattagttctgttaataagtccgtgtacaactacttacacgaacccacttgagcatgtcgcgagctacaaccgactggcgatgaccgggtcctcgtgtggccctgcgtctcgcaaatcagccgccggcagctgcggcactggcaacttcaacttggtcgcgatggtcctagcagcccagagacccgtgacaaatgccagcgcgagaccaccagcatacccaagattgctaaatcctccgccgtcaacacctgcgatcagtaaacctgggataggagtcttgtcgggagtaagggcacgtccctcagcgttgataagaacgccgccgtaggtgaacgtaattctgtcaagagtcaacactttagccaagcatggatcatatccgggggcatgtacgatggttggacttccatgacgaagaaaggaccttcaccttccacc

SEQ ID NO: 3848 - DNA, 475 bp, Aspergillus oryzae
  modified_base (10)..(10): n is a, c, g, or t
  modified_base (18)..(18): n is a, c, g, or t
cgatcattgntattgcancttctcgagagacttccagaacttcaagatgttttggaatctcttgaattgacaacgtcaacacaggctggaagacctcacaaatgggttatggagtcacttaaagaacttttcgaacaagctgtgcagcgtctgggacagcaccgtttgatctgttttatcgacgctttggatgaatgcgccgaggatgaaattcgagacatgataagcttcctccaaaccataagtgcagacacaacatcgactggtattgaattctatgtctgtctttcaagccgacactatccccacattaccattcgaaaaggtatcaccctagttcttgaaggacaagaaggacaccgtcaagatattaccaactatttggataccgaattgaatattggagacactgatcttgccaggcaaatctccattgatgttcagaacaaggcacttggggtatttatgtgggtgg

SEQ ID NO: 3849 - DNA, 461 bp, Aspergillus oryzae
gacgcttgccaccgccgaggtgtctcgcagtcaactctggcaatggacctaccacggcgtcaccacggccgagggcaagaaggtcgacaaggcatatgctctgcgtttgctcaaggagcaggccgacagcctggcggagaagggccccaagggcaacaagtaccagctggcagcccgctacttcgccggtcaggtgacaggcgaggattatgcggatttcttgaccagcttgttgtacaacgagatttcgtcagcgggccaggtgtccaagctgtaattgcgttatgatttgtatgattataccatggagcatttgatattttaatttcctttgtttagttccaaatgagcatcagggttatgtgcatcagtgttgttcgtcaagtcgtatctgggtggaccctaccagtatgatggtcttttagggtcctagtttagtgcaataagatcaacatgaaaaa

SEQ ID NO: 3850 - DNA, 623 bp, Aspergillus oryzae
tttcctttcaaaaggacatcctgggcactttacctaccgaggtcgctgtacaaatttccaggcatttagatttatcaggaaatccacattttccgaagagtctccagacgatggaattgtcttctatcctctaggctattccgcgatgctgtgtgccatcagtatgtcggacacaacagcagatccattgcgctggaatctccagatgcatttacacaatatgccaagcagcgtgttcgtctggaacgtggacaaccgatctctaaagtccttaaccgaccgtattctccaataccaaatgcgacaggcttagttggtcttgacttttcgcatgggaactatggatggattgaagatgcgatagtctatgtccataacctccactcgaatacgacgcagagtttctgcaccgaaaaccgagatacattcactgcactacgaatttctgaatctattgtagcagcaataacactgcacggattctgtcatgtctggagcatccaaaccaacgattcggcgtatttccggttgccatcgttaaactggaaatacttcgttgttcgcggtgtgaatgtcgccatggcattcagtggcataacagccagcggaccagacagtattat

SEQ ID NO: 3851 - DNA, 516 bp, Aspergillus oryzae
acatcgacgatgatgaggacaagatcactctgaaagaggccacacggggattaaggcgtcctgatgggcgcttgaaatccatcacaacatcatatcgaagattgagtcaacatctaggagatcgatcaacacttctactatggttgaatatcattctctttacagtttcaagctttctgttttggagttctatacaggacaatagggattccctgagagagcagaccgctatgccttcgccggtattgaaaggagaggatttgtcgttctctatcagaaacatggacgccacgcttttccccgacgacaatcccagcatcttccgccaagggccgagtccagaggtggacagagcatggaccgttatttctgataccagaccgattgccctctcccgagaagacgttctatctatcggtaaagaccctgccatggccgtcaagctttcagcggaatttggactaggagacgactgtatgccggtcggattgatgtgctgcaccagctgcattgcct

SEQ ID NO: 3852 - DNA, 515 bp, Aspergillus oryzae
ccgaggactactcctgattcaccatggcgaaaaaagcattggccaaagatcaaattgtgaagctcatcgtgggagctggacaggccagtcccagtcctccagttggtccggcactcggtagcaagggtgtcaagagtatggatttttgcaaggaattcaacgcccggaccgcacacatcaacactggagtacccgttcctgcgcgtgtcaccgttcgcccagatcgctctttcacattcgatctccgcacccccacgacgacctggctgttgctgcaggctgcgaacgtggaacctcgaaagaatcgcattcgcggagccatgaacccaggccacgagatcgttggcaaggtgtccctgaaacatgtgtacgagatcgcgcaaatcaagcattccgagacgagactatcgggactcagtctgcaggggctatgcaagagcgtcattgcccaggcgaagtccattggcatccaggttgtaccctgaatatgaggaagcgagatcgactggatattt

SEQ ID NO: 3853 - DNA, 565 bp, Aspergillus oryzae
cgggagcgtgagatggaggcagcgaagacggatgccctgatgtcctatgagacagttcatcacaattcggccgttccccatgagatcaaccgctttaaccgcctcgtgcaagctttccaaaaagccgagtacttcgtcttcttctccctcaacctgctcaacgccacccagaacttgctcttcacggcaggagtggcgatcgtctgcttactgtgcgcgtatcagatctccgcagacatgcagcaagtcgccatgtttgtcacgctactcacctacttggctcaactccaagctccattgaacttcttcggaagcttctacacccaggtccagaataatcttgtcgacgctgagcgaatgcttgccttgttcaaagaaaagcctctggtccaggatcgcgatggtgcgattgacctcaacacttgcgccggtcgcgtggagttacccatgtgaactttgcatacgatgagcgccgtccggcattgcaggatgtgagtttcaccgtcgagcctggaacatccaccgctatcgtaggagagagtgggagcggcaagtccacgatctt

SEQ ID NO: 3854 - DNA, 511 bp, Aspergillus oryzae
cccacgcgtccgggccctaacagtctgcgccacacagctggtgcaggcgaccccaatccagacgcgggagtcggactacttcctgcccaactcgactggatttcgcatgcagcatggcttcgagactattctggtacagccctttggcttcgatgggttccgtgtgcgcgcttggcccttccggccgcctacgggccatgagatcagcttcatctacgatccaccattggaaggattcgagaatggacaagcgcatggactaacatttgacacggcatttaatggcaatcacactgttgctatccgcaatggaaacactatcgtgcgcacctctggctggggtggaaatcccggaggatatcggctggcattctaccgcatcgagcaagatggttctgagtcactgttaacaaacgagtatgcgccactcaaatcgatcaatccacgatactactcgtggaacggcccgggaagcgaattttctgccgagttttcattcagtacgacccct

SEQ ID NO: 3855 - DNA, 585 bp, Aspergillus oryzae
cgggtcagaaatacgcaatatcgctgtccgtgttagggacgttaggatggaggcaaccagagctgcagagactctgattctagttgacaacaagcagggcccgtctccccttgtctccaaacaaacgagtgacatcttagggcctctcgcttgggtcactggtgaatttgcagagcatcttgcatatcccagccaaacccttcaatcactaatcgatatgtcgaacgtgtcgttatcagcgagcacgctgtccctttatatacaggctattcccaaagtcttggccaatctcatttgtgatggggacgaaacctgggactcgttaaagaacagtgaaatgtcccttcttttagctcgaatcatcgaattccttgatgttttggctgcccacccagacttggacgtgcaagaaagggcaatcgaatttctggaggtcatgcgcttagcagcagatgccgttcagtcagaaactctagaagtaggccaggctccatccttgctgtcgtctatggttcccagctttttccatggactagaactcaatccagtcgctaccaacgcccaaaagaaggttcctttgccaga

SEQ ID NO: 3856 - DNA, 461 bp, Aspergillus oryzae
ccggcttctgcgggaggctttgagcaggaaaataaccatcgagaaagtaacgctgattattacaacgcgcccaccgacgaacaagatcggcaccatcctccatactctcgtccccaagaagccgacaacacttccgacaatgagggaactgagcgcaatcttgcaggggcacttgctggtggcgctggtggctatgttttgggacgccaaagtaaccatggtcttctaggggctgtggggggtgcgatactagggaacttcgtcggagacaagatggaggataaaccagatgatgaggaggatggtcatcatcaccgtcaccaccaccaccatggccatcatcaccaccgtcacaagcatcgtcacggccatcgccatcatagtcatcatggtcatcatcgcagtcattctcggcacagtagccatagcggtagctactgatagggaacactcttagattg

SEQ ID NO: 3857 - DNA, 630 bp, Aspergillus oryzae
cccacgcgtccgcggacgcgtgggcgcgccagtccctcagtcggcacaccccttggctgcgaacctgcggattgatacctcggctgcgtacggcttcgatccccgtactcaccccatgtctgcgacgacggcgacagcctcgccgtcggacttcgctagtcccgggctcttctccaatggaggccatggcgattcgacccctgtcgcaacgaccatgggaacctcctttaacctgcctttcgtatcccctcaagttgactcttccaacatggggccacagtcggcctccccatattcgaccgttagccacgccgatcctatgattgcggatcattcgcctccgctttcgaacatgcacgcgtcgcaggagatgtacagcatgagcaatgagcaccagccgagctttgcggaagagggcatgcagatgaatgtgatgtatcccaagcagaacatgaactttaccgttccaacctccatgggcttcgaaggaaacacttttgatctgccatgcagaccttgtccggtcacacctctccaggtgttcagggcgactaccaaatgacgtctatggaaacgccgatccgaatgcattcgccactggatcttgagtcttacctgggccacgccggt

SEQ ID NO: 3858 - DNA, 643 bp, Aspergillus oryzae
caacaagccgcttgtcgataaaaaggtcattgagaacgaattggaaggtttcggaatcagaatcaacaagcagccccctaacatcgtcttcaagaagaaggataagggtggtatcgcgattactagcacagtcccattgacgcatattgaccatgacgaaatcaaagctgtcttgagcgagtacagaatttcttctgcagatatttcaatcagatgcgacgccacaattgacgacattatcgatgttctcgaggcaaagagtcgggcttacattcctgtcgtatatgcgttgaacaagattgattctatcacaatcgaagagctggacctgctttaccggattcccaacgcctgccctattagttccgagcacggctggaacgttgacgaactgctggagatgatgtgggataagctcaacctcaggcgagtctacactaagcctaagggaaaggcacccgactacactgcacctgttgtgctgagagccaacgcatccaccgttgaagatttctgtaacgcgattcaccggaccattaaggaccagttcaagcaggctattgtctatggccgctccgttaagcaccagccgcagcgtgtgggtcttacacacgagcttgcagatgaggatattgtgaccatt

SEQ ID NO: 3859 - DNA, 658 bp, Aspergillus oryzae
ggccgtttcagtcattgtcatactctgtaccgaaattcctacaatcctcgacgaatcgtttgacagcagacacaacgccatacctaccccgcattcaaccagaacgaatcccggaaactgtttctctatcagaatctccagggcgtacgaacttgcttaaagcgttccaaaagtatttataaaaggggagcgtatcgtttgaacgaatttcggacagtccacgaatatggtgcagcaacttcctccccagggaggttcacgaaagatctccttcaacgtttccgaccaatatgaaattcaagatgtcattggtgaaggtgcctacggtgtggtgtgctctgccatccacaaaccatctggtcaaaaagtcgccatcaagaagatcactcctttcgaccactcgatgttctgcttgcgaactttgcgtgagatgaagctgcttcgctattttaaccatgaaaacatcatctctatcctggatatccaaagaccacgcaactatgagagcttcaacgaggtttatctaatccaggagctgatggagactgacatgcaccgggtcattcgtacccaagatctttcggatgatcactgtcaatattttatttaccagactctacgtgccctcaaagctatgcactcggccatggtcttatcg

SEQ ID NO: 3860 - DNA, 616 bp, Aspergillus oryzae
cagtgacgaccccgcatgcctcgctctgaagcaggagatcatggcccggtgtccagatcttcgtcggatgaattatcgccacgggtcggagggcacattttcgcaactgcctggcacacacctttgggcaaatctggaaatactggaattgtcaggactgcaagtcgagcctcatattctccggttcggcctgggcgcgtttcccaagcttcgtgacttgaccttggacgatcttccctggctcgatgatgccaccttcgcacactctcaaacgtttcccccgtttcccgccgttgagcggcttacccttcgagataccccgaacgtcacggcaagcgggcttgccgcatttttctccttgcctgaaaaccgagcctctttgcaatcattgacattgtcatctacccaagttcatccctcaactctacaccagattctctctgtcgcaccagagctccgtgcactatcggtcatccaggaagtttcacgatcgttccctccggaaaaagtgccaccgctcacgtccggtcactcgaactgttgcactacgagatatcctctccagccggctcttacggtatgccgccggtggcgagctcgtattactcctacctaa

SEQ ID NO: 3861 - DNA, 621 bp, Aspergillus oryzae
aacgagatctccgccaacacagaggttgaggaggacacccgtacccaggccatcagcttcctgatgcagtgtgtccagtaccgcaagctcaaggtgcaggctatgcgtgtcggtgagcaactcactcgcactgctctgcacatcgtcaccgagctgggcgatacctcggtcctcgatgatgatattaccccggctcgctctgctctggggctgctcgatatgctggctcagagcctgcctcctagccaggtcgtcgtgcccctccttcactctttgggtcagtacttcaacaacagcaaccccgactatcgtcgtgctggtatcatggccctgggcatgtgtgttgagggtgcccccgacttcatcagcactcaaatgaaggagatcttccccatggttctccagctcttgggagaccccgagcccaaggttcgtcaggcctcgctgcatgctgtggcccgtcttgccgacgaccttgccgaggacctgagccaggagcacgagaggcttatgcccttgctgttccagaacctcgccagcgccatgcaagagtacaagggcgaggaggatggccccaccattgatattatgaaggccggtatcagtgccattgacgccgtc

SEQ ID NO: 3862 - DNA, 521 bp, Aspergillus oryzae
  modified_base (478)..(478): n is a, c, g, or t
cccacgcgtccgcgcagagccacaccataaggatttgattcttttggaagactgtcgccatcatgtctaagatcacagtcgccggagtgcgccagaatatccagcagctgctggactactctcagaatgagaagaagagaaacttcctcgagaccgtcgagctccagatcggtctgaagaactacgacccccagcgtgacaagcgtttctctggcaccatcaagctgccttccgttcctcgtcccaacatgaccatctgtattcttggtgaccagcacgatctcgaccgtgctaagcaccacggtattgatgccatgtctactgaggatctgaagaagcttaacaagaacaagaagctcatcaagaagcttgctcgcaagtacgatgccttccttgcttccgatggtctcatcaagcagatcccccgtctcttgggtcccggtctttccaaggctggtaaattcccttaccccccatnttttacgcttgaggacttggcccaacaagggctccccattgtc

SEQ ID NO: 3863 - DNA, 552 bp, Aspergillus oryzae
ctaattccttcgtaatatctagtccgttttcacctactacctctccgtactatttctatctacattactacattcctctaccatcaccctcacacacaaaagtacatcatgagaaacacaagacgtaccggcctcaacatagcctttgtctacgatccaaaggattactatgaatccataggattttccaagagtgaatgtgctgacctggcggacgatgtgaccatcaatggtgtggcatcagccctcgagagtctcggccaccgcgtggtccatgttcccgggatcaagactctcgtcaagcatctctcagcagagcatcacaagcaatgggatcttgtcttcaactacagtgaaggggtattcggctccgctcgtgagtcgcaggtacccgccctgttagaagcctatcagatcccctttaccttttccgatgctgcgacgctggcgacggggatcgataagggaaagaccacgatgctattagacactatcgaatcccaacgagcccattcgtcatcgtccccagatctggtgaagcagtcgactacg

SEQ ID NO: 3864 - DNA, 155 bp, Aspergillus oryzae
tgatctccttgcataaacaccgaagacgcatgtttggacgtcatgcttgacgaatgaaagtggtcattagtcaattcattgaatgcgcttccttctattcaatcacccatacaaacaaacaaacactaaagtacatacataaaaaaaaaaaaaaa

SEQ ID NO: 3865 - DNA, 548 bp, Aspergillus oryzae
caacaagtccagctcgttctttgacaatatctcgagtgaagctaaggatcgcgaagaaggctctgccgctcgtgccggtggccgcgagtggcgtggtgaagaagagaagcgtaacattgaaaccttcggtcaaggtagcgtcgacggctatcgtggcggttaccggggccgtggcagaggcagaggatatggccgtggtcgcggtggcggctatggtcgaggctacggtggccgtggccgtggtggtatgcgtggaggccgtaatatgtctcagtccactggcgtccctgcccagaactagtgtcgtcttcggcatcccgacctgattgatcttcagtcgtatttcttgaagcgcttagcgttgaatatttcctttattttgccttttctggaagtgatgcgtccttccacggcctgtttctgatattacccggcgtctgatggtaccttctcacgaatacttggcatacagtcaagatctcctcatgtttgggatgttttatggttacggtggggattggtgaattacctgctgggatggttttgcg

SEQ ID NO: 3866 - DNA, 620 bp, Aspergillus oryzae
tgatgatctgagccggagatggccacctgcgctctcgggcaaaggcatcaaccgtgctaaacctatgaagatgcgtcctaggactcccaacttgcctgacagtacagacttcgtctgtggcacgtttgacgaagatcgacctctagaagctgcctacaagtcttgcatcgagcagcgtcgactctccaaacagatcatcatcccccaagacatcgaccctagtttcccgacatcggatcttgatgaggaggacgatgatgaggacgacgatctggcggagtccatggtcgacgaaccggctcgaggaagatctggggctgaccagatgcgcaagcagtctcctcgcttgtctcccaagcggatggtctctccaccacctcctcgtcgccatggccgctcctcccccagacgtctacgctccccaccaccaccgatgaagttgaagtccccggttagagtcgaacggactgccagcgatgaggccactcaccttcaggcccctggcatgaacatcagcgagttggtccaacgcccgcacgttgctcggtaccaagtcgctgcctcggacacctaaccccttcttcgctaaacaggatggctcttatcgctggacggtattg

SEQ ID NO: 3867 - DNA, 620 bp, Aspergillus oryzae
atccaacctctgttggagaatccgcccctagcaaagaacctgaggaacatggtgcttcagccgaggaaccaacagttgtagatgagttggcgagtgaacaacctcgggttgaaacggtcacagacacagaacccgccgttgcgttgaatgagggcttggacgagcaatcccaagaacctgcccagcaagagcccgaagaaacgcccacagacattgctggtgtttcagcaattgaagcaggaaatctagagctcggccaaacacaacatacggatcatacaccattggatttcgaaggtacccctgagaatgaaaagcattcaggagccgatgctgaggaaaggcacatggttgaaagaatgggtgtcgagcaagagaccacgggtgaaaagaaagttgaggtagagtctggggacgccacgctcgatgctgcgccaaccatgaatgcggacacggctctggaacaacctaaggaagaagcaccaagcgaggaagccgctcccgaacagactatagctgccgacatccccttgactgacattgttccgcaagacactatggagcagcctcaggaaggagtgttaaatgaaacagctgtggcagaacagattaaagatgct

SEQ ID NO: 3868 - DNA, 682 bp, Aspergillus oryzae
cggtacctatacttacaacttcgaaatgatattgcctcctgagttgccggaatctgttaatgtacgacgaagccatgttcgatataatgtccgagcatgtctagaattcccaggccatttcaggcataacattgtccagaacatgccgatcgctgccatccattgtccggcagaggacttcgtggaggatgcagagccggtttacattgcccgggcctggaagcgtttgctccgatgcgacatcctcatgtctagaagaggcgctcctctctgtcataacttacctgtgaccgtgtcttttaccgagctggccaatgcgaggttccatgggttgcagatatatatttcggagaacgttcaattcctccgaaaagatggtgttgtttcctacctcggacctttcaagaggagactcctatatgaagcggcggaagattttgtgcccactttgccgccctataggttgggtgaatatgatgaccacctttcagaaaagagcggctttggtgtacaagagagtgtggtgctttcggaatgcgaggacaaacccgtgacctccgagggcatgacgctgaatatcgacttggcattacccacctgccaggaccattctgaggataattggatgcactttagcactgagtacaagagcacaagagtgtccattggcttgattttgggt

SEQ ID NO: 3869 - DNA, 630 bp, Aspergillus oryzae
tcccgtatatactcggcgtactccttgatgtgaccctggttttggttttgaggttgggctgcagggcgcagcatggtggcccagggccaaagtcggatcaccgcggatatctcacacggacaagcagcagttcccaatcttcccctaaccacgatcattttcccaggagtcaatgagcccacagtgggctgaatcagcaaatctatgacctctatgacctcttcaaacgagtcccgctacaaacctccacgaatacccctccgcgtaatatccaccccctcggctgatgcttggaaggtacaacaatatgatgaattagtttccaaagcaaaacgaatcagtcaaatcgatttccgtcacatcgattttaaccccagcgaccgaccgaaacctcctcccaccgctgcaccaaagacggaatgcgttgcctgctttgagagattaccatcgacctacttccccgccgagtcaatcacagaaacatgcgcccacgaaaaccaaacgtgcaaacgatgcctgagattatatcttacttcccagcttgacagtatcagcccagacggaacgatcgcgtgtcccgtctgcgggagggaatgtcggagtccaaatccaggaatgggcatacaggaa

SEQ ID NO: 3870 - DNA, 565 bp, Aspergillus oryzae
  modified_base (424)..(424): n is a, c, g, or t
caaatgcagagtggacaggttccacctcagcaattagcgccaccaggaggcttcccgcccacagcgtccgctaacgcgaatatgagaccatcctcaatgccctcagctggaggagtgaccaattctcctgttgcttaccggaatgatcaaagaacactgagtatgcttgatccgaatgtttcttctcgtctaaatagcccagccacgccatacaatgtagcaggtaaccgaccgagcacgccagcagggcaaggctatgcaccatccattgctccatcagagcgcagcaatgttggactggcgcctcggtataggcctgtgtcaatgttacagccagaatccggaccagctgcttttcccttcatgtcaaaatcatggaatgatgaaaatcagaagtcgactctctctgttcctccggatagancacttcagaccaaacctaccatcgatcaaatctcaagtggcgataagtcggcgatcattagcacaacggttcatggtgctgacccagatgatgatgatgatgaaggctgggccgaaatgatgaagaaacgtgagaaaaagc

SEQ ID NO: 3871 - DNA, 513 bp, Aspergillus oryzae
ctggtatgcgcagcattgccgcaggctatcaagagatatttctgaagttctggaaatggagcaagtcgtctgacttgtgggaactggtgacgcgtattgacgggccccatttttcaatgaagggcccggttccggtcttagatcttgcatctcggccagttagccatgaatttgcaacaattggaagcaacgcggttttacgcttgtggtgcccaagcagtagacagcgcagtggattgaagatggggcatggtgaagagcagctcgagacttggaaatgtcggaatactgtcgatttgaaaggttacatcagcggcgaaaactttgacagtgtgagcatggcttccctagcattttcgcaagatggttctgtgcttgctgtatgcctacaatcagtgcaccctgggagtcctgggattgcccttcttgttgatgtccaaagttgtactgtccgttacagtagagctgggttgtatccaggggatccatgtgtggcaaggttcctagggtgcc

SEQ ID NO: 3872 - DNA, 586 bp, Aspergillus oryzae
gtcaagagagccgatattccgtggtcgcagaaaaccccgcagttggtttggcgcggcaaaccaagtttcgcgccgaagctgcgccgcgcgttgatggatgccgctcgggataagccgtggggtgacgtcaagcaagtgaactggtttgagcggacgaatatcatgtcgatggaagatcactgccgatatatgtttatcgcacacgttgaaggccgatcatattccgcttcattgaagtaccgtcaggcctgtaactcagtaatcgtggcgcataaactacagtatatccaacaccatcactatcttctcgtaccggacggcccgaatcaaaactacattgaggttgagcgagacttcagcgatcttgagagcaagattgagcctctcctcgacgacccgagtacggcccagcggattgccaacaacagcgtgcgcaccttccgtgagcgctatttgacgaaggccgccgaagcatgctactggcgtcagcttttcgagggatacggacacgtctggaacagcagtgtcccggtgtggtccgacgtgtatcagcgggaacgaggtctccgatacgagtcgttcatct

SEQ ID NO: 3873 - DNA, 555 bp, Aspergillus oryzae
cccacgcgtccgcccaacttccaagaacccgagctgttcatccgaggctctcatcgctccccgttcgcgtatactacggctttgatttctcgtctctcgcagccccgtgaaaggagaatccagcagactccgcctttctcccgctaggcatctggtgatccaccaggttccccgatctcagttctgaacgcctcgcattcaccgcatcaaacaaccatgtctgaacaaccttacgacccctatatcccttcgggctctaccaccaacgccccagctggggccagtgccgcgcagaatggcgatcccaggacaagggaaatcgacaagaaaatccaggagactgtggataccatgcggtcgaatatcttcaaggtttccgaacgtggtgaacgtctagactctttacaagataagactgataacctggccgtatcggctcagggtttccgcaggggtgcaaaccgcgtacggaagcaaatgtggtggaaagacatgaagatgcgcgtatgcttggtgatttgtgtcatcctcttgcttgtgggtattaattgggcc

SEQ ID NO: 3874 - DNA, 526 bp, Aspergillus oryzae
cccacgcgtccgcgcggattccaaggaatccaatgcaagttctaccgattcatcaaggagaagaagtgtccaacgctgcgagagcagagacgcatgcgcgatggcgagttcctacgagaggggtccgggctagttgagtcggctgcaccacgatttggcgtcgtggaatggatgggagcgtggtatccttggatgcgagagaccaaagaacaagttctaagtcgacgtattccacgttgaatttcctcctcttcttttcttgtctaaaaattcttacctccttcattcctcgacttcctacggatcctcctcccaccttgaaaaatccccttccttacggccgtcaagatacctctgaagtttctcatctactttattcacttattttaaccttatgttcctttaccgacagggctatcattctgacacgttgctgcgttcttttctctcatttacattgtgttatgattctcactgggaggctgtctgatctttagcatgcatacatcacatcatctttggtttt

SEQ ID NO: 3875 - DNA, 506 bp, Aspergillus oryzae
cgaaacattgaagtttattgccctcattttccttacgcgctatcgagtcgctgttgtcgggcagactgagcaggatgggtgttgggacattgaatcgggacaggtgctatactcggtaaggaatgcactgagggggttagaaggatatcgacatctcaatatgttctacaaaccccatggccagaatccacccatcgagttcggctgtacggataccctatggacgagggaagaagaccttggactgctggaagaccgtaaaccagtcgtttctgaacttgaaaacatggccctgattcctagaatgaggagcatcttatcgatcatgagtacttatagcgccacttaggagacagagcttatggcttcggtagattagcttgttcttgctaggatagctctgcttagttatgtatcttcatgtattattcggcatcggtcgtaatcctttgcgagattctctcccccctttgtgggatcacaatgtgtactgtggtgagataaaa

SEQ ID NO: 3876 - DNA, 580 bp, Aspergillus oryzae
  modified_base (161)..(161): n is a, c, g, or t
  modified_base (241)..(241): n is a, c, g, or t
caataatcaagactcttttattcaatatgcctgccaagctcattgatagatatgatcacgttccagtgacgaaggagaaccttgactgggctgagctcgtcacccttgacctcagccaatatgaccaacctggaggaaaagaagaccttgtgaagcaattngatcacgctgtgcggcacgtgggtttcttctatgtcaaaaacttcgacatcagccaagatgaaatcgatcgccaatttgncctcggtcgcgagttctatgcacttcctctagaagaaaagctcaagtaccacagcgcctctgacctcgaaaagggggaatataacggatatagacctgcgggacaccgggctcttggaaacggagtcaaagacaatgtacaggtttacaatattccaaagttcgacggctatcaccaacgccagcagccgccaattctcggggatcatctggaagagattgaggcatttagtcggaaatgccacacagaagtagtagagaagcttctccgtctgttcgccatcctccttgaacttcccgaagaggaccaacttgtcaaggaccatcaatacgatgtgaa

SEQ ID NO: 3877 - DNA, 493 bp, Aspergillus oryzae
cgacatgatcttctacgacaacgcagactgggatatcttctggcaaacctgcacagagctcgacgtccccttctacatgcacccccggaaccccacaggcacaatctacgagaagctctgggctgaccgcaaatggctcgtgggtccacctcttagcttcgcgcatggcgtcagtctacacgtgctcggaatggtcacaaatggtgtcttcgaccgtcatcccaagctgcagattattatgggccatttgggtgaacatgttccgtttgatatgtggcggattaaccactgcttcgaggatcggaagaagctgctgggtcttgcggagacgtgtaagaagacgattcgggattattttgcggagaatatttggattactacttctgggcacttttcgacgacgacgctgaacttctgtatggcagaggttgggtcggatcggattttgttctcgattgattatccgtttgagactttctcggatgcttgtgag

SEQ ID NO: 3878 - DNA, 442 bp, Aspergillus oryzae
caacccaatatatccaattctacaacatggttgactcgcaaatcctcaaagccattcagaactctatcgaggcctggaaggatcttgccgttccctccatccagaaaatcactgatatcgaatcaaataaaaaacattataatgaggtttatgaaaacttagagtgggctattaagaccgttgctcacattgcggacgatcttgaggagctggttaaggagccggtaaacaatgaggatgcggaccagattgtcacaaagttggaagagttgctatcccaggagaaacccttttttgatcattacaacaaatataatgataatgatgtcttggaaccatgggaaacacatattgaaggccacgcgttggaccgcagttcttactctcccgggtggctagacgaccagttttaccccgaaaacagttttcataacaatgtgtg

SEQ ID NO: 3879 - DNA, 588 bp, Aspergillus oryzae
cccacgcgtccgcgacaaagaacacctggcttcggcattcacagagctagacgaacgagtagacgattggaagtcgcttaaaatagaatcatttggtgacctgcttcgcttcggcacatttaccgttttgaagggagacaatggcaaggattcagaaagagagtaccacatctaccttttcgaacgtatccttctctgctgcaaagatatcaatccgaacaagcagaaaacgaaactgattgtcggcaaagataaaccagctactactgtgaaaggaaaaccacggttgcagcttaagggtcgcatttacatggcaaacgtaacggatatagcttgctatcaaaagccaggttcttatcgtatccaaattttttggaaaggtgacccgggcgtagtggacaactttatcatacgctatcaaaatgaagatgccatgcgcaaatggtatagggacattgacaaccaacgagcaattcaagcagaacaccgcagcgcacggaataccggtacatcggagacagaattcacgtacatgaggaacatggcgaatatgcccaatccgtaccttgaacatgatgccgatgaacc

SEQ ID NO: 3880 - DNA, 597 bp, Aspergillus oryzae
tgaagctggacgctgctgcctcgaccatttcttcccgatacaaatttcgttttcttgctctcacgatcgaatcgcgatcatcctaacttgttgttgcccgtggcaggtgacttgctgtcaggtgatagatagcccatcccaagatcactcactcaacaactagattggtgtcagtagctgtgcaggagcgtggttgcccgatcttatctagattctaccttatctagcagggtagtttacttgtaatactcgacgtcatgtccgatccctcattgggtgccactgatggcatgaacaacaagagaaaacgcgaaagcactgacagcaccggacctgatgctcagcgactgaaccgctcctccaacggaagtaacggcagtattccagcccccgatacccaacctaatttcggccatgcctcgcttggctcttatgatacgcatggcctccctggtgcagcatcggagcttaacattgaccagcaaattctccaacatgtcgccgcgcaccaaccgcagaataaatacccacctcccccagacgcgacatttgacagtagccttccacacggcctgaccttcggagatgaaatgggcc

SEQ ID NO: 3881 - DNA, 545 bp, Aspergillus oryzae
tacaactgatccagttaaactccccttaccatcggtcaaattgctccagctccagtggactttacatcgtgttcttgctatgagtggggcagctgacgcttcggatgaggatctcgacccagatttccacaggccggcgggtgctggcttgtgttgggaaaacgaagtcgaagaagaggaagtcgaagaagaggaagatgaagaataggacgacgtcaaggccttcaaggagaatttggcaaagatggtaaaggtggcagaagaggcgaagcccaagaacaaccctgatgagcctagatactgcagtgatgacaatatgtgttttacgccattatccgatgataaatcgagcaattgaggctagaatagctaggagcgatggctttccatggtggctctgtgtgcggaaagcaagtaatttccttattttttggcttttttttgacccttttttttggtaaagccctttcaccgctcagccggccgtctttgattagtcagtactaagccaattctaattgatccaaaaaaaaaaaaaaaaaaaa

SEQ ID NO: 3882 - DNA, 657 bp, Aspergillus oryzae
gcaaggaccatggggatctccaatggacatacaattacggcacttacctgagcggagctgcgtacatgtacaatttgactgatggaggtgagaagtggaaagaagctatcgatggcttgctcggtaccaccatagccaagttcttcccccatgaatacggtggcgacatcatgtcggagatttcgtgtgagcagagcatgatgttcgaccgtaaccaagattgcttcaaaggttttctgtcttcttggttgaccttcaccactaccattgctccgtttacacaagaccagatcctccccaagatccaagcctcagcacaagcagcagcaaagcagtgctctggtggcgactccaagaccgactgtggacgaagctggtacaagcaggacaagtgggatggttcaaaatcgctggagtcggacatgagtgcgctgagtgtcttgtcgtccaccatgatcgctcacaagaaagagcaccaagcacccttaacggcggagaccggtggcaccagcaagagtaatcccagcgcaggctcgggtcacaaggatcaacagaccggtacgccgaagccgatcacgactggtgatcgggccggggcctcgattgtgacgttcttcttcgcgtgtggctggatggcctcggtgagctggatggtta

SEQ ID NO: 3883 - DNA, 729 bp, Aspergillus oryzae
cccataccttcaccaccgttaccatgaccgaggccgtttttcagaaggaacgtcatatcaagtatttcctacgatgcctcaagacgtttttaccgagcttatatacctccaatgactcgaaccgcgtcctcctcgcttacttcaccgttgcaggcctagatctcctaggcgaattatataacaaaaccacttccgaagagcggcaagggtatgtcgagtggatttatcattgccaagtgccctccgggggctttcggggattcacagggaccgactttgggtcagaacggcgaacaccggaaaatgaagcttgggacccggccaacattccctcgacattcttcgcattggtgatactgttgatcttgggtgatgatttgtcacgggtaaagcggactgagtgtctacaatggctctccaaaatgcagcgcgaaaacgggagctttggcgaagtcctcggcacagaagggaagattgaaggcggcggcgacttacgattttgctgtttcggtgccggtacgcgatatatactgagagggaaatgtggggatggccttgagggtattatggatatagacgtggataagctggttgcatttatagaggcttgtcaggcatacgacggcggcataggggaggggcccttctgtgaatcccactctggtcacacctattgcgctattggtgctctaacattctggatcgctttcgaagaaccataagccgacg

SEQ ID NO: 3884 - DNA, 633 bp, Aspergillus oryzae
gctagtcagtggatgagagttatatcagcttgaatatttccatatccggcagctcgcctacacgtgacttcgcgtgggcggtcaacagccacgtcataatccagtgcagaaaacgagtccaatttatttggggggcttcttggagaaagaagagaaacactggtggaacgtgcttccccccatgccactttttatcgtcccccctgaatgattatcaccatctcctcagtatatcgtgagcaaccttagcccttcgatctagagggcactttccttcttctttacttttcggattacacttcgccatgtccgattcgaccctttatctttacacctcccttactgcggggtcgtcccatatcgtcaccgccactgcacgattggagactatcctcaaggccaacaaactccctttccgcgcaattgatgtagccaccgatgacgccgcccggaagctctggggtcgtcgctccagggtaaaaagttgccgggtctggtgaagtttggcacagtcgtcggggacctggaagagattgaagaatggaacgagatggcgagctgagaatgcaggtcaacagcgtcgaagattttggtgatagtattcctgctacgagcatcgtgaccacccagcct

SEQ ID NO: 3885 - DNA, 616 bp, Aspergillus oryzae
caacactttcagtcttctttccccctctctcctctccgacctgtggattaattaaaatcacctcttaaacccagtcacagtaagatcctgtactggaatctgattgttgctgcccctcttctctggtcctcttcctccatccggactaacaccaaccactcgtggtgaccactctacccataacatccttttatttcctgcatctccctttgaaaaggggtaaagaggaaaaaagaaaagaagaagaagtaaaaaaagatattttccaacacctcgaagaccgaggtgaatgtatggtcaatgttgtccatgcaaaaaagctctgcttttgtgtttactccgacggaacttgacagcagccaccgtcatcaaagcaactccacccgctcgggcagtttttcggaaaaccccgctctcgccgactgtcccttcatagacgactcttcggtctcccatcgtgccagtattagtaccgatggcctttccaatgagtctctcgaatcctgggacggcgacggtccgtctgccagctcacctgttccggaactggaggtgaagatccacgacgtgtcgcagtcgctcactcgactttccttccacacaaccgcacatttac

SEQ ID NO: 3886 - DNA, 596 bp, Aspergillus oryzae
cggacgcgtggggagaaagcaaagcaaaaatcttttaaagtatcaacgctctatcgctagccaatgtgtatcccaaataaataatatccaaaaaggcgcaaaaaaaagcgcaaacagtacaaagcaagttgccacaggagcagaagaccctgaatgagtacccgtataaactccctgaaacccgaacttttcctgtgatggagcagataaaaagcaactatatgtctagggctgtccgtctattcctctaacaattcaatgccatctagtccatagccaaagtccatgatgacagctcgagaatcctggcttgtggctaggatgcgtcgatagtccgacttcacactcaacatccagctggtggtccagccgggtaggtcaattgacaactccccagtctgcgcgtcaaagaccttaacgctcatatcgtaacttccgctgacgatccgctgtcccgcactgtccaggtgcagagaccggactagcccttcgtggcctttcagctcattgaccatatcaccagtgtttgcatcaaactgatatataacttggatcgttaccaccggtgaggatagtcctggcatcttcactaaact

SEQ ID NO: 3887 - DNA, 598 bp, Aspergillus oryzae
gtcatttatttctctattccatgtaacttcacctctttgttaccttctatttgatttgatacgaatccttgaggaacaggagtccttcctcagccatgaactctgaccacatgtgtatttacagatgaatcgacgcagcgtgattgggaatacagcgcatcgtccaccatgtcagcccctccaaactccaaacgagtcaaggcatctccatcgaccagcgcgccatctcatctgttagctccgcagcaagtcaacccatttcaaagagtgccttcatacgagggcattcctatgccccaatctcagctttctccccccaaccccaaaaagcgccgtgcttcgccccagataagcactgcgacaaccatgtcaacatctgggactaccgccgctgcgggcgaggccgcgcttgaacctgggccaggagtgccagaagctccccccaggaaaaagggaaggaccaacactccgtggactgcggaggaagagcagcgactaaagacaatgcgcgatgctggtcgcagctggagtgagattgctaagacatttccttttcgaaccgaagggagtgttaagaagcactggtataaggatatgc

SEQ ID NO: 3888 - DNA, 275 bp, Aspergillus oryzae
tcggtcccttgtatctgagtatacctacaatgaaaatgtaacggacgagctggcagtcgatgacgacggccttggatactaccccgatggtgtgaagcgcaccctgacggacgagcagatcgaaatattcagacatagtgagatacactcacttatgcgcgaaagactacttaaagaagaggaggaggtgtatcagaaagctgctgaaatcaatgagattaagggataatcaagcacgatgacaaagacactttctgcaaagcgctctggtgtcg

SEQ ID NO: 3889 - DNA, 166 bp, Aspergillus oryzae
cttgtttcggtacagtattggacgtggtgtttgggtgatagttatcgattcggtggttctgttgaagtaactttaagtcctgggatacttgttagatttgttgcatctttacactacatagcacgataatacagcaagcaacaacgtccgttactacacttaaaaa

SEQ ID NO: 3890 - DNA, 597 bp, Aspergillus oryzae
gccctagatgtctcggatctgcgttctcttacggatcacactttatacacagtggccaggaactgtcctcggcttcaggggcttaacatcaccaactgtgtcaaagtgtcagatgattcgttaattgtcgtatcggagaactgtcgacacatcaaaagattgaaacttaacggtgtcatacaagttacggacagagcgatcacatcgtttgctcggaactgcccggctatccttgagatcgacctgcacgactgcaagtctgtcactaatcgttccgtaacttccctcatggctaccctttccaacctccgcgaactacggctcgcgcattgcacagagataaacgatctagcattcctggaactcccaaagcaactctccatggacagtctccgtattcttgatctgacagcctgtgagaacatcagagacgacgctgtagagcgcataattagttcggctcctcgcctacgaaatcttgtgcttgcgaaatgtagatttattaccgaccgtgcggtatgggctatatgcaagttaggaaagaacttacattacattcacctgggccactgttcgaacatcaccgatgcggctgtg

SEQ ID NO: 3891 - DNA, 608 bp, Aspergillus oryzae
ctcaatttcactacgattctactcatctcccatcctgtgcatctaattctttggattatttctaaattgtacgaatcctaccacctgagggagaaccttgcgaatatatcctcgatagggaaataccaacatccacatacagcttcacaatttctgttcccggagaataatccgaaaataatattacaaccatgaaactttcacttgttgctttggctatgaccgtagtgactgccctagcgcagcaggcggggactcagcagccgggaacagagcctccggtgcaggccagtagctgctgcagtgagtgtgctgctaagtgcgcggttgcttggcttaatggcccagctgcttatgcgctctgtgttggggtttgctgcggagcgggctgcggataatggcaacgctaccgtacacccccatatggcatagctcaagctattccacttggtcaatcagcctcgttcttccagtcgattcacttgttgtctgttgctgcgtgtggaacagtgtacaggagataagcatatcaacgatcgttctccgattatgtttgtacatatgttctgaagtgcctttcatttacgtgggtttgagtcactgtcatt

SEQ ID NO: 3892 - DNA, 593 bp, Aspergillus oryzae
cagataaaccctctatcatcgctacctgttccagaaatcaactcgcccacttcacctcatcatgaccatagacacagagatcaagtacatcctcagtctccaggctgtccgtgaacgcgctcaacgtgtgttccagcttgccgaggccaaccagatcaaccatttcgagtatcatgaggaccgcttcgacgccgcggttcaatacgtagctaacatcatcaagcgggactttggcccggacaagtatcacctgattccccctcacggccggtggcagcacttcgaagtcggtgggactcctcgtattaaggatctcctttcacaatgggaagcggcggggtacgataaggacgaacaagctcggagcctcgtcgatttgttcttcgtctcggtactgctcgatgctggcgcgggggataaatggcgtttcaccgaactgggtagcaacgctgtgatcggccggagcgagggcatcgcggttgcgacattacatatgttcaacaatggcgagtttgctcttccgggtagtgatcgaagggatgttgttctaggcgcctccctcaaggacttctccgaggcaaccctatcacggg

SEQ ID NO: 3893 - DNA, 188 bp, Aspergillus oryzae
cttgttaaaccctgtcgtgctggggcatcaaaagcttgtccttgaagatggtagatatattgttgcagcatgatgccgatgttcttgtagcagttatatacaatcaatctgtctctcgaagcaaaaaaaaaaaaaaaaaaaaaaaaaaaaaaaaaaaaaaaaaaaaaaaaaaaaaaaaaaaaaaaaaa

SEQ ID NO: 3894 - DNA, 556 bp, Aspergillus oryzae
aatttgtcttcgtacacttgttcgttagctacatacttcgacaagaacaaggattacaatcatgagccaaatcgacgtgcagctcaaggatgtcgccatcctgggcgccatccccaatgacgcccgcaagatcctcaccaaggaagcttgtgccttcctggcgatcctgcaccgcaccttcaacccgacccgtaaagctcttctccagcgccgaattgatcgccaggccgagctcgacaagggtcatctactcgacttcctcccagagaccaagcacatccgtgagaatgacgcctggaagggtgctcctcccgctcccggtcttgtcgaccgtcgtgttgaaattaccggcccgacggaccggaagatggtggtgaatgcgctgaatgctgatgtctggacctacatggctgattttgaggactcgagcgccccgacctgggaaaacatgatcaacggtcagggtcaacctgtatgatgccatccgtcgccagatcgacttcaaacagggcaacaaggaatacaagctgcgcaccgaccggaccttcccaacttt

SEQ ID NO: 3895 - DNA, 593 bp, Aspergillus oryzae
gggacataatgcaagtggtcgacgcccttgaggaagacggcaagctcagatggtggggccaatcttacggaacgctcctcggatcgacgctcattgccatgttcccggataagatcgacaaggctgtcctggatggtgtcatcaatgcgcatgagtactaccatatcaatgtagaacaggttgctggtgcggacagcgccttttccgggttctgctcccagtgtgtggataacaaggacaagtgccctatcgccagcaaccgtacggccgaagagcttgaggaagatatttacgcggcgatggaggcgttgaagtccgaacccatccccgtatccgtggagggcaaaggatacatcgtcgactacgcaaccatcaaggggacgatccactacgccttgtacttccccgcaacgtggcccacactagccgagaaactggacatcctgttttcgggaaacatcacgggcattcttcctgacctcgtggcccccctgccagtcactccggacgcggatgctatccaggggatcaagtgcagcgacaaccaggagcctctggagacccttgaggatgcgctcccgggtgtcgaggcg

SEQ ID NO: 3896 - DNA, 441 bp, Aspergillus oryzae
gcgtgaataccttaaaggccgactggcagcggcgttccgcatctttggaaagaatggatacgacgagggcgtggccggccacatcacccttcgcgaccccgtcgaccccagcacattctgggttaatccatttggtgtcgccttttctcagatcaaagcctctgacttgatcctggtcaaccatgccggggaggtcatcgacggtggcccatgccgattactcaacgccgccgcgttcatgatccattcggccatccatgctgctcgtccagacgtcaactgcgcagcgcacagccacagtctgcacggtcgcgcgttttgcagtctcggtcggccattggatattatcactcaggatgcgtgtgccttttacaatgatcatgtcgtgtacaaacaatttaatggcattgtcctcgccgaggaagaaggaaagaatatcgc

SEQ ID NO: 3897 - DNA, 590 bp, Aspergillus oryzae
ggtggaacggataaccacctggtcctcgtggatctgaagaaccgtggggttgatggagcccgtgttgaacgtgttctagagctctgcggcgttgctagcaacaagaacaccgttccgggagatcggtcggctttgaagcccggtggtctccgcctgggtactcctgccatgactacccgtggcttccagcccgaggacttccgccgcgtggccgatatcgttgatcgcgcggtcattatcacccaaaagctggacaaggctgccaaggagagcgctgcggctaagggcgttaagaacccgaacactgtcaaggccttcctggaatatgttggtgagggtgaggagatttcagagattgtgctcttgcggcaggaagttgaggactgggtgggaactttcagcctcccttggaaggacgagtaaccggcttttctacgaagtctatgaaataaggcactgatcgggtttaaatcaattatcgcgggagttatatgagcattaacattaacgttttcattttgcaatttgatgtgtgtatgtacgatgtaccaaaatttattcaaagcctcttaaaacctccaaaaaaaaaa

SEQ ID NO: 3898 - DNA, 578 bp, Aspergillus oryzae
gtctctcacttcctcgtccgcgcctcagatccacctcatatctggcgtctgaaactcgagatcctcacgattcttttcccccattgtggtctacacttaaagggtgtgatcattagcgaactcgaacatttctcccaaggaacggatcccgagctggtgcgcgagagcgttcgcgcaatcggacgctgtgcacaaagtgaccctagcacggctggccattgtcttcgcctactgctcaaccaaatcattagcctggacgacaatctagtatcggaatccttgaccgtgatcagacatctaatccagcaagatccagcttcgcatgaacaaactgtcattgagttggtgaagcacctcggattaacgaataacccggatgctagggcgactattgtatggttagtcggagaatatgcgggtatagaaccggagaggaactttgcaccagatgttctacgaatcctagtacaggacttcgccaatgaggcagaagccgtgaaacaccagattgttctcttaggagctaaggtatatctacaccatcttctacggaacccttcccaaggaggaaccctccg

SEQ ID NO: 3899 - DNA, 511 bp, Aspergillus oryzae
aacgccgatggcgaactcggagctcttcgacaagattcgggagggtaaggcgcgatggctgcgcggcgatattgtctccgtgaaggagaacgggatccttttcaatcgccgcgccagaaaggtgcccaagggcggtccgggccatgagtcggtcgtcacgggagatgttattatcatggcgaccggctttaagcgtccgtcactatccttcttgcctgacgatgcgttcgaagagccgtatactccacctagctggtatttgcaggtgtttcccccgaagtaccccgagatttgcgccaacaatagcacttatgtggacgctattggaaccgtgggcaatatgcatattggcatctacacgcgctttttgctcatgttcttgacggatcccttgacgcaacccacggagggtcgcatgaagacttggatcgacttcacccgctttgtgaaacaacattccccgaccaacgcattcgacttcttcacgtactccgaattgatctactggctt

SEQ ID NO: 3900 - DNA, 530 bp, Aspergillus oryzae
acttgacctcaccttgaatatcactgaacatgcggaggtaacattcagacaccaacatcactatttccaattacagcaatctgttttgttctacgcatccttcaacctgtcccacagacaacaagatgggtctattatcatctaaaacgctgattcaggcacatgccttgtttctgttcatcctcgccgtctacctcaccaggtcacctgaagtcatcacggactccgatgtggttttcatgctaggggagaccttacaaatagatgccgcgccatccctttcgcgtcctcaatcacccttcgcgctatgtggtatcctccttgtagcggatgccctcgtcgaccttatcctcgtcacaaaggtcccccgaatcaatgaaatcattgcaatggcagaaatcgctcggtccgcagcccccacgtccatcgcaggagctatgcgaacgaatccattcttagcacgtctcgcctcgctttacacggatatttggacgctcctctctgcttcacgcttttgcctttttttgctg

SEQ ID NO: 3901 - DNA, 447 bp, Aspergillus oryzae
  modified_base (397)..(397): n is a, c, g, or t
cggacgcgtgggcatcttcttcgcaatcttcaccactatccctattttgatggctttctggtccgtcgcttcatccatctccccccgcaagaccgaaaaggccaagtatgctggccgccccgtcgaacactacctgcacttccacagcgagcatgaccgtgctgcctaccgtggaaagagcaagattcccatggaggttttctacgagaagtacttcaacggtgaggtagacttcaagggtgacgccttggagtgcctcgagttccgccacgattgggccaacttccgcttcaccatgggccttttcaagcacttcctcttcggtttcatccccgagatgctgatgcacacccgctcccaagatgaggagcaggtccgtgatcattatgaccgtggngatgatttctacgcttggttcttgggcccacgcatgatctacacctccgg

SEQ ID NO: 3902 - DNA, 500 bp, Aspergillus oryzae
gtcggttatcacctggcttgtcgcgggtctaccgtctgtgtcccacaggttaaatcgtccgccaagttgatcgtgattctatcatcagtgcatcttacgtggtgacgtattatcgactaaccctcgaccaaagcggcgagagacgcgcctgcaacgtggccgacgttctggcgtcgcatcctgcttcaaatcacctcggaaactgcacaacattctactctcagctctagtttgatatttgacgaacttgaccgttcatcatggcgcgctcactgcccaagaagaacaatccccacatccttccgtctgagactccctcctacgaggaactgttgcggtgccgacgattgggaaaaacaaatctcacggtgagacctacagtgatcggcacgtcgaatgcgacaaagccggaaaaccttggaccttttgaatatgcgcatttgcgcgtgaagctgccaagggacctcaaaggctctgaaatatttccttcacataacacc

SEQ ID NO: 3903 - DNA, 526 bp, Aspergillus oryzae
acgagagagaagtccgtaacctgagagaggaagtcaaccatctccggcaacgtgccgaagaggcgttggatcagaaatggcagtgcgaaaagggattggcagggcttaagatggaccttgaccgtgctgagcaggagaccacatcccttcgtgtattgctgcaagaacacgatatcaccgttccagaaggcctcggagctgaccaagagggatttgctgaggtactagccacatcgtcatcattagagtccgcatataagcagctccaggctgaacgggagcaagctgaagcaagcgccgttcagtcgcctcaggaagaacatggccagctagcagcctcggttagtcggacggaaagcctttcgcagcatgtgcagaaacagctcgagaggaacaacgcgttgcgcaaccgtttggcagacgctatcggcaaaggtgaaaaagagcaacagctttctgtggttcggatcaatgaattgcaggcgcgtctcaaagagctggaagacaccctttttgatagctcaac

SEQ ID NO: 3904 - DNA, 204 bp, Aspergillus oryzae
atctcgagaatggcgccgacaagaagcgactgatccgcgtcggtcgcggcgatgaccgtgagtaagtactcaatgctcacttaaggatatgtaaatattgttcttattattacttcttttactttgatgagctttggccctctggtcatactgtacatatatatcaaacattcacaatacatcgccaaaaaaaaaaaaaaaaaa

SEQ ID NO: 3905 - DNA, 574 bp, Aspergillus oryzae
gtttgctttttctcaatgctcattatttaagagcttaagcttacatttcccctcctcttttctctcgcgcactcgctcttctgtcgctcgatcaaaagaaaccaacccctcttatcacagtcgccttgccgcgtgttcagccccacggccgtcgttcttccgagcgtccacttctcattctaccaatattcctcttgctttctctctctctatcccgtgacccttcattcttttttcaagttgttcttgcctggggagaggcaagacaatctcgccatgtcaacacccgcggttcccctcctcaaaccgcccgtgccgggtaatcgcaacaacagcaatggtccccgacctccaaagctcaccttggggatccccccgtctcccaacgctcgtcccgttaccggcaatggtataccggctcctgcgccccgttccagcccccgctttagcccccgaagtgccacagctccagcgcccgtccacccgcccggcgcccccgcaactacgactggcgaccccaatgggcagcagtaagaatatccaacaagtcaacggtcgcccagctcccccggct

SEQ ID NO: 3906 - DNA, 439 bp, Aspergillus oryzae
  modified_base (314)..(314): n is a, c, g, or t
ggttgcagaattttataactctgacgaaaggattctagcctatgctaataaatacaacattgatttgcgcggtccgtccaacatcgaaagttgtgttgaagagttggatgatgtcgaattaccacctgctcaaaacgacccttggggctgggctgatgtcctcaagcagtatgaaaaactttacggacgggagagaaagaagcctaagattgggggaattcaatatgacatcacggggatgagcagtgcagaacgcagggagagcagctacaatggtaaagaccctctgaaaaaggccgaaatcgacgcaatcnagcaaggtatgattctgcaactggcctaggatcaccgatgacaactagccgggcgaatgatcagactactcgatgtgtacatttcacactatctaatacatgggcttgctttatctcatagaaaa

SEQ ID NO: 3907 - DNA, 508 bp, Aspergillus oryzae
  modified_base (371)..(371): n is a, c, g, or t
cggacgcgtgggtttttttttttttttttttttaacagacgcacttcttcgaaatgcaagtattccctatgtcccgcattctccatatgccacgaaaataatgtaaagtgcgcaagtatcagaacataaaacagtaacgtagatatccccgtagagaaacccaataaaagcccataacaaatgctttgcccgaacctgattaatccagaaaaaagaagaaaaacctgaagggaataacacccgagacaaatgcgaccctaccacccaatgatcatggaatagaattcatggcccatcgttcttagtcgtaaaaattcatttcgaaggaggtattacgatttcagacaacctgatgccgtctacctctcctntctaacaatgtcgcgttatccagactgagttcgaatggttgccgcgatgaccgagcaatattctgcttggctgccgccgccaccttggcactatgtgtgccgtagccctgctgcggctgtcgaggctgatgagactg

SEQ ID NO: 3908 - DNA, 296 bp, Aspergillus oryzae
gacccacgcgtccgcccacgcgtccggaggatgttggactcgacgatgacaacgaagccaagccgaaaaagaagggcttattctcgcgactcggcgactttacgaatgacagccagacgtcaaacaactccaaactgggctttcacatcccgggcagaaaacgaggacagagcaatgtagggtctgaactgggatctatgaagtctccaccaactttagagtcggagttacgtgatgcgtgaggtcctcgcaaccatgatatatttgggtaatgaatggggtacggcgttcggggg

SEQ ID NO: 3909 - DNA, 170 bp, Aspergillus oryzae
agtggggaagaaacattcatttgtgtgattccaatccgtggtcatggggtcaggtgactcattctgtgtatgtaggtgcagactataagcactagcaaaagttatgtgctactggttgattccagagagaatatcattcataaattgcatcgctcaaaaaaaaaaaaaaa

SEQ ID NO: 3910 - DNA, 665 bp, Aspergillus oryzae
ggcataacgtgagactattcccatttggtaaaccttgcgagagaactttgaatctgctacatcattagcctcggccctctttgtttgcgggtccgcctacttaaaagctgaagagttctatggttgaaattcggcaaatgctcctgcgaaggttacacttgctggtgcgggtccttgccctgaactctttgtctacttacatcgaaggtatataaaagcttccccaccaccccggtccacacccacctccttgatctcgcgggcgactcaaccaccatgatcatgaattcttcccactacccagtagccctgcttgcaggcgctgtggttttccttgtttatactgtgaccgctctccagcggaaatatatccaataccgcatagcccgcgcgaacaactgtcaaccggtacattttcacgacggatggtgaccactgggcgcagtcgcgcgccatgatccgtccgaacttcgtcaaggaccaggttgcgcatttggacatcttcgaggagctcatggccgatttactggccttgatcccgaccgacggcaccacggttgacctgcaggaccggttcttctgttacacatttgattcggctacggaattcctgttcggacacagcgtccagtccctcaagaaacgcctttcgggtgtgaaactgg

SEQ ID NO: 3911 - DNA, 583 bp, Aspergillus oryzae
ctgtcgttgtctttataggggctctatgccacgtttcaactgtcatcgtcgtgcttttatctacctgctgttgcgtctgaagattcatcatggctatttagctttttcctgccagaaacgaggcgatctaccggggactactttccaattctaaaacacaacaataagatacactgttggtgttacgctacgcttccacgtaaccgtcgtcgaactccattggcttgcgaacccttgttctcggactgtctctccggctttggaataatcataacacaccctcttatactcctccaagatgcctgccgactatacatctactgctcgggctttgtctctccccacctcgccttcagaatcgctatcacccgcagacaatgattcgtatccgccatggagtcatttggcatctggcaggagcaatcccgcccacccctccgagcgtcctactctctggaagcaggtcacccatcggttgaatgaaacatcgcaacgaatgatggcaatttggcggagattgagtttttggcagaaagtaggtgcagctgcagctgctttgcttgccaatctccttggaattggg

SEQ ID NO: 3912 - DNA, 605 bp, Aspergillus oryzae
gacccacgcgtccggcgtaatatcactagagtaccgaggtgaccgtctctgtatccattgatatacagcagcagtggttgacgctggtctcggagaaaagaaagataatcccgaacggccaaaccagagctatcgtcacctaacataacataccggcggtttaaatcccagccttcatcatccacaatcttcaccatcatacatcactactcctacaaatctaggggctctggtacctcaacagccatttttagattgtatccagtcaagctccgtcgcccttgtcatcacaccaacactgttatcaccaaaccgtgacgagacagtacaccgacgacaccagcgcccttcgtctaccctccctccctcacatctacaccatgcgaatacccgcaggcctctcctcgattatcctctcctccgccctactaccgagtctaagcgccgcaagcggcttcgactgcgcccatattaatgtcgatgggtacaagtacgacctgagtgagctgggcggcgtacactcgctctacaacgttgagaaaacagaggaacacgtcgtgaacaccacttatgtactgaacatatgtaacattttgaagggggct

SEQ ID NO: 3913 - DNA, 604 bp, Aspergillus oryzae
cgcagatatgccgccgtcgcagctgaagcagctcaaggcctctctccgtgagagtggagttctggggccacagcaatcgaaaaagcaaaaacgccagaatgcgaagagtggcgctgcggcgcaaaatcgggtccagcgcaatgccgctttgcagtcaattcgagaccgattcaatccgttcgaaatcaaagcggggggcacacggacaaaatttgatgtgacaactcgagatggaaattcaggcacagctgcttcgcgtgcgcgacctggtgttaccaagtcactgggagaagaaaaaagacgtcaaacgctattacgagaaatggagaagagaaacaaggtcggtggtatattagatcgccgattcggtgaagatgatccgactatgacgcctgaagagagagccgccgaacgttatgccagagcaagtcagcgcaagatgcggaaggaatcaatgttcaatctggaaggggatgatgaggaagaagagttccaactcacacacaaaggccagtctttgaacgatatcgaccaagacgatttttcaagagggtgacttgggcgggctggaagatgatgcctcggataccgaagcagcccggaa

SEQ ID NO: 3914 - DNA, 561 bp, Aspergillus oryzae
gacccacgcgtccgcccacgcgtccgcgccattatcctcgaaataactcacacgagttacgcagctcacggaaccccttgcttacagatttagacaggcgccagcgccgaaattgtaactgacctccgctgctgctcaagtttccggtcgcgagccttcaagctcgttatcacttgttgcctttgtgaccaaaacagccacatatctttttcttccctccgttttggtgcgacacaacacaatcatgtccgcagaagttagtcacgctgcatcacaaatcctagcttccggcagcgagcgcgacccaagctataacgatttctccttcatccccttcctacgcaatagcttcggcttcggactcgcctgcgatgtacccgtctgcaaggcgtacagtgaaggccattgtcccttagggcctgcttgccccgatcgacatccgacaccatcccgagtgacgacgtccacgactaccgcttccggactggcaccgtccacgacgcacgggtcactcgtctgcaagcacttcctcaaggggctgtgcaaaaaaggcctcaaatg

SEQ ID NO: 3915 - DNA, 488 bp, Aspergillus oryzae
gtgttatgtatcggtggaagcagcaactggctcaacaacttcgccgtgggtctttctacctcccccttcctgagtgcatcgaactacggtacatttatcttcttcggatgtatcaccaccatcggtgtattctgggtgtggttcctggtccccgaaaccaagggccgtaccttggaagagatggacgaactctttggctctgggggtatggccgccgaagatgaggcccggaagcgacggattgagcgtgagattgggctcttggctctgttaggtgaggaaccggagcatccaaccgatgagaaggtgatggagaagcctacccatgtggataatgtgtcggagtagtgttgtaagtggtctagctaccgagttcctaccggtggttaaactacgtaagatggcgtgatgtgtgtcaagtagctggtgtcgctaagagtgcttactattggattattaatgtatatctcttctcatgaaaaaaaaaa

SEQ ID NO: 3916 - DNA, 601 bp, Aspergillus oryzae
gctgcagacaaccttaccatggaaatcagtgatgcacccttctcgccatattcatcttcccacggaagtcgttgtgcagatcgtttcctacatcgacggcaatgaactcgatcgccaacggactctccatgcctgctgtttggtatcacaccaatggtactccgccgccatcgcacccctctatgaaaggcctcgagtagactccggagtctccttccagaggttcacggaaaccatcagtccgccaatcaatgcacggaagaacaaactgaatctcggtagtttcgtgcatcgattaaacctaagccacctcgtccaccatagctccaacagcctcacatcgagactactgggccgaatcaaggaaaacctagaagtattcgtcgctccaacccttaccttctccataagcagcctcccagcgctatcaaaatgcaccaaccttcgaagcctcgacctcggactcgtccaagaagcaatccccttccccaacctcaaacaggccataagccgcctccacaaactcgtcacccttcgcctcccacaatcaaccatcctgaccgactccgaatctactaaagtaccatggccccccgccctc

SEQ ID NO: 3917 - DNA, 554 bp, Aspergillus oryzae
ccttaagctatcacgatggaaagcccccgtgaatcagcaaccatagtgaatgatcccaacagagaagaaggaaacgtacagagtgaaacaacaccgctcctgcaaaaacgggcaagcgacgtgacaggaaagataatcagtaccaatgttacccttttcgtcgccgggctaaacgacgccgctttgggagtcctggtcccgtacatcctaccaacctatggcgtcaccctctttcagctctcccagatctaccttataaactgtgctggctgtctcacagcttccttttccaatatccatgtttgctcgcgcatcggcacgggcggtacattagtgctaggagcagtgatccaaacacttggattcgcactgatgtactggaacccgccctttgcgctctttactgctgccttcttcttaactggcatgggaggtgcctatcaagacgcccaggcgaatacattcacaacaacagttgacaatgcgcatcgctggctgggaattctgcatgcggtgtatggtgttgggacaattatctcacccattgcagctaa

SEQ ID NO: 3918 - DNA, 464 bp, Aspergillus oryzae
aatggattctatacctcacgggacgcctatgattggtggtacgaaaggaaagccgagaatttcatggctcgtctgggagttcacccggaccatgtcatgagcaaagctatttacatgagggacatcgatgaagtgattgcaaactcaaccctcggacatgcgagcgacgacgtgagtgactgcttcgccaccttccatcagcaaacaatacggaatgttggaacaccgctgtccatcagcacgtctggcccgagagattcagcgacaaagagcgcagccagacggctccagcagactcgtgaacgtctagctatgcatcgacatgacctcgtggtaggcctccgcgtagtgaacagcatcgaaagagagatcctccagaacgaatgggagcgttggctccgacaagaactgatacgttgcgaccaaatcgaagccctactcagacagagtagtgacaccgacca

SEQ ID NO: 3919 - DNA, 591 bp, Aspergillus oryzae
agaagatgttcgcctacagcaagtacaagctgccgttatattgataaactggtgaccggagaaaagagcactgtttatagatgcggtaccttggtcgacctttgcagaggaccccacattcaaaacactggcaagattaagaccttcaagatcatgcagaactcctctgcttacttccttggcgaccaaagtaatgactctctgcagcgtatccgtggtgtcgccttccccgacaagaagcaaatgcaagaacatttgaagttcctggaggaagcggaaaagcgtaaccatgtgaagatcggcaaagaacaggagctcttcttctttgacgaagtctccccgggatgcccattcttgctccccaacggtactaagatcttcaatgctcttcagacccttttgcggtcagagtatcgtaagcgtggctaccaggaagttcagacgcctaacatgtacgatgttggcatctggaagacttctggacactgggctcactacaaggatgacatgtttaagcttgatgttgagaagagagagtgggctcttaagcctatgaactgccccggacacttcgtcctttttcggtcatcg

SEQ ID NO: 3920 - DNA, 641 bp, Aspergillus oryzae
atcaaatcaaggcaacattggatccttccgttgctcgtcaatgctggcctgctggccctcccaattgcgggctctattggaactcttctgggcattgacgcccaccgtcaagcaacaggacagcgacctctattcaccagtgaaattggtaatgatggaagtatctctcgcaatggtgttaccaacacacgatactgtgatttgtttaatcccatttcaccgaagtcagagggtcaactttacacattgaaccccaaccagtggggcgtgacagacaaaacagaaggaggattatgtatgaacatcaccaccattgccaatggctcctacgcgactatgtcaacagcaccagagttttctgtgacatggaaattcgatcaggaaaccaaggaccagacagtgcatgcattccctaacgtccaggtcgacaatattcttcctgcttcacttgcggacatccaccatctgaacctcgacatgcattggacatatggaataggcaacaaaactgtgaacaaaacggatgacgcagagctcaaggacgtcaataccaacgtcgctcttgatatgttctttgacgacgacatcaagaccgcgaagaacgttccctggcgaagtacgaatgatgatctggtttgcgg

SEQ ID NO: 3921 - DNA, 501 bp, Aspergillus oryzae
caccagataggagggtggaacagaagagaggcaatgcgaggctgtggaattccccaaagctaaagaaccagtgaccgacttgactgggagcaccaccgacccaacaaggcaacactgatgcaaagtcgcagtcacactctcactgagtgattgggaaggggggcacaggtgaactactgcgatagttgactgcccgcagtggagtattgtcgtactccatacctggagagtacgtatcagagcgaggccgtaacgcccgttcttgagcaagtcgaccagaagagagagagagagaagggggtgactcgcctcgaaccttcacggtgggtttttctgaagggaaaaattaaaaacgtgtctctccgggtggtacgtacgccgaacacactacgtactttaaggggactagcctttaagaaaaacttatagagtgggaagatccagggcttgggaacttgtctattttcggtcatggaaaatccaatcgagttccactatttc

SEQ ID NO: 3922 - DNA, 563 bp, Aspergillus oryzae
agatcaccttcttatatctggaccgaacggagttggcaaatctgctattgctcgtatcatagcaggtttatggccggtttatcgtgggttagtcagtcgaccaaggggattcggactggatggaattatgttccttccacaacgaccctacctcagtgtgggtactctgcgtgaccaagtcatctaccctcacacggaggtcgacatgcgcaagggaggtatatcagacgcatgtctacaaaagatcttggatgacgcccacttaggttacctccctacccgcgagggtggatgggactcccgcaaggagtggaaggatgtcctgagcggtggtgagaagcaaagaatggctatggcacgtctatactaccatgagccccgttacgccttcctcgacgaaggaacctctgcggtctcctccgatgttgagggcttgctgtacgagcgggccaaagagcgcggaattacactcatcacgatctctacgcgtgcgtctctcaagaagtatcacacttacaacctcacccttggtcttggctccgaaggcgaacagtgggaagttt

SEQ ID NO: 3923 - DNA, 572 bp, Aspergillus oryzae
gtcgaccgtttgaaggaaaggctgcctcaagtattacagaatgactgggacgcggtgcgcaaaatcttcaggataatcagttcccttagcacggctcacgagacatccgtcaacacgttcgcggcatggtatacctgcaattatacaatgttgacggtgaccttacattactttgcaatgcttattgtgaaaaagcacgaacccgaggtcttcgatactgcttcggttgctgaaatccggcaggagatagaagatgctctgcgcgtcatgaagcatattggcaaaaacagcctgatcactcagaaagccggctgttgcatcgagagactactcaccgtatttgatacactcggagaccacgttagagtcaggtcctctgtctctttagatatctggaataccgactgtatcatgcgaaatatcggacaggcttcggacgatctccttatgcacttcagtcaagacgactttatcgatcaagatctgtcattccttgacctgtactctcgcctcctttgtgtgaatagtctactttacttagtgcgagtaacgctagtagttcattcctaaaa

SEQ ID NO: 3924 - DNA, 616 bp, Aspergillus oryzae
tagaatataatgtcttgtatatataataacgcgccgtcacaagagttgattcttcgccgtgtaaatgaggatatcgcttgacaatcagttcctacgctgcggatcgcttgtctttgggcaccaacttatagccggcttacctcggcatgccgaacagccagaaattcttttctcagctataaactaggtataggcatacaaaacacgttacttcaatacaactcgaagcgaaagacgatgtctttcttttttggccgtcggcattctgtctctggtgcgccagcagaggacgatggcgtgcctaggaatccgaatttgagattgagaagaagggcatctgttccgaatgcgccgagtcagactcgtggcactcatgacaggaatgtgttccaagatctgttccggagacatcgagatgattcagaatcggagatgtcgacagtggagagggaccatggtacgtactcatgcaaaccaatctaagcaatcaacggcaacagctgccaaaagtcatacgggttcccagagctccccgcatgcgcatgaaccgtctgcgaagggacacaaccaagagggtgttaataatgctacgccgtcatctgaatatgcgctcagc

SEQ ID NO: 3925 - DNA, 327 bp, Aspergillus oryzae
cagcttccaataaagtaatgcttcatcccgttgctcaagaagaggtgaagcccaggcctggtaccaggaagaggtaatataatcttatccggggtatgaagttggcgcagttgggggtttggtgtggtcggcgtcagccttaggttgatatctagcgaactttcgagtcccttgtccacgatatgaatggacagtggtcgacagctccctccctgcgttaatctcgtgagggttcggctgttttatctttcatgctattatccccgatttatgtacctttcactttttcctttgggaatgcatatgagcgaattaatctatgaaaaa

SEQ ID NO: 3926 - DNA, 421 bp, Aspergillus oryzae
gacattggcgcccagagattttcaaaaagagcggccacggaaagccagtggatatctgggccatcggtgtcatcacctacttcttactctgcggctacaccccctttgaccgcgactccaacctggaagagatgcaggccatccttgcagctgactattcttttactccgcttgaatattggcggggtgtctcgcagcacgcccgggatttcatcaaacggtgtctgaccgtggatcccgaagcgcgcatgaccgcccacgaagccctccaacacctctgggtcaacccgccctacgacccatacgccgatcagtccggtcaagacttgctcccgaccgtcaagaagaacttcaacgcccgtcggacacttcacacggccatcgataccgtccgtgcgatcaacaagctccgcgaaggtgg

SEQ ID NO: 3927 - DNA, 450 bp, Aspergillus oryzae
cggacgcgtgggagatacgatctttttctcgaagttttcatcatcttctctgtcagcacggaacaagcgtgcccatcatcgacggcggctgaagctcttatcgaaagcccaggcggaggatgctcgaactgccagcaatgatccctccaccccaagcaaaaaaggcaagagacaaaagactcgcatcacaaaatcgaccctggaatcggctttcgccacttcttccgctactacctctgctgctggtgccaccggtatcactggcccatccaccattctcacagccagaccattccccttagagagattaatagctatctaccacgctattgatcctaacccgccagcaaatcccatcctccaagcggcagtttccgatgcactatatgcggagcttgccacactacgtcgactacggcttgttgttcctgctgcaggccgagaaagtgg

SEQ ID NO: 3928 - DNA, 628 bp, Aspergillus oryzae
aattcatcctcaatcccgaggcattacatctctcgttcacggagagtgtatttgatttctaattggtctttttttgtcgcgcgcacgacctcccacacaatgttccttcagtccgtctctcgggctgctgctcgcagctcggccatgcccaccactgccattcgttcctatcgcaccgtctcgggcccaatggcttgcctgaatgcccgccctcagcctgtgaagaagtctatcgctccccagcagacccgcgcctcatccgagcacgccatctcgaatcccacactcgccggtatcgagaagcgctgggaggccatgccccctcaggagcaggccgatctgtggatgcagctcagggaccgtatgaaggttgactggcaccagatgacccttcaggagaagaaggccgcttactggattgcctttggtcctcatggccctcgcgcgcaggcccctaagggtgagggtcttagaattgccgttaaggtcgcccagcttactgctgtctccgtcgccctgttctacgtcattcacttgttcgctaaggccccacctaagaccatgtccaaggagtggcaggaggcttcaacgagtatgccaaggccgagaagatcaaccctatctacgg

SEQ ID NO: 3929 - DNA, 617 bp, Aspergillus oryzae
cggacgcgtgggaaagccacgtgttgagccttcatcttttgccgaccgcttctcggatgaggcaatggttgctgcttctgaatcagaatatgtgagaagagattctggtccggaccttcacagcttgcggtctccagatacgcctgtctttaggccatctaatcagtcaggccttcaaccagttgaggacccccagactcaacggagatattccaccttggatagtacaccaagcattcctgcaagagatactacgcagcgccttgatctaccggccctgacgaccctcaatctgggctctaccacggacctggatccttcttccacttcttctcggctaggacacgcccaacctgacagaatggaaaatatggtatccgagatggctactaacatggtcaacgccatggcaagaatgatgaacagcagtagcaacgataacggtaacagccagcgcagacacagccaccatatgggcgacaaagtagagacacttggagggaatgacggattgtcccgatcagaagcgggagattatgcagaagattttatctgcagctctagaccaagtgtccggaaacccagagcctagtcaggctgattcgcagaccggtgcc

SEQ ID NO: 3930 - DNA, 482 bp, Aspergillus oryzae
tcagaatggcaatagacccgcagacgtcttctttaaggtctcgcacccgcacgctagcgacatacattgagtctctcgtagacaaatcgtccatctccttcggagcgagtttcaatccctcgacggatattatgattagctcgtgggcaagtgtcaactgctatgaattagacttcggattcggccttggaaagccggaggctgtgcgacgaccgcaattcactccggttgaagggttgatttatttcatgcccaagaggtctgatggcgagattgctgttgctgtctcgttacaggaggaggatatggcgcggttggcggcggatgaagagtttacgaagtttggcaaatatatcccttagacaaatagatatacccttgataaaggtacacgataaatacgttatgttcagctatttatttatctagaccacctatcccgaaaataaccagctcgatagccgtctacccatgaaaaaaaa

SEQ ID NO: 3931 - DNA, 553 bp, Aspergillus oryzae
gtttcacaacttcgtattccatcgcgtcgccacggtttcgtagacctattcgaggttgtcagccggttgaatggcccattgcctgtgttccacccccaattcttggcgcagtgtatcctaagtggcaagagtaatttggcacattccattttgataaggttgcaccggaagctcaagttctatactgaaggcgatgaccttgacggtttcttggacatgtccctggaagatttctatttggaacacgatacctcacagaaagcgtcgtctaaggaactacattctgcgtacgaagatctttcgctagaggatgaaccatctgtcatggacgaaaacactgctattgtgctcaatgaaaatttagctagagttgctttgccacaactttccagtcaagagcaattccgcctggctgatactatcgaatgcgttgccactgtcgaaaagcatcggcgctcaatggatgacaacgctgcccgctatctgctgttcttccggcagcatatgctgcgaagaacgcaaggcgtcgccaacaaagatacagtttcctgga

SEQ ID NO: 3932 - DNA, 548 bp, Aspergillus oryzae
tcgaccccgaaccctaacccgcgaaagcgtggcacggacgaagccccgtccttagcctccgaggagaacccctttgtcagtacgcgatacaacctagtcatccattacgacggggagacgcagaagtcgctggaggaaatggtgcggattatcgggacagccagaaacaacattcggaggggaaagatgtcccagatgggagcgatgcgtagtagtgctcttaacaaacccacccggatgaacagcccgccgctccctcctcccggggttgcagctgacgcccagttactgtcccagatccgcagcacccggaatcgtggacctccgccgcaggcccgcgtgatggcaaagaactccccgtttgagatggcggatagacagctggagttggctcatagtatgtgtgagactgcggcttaccagttcctccgcacaggtgactgctcggaagaattacagggggtgctggataaattcaaggcgctcctcgaactggccacgggtgaagtgcgacgtctcaccgaggaacaggaaagagaacgtgctgc

SEQ ID NO: 3933 - DNA, 621 bp, Aspergillus oryzae
cccgaccttacctgcgtgatcctctgccattctgcccgttgtagcagtggatgaggtggtcgcttttgtgatctctttatatctagcgtgcggagcttgcttctctatggtgcggctccggccaactctccttcaagatgcagtcctccccaaacatgctcactaagttcgagtcgaagtcctccagagcgaagggaatcgctttccatcccaagcggccatggatcttagtatcgcttcactcgtcgactatccaactatgggattatcgcatgggaaccctcattgaccgtttcgaagaacacgatggccccgttcgaggcattgacttccatcctacacaacccctcttcgtgtccggaggcgatgactacaagatcaaagtttggaactatcaaacgcggagatgccttttcacactcaatggccatctcgactatgtgcgcacagtgttcttccatcccgagctcccttggatcctttccgcgtcggacgatcagacaatccggatatggaactggcagaaccggtcactgatctgtacgatgacgggtcacaatcactatgtgatgtgcgcgcaatttcacccaaccgaggacttgattgcctccgcctcctaga

SEQ ID NO: 3934 - DNA, 528 bp, Aspergillus oryzae
tgcaattaattttcaatatagcagggaatatatatacccgagaaagaaagagaaaattacaaggtaaagaagcatgactcgatactttgaatcccatacccgaaatattcgccacactcgtaaagtgtcccaggaaaacacaagcacctttactggtacacggtctcatcaagcgcttccttgacatgctttgaaaggtaataattccggcacagtccggtccagtagattccatccaaccgtaccagagccaggttcatcaacgaagaaccctcgctctgccttcgcaaggcctgtcgccacatgtgcactaatcgtctggccctaatggcatgatctttggatggtgcttgcacaagtaaaagtaacatgaagctggaaacagtcgcaaagccgatccgagaccctgggaacagatagcatgttagacaatgtctgctcatagaacaatgaggagtcagaagacacatacatgagaaccaatacccggccaagtcactatatgccatcctcatcaccaatcggagc

SEQ ID NO: 3935 - DNA, 226 bp, Aspergillus oryzae
  modified_base (66)..(66): n is a, c, g, or t
ccctgggcgaaatggatctgagcggtaacatgacccgacaggtggaggtggacttacctgttgagnccgatgcgagccacgttgccaatgttggtcgactcgttgaggatatggagctgaagatgaggaacctgttgcaggaggtctacttcggtaaagcgaaggatgtcgtgggcgaactccggagtctagcttccttgtcggaagcaagcaaggagcgcgccac

SEQ ID NO: 3936 - DNA, 401 bp, Aspergillus oryzae
atcgctactccccaagtctaaagtaggttatctcaacggactaacgttgaagaatatttgctgtcaccccaaaccgacgacagtcgtctggcgatccactatccattcctacatacattcgccgctccacgttgcagcgtggcgattacctacgttaagcgggtccaatccattgtccacctccaagtacctgagttgatatacccttacgggttgctagggtctaatacggcttgactacctatacccactagtgtcgtcttcctggtcacttatcattttatcaatcagtattggacaagcctcatcgaccaatatttcgccctctcccgtttcagagtctcaacgatatcaattgacaagatatattgtcttcactgcactagcctaacctgcaggcc

SEQ ID NO: 3937 - DNA, 528 bp, Aspergillus oryzae
cgcacgtctgccaacaacaggcacggaccaatctgttttgtcgccatcttgcgccgagtttgccccattggtccgccatgaagatagtccccgagagttggccgactggatctattccgatcgcccgcaactgcatgtccatgttgctgtcttcgaagatgcaactcttttgacggtcagctaccttcacaccttgttcgacgccgtcgcgcggaccaatttcttcaaggcatggattgctgttcttgaaggccgggaagaagaggtgccaccttttgtgccttttgaccaggaccccttatgccaattgggcaaggaagtcgctcgggagaactacacccactttgggcgactcgttgccgggttgagtctcgtgctcttcggactcaggtatctattcgaactcctctggttccgaaaggaagaggaacaccctatccgggttccgggacactgcgtggaacggatgagggaaaccgcccaacaggaactggccgctgccactccggagggagcggaagtgccttt

SEQ ID NO: 3938 - DNA, 634 bp, Aspergillus oryzae
caaagagccgtgctctcatgtataccctgtcattttcagaaaattaagtgcaaccatgtcaggccatgcagtgcctgctgcgtacgaggacgacaagcgaaatgcgaatacacggtcactctagaagataggtggttcattgagcaggcacatcttttgcggcgcctacaacaacggcgtaatttcctcgagcagcggatcgtcagcctcctctcggcttcagataagaagattcctgtttacctcacgccacaacaatcggaccatcccagacaacgaggcaagcaagcacggtcgcgaaataccacccatcgaggaagtccaagtaaatccctatgccgagaggctgtgcagccgaaacaggaattcgatgaagatgagaaattctgtatagagcaatcgcaaccctacgtgcaaaccaacagtagtctccctgcgcgatccacccatacggaacgttccatccaatctctagtagaagtgttcagtgtcgatgtcgacggcaagcgcacggtgcccatatggctagagcaagcgatccatatgcgctccagctccccctctactttgtgcggccatcgaagccacatcctttgatctgatgggcaaaatgtcatgcgatccaaagtccacc

SEQ ID NO: 3939 - DNA, 408 bp, Aspergillus oryzae
gtttgagtgtccgaggttggttcctgaaattccggaaggcaacccggcgggcgcgtcacctgactggtgccttcccccacatcgcccagagcgtcaatcagcatcgtgaattccttcaatgcggaagcattcatccgatcagctagatattgccctcctctcttcttgtatatgggttcgggggtttacatctgtcgctgatttctctccagttcagtcccagggacatgaacaattgattcctttccatgcctgtcatgacatccgttttgtgtaactgtcagcgtgcacaagacttccgatattggaaaagcagacccttatcgataaagatgaccaggtacgcgagattcccactcctatgcttgtgacgaatgccggttgcgcaaggtccaagtgctccaagga

SEQ ID NO: 3940 - DNA, 557 bp, Aspergillus oryzae
gaaatgagtccctgaacataaatctcaccaactaactctacacaactcgaactatcccaccctacaatgcctcgccatcatctcctccgccgacacccacaccccactgctccagaagaatccccctccgagtccactcaaccacgtccaagtagatcacgactgggccaacatgcagcgggacagtctcaattccagacaccaccgtcgcagggtattccccagctacatccttcatcgggacccatcgagccggtcgaatcagcgcatccagccgccgccgcccaagcggctctcttctccctatttggccgaggagtcgcaggacgtccacggacacagttgatggaagacgacgaggaagaagacgacagtcaattcgaagatgaagacgagcacgacgaatacaactcgcaagagaacgcagatcacgaagctcaactctccgaagaagacatggaggggatagtcgaggacgacctgcaggtaatagacgaagacgaagatgagatcatgcacgatcgagcaagatcgccatccccggtccccagcaacct

SEQ ID NO: 3941 - DNA, 282 bp, Aspergillus oryzae
gtctttgatttcaatacccggagttgcttcagcagttatccgtcccggacaagcgttgacaccgacgtttgacccaaccaggacaagactttctcacggctacttgtttgtctcatggaagacatgatgtagcttatgtgtttatttcttttcccctgtcgttttcagtcatcttgtatgcattgcatctacactggcttggtgtgtgctggcgatgtctgctttatctgctatgatatgtctctctaaaaccctttgctagacaaaatcttcgttagaaaa

SEQ ID NO: 3942 - DNA, 498 bp, Aspergillus oryzae
gacccacgcgtccgctctcttctctatccattctcaattaacatttatacccgcctcgtcaaccctctgttgtccatcttgttccagtccacaatcatcttctccactgttctcatttctctcttctcctgatcgttatccacggttctactgcaaaaccaccccgctatcagccgtcggcggcccgcagtgtcagccgctgccgtcacccacggttcgcatccaccagatcattattaacaccgcttcttctacaaatccctgatcataggacctcgtaattattaagcacatgcctcgatacgacgaatatcgccgctccactggcgtgctcgagacagagcctgaccgctgggatccagatcgttttgctcgtgagcgacgggaacgccatcattcccgtggcccgctagttctcgatcgaccccggcgggtagaggatgaacgattcgaatatcgcctacaggagcatgaccggtacgggcctcctgcacgccg

SEQ ID NO: 3943 - DNA, 579 bp, Aspergillus oryzae
cctgggcctatgccaattaccgtcagttcaatgaacacatttgctccaccgccacttccaccgccgccgcgcatcagagacctagaagacggttacgatgctggttgggtgcatgctaattctaagggacccagtgcaaaactggcccccatcaatccgagttcgagtctatttggtggccatcgccgtttagaagccgtacctcaatccgatcgaatggcgctagacgatttggatggcagacacagcggtttgcctctatcaagaagtccggaggctcatatacggattgagcctccaccaccagcggatgacggcttccggaattcaattccctttaacaccagtcctattttgaaaggcgagcaggacttctcacgacggagcgtgaaggactcgtctgatgcatatgaccagcatcttctgtctaaaatagggaaaccactctctcctcgacagtctttaagtttgggtaccgataatagaggccctatatcaacacttcccataccttctagaaatcttggaagcttaccctcacctggtggctctgacgggtctacgctcgacgtgaggtgg

SEQ ID NO: 3944 - DNA, 563 bp, Aspergillus oryzae
ggaagggggtccgcagctcacatacgaagagctaaccctccaaggccaacgattcctctgtcaaatcccgcaagttgagaccgacgaaaggagtccgacgaatgagaccaaggaagctagcgagacggacgaggagcaggagctggcccgggcgacggaccgcggcttggaacttctgagcgagatggaagggaaatgcatgtactatgtgtcgggctggtggtcgtactcgttctgctacaagaagcagatcaaacagttccatgcattgccttccggcagtgggatccctagctatcctcccatggaggatccggcaacgcattcatttatcctgggccgttttccccgggcaagcgatgatgaggaggatggtgaagctgagcgcaaaaagaccgcagagacgacgacaacagcaacaacaacggatgtggctgagctccagacgaatgggggatcaaggtatctggtgcagcgcttggagggcgggactaaatgcgatttgacggggaagaaccggaagatcgaggttcagttccactgccatccgcaatcgacggatc

SEQ ID NO: 3945 - DNA, 372 bp, Aspergillus oryzae
cttcctctctggcttttgactccttctgttcctttctcccctgctttagataatctgtctcattttactttactttttatttataatttctttttgcatcgttcactgttcattcacctctgacctcgcccgcttccaccaccaactctacttacatgttcgtccatcatgacagttgctgcaccgcctgtggcacccgttcacgaaaatggtatcaacggcagcggccccggacaccaccatgtcaacatgagcttgccacgtttccacccaatcgcaatgaacccgagccaaccagtgcatcccgagcaaatgatgccgaatcattctcatttccgtccttttcctccacctcatcctatgcaagaagcg

SEQ ID NO: 3946 - DNA, 347 bp, Aspergillus oryzae
atccccgtcacaatgcaagccgtcccggagtcgcgacagcagacctttgaggaaatctacggtcctccggagaatttcctcgagattgaggtccgaaacccccagacctacggcacatcccggaacatgtacacctcgtacgaaatcgtctgtcgcaccaacatccccgcattcaagctcaagcactccgtcgtgcgccgccgctactccgactttgaatacttccgcgatatcctggagcgcgagagcacgagggtgactatcccgccgctgcccgggaaggtgtttacgaatcggttcagtgacgatgtcatcgagcaccgcagggaggggttgcagcggttctt

SEQ ID NO: 3947 - DNA, 398 bp, Aspergillus oryzae
cgagaacctgaagtactatggtatgcacggtagcatgggcaaaaacatctatgtcaccacctggttggctgtcgccttctccttgggagctgctctgttctggatgctcagcacctgctgctgctccggtcgctccccttacaaccacaagaacaccccccgcggtgtcacggccgagaagaccccttacacctatgagcctatcggccctcagggccaccagcaggcctctccctacaacacctcctacccgcccccccctcctactcagaatcggtcaaatgcctatgagcccttccgccatgtctaagcgaaatcatacatgagcgaatcatagtccaacaagaaacaagtcattaaaaggaataaaaaaaatacatggtcatacgactcgacca

SEQ ID NO: 3948 - DNA, 486 bp, Aspergillus oryzae
cggacgcgtgggcggacgcgtgggtgagattattcgacaggctcttcgtgctaagattgatcagtggcagtcagatcaactttctaccgattctatgagcaattcccaatcggggaggccaagtattggtctggatgcgaacatgatcgctcgaagtgcgcagcagcatgaagacatcagtttgcggcatctagagttggcattcaagcattgggcttcgctcccttctgacacgaggcgagatgcatggcagctcgagattactcgagcattcgcccgggagatggaaaagcgcaagtcattggatgaccagctagctcgggtgcaacaagaagcaaatcaacttcgtgcccaagtagaaagattaggctcatgtcaatggccaagggagttcgcgctctttcctccagacacgttaccactacctcgggatgtagcccgcgatttggacaccaaagaaagcaagatcagccccgattcatcccg

SEQ ID NO: 3949 - DNA, 622 bp, Aspergillus oryzae
  modified_base (535)..(535): n is a, c, g, or t
ccacgcgtccgcacctcctcaccatctgcccttgtatatcaactaaggcttattatcccgcttcccagataccgatttagatcaccgcccgccatggacaagttggtcgcccaatatagccgcccggcccatcagaatgagatgtattccgaacaagaacagcatgacctcacagagagccttcctcccctctctctgaaattcaaccttcctccagttgacaactcaagatcctggctccgtgctatgactgatgatcactcgaacccaagctgccccattaaacttgcccacggaacgacaacactggccttccgattccagggcggaattattgtcgcgacagactctcgagccaccgctggaaattggattgccagtcagacagtgaagaaggttattcccgtctcgcggttgagccgtggtgaggataaggcgaacaatgccccgacccccggtctgctaggtactatggcgggtggtgctgcggattgccaatactggttgagatatttgagtcagcagtgcacacttnatgaaaatcccgccacaagcgccgtatcacccgttggcaggccgcttccaagattctcgccaaccttgacattaccgccttacaagg

SEQ ID NO: 3950 - DNA, 406 bp, Aspergillus oryzae
gacccacgcgtccgatgagacttgaggcaacatgccttaagtcgagaaaggaccaacgcaaagcgatcaatcgctggaacaaattcgtcctgggaccggaatacatccgaagggcagcttatctgtgcccaaaaacacgggaagaaaagaggcaccggaaatgcaatttcgatctgctcacaggtgttcacgaagctgaatacagcaatgtgaagcggcccattgatcccaagaccaagagatacttggaacctgctcatcgatttgaggtcaacatagagggggattctgtatctcaggcaaaatacgagctcttcctcaaataccagaccaaggtccacaaggaagacgtctccacttggcagcagaaggacttcaaacggttcctctgttcggtcctgaagcg

SEQ ID NO: 3951 - DNA, 659 bp, Aspergillus oryzae
gacccacgcgtccgcggacgcgtgggcaacgacgtggacacgctgcacaagaaaaatctgctttctttgggtgaggatcgttacttgactacattgatgacgaagcactttcctaccatgtcctacaaattcatcccggatgcctacgctagcaccgccgcccccgagacgttctccgtcctgctgtctcagcgacgtcgctggatcaactccactgtccataacttggtggaactcgctgctctgaaagacctctgcggcttctgctgcttcagtatgcgctttgtcgtattggtcgatcttcttggaactatcatcctcccagctacctgcgtctacttgggttacctaatctacagtgttgccagtggtgggccaattccaatcatatctatcgccatcttggctggtgtgtacggcctccaggcgattatctttattgtgaagcggcagtggcagcatattggttggatgatcatttatatctgtgcctatccgatctatagtttcgttctgccgatgtattccttctggaaacaggacgacttcagctggggtaacactcgtgttgttcttggagagaagggaaataagcgagttgttgcagtagaagatgaaccatttcgaccctcgcagattcctttccagcgctgggacca

SEQ ID NO: 3952 - DNA, 651 bp, Aspergillus oryzae
cggacgcgtgggcgtcgtttcaccacagactccagcaagctttcttcttggagttatttgaaccatgctggaaatgcgccccagatgccggatcccttagatctattgtcatcgttcaaaaagaagcgtcagcacatcgagtatatgcgggagcaaaagaggaggttcgaagaagacatgaagctactagacatgcagcatgagaaggagaagttagagatggaccgaattgcgaaggacctcgctaaagctggcatatctggccctgtcagtgagcctacgacccctcccgagtatcgtgaaaacagcttctcaagtgggttcacacgacctactcgcttctcaacttcatctgtcacctcatcccctggtttcttcaatgtatttgccccttctcaggcaacaacgccgcagggccaggtgaatccttctgctgcacagactcctaccaaccgcttctcggtgcactctgttcctggttctcgcagaaactccgagaaagaagatttcggtcaagaacctacatctcctttccgtcctgggcctgctatccatcgttattcaatgccatctgcaggttttggatcccagcttcgtccaaacatctctggcttcaacaacacctccggtttggagtcgttcagcacttct

SEQ ID NO: 3953 - DNA, 650 bp, Aspergillus oryzae
gatccaagcagtcagccaaacaaccgacccgattgacccgacgagcgggtccgttcagattgacgaagttgactggaagccggacgcagtgcagggtaacatagcactaactacctttttgaatgccatttcactctgtaacctttcgactgtacaaaaggaacaacagtcaatgccatcggaaaaggatcctgaacatggcgcgcaagtcaggtggaccgcagtcggggagcctactgaaattgcccttcacgtcctcgcaatgcgatttggcctcggcaaaccaaatatactgcaagacagtaatttacaacttcacaccgagtacccatttgactcttcaatcaagcggatgacggtaatttaccgtagtcttgaaacgagcatgaacgaggtatatacgaaaggggctcccgaggcagttatccctagattgaatagcagcgagatagagaagtcttcgatccaagacactgcagacagaatggctggggaggggcttcgcgttctttgtgttgcttacaaaaaggtccctattaataatgagtctgaggtatcctcgcgtaccacagctgaatcaaatttaagttttggtgggctcgtgggactatatgatcctcctcgggttgagactgcagcagcggtgcgga

SEQ ID NO: 3954 - DNA, 643 bp, Aspergillus oryzae
caacaatcaagagactgctggcaatatgcctggtagagtccgagaactgtctttgaagaatctgggccaaaaacctcagataaaagatccaggatggtacgttttggatgctatttctagtcaattttgctcaggcgagattctggaaccatcgtcctgttatctgcataaccctcccgaacctgagctggcagtcagatatgaaaagatttttgacaaatgcgcaaacaacccggtcggcttgttggtcgatttagacttcactggatccccaccgttccggcttcggtacgtcgttgaacattccaaaggcattgagaccaagacccagttgattgaggggttgcggactcagctggacctcactccttctgaagcgggcttgtaccgctatcgtttcctagatattgcagacacagtgtacgctccacgacctctcaaagacaaggcccccgttctagagcaacacgttaaacctcctgcttctgctcatttccttgggcctagagaggtgcggaaggcttgcttcggtgagcctgtgtctgttgatgtagccttgcttggtgaatcgccatggactttgcagtacgaacttggtcataatggcaagaaaaccaagtacgttttggaaacagagaatgag

SEQ ID NO: 3955 - DNA, 653 bp, Aspergillus oryzae
atcccttcggtcatacccttccttccccagactgagctccttcaattcctcttctcccgtgggtacatagctatattcttagctacctccccttacacatacacaatgttcaagtcaccagccgcccgtcaagccgtcaaggctctcagtatcaacacacgccctgctgcagtaacagcagcatcccgaccagcggtggccaatactttcttccgaggtctctcatcgacagctccccgtgccaacgatgagaagtcgaaggcagcaaaggaccccatcttggctgccaccaacaaagctcctgagggtgccttggactcagagggccgtttcgcccgtgtcgacgagagtttgcagatcgaataccccgatgatgagaacatgcctcgtagtcctatcgtccagggccgcggaggaatgcacttcaaacgtaccctggctcaattctccctagagaacaaggtcaccctggttaccggaggtgcccgtggtctcggtttggtcatggctcaggcgatcgttgcatcgggatcggaccttgcaattgtcgatcttaacaaggcggaagctgaggagcaagcccagaagttggtggaacagtttaggaaggagaaccccggtttggaacaaatgcccaacgtcaccgcccacta

SEQ ID NO: 3956 - DNA, 615 bp, Aspergillus oryzae
gttcactttggcttctccagtaactggctgtgatcctgaaggccaattcgaagacaatctactcgacggtatggacgttcttgtagctcggctccccgcacatgtgccgtctgatatccagcgacgaagagctgtgtggaagccagagctccggcatttcaaagatgttatcgttttccctactgttgggacaacgccactggcgcacatgttatccggtggtgattacgacggtgatacaacgtgggtttgctgggaccaaaatattgtccagaagtttcgtaattccgacctatccaccatggaataccctgcggagcactttggtcttgaggaacataacgtgccaatgaaagatattgactcatgggacgagtttcttcaaagcacttttacgttcaatttaaccatgtctaatctgggaaggtgtactgtcgagcacgagaagatatcctacgacgaatcgatcgactcgccgaatgccaaagagctcgcctgtctcctcagtcatttggtggacggtcgtaaaggaggggtccgcttatcagacaggcgtggcgagcatatcgcaaaagggttagccctagggcacgggatgtgcctgcgtacaagaac

SEQ ID NO: 3957 - DNA, 613 bp, Aspergillus oryzae
cttctttcctcaacttccgcactttgaccggtcacccgcaccacctgctttttacgatctcgacgtgacctatcgcgctaccttcttatcatcgacgtttgcaaagcggaggatttcttcggtgtcgaatggaacataaaccatggctaccactcaaaacggatccgagttgcgtggagatgctggcttgctgaaaacccagaacaatggtctacaggacgacgacaatcaagatcagatcggctcaaacagtccgagtccgtccgggatggctactccacagcccgagttctcggataagcgccagccttcctaatgcacaatttcttccagaataccccaccgcttaccccgcgtgccatgtccaatgaagggtcacagaccgataagccgccggctacatcgtcgcctgagtcgacagagccaacacatcaggccgatgagatggacaaatcaactgatgaaattgccggaaaacttgaggaagcgtttccatctccagccgaaactccacaaccttcagggccgccagttgctccgatcaagggcaatttgtatgtgaaaatttcagaaggccgcgggcttaagccagggtttgatccttatgttgttg

SEQ ID NO: 3958 - DNA, 660 bp, Aspergillus oryzae
atcagagatggcaaactcaccaccccgagtctctacccttcggtcccagttccctctccaacatctgtgccgccctcgaagtcgaacccgttcaaacctccgcccccatcaaacacaacctcccgttccatctgcaggcgctggcccccgcgtcgccacgccgggccatggaggaagccattacgctggcccgcgtcctccgcggcttgatccgcaagtcccaacccccacatgagcatcccgagatcttgacccgccccatggatgcgagagcggacgttcgtgctttcttggctgagcggagcaaggtgctgcatttgagcggtcttccccacgatacgacccagtccgagctcgaaagttggtttacacagttcggcggccggccgatcgccttttggactctccggactcctgatcagcacaagcccactggcactggctttgcggtcttctcatctcacgaagaggctgcagaaagcctctgcatgaacggtcgtgcactcaacgagaaggccattgaggtctcaccttcctccagccgtgtcctcgatcgtgccgcagagatcctcaccccgttcccccctcgaagaaccgcctcgtcccggcgactggacctgccctcctggggattctccaacttcagcgccgtaccgttgt

SEQ ID NO: 3959 - DNA, 646 bp, Aspergillus oryzae
ggttggttcactcggcactgacaaggttacgtctacgactactgcgcgtttgtgttgtctgaacgctaccggagaccccccatcctcggctctcttccaaaacaaacagaaagcctctgcgacttcgacgcaatatccccttgttcgatcggttcatcactcactttactgtccatcaaggtggtacggtcgccgtacagcaaccgcccccgatcgacgctgcgcactgtcttttgccatagtcaacctcgacacacagtatccgtggaccattcggtcgctggccggcttgctaaatcacccgggcgcaaggagttataacagtccaatcgtgctggtgcaggtcagatgatgaccttggcttgataaagaacacgacgaacgaggcgacgagttcctgggcttttgacgacaaccgtgtcctcatcgcaaaaccaggtaccgcttacggattattgtctggcgcttggttatttccctggccgtcacaagtaacggtgctacggacggagggtagagcgggattgacacattttcaccatggacgatccttttgtgtcccccgccgaggcggtggctccccgcgaatcgcataggtattcgtctttcgatacgcagttgttcagcctggatgcgtcttcgccag

SEQ ID NO: 3960 - DNA, 566 bp, Aspergillus oryzae
tgcaaagctttcgtgtacacaagctcgagctcagtggttcacgacacacaaagcgatctgatcaatgtggacgaggagtggccatacattagaggggataggcagttggagtactactcagagacaaaggcggacgcagaagaactcgtcttgaagtacaaccgaacctcgccctctggcatggtgacctgtgctgttcgtccagccggtatttatggagagaaggacaccacgtttacctacaaggttctggaacactcgtccaaggcctcgccagccgttcttcgaatgcagttgggcgacaacaataatttgttcgacttcacttacgttgggaatatcgcgtatgcccacttactcgccgacttccgcttgcttgctaccaagacccgcattgagtccaaacaaagtgaaccgttagaccatgagcgggttgatggagaggcttttaacattactaacgatgccccggtctatttttgggatatgacgcgtgctgcctgggcactgactggcaaggtagtcgagccccatcaagtctgggaactccccgaggcactccttgg

SEQ ID NO: 3961 - DNA, 534 bp, Aspergillus oryzae
  modified_base (230)..(230): n is a, c, g, or t
  modified_base (506)..(506): n is a, c, g, or t
gccaacaatccggtgaccaacaacgttgtgatttccggcttacggtgcagttgggctcttcggtcaacatgcccggcattgctggcacgtctcccgcctcactagagcacttgggccggccgctattcagggcccacaagtcacttccccgaaggccaaatggcgatccaagtgtacatgtcatcaacgcgtctccatctgaccccatcgttgacacttcaaatggcggngctcacgcaacggcgcctactcttcctttaacacctcctggtgttccttcagatgaatccccaactcccaaagagctggaaatgcaaaagctcgcctcgccgcactccatgtccggaacggtgacaccttcaaaaccatcgcatccccccacccccgaaacgacgccgcctcgacttcctgccacgacctatcgacccacaatttggtggtcaattccggcaggcttcttgctcgtctcgtgcggagtctttcaaacagcatgcgaaaatgatctncgacgggtgagacccgagaacccgctca

SEQ ID NO: 3962 - DNA, 613 bp, Aspergillus oryzae
caactctcgcccagtttcggaagtagagaatcgcgcccggtcacgcctccatcctaacccttaactgccaccttcatttccatcaaccgtgaaccttcactactacactccttccgacatccaccacaactccttccaccatgttgctgcgtttcctgtccctgacaggcgcgctctgtctgagcagctgtgctgcgttgtcactgcccgagcataaggtcgaactatcggggctggatcccgagtttcgaagccgaatcatctccaatgcccgtccaacaaacgtgccgaccgctctttgttcattctcagattccgaatgttcgaaagatatcgatcttcattcccagctgacactggacttctctacggaaaatggcaccctactcgccaaccatgaccctatcttcccacccactttcccaatgcgattccatgctgtccggcattttcaatcaggccgagagacggtcgacctggcctatgaactcgatgtgcgacccatgccgtaacgccctgacgaagcactggggggccgtattccttttgaaactcagactgtttgacctccaagggcggcccgcctccgatcacctggtcacgatcaccctga

SEQ ID NO: 3963 - DNA, 631 bp, Aspergillus oryzae
gacccacgcgtccgcaacgatctaacaaacgtgacagcttcgtgtgtcggacctccagctcaggtagatgcaggccagcacatagtggccgacaattattgtactttcagaggttgagtgtctctgattgcatctattagctcaaagatggccgggaggcggctgttgtccactcgctggaccctattgctttccttggtcatcctactcggatgtcttgtcatacccggagtcgctgtaaagcatgagaatttcaaaaaatgctctcaatccggtttctgtaaacgaaacagggcatatgccgacgacgtcgccgccaagggttcagcttggagctctccatatgaacttgactcttcatccattcagttcaaggacggtcaattgcacggaacaattttgaaatcggtatccgctgaggaaaaggtcaagttgcctctcaccgtgtccttcctcgagtctggagttgcccgagtcgttattgatgaagaaaaacgcttgaacaaggaaatcgagcttcgccatgacagtcaggctcgcaaggaaagatacaatgaagcggaaaaatgggtcctggttggtggtctggaattaagcaaatctgcgaccctcgattccgaatcggagacag

SEQ ID NO: 3964 - DNA, 544 bp, Aspergillus oryzae
taattgcagcccatcacgaccggcaacattacttcgacatcttcaccacgtacttcctcgagcatacccttgcagtccttagaataccggtttcagccaactcctgtacagtctgtgagagcacgcgaatctgctagcgagaagggtagccggcgttcttctttatctgcacagtctgtcgagtctgagtactctctctggacagacactggcgacttagctgaacagctcgctaatgaagaagaccctctccgggtccgtctcggagaacctctggatcgtgagatctctagtccatctgggtcgagggcgcgagtaaaacagctaaaacgagtacattatcctaacgaaagcaatctcgtcactgagcaagccgaacccgaaaagacatcaatagagataccccgtcccccaccccggcatatttcgcgggttgaacgtcttctcgctgtcataatgtctccaagcaatcggcagacggcacaaatgcatggcttagttgggaagccactgctgtactttactagtgtctttgtatctttag

SEQ ID NO: 3965 - DNA, 522 bp, Aspergillus oryzae
ggttcaatcggctaagtggacgcttttttattaaagctagatgtccccttgctctcatgtgaggggcttgaaagtcctacgaacaaatgcgctagaccgagataccgctactgggtctaatacatagaggtgattctatctctttgcgcagcgagtctcgtcaattgtgcatttacttttgatcagtggactttctggactcagaaggtaattattcgggcctatatccccctcagaaccgcaaaaatgaagttcaccgaggggatgtggcgcctgcgcgaaggcattcgaattgactggatgaacaacgtcgagagactgcacattaataatgagaaagtggaattattgttaaataagttccagaggcatcgtggtgacacgcttaattcggcaactgttactgcaagtgtaacgtctccattagaaggaattattggcgtcaagcttgtccactgggcaggacaagtcgataacggcccccactatcagttgagctcatcgactggccacaccaagatt

SEQ ID NO: 3966 - DNA, 600 bp, Aspergillus oryzae
agaatccagaccccagttttctaccaagaatcgatctagctggccatgagctagccttctgacggccattatggttgaaacgacactatttgacttgctcgtcaagcggtcggacctccttaaccctgagaatgaccctaacatagggtcttcccggggaaatgcctcctcaacgacttccgaggctatggaaaatcttggtgtcaaagattcaaacgtctctttccgcacttgtcaccacattagttcctgccttgataatcgcagtcttttggttcggtctgttcctgatctgtcgacgaactcaacttcggtggtacgcgcctaggacacatttacctaattggcataagcatgaacggagtcctcagctaccctcaggtttccttaattggtttgggcactttctcaagatatccgatgcgcacgtccttcattcctcttccatggacggttatcttttccttcgattcctgagagtgctgtgtgctacatgcttcacggggtgcttgattacttggcccatcttgcttcctattaatgcaactggtggtgcaggtaatactcagctggatgcattgagtttcagcaacgtgaaaa

SEQ ID NO: 3967 - DNA, 459 bp, Aspergillus oryzae
gaatcccttccatggaggtcccctacggaacgaacagttgcatttgcgccccttcggcttgagaaggttcacggcctgaccgtgttcctgaagtgcggcagtgtcgtccatgcaatcctcaagaactcccaatgttggtgcatcgacggcgtatcaacatttgttctgcgcattcgccctctcacatattatcgtatcgaacttcctaatgaaactgaagaggataggaagtccgtggcagcaatgaaagaggccttgcctcaggtcctccgctatgaagtcaccccctgtccgttcaaaagggggtttacagtcgagataccataggaggccagggttccgcggcgcaaaagagcatggcgtccgaaagggcgaagggagagcgctcctatcatttctgcctacatgcttgataagagtccagcccgcgaaatcgctctgactgattctctgagtgct

SEQ ID NO: 3968 - DNA, 553 bp, Aspergillus oryzae
aaattcttctgtcactgtttgcttgtcatgcttgctttgacattctttctgacgtggttacgaaattgaagatagctgtctttcgttttcaagctcttatcgataccgacccatacatagtccgaggtgaccggtctagtcagtttgaataagattatcgacagtgctcgtggtttatcggacctggagagggacagaacgagtttggcattcttctcgtgatcccagcacatatctctgtccaccatgcacacttctcgcatattacactcagccatatccatactgactttattggcgcaagttcagcgctccgctgcttcccctctggattttgatgaggccggccttgaaaagcgctgcgcaaattcctgtggctattatggccaactctgctgcagctctggtcagacgtgtagcaccgatagcaatggccaggcagtctgtgcagattcctccggtggcagctggcaatacttcactacaactttcgtcaccacggaaaccgatgtcgcgacagttaccctctacatggagcagctatgtaggacag

SEQ ID NO: 3969 - DNA, 524 bp, Aspergillus oryzae
ctccccgatcccttttcttcccttcatacctcggagccgactttgtcagtcttcgtcaccatagtccaagatgactgacaccgcagatatcaagaatcagcttccgtacgaggtagaaaaactatccgacgagagccttgctccagacgatgccgtcctccaggcccagggtcatcggcccgagcttgcacggtcattttcctgggtgggagccattggattgtcgttcagtattgccaactcatggttaggttacggagcaacgttcggaacgcccctggcatatggaggtggcccgaccgtcctcttcggagtgatgattgcggcggtagcgcaatggatcgtgctgctaggactggcagagctgtgctctgcattaccctcttcagggggtcaatatcacttcacatatatcctcgctccaccgaagtacaagaagtttgccgcatacacagttggtattaccaatgtaatagcatggtgggttagtgcggcatcgggcatcatctatacaggcatctcgg

SEQ ID NO: 3970 - DNA, 524 bp, Aspergillus oryzae
gcccgtctcccgcttcttcctttcctcttgccctcttccaaagctctaggatgttctgctgagctactcccaaggccatctgtaccgagtgatttagacaagaccacgtatgcccttggtgtagccagagctcctagcttacgcatccctctctctccccgcctccaagtgcagtcggatacaacccaacattttcaacggcaaccccggacggtggaaaacgatcggagcaattgtgtacgcaacttgacaggtaaaagtctggtaatctatccctagaaggagaaaatccatcgttgttccaaatcgtggcctcggtaccatgtcgaacccatcgcaatccttcgagcccaatcgacgagcgacaacttatggccggcctgaggagctgcacattccgtctgggggtatgggagctgcgaatctacagcgacagtccatgtcccatgaattccctgccaccgccgataaccacgttccgtctatcaatgtccaccccacgaactctcagcccaaccaatatg

SEQ ID NO: 3971 - DNA, 566 bp, Aspergillus oryzae
caatatcataccctgggcataacctcgctcactacaacaataaacatgatcctcttgtcatacctcctcacctatcttctctgtgccctcacctgcagtgccagagctatacacaatggcagatccctaatcccaagagcaggatcccttgaacaagtcaccgacttcggcgacaaccctagcaacgttaagatgtacatctacgtacccacgaacctggcctctaatcccgggataatagttgcaattcactactgcacaggaaccgcccaagcatactaccaaggctccccttacgcgcaactagccgaaacacacggcttcatcgtcatctatcccgaaagcccttacgaaggaacatgctgggacgtcagctcccaagcaaccctcacccacaacggaggcggaaacagtaactccatcgccaacatggtaacctggacgaccaagcagtataatgccgattccagcaaggtgttcgtaacgggtactagttctggtgccatgatgaccaatgtaatggcagcaacataccccaacctcttcgccgccggagtcgcctacgc

SEQ ID NO: 3972 - DNA, 408 bp, Aspergillus oryzae
cccactgcgttcggcaattcgaccgtgcaagagaccggacgagatgtatatcaaaccattcatccttcctgcccttgcggcagttgcacaagctgccagctattctggagaccttcggcctcaaactcacttctctccaccttccaatttcatgaacgatccaaacggtctcttctatgatagcaagaggggcgtgtatcacttatactatcagtataatcctacagcgacagtagctgggaatcagcactggggtcatgccaccagccctgatctataccactggacgaatcaacctatcgccctcgctggggataagcctgaggagtatatcttttcaggctctgctgtggtggacagcaacaacacctcaggattctttcccgatcaggacgatggcgtcatagc

SEQ ID NO: 3973 - DNA, 567 bp, Aspergillus oryzae
cttttcgaatgggggagtgagctatccaatctatggtaacaagccagatacggcaagctcaggacctatgaatgaccgagtaggagcactttttagctgggatgatgtggaagagtcacaaatccgctcaagggtcggcatctcattcatatccactgagaaagctcgttcttatattcaatccgaaataccctcatgggatctcaacgacacggtgaagtcggcagtagaagaatggaaccgagacgtctttagtaaaataagggtgccccttgatagtaccaccaaccagacacacgtgcggctactatacagctccctctactttattcacttgatgccatctgatagaacaggagagaacccactttggcattcagaggagcccttttgggatgatttttacactctttgggacatcttccggtgtcaattagcttctatcacatatttcagccttcttactacgagtcaatgatccgcggccttattgatatttggagacaccaaggcttcctaccagatggacgctccggaaactggaatggactggttcagggaggctcg

SEQ ID NO: 3974 - DNA, 496 bp, Aspergillus oryzae
gttccgaggattgaccctgactagatatatccgagtctgctcccaagcgaggtttggtttcgatctttaattctgtagttctctgaccggacattcttcgagcacgtacgctcggacctggcgtcggggcagggtttttgtttgggcaaaacagcaggaccatttgcctgggttggaagaggctctgccacctgttttgtcattgcacttacttcaggcagagcagaggcttctacaagaggagataacattaccccggtggtggttgtgttggatacagccgaactttcccaagccctgccggaaaagctgctagaatcggattgtcgagggagagctgactttgactggagatcaaagttgaagtcgtccatgatataacccctggtcatctcttccaataaacgttcttcttcttcggcttcctcatccagataatccaggccaaccccgtgagagtggtcaattatagacggctgttgcagattgcgcacct

SEQ ID NO: 3975 - DNA, 416 bp, Aspergillus oryzae
gtcaattgcaacatgaagagagaggatatcacctacatgggtgccggccctgcggccctgcccaccgatgtcttagcccaagctgccgaagctctgcagaactatgagcagaccgggctgggtatcgccgaacacagccaccgcagcgagatcgcggccaacattttgaacaccatgaaggccaaccttaccagcttcctcgatgtcccctcgaactacgagatcttgatgatgcagggtggaggatcgggccaattcgatgcgacagtgtacaacatcgtttctgcttgggttgagaaacagcgccagaagatcgtgaatgagctcggtgaagccagcgaggatgacgtggtccgagagctccgtaagaaggttgagtcggagctgcgattggattacttggtcacgggaatcat

SEQ ID NO: 3976 - DNA, 468 bp, Aspergillus oryzae
atggtatcagagctctatgagaagcgtaggaagtttgcgattgaatacggtgctacgcatacctttgatccggaccaggaggatgtgacgcagagggtcatggaagtgacggatagtataggcgccgatgttatctttgatgctgctggtgtggaaaaggcattgaatggtgccatcagtgcgtgtcgcacacatggtacaatcgttaatgttgcggtgtgggagaagaaaccagctattcccgtgaacgacttgatgtacaacgaagttaattataccgggtcagcattgtacgacgaaggctccttcgaagctgttatcaaggcccttggatatggtcaattgaaaccagaaaagatgattacgtcgaagataaagttgaatgagacggtggaaaagggattcgaaaccctggtcaacgaccgcgaggaccactgcaagatcctaatcgacgtgcaggcatgatag

SEQ ID NO: 3977 - DNA, 449 bp, Aspergillus oryzae
cggacgcgtgggctacctcctccttttctcttccccgtttatttccacccttctatagaacacactcgtcataatggctgccaaccccgtccaaaatggtctcttcgtccacgaaaacactactccccccgagcaccccagcttgttgagtatgttctctctgaagggcaagaccgccatcgttactggtgctggcgccggtatcggtcttgctgtcgccaacggtcttgcggaagctggtgccaacgttgccctatggtggaacaccaacgacaagtgccctgagcgtgccgctgagatcgcctccaaatacggtgttcagaccaaggcttaccaggtcaacatcaccgatgccgaggccgtgcaaaaggccgttgaccagacggtgaaggatttcaacggccgtctagacgtcttcattgccaacgccggtatcccttggacccaag

SEQ ID NO: 3978 - DNA, 483 bp, Aspergillus oryzae
cgagaggtgctgcctttgactcttctcacgctcgctctccggccatgtccagctccattcctggcaatcgggaccttcctccctctcagtatgacctgagtacatactggggccgtgtgcgacactcggctgacatcgccgatccgaggtatggtccctccgactcttcatgactgagagccctgtctggcggcatccagcatgatgttgttcatgcgccggctttactttgactaatattcactaggatgttgttcgtctcctcgtcggggctggagagtgcgaagcagcttatttcctcgtataagcagagccacattcccgcaatgacacccgagttgtggcgtgcgaagaaggtggtcgattccacatctgcacccagacaccggcgaacctgttttccttcctttccgcatgtcctgctacgttatgaccaacctcgtcgtgacggctggcatgcttacgcccgggctgcagaccact

SEQ ID NO: 3979 - DNA, 625 bp, Aspergillus oryzae
cggacgcgtgggcggacgcgtggggcctcggattgcgcgatagacttgtcacccttctatactaaaggttcaggtcggatcaattcgtccatcatggcgcgtgtccctgtgattggacggctgttttggttcgagtatttggctctgtttgcctctttgattttggtgctgctcgaatgggtcatacatattattacattttgtcttcctgaaacggtaatcaagttcttctacgaccggtcgaaaactattttcaacctatttataactcctgaggatgaaggcaagcgcagtaaagaagaacggatcgccaccgcagtcgcacaggcctccgacttcgtagatatatgcgctctgttcggttaccagactgaggagcatattgtccagaccggcgatggctacctgctcggcctccaccgtttggcctaccggagaggcgaggagaagatgcgcgtcaaccaagggaaagggggcgttcggaagaaggtcgtcttcctccaccatgggctcatgatgtgcagtgaggtttgggtgtgtttgtccgaagaacaacggtgtcttccctttcaattagtggaaaggggctatgacgtgtggttggaacaatcgcggcaacaaatac

SEQ ID NO: 3980 - DNA, 529 bp, Aspergillus oryzae
gctatcatgtcgtgaaagctctctgcctgctttgtacatggccattccctacgagcagtacttctaccgatcccacctttatgctctgtggaatgatgatgcaggtggccatgcagctcggtctacaccgcccgtcatatgctcaggatttcagtaaattcagggtggagcttatcgaggaagaactgaaagataaagtgaggacgtgggcgatctgtaatattgttgcgcaacgggttgcgaccgggtacggtcagccaccgtccactttgtatgactggacactgtcgagcgagtcactggatccaaactacaagttgcctgaaggtatccgtgcgcgccttcagatcgaaaagttctgtgaccaggtcaccagagcactctataccaaccaccgggaccctgttgggctgtgtaatgaccaggaacgatcgacgctgatctcatttttctctcgggattccgatgaactcgagtcgcagctgaaggctcagaatgattgcattacccgacctttatcttcgcgcgg

SEQ ID NO: 3981 - DNA, 399 bp, Aspergillus oryzae
tgaaatgatggcacgccttgattgagttgaggtgtgcgatacttacgaagtacacggttgttcatagtacggtcacatgcacgtgtgcgcgagaacctgatgctatgctgtacgagttcactttgatgcaccaggcggttataaactgggagaggtcatttcagttgtagaccctattccattggcgagacatctgggagctggtttctctgcggcgggggtgatgactttcaggcaatttcaaaggtaaacaggaaaagaaaaagacaaaaaaattcacagaaagaaacaaggacaaaatgtcgaaagagagtgtaccaccctctgtcatagctggaaaagttcttttttttttcttttttcttttttttattgaaaaagaaaaaaaaaaaggggggg

SEQ ID NO: 3982 - DNA, 568 bp, Aspergillus oryzae
tcgacccacgcgtccgcaaacttccttcatatacttaccgcgaccgttcaagtaggtacaagtaccgtttgtttactccagtctcaccccgccccctaatcaagcatggagacagccttttggcacaactgaggatctacgtcgctagcaccatctcttcaactttctcctgtagcggtatttttccccctcactgactgtgatatatttcttcagcctatacctgaacgataatcataataacctgcctctcgacttttttaaccacgattttctctccgccccgccaatcccccctcacgtgcggggtctcatcggcgtcaagcctactgctttagctcgccgcacatttaatttttcatgattcaaggcggtcattctattcgggcacaatgagtttcactaatatgctcaacaagctgtcgggacagcccgagagttatgagaaaaagtacggcctttcccatgtgttttatgattccttgacatgccattgggcagttagtaaccagtgagggcgtgctctagacaactgtccaaatttgggagaacacttggtgctggaacg

SEQ ID NO: 3983 - DNA, 535 bp, Aspergillus oryzae
aaagcacaatgtccaaactagcaaaccgcgccgactgggccgacgacgaggagttcgatgacccctccgcgctccccgcgcaacaagtcacaacgaacaaagatggcaccaagaccgttgtgtcgtaccgcttcaacgatgagggcaagaaggtgaaggtcacccgccggatcaagaccaccgtcgttcgcgaacatgtcaacccccaggttgcggagcggaggtcctgggccaagttcggtctcgagaagggccacgctcccggaccctcgttcgatactacctccgtcggtgagaacatcgctttcagacccagcatcaactggaaggcacaagccgcggaggcggagaagaacggcggcgagaagggcagcatgaaggatcagctcaaggacaagaaggtcaagtgtcgtatttgcagcggagagcactttacagcccgctgtccgttcaaggataccatggcgcccgtcgacgagcccaccgctggcggcgctggtgaagatgatgaagcagccgtcggttgcttgtccgc

SEQ ID NO: 3984 - DNA, 631 bp, Aspergillus oryzae
gagattttctcaagcaaattacacctgcacgttgatttatataccatctcgcaatgcctctagacaccatatatctaacccgacatggcgtagcatcgtctaaattggacaatcgactataaaacaggcgaatacaagtcccaattcccaacaccgaccggcaaccccgcagacccaaccctaacctcgcacggtgtgcgccaatcgctagagctcgcagagcacctaatcagcccagagttctatccgaaaccctttcggatatactcaagcccattctaccggtgtctgcagacgatccagccatctgttgaggccctgaaggagagacataactccacgccttcgagtgaaacaggtatagaccgaaatgcggacctggatgtgaggatcgaaaatggagtcggagagtggttcggtccaacctctttctttgatcacccttcccctgcatcgcccggtactctcaagacccattttccaacactccttgcctcggaccctgaagccaattacaacccgcatctcctaccctctacccgcggtgaaacgattgcgcaacttcacgacagagtagctacggcattggcggggattattgcggatgttgatgcagaaatcaatgcattgg

SEQ ID NO: 3985 - DNA, 569 bp, Aspergillus oryzae
cacagctgtcacaaaatttgcttcaattaacctcgctttatttcccacttcatcgcatcatggaatccgagtatacatccgaggaagattcaggtcataagcctacagttgtaactaggacgacgaacgcgctggtcaagtacagtcgtccgttcttctcgaaacaagcccagaaggcatatttgggaaccttgctatttgttggcgctggcctattcatgctgtttgggtccgcccttgcctatgggattttctactacagattcgttccccaagtcggcgttggacgcgtggtacatctacaattcgggtcagtaaaggcttgatcggcgaatttcaggaaacaatatgtatcctttggccttagatacctgtttgctgatcgtacttgctagtagtgatgggcatccttggggaaccgcctccctcggctccgaattggtatcccttcagccatacgacataaacgtggaaattgagttgcctcgtactccgtcaaaccttgccgctgggaatttcatgctcgatctgaccctcctttcccatccttcgacgtctgccctgacggg

SEQ ID NO: 3986 - DNA, 349 bp, Aspergillus oryzae
  modified_base (258)..(258): n is a, c, g, or t
  modified_base (268)..(268): n is a, c, g, or t
gattgatttgtattagattcgcaccccttttgtcctgtcctctttttgtggtagacgtcctttccctcattctttgttttgtctgggtggtcggtgtttcttatcaggagttacttgtttaagcggaccttatattttttttttgtttcccttgcctacatcattcaaacctccccataatttgtctgttacgggttcccgctcgagaacagacggacacttcgctgcacactccatcgacgctctcacatttgtccnttgctgttcnctggaattgtgtctcagggtaggtgaaaggggccctcttgtgtcagtatatagtcgatctgcggcaactccgattatcctg

SEQ ID NO: 3987 - DNA, 565 bp, Aspergillus oryzae
ctctctctctccttttcatcaactcaacgtcgcgtctctcatccgaacgtggcatataattcactttaatacttcttttctactccactatctaccacttatcccgcttattacgcctgtcagagcaactgtcttgaaatcagacttttacctgccccttgctgttgcgaacctctcttcggtgacgcaacgactgacacgctcgaactcttgggaatcttttcgagaatcgctagtatcgcccatatccatatatctttcacctaacacaatgtctggaaagttggacaagtctcttgacgagatcctcgtcaaccgtcgtcagggcgctcgtcgccgcaatcgtcgttcaacccagtccaaggctgccccggcagctgttggaggagtcaagaagagcacgaaggctgcgaagccctccggcaaggctgctcaagctggacaccctatgtcaactgaaagcaaaatcatggtcagcggcttgccttccgatgtgaatgaggccaatatcaaggaatacttctctaaatccgcaggacccgtcaagcgagtcatgcttacttac

SEQ ID NO: 3988 - DNA, 523 bp, Aspergillus oryzae
ccttgccacatatgctcctgccattgacaagttcttcgagacgcgttggttccaggatacggctttgactcaccttttggccaatgcccagcttatggccgagtattcggcgttaatcgaggcttttaacgatcagaacctcagtgatccgaatgtcatcgcacggctagaaagctttgaagcgtccgtggtttggagttctatgacattgtgtcgtcatgttatgaatgtatcgaatggaagtcatggccaggattatgatttactagccgcttcgaaacgactggatgttattgagtccatgattacaggcgaacatctggactcgaatcccttatcccagtttcctcccagggacccgcccacaaatccccccggtctctcagatcagttagcgcaacgatcgctggatttttggtgcgcaattggccactttcttactcttcatgataacgaggctagttcagccaaagagattgacgatactcttggccgttgccgcacgctgttggatacgtttgaa

SEQ ID NO: 3989 - DNA, 619 bp, Aspergillus oryzae
taaatctgaactcgattatgcatcacctggcggagggtcatcggctaattgtgcgcgcctggcattaggtgcccatcccacctgcacgagttgtctgcccccgactggggtggtaacttttcattccgcagatctaagtcgaccaagaattatcgctttgtttatgctctccccgttacaccgaccaccaccaaatcaacatgagttttaaggttcctttcgactcgagtccaccctcgacccctggaaaatctcgcagcttgttcagtttatctgaaacccctgcgggtgctccgccgtcggcatccaattcctttactccgcaaggcgctcctccgtccaccgtatttggcagctcccagatgagctctagatcacagtttgactcccccggttctctctttacaaaatccggaaacatcaatcccaatgacagcatattcgggtcctcgatcgcatccttcgattatccagcaccacggggaaggaaagcagctccagccaagtcttttgcgccctctcaatcacttttcagcgtgacaaatgatagccggtttggtgactcgaccaattttgggcccgtcagatagtttgacctcgtcgcaaatggaagaaggcg

SEQ ID NO: 3990 - DNA, 541 bp, Aspergillus oryzae
  modified_base (38)..(38): n is a, c, g, or t
aggtggtgcacgccgaccggcttttccggaaccacttngtgcctacatctggggttcggaacaagtcggagaacccacaagaggcattttacacactccagagtccacggttaccaacgctgcctcagcccggtcttcagccccgacatctcccgtcaaactgtggagaagcatatcggagtcgaagactgaaacgccttctggacttactttgctgtgatcatggctcctgctgaaaacattaatataccccgtgcttccccagtagaaccaggtcctctctacacagatttcttccaacaacaagtcgcaaagcagcgcaacaataactatcactccacatcattaagaaacatggttgccacatctgtgaatcgcactgctctgcaccctggtggtgtccagcctggcaagggtcacactgagctggaggaagagcttcacgagcacgctcacattgattacgagcgtgtcgctattatcgctaaccctgccgtccctgctctttacgaagatgctcttgtctatgagactggtactg

SEQ ID NO: 3991 - DNA, 568 bp, Aspergillus oryzae
tcgacccacgcgtccgaaatctgcccttagcctcgtataccacgcgggatgctgggaacccagcgagattattgcaatactgacttcctcctcctatccgccctaaacacacctaagcaccattaagcatcctgtgaacgtattactattcttggttgattgtacttccaacaacagtagaccgacgatgctcaaaagactctcctggacacctacattccctcaaacaagtacatcgaattcctcccctccaccacggacgcggaggcaagacgcggctggcaattatctacggcgagaaaagctacaagccctcctggagcgactgttccctgatcacccagggttgaactttcacattcgactcgatgacgaaatttggtcgttcgatgcaccacgagaggtgacccgtcaagagctgagagaagcgtctgattgatcttccacactctgagtggtcgggatgaagtggcagtgactggtcagggtgagagttctggaagacagcgcttggccttctttgagaaaggattggcggtgcagggcgcttggccatcgtgttgctgag

SEQ ID NO: 3992 - DNA, 566 bp, Aspergillus oryzae
gacgtcgtataccatttatattactaagagaaccacttggactcgctgttaaaagtcatttaacctttatttcgttttcattaccccaccggtactctctaaacgggctgtttcttatacatctttgacgttggttcctctcgatgttgcaccactgcacctatcggctgggaggactgtgaatttcttcttcttcttcttcttcttcttcttcttcttctcctccttagtttttgaccttttgacatcgccgattaagaggacttcgtgctctctgtgagggcatggctcatacagagaggaacaatggcgaagtgaggcaggaggcaggagagtgacggatgatggaactggtatcgagggcgacctgttctgagtagcctgcattcagcgactcccccaatctcggtaccccgacatgatgatcatcctaaggaagatgttagcttcccagaaagacctgaggatgtacaatcatctccgcttgatagcttccttcatagccgccgccgttccgtcagcttcgacccgaatatcacccttcgactccggacagccgcaggcgc

SEQ ID NO: 3993 - DNA, 473 bp, Aspergillus oryzae
  modified_base (311)..(312): n is a, c, g, or t
ctcacgctgtccatatcgcacttttcgctggcgtcgagacctgagtgattggggttttcttcccttttgttttttgctttcctatctcttttctttcctatttctttttgcatccatttcctccagctctctcgtgttctaaccccccgaatcttaagcttttttcctcctgtttaacttgttgggaagaaagccgtgttttgagtcgtctggattctagcgcttcttcatccgtcacgaagctgttgcctcaccctttctaatttcttttctttttcctgtcgttatttttgacgactgcgcttccttgnntgctccactaatttccttttcttttccttctcccttttttcccttttttccccttccctgttttgtccttttttgttcttctgggcgttagatccccgcgtcgctttccgcctttcgaccttaaaccaattcggtgactgcgtaacgttctgcatcgcccg

SEQ ID NO: 3994 - DNA, 614 bp, Aspergillus oryzae
tcgacccacgcgtccgcacgctttcggtggtttcgtccacggtcgccctcactctccggcctatccaccatatttattacctttctagctgttagattaaatattttttaaaccagctgggaattgaggccgtccaccatgacgctgtttatcctcaccgaaaccagcgcgggttatgccctgctcaaggccaaagacaagaagcttttgaagagagatgatctggctacggaggctgcgacggcagagggtgtttcgaaccttgtgaaattgaagagtttccagaagttcgacagcgctgctacagccctggaggaagttgcttctcttgttgagggcaaggtcacccctcgtcttgccagccttcttgacgaggtcaaggatgagaagaaggtctctttggccgttgcggacccgaagcttggaaatgccattggcaaacttcccggtctcgatatccaacttatcgccgactcgaccaccactgatatctaccgtgctatccgtgaacatctccccacattaatcccaggcctcgcccctcaggacatgtccaccatgtctctgggtctttcccactcccttgccagacataagctgaagttctctcccga

SEQ ID NO: 3995 - DNA, 534 bp, Aspergillus oryzae
tctcgctccatttaattatctggaatcccatctgagaccctcccattgcctacaaactcacctgcgcaatcctactacccgatcgcaaccttcccccgccaacgccctttatacatccggctattccacgctcccctgatcagtcactcgcaacaatgagtcgctacgtatctcacggccgcggaggcgcaggcaatatcttctccggcgaaagccataccacgccgaaagatctcgtcacacccacgatcaaacaagacatttataccaccggtcgcggcggctcaggaaatatggtcgtaaacgatccccagcgcccagagattgcgcgcgagagtcaggacgtagaagcgccgccattgcgtgtcgaggaggctccccatcacactggacggggtggcgccgcaaatgcgtatattccatcccccgaagaagagacgaaggctcgtgaggaagaggaggaacaattgcgccgaattcgcactgcgtctagagaccgactgaaggatgccgagcgtgctgccgaaaagcgca

SEQ ID NO: 3996 - DNA, 591 bp, Aspergillus oryzae
ctcccctctccttaacacataccaacacccctctccttcctagtgataccccatttctcgtttattttgtatcctctctcaccatggctgaccttttcaccaccatcgagaccccctcggccaaatacgagcagcccttgggcctgttcatcaacaatgagttcgtcaaggctaagagtggccgcacttttgagaccatcaaccccaccaacgagaagccgattgtagccgtccaggaggcggacgagaatgatgtcgaagatgccgtcaaggcagcacgcgccgccttcgagggtgagtggagcaaggtcactccctccgaacgtggccgcctcctcgtcaagctggccgacctcttcgagcgtgatagcgacatcctggctgctattgaagcccttgacaacggcaaggccttcaccatggctaagggcgatgttgccgccgccgccggctgccttcgctactacggtggctgggccgataagattcacggccagaccattgacaccaaccctgagtctcttacctacacccgccacgagcccattggtgtctgtggtcagatcatcccctggaacttccctcttctga

SEQ ID NO: 3997 - DNA, 583 bp, Aspergillus oryzae
  modified_base (376)..(376): n is a, c, g, or t
cacaaaagtccgttaccgaagtgccacggtctatactccctcgcttgacatggaacggctcctctgctcggactactgttcctcctccccagagcaacattttatcagcaaggcaacaacagagaacgctacgcatacatagctggaactctgccgggcgacaactacatactttgaccttttctcctcactcttctacatttgtttccgcaacagtccgagagccgaccttatcctcaatatctagacgattaccagaatcaacgagtcgtccaaccagtcgaccggcagcacccacaggtaatcctatccgatataatggtgtttacgtcgctgcatttaaaccagctcggcgcgctttccatgcctccgccanccaacaaagggaccaccatttcgatacgttaaagttcgttcagcggttgaaagaggaaggtttcagtgaggaacaggctgtcgcgatgatgcgagtcctaaatgatgttatccaagagtctattcagaatttaacccggacaatggtcctcagagaagacaccgaaagatcgacgtatactcagaaagtcgatttcgccaaaccttc

SEQ ID NO: 3998 - DNA, 445 bp, Aspergillus oryzae
gtttgtcttatctagaactcctatcttcgtcccgagtgtatcctacaaccttcctaccaaaagttcactccttcacaaaccatgccttataatactcgtcgaaagtcactgtcacttccgtcgctagggattcatctccctagtgcctcccgccgatccccgtcggcctcgaaatcgccacacgcgaccgacgagcaactgcctccctccaagaaagtaaagaggtcgcacgactcgtcttcactatctccagagcctacctcggtgtcgatatcgactacgaaggagcagttgcctgtacgttcgcttggtcggcgcggtgcgtttgaacaaacgccacccccatcgcctattgatggaaatgtcgcgcccaagatcgatacggagggtatcaacgatgatattgtggtcggcgtgatcgagcagttggagaagacaggcaatc

SEQ ID NO: 3999 - DNA, 433 bp, Aspergillus oryzae
gcactctagagatgcctagggaagatgcgtcccctccctcgacggcatcagatggggacgaaaacgagtctttatggcggaagatcacccgcaaagtcatccgggatctcatcggtatcgacgactctgtgctgtttgccctctttggggaatccctaccagagagtgagagaggggcatctgctgggacagatgacacccttcgtatgaatgaaacccttaacttggagctggactctgtccccgacgaccacgacaattggcaaaccaagctgcttcagcgcattgcacgtgaattgggaatacttgttaaccaactgtgtgaacacccgggagcctttacatcgtatctcaacatgtcggacgagatccccaaccaatacgctggcatgcctctcggaccattaccagaagagagtgactcacagtctcg

SEQ ID NO: 4000 - DNA, 503 bp, Aspergillus oryzae
gcgcaacagtgtcttcatgtcggttgtgggtggtggttctttgctgatcggcacaatcccggcggtcatgtacatggagaaattcggtcggcgttactgggccaataccatgctgccgtgtttctttattggtcttgttttggttggcgtgggttatcaaatcaatcccgaacgaaacccagtggccgcccagggcgtctacctcaccggcatcattctctacatgggtttctttggctcatacgcttgtctgacctgggttatcccatccgaggtgttccccacctaccttcgtagttatggtatgactactgccgacgccaaccttttcctatgctcgttcatcgtcacatacaacttcaccgctatgatgaaatctatgacccgtatcggtctcacattgggcttctacggtggcatcgccgcaatcggctgggtctaccaggtcatcttcatgccagaaccgaagaacaagtctctggaagagatcgacgagctgttct

SEQ ID NO: 4001 - DNA, 515 bp, Aspergillus oryzae
gacccacgcgtccgctttaaaccataccttttacctgctcacttgcggcggatttgctaacgtctctgtctttctccatcttgtcccgatctcttccggagtgtttcgctgtctgcgacagaatcaaacatgagtttgaagggctttcagaagagcattgtccgagcgccgcaacagttcaaggccaaatttaacattggcgaacacacgaaggatatagtctatagtgatgcggagcggcgttttcaggaactcgaaacggagactaaaaaactgcacgatgaatcaaagaagtactttgatgccatcaatggcatgctaaaccaccaaatcgaattctccaaggccatgacagaactctacaagccaatctccggccgcgcatcagatccaagcacgtatacgattgaaggcaaccccgaaggcatccggccttgtgaagaatacgaaacgattgtacgcgaacttcagggaatcgctcgcgcccgagctggaaatgattgaaagccgcatca

SEQ ID NO: 4002 - DNA, 475 bp, Aspergillus oryzae
ctaactaccaacctcctcgttgtttattagtttgccccaagccctcttatcctgcctgtgaggatgtggttttcaagcaccgcgtggttgttaccattggcacttgcaggaagcgtccaggcgctgcccaaaggtgccaaaataggaacaacagcgtcccacgttaggaaaggcggagtgacttacaacgtctttgaacatgctgctactggtgctaggttggaatatgtcaacaactccggtatttgtgagactacgaaaggcgtgaatcagtacagtggctacttaagtgtaggagagaaccagaacatgttcttttggctcttcgagagtcgcaacaacccgcaacaggcgccgctctctgcctggttcaacggcggccccggctgctcttccatgatcggattgttccaggagcatggaccctgccacttcgtcaacggcgaggatactccatccttgaacgaacatagct

SEQ ID NO: 4003 - DNA, 619 bp, Aspergillus oryzae
aggacccttgggtccatcagtccacacacattccatgtcgcacaaacaagccgcctcgtgcatcacctcgaaccagcccccggtattcgtttctccagtcgccagaaccctggacaacctacgtcagctgtagatgtacatctcaactccgaggatgagctctatgcccacagggccggggtgaatgtgctggcgatagaccaatatgacggacgatttatggtctccgggggcgcagacccctcaattcacttctgggatctagaaaccagaggctcagagctcggacatgtccacagatccgtcgcctcggtcacaaaatcgtcgcataaagacgctcatacgcacgccatcacctccgtatcgatatatcccttcgacccagtcccctccaccatactgacaacatcgcgcgatggcactctcaaactatcagccctagaaccagacaccatcaccccagttcatacacttaaacttgactgcacaccatatgcccattccatgtcatcacaccccgcatcacctctcctcatcgcggtcggcacatccgagagcccagtacgattactcgatctccgctcgggtctctctacccatggcctaccaggccattcct

SEQ ID NO: 4004 - DNA, 632 bp, Aspergillus oryzae
gtcaagctgttttccttcgcctctcgacgacttcccttttcctcccttcggtcctcactcggattgacagccgctgctgcgtcgtctctgcaccagaaatcctctccgtctgcttcagtcctaacgaataatctttcgacgcccttgcgcgtcagtcaaagttcagcaaccaggatggtgcacagcaaagtcgttatcattggctccggccccgccgcacacaccgccgcgatctatctctcgcgtgcggagctcaagcctgtcctttatgagggtatgctggctaacggcaccgctgctggcggtcagctcaccaccaccaccgacatcgagaacttccccggcttccctgatggtatcggtggtacagagctgatggagaacatgcgcaagcagtccgtccggttcggaactgaggttatcactgagactatctcgagagtggatttctcgcagaggccgttcaagctgtggacggagtggaacgatggtcctgacaatgagcccgcccgcactgccgatgccatcatcatcgccactggtgccaatgcccgtcgtcttgacctgcccggtgagaccaagtactggcagaacggaatcagcgcctgtgccgtctgtgacggtgccgtgcc

SEQ ID NO: 4005 - DNA, 507 bp, Aspergillus oryzae
gtgccaaggattgtgcacaactgtgccagacagctggctccagctgtgcgggaagttcatggttcatgaaaggacgcaagtgtctcctcagcggtagcaatagtgaggcaaagcgcgagttcacggtttacatggagaaggttggggaggccagtgaccctttcggtgaagacgaggatgatccgtttggcggtgatgaaccagaagaagatgatccgtttggcggtgatgaaccagaagaagatgatccatttggcgccgatgagccagaggaagatgacccatttggtgccgacgagccagaggtagatgacccatttggtgccgatgaaccggaagaggatgatccatttggtgccgatgagccagaggaagatgacccatttggtgccgagagccggaggataacgatacagcctgtggatgcgataattgcgaagtagatgtggcatgcggataccctgacgaagcttcacccgctctgaagggtaaagcatacaaggtctt

SEQ ID NO: 4006 - DNA, 504 bp, Aspergillus oryzae
gtggctcctatgcacagacccttcttgcataacagtttcaattatgatcatttccgagccatgaatcaacagcagccgggtgcgcatatgcaaaatgccggctcccatttcgaacagaactacatgaataccaagggacgacccactctgcagacaatggaccgttccgctgatgtccgtagccctatgacacccaagactcctgccttaggcggcttaactcttggaacaccggagtcaggcagtttcccaaccgctcagcccatcaggaccggattgcaccctcgacaccaaaagactcttcgaaccagtgggacggtacacccggaagtgctcattcatttggagtggaatctcccatctcatctcctcccaatccccaccacgttggaatctctgaaatcctgaaatcgggcaagcatgcttccttgccggccaaggttgatacacacatgcccggaactgcccaggatctggagtcacaggaagccaagcgacgtcgtc

SEQ ID NO: 4007 - DNA, 460 bp, Aspergillus oryzae
  modified_base (188)..(190): n is a, c, g, or t
  modified_base (286)..(286): n is a, c, g, or t
acgcgtccgctataaggctgtgccaactcactagctggtatagcatatcgtgcacatactacctatctatcaatacagtaattgaagtttatcgtgggcaccaaattgtactcgaagtcgactaaaagagtcaattcacaaaatcccagagaatgtcttcagcagaagagtcgccggcccagcgagcnnnctcgtctccgacgcgagcgccgtgaagctaaaatcaaagagggcggtgcagcgcgtttggataagattactagtctcagcggacgcacacccgcangcacgcgtgaagaggtctcgccatcaccatcgccatctccccagtctcctgcacagatttcatccacggaaaggcctcaaccgacaccgggaccagcaccaacatcagcatcagcatcagtaccagcaccagcaccagcatcagcaccagcccaaccaatgtcgaaccccgaac

SEQ ID NO: 4008 - DNA, 384 bp, Aspergillus oryzae
aagccgaccatcattcattactggaccccaacattggaccagaatcgccaatcgctcccattctccataacgaggccgaaaaccgtctggatcttgatttttacattgtggattctggatttattgcccccctgcatagtgaggatgaattgccgttaacggtattttatgtcgggggcaatgcggtggaccaggctccattcgatccgagcgaggttcagaaccttttccagagaatttaaggtggctgaggactagcatattgatgcgcgagaaagcatggttgttatggataagaatcattatttattatgaaggttgaacgtttatatcgttgttggaattcggcatagagttgagggatattgtaggagagaatacctt

SEQ ID NO: 4009 - DNA, 576 bp, Aspergillus oryzae
  modified_base (194)..(194): n is a, c, g, or t
ttgtgttgaagacggatcctcgtccagaggccgatctgacgtttggattttcttcaaaaagttttgaattttgtgtagatttcttttctgtacttttcatttctcctttgtggtattttcaattttccaccaggctccgacgacgccgctttagtggcttaccgacttagcgcaaaggttgaagcgaaagaacncactccggcgagagacgcactgcatttaagatcgccctatataccagagaatgcctcattccgaacctaccaccatggctaccgctgtttccaagaccccatctaccgtccctcccaccccagaggagatctcgtccctttttaacaccatctttaccgcagagacctctcagcagtctctcgatgcatcctacgccttgaccaatttgttgattcaaagtgtcggctgtctcggctttcaaaaatacgacgtcttgtcgcaagtcaagaaggcggcgagcgataagaagaatggcgcccgccgtgagagtgccatgctgatcatcggcgctctgttcgaacgtttcccccgcgaacaccctctgagcgaagtcatattcct

SEQ ID NO: 4010 - DNA, 505 bp, Aspergillus oryzae
cggagactgacagtatattgtctccaggagccctttcctctggctcctctcgtctctccagcggtaacctgaagcgccttaccattgaccgcagtttgctggaacgatctattctcacggcctgccagtacacctgccgctgcaatcacgaatggcgaggattctgcacaaccgacggataaagccaagaagaaggtcagctttgaatctacctcggatactaccacaggaggtgaaattgtgccggtacagtctcaaacctccgagcccacaccggaagagctgggtttcctccgctcgattcgcaagagcaacaccgtcaacgggctcaatgggattaaagaaaatggcacacggcccgagatggaatctgtccgtgacaaggatcttccggctgtccctgaaggctctgagcagaccacagtcactgatggtcaatcgcggctggctttcgtccctagcggcgacccacagcctggcgaatattggatgaagcccagcaggg

SEQ ID NO: 4011 - DNA, 626 bp, Aspergillus oryzae
gcatgatgcagtttagcctctagatcgaaatatctccgtatctctctcgcattttattatctccgaaatacagataccaccccgttccatatcgcaccgatccatcacttgacaattttctcccacccatactacctcctaccatctagaatatcccgctccggcgtcatggattcccccgccgtccccgctccgttagatccgcaagaacaaccaattctcgaccgtctgctgcgcacccgcgacgctctcctgctcatcaagcaggacaagtcctcctatatcaagtctcgcgacgtgcttccgctatacgaggaggtggtctctgaggtggaaaagctcaatgccgtccggaaggggaaagaccgccggctgccacataaccgacttgactatgtactggatgattgctttcaattgatctcgttgctctttttgacggttggtcggaacaatgaggcacctgcagtgtattctttggcaactacagttcagcgacttcttgaccatttggaagaggctggcttctacagttccaaagatcttagctccatcacaaagactctcgcacatgttcacgaaaccatcgatcgctgtcgcaatgtatactcgcccggtttattgga

SEQ ID NO: 4012 - DNA, 631 bp, Aspergillus oryzae
gacccacgcgtccgcacactttcatccttacttggatacctcctttactccttcacaatggctcaggaacgtgctgcccccattcgtctcggctctactgcccccaacttcgacgctgacacctccaacggtcccatctccttccatgactacattggcaacagctgggccattcttttctctcaccccgatgacttcacccccatctgcaccactgagttgggcgcttttgccaagctcgagcccgagttcactgctcgtggagtcaagctgatcggtctgagcgccaacggcaccgactcccacaagctctggatcaaggatatcgatgaggttaccggctccaagctcaccttccccatcattgccgaccccgagcgcaaggtcgcctatgcctatgacatggttgactaccaggacaccaccaacgttgactccaagggtctcgctctgaccatccgctctgtcttcatcatcgaccccaacaagaagatccgtctcatcatgtcctaccctgcctctaccggccgtaacaccgctgaggttctccgtgttgtcaatgtcttcagaccactgacaagcacggcgtcaccacccccatcaactggctccccggtgatgatgttgtcat

SEQ ID NO: 4013 - DNA, 646 bp, Aspergillus oryzae
cggacttcatactttgtgtacaccgcgggatacgcgcaatgcgtcatgcagccacaatcacaatattgctgaatagttgctgacgaataagggcttccgaaagaaagtgtcctggttcaagccattgcttgaattactattgctccggcaaagacgcggccagttatttaatagtcagcgtctgccttttacacttttgcatctggatgatgtgatatctcatacctaactcgtcttctactgaatccatctatcctgttccaagaagatctcctctaataagctatcaattaaatttcatacagccattcaaagatataccatcctagatataccacccatacagtgaaagcaacaatggccaccaagccattccagcatcttcttcatgataaaaaacacgtcatccacgcccccgaagaaacctccaaagtcaaagtcgaaaactgcattggattcgtcaaagtcccagtcggaatcgcgggaccattactggtcgacggtcccaatgccacaaatgagcaagtctacgcaaccctagctacaaccgaggctactctagtcgctagctgtgcccgaggctgcaaggctttcaacgcctgtggaggtctccagttcgacatcctcggagagggcatgtcttcgg

SEQ ID NO: 4014 - DNA, 576 bp, Aspergillus oryzae
gctggtggcttcgtgccgcttagacaaaatctcatgtgatcgtctagcattcagttgagttgattctgttacactaactttttgagttctatttgcggtttactatccgggccttaccatgcatgttcattatgacgcatacttgatcggtgttttacaatggtcgattttgtgggagttctgttcttgttctaatgggcgctgtatttcttctttcttttcgttttcatcatatctctttcctatgagagcattcgatacacgctgttacgacaatacgcgaagtgatatccgagcatatcctacgaggtggagttgcagcactctaaccggtcagtcgggttgtacaccggttttgtgcgactcgatgtcattccggtcatccttactgtgtgacaacgctggctcttcctggtgtctgccacggacgactgcttcctgtgtcatgcaacgtgcggtttaccttgtgttatttccattttgactgcgattctgcccggctgtgatgattgaaatgctatttccatgtattttgcaccatgttccacgaatgattgaaaccaccggaaaaaaaaa

SEQ ID NO: 4015 - DNA, 641 bp, Aspergillus oryzae
cggacgcgtgggggaatcctatccctcaatactcagatacttcatgatgctgtgcttgcttgtgatgtcgatggaatttgtccggttgcagcaattttccgattatagacgaccttctctggtcacgctctacactccctagtagggaaccccccggctgaaacagcgccttcgagggctagatatccttaaccgtcgagagatagtacatacacacctaaaactgctgatctctcaacttaacgctttttcacttgggactattggtgtcgtgatgtctaacgactggggaagcccttacggcttctcgtttcgaaggaatggttcgcaacaaagtacagaaaccgattgcggtcaaacgtggcaaccttttcacgcatgttgtccaacggcaaccactgtcccacccaaagcaatgtcaactgttattctagcgacgcagactgcggcgatctcttcaagcaacagccacattgtgcaaataacataggcaacctcctgaaagcaaacatctacttctgttgccctcctgagacagtgggttttccagaaaacaaaatggatcggtgggttgtgcagagtctgtagaggatgtgggagaagagtacaacctgctagcgactctttctgctggccgagtt

SEQ ID NO: 4016 - DNA, 645 bp, Aspergillus oryzae
tcgacccacgcgtccggcacttcttccagagcaacgactttgttcgcttcttctctctcccaaaccctttacctttcgttgtgatacccgagctcttcaagcctcgtgctctgagagctcttgttttctgttaagatacccccttaagatacccaaacggacgtgacacttcattacgaagctatttcagcttccattaacaacttttaatttcatctctactattataattaccatttaatccctacaacatgtccgacgttcagaagcccgtcgaggagactcccgctcccgtccccgccgctgcgcctgtcaccgaagtgcctgctgagactcccgcgacggagactcccgctactgaggcacccaaggaaacccccgcagaggatactgaggctactcctgctgctgcagaggagaagaaggatgaggctcccgctgagcaacctaaggaggaggccaaggaggaggtgactcccgcatcggagggtgtcctcggtcacaaggcccccggtctcgtcaagagcctgcgcttctccaagcgcttcttctacttcagcgaggacgctgtcgaggctaagcagctgtctgctttccaccagaatgagaaggccgctgttgccaaccccatcgctgcctggggtt

SEQ ID NO: 4017 - DNA, 621 bp, Aspergillus oryzae
cggatccatcttttctactgggccaggggatatgctaacggcacccaatcatcagtgggagaacgcagccatcgagtcaattattgcatctcatgcctttccgcgctagtggcttcttttcatgattgactaagccatacctttccaccaatatttttatttttattttttgcccttttttttgcatttttctttgcttttttacacagtatagtaataatccactgttcggatcttgtgtggccattcctgacaaatggctttctttcaatcatatttcctcagtatttgtgatttatacttcaataaatactggacccgtcacggatctctccactcaggtgaaatatttcaaacattgtcctgggatttcagcttcaatttggtcaaacatcctgcgattcactgccatatcttccactgtgggatttgaaagggctcgcatgttgaggtgaagcctcgcctgtggatactgccttacaagccacggccaccgccgcaaacaccaaagggtagggtaggtagagggcaaatcccgggagataacgaggaaaagccagcgaatattctgcacattactggatttgttttccagttagctgtctgtccgccactgtacag

SEQ ID NO: 4018 - DNA, 457 bp, Aspergillus oryzae
cggacgcgtggggcatattatacaaaatggcctctcagaaacctacctaccgcatcgcatccattccgggagacgggataggcatcgaagtcgtcgacgctgccatccaggtagtagaaaagctcgccaagacccttggaacattcaatattgatttcactcacataccatggggaactgcgtactacaaggaacacggtcgatatgtgtccgaagattgtttagacacgctgcgcaagttcgacgctgggctgtttggtgccgtgggtgccccaggtcagtactagagtcgccgacgttgcactcggatccgtatgctgatacgcgagacagatgttccggaccacatctccctctggggtctcttattagcacttcgcgggccgctgcagctatatgctaacgtccgtcccgtgcgcacattcccgggcaccaaatgccctctcaacaccgcgac

SEQ ID NO: 4019 - DNA, 551 bp, Aspergillus oryzae
cgttgctccaattcccaaccaaagatgtctaccggacaggtatctgccctcttggcacccgtcgtcgccctcaatatctggaccttcgtcatggaggcctggatgtacaagacacggatcccaatatactccaagatgaatatgaaaaataccatcacgaagcgcgaactcgatgcgatgacgccggctagtgtccgatggaaggcagacaattacaaccatctcatggaacagccaacccagttttacgcgatagccctcgtattggcactggccggccaggatgacaagacgaacattctcctggcatggtcctatgtggccattcgtgttgcgcacagcctggtgcactctacgagcaaccatatcatgagccggttttccatcttcgtggtttcttcggtgatcttggcggttatgactgggccgggctgcgttgcttgttttctgagcgttggggtaggagacatgtacaggatctgtgacttatagggggcagtctgagagggaataatgggcctttagggaacatgtacagtgatagtgttctg

SEQ ID NO: 4020 - DNA, 404 bp, Aspergillus oryzae
cggacgcgtgggcggacgcgtgggcagaaagtacatagactcaaaccagagtcttcacgtaatgaatctaaggaagcgtactttattggtctcgcgcgcaaacaacatgcgacgaggcatgacgtgctcaaatctccttgaaacaatgattttcgcgcaagtctaccagctcaaagaactcgcctcaaaaagaaggtatcatcccactcaatatcggcagctgtggcttcagcgattgtttgaaccttgcagagcctcagcatttatctcaaggtagaagacaaagggaacaagaaagcaagtaagaaacgagaacaggagtaccaacctccttaagaccgctcaggttttccacgtatccagtctcattcaaagccttttgcacaaaatcccaaaaaaaaaaa

SEQ ID NO: 4021 - DNA, 543 bp, Aspergillus oryzae
tcgacccacgcgtccgatgccatcacatttattgtacagcgagggaggcgacgctatatatattcgaattattcctggttcttctgtcccttttgttacactagtttcaggatcctgaagtcctgatattcttaaagcgccgtatttcgacctttctcaccctgctgcattttgaaatcagacccctgctcctctcggctacttatcagtacgcgcaactacgatgtttttctaccgggtaactgacaaagactccgttgctgcatttgaaccgggacaaggttttatcgcagggaatacttcttcccgagtaacactggatccccttatacaagacgatgctatagagctcgtggaatatatccagcgacatctgaactggaagaacagatacccgacaccgttcatttccgcatatcttgatttcgacacggccaaaaccgaagcactgcgccgggtgaacgatggcaagaagagtgtcgttctctggaaaatctgcttggatgaggatgacgatcttgaatgggcaacaatatacgacct

SEQ ID NO: 4022 - DNA, 294 bp, Aspergillus oryzae
gagcatgactggtgtttggtttggcgtcattttgagggcttccctatcctgtcttgatcttctgtcttggaccagcccagtgatttggcatcttacggttaatctcgcgtctggttgttttacgtgactcagcataggaagattggtataaaatgagcatgagtaggatgttaaggtgtcgatgataggccttactcaatattaagtatacaacgttatgggttaaaaaaaaaaaaaaaaaaaaaaaaaaaaaaaaaaaaaaaaaaaaaaaaaaaaaaaaaaaaaaaaaaaaaa

SEQ ID NO: 4023 - DNA, 586 bp, Aspergillus oryzae
ctcgacgataaagcgcctctcacagactccaaattcagccgtgatgcccctaatgtggtgcacatgacagtcaaacctcaggaacttgtcgatgaggaggacgccaaaggctctaaaccacagtacccgcgggaacgtgaagccagtgaacgcagcccggggtgtcgttgtataatccaataggctcattggatcctgtatatgcacataccgatgatgggggttgtatccttatccagctccgacgtaacctggccttccggttctgacaatgcacgtccgtggtctgttgaatatcacaagatgtcttgtctagttgggttactcttgggcgcgatggactcattacgtcccatacccccatccgtctatcttgtttttggtttgctctccttttatttgtgagcgctttggcatggccatcgctctgtggccttgatgcgggatatctacttggccaattgtgaccgtaaacagggacggcgttccggttgtaatatttgctcttccagcactgaggcatttgtgtggtactcttagtgtgtctggttttatggtttccatctgtttgcataaccactcgagt

SEQ ID NO: 4024 - DNA, 550 bp, Aspergillus oryzae
aaaaaaaaaaaaaaaactaagaaacaaagccaacacagtcattgttcatccccagaactaactgatcttcttttggcactatcacttacgcttcccccattttttcttccttaactaatttccgttctccacacactttcccttaacccaaccccttcataatcccattcttttcctgtttggatcccttgggttgaccttcctagttagtcttcatctgtcctgaagcttggttccttcagtgacttgcatcaattgcttgctttctttcgtttttttttcgcattcctatatatatatcacaatgactgtcaaggacgcggtaaaagagtccttggttggctccagtacggatcagtcacaaccatcaagccaggccaagacgaatttccttcgtcacgcacgcaaggatgagggcaccggagacctatacatgacggaagacgatttcatcaatgctattgcccccaagcatgaggattatcataaaatcaagcgtgaacattacggaatcctcttcaaggttgcggatcgcaagcagactggcaag

SEQ ID NO: 4025 - DNA, 545 bp, Aspergillus oryzae
gaaagccgttaagttctacgacgccatggctaagcgtgctgccaacaatggacatattgtggatgtctttgcgggatgtctcgatcaagttggtcttctggagatgaagaaccttgtcaactacactggcggtcatatgctccttacagatagcttcacgtcctcacaattcaagcaatccttcgttaggatcttcgacaaggatgccaatgacaacttgctgatgggcttcaacgcatcccttgaagtcctcactactaaggagctcaaggtcacagggcttattggccacgccgtatctttgaataagaagtccagttccgtcggtgaaacagagtgcggtatcggcaatacgtgtgcctggaagatgtgcggtattgatccttcttcaagctacggtgtttactttgaaatcgcgaaccaaggcgggcctgcggcagtgcagccgggtcctcagagaggaatgatgcaattccttacatactaccagcattcttctggtcactatcatctgcgtgtcacaactgtcgcgcgcaacttgagtg

SEQ ID NO: 4026 - DNA, 563 bp, Aspergillus oryzae
  modified_base (482)..(482): n is a, c, g, or t
cccgatagttactctttccatctttccaaaccttcctattctcatacctcctctactttcttctatcactttctcatatccaccatggctgctactaagctcaaaattggctgtgctggtctcggtcgcatgggcaagcgccatgccctcaacttcctccagcgaactccccgtgccgagctggtcgccgctagctcccctgacgatgctgagcttgaatgggctaaggttcatcttgaaccatatggcgtgaagttatacaagaactacgatgacatgctccgccacgaaggtctggaagccgtggtcgttgcatcggccaccgccgttcatgccgaacaagccatcaaggccatcgatgctgaaaagcacgttctgtgcgagaagcctttgtcaaccagtgtcgagatctcccaatccgtcctcgacgctgctgccaagaagcctcatctcaaggtgatgtgcggcttctctcgtcgctntcgacgcctcttatcgggatgcattcaacaagatgagcgccggctcgattggctcgccctcagttatgcgtagtcagacat

SEQ ID NO: 4027 - DNA, 538 bp, Aspergillus oryzae
cacgcgtccgagatccacttctgcctcgtgaaagttgcacttgactcctatgagtcccatcccatcgtttggctgtgagccctaccacgtcaaacccctccatctcatcggggaacatgaaaagatgttgctcacctgcatgtcactgcggaaaggaggggttgcgataccaatggacccctcctctcaccctgtctgacactttgcgacttcatcttgcagcgcgtctgtgccaacatgcttcacttatggactggatgagaacgaaagtacgtcggatgacagggagaggggttcctgtttcatgacaacacagtaaaaagggggcttaccatgattatttgctcttgttttttgcttattgcacacacatacaatgtgtcactgctggccattaccttctttacacttcgactactagtgggttcgccaatgggctgccccatcaagcccacgttgggcagcaatgcgtctactagaagatgataatcggggccatcgggaaccttatgagaaatgaattattttattttgaaaa

SEQ ID NO: 4028 - DNA, 576 bp, Aspergillus oryzae
aggaggggaagacctcctggcctatgcgaaggagtcaaacttgcccgaaaatgccctccagtggtttgagaaggccctcaatgttaacgttcccggtggaaagctgaaccgcggtctttcctgccccgacaccggtctcgctcttctggagaagcccctgaccgaggagcagttcaagcacctcagcattctgggatggctcaccgagcttctccaggctttcttcctggtcagcgatgacattatggacagctcgatcacccgtcgtggtcagccatgctggtaccgtcaggagggtgtcggtctgatcgccattaacgatgccttcctgctcgaatcttccatttatgtcattctcaagaagcacttccgctcgcaccccgcctacgccgacttcatcgatctcttccacgagactacttggcagactgagctaggtcagctctgtgacctgattaccgcccccgaggacaaggtcgacctcaacaacttctccatggagaagtatatgttcatcgtcacctacaagaccggctactacagcttctacctgcctgtcgccctggctctgctcta

SEQ ID NO: 4029 - DNA, 636 bp, Aspergillus oryzae
ctcttccatcaattcctcatatatgcctggggaacccggctcaccgcaacagggagccgtgacatctccagagagacagaattcatctcaactaagcccagtatctcctcaacaaccgcaagttccattttcctcggacacaggctccagccggcttaaacggcgagcatctcaaggatcactcctaacgaaaccatcacccgtgtctcgctttctatcgagaagcaacgcatctttacatctcccgtccttcgagcatctcggcctttcgaagacgaagtcatccagtcgaatcgaatcgcgcacccattcagctgattctcgtctccgtcttcatactacttctgcggcgtcgagctcgctggcgactcgcgcatcccagtccacatctacggtgtgggacttcgagaccaaaggcgactaccctactgctctccccccaacacctccggaagacgacgagtacgtagcgtggaatcctcggtccggcatgctacttttcgaatcgcctttgagcagggaacctgggccaatgcccatggacgaaggtcctaatgtggacagcgctgccagaggtgccacttcagacggactgagtagcccgtccgatcaactttcgaacgttctccttcgagc

SEQ ID NO: 4030 - DNA, 618 bp, Aspergillus oryzae
tcgacccacgcgtccgaatgatgtggaactcgcgggcatgcgggcatgccacatccgcgacggtgccgcgctaacagaatacttcgcctggctcgagaacgaactagtcaacaagaaatcgactcttgacgaagtggacgccgcagacaaactagagcagatcagatctaagcacgacctctttgtcggtctttcgtttgacactatctcctctacaggccctaacggagcggttatccactataaaccggaaaagggaagttgctctatcattgatccaaatgccatatacctctgcgattctggtgctcaatacctggatggaaccacggatgttaccagaacgttccatttcggacaacctaccgagctcgagaagaaggccttcacattggttctcaagggcgtgattggtctggataccgctgtgttccctaagggtacgagtgggtttgcacttgatgtgctcgccagacagtacctctggaaggagggacttgattacttgcatggaaccgggcacggaatcggctcctatttgaatgtacacgagggaccaattggtgtcggcacccgtgttcagtacaccgaggtccctatagcacctggaaacgtcat

SEQ ID NO: 4031 - DNA, 429 bp, Aspergillus oryzae
tccactggtaaaaggtcagaccgcgaaaccaaaaggcacgtcaatcaccagccgaagggactcctcatccgctgtcaaggtgtaccatcagacgaaaacaaaatccctcccatatcggcagccagccgtgcgtcattctcgagaagatcttatcattgctctcatcctctttgctatccatcgatgatgcagacacatgcttcggtaaaaggcaaatggtcatagtcgcaagactcacggcattgcataccctggaaagacgtgtgtacagcaaagaggataatccgcaagccgcaatttggggtttctggtccgctttgtctctatgaggaattcagaaactaatggctgcggcaaacaagagggggtgggtgtttgggcttgattttgtgggagtaactgctgatgggagtggaggagaagcggtgg

SEQ ID NO: 4032 - DNA, 528 bp, Aspergillus oryzae
cggacgcgtgggcggacgcgtgggtacacaagtccgtcaaaaaattactcctcaaccccattgtacaggcagtgtagagccttctatgaacaccctcctccgttcctctgttcgcctctactcaacaatgtctgcatcgctatcccctacgtcatcgcccttcaccaaggccgtggtgagctccatgaggaaactgtaccccgagaccctcgcagacaaaagctgggataacacaggcctcctcctcgaagcccccttcaacccaacccgacgccaaaacaactccgtcctcctagccatagacctcacaaaagctgtcgcagacgaagccatcgcgcgcaaagactccgcaatcgtagcctatcacccgatcatcttccgcggcctcaaatccctcaccttcaatgacccccagcaacaatccctcctccgtctcgcacaggaaggcatcagcgtctactccccgcacacagccgtggacgccacaccaggcggaatggccgactggctctgcgacatcgtaaccgg

SEQ ID NO: 4033 - DNA, 460 bp, Aspergillus oryzae
ataggctcctccttctttgcaggggccggcgcggggatggagggtacactgggggaattcatagcttcttcgaaagccgcttcatcacgcgatcttttgcgcgacggcttgccattgacaggcccagacacagctagctttgcaccaaacgaggtgcttgaaccactcgagaaaatcgagccagagtggcgtgggaactgaaggaaggcgtgttcctggggaggggacaggaccatggcagggccgtcggaaaagctgttgagcatcatcgggcacatggtgatgtgaaagagctgatagaatcggaggcaactacaagaatccgatctgttttatcaagtgagctagaaccaacaagatagagcaacctatggatcacgagatccaagccgtgagaagaagatcgacagggttggcgcaacgaatgctggggttgcgaagaaggacaggaaggtcgata

SEQ ID NO: 4034 - DNA, 553 bp, Aspergillus oryzae
gtccgtgaccagtacttcagtcggttgaagtcctacatcgagactgccgttctcgtgaaaggagaaaaagtggctctagcttcacacagcatgggctcgcaggtgctcttctatttctttaaatgggttgagcatccggagcatggtaagggaggcagtgactgggttaacagacacgttgcctcctggatcaacatcagcgggtgcatgctgggcgccgtcaagggtctaacggccgtcctctcgggcgaaatgagggataccgcccagttgaacgcctttgccgtgtacgggttggagaagttcctgtccaaggaggaacgagctgagatcttccgggccatgcccggcatctcgagcatgctccccaagggcggagaagccgtatggggcaatgcaacgtgggctccggacgacctgcccggccagcacacgagctacggaaatctgctgaagttccagcagaccaactcgtccctaacagccaagaacctcacggtctccgaaagtctggcgtatcttatgaactcgagcgacgaatggtaccgcatca

SEQ ID NO: 4035 - DNA, 466 bp, Aspergillus oryzae
ctctatccgcagcaatacttgccgaaccccagttattctccgcatatcctcaccatcgctagggctatagcgatggaagaaggaaccgctaataccaaccctttggaccctccgccgctcccttactcactccggacacgaaagaagtcaatcgcatttttctggatattattcgtttttgataccctcgctcagcctgtggcactctacttcggtctatggtatggcacgaacctgtcacataacttggtctttaccattgtgacagctgcattaggagggatctctgtgtttgaatacttctaccggctctataatttgttccgaaaagattctcgcactcggccgttgaacgcacggaaatcatggttggatttctttcatatcaatttcaccatcgtctgcttgatccttgccgttgaacttatcgtaggaacggtccaggaggaaccctatgtgcgacttg

SEQ ID NO: 4036 - DNA, 467 bp, Aspergillus oryzae
  modified_base (248)..(248): n is a, c, g, or t
gcggacgcgtgggttttcatcctcgaccgaaggcttacgaaagctagtggaaaggccacaatgtcccgcatcatttctcggctttttctcaatgctcgaatgggcgatatcccgaacggggcggtatccaccatgcttttccaaaagacctgtgaacgactgggtcacgcgaaactggactcattctttcaacaatgggtcttgggtgctgggtgtccccgcttccaggctacacagaggttcaatanaaagaagctcgtagtggaaatgatgataaagcaagtgcaatcagagcagcccagcacacgtgacctggacaagaataccttcatgcgtgatgttaaggaggagattcggggcatctatgccggggttgttcagccggcttttactggctccatgacgattagaattcacgaagctgatggcacaccttatgaacatattgtcgagattaaagaaggcgt

SEQ ID NO: 4037 - DNA, 390 bp, Aspergillus oryzae
agatctcctgttgaccaccacgatcatttccctcttgtctgtgtaaccgcgagaggcgttcttttgctctttatctttctttccttcatttttattatttcttccgggcatccggctttgttgttctaacagcctccgccctagcatccccccaccaacggttttcgacccgtcgactgtgggaggttcgtttcgatcaacaacaccgccaccgctggacaggcgcgcgctacctatccttatctgatcgggttttatcaatagagagaatcagaaaaagaaaaccgccatcatgcctcctaagaagcagaacaatgagcccaagaagaagaaggcctcggtcgaggacaagacctttggtatgaaaaacacacacggtgctcaggccaa

SEQ ID NO: 4038 - DNA, 532 bp, Aspergillus oryzae
gccaagctgactcggacctgggtgttaggctcccttgtccatgccacgttcatcggctacggctaggaagagtcatagcaatcggcaggagaatggcgccgccggctccggcaagaaagtgaacaagcaaaaatcgaatggacaactgaatgggaatgccaacggtagctccgcaccaatttctggaccctcctctcaagtcgactggccctcgtctcgctccaatagcgatacggcaattaattccacggtagcgacggcaaccaaggccaacggtacgacggagtgctcgaaggcggatggcaacggacgtggttatctgaatggatacgttaagggcaacccggacatgtcttacgggcaggcgaatggggcggttccgcagaatggtggccttaccggccaggcgtcgcgtcgtacagagagttccaagaggtcaggctcgaatacctcaatcaacccactccaactggcatcgactatcctcaaatcctgtccgatgtacgacactatcgccattctgatttttctt

SEQ ID NO: 4039 - DNA, 502 bp, Aspergillus oryzae
ccctttccctcttcctttcttcttcacttacctcctccatcttcatccctatcctaaccaccacctaccattatgaccacagatagccccgaaacgactagagctgacgggacaaccgtccaggccgccccttcaccagaatctcactatagcacacacattgtcttgaccacctatcccgggcaaagcggtatagaccccgtgcccctgaactggggtgcaaaagatgccaaatcccgtggtccagtagtggtctcgcgcagcgggccattgctgaaacgacgcaatgcaatgggcgcccatggcggtagctacagcatctacaacgccctggccatcgctgcgggcgacctcccccctgacttccgtccggactttaagaacagtgaacccacctttaatttcccctggcagcccgcctgggccgacaaagacaagatcgtgtcaatggacccctacggtcacgatatcgtcaaccaattcgggatgagttgaacgccgg

SEQ ID NO: 4040 - DNA, 462 bp, Aspergillus oryzae
ctgttcctatttatcggagatggcagtctacagatgacagtacaggagatcagctcgatcattcgagagaaacttgacgtcaccatttttgttataaacaatgccggatatactatcgaacgggcaatccatggccgaaatcaggcatacaacgatattgcaccgtggagacatctgcaagcgcttagcttcttcggtggcagtgaagaagacgccgcaaaaaacaatttcagcgcacgaacctttggggagttagaagaagtgctacagtcggaccgcatccagaaaggcaatgggcttagaattgttgaggttcacatgggccgggaagactgccaaggtctcctgagaacccttatgaacaatcagatcgcacaagacgcaaagcaataagtcatactagggagtatattattagctactagattagactagaatccattcaagtatcttatctgaaaa

SEQ ID NO: 4041 - DNA, 490 bp, Aspergillus oryzae
gcgctggacaaggactaagcgtgtcttgcattcggggtagtgataattggcagtcacgcactactagactagcgcttgtaaaaagcaagtcgctctttcgcactcttcgtcccactctcactacccccctcatcggaatttattttgttgttaggctcaaaacaagtatatcgcctcagttgtatcctgttttggcagtgtatatcattagtgcaacagcccccaatgcctatattccgccatttgagatcgcgtctgtcctcgtcatcatcgcctgcaaccgaaacaagatctgtggaaacccacacctattatcctaccgacggagaattggttactggttcaaccacacggaagccacacatacccaacgccgcccaaccgacaaaagaacctcaagcacggctggagcccgtatctagctcgtcatcccaagagccgtcgttctattggcaaaatatcgacccgccggcgccttctcacagcttat

SEQ ID NO: 4042 - DNA, 484 bp, Aspergillus oryzae
gcgagctagctaagcgtaccgctcggaaagccgaagctactgaggctcatgaggaggccaaggaaaccggcacagcggaggatgttgagaagttttcacggcgcacagtacgggttacgagagatcacaatgcggagtgtaagaagctgctgaagttaatgggtatcccatacatcgacgcccccactgaggcagaggcgcagtgcgcagtccttgcacgggcgggaaaggtctatgctgctgcttccgaggatatggacacgttatgctttgaagcccccattcttctgaggcatcttacattcagcgaacagcgaaaagaaccgatcctggaaatccatctcagccgcgcgctggaaggactcgatatggaccgaaagcagtttatcgatctttgtatcttacttggctgcgattatttagagccaattcccaaagttggacctaatactgccctgaaactcattcgggagtttggaagcct

SEQ ID NO: 4043 - DNA, 412 bp, Aspergillus oryzae
gtgaccattgatcagctttgggatcgcttcgaggtggacgatattcctctgcaggacttcctcaagcacttctctgacaagggtttggaaatcagcatggtcagctcgggagtgagcttgctgtatgccagtttctatcctccctcgaaggtgaaggaccgtctcccattgacgatgagcaagttggtggagcatatcagcaagaagcccgttccggaacatcaaaagaatatcatctttgaagttacggctgaggatacaacggaggaggatgtcgagatcccttatgtgatggtgaagctgaggaagtaatgtgccgcatctacataaaatctggccgctagaatatggcccctatggtacctcaagtttataaacaatgatatatgacttttttcttcttcagaaaaaa

SEQ ID NO: 4044 - DNA, 448 bp, Aspergillus oryzae
gaggccgtggaagccgcgaaactagctctcgagaatccctggaaacagcattcatggcgtcattattttcgtgccttacttcgccaatgttcctacctaccagaccctgttgcgaaatgtaatctacatgaccatgttgtgcgaagatttcgacgttacgtgatagaagagcgacgcccatggatcagatggaatgccgagcggcagatctttctcttcaaagaagtaaaggataccctgtcattactgcagcgggcgaacgcaggatattccaaaccactcgagaaagtcatccgaatggcatacggacgaatagtgagacggaggaaggaattaatgagcgctttgattgctcccgatgttcctgcgaatcatacagctgtggaagaggcccttcaacgacccgaaaattactaagatggctgggaacctccagtaatcgtgatgg

SEQ ID NO: 4045 - DNA, 565 bp, Aspergillus oryzae
atttggcaattgaccctcaataatcgtgtgaaaaaacagcttgtacacaatcaaatcgcccaaccgctaacagaatctaccagactattgtagcatggcagccaagttcattccccgacagaccttccccagttatacgtccattccaaggtcgtatttcctgggccatcaccgggcaggtctgaaaaagatgcagaatatgctctcttccattgactacgtcgttgagtgtcgcgattatagagtaccagttacatctatcaatcccatgtttgaagaagccttggggaaaaccagacgattaatagtatatacaaagagggatctaggtgcggaatcggggtcatcagcccaacaacaggcagagaaaagaattagaaatttcgataaaaatagcgccgtgttttttgttagttcctcgtcccgcccggatgtgagttctatattgaagcatttacgaaatgatgccgaaggacccgacaagctcgtggggtgtcgagtgatggttgtcgggatgccaaacgtcggcaagtcgacgttaatcaataatctgcgaaatcagggt

SEQ ID NO: 4046 - DNA, 472 bp, Aspergillus oryzae
atcaaggtcaacattcagaatggccatgtcaaccatgtcaacttcttggcggacctagtcgctggcgacatccctggtatccgcgcggtagcagttgattggttagaagggcgactcgaccgcctgcgagtgcaggggaaagcaacagtgccacttaaatctggcattctgagtttgggcgagcagacgataactgactctataaccttccatgagggtgatttcccaacactcccaaaggtcaatgttacaaagttcaatgtgcacgatacagatacgcccggacataatggagctatggaggtagatgcctcagtggctgctcttgtcgattcgccctttggcctgagtatccctccgcttggatttgaggtgctcgtgccaaattgctcgccaggcgacccatatatcttagtagcggacgtcacaactaaaggattccccatacatccagggcagcccacgtctatcg

SEQ ID NO: 4047 - DNA, 429 bp, Aspergillus oryzae
tcgacccacgcgtccggccgcagtcgcgatgagtagaaccccaactaccgactcactgtgcggaggtatgggaatgatgagatttgattcgtcgggaccacatcttaatccaaactgctcgtttcctttgcatcctcagacttcattccctccacatcccctatgaacgttccatttaccaaccccttcacatccgcgcaacgcgacatggatcatgtctcgttccctttgattgattctactgccacgccctttctcttgctctgccccccctgctacatcctttgcgccgcctgtatccactctttcttcgtccccagcaacggagatgaaacattccatgtcctccgacagcagcagctcgtctctgtctcagccctcaagggcggctcggaggactcaggaacagattgtccagggcaccagacc

SEQ ID NO: 4048 - DNA, 565 bp, Aspergillus oryzae
gacccacgcgtccgcggacgcgtgggcggacgcgtgggtttggacacttgtcctttccaacaattccacctacggttgctggtccctataccctaattgaatcggagcctagcctccactcactcaaccgtgatgacaccgtggcctctgaccttatgatctgggcctgtggacgtgatcttattccccctttccgaacaagacgtactctctggtttcccctcgtctctggcggagccaatacattacgcattttctagaattgcgaccatcataaaatcatcatgtcttgtgatatggagaagaccatgtcatcggtggattcgttgcccgccaccccggcatcagaggtgccggtgctgacggtctccccggccgacacatcgttgaatagtgcagatgtgaagacgcaggaagtcaagccggaagagaagaagcctgcaaagaagcggaagtcgtggggccaagaactaccagtttccaagaccaacttgcctccgaggaaacgtgccaaaccagaagatgacgaaggagcagcgtcgcattgaacgcgtccttcgaaatc

SEQ ID NO: 4049 - DNA, 415 bp, Aspergillus oryzae
cggacgcgtgggtcgagaaacaaggcaccatcttcctggcgggccctcccctcgtcaaagccgccacaggcgaagaagtctccgccgaagacctaggcggcggtcaactgcacagcaccatctccggcgtaacagactacctcgccgtagacgatgcccatgccctcatcctcgcccgcagatccgtcgccaacctcaactaccctaaaaccagcgtgcccctcaaactcgacgacagcaccatcaaagaacccctctacgaccccgccgaattgaacggcatcgtcggcaccaacctccgccgccagatccccgtccacgaagtcatcgcccgtatcgtcgacggcagtgaatttgccgaattcaaacgcgactacggcaccaccctcgtcacaggcttcgcccgtatctacgg

SEQ ID NO: 4050 - DNA, 516 bp, Aspergillus oryzae
gtccgaaattaattcatcatgtcgttggatatcactaccttctataacgttattaataacgaactgaccaccaccgccgaaacgcgccatggaatcaaccccgctaatcaacaaccgaaccccgaggtcccagtttcgaccgccgcggatctggacaaggctgtgagcgctgctcgccaggcattcaagtcatggtcccggacatcagtggaggagcggcgtaaggcgctgagcgcttttgctgacgctatcgaggcgaacaaggattccctggccaagctactgacccaggagcaaggaaagccattagaccaagcatctggtgaagttgataacgccgtcatttgggcacgagctatccctaagattgaggtcccggagacagtgattgaggagaatgaagagcgcaaggtgatccagaggcacattcccatcggtgttggaggtgccattgtgccctggaacttccccatcatgttggcggtcggaaagatcattcctgcagtgtacactggt

SEQ ID NO: 4051 - DNA, 449 bp, Aspergillus oryzae
aacctgaaagcgcacgtgccttgggaaaacagctcccaacagaaattccaggagtcggcgatcttcagttcttcaagcccgaggatatggcatactttggaaagcttatggaaggtggagacgagagcgtgatgtccgtggacgagctgaaggagcggaagatcatgaggctactgttgaaggtcaagaacggcacaccaccaatgagaaagactgccctgcgtcaactcacagataacgcacgtcaatttggggccggccccttgttcaaccagatccttccgttgctcatggagaagtcgcttgaggaccaagagcgccacttgttggtcaaggttattgatcgtgttctctacaagctggatgatcttgtccgcccctacgtgcataagattctcgtcgtcattgagccattgcttattgaccaggattattatgctcgtgtcgaa

SEQ ID NO: 4052 - DNA, 593 bp, Aspergillus oryzae
atccggataaggatctgtcattcctggtttattcttcgggtaccactggtgttcctaagggtgtcatgctttcccataggaatatcgtcgccaactctcttcagttggctgcaggagaggcaggccatctgacttggaatggcggtgccgacggcaaaggagaccgggtactagcgtttctgccattcttccatatttacggtttgacctgtcttgtgcaccaaacactgtaccaaggctaccgacttgtggtgatggagagattcgatattgaaaaatggtgtgcccatgttcagaactaccgcatcacgtttagctacgtcgttcccccggtcgttttgttgttgagcaaacatcccatagtcgacaagtatgacctctctagtctccgcatgatgaactcgggtgctgccccactcacgcgcgagctcgtagaggccgtatatgcacggatcaaatgtggtatcaagcaaggctacggtctcagcgagaccagccctactactcacactcagccttgggaggaatggcgcactagcatcggatctgtcggcaaactgttgccgaacatggaagccaaatacatgaccatg

SEQ ID NO: 4053 - DNA, 614 bp, Aspergillus oryzae
ttcatcttgctttttgtccacctctgtagcatctgaaaccggtacaggctgcttcttgtccaggatcgccgagtagcagacttgctgatgtcgaggttggtaaacactgcccatattcattatcttgggaagggattcgggaggatctatactcttgagctcttgtatcgaccaaggtatttatgaccgattcatgagagcgaggatttccacattgactgcaccatctttcaacttccgacctgcagggagtggtactgtccagtaagaatttactcgaaaactatccagttcttccgcgaaatgcaaaaaaaagggagaaaaaaaaaaaaggtctgttctctagtttgatgatctgacatcatagctgcagcaatctccatgactccaaattcaattagtggggcgtaatttatctacacagtactcctattcctacccagaaaatgccccacgttcaataacgaaatacctatacacatggaactccactagtttcttccgcagggaggaccagacagattgatctgtcaacttttctttatccccttttacctttatagtccatagttccatggttgaattgcctgtctgctcccgataacgtctacatc

SEQ ID NO: 4054 - DNA, 221 bp, Aspergillus oryzae
tgacattctgattcgtgtcaaccggtgcctgcgcacggtggagaatgtattgccttttagtgtatacgcatggtatttacaagtacagctgaacaagcttccctagtcacactatctggcagggctcatgttggtcttctcaaaaaaaaaaaaaaaaaaaaaaaaaaaaaaaaaaaaaaaaaaaaaaaaaaaaaaaaaaaaaaaaaaaaaaaaaaaaaaaa

SEQ ID NO: 4055 - DNA, 598 bp, Aspergillus oryzae
gtgacaggaaagtggtctttttaaataagaacgggataatcatccgctttggctcctggtctatattaacagagaggtcgagactatttccatcttttcggctattgctactgacagatcgcagaagcatgctggggatcatccttttttctctattcatcagttatactgcctacctaggtctctgtttccttcgacactggagtcttgcgcggaagatcggattgccatacgtctcatttcctatctcgtcgcataatatattgttcttatctcttttcgagactcggttcgttccatatgtgatcaacacgtggctctcacccaagttggccgattttatctatggtagcgccttcaaaacgcgctgggcagcaagagaccgtctccacaggaggtatgggggagtttatatgcttattaccccatccgtatcaacttgcatggtgtgcgacgcctcagtagcctctcagatctgcatgtctcgtcatggtttcccaaagcccatcaaacaatatggggctctggagatgtatggtcccaacattgtcacatctgaaggctctcaatgggcacatctgcgtcgacatacagcgac

SEQ ID NO: 4056 - DNA, 601 bp, Aspergillus oryzae
cgttcccttctgtttatcattctgatcatatttccctattcaaagacttcgaagaattgtcagtcgcaacactcattaattcatgatatccggctttcgcccgattccgggccgctattccggcgcatatagagcatactgtggagtctttcgattccatagaactccatcatgcagcttccatactgatggccgaactcgggtgtctaatttctggattcctacgggaggcatctcaaagaaaaatattcagggtgaaaaagaggacgtgaatgacctcttagttcggggaggcttcctccgacaggcttattcggggatttttcatatgttaccgctaggattgcgagtgcaagacaagcttgagcgcctgatagataagcacatgcgctcagttggagcgtcaaaagtttcactgtcgtccatatcttcccaagaactctgggagaggtcaggacgcttaggagagggttcagaggtgttcaaatttcatgacagaaaggaatctcgtttccttcttgctcctactcatgaggaggaaatcaccactctagtgggcagtcttgccaaatcgtacagagatctacctctacgagtatac

SEQ ID NO: 4057 - DNA, 493 bp, Aspergillus oryzae
ctccgttggtacacggaagggtcaaaagagatacgtggtccgcgccgcagaactggccaagggctaccacattttcgagcgatggatccccggcagtctgaccaatggacagcagatcctgggccactgcgagaccaaggtcgtgaatgctatggatgaagaaatccccaagtacagggaagccctggctgaccgctcggtcctcaaacctgacctggtggtctgtctgaaccctctcgagaacgtcgtcttgctccacgagtgtggtcttaacaacgtccctaccatcggtgtcattgacacggatgctgatcctacccgcgtcacataccctatcccctcaaacgacgacagcatgcgtgccatcggtgttatcgccggtgtcctgggacgggcaggagaagccggtcaacaaaggagattggagaatgcaaagaacggagtcctaacctacccacccatcactcctgaacaccttctctcccccgagcgt

SEQ ID NO: 4058 - DNA, 561 bp, Aspergillus oryzae
ctccggagcctcaccacgagggaagagcatctgctaggagacgggactatcgcgaagagagcatcgaagagccagaaaaactaattgtgaagcttaagatccctcgtgagaagttccgtcagcttcttacccacggaccacagtcaataccgagtctctcagcgactccagcccctcagccaccgtcacatcaaggcacgcctcaaattagcactcccaccccaagcaacatggctccaccgtcacacatccagcctcaagccagagttccaggtgtcggtacacccacgcaacggaccgtccccgcgcaacaaattggagccatagatgcaacccacccccctcagccgggtgtcccaggggtgagtgatatataactcatgacaattcttttgttgattcgcctcaagtggaccggcttatccggctatggtgggtgtatcaatcacggttccctgctgacttaaacttctcttagcccccgcctccaaattggcttgcggcgggactcgcgcgattaaaacgctcgtatccaaatgactcatttgaaggcgtaatgcc

SEQ ID NO: 4059 - DNA, 549 bp, Aspergillus oryzae
cctttctatgtgttatcctttgactggttttccctttagatagtctcttctatccaacaatctctttttatagtagccatctgaggtgctattggtttctcggtcgaatgccttgatgtcagtggaagcctggcatggcaatccttcatgactctcccatactacgccctcactgccatcccaatagcaaacatgttcgaaagccgtcgtccgtaaaggaggcctctggcactcagtttcgtttcctttcgagagccgtttcccttccctcgctgtcatccgttatcaagtcctccctgacttgggccggcgacactttgtatagtgtgaaccaggatggcttctctaaggtggacaaggacgggcatactactaccgatgatcgaaagcaggtgctgtatctgaaaatgcgcaatgctgtatcatacaaagagtggaaggactgcgcctacgagttagacgagttggaagacaataactcttggaaagcaaccttcgagagttccgaatacgatccccatctagtacaggaacgcctgaagcaacttg

SEQ ID NO: 4060 - DNA, 569 bp, Aspergillus oryzae
cgacccacgcgtccgcgattcttccttcttcatacttttcttttccaatcttccccatcttcttctgaatataccccttcgttcgtgataccattccggctttcacaatgtcttcttctcttgaacagctcaaggccaccggcactgtcgttgtctgcgactctggtgactttgccaccatcggcaagtacaagccccaggatgccaccaccaacccctctttgatcctggccgcttccaagaagcccgagtacgccgcccttatcgacgccgctgtcgagtacggcaagcagcacggcagcaacgtcgacgagaaggtcgacgccacccttgaccgtctcctggttgagttcggcaagaagatcctcgagatcatccccggaaaggtctccactgaggttgatgctcgcctctctttcgacacccaggcttccatcgacaaggccctccacatcatcaagctctacgaggagaacggtatctctaaggaccgtgtcctgattaagatcgcctccacctgggagggtatcaaggccgctcaggtcctccagcgtgaccacggcatcaac

SEQ ID NO: 4061 - DNA, 566 bp, Aspergillus oryzae
atcgtctccttcgaagtatccatatctacaaggcttcaatcctccgacctcctgccttttgttcaaattttgaccctctcttaaggcactactatacacaatcagctaagggcgctgtcagacggtttccgctctacggggcgcctatcccccttttgtaattctcgaatttgaatgaccggttatcgctctatacccactacttcactttggcgtcataacaataccaagaagaacatttaaatatcgacaactattgttttgagcgtctcttcgaccatgtcttccgctcagcctgtcgacgaatcagaccggcgtcatcctcgacgtcgagtacttaatcgtcctccgccctcgctctcgagtgactcgtcaccaccccatctactcccgtcgaatctgcgcttgattaaaggagaaactttccactcttccaaccgacccagatccgaccgtgatcccatcctagatttaaaactgttaccacgccgctctccaacgtgtcctaaagccctggaagctatagctgccggccagcggcgtatggcccatattcttaaccggtt

SEQ ID NO: 4062 - DNA, 550 bp, Aspergillus oryzae
caagagctcgtttcccacaatggcgctccgagtcaatatccctcctgcgacccgtacctgtctcatcaccctgcttactctctcgctcctgtacaatatcgcccgatggcgacaaattgatgccacaggggggcatcccttaaccacgccagttgtgccctacctgacgctcgtcccatccgagttcttttattacccttggacattccttacagcgacgttcgtggagcagaacatctttacggttctcttgaacggcgcaaccctgttctatgggggcaagtacctagagcgcgcttggggttcccgagagtttgcgaaattcattctgaccatcgcggtgatcccaaatgtgactatcattcccctttatctcttaggaactaccattaggggtggttcgaccggcggcgtaacccaaatatgtggtggcatgtcgatccagacctccttccttgtggctttcaagcaacttgttcccgagcatactgtgactatattcaaaggcctggtgaagatgcggttgaagcatttcccggcgctttttctt

SEQ ID NO: 4063 - DNA, 482 bp, Aspergillus oryzae
gtacaatgcgccttggaaagcgggcgactgtgttccagcctggtactgaatggtctcgcctgcgcaagctgtacggggagaagcaggagatctgggaaagacatcgccaccgttatgaggtgaaccctgagcttatcggccagctggagcagggtggactgtccttcattggaaaggacgaggccggcgagcgtatggaagtcattgaattgaaggatcataagtggtacgtcggagtacaattccaccctgagtacctgagccgagtccttgcgcccagcaagaccttcttgggcttcttcgccgctgctgccggatgcctcgaagagatcaccgaggcttataaggaccgtcacgatctcagttccaaattgcctatggtttaggctcggtgttttttctcttggggttataggataggataaagaaaaaggagatatcataccatattatagacatagtacaatgaaataccatcatga

SEQ ID NO: 4064 - DNA, 559 bp, Aspergillus oryzae
tacgggtgggcgattccggaaaaaactgaagggtttctttggggaagactacttgcctggagattcaaaattggagtccgacaacggcagccagcatcccacaaagaaatcatcacttagcgagcagcatatatttcgcgaaagggccaactcggatggtgcacgaagcccaccacaaaggctcattggtgaatcttcaccacaacggcctagaccccgagccccgcttccttccagtgaaattactccttgggtatttcaaagcttcaatgacatcccacagtacggtgaagcccctgttcgtgaagctcccataggggctgatggtcgccgggctgctgcccaaatggcaagaggctcacaaagaaaccaaactggacgacaattcagtggacatcgccattctcgaagcaaagaagagaaatcaaccactgccgacgatataacggtgtatccaagccgtcccaccacagggcgcgatgattttggtatcggtctgcgcgccaacagcctcaacaactcagcgatgaactcaacttctactcttgtgcgctccacc

SEQ ID NO: 4065 - DNA, 159 bp, Aspergillus oryzae
gtaccatggtaggagaaacggtttggatgagatagtacatacttttattcctctcggactggatcgcgttggaacactaccagaatgaattataggtgtctgagcaccttacggttttcggaaaaaaaaaaaaaaaaaaaaaaaaaaaaaaaaaaaaaa

SEQ ID NO: 4066 - DNA, 510 bp, Aspergillus oryzae
tcttcgcttccattgtcttcctccgactccccgtccttatctgcctccttatctaccgtcccttccccatacctccttctcggcgcttcaatctcccttcaggacgtccacgtcacccattcatagcggccttgccacatcgctctcttgactcctcactcatcactatttccgtataacgccggaaattccgtgagtcgctagcaatcgttcacaacaagccgtaatccgcctgctccaactcggcgcttatcggctcttctccgacgtcacctccttatccggctccctacttgccaccacccgctcaacatggctcctcgcaagccccgctgcaacttcaaggaatgcaaggaagcagctcagcggattgtcggagactgcagcttctgcaatgggcattactgctctaaacaccgcatgctagaagcccactcctgcactggcctggaggactgcacgaaggagtcccacgcccgcacgccgataagctgaacagcgagcgtaccc

SEQ ID NO: 4067 - DNA, 617 bp, Aspergillus oryzae
gttgtaatttatccccaattgcgttgcattccagtcagaacacctcacgaaaccctaacctaatccgtttgcgtctttcattccagtgatacccccccaggcaacgcgacacccccattctcccttgtaatctatccttctcgactcaaaccccccgtgcttgaccgttacgtttttctgtgacacgtttcaggcctccctgcagtcctttcatatttaatcattagtctttcttacgttattaatacgcctctccacctcgtgaataccgggagacaagaacgcctacatcatgtcttcccggctagtcaatcgcccgatggatacgaagcagagggacaaggatatcaatcagaagctgcagctatatggaatatatcaagcgttcaaaaatggcaagcttccatcgaacaagcaatgcgacgttgctctaaacagcgcgctcaagtccaaggctctctcaacaccaccgaaagagttgtctgaagaaggacaagctcttattggagacgttcgcgacgtcattgagcaggcgaagcgcctcattcttagcaagaatgacggccaattgattcaagagttcatctgggaggcccagagcatcactggtgaacatg

SEQ ID NO: 4068 - DNA, 443 bp, Aspergillus oryzae
tcgacccacgcgtccggattaaactgctcgcatattggttgacgtcgcgctggcttgaatctctggatgtgtttctaagccgagagagcccaggagagttttgtatctctgcgctctgttgttgtcgctttcacctttcttacttttttctttcttaaccgacatctctgtcgagcctcatactggacaccatgaggacattccaatcatcagtatcgcaatggatggccttcctccttatgtgtctgggcttggcaaatgcccacacggtcatcgtttatcccggctatagagggaacaacttatttacaaacggcactgttgcagaagccaacggtctcggggtagctatgagccccaacgcaacagacagcaactcctttatatacccctatggacaacaatggatctatccttgcggaggtatgcccacctcaacgaac

SEQ ID NO: 4069 - DNA, 546 bp, Aspergillus oryzae
cgatcgtgtcgcctttacatttctgtcctttttattcgcaaccccattacacaggggctccatcgccatgccaccaccatttcagttccgtggcaatgacaggcggtcacagaatcaccaccccaagcctgagttcacctttcgctattcgcgacccccaacatccgagcgtccgctcctcagatcgagaagagaaactacgccagatctgttggtcgccccggaaaatggtgatgataaaccagcgctgaagtttgcgcctattgagagcctcagcgatagcgaggaagctgacatggacgtatcctccgacgagaatgacgacgacgagtcgcgtcctcgcaagaaacgcgccctggagtcgaacaaatgcaatacacctgcctcagcgcccaccccacctcccgctcccaagtggtccaatccagacccatacacagttctaccaccaccagacgagactcagtccaagagagtagacgtggtcacgctgatccgtaaggcccggatagctgccagcgcacaacccagcgaaaacggacgcag

SEQ ID NO: 4070 - DNA, 490 bp, Aspergillus oryzae
cggacgcgtgggtttcttttctttttttttttttttgacgatctgtatactttaagttcccttcgttttgattatctgaaatctttttctcaaatgattatcgggcataataaagcttggttctttaccattgcccaccatgcctttcatcgagtgttcctccccacccatcagaatgggaaacacccgaattgacgctgcttcccaggggaaattattgcctactatcattgacgagctggctcgcgatgatcccaatggtctctggatggaataccccacctccccgacgagtcttgacgttggatatagccagattacttatgccgaacttgcaaatgctgtgaacggtgttgccaattgtattaccagtgccttgggaagagccaatacaggagagtcactggcctggttagcgcccaatagtcccttgtgctctatcacgcttattgcggccatgaaagctggcttcaaggtgtgcaagtcatag

SEQ ID NO: 4071 - DNA, 404 bp, Aspergillus oryzae
gaaaagctggaatggaaagcccttgatgaactcgattcaggggtgtgcgatggcctgacgtatgaagaaatcgctgaaaagtacccagaggacttcgccgcgcgtgacgaagacaagtacaactaccgctaccgaggcggcgaatcgtaccgcgatgttgtcattcgtcttgaacctattatcatggaactggagcgcagtgagaacgtcatcattgtcactcaccaggctgtgctgcggtgtatctatgcctattttctcaataccccccaggagcagagcccgtggatggaggttcccctacatactttgatcaagcttacacctcgcgcctacggcaccgatgaacaacgtttcaaagccgacatcccagccgtgtctacctggcgtgccaaaggcacatc

SEQ ID NO: 4072 - DNA, 301 bp, Aspergillus oryzae
attgaccaagacattggttttttcccctaagcatcaccaatcaagcctatattttcggcatactcctgctcttgacgatacgcacctctatcctcacaactatcgactcgactgattgaaaagatcgatacagatactcctgaaaccagtttacttgaattttatttctgctatgacagttgacctccgagcagatcactcattcagtgctgtctcaagtactgtcgcaaacgctccgtggccaactgaaatggaggttgatggaggcggggaaaaagtagttgagaataaagagcgttcc

SEQ ID NO: 4073 - DNA, 396 bp, Aspergillus oryzae
cggacgcgtgggcggacgcgtgggtttcccaacttcgttgtaactgcgatctcagtctttcctggactgtgtggtctcattactttcccaaatatttcgacaccgccaagaaatcgtcctgaaatacttgtttatagagtcaacagcgaatattaggcttctggttgttgtgctccactgccgtttacggaaaaccaagtgacccgtggccgagagaccataacccaaaagaacacagacaaaagagcaaaagaagacgcaagaaacaaaagaagcaagttatcaataaacattgacaaatgctacgcatttcactatcgtcatagtcattcgagcttcgagagccgctctcgtgagggtgttgtgtatgttcgtcgaccctcccgctcactacta

SEQ ID NO: 4074 - DNA, 411 bp, Aspergillus oryzae
ctttctcctcgtcctggtgcttgtcttgatttcctcctcccccctccctcgagcctgttatccacagattataggataggtacagtcgagacacacagttaaacatgtggacaaccacctgtggctttcggggccgaaagctccgtctagccatcaccatcaccgccgtcctcggtttctcgctcttcggttacgatcagggtctgatgtccggtattatcgccggtactgagtttacgaaagagttcaaaccgctatacatccccggcgacgccacagaggcgtacaagtcgcatgtctcggttctccaaggtgcggtcacagcttgctatgaattgggctgtttcttcggtgccattttcaccatgatgttcggtgagcggattggtcgtacacctttgctagtggctg

SEQ ID NO: 4075 - DNA, 163 bp, Aspergillus oryzae
caaacgctaaaagtttgcggtatattgggatcttcataggcaagcattgcatgggatggcgcattggagttcttcctttgttggtctagggcttgtctcgtgtggacagcttctttgttagggctatagcagatgcatgggtattgtcggattcgtgaaaaaa

SEQ ID NO: 4076 - DNA, 425 bp, Aspergillus oryzae
caataacaggttctttgctactccgaacacagccataaagatacagtcaaggcacgaacagcaatggctgccaaactagtagacaagaagcttcacaacgtcccagggaagctccgtgtagcagaactgctctttgacgttccagtcaactacagccggccaaatgatggcactttgaggctttttgcccgcagtgttcggcgtttgacgacttcatttgatgctccaaaggaggacaagcaactgccttggcttgtatacctacagggtggacctggttatggatgtcgacctcctcaggagaatggctggattggcaccgcccttgacaagggataccaggttctgtttctagatcaacgtggcactggcctcagctccacgatcagtgcaggtacccttgccttgaaaggcaatgcaatcac

SEQ ID NO: 4077 - DNA, 427 bp, Aspergillus oryzae
cggacgcgtgggcgtcgcccaaccccaaggcaatcgatatgtttaacattgaggacaggtggaaatctcttggaatgaccgacagttctacctccctcctttcgtcagggctaagatcaacaccggagcttctcgcaatcttgtcctatacaatgtgcacccaaacgtcacggaatggcttatccggaaggacctcgaccacatccataacctcattgtcatcacagtcaaatttaagaatggaaacgcttacatttccacgaattccgttcataatgcattgtttgcacgctcttgcatgatgtctcgactcacatataaggggatgaggattgcattttatccggatgaatgtgccgagcctctgtccaagcttaccaatggcttgaagaaagagtcacaggtgccttccaagaagtctgtttcg

SEQ ID NO: 4078 - DNA, 469 bp, Aspergillus oryzae
gacccacgcgtccgcgagaccccctccctcctgggacataactaggcgacaatgaagtggaagagtctagccctaggccttctggccaccgcccaatctgcggcgagtcttcgcttcgtgatgtatatcgacgaataccacactcaaggcctccccgacagcagcggcacagccggaatcagccacgccgtaatgggctttgctaaatcgacactatttaacagcgactcgccgcagtcctggaagcctttcgagccgatcgataccatgcgcaagcgcttcagcagtgatacgaagttgctcgttgccattggaggatggggcgatacatccgggttctcggagggtgcgaaggatgaggcgtctcgggcgaggtatgcgaagaatgtgaaggctatggtggacgagcatgggttggatggcgttgacatcgactgggaatatcccggcggcaacggcgaagactaca

SEQ ID NO: 4079 - DNA, 509 bp, Aspergillus oryzae
caaccaacacgagatcatgaatccctttccctagatatactgtcaccggactattcaacatctcgggattttctgaacaatgtcgggttctgacggttctaacccttcgatgtgtctctccaaaagatcccgagccagcgatgctgcgcaagacaaattgattcgcaccgagagagagcgagtcaagcgacgtcgcacttcccgagacaaggatgaaatcaagcaaagcttgcggccaccaatgtccaatcccccaaaagctaagaatgacaaccatcaggcagtacgtgtcgcaaatagctcgtcattgcatagcatcgaccagaacgagattgcactccttgaaccttggtctttatctacgccagttgcgggacagtataccaacatagacccaatacttacccgcgatgaggggtacctttttgtcgggcttgaggcagccgttcatgtttattctgtcgcaacctctcgtctctttcggacactacagttgaagccaaatcaga

SEQ ID NO: 4080 - DNA, 584 bp, Aspergillus oryzae
gatacaagtcgtgtcagatgcagagctcggagacctagtgagacctgtacggaagagtcgtatcattgatatctcagactctccgttcgtaccagccacagagttgcgctccaagcttcaaactcttctcatggcaggagagttagacagtggcctccctatcttacgccacgatgtcttgtctgggttgatcccagccccggacctcgaatatgcgctggacaatctcgaggacgaagaaaacacgttatgtctgatgacactagatacgatgtcggtcgtttccgacagtgatgatgaagaggccattcgagtggactttaaccgctatattgatccggcccctatcgctcttgatatacactcacctgtagaccttgtttatcagtgcttcgctaagctaggtctacggtacctgtgcgtccttcaaaacggacagtacgcgggtctggtccataagaaggccttcgtgaagttcatgaaggagaatgagtgattctctttaccagatgaatccgcttgctgtaaaagagaatgcaaacgtatacatatttccaacgtcttcaaagcattgtccagcgtta

SEQ ID NO: 4081 - DNA, 599 bp, Aspergillus oryzae
catttcctccttctccatttacccccttatattccacccagcaactgtcctaattgacactctggggatccacttcattctttatcttcctgttctttcggaaaagtcagccgcattcctggaccctggacccctcccctcaccaccgacaccatggaagccatcaagaagacatttgccaaggctaagcaggagaagcgcgccgccttggtagcgtacatcactgctggataccctaccgtcgaggagactgtagatatcctcctcggcttggaaaatggaggcgccgatatcattgaaatgggagtgcccttcactgaccccatcgccgacggaccgacaatccagaaggctaacaccaaagcattggagaacggcgtcacagtcacgactgtccttgagaaggtcagggaggcccgccgcagaggtcttaaagtaccgatccttttgatgggctactacaaccctatgatgcgttatggtgaggagcgtatgctcaaggactgcaggaaggctggtgtcaatggtttcattatggtcgatttgccccccgaggaagctgtgcgtttcagagaacactgcactagcaatggcctttt

SEQ ID NO: 4082 - DNA, 541 bp, Aspergillus oryzae
cttcgcctatttacagataaataccttctacccagccattgaagaagcccacagctttctacctcttctacagttctatctgtgggtttctttggcctccgcgcgaccggtcaacaactctgcgtcactgttaaacccccgtggaccccccgaatttcagtcgcatcatggcgccgaagaagaattccaagaccaaagtcccgatacagcccgttcccgaaaaacggggttatgaattcttaggccctcccggcgcgtttgcctttgtgacctgccttccgactctcatctacgctttcaccttcttatgtaacgatgtttccggctgccctgctccctcgctgctcaatccgtcgaccttgtccctggaccagttaaaggcggaggttggttggccccaagatggccttaacgggttcttcgacgctcgcgtgaccctgtgggtgttgagctattacctcctcagcctggtcttgtacgtgttcctacctggcgaggaggtcgagggtacggaattggcctgcacaggaaggcttcgata

SEQ ID NO: 4083 - DNA, 621 bp, Aspergillus oryzae
cggacgcgtgggcggacgcgtgggttctcaattgacaactccctcgagattgtatgtctttggcaccattagatcatggtgagaaagtttccttaaattagaattttccatacataccaagctttaacgtctctccacttacccttcgcataattacatcaccgtcgcaatgggccgcagtaatagtctgcgctcagcagaggaacaagccttacatggccgcttcttgtccagttccccgctcgctgaggctgcaattgctcgagatctagagaattatgcggacgacgagggctcaatgattactactgacgacgaggcttccgagacatccactattcgcgcgataaacagtcagcccggcacgaacccccattctctatctggatcttaccgtcgtcctagcttcttcactacagtctcccacgctacagttgtaccatatactgcagaacgagagaggctgacacgcagggaacgcgaacgcgccattgaggatgagcgggatcttctcagcgataataatgttatggacgcgagggcgaggcggcgagtgactccaactagtgcacccctcaggagaaactacggcactcctaggaagtcacgtaggtggtcgcg

SEQ ID NO: 4084 - DNA, 649 bp, Aspergillus oryzae
ccagcgtaatccgcgagcgcgcttttgccctgtcatcgcactctccttttcacctcgcgatattggaaagatcctagtgggctatcctgagggagctgtgacattctcgtttaagcagaacttagcacagaagtacttcgagtatgaagttcctccgggtgcattgggtgggaattgcgatgttccatcccaggagccgcgcagaccaagactgactaaggccgtttggcaccctaacggaattttcgtattgacagtgcatgatgataatagtttggtcctttgggactctaaagatggtcgcaagatagcggctaggtcaatcacaacccccaatattgaccagccaggtgctagtcgtgagagaccactgtcagcagggagcgctgttgggctcagggaccccattactcatattgcgtggtgtgttaaaggaaatggggatgatagtggacttttaatagctggtggtaagccgaaagctgaggccaacaaaggacttactttcatcgatctggggccgactccaaactatcaaacatcctcttgggccatgatatcgaattatttcgaatctccaaacaaataacagatctctccacgcctccaggcgcagaagtcgttgatttctgccttattcctgggctta

SEQ ID NO: 4085 - DNA, 649 bp, Aspergillus oryzae
cgttcgtctacccgactctcgttccatgtgcagggtcttaagttccatacctactttcctactaataataatttgattcacatctaattctcctccccttttcttgaccatagtcttttattgctttttgttcttctctctatcatttgcaattcgtgtgcgtctctgaactgaccttacaggcgccacagtctagccacaccctggttggctcgcactcctttttgttcctaatttttccttttcttcttcccctcatttccagctttctcttcgcccctcgacgggttcacgtcccattccctgtgcgactgtcatttcactctttctttgactgtctttcctgttgaagactaatttcgtctgcaatattacacgggactctatactgtgcactgacttgggaatcttgtgccatccactatcatcaattgttggctgatcccgctccctgaaccgaaacgcatccacggtactgtcaccgccggttttccgttcaactatttgcttcagcccaaccctcgacgtactattctccgccgatcccctatttacacattactctttcaggctgcttccttacttcctcttttctccatcggcagaacaactgcccgcagtgtcctcaacccccgaccaccttccaact

SEQ ID NO: 4086 - DNA, 460 bp, Aspergillus oryzae
aaagccgtggcgacggaagcaaacagtacattcttcagtgtcagtagcagtgatctagtatccaagtggatgggtgagagtgaaaggctcgtgaagcagctcttcaatatggcccgagagaacaagcccgcaattatcttcatcgatgaagtggatgctctctgtggtcctcgtggagagggagaatcagaggcatctcgccgtatcaagacggagttgctggtccagatggatggtgtaggaaaggattcgagaggtgttctaatcctgggcgcaacgaatatcccatggtaactagatgcggctattcgtcgcagattccagcgcagagtccacataagccttcccgacatcaatgcacgagtgaaaatgctcatgctagctgtcggacagacaccgtgtgagatgacacaagccgattacagaacacttgcggagatgagcgagggctactccggca

SEQ ID NO: 4087 - DNA, 551 bp, Aspergillus oryzae
cttgtatagctcttgtgtaccccagtcgccaagactatactccacaatgacagtgaacacaacacaaagcacctcaacctcgggatcccctcttaagctcgagcacgctacactcgaagatatccccgagttaatcgaagtctggtacaatgcatttgataccccagacatgctagccatctggccgaacacccccggagtacggcaatggtgggatcaagccaaccgccacgacatgctgcacaagcctcgagagaaataccttaaggtcgtcgatacaagaaacggtcggattgcggcatacgcaaagtggtcccttgagacggctgaagagcgtggtccccggttccctccatggcactcggacatggatcctgagcgtaacgatgcatttatcgagggtttggagcttggtcgtgccaggttggttgggggaaagaagaatttctatcttgatatgttgggtacgcataccgactatcggaaaatgggccgctgctcggatgctgattgggtggggatgtcaaatggctgaccaggaagggtgcttt

SEQ ID NO: 4088 - DNA, 567 bp, Aspergillus oryzae
tcgacccacgcgtccgtttggttatctctctccatcagaaccccttcccccacacctgatgatggaggacgttgtgggcgactataaggacaaaaccgttactcttgaggatttcccgtggtacgatggcaacgtcaaaatggccagtgtacacccatgtcgacacgcttcggtgatgaagacactcctcgaccgtgcagatgcagcgctgaaactccgccgcgaaaagctgaagcaagctcaatctgacccatccaaggctccttcggtcggcgaaagcggcttggaagggttggtcgatgacatcaaggcactttccttgagtgaccaacaacagcatggcagtgataagagcggcggagatgaatgggaggttctccagcacgatgaagaagaacaggtagccatcagagtggatcagtatttggttgttttcctgaagttcattgctagcgtgacaccagggattgagcatgatttcaccatgggagtatgatcgaaggtgtctcacagatatgacctcgtcttcgaattttctccttttctccatttttaaatctggcgtac

SEQ ID NO: 4089 - DNA, 552 bp, Aspergillus oryzae
cagcttgctagatagcttgtcttcggatccagatgcgtcgaaactaccatcgatgaagccgcgcgacgagggtgaggagctggatagagtgttcggtgggctaaacgtaaaatgagtggtctcgatcaactgagcgtcaggtacaatcatccccctcgacgtggcagcgtcatttagcttcctctgccatggtgtgaaccatcggggaaagtcaccgattgggccacacccatcaagcttgcggtagactgcagattcagctgcaccccgtatgcagattgcagagctttggcatgtcaggatcctgcggcctcagcacggacgaagctcgccacaccgcactatcgcgtagagtcggccgtatacaggaaggatactataaggttaaagaataattttatgtggggaaatatcctgtacaagttgggcccagtcttgaccttatctcagagatattcaatatccggtgtctgcggttccatatgtttgtactcaatgaagaaagtgtattatacaaactatatttaatacgttatgaccctcaaaaaaaaa

SEQ ID NO: 4090 - DNA, 398 bp, Aspergillus oryzae
cggggattgccagtgaaaatccatcgtgctggtactatcagtggccatagcgccaccggtgccgccaacgcgtgggatcttctcactgctcttatcgtcgagtctatccatctcggatatgcccccgatgtcgacggctggcggacggagatgacccctgtggacttcgtcagcaaggccatcgtccacctggccaaccagacacacgccgaccaaacggtcttccacctgggtgatcccaacccgctcagcatgaactccgtcttcgcagaactccgagagctcggataccgcacccagccactcggttgggatgagtgggtggccctctggacccagaaacgaggcccggtgaagggaggcgatggtgcgtttaccgttgacatccttcgcagtgg

SEQ ID NO: 4091 - DNA, 469 bp, Aspergillus oryzae
catcgatccttttatgacctacccctggcgtcattctccagaaatcgccaacgcatgccaggcatattgtacgtccgtgctatggcctactcttactcccggagccagtagatcggatgtctcggccttgaattggtttcccttgatgatgtctgagcctactctaatgacagccatcacgttcggctcactctcgcaccaacgggtgcagtggctgaaccggtggattccggacggcgcatttcgggaacgagagcagcagcttctaaaagtctgcgaaatggagaccatcgagctgatcaatcaggaaatgaaaaagccaggccgagcgatcagtaacgcggtcattctgagtgtaatgtgcatggcacataatgcaacagatattagcgaagaacgacagtttcggcacattccgttcacagcacccatgcggcggttgcaatggattgacgtctatggcagtctg

SEQ ID NO: 4092 - DNA, 550 bp, Aspergillus oryzae
caatcattcaccagttcagaccaccagtagaacccgtttgggccggcataaagcttgtgaccggtgtcgaacccgtcatatacgatgtaaaggaggctcagatggtaatccttgctatggctgccggcgggcaaataagccatgcacaagccgtaaggatggcatgttccgctttgttgagtacgcctctgtagagaacagttccgaggaccgtcaactccagcccagtcttccggcaagcaacattacgtttgttaatgagaatgatgcggatattgagagcaatagtccatcaaacaacatgccacatggccgtaacgactatcagcagtcgtctcaacattctccttcacagatgtccaattctgtaccgacatcatgccccgtcggatctggatctcccctgtcgccgttaaaaagcgaatacgaagcgtctcttttcaatattttatgacgtctctctctccttggtttgactactgcgacccgagtcggcatttttatacatacatcgccagctctgcgtctagtaatcctatccttttggacc

SEQ ID NO: 4093 - DNA, 367 bp, Aspergillus oryzae
gacccacgcgtccgcttagttatagtgacggacgtccagtgatccactgctttattcctttctctcttctttcaaacttccctttcttcagcaccgaatccatcggggacccaagaaacggaccgcgctctcatagttaaaaaggacccagggcaccgattgaaaggctggcaataaagaagggtgaccggcgcaacacaagctaccggcctcgaagagagacagtttagcatccgaccacaattgccttgcagcttctcttacattcccgcgcagcaggtctcagagagaaactggtgatcaagaaagcccaaagacacgtgctgttcagctctatccccccgatctttcaacacaaggatcaatt

SEQ ID NO: 4094 - DNA, 438 bp, Aspergillus oryzae
ccaaaacattctcaaaggaagacgtcgcatcgcataacaagccagataacctctgggttgttatcgatgaagatgtgtatgacttgactaaatttcaggacgagcaccctggtggaaaaaagattctgtcgcgagtcggaggaaaggatgcttcgaagcagttctggaagtatcacaacgaagggattctcaagaagtacaaaagcaagctgcaggttggttccttgaacacaaaagccgcagatgcgtcggcaccggaaccagcagcagccaaggaaacccccaagcctcagcaggcagctccagtggacgttggatcggccaagtcgtccgagccccaagaaccttatggtgacttgattcccttcgccgatccctcatggtatcaaggttactcctctccatactttaaccagactcatgcagcccctccgcgca

SEQ ID NO: 4095 - DNA, 605 bp, Aspergillus oryzae
atctggctcttactttagattcatcccattgctaatattgatacactgagtatgcctccgatccgaacctcccgcaaccgcaaaccacctccggcggggttcgatgacatcgaggacacactacttgagttcagtaacaagatgaaagacgcagagaatgcgccacatgatggaaagaagaaacatgagatgctgtggtcaatctttcaaataacccatcagcgctcaagatatatctacgatttatattacgaaaaggaagctatatcaaagcaactatatgactggcttcttaagaacaactatgcggatgctaacttaatcgctaaatggaagaagcaaggttacgaaaagctttgttgtctccgttgtattcagaccaaggaaacgaattttaatgccacatgtatttgccgcgttccaaaggcccaactgaaagaggatcaaatgatacaatgcgttagttgtggatgtcgaggttgtgccagtagcgattagcattgatctgccaacaccgtcccgggggttcaagcttaggggcacaaaaaaggggaaatgattaaaaaagaagagttggaaatattgccatgtatatgggtgaaatc

SEQ ID NO: 4096 - DNA, 648 bp, Aspergillus oryzae
  modified_base (527)..(527): n is a, c, g, or t
ctgatttaggggtctctttctttttgttcttttcttcttcgcttcttctccttcttcttcctcgctctccgtggattgagactttagctggttgcttatcctgataaccatcctttttcgtagcgggggagcaaaaggcaatcaatcccttccttgcatttggtcgccacaccaattctgcccatcttttttttttatatcgctgttctccccagccatacatttgcctactcacaaattctgtctgtttcagccatctaaaagctagatctcgctatgtctcccgcgacagcatcggatgctccagaaaacactcccgacgactcctccaagctgaagaccttcctttctattttgaagaagtttattggggtcgctgatatcgcctctgttcgcttttcattacctgcccatcttctagagccgacgcccaatctagaatactgcaactacttggatagaccagagacctttgcaagcattggtcagtcagacgatccgctgggccggacgcttgagatcttaanggtttggttcacaaaggacttgaaatacatcaagggcaaagccggcaagccatataattctaccctcggcgaattttcagagctacttgggatgtcaatgctacccttccagaagtacagg

SEQ ID NO: 4097 - DNA, 490 bp, Aspergillus oryzae
  modified_base (264)..(264): n is a, c, g, or t
  modified_base (383)..(383): n is a, c, g, or t
ttttttgcctacaacacatgaggggcactgttgattgggtgtacgattgcaccgtagcctatgaaggacctccaaaaggaagctatcccgataaatacttcacgctccgatcaacatatcttcagggaaggcccccaacatccgtcaatatgtactggcgtcggtttgctgtatcagacatacccttaaatgaccagaaggaattcgatgcctggctcagggcccggtggacggaaaaggatcagctgcttgatgaatacttcnagacgggaagatttccatctgatttagcaggctttgttgacaatgtggacgtttccgaaagtcttaaagctgccgccgctgctggatatgtggaagtatttgttagactgggacattgnagtgaaattgggcgtatattcatggtattaataggcgctgctcttctgtgcaaagtaccaaaactcttggggttttgacaagcaagggcttgccttttatatgtctg

SEQ ID NO: 4098 - DNA, 569 bp, Aspergillus oryzae
gcggctgccatcttgatactccttgactgctaacaactgcgcacgacagagaccgaatcaggatggatcaggaaaatgagatttcttatgcttgtccggaaaaactttgcaccagctcgttcccatctacctgctgtacctattggccatatccaagggtattgaatgtagcacatatatctgttctgggtcttgcgaagttggagagcatcataatggtattcttaaatcccggcgagcaaccgatgatgatcatttgattccaatccacttcaacaaatggaagcttggccaggctgtgggtgtgattcaccatcactctagctcgggacaatctcgcaaatgccgcgcatgaatcatactgagttcctcgttacgaactaaccgaatgttccttgactcaagtgcgacacctctcagtgttcgatgagctatccgatcccgtctacaattttatgctaagtcttaacgtggggcccacgcctgagtttggtagcaatctctcaacgtacactatcagcctaccgtaataccgaatggaccattccatccagaagatgacactattt

SEQ ID NO: 4099 - DNA, 651 bp, Aspergillus oryzae
gcgtccgaatagagctagtgaggagcgtggtggaatccatgaaactgaagagtaccacggagaggaagcacgccaggaaactgaggaacatagggaaactgaaggccgaccgaatgggctcaatagtgattatacttctagtgaacgtccagctcttcttcacccgactttgaaagcattggcaggacatggttacatactacgtgtcagggatgctcaattccaaagctatgctgacaacgctttggatgccgagcgcacaattaagtcaagaccagacattaaagcccttaagggaaaaaaactagacgaagcagttaccgaggggacgctcgaattgctcaaagaacggttggacggagacctcactcgtgggttgatgtttaatggagtgccccgaggagctaaacgaaggcataccactggagctaccgaggcatctaataaaaaggcgcgagttgactatgctgctgtcgatgaggatgaggacggtggagaagaaaacgagtggtcagacgatgactttggtgaagatacaatacctatggagtccggcatcactgtacgcataaattatgagaaattggacgtcgcttttcggaaccgccgttttttggaacttgcaagcggggacttcttttccgtgacaag

SEQ ID NO: 4100 - DNA, 592 bp, Aspergillus oryzae
gcgtccggttctgggtccaggcaccgggattcctccgtcttgcctggctggatcccagctacctccatcccttgacatttcttctaacctgaataccttggccgatacgaaagccaccttggaactcaccgaaatcaccgtggatacatccacctccccagtctctcatgatatcgccgacgatatggggctgaacatggaagtatcctcgaccacaaatccaaacgtcaccccagaactatctcctgcttgcgataaacctcgcatttcaaagcggaaacgaacttcttccccaccgtcgccctcttcgacaagtcccggagaccatcgtcgttcatcatctcgaagcactcgtcactctgcacagacagctcgccaaagctctttacattctcatcgccgcgcagctaccatcacagcccctctcacgccatcagttcctagcaaagatctggaagccaagcgggaagaccttctggccctgcatcgggaatcctgtcgtctatttcaagacagtgagcgaactattccgactcagtatgaaagagcgtactttccccaactatccacgatagtcgcacacaaccgtccg

SEQ ID NO: 4101 - DNA, 391 bp, Aspergillus oryzae
  modified_base (5)..(5): n is a, c, g, or t
gcctntagtctcttgtgcccacgcacttagccttcgttttctcttctcgaagcaagacaaaagctcgggccatccgtggcgcgatcgatcaaaacaacccaaaaaaattacataccagtctattaccttactaccgttattattgattgttcacttgctcgacaatctgatctcagatctgaaaaacgacaaacaaggaactgtctcctatttatactcctgtattttattactccgtttgatgcctataacattctcccaggcgtgacatactttataacttctctgatgtccacttggaatccgtttgaccacttgaattgttaaaatttcaagctatgacagatcaggataattcttaccgacctcgatctcccgatttttccaccct

SEQ ID NO: 4102 - DNA, 627 bp, Aspergillus oryzae
  modified_base (32)..(32): n is a, c, g, or t
  modified_base (39)..(40): n is a, c, g, or t
gcgtccgcaggaaagcaactggacgtttcagnggcccannactctgcctagtgtcatcatgcgaacagccccgaatgtgattatcacaggaacccctggcgttgggaaaactgtccactgcgaacaactagcgcaagataccggtctgcgacatctgtcaatcaatcaggtcgcaaaagatcgtgattgcttcgagacctatgacgaggagttgaaaacttggattgtggatgaggataagctgctggacgctgttgaagatgagatgcttcaggggggactcttgattgactggcatgcatgtgatctattccccaaatcttggattgacctcgttgtggttttgcgatgcccgtctacatctcttctatatgaccgtctttcatcaaggggatataaggacgcgaagctacaagaaaatttagacgcagagattttcggtgtcctattggaagaacctgtgaagccttcgacgaagaagttgtggtcgagcttatgagtgaaaaggacgacgatgtagagggaaactgcgaaagaatctcaagttggggtatcctcttggaaaatcaacccaaaccttaacgcgaattggaaatattttagagatgcaccacctatcaacgtcgt

SEQ ID NO: 4103 - DNA, 705 bp, Aspergillus oryzae
  modified_base (483)..(483): n is a, c, g, or t
gagaagattgctgccaacgggttcttcggagggtataattgggccgtctggtctaccgtggttactcaagcaatcgggggaattgcaacatctttctgtataggccatgcataccgagatgcgaagaatgttgctactgccaccagcatttttctcactacgttagggagtatctggctatttgagtttgagctcactggtaattttattctcggaacgtttgcagtgcttgtggctacgtatctttgcgaagacccgaattcggcttccagcaccggcaagcgccagggacttcgcccgccaccgattcgcatcgaccagtatgagaaagaatccaaaagcgacgatttttcgcccgcgtcccctccaccgaacgagttttcgattaaactccccggaacgccgttcctgtctgatgccggcctgtcgacctctaggcctacgtcaccaggccatgctaggattaatgcaagcccggaccgncagcggtggttatttcgataagcagctacgagaccagtgattttgacgatactgatacgaactcagatttgcatgcaatgtgtacattacgctttgcatttggactaagtcctatgggaagtaaataagcatggatagaagcgaagcttttcttggttcatcttgaacatcgacatatttctcgtgcatgtgacttttgatttggtcctggtttccacccct

SEQ ID NO: 4104 - DNA, 656 bp, Aspergillus oryzae
  modified_base (474)..(475): n is a, c, g, or t
  modified_base (490)..(490): n is a, c, g, or t
  modified_base (547)..(547): n is a, c, g, or t
  modified_base (552)..(552): n is a, c, g, or t
  modified_base (620)..(620): n is a, c, g, or t
  modified_base (643)..(643): n is a, c, g, or t
cccacgcgtccgcttttgtgttggtctggcgttttgtgtgtcaatgacgggtttgccttctctatagtcccggttatcctcaggtaccaatggagcgcgggagcccctagatgtgatcacaagtcaagattatatcgcatcgcgtcgacattcacacaaatacgatcgcttgctatccttccgaccactcacaccttgacgagtttgatttccttgtttgttctccgcatacttgttacgattaacgaaacgaattccctccccgaaattacgcgcctggtcaacttcacctcaagtttgaccaacgaagctgcaccattgacgaaaaccgatatattttcttctaaaacctcccttattgactcttacaaactactagtggactgctaggataggaatttcgggtgcgcattcaattgggccaaagagcgtgtgcgacgttgaatcgaaagtccgcgcttcccttgacgccgnncattatacctctcangacgtgcgaaagctttaaaaggagcgaaatgatagtggcataggaagattggaactnagatnaaccgaatcaaccgggcatttcgatcattccgacccggcttgattctatatcggtgagagatacgacnggaaccgccgtgcatcatgactnacccgaccggcaa

SEQ ID NO: 4105 - DNA, 510 bp, Aspergillus oryzae
  modified_base (494)..(494): n is a, c, g, or t
cgattgggtactggcgtgaagaaggggttcatgattggaggtgctgaaaagaaggataatactgccgatgaagagagtgtgaggactttcagcatcgaatgggcaggaatgtgagaccattagcccatattatcagactttgacggaccagtcttatgccgcacgctggcgatgcggacattcgttcagcggatacgctgtatgtaacgtgtgccgcaaccctcgacgcttcctgggtggaatatgcccactaacggaaacgccgctgttgatgcttggtctacatagcctacgattactgttggtgctcaccgacatccatacgggcgacaaatccaagcatacctgtgcatgctgaggttagtggatatgctagcagctcggtctagccatttgacccatggcacagccctttgacaatgcgacttattatcaagtcgaatgtcaagtctcatctatggttaccataagagactcaactatcacatcgaagntctatcattttctatg

SEQ ID NO: 4106 - DNA, 690 bp, Aspergillus oryzae
  modified_base (394)..(394): n is a, c, g, or t
  modified_base (489)..(489): n is a, c, g, or t
  modified_base (495)..(495): n is a, c, g, or t
aaccatatgaattccatgatgtcccccaccactccactctccggaggggtccctggcggtggctcgggaccgaatatgggaggctttaattcttattatcctgactacatgatgggtcggtagagagatgctgcatatcgtggagataatgtccgacatgtttgatgacgatcactgggtttctggcgcattggggatttgatttgatatttcacgagctagattagcatttggaggttccccttcctcctgggagtaaggaacatgggactctggcttctatagcttgcttgtcgttttcgcttcttccctcatcctcctttcgtttccttgcaatgtacttgaacaagacaggattgtgggttttccattcttattttcttcttttgggggngcattatcgtcttgacatttgcttgatatttccttcttctttttcctttatacctttccgacaagtggctccgtgtttgttagttattcccctgntgttgngtttcctacacattcataccctgtgctgtactgcgatttctgaattattgataatagtgttcgaggagttgtctcaagacgagctttgtctgtggtcaatcaagtggcatcgagcccatgtcgcatcatttatccggcgtcactgtctggattcagaggggtttagcaatgcttttctttctaccgtggatggga

SEQ ID NO: 4107 - DNA, 291 bp, Aspergillus oryzae
ccacaacactctttagcagtgggagacaacatgaaatcgtccctcttttgtatactttctagcattgtggctgctaatgccacaagcgtcccctcgttcttagctcgagactccgtctctgcgtcactctcttcatcagcatctcttagtacctcttcctctggtgcctgtacaggaaacactgccagcactcgcgatcaatggtgcaactataacatcaacactgactataccaccaccatcccggagacgggtgtcactcgagaatattggtttgacctcgagcatgtc

SEQ ID NO: 4108 - DNA, 586 bp, Aspergillus oryzae
  modified_base (435)..(437): n is a, c, g, or t
cggacgcgtgggttcggatccgcagaccctctacgacaaccgtcatcttgtccttcgtggcgagaccgcttccgctgtcatgaaggtgcgcgcggcaacccttcgggcattccgcaaagttttcgaggagaaccgcatgctagaagtgaccccacccgcaatggtgcaaacgcaggttgagggtggtagtaccctgtttaagttcgattactacggcgagaacgcctatctcactcagtcttcccaactgtacctggaaacctgcctcccatccttgggtgatgtcttctgtgtttgcccgtcattccgcgccgagaagtcccttactcgtcgccacttgtcagagtatactcacatcgaagctgagcttgacttcatcactttcaccgatctcctagaccacttagaagctgtgatctgccgtgtcattgaccnnntcctggcccgaacctgagaccgcagcctttatcaatcagcttaaccccgacttcaagttccccaagccgtcccttccggcgcatgaagtactcttgaccgccattcaatggctcatcgagcaccgaaattcccaacgaagaaagggaag

SEQ ID NO: 4109 - DNA, 456 bp, Aspergillus oryzae
  modified_base (125)..(125): n is a, c, g, or t
  modified_base (165)..(165): n is a, c, g, or t
  modified_base (199)..(199): n is a, c, g, or t
caccgacagactgcatagtttctaagcggcaatagaagtgatttgcatggagtagggaaggctctctgataaggaataacaacagacaataccgggatataacatataccttgttatcaacgctngccaaacaaccacttcagtccaaatggatcagacacactnccgggccatggaggcccttcaacccttcgtcctnctggccaactcaaatagcgctacatcaccgaaattcgtcgcaaacctgatcacaaatgccacttcgagtccgaacacttatgtattcgcagagctgctagagacgcctacagttcaagcccttcggtcagaggacacccccgcggagtatcaaggataccttacattactggaggtctttgcctggggtacatggcaggattatcaaacaacgccgaaccttccttcacttaacaatgaacaaaccctaaagctccg

SEQ ID NO: 4110 - DNA, 487 bp, Aspergillus oryzae
tgacatctgaacgacacttatacgcctctcactatgcctctctccaagctacagggagtgaagctccccgcgtcggccgacttccacgtacaccttcgcgatggtgatatgatggagcttgttacgcctacgatcagacaaggtggtgtgaacacggttttcgtcatgcccaacctggtgccgccagtgacaactgtcgaccgcgcgctcgactacaagaagcgcctgcaagccattgaacccaatgtgaacttcctcatgtcgttgtacctccacgagtccgtgaccccggagaccatcatcgaagccaagaagcgcggcgtcaccggtgtcaagagctacccagcaggcgttaccaccaactcgtcctctggcgtggtggattacacccaattttacccggtctttgcagagatggagcgtcaggacatggttctgaatcttcacggagaggtcccttccactggcgatgtaactgtcttgtcgg

SEQ ID NO: 4111 - DNA, 304 bp, Aspergillus oryzae
catctctccaacgggtgtgtactattagtatgtactcgatccagcactactcacatggagtgtatacttaatgtgagcgagattttggtgctgtgaactgtgactgcaggctttcgaagattctgtatcagtaaccttctccagtctttctctgctagcatgccatgcaaattatactcgtgtaccaagtctggcgccctggctctggtgtaacatagacgttgtacgcgagggacaaagggaacccctggactgtttataaaaagtagactgtcactttactatgctgaaacgcccagcttct

SEQ ID NO: 4112 - DNA, 436 bp, Aspergillus oryzae
  modified_base (416)..(416): n is a, c, g, or t
ctttcccaccccaaagtggtcccctgtttagaaggccttcgaccttccgcctctcggattctccgttgggacttctccctcccgatgggtggatcccgatacgccgccctggacagtggacgctgtcgagttcgaagacgatggcacctccgagcgggtcggcggcatacaagaagaaagatggcaccctgaccatgtcccaggatcgccagtcgatctcttggatcccggcggctggtggtgcgacgggaacgatcacgctgtctgtttcccagattacgaatctacaacagaccccagcaagtaacccaaaagtcatgttgaagatctttgtccttcccccagatgcgccagataattctcccgagcagtacgtcttcaactttaccgttggagccaacgcgcgtgcggaagcngacgctattaaagatgcact

SEQ ID NO: 4113 - DNA, 493 bp, Aspergillus oryzae
ggaaaatgtgggccggttgcacatgtacaagtagcaacatttcaagactccgggaaatgtaaaggttatgcctgggtgacattcgaagacctcacagccgcagaggcagcggtgaaaggctttgttatggttaacgaagatgaggaagatgaagaagtacccgggtctgactccgaaaattacaagcagcctaagaagctgaaacaaagaagggtatgggtaaaccaaattatgggtcggcgtatgcgaatggagtttgctgaagatgcaacaacacggtacaaaaagcgcttcgggaaggatggcgaaggcaagaaaacacaaactacagatgttcgtgggacagaaccgttcgacgatcaggatacaaccggaagacccctcaaagatcacgatctgcaaagactacgcagggaaggacggattactcaagatacgaccaggaaaccgtgcaaaagcttagtggtgccattgttgagtctcagggaaagaa

SEQ ID NO: 4114 - DNA, 520 bp, Aspergillus oryzae
gacgagcaaaatctcgtcagaacctttaaggatggaaagctcaagccggactgtttctccaccaagcgtgtactggggttccccccgggtattggcgtaatcttgatcatgtttaaccgatttcacaactacgtcgtcgaacagctggcgtcaataaacgaaggcggccggttcactaagcccgacgaatcagacaccaaagcatacgcaagatatgataacgacctgttccaaaccggtcggctagtaacctgcggcctctatgtcaacataatcctcaaagactacgtccgaacaatcttgaatgttaaccgaactgacagcctttggagcttggatcctcgtgctgaaatgaaggatggattgctcggtgaagcagccgctcaggccacaggtaaccaagtctcggctgaattcaatctcgtatacagatggcattcttgcatttcccagcgtgacgagaagtggacagaagatttgtacaaagatatgtttcctggaaagggacccaagcagtgtc

SEQ ID NO: 4115 - DNA, 676 bp, Aspergillus oryzae
  modified_base (555)..(555): n is a, c, g, or t
  modified_base (660)..(660): n is a, c, g, or t
cccacgcgtccgcccacgcgtccggtccgtccttgctccttgcggccgaccttgaacgttcgaccgaccatggatgaacttttcgatgtttttgaggaccagccccaggctgttaagccctctgatggagctcccaaacgtcccaagaaagacaagagcaagaagcgtcaggtcaatggggatgtgaaggaaagcggtgctaccgtagaagcaaaggaacctgtcgccgttgtcgatacccccgttgaagagacttccgagccagaggagggcgacgcgcccacgacagacaacaatgaacaaccggatgcgaaacggccgcgactcgagaaggaaccggaacctgtggtagccgacttgttcgagacagcgcaagagcgtgaagtcgccggatctgcaggacttcaagccgccaatgattcggcatccgttgtgctatcgcaccaaatccgccatcaggtcgcgatcccgccgaactatccatacgtgcccatctccgagcataaacctcccgagaacccggcacgagtatggccgttcaccctcgatccgttncagcaggtttccatcgcatcaatacaaagagaggagaagtgtgctagttttaagccacactatgcccggaaagaccgtcgtcgccgaatattgctattggccaanaagctttgaagaacaa

SEQ ID NO: 4116 - DNA, 651 bp, Aspergillus oryzae
ggtgagtataatcagtgtcagactcagctgcgcgcgctgtacgcacagcaacttgggggccaccctacggaattcaaggcgtaccgtattctgtatttcatccacacccgcaattggacggccatgaacgatgccctggccgatctaacagcagcagacaagcgagaccctgctgtcaaacatgccttagatgtccgctcagctcttgcgcttggaaactaccaccgtttctttcaactttacctggacaccccgaatatgggagcttacctgatggacatgttcgtggaccgagagcgactgtctgcgctgacagccatttgtaaagcttacaagcccgatgtaaacatccgtttcattactgaagaacttggtttcgagtctgacgagcagagcgcacacttcatcctggaccacacctcggaggatttgctccaggaaaaagatggagccgtgaggctgcttacgggagcgaaagccgcacagcttttcgaggctgccaaggctgatgctcatcggatagtcgacatcaagggtcagatatgaaactcttgaatagcccataggacacacaattgggagacggcatgtcaatcaccctataaccacttcttttttatatctgctcttggtggttctcattttcctttt

SEQ ID NO: 4117 - DNA, 634 bp, Aspergillus oryzae
cccacgcgtccgcccacgcgtccggaacgtcacatctccacccctcatttgtttgatcaattgaagtcttcagactatcccttcaccatgccgctctcccctgaacaaatccagctcatcaaggccaccgtgccggtcctccagcagcatggcaccaccatcaccaccgtgttctacaataacatgctgacggcccaccccgagttgaacgccgtcttcaacaacgccaacaaggtgaacggccatcagccccgcgccctggccggtgccctctttgcctatgcctcgcatatcgatgacctgggagctcttgggcccgctgtcgagttaatctgcaacaagcacgcgtcgctgtatatccaacccgagcaataccagatcgtgggcaagtttctgttggaggccatgggcgaggtcctcggtgatgcgctgacccccgagatcctggacgcctgggccaccgcatactggcagcttgccgacctcatgatcggtcgtgaggccgaactgtacaagcaggccgacggatggacggacttccgccacttccgtgtcgccaagaaggtccctgagtcctcggagatcacctcgttctacctcgagcccgttgatggcaaagccccttcccaaagtt

SEQ ID NO: 4118 - DNA, 662 bp, Aspergillus oryzae
  modified_base (608)..(608): n is a, c, g, or t
gcccacgcgtccgaacccaagcaaacatcctcatgccgcccacaggctcagacgagacactgcggtggtagtagtacttttaacagttgctacccgctgcttatacatcagcgaattacggtgagactggattcgcgaatcatccaggtaacttgcgttctcagcaagaatgggtgatttgcgaaagatactattcgaaagtcaagggccttttgccaccatatcttggacggcacgccttctcgtgtcgtctgcagggcactctcgatagagatactgtcctgcagttgaatagattcccgacttgtgctttcattagtagttaatttgaaacgaaagttgacatcacttgcctgccttattcgacgactcgggggatggacggactgcgacgcggattgctttcttttttccaaagtcttatggatcgaatacaagtctaacataccgttccgcctcactatagtccagcaagtttgcattccgaccgctattctcaatgtcgatgttctttgccaggcaaagtctggtctcggaaagaccgccgtcttcgtcttgaccaccctttaccagctggagcctgtccccggagagtgctctgtcttggncatgtgccacacccgtgagttggcttaccagattaagaacgaatatgctcgttt

SEQ ID NO: 4119 - DNA, 670 bp, Aspergillus oryzae
gatcgattgagaaaatttataccgtgaagatgacgtcgaaagatatagagtcgaaaacagccttggaattggaggatctcaaagatgcaccccaccgtgatcctcttttagaattgtttccaattcttcaggacaagacccccgaagagttggagaagttaaaccgttctgtggtccgaaagctggactggtatttcctgccatgcattacaatgattctcttgatgagctatcttgatcgtatcaatgtctccaatgcccgtcttgctggtatgcaaagcgaccttcacatgtcagatacagtgtggtctgcgggcatttctcttttctatgttggttatatcatttcacaggtgccagcaaatgttttcatcgcgaaggggaagccaagcattctcttcccctgtattgcgctagtctggtctgcggtcactatctgtatgccggctctgacctccggctggggattttgtctctgtcgcttcctggttggtgtggctgagggccctttcgtcccggccgtttctctgctcacctcatcatggtataccaagcaagaatcaccattgcggatgggaatctggcacgcgggtaatattatctcgaaccgttttctctggtcttctcgccgctggcattctcaccaacatggatggaatagcgaaacttc

SEQ ID NO: 4120 - DNA, 681 bp, Aspergillus oryzae
ccgccgcactcaattcccccggctccatattctactcctgttccgcccatgtctcatacaccagccccgtatgattctagctactaccaaagccaagcctatggcattcgccagcgcaaggccgcacgagcacagcaggcttgcgatcaatgccgagcgaggaaagcaaagtgcgatgaaggtcgaccgtcatgtagtcattgcaaggaaaacaacttgaactgcgtttacaaagaagtccctccgcacaaacaagaaaaggcgacccagctcttattagatcgattgcagtcattccaagacgctatattagacagattcgatcgtttagaccagctaaatacggagcacgggaacaatttcaactccatcctggcgaagatagacgccaagtccgcatctaaggaaccacggaaaccggcagtcccgcaattggcaaagaaggacataatcgatatccaggaatcaaaagccaaggatgagaatattgctacaatgcaggagcagataccagaaccaagtgaaacgaccacagagcaagttgttccttctggtgaggatggtgagctctcaatccctgtagagcatacaacagcggcccacaaattgctgttgtggccttcaattcggaatcttcttcgtccaagagaatatgatgaggattatgtgatgaaacttgaa

SEQ ID NO: 4121 - DNA, 672 bp, Aspergillus oryzae
cccacgcgtccgcccacgcgtccgagcagtcgaaacagcctgttgtctcgtacagcacagcccctgagaccaccaagactaagcctgcgcccagtaagcgtgccacttgggcaaatggagccccgatgcctatcttgccttcgatccgaccggtatctccgctttccaatgcagtcacagcacaggccaattcatgtattgccggtgataacggaaaagcgagcaagaagattggcaggcagctttcgcttaactcccatggcaaccactacgctgatgtccataggcaagaagcagagagagctctcaatggtggaaatcctcttgttggtgccaaccagaaggagagctttttctcccaccttcgcaaacgtgctcgtaggctatctggtcgtaaccagggaaacgtgggaagcgataatgttgaggctaatgctggttgtatgccttggtcgaatcgttcatctttagccttggacactgccaatgctaacgatgccaagcaaggctctgatctgtcggaattggacaaagcccttcagggcgtgaaatgctctctggattcgactgcacttggtaatgttcctgttcatattacctcgcccgtggagggtgtcaagaggcaatccatgcctcaaggatctatacgttcaatgggagacagtcccgttt

SEQ ID NO: 4122 - DNA, 382 bp, Aspergillus oryzae
acgaagataaactatttcttgtaccaaatatcaaaaccaacaacccacatcaaaatggacaagcttgcctcgaagcttggtggtggacacaagcacggtggtgctggtggtgcccagaatgaagactatgttgacaagggcctcgactccctcgagaccaagtacggccatggcaaggtcgacccccataactcgaaggtgcgacagacaaatgaacgcatcactgattccgcgaggaacaagttcgagagtgctactggaaaacatgtgccctctaagatctccaactagagagaattcgttatgacagtcatgattgagacagcgaaatgtattatactactggctatgcatgcataatgaaaacaacaggttgtgtatt

SEQ ID NO: 4123 - DNA, 672 bp, Aspergillus oryzae
gtccgttcccggcagctggtgatctttcaatgcagccatgagcggtcaagcagccagttactataacgaaaacgaacgctttggcggaggccagcctccacctccgccgccgcagcagcaaccattctacaataacaacggcaataatggcaactatcaatacgccgaccccaattatcaaaggggtccggagcccaagcagcctcaagaacccccgccgacttataatcaggccgtctatggttttgacgatgctttcaagattgagaaacccaagtttaacgatatctgggccggtcttctgcttatcgcggtgttcctgggatatgttgcagtatcgggaatagcgatccaccgatatgcgaaatacaaaggtttcaatggcggcggcatctatgactcatccaacaccttctctcttgacactaatacgctggtgctgtttatatttgtactctgcgtggcactggccttctcgtgggcctacttcctcggagctcgctatttccccaagtttttcatctgggctacagggattttgaacatcgtatccgctttggccacggcgatttattatctggcgaagaagcaatatggtggaggtattgtgttcctcatctttggcgtctttgccatcatttgcttcatcagttggattccgcgcatttcatt

SEQ ID NO: 4124 - DNA, 681 bp, Aspergillus oryzae
  modified_base (398)..(398): n is a, c, g, or t
  modified_base (477)..(477): n is a, c, g, or t
  modified_base (575)..(575): n is a, c, g, or t
cccacgcgtccggggctcagatatatgcgccggtagccgtcgaatgcacagcaatcgttccccgctctctacgacggcccttcgattcggcagaagcaagcctaccgattgccgccctcccaagagattcgtggatagataatacaattgaggttcgcgattatcgcgcaagctaaagacgggcaggatgcttgatggcggattgggcaagttgcacaagaggatgaagcgctttggtgatacgttaaaccccgatgatgcatatttgagctactatgacattcgatggaggatatgcaatcactcaagaatgactggctcacagataatatcatatccttctgggaggaatacttggaacgcgagttcctcgtcaattataaatcatccaatattgntcttctgcggcccagcatgtcgttcatgatcttgcagacgcccaatccgcacacactccgcgaggccttacccgacttnacgcggacaacgcatgtcttcctccctattaatgactgtcgcaatgttactgaagccgaaggcgggactcactggtcgttgcttctcatatccattgntgatgggatagcattccattacgattcactttctcctggaaacgttcgggaaaccgggacggtgaccatgaaatttggcgctttactcaacccgacccattcgatt

SEQ ID NO: 4125 - DNA, 660 bp, Aspergillus oryzae
aaacctcaaacccttgcggcaccatgttcagttggtatcaacgaagcttaatccagcgccccgtcctgacccaaagtttaacgacggcgtgcctcttcgccgtgggagacggtctagcgcagcaaggggtagagaagaaaggcattgctcgtcatgatgtaacccgtactgcccgcatggcactctacggcggagctgtgttcggtccggttgccacaaaatggtttcaattcctgcaaaaccgaatcaatctcggcagcccggggaaaaccctcgtggctcgcgtggccacggaccagttagtctgtgctccgaccatgatcggcgtcttcctctctagcatgtccctgatggaaggaggtgatccgagggagaagctgaaaaagacgtattgggaagccctccggactaactggacgatctggcccgccctgcaaaccgtgaatctgtatcttgtaccgttgcagtaccgagtactgacggtcaatgtattcaatatcgggtggaattgcttcttgagcttcttgaacaatgccgataatgtcgagaaagtcgagtttcaagagatacctgctctctgattgctcctgggctattcgacggccaaaggtctctaaattggtcaaccagacaatatgcacacaaaactggggtgagaaa

SEQ ID NO: 4126 - DNA, 711 bp, Aspergillus oryzae
  modified_base (314)..(314): n is a, c, g, or t
gatttgattcgatcagtctgagttccaggcggcaactctcaacacctgttgttaccctcctatcagaaacaggcttgttcttcagtgtctctcgcggtcgctgtctcaaaatgtctcaacaaaagtcagctatcctctccgtctatgacaagaccggactgcttgacctggccaagggcctggccaagaacaatgtccgtctgctcgcctccggtggcactgccaggatgatccgtgaggcaggattccctgtcgaggacgtctctgctatcacccatgctcccgaaatgcttggtggccgtgtcaagaccctncaccccgctgtccacggtggtatcctcgctcgcgacattgagtccgatgagaaggatctggccgaccagaagatcgcgaaggtcgattttgttgtttgcaacctttaccccttcaaggagaccgtcaacaaggtcaatgtcactatcgaagaggccgtcgaggagatcgatatcggcggtgtgaccctcctccgtgctgcggccaagaaccacgctcgcgtcaccatcctttccgaccctcaggactaccctgagttcctcaaggagctcgatgccggcgagattaccgagtccagcccggaagttgtatgccctcaaggccttcgagcacaccgcagactacgacactgccatctctggtttcttccgtaagcagtatgcgggcaacggtgagcaa

SEQ ID NO: 4127 - DNA, 641 bp, Aspergillus oryzae
  modified_base (44)..(44): n is a, c, g, or t
  modified_base (318)..(318): n is a, c, g, or t
  modified_base (531)..(531): n is a, c, g, or t
  modified_base (583)..(583): n is a, c, g, or t
aagagatttatgcttaactcgtagtaggtaagctttcgaacaanttccctgtgttggcagattttggcgcccctcttccaatgtttcatgaaccagcgggcaaagcacaagtcgtttttaattccccggattaaataaatttgccttgacattgattgtcccaaacactctttgggcccgtttgctctcacgatcaggatgggactaggtgttttagaagacactgcacttgctcaggttcctggcacttcagatatccttaaaagagaatgctttaatgagcagaccgatgttgattctaacctaaaatacgaccgntcgggtacggttcctatcctcctagttcctcaaccgagtgatgatcccaatgatcccctgaattggcccttgtggaagcgtgatattacaccgctagccctttccttcgtcgcagttctttgtgcaacaacaaattctcttatggctgccaataccgtgacgatatctcttcactttaagaagagcttcacttcggtcggccttcttactggntatccctttgtggtgtgggtgttgctgggatattgatcgtgccgacggcgcnagtatggggaaaaacgtcatcttttcttcttgggaatgttctaatggtgataagctgt

SEQ ID NO: 4128 - DNA, 637 bp, Aspergillus oryzae
attcctattctcttcgtgatcgtcatggcgacgttccctctggtagtcctgacagctctgtcgaacccagccctgaatctagcctggagtgtctggggtcctttgtcgaaaaggaaaacgctcgtgtgaaggtcgagagccgcgacattgaggccggtgaacaatcccaagatgagcttgacaaccttgtccactgggatggccccgacgaccctcggaaccccatgaactggtccgatgcccggaagtggctcattattggcctgatatcattgagcagtttcaatacatctctggtctccaccatttttgctcccggcgtcccggaagttctgaaggatttccatactgacaactcttcacttgcatctctcatggtctctatctacgtgatgggatccgcagtggggcctcttgtacttacaccaattacggaaatgagtggaaggttgccagtgacccacggagcgaatatcctcttcatgatcgcagccatagtctgcgcatccagcatcaatatctccatgctcattgtttctcgtctaatcatgggaattgccagctcagtgccggtaacagttggaggagggttcgtcgctgatatgatgcccatggaaagacggggaactgcaatgac

SEQ ID NO: 4129 - DNA, 703 bp, Aspergillus oryzae
  modified_base (34)..(34): n is a, c, g, or t
  modified_base (44)..(44): n is a, c, g, or t
  modified_base (428)..(428): n is a, c, g, or t
tgactcccgtgttgtgcttccacaccttactcantttttctacntctaagaacttgtcctccagcttacctaccatcatcttgtcctgctcaaatctgttgtgcggggtaaacagcgatggcggaccgacaggcagtccaacaaaacctcaatggactgctctcgaaactggatgatccagatcctgacatgaggtacatgtcgctgaacgatctcctgggaatcctcaacagcccgacctctgcatatctggctcacgatcagttttcctcgtcacggcttgccgacggcttgctcaatgccttagatgatcaacacggcgatgttcaaaatcaagcactgaaatgtctcggtccacttgtgaatcgactgccttctgaaagcctcactaccatcctcgaaaagctctcgaacctgacagcatcccnaactatcgatacctcagttcctaataccgctctacgcgtcattgtcacggcccttccccgttctcaagctgggcaaccacctaccccagatgtttccgtagcttactcatctgtctccaaaattctcatccctcgcttgaccggtcccacaccatctcaatctggcagaagaggctccgtcatcaagggtatgctggagaaagatccttctaagggatttagcagcgatgcgattgatgtctgattcaagtcgtcacctgcttcggaccacttct

SEQ ID NO: 4130 - DNA, 627 bp, Aspergillus oryzae
  modified_base (449)..(449): n is a, c, g, or t
cccacgcgtccgacggtgcaaagatgcgtccaattttttccgcgactctcattctactgctggggatgatgggaaatttcggctccctgttggaagctaaggatgcacccacgatcatccagggaatgcagaatcttaacgagaagactcatgtcgcacggcaatcgctagaaggattcgatggcagttttattaagggcctattactagcgagggatctctttgagactacaaaagcagctgaggcctcaagaaaagctttcgaggatgcggacccgctgtcatacgacgatgtacccgacattttggagaactaccacacagtccggaagacaattgatgatgccctgaaggctgtcccggcaaaggtcgactccatagactccatgggtgtccgcatgttcgcaaccgggcttctgcgaaattttgctgccgacagaaccgccgtncgagaaggcgacgaaggcgaagatacctgtagaaaaccatacaagtatccagggccctattgatagccttgcaaactcatttgacgacgcaatcttcgctattatctgaaatcaaatcgtccgcctaattaccggggtggcgtgatgaggaaggcttgatgccagtcgtgctcaaata

SEQ ID NO: 4131 - DNA, 636 bp, Aspergillus oryzae
  modified_base (596)..(596): n is a, c, g, or t
tccgacttagtattcggcgcttcggcaccactgcgctccgcgcagcagaaggatcgaccgcctatagcgtccgggtgtcgcaagctcagggctacgttaacggtcttacagaagcaattggaaacacaccacttatccgattgaagcgcctctccgaggagactggctgcaacatcctcggtaaagctgagttccagaaccccggaggcagtgtgaaggaccgtgcagcattgttcgtcgtcaaggatgccgaggagaagggacttttgaagcctggtggtacagtggttgagggaacagctggtaacactggaattgggttggcgcacgtgtgtaggtcaaagggctacaagcttgtcatctacatgcccaacacgcagtcccagggtaagattgacttgttgcggctgttgggagcggaggtctaccctgtgccggccgtcgctttcgacaacccgcagaactacaaccaccaggcaaggagacatgccgaatccctggataacgccgtatggacgaaccagttcgacaacactgccaatcgccaggcccacattgagatgaccgggcccggaaatctgggcccagactggcgngacaggtccgatgctttcactttgtgctactggaacccgg

SEQ ID NO: 4132 - DNA, 744 bp, Aspergillus oryzae
gcgaaaaaagaagcaaaaaaaaaagataaaaggatgccaagaaggcggaaaagactgcccgtaagaccggcctttacagtaccaatgcaagtggatccgctttggacgtacctacagggctaggaagggttgcgagcagctcttcctctgttatcggcgaggaaagcacgcctgctggcaagggtaaagaagtggatcgtgcatccccggaagcccccattgatgctacgtctacatgttccgttactgcgcccgctagtatgaatgctgtatacccgcctatgaattcggcagatcaacatcagtctatgcaatcttccgtcccacaaacctcacccagggagctttcgaaaccgtcacatttgcgacatgtctcaagtgcttcttcatcgttctcttctcttgttgaatcgatgtctggcgatcacactgggaccacagaggggaatggctcgtctacagaaccgctgttcaattttcggagtctagctgccgttatcggcgatgaagacaaaagggaggaatctgcagagcatgtagaaaatacgttatcaaatccgcaagctgaggggtctgcctcgcggtccgtgcttccagtggatcatgcgcatactgatgactcggtctttaatgctgatgcaagccacgcccgctggatcggacttcgcgctacaaagagagtcaaggatatatgatacctaaagagcttggaaacacgtttcagtcgagatcaccgacttctac

SEQ ID NO: 4133 - DNA, 371 bp, Aspergillus oryzae
  modified_base (34)..(34): n is a, c, g, or t
  modified_base (36)..(36): n is a, c, g, or t
cttctgggcctttggttcgcagtagttacaaggntngtgaggcgtttatcgaaaatgtcttgaaaaagagacgcgctgctggtaccgcgggcgagtctgttacggatagcaaggctgctgtcgatgaggctactcggtgaaaatacttataaatctcttttcttatgctctactttctctcggcgcaggtttaggttggtattttatcaattttatgaaatgtattgatattgacgggcatgggccgtcgttcgcatatgttttttacttggggtttgggaggtaaaatagacagcgtcctccgggcatgtcctgagagttcattgagttcaacacttatttttagatggaatcaacaatattatctgcat

SEQ ID NO: 4134 - DNA, 531 bp, Aspergillus oryzae
  modified_base (65)..(65): n is a, c, g, or t
  modified_base (67)..(67): n is a, c, g, or t
ggagaggaagaggagggagcccactcctgaggatgatgagacgttggatcctgctactcgtcgtngnagggctttggatcgtgctatggatgaggcgctcaagaagcctactaagaggcgttttcgcaaggcggatggtattgatctggaacaaatggccgatgccgagattgaggatatgcgcaagcgcatgacccatgctgctcagatggacgctattagtcgtcgggagggcaagcccgctatgcataagttgaaaatgctgcctgaggtggtctctctactcaatcgaaaccagtatgtcaacagtctggttgaccccgaaatcaacctgcttgaggcggtgaagttcttcctggagcctttggatgacggctcgctgccggcctacaatatccagcgtgatttgatgacctcgctggctaagcttccgatcaacaaggaggcgcttgttgcgagtggaatcggcaaggtgattgtgttctacacccggagtaaacgtcccgaacccggcatcaagcgtatggctga

SEQ ID NO: 4135 - DNA, 608 bp, Aspergillus oryzae
  modified_base (538)..(538): n is a, c, g, or t
cggacgcgtgggctgctgtattactctgagcttttgcgtctaaggaaggctgtctcaatacctaggctctacggagaggtccactttctcttttaccacgcctcctgatcgttcttttccgctccagctagcttgcttgctttaccccgcgggccgtctcttcaccgtcttgatcgcctctacctcgccctgacaccctttgtccaatcttctgattctctctatttcgcaaaactccttcacgatgtctgcggaacaacctgccgaaactgcctccgctggtaaccctctggcagatcgtatcacgacggccgatggatcgaagcctgaaggaactactgaaacgaccgacaatgaacaggccgatggcgctgccgctcagttgggtggctccgaacttaacgagcctgactacacggtcgaagtcaaactcagcgatctccaggcagatcctaacaaccctctttattcggtgaagagttttgaggaccttggactggaccctcgcatcttgcaaggactctctgccatgaacttncgtaaaccctcgaagattcaagaaagagcgctcccgttgctctttgaacaacccttctaagaatctggtc

SEQ ID NO: 4136 - DNA, 705 bp, Aspergillus oryzae
ctgcaattgttgtcaagtgatgactttttcaatgacaacgaggtccaattcgtcgatgtcatcaactacgctacaatgtcggagttcatcattgtagcatcgcggcagccagaaaaccccgattcactggtagctagtacgagcgttgacggtaggactttcgcaagagcacagttcccaccaaacgttcaagtgcctgttcaaaccgcctataccgtactcgaaagctcaacgcacgctgttttcctgcatgtgacggccagcagcacagaagggggcgagtatggccctattatcaagagtaatagcaacggaacatcgtacgttcttagcatcagtgcagtcaaccgaaacagtctgggttatgtcgattttgaaaaggcgcagggcttagaaggggtggctgttgtgaatgttgtcagtaacgtcgctgacgtctcgaagaaagtgccaaaaaagctcaagactatgatcactcataatgatggagcgcaatggatgttacttccccctccaaccaaggacgccggatggcaagagctttggctgttcggtcgtagcagggaaaggcacggatgactgctcacttcatcttcatggctataccgagcgcaaaagatgaaaggggacacttttgcttctggatcccgcaatttggtcttgatgatggctgtgggtaatgtgggtgaccatttaacccgtgga

SEQ ID NO: 4137 - DNA, 629 bp, Aspergillus oryzae
cacgccgggaacgactgccaccgtggaagaagtccaaccttcttgtggtatgccgccagatctatgctgaggcagtcactctccttgcctttatcatcaccgccagcatcatagcacaggatagggatgaccttcttattctgactgagttgcgaggaatcctgccaattactcaatatcatgccataagatccatcgagttctgctaccacatagccaagcatcgaacgagtttcgacgactttcagcatcctctgtggtttacaagatgggaggatatgtgcgctactcttcaaagtatgagagggcttcaagacttgcacctgtggataaacaacgaatacagctacaacggacgcatagatatgatatcagagcaagagcagcagatcttgtagccacttcgggagttggccaggttgattaatgtgaaggccgagatttcctggcccgaaaacagttctacaggggacgttctagaacaaacatcgctcaatatcacgcggagagtcggcttcgtctgtccgtgtgcgatactagaagcaaaggcctacatcagcaggagtgccgatgcccagactacagaagacaattcttggagaatgccaactgagaacgaacgtctgaat

SEQ ID NO: 4138 - DNA, 532 bp, Aspergillus oryzae
gttcgacccgttcgtacttggcatttcttaggtaccctctaccccctttcattggcccttaccgtgcccacgagagcctcttccccatcatcttaattttcttcttcatccgattccatcatctgaagcttggtttgatcagtccatactgaccggtgcgacaatcgttctgccgacagacatctatcatcatgagttaccaacaacagcccccttatcctccccagcctgcgtaagtactccaatgctacttgatttttcttatccgtgttttgcgaccgggttcgcgatctctacccaggtagtgtcggaggctacgctgtcgcaattggccaaggcgcggttttaagggtcttgtccgatgtcatccgttggtttccccgtgaagtgagcggaccgaacagaaaagactcgacactagtcccttcaaagtccttcacaatttattctgactccgtcctcaatgcagctacggtcctcctcccggtaactacggaccttctcagggcggctacccttcccagcagtacgg

SEQ ID NO: 4139 - DNA, 683 bp, Aspergillus oryzae
ttcggctttcccccgtcgattcactcagcccgttgtcttcccttcccttcacttttcttttctcgtcacattcctgtatcccgtttatttgtcgcgtttccctttgtttttcctaatttcaaaagacatacgttctttcttaactttcctgtcttttatctctccgctttccaagacttaagcaccgcatgatcctgtacctttaactagacagtcattatggccacaccaccagttcgccaatggggagttactcctccgatctctacagtcttgccgaccccagatgagctcgctgcaaatgacgatctgatctctgaattgaagttgcagaacaacttcgaaagccctgcagagaccgaacacaggaagaataccctccagcttatccaacgtgtcacggtagagttcgtcaaagtcgtcagtcgaaagaagggattatcccctgctgcagtggaggctgcaggaggaaagatcttcacttatggaagttatcgcttgggtgtttacggacccgggtcggatatcgataccttgattgttggtccgaagcatgttgtcatcgatgatttcttttcagatttcccccctggtcttgaaagaatggcttcacaaggggctgttgagaagatgactcctggtccagatgccttcgtacctattatcaaacttgagttctccgg

SEQ ID NO: 4140 - DNA, 409 bp, Aspergillus oryzae
  modified_base (222)..(222): n is a, c, g, or t
  modified_base (246)..(246): n is a, c, g, or t
  modified_base (256)..(256): n is a, c, g, or t
  modified_base (274)..(274): n is a, c, g, or t
  modified_base (284)..(284): n is a, c, g, or t
  modified_base (288)..(288): n is a, c, g, or t
  modified_base (301)..(301): n is a, c, g, or t
cccacgcgtccgcccgccgaagaaagatttcgcattcgcacagaaaagtagatagcggctacagctccgctgcatcagttcgctctctacaagacaatcgcactggggcttctcttgattcccaagaatcaacgcaacggccctcaggatgtcgcaggtttacactcgggggtactgagttgtgcgatgtagaaaatcactcgaagttgagccagcagcttnctatgaaccgccgtctaagtcttnaaggacctanaatgagccctatatgggncacacgtggntggncaacaaacatggnaacaatgtgccttgagacaccacagatatcaaccagtgaacgcccaagaagcttatcctttacttcatcacaacaccctggtcacacagtgccactttctccgtactg

SEQ ID NO: 4141 - DNA, 667 bp, Aspergillus oryzae
  modified_base (17)..(17): n is a, c, g, or t
  modified_base (31)..(31): n is a, c, g, or t
ggaaacccccggtccgnttttcccgggtcgncccacgcgtccgcctgaatcaagactcggagggaaacctgcaaatcactcaacttgaaaccaaccccgtcctcggccaccaccatcacgacggaccaccatcatggatggcccaattaaccgccagccttcaggcaatgaaggacgccgtcaaggactgcatgcacggtccgggaccgaggcatccgaccgcaagaccccagcacggccacatgcaacctccagtcgaccatcaccgcacgatcgctccggagcatcaccgctaccaccacagacccggctactgggcaggtcgggagaagaacttcggcaggctcatgcgtccggtcgtcatgcctgcccttctaggtgtgatggccggtgtgatcgcctgcatggttggattcgtgctgggcaaaatcttcatctcagtattctactgtgttcggggttacaggaagcagcaccagaagcagaacgagactgccattccccggatagtggtggtggaaagcgctcccagtgaaaaggagcgcttgatggcgatgtgcgatgatcagtgtgaccatacaagatacgatctctttacactcttcactttttctttttctttgcgtgtttttctcagatagctctatatacccagtgtaacatgcct

SEQ ID NO: 4142 - DNA, 234 bp, Aspergillus oryzae
  modified_base (211)..(211): n is a, c, g, or t
gcccgccgaagaaagatttcgcattcgcacagaaaagtagatagcggctacagctccgctgcatcagttcgctctctacaagacaatcgcactggggcttctcttgattcccaagaatcaacgcaacggccctcaggatgtcgcaggtttacactcgggggtactgagttgtgcgatgtagaaaatcactcgaagttgagccagcagcttnctatgaaccgccgtctaagtctt

SEQ ID NO: 4143 - DNA, 580 bp, Aspergillus oryzae
gcctgaatcaagactcggagggaaacctgcaaatcactcaacttgaaaccaaccccgtcctcggccaccaccatcacgacggaccaccatcatggatggcccaattaaccgccagccttcaggcaatgaaggacgccgtcaaggactgcatgcacggtccgggaccgaggcatccgaccgcaagaccccagcacggccacatgcaacctccagtcgaccatcaccgcacgatcgctccggagcatcaccgctaccaccacagacccggctactgggcaggtcgggagaagaacttcggcaggctcatgcgtccggtcgtcatgcctgcccttctaggtgtgatggccggtgtgatcgcctgcatggttggattcgtgctgggcaaaatcttcatctcagtattctactgtgttcggggttacaggaagcagcaccagaagcagaacgagactgccattccccggatagtggtggtggaaagcgctcccagtgaaaaggagcgcttgatggcgatgtgcgatgatcagtgtgaccatacaagatacgatctctttacactcttcactttttctttttcttt

SEQ ID NO: 4144 - DNA, 574 bp, Aspergillus oryzae
gggctctcccccccagcgtctttactactgtgtcggaacaattaaagagaaactgctaccccaagaacggtgtcgctcgtataatcgtcgagaagccattcggtaaagaccttcagagctctcgtgatctccagaaggcgctcgagcccaattggaaggaagaggagatcttccgcattgaccactacctgggtaaggagatggtcaagaacatccttatcatgcgcttcggcaacgaattcttcaacgccacctggaaccgtcatcacatcgataatgtgcagattacctttaaggagcccttcggcactgagggtcgtggaggctacttcgacgagtttggtatcattcgtgacgttatgcagaaccacttgcttcaggtgttgactttgctcgctatggagcgccccatctcattttctgccgaggatattcgtgatgagaaggtgcgtgtcctgcgcgcaatggacgccattgagcccaagaacgttatcatcggtcagtacggaaagtctttggatggaagcaagcccgcatacaaggaggacgagacagtccctcaggattctcgctg

SEQ ID NO: 4145 - DNA, 697 bp, Aspergillus oryzae
  modified_base (35)..(35): n is a, c, g, or t
cttctctatcagttcaaagctctttcagtattttnaagacttcaaagccatctacacttccactttatctcttctcaaaagacaaaccagataccgatctaccttcttcaagatgtacacctacactcctacccacaagttcctcgttctctctcccatccactctggtcccatgaatgaccaggctgagagcaaggagccaactcaagtccgtgaacgctccagcagccagtcttccacagcctctgccggatcgcagctgaggggtgccttctcccctctccccggtggcttcctttacctgggacacgagcaagacagaaactaaattctgacgccacataagcttgcgcacgccatcccacttcaccaatcgcgctggacacgatacatctgcaagcgcctcagcccaaattcaccctgcaccggacgaagggaaggagcactagcggtttcatttctttattgttttcaaacatcactttctttacgagatggttccttatctctttgaatgatttttctgtttcggtgtttacctcttcaccacatcaatgataccacactgccagggaaaaagggggttgaaagtgaagaatgaagtgaatgtttgccaaggagatgttgatacttgccaagccctgtgcaagtgaaattcaaattcaataggctgtcctgtgttggtccacaagccaaa

SEQ ID NO: 4146 - DNA, 584 bp, Aspergillus oryzae
ttctttcatcagctggcaatctcatcggacttggtactactgacctaaaatacccaaccatgacccctcgcaagaaggaagtcttatctgcggtaaccgcgactgcagatacccgcgcagacgagccggcaatcgaattgcgccagaagactcgatcggaacggatcccccagtcagcgcgctttatgttggttgttttgagtagtctggcactgagtgctgggttcttcagtttaacgtctggggatacccttggcgaactgggcgacgtgagcagacatctcgaggcatggtgggaagtggggggtttgacggcatggaaggcagtagaggttggattagcctggatcttgggctttgatggacgagatgtgtcatcattcatcttccttacccacctccccacatacgccctcctagcatctttctataacatccgccccaccacggtcttgatctcttatgcgatcatcttgttctcgacctcggtcccttttgtactcctgcgcaagccgacttgcgtgcatgacctgtcgcatgctcccttcgacgcaatcccgcaaccgctcaatccttcaggaccg

SEQ ID NO: 4147 - DNA, 264 bp, Aspergillus oryzae
gcgaggatgaagacgaagagaaggaagatgatgatgaagataattcgaaaacgaaatccgaagcctcgcctcacggcactattgcacctgcagttgccttctccaacccttcgaacccggtaaaattgcacaagctccacggatctctccctcaacatgtccgaacagccacccttaacgccttctctcgcgaacgtgagccatccgtattagtctgtaccgatgttgcatcccgaggattggacttgcccaatgtcgacttgg

SEQ ID NO: 4148 - DNA, 704 bp, Aspergillus oryzae
gcgtccgggttcgtcgaacaactcggcttcacactaaataccggagttatgcattgtgctgaccacggcccttccgtccttgattacttctcaaacggctacccttggtctaaggtcgcagccggtggaaccgagatgtggtcctccatttccctgtctcccaatgaatctgcccggcgaaatgattgcatgggtgcttgatcatgggattggttactctggcctgatcccctcactgaccctaaatctccagaccatgtgttgcctccccgcgggtttccccattcttactgaacgaggaacccgtccgttttggactcggacagccgaaaggctgctaccttgtgtcatcattcacagaagagctgctccggtgggccgtctatatgatgtgtctgatccatgattggatatggtctcctggttgtctcaccggttggaatccagtgaatctcgctagcttagactaatctcgccagtcgcatagcgtatggccctttccctattatggcacttcgggtcggtacaggctcaagcgtcatcaggaatttagacggaattggccgtcattcgatgcgacatggaaaggcaaaatttccgtcccctgtctcgggtatattaagaccggccgtccctacggtggtttaaaacttttttattacacagttttcgtacctcctcttctgtggcttctgtcttcgtca

SEQ ID NO: 4149 - DNA, 540 bp, Aspergillus oryzae
cgtccgcccacgcgtccggaacaacagacccgatggtttcccagaacactgtgatagaacatgaccctggtgatgtcacagcgttctacgaaatggtttgctttacctattctctgaatcctgtgaggggtgacagaatcaagcctcggtcttctgctgaaagagacggaatcggagttgcaaaatgccggcgagatttcgcggacgcaatcgcgtacttttgcgcacgcagctgcgacccggataatgtcactgctgtggctgtagggaggaaagacacaaaagttgtcatttgggttgcaagtaacgcaaatgtttctcgagaggtgttggaatttctggataacgatgtgctcaacatggtacagaggctcgcaaaaatgaagcaaggacagttaccttcagaagaaaataggacggttaccaggctcttgagtaacatattgaatttcaccaggaagaaaatcttcaaatactacaaagccaccattacggcatggaaagcaattggcgaattttcgaaatctgaaggtttagaca

SEQ ID NO: 4150 - DNA, 659 bp, Aspergillus oryzae
  modified_base (12)..(12): n is a, c, g, or t
  modified_base (16)..(16): n is a, c, g, or t
  modified_base (23)..(23): n is a, c, g, or t
  modified_base (524)..(524): n is a, c, g, or t
  modified_base (528)..(528): n is a, c, g, or t
ccggtccttaantccngggtccncccacgcgtccggaacaggccctggatggatgtcctcccaagtttgccaagccgctctatctaatgtatggcaatcttgaagaggaacgtggattagcccgccacgccatgcgtatctacgagcgtgctactcgtgcggtgtccgacgaggacagattcgagatgtttgagttctacattaccaaatccgcgtcgaactttggattaccttctacaaggccaatctacgaacgtgctattgcggcattgcctgatcaagaagccaaggagatgtgcctcaaatttgcagaaatggaacgacgacttggcgaaatcgaccgagcccgcgcaatctatggccacgcttctcagttctgcgatccccggacgaacgctcctttctggcagaaatgggaggcattcgaagttcaacatggcaacgaagataccttcaaggagatgcttcgtatcaagagaagtgttcaagcacagtacaacacccgacgtcaacttcatcgcctnccangctattgctcgcaagccaacagcggcttcaagaacggcgacgaaaagggcgccgaggaaggagaatgttggatggttcgacaggcagaccttttggcaagccctgggaacgacaagcgccgtgcttcctgg

SEQ ID NO: 4151 - DNA, 415 bp, Aspergillus oryzae
  modified_base (393)..(393): n is a, c, g, or t
cccacgcgtccggctgccaccgacagttgaagtactcccccgcgcctatcgcaacggtcgctatctactattacacttctctcgacactactggttgttggattcgatagtacatacatacattcatacatacatacccttttgcaaattaacctaatcatccacccttgggggtacctgcatcatggtcacctcaaatactccctttaaaccgtcgccgttatccttcagctctcctcgtgcttctcctttccgtcgtccctctacgccaaactctccgcccacagggatccgtcctaccacgccggggagttcaccgagccgaggatacacgccggtagtgtctccaagcaaacttaatcaatcgtataccgtcgagcacgaagatgcctnaccaaccagcagagatcgaatt

SEQ ID NO: 4152 - DNA, 570 bp, Aspergillus oryzae
gtgatgacctgcccaagggtgaggaggctgcctaccgccgtttgcgcgaggcccgcagtgaagcccgccacaagggtatccgggagaagcgtgctagggctaaggccgaggaggagtccgccgccaagaaataaatgtgattcacagttaatgatgatcgggtctattttcaagtcggggattagtgtactgtggcatggcgtggcgccccttttctcaatttacctttgtccttaaaaaagctccgaaccttccgaaatgcaaatgcccaaattttcacgtttcaaaaaaaaaaaaaaaaaagggcggccgctctagaggatccaagcttacgtacgcgtgcatgcgacgtcatagctcttctatagtgtcacctaaattcaattcactggccgtcgttttacaacgtcgtgactgggaaaaccctggcgttacccaacttaatcgccttgcagcacatccccctttcgccagctggcgtaatagcgaagaggcccgcaccgatcgccctttccaacaagttgcgcagcctgaatggcgaatgggacgcgccctgtagcggcgcattaa

SEQ ID NO: 4153 - DNA, 481 bp, Aspergillus oryzae
ttttctttctagatgcagaccaaaaccaagaggaaacgattgagtcgcggtggtcgctggacggaagaagagcgacttcagctggtacgactgcgtgatcgtaataagcatcttgcttgggatcagtttcagaagatatactttccacgacggtcctatatggctttgacgaaggcttattcggatatgaaattgaagcatactagggacaacgcaatgaccaataacactagcaatgagacgacactcccatccaagaccaacagacctaacaaacggccaaacattgacgagcgctctgtcaacgaacgggccaataaacaggctaggacagccgagagagattcgacctatgtgcctgaggaagacccagaatctccggataacggagatattcatgaggatggctcatcgagccccatgcatggtcgaacgagaagttcggtgaactccttggcaaagcttagagcccaaacagtcg

SEQ ID NO: 4154 - DNA, 609 bp, Aspergillus oryzae
  modified_base (33)..(34): n is a, c, g, or t
ctcttttcttgttgtgtcaaaacgtgcctaccnnatctgtgcacatcctttcgctgaaggaaccatcatcaaaccgcttctctttcgttgaagctctatctttcttccactcgtttatttatctttggatcccacccctctttcaactctttgcgactttgcgctactgttatctggtaagggctaaatatcgccccgtcatacccaagtagtccacaacattatcgaagaaatcacataacaatgttcattaaatacgctcttcccgccctggccgcggctcaggccgtctttgctgctagtgataagtgcggctcgggtgacaccatcaagatcgagaaccagagcgatgccgacggctactccagctgcagcacccttaagggtgatgttgagatctccggaacctactctggcgatctccaactcaatggagttaagcagatctccggtggactgagctgcgatgcttcgccgcgctcaccaaggttggttctatcgaatttactgctctgcctcagctccagagcctggatttcaccaagggtgttacggaagctggtagtgttgtcattaccaacactggtttgagcagcctcaaccgcatct

SEQ ID NO: 4155 - DNA, 619 bp, Aspergillus oryzae
gcttctcctaatgtctcctgaagccctctttaacacgcccactgtctggtcttgatgccaagtgaacagtcgcaaaaatggccggatcgcctatagtggctatatcagcgattgtcttgacaattacattgttatataaatgtattgtgtatcccgtcttcctctctccattgtccaagatcccaaatgcgcactggacagcgccaatatctcctgcttggatgctctggaagcgtttccggagtcaaaacaaccggaccatccaggctgcccatgagagacttggacctatcgtgcggctttccccatccgagatctccatcaattgtgttgaaggtggtatcaaaaccgtctacacaggcggattcgaaaagcatgaatggtatccacgagtattcggatcactcgggaccgtcagcatgttcaccatgattagcagcaagcctcattctgttcgcaaaaggatgttgtctaatatctatagcaagtcatacttgcagtcctcacctcatatgcgtctgatctcggagagtattttgttcgatcgcctcttgccaataatccaggaagcagtctcctctgatgcgcctattgaagtccatgatctcaatcagggact

SEQ ID NO: 4156 - DNA, 641 bp, Aspergillus oryzae
  modified_base (589)..(589): n is a, c, g, or t
caactcagcgctcgtattctactgcctcactgacattttcccatgcaaaatggcaccccttctggctccctataacagtgctatgagacttggctctggcttcaactcatacacacatgagctgtgcctcgatgatgccgtcaaaaagggaaccggtagccccccgaagctttcagacggcgaaggtgtcgcccagtctgttgtctttaagacgagtgtcatagacaagatgtctgacattacggatgctctcaatatcagcggagccctcactatcaaatacaacaatcttatcgatggaaccggcaagggatcttttatcaactccaataagatcaaagacgccgatatcaattttctgattagtgtcaaggtgatcaatcagactgtcacggataatgcactgaccgagtttgctccgatcgataatcttcctgctgagaagttcaccgaggtttatggcgatacttttatctcaggcttccaggaaggaggagagtttaacgcagtcatttcgatcaaggtcaaggataaagaatcaggtcgagaatatcaaagcagatgccgctgtcgccttgaccaccccctnattcggaagtgaaaagcccaaggcagaaaatacagaaacgtatgctggtgct

SEQ ID NO: 4157 - DNA, 567 bp, Aspergillus oryzae
  modified_base (33)..(34): n is a, c, g, or t
atgaagtcgtatttataccacgccgtcctcctnntgacagccccgttggttaccgcaaagaagaacaaccttcaatgggcaatatgtgattctgaccctcaaactgttcttcaaaagctggggctggggacaccagaaccctacaaggagaatccgattacctactacgacacaagccctccggtatacatctccgatggcctcatgttccgcaccaagacatcgaaaggcgaagatatttccacggtgaaagtacgactgcagcaggaaagctccgatgtccccgactccgccgaatgtgtttgggatcgttacggtgaaagtcccacgtacacctgcgagaagcgatgtcccctgcgagaatctaccatctggtgcgaccaacaaatcgagctcgccgagcactacgaaaaggtcaactgggaggagcttacgaattatggtccgtatccgaatgccaagtggaagatacggatcgaaggttataaagccaagttcgacaacgtcgcggctggctcgctgcacctgatggaaatcgaagccaaagtaccgaaagagaaggcagat

SEQ ID NO: 4158 - DNA, 658 bp, Aspergillus oryzae
ctgcagctcaatctgcaattgattggatttctttgttatatatctttttccctttccattaaccatgctgtctaccctcagagtcgccagccgtaaggctgcttcgcgtgacgctaacttgcgcaccgtcgtcgttggtgccagacatgcctcggcctggtccaacgtccctcagggtcctccggatgctatcctgggtatcaccgaggctttcaaggccgattctttcaaggagaagatcaacctgggtgttggcgcttaccgtgatgacaagggcaagccgtacgttctgccctccgttcgcgccgcagaggacaaggttgtcgcctcccgctttgacaaggagtacgctggtatcaccggtgtcccttctttcaccaaggccgctgctgagctggcctatggcaaggactcccctgccatcaaggaggaccgcctcgtcatcacccagtccatctctggtaccggtgccctgagaatcggcggtgctttcctgcagcgcttctatccccacgcgaagaagatctacctccctaaccctagctgggccaaccacaacgctgtcttcaaggactccggcttggaggttgagaagtacccgttactacaacaaggacaccattggtcttgacttcgagggtctgattgccgacatcaa

SEQ ID NO: 4159 - DNA, 624 bp, Aspergillus oryzae
  modified_base (624)..(624): n is a, c, g, or t
gttcacaaaagggtttttagtataaaagctgctgtgccaggtatctccttcaccttttcaatcatctttagccaagagaagtgcttagctatatggtcgattaaacatttttgttcttgctgctcacacgttctttcgctgcactttccgtctttattgaaatacactcgcctttgctttgactttggtttaccgaaccctagtcagttgcggtactaggtagttactggtgaaaatggtcttgcgtcagttctcaactagttccttggaggcattatgcgcagaggagcacctggagctgctagattctgtcgatactctccgttctcagggcatcagccattatatctcccttccacagataattgtctgtggagaccagtcctcaggcaaaagctccgtgttggaggcgatatccggtgtttcgttcccagttaaaagcaatctttgcacccgcttcccaacagagcttgtctgcgcaagagctcccacattggcgtgaaagtatctattggtcctcatcgctctcgtagtcatgtggagcaagatgcactctcgcgtttccacgaaggagctcgagagccttcgaaggactttcaacgcttgatcgagaaatgcaaaagn

SEQ ID NO: 4160 - DNA, 234 bp, Aspergillus oryzae
ggttttggtggtgagatcagggtttggtcctgtcatgatggaaactggtccgaaaataagacagtctcagctggcaacgcaggatctactggtgtttgggcaattgccttgtcaggcgatggccagtatcttgccggtgtaagccaagatgggcacattcgagtgtgggatttggatgccaatggcgaacaaatacgttactatgagaccaagggtagctttggtacctgcata

SEQ ID NO: 4161 - DNA, 505 bp, Aspergillus oryzae
  modified_base (339)..(339): n is a, c, g, or t
  modified_base (359)..(359): n is a, c, g, or t
  modified_base (434)..(434): n is a, c, g, or t
  modified_base (442)..(442): n is a, c, g, or t
  modified_base (457)..(457): n is a, c, g, or t
gaaggacgccagcagcatgcatttttcatcccccagcttgggcccgcaccgaaatggtgttccttcttggataaccttgttgaggagatggccgaagatcctaacgatcctaacgcatttagtagcggccaggcaaactctgtgtacgacaattacaagttcttgaccattcctcaattgcgcactctgaacttggagcacttgattggccggaccaatctcctacgcccttacatgcacggttactttgtggcacagcgcttgtatgaggaggctcgtttgatcacgaatccttacgtctgggaagaggaacgtgcgaagagagtcaaggagaagatngacaaggagcgcgagagcanaatccggggtaagaagaaggccgctgtcaaggtcaacaacaccctggcccacagacttatggcgattgcggaganccaaccancgcaagagggcgcancgcctattgcacaccggcggcgatgaggatatggtcgacgcacctgca

SEQ ID NO: 4162 - DNA, 550 bp, Aspergillus oryzae
  modified_base (181)..(181): n is a, c, g, or t
  modified_base (283)..(283): n is a, c, g, or t
  modified_base (288)..(288): n is a, c, g, or t
  modified_base (301)..(301): n is a, c, g, or t
  modified_base (308)..(308): n is a, c, g, or t
  modified_base (353)..(353): n is a, c, g, or t
  modified_base (365)..(365): n is a, c, g, or t
  modified_base (382)..(382): n is a, c, g, or t
  modified_base (413)..(413): n is a, c, g, or t
  modified_base (423)..(423): n is a, c, g, or t
  modified_base (464)..(464): n is a, c, g, or t
  modified_base (485)..(485): n is a, c, g, or t
tgacaacatccacgttatgagggactctttgaataaggtgattgatactttgaaggactcagatgtcaccccgctaggaccaaatagagaccagcttgcgcgcagtgggtggttaaagcatattactgggattttagacggcgcgggcttgattgcccgccaagttggccttcaacactcncacgtattgatacattgctcggatgggtgggatcggaccggtcagcttagtgctttaagtcagatatgtcttgacccctattatcgtacgatggagggcttnatggngctggtggagaangattggntttcctttgggcacatgtttcggcaccgctctggacacttgaacnccgaaaagtggntccagatagaaaatganaggatcgggggtgattccagtcgtggctttngggaggccgncggtgcgggcaaagccatcgagaatgcattccttattgccnaggattcttcaaccgagatancacacgtcgtgactctctttccgagtccgatggagaaatgcgcagctacgattcagacactcctg

SEQ ID NO: 4163 - DNA, 406 bp, Aspergillus oryzae
aacatgttcatgatcttttaacaatatcgctaagtaagagccacgtggtctatacgaagatctaccctcggtataagactcgaggaccggtgcatatagcccgagacaattttagccaatggctttcaccgcatgaagcgccagatctagatattattctcctaggtcacagcctgggaggcatcgtcgcagcagaagttgcactgatgccaacacagtctgcaactgggcgtgtgaacacgggactgaatcatcggatattaggacttgtcaacttcgatgtacctttctttggacttcaccctcgcgtggtgaccactggaattggaagactcttccgccacaaactggatgaaacgagcgacaccaccaattcggttacatccatgaatgagggcatcggcag

SEQ ID NO: 4164 - DNA, 443 bp, Aspergillus oryzae
  modified_base (240)..(240): n is a, c, g, or t
cagctcttccccaaaagagctttccattccctcttccgcctccaatttagtgcttcacgaggacttatatggattcggcagtctgccattgtccctgaatctcgattgaaacaccccctaacctttgccttcgggctcaccttcctcgaccatggccaccctactccgacggccaggcaatcttgctcgatattcgaggagagccgcagactacatctatcgcgcaggaccacggtcggngcatatctcacaatcgagactatcctcccttatcaccacgccacgcctgagaacatatgctacccagagtccgaaacccccgaacgagaacgacggtcaacaccaaccaccgaaccaacccgggaatggcagcggtaaggatggggaaggaaagaagccggaggagcctcaatcgaagctcaccaaacaagagcaggagtcag

SEQ ID NO: 4165 - DNA, 272 bp, Aspergillus oryzae
tgcagcgaaggcattctcgcgacggttcgagaaggctaagcgcctcctacggtcgctccaggaaacggcgcgagaattgaggattaatttaccagtagaggtagctccgttgttcatcgaaatagatggtcaatggttactgcgcccggtgcgaattaaagaagagacgagcgatacggcaagcggggacgtatgattcacgatcagctctttcatgtatacggtgtttgggcccgggatgatactcgtcgcaatagatagagatcgcataa

SEQ ID NO: 4166 - DNA, 606 bp, Aspergillus oryzae
  modified_base (502)..(502): n is a, c, g, or t
  modified_base (581)..(581): n is a, c, g, or t
aaatctcatctggcccacccagcttggacgctgaagcccagtttggaattaagtgcagcgactcgtaccgtaccgacaatagcgaggaggaagtgctcgaactgatcaagcaacgccatgagctcagccgaattggaggagatgtctctgactttgttctcacacgatgcgtggaatggaagatcaaaccaaaggagcgatacacgggtgatttccaggcgacaacgaagaatccactcctgattattggcaacactgctgatccggtcacccctcttgcagccgcacgtaatgtcagtgcagggtttgccaatagtgttgtgctcgagcatggtagttatgggcacgcgagcttggggcaagcatccctctgtacggccaaggccactcgcgcctattttgaggatggcactctgcctgaaccggggactaagtgtgagatcgacaccacgcccttctctggtgataatgggtgggagaaggtcctcaaagagcttgcggncgacagccaatgaagccgaaggtattggcctatcaaggaatttctggaatagataatgaggatgtggttcgcgctttgnttatgatgacttcttggggtattcg

SEQ ID NO: 4167 - DNA, 485 bp, Aspergillus oryzae
catgcctgcggacgcctacggccagtacgtcgatatcaagatcgaagatggcatgaagtatgatctgcgcatcgaaaacgcccaccttgacagcgggcaattctatcggcagggagaccaaggagatatcatgacagccgacgacattgacgatatgatcatccggcacaacggcgggatcagagaagtctgttcctgtggtgaaaccgactctatgtcgggaactcaaggcacaatcgacctcatcgatgatgtgaaggacacccggatctgcacactggcatggagcgccccgatgcagtcgggaagaaagaatagattctcgatgctcaatcatgacccgagatataaagtcgatatcggaaaatggcaagagtccggtaccatgggcacggtcaatgttgccataaaagatgagtgagtctaagccgtaaaatatcaagtcgatacgcggacgagtccagtcgtctttgcaattgatccca

SEQ ID NO: 4168 - DNA, 650 bp, Aspergillus oryzae
cgtggagataataccttcttccagttttccgttttaacttccccggacatcattcaatgccagacgatttatccgacggctagcccctatttatgctatattgaatccggttacaatagattactttgaagatgtcattcctcggtggcgctgagtgttctacggcgggaaacccgttgacacagtttacaaagcacgtacaagatgacaagtccctccagcgggatcggctcgttgggaggggcccaggaggcatgcaagaaagcatgcggtccagaggtatgatgggtggacaggatcagatgatggacgagtttgcccaacaacctggccaaatccccggggccccgccacaaccttttgcgatggaacacctgagacgcgagttagaccaattccagactacgccacctcggactggctctccgggctgggcggccgagtttgaccccggtgagcaggctcgcatggaggctgcctttgccgggcctcagggacctatgatgaataatggctcgggattcacaccggcggagtttgcccggttccaacaacagagtagggctgcagtgcctcatactgccaatccggttacttctggtcccgtcgccgatgatgtcgggtttcagcgtcctatgggtatgggctat

SEQ ID NO: 4169 - DNA, 471 bp, Aspergillus oryzae
  modified_base (38)..(38): n is a, c, g, or t
  modified_base (68)..(68): n is a, c, g, or t
  modified_base (412)..(412): n is a, c, g, or t
attcatatcctactcctctgctggttgacatacctttnaatattcctagagaatcatgcatcctccgngaatatcgcagttaagtatctcatacaacaatctagtccgcatcccttacgtcgttacgccctcagcatccgacatcgtcatctttccgccactcctcgactgctcgaatccccgtgagaaaacggtgacatcgctccgttttcacggcccagctcgctgtggtagctgggtcgtcgtcagaaactcgctatcacaaaatcatagagcaagcaaaaggagaacgggatccccaccgcccgtttcagatccatctcttgcatccccaacacgaacgcgttacgttatggagccccgcataacccctccagagtacttcctggagatctttgcagacaccactacncgtccgggacgtcttgaaaggtgttctcaacctaatcttctttcaccgttatttcccct

SEQ ID NO: 4170 - DNA, 451 bp, Aspergillus oryzae
  modified_base (385)..(385): n is a, c, g, or t
  modified_base (387)..(387): n is a, c, g, or t
  modified_base (393)..(393): n is a, c, g, or t
  modified_base (410)..(410): n is a, c, g, or t
ccctgtcagccatcgctgccgaagccaaagcctacctcgtaggaggtagcatccccgaactagaacccacaacgaagaaatactataacacctccctcgtgttctctcccactggctcgttaatagggacccaccgcaagacccatttgttcgacatcgatattccaggaaagatcactttcaaggagagcgaggtcctgtcgcccggaaaccagttgacaattgttgatcttcccgactatggaaagatcggccttgccatttgctacgatatccgtttcccggaggcggccatgattgctgcgcgaaagggcgcttttgcactcatctacccgggcgcgttcaacatgaccaccggtcccatgcactggtctctgttggcacncnctcgtncggtggataaccagctngtatgtgggggctgtgtagcccagcgcgcgatatggaggcc

SEQ ID NO: 4171 - DNA, 591 bp, Aspergillus oryzae
cccacgcgtccgctcgcttgattctgagagaccgatcatggccccttccactcgagcgtcgaaaagattttcgaccgtaagcgggaacccttcgattgcttcgtcaggcaccattggaagcctaccaagcggcgatcctcgtttggctgaattccatcacttgcgtgacggactggagcgcctggagaataaacctcttcagaagcaacgcttcgtccctactcccgaaaagagcgataacttgagcaagctggcgctgagtgcgaaggtggaacgagcacttgaccggagaatgactggccaggatgctatcatgcgcaagccagttttgaacgagaaggccgctgctgaatctacaagctcgtagacgatctgtggtctacccgataagtttcgtataaacgccttgagttgatatctatgtttggtccttaaatcttttcattttcattttttcttttctgagcacctgtttccctgaataattccctctgcttgctcatattgcgtgattcgcggctttctttggtgaaccttgtgaatgagtctctgtacctgctatacgtcatcggtgatgaaaaagcttgccct

SEQ ID NO: 4172 - DNA, 577 bp, Aspergillus oryzae
  modified_base (364)..(364): n is a, c, g, or t
  modified_base (526)..(526): n is a, c, g, or t
ctggcatctgattctatatagctaagccttcagtcttcctctgtgttgcgcgcttgaaccggtgaggaagtcctagacgataatgtctcataccgaggccgctcgtacggattccttgggtgaacaggaaactcggggtgatgtcgagagcgataaaaaggccaaaaacaggcgacctgcaaatactgcttttcggcaacagcgcttgaaagcctggcagcctatcttgacgccgaggagtgtactgcctttgtttttcgtcgttggtgtcatttttgcacccattgggggccttcttttatgggcaagctctgaggtacaagaaattgtgatagactactctgaatgtgctgataaagcacancggacccctgtcccaatcccagacaaagtccaatcgtctttcaaatcttccaatcagcagcctaatccgacctggatgaaatatagagatgaacagacgaacgagaccatttgtcgcttgagtttcaagatcccggagagcatcgaacctcctgtgtttatntactatcgtctgacaaatttctaccaaaaccatcggcgattcctgaaatcg

SEQ ID NO: 4173 - DNA, 592 bp, Aspergillus oryzae
  modified_base (487)..(487): n is a, c, g, or t
cacgcgtccggcactccattccctcggattcccttatttagtccctccttcaagtattctggcctcatcacaaatacttccgcgctttcacataaactagcttgataacgctacaagctattggggttttaatataccgtcagcatggagcgtagtcccaccattcaagatgaggacgtctctcagttttgtgccatgactggagtacgtcctgaacatgcacaggagtacctcgcagctaatggaggggatcttgaggccgccgtgactgaattctttgccgaacaagacgaagctttacaggagggaaacacgggcgctggccagactcttggaggaagcgaaactgcgccgtccgcaggccggtccctaggtggcagctcctctcagtcaccatcgtttaccccgcaaccatcttccacatcacgcaaatccgccccgaaaaagaagttcgcgacactgggtgatttttcctccggcggtggcngatgactcggaggaggaagatgacgcagtcaaccaggatttggttgctggaggtgaaaagtctggattagctgtacaaaaccccgatgatatcaagaagaagatc

SEQ ID NO: 4174 - DNA, 512 bp, Aspergillus oryzae
acgcgtccgagcaaaagcctcaacattaactcctcgaggcggactcaaggtgtacccccaaaggatcctccttacctagttacatcgcgttgccacattggatcgagtcgttgggaaagaacaggaagcgtgcataaataacgcgtcgcgatgttcgagcgtcgtgccgctgatcgatatcgcctacggatgcaccgggctcgcactgttgcgctaacaaccgatgagatcgttgaagtgcgggcagctcagcggacttttgaaggagcctatgtccggacagcattatcacagttttcgtttgccctcgttgtgctcaaaattttcactagcgagttctacagcacaggggctttgttcgcgatttacggcaccggtgtgctcattattggtctcttccgccgccaacaagggaatcggcagtttttctcggaggtgggagaagatggcatccatagacataagtttcgaacgagcggaaatgcggtggtcgtactgacggctctgagcgt

SEQ ID NO: 4175 - DNA, 391 bp, Aspergillus oryzae
  modified_base (24)..(24): n is a, c, g, or t
  modified_base (34)..(34): n is a, c, g, or t
  modified_base (85)..(85): n is a, c, g, or t
  modified_base (247)..(247): n is a, c, g, or t
tcaagatcgtcctggcgaaggctntcgacctgtngtgcactattccagagatcgagaacgtcggtgagccactgttgctctacangaacgtatagaatcacgatgaagtggaagtaacgattatgtacattgggacgaagtgatgttgacgacttcttttcccttggtgggatgaagtggctgcagtgggaggatatctacattgcgtttctgtctgatacgcattttgctttcctttatttgattntcttttctctcagcattgggacgcgtcaggattctcttcatgttcatcattttctatttcttttcttttctttctttctttcttttccttgtgttaaattccccacccgtgtttttaatctctctttctttcctcccacacttt

SEQ ID NO: 4176 - DNA, 478 bp, Aspergillus oryzae
agcgattacttccttgcaccattcaagacttgcgtgcgtgacacggatgtgggaagcattatgtgttcgtacaattcagtctccggcatcccagcttgtgcgaatgaataccttctcagtgaggtgctcagaaagcactggaatttcaattcagactatcactacgtggtgtctgactgcggcgcagtcacagatatttggcaataccacaactttactgacaccgaagaagcggcagcctcagttgctctcaatgccggtgttgatttggaatgtggttcgtcctatctgaagctcaacgaatctctcgcggcaaatcagacctcagtcaaagtcatggaccagtcattggcaagactatattcggcattgttcacggtcggcttctttgacggcgggaagtacgacaaactcgatttctctgacgtttctacccctgacgcacaggctctcgcggtatgaagcttgcagtccgaaa

SEQ ID NO: 4177 - DNA, 411 bp, Aspergillus oryzae
  modified_base (33)..(33): n is a, c, g, or t
  modified_base (257)..(257): n is a, c, g, or t
ctagtcttccgatcatggtcgatggggatactnggtatgggagtccgatgaatgttcggcggacggtggaggcgtttgcggctgctggggcggcaggggtgatgattgaggatcagacgtggcttaagcgatgcggccatacaaaggggaaatcagttgtttcgcgcggtgaagcctacgctcggatccaagcggcctgcgacgcccggaatgaagggcgggatatttttatccttgccagaacggacgccttgatncttggatgggaggaagcgatgacgcgggcgaaggagttcaagagactaggggccgatgcggtgtttgttgaagccctgccggacagggagtcgatgcagcgctgcgttgaggagttggatatgcccatgctggctaatattattgaagggggca

SEQ ID NO: 4178 - DNA, 473 bp, Aspergillus oryzae
agctacgattacggtcattcaagaatatggataattaatttccgacatatgaccaatgtatccatggatagcggctcgaacattcagaccatagattactcatctcttaaccgctgatggcatctgttccctcagcctctgccttctcattgccaattccatcatggcaacaacctcagagtgcgcgcgttgcccggtatgagtcgaggaagcgtaagaaagtccatgatggctgggacactgaggacgatgtttttgaaggcgaaacaactgacgccggatctgaagtcgcaccttctgggacctcattgattctgtcaccagaagaagcacaccaatatcgcatagccggtctatctttcgatagagaactaccagggggtcatttcccacatggtcctgcaaggatgaacgcgctagcaacccggggaaagggataatggtatgaaaagggatttaatcaatcaattgga

SEQ ID NO: 4179 - DNA, 565 bp, Aspergillus oryzae
  modified_base (59)..(59): n is a, c, g, or t
  modified_base (258)..(258): n is a, c, g, or t
  modified_base (267)..(267): n is a, c, g, or t
  modified_base (290)..(290): n is a, c, g, or t
  modified_base (339)..(339): n is a, c, g, or t
  modified_base (361)..(361): n is a, c, g, or t
  modified_base (401)..(401): n is a, c, g, or t
  modified_base (416)..(416): n is a, c, g, or t
  modified_base (432)..(432): n is a, c, g, or t
  modified_base (461)..(461): n is a, c, g, or t
  modified_base (479)..(479): n is a, c, g, or t
  modified_base (515)..(515): n is a, c, g, or t
atcgggaaaacctcgtggtttgggagcctgacgatttgcctcactggaacaactcaagnatgcagcgaactatggaagtttctggtttccacttcggatttgcctccactcgtcagagtgtcccagagcagtaaaatccatcatggaattttttacactttaacaaaagtctggttacggggctataccgaaacgggggcctgaggggaactagccccgaatgggattaaacggctacgacatcggatctgcagtcgnactgcgganggagtcgtgactcagcaggtcangaatgaatgcctcttccgtataaattgactttgactgcactgtcgccgntccttcttcatctttgttcttntgcttatctgtccttcgcttccattgtcttcctccgactncccgtccttatctgnctccttatctaccgtnccttccccatacctccttctcggcgcttnaatctcccttcaggacgngcacgtcacccattcatagcgggcttgccacatcgntctcttgactcctcactcatcactatttgcgtataacgccggaaattccg

SEQ ID NO: 4180 - DNA, 595 bp, Aspergillus oryzae
  modified_base (17)..(17): n is a, c, g, or t
  modified_base (78)..(78): n is a, c, g, or t
tcgacccacgcgtccgnggacgcgtgggcccggatcaaatattcataaagtgttgtgttcaatatgtccgctttgatnggggtttccattgctttccaggtactggcttttgcattcctgataccttcagcttttactctgaggatcattcaatcgacatgggccacagctgtggaagttctagccggtttaatatcgttgattgggctctggatccatggcggtagtggatatcacacgtatataatcccccaagtcggattgactattcttctgctcgtgcgacaatcattgggattatatattcatcaaaagcagaaagtccactcggggtacgttctggaatacttggaccgttcttacactcttgcaaccatggcactttttgcccttggttggtatcacgtaacagctggatccctggaattcgttggtattcgcgagaactactacaacaccctctcacatgcagttctcctggtgctcgtaatgagcgaaggactcctactcctctctttcgctgctgggctatggcccaatcagagaagtctgacaccccgactactatgattctggactggcttcttgcatgcgg

SEQ ID NO: 4181 - DNA, 547 bp, Aspergillus oryzae
  modified_base (30)..(30): n is a, c, g, or t
tcgacccacgcgtccggtttttgatgaaangtgctatgcgagtacttattgttattaaggagggcgtagtgccccaggggagactctgttctacaaaatttgattaacatcaccgaggtcatcagcaggaacccgagcaacccaagattctattacttccactttgaagctctcggtgcctttatcagatttgctgccccggcgaatcctgataagctggagcatgctttatatccccccttcgccggagtactccaaggtgatgtgcaagaattcatgccctacatattccagctctttgcggcactactcgaagcaaatccttccggatcgctgccaaactactaccagaatttggttgcccctatcctcatgcctgtcatgtgggagtcgaagggcaatattcctgcgctcgtacgactcctttcgtccatcattgcccgcggttctcaatacgtcctggagaaccaacagctttcgaatgtcttgggtatcttccaaaaactgcttttccactaaggcgaacgagaggtatggcttttgactt

SEQ ID NO: 4182 - DNA, 381 bp, Aspergillus oryzae
  modified_base (63)..(63): n is a, c, g, or t
  modified_base (66)..(66): n is a, c, g, or t
  modified_base (260)..(260): n is a, c, g, or t
  modified_base (281)..(281): n is a, c, g, or t
  modified_base (303)..(303): n is a, c, g, or t
ctcgccccctgattgcgaaaaggtcgattcttgaccctggctgaccgagattaatctcaactntancaagattgggggaatgattgatgtacggtacttttactttgatacgagatgatgtcccgccgactgccaccggtctaggcgactcgaaccaagcttaattccatagttcaccccacgccgccgttcggaccataatcgggacaggattgctaagccagaccaaagttttgtcagcgaacgggctttacttttgngatccgctcaatgtgcgcctntcacgccatcttcctgcagcantttctgccatctcaaatgtaacctctttcgatggcctaacggcttcatgtccttcacaggaaggtagtggtgcccgtg

SEQ ID NO: 4183 - DNA, 291 bp, Aspergillus oryzae
  modified_base (155)..(155): n is a, c, g, or t
atccaaacatcccagatttgaatggtaatacaccattgtactgggctgccgagaagggaaagccgacgttaatggcgttgttgttgaagagaaacgccgaccctggaatgaaagatgccaatggccggacgccgttgctctgggccgcggataanggccatgtccaagttgtcatgttgctcattgactccgggagaatcaacgtcgatgatgcagatgccgctggccgtacgcccttgtggtgggctgcccgaaacgggcatttgccagtcgtgcaattgttggtgcgac

SEQ ID NO: 4184 - DNA, 257 bp, Aspergillus oryzae
cctgctttcacacccccccccctcctcccaccaaaaaagccgtttgtaacaaaagcatgtcctgggcatgaccagcaagaatgaagacccggggtcttcacagactacctccactcccgcgaacgacaccatgagctccaagaccggtgcgcgacgtctccctccgcccgagaaatccgaggctatccagacccggtttaaggtcattgccgccttttgggccgtcattatcttcctggggtttccgatatggtgga

SEQ ID NO: 4185 - DNA, 498 bp, Aspergillus oryzae
  modified_base (64)..(64): n is a, c, g, or t
  modified_base (401)..(401): n is a, c, g, or t
ctaagcctttgatcgtgctcccccgccctgggacagtgccacccagcggcgcaacgcagcccantcccgccccattggaagccgccttcgtcgcaaccttcggcaaccggcttccaccagcatcatatttacaaaccctccacggcaaagcagcatactacgaactaccaccctcatctcctgtttccacggatggtaaacagcccatatcccgggtactattcgtccacggggtgcaaacacctgcaatcggcctccagccattagccaacgcactgtcctcgcgtttcccctcggctcattgtgtcctagtggatctgtggggccacggactctcagaaacaccgtttgtggcgcacgaccccgctctcttccatggattaatagaagccgtgatggtntcatcttggatggactgatgcccatttcattggctattcttttggcgggtctaccacagcaagttttgcgggcagcgcaccccgaacgcgtcgcgtc

SEQ ID NO: 4186 - DNA, 198 bp, Aspergillus oryzae
  modified_base (13)..(13): n is a, c, g, or t
  modified_base (22)..(22): n is a, c, g, or t
  modified_base (78)..(78): n is a, c, g, or t
  modified_base (104)..(104): n is a, c, g, or t
  modified_base (116)..(116): n is a, c, g, or t
tgcgatcgagagnctatactcnacaatgtgactcttctttatctgcgccttgccgtagggggtgccggaactgcggancgctcagcacttctttgatcgcggantgggctgggaantcctatgcgtgctcagctatctgatcaagcaaaataagaatatggcccgaacttgccgtgggaaacagtctatcctgctggg

SEQ ID NO: 4187 - DNA, 238 bp, Aspergillus oryzae
  modified_base (10)..(10): n is a, c, g, or t
  modified_base (31)..(31): n is a, c, g, or t
  modified_base (55)..(55): n is a, c, g, or t
  modified_base (111)..(111): n is a, c, g, or t
  modified_base (129)..(130): n is a, c, g, or t
  modified_base (149)..(149): n is a, c, g, or t
gagagacganctctccgatctagttcgggcncttctctcttcccgagtagagcanagtatcagtccacgtcgcgtcgacatctcacctctgctagttcaaacccccgggtntcaagccaccaccaaagnncccgtcttcgctcatggangatagctcccataccacaagaaaagccgctccgtggacccgaagaagtgactctccgtcttctccggaaccgatcaatttcaataatgt

SEQ ID NO: 4188 - DNA, 255 bp, Aspergillus oryzae
  modified_base (16)..(16): n is a, c, g, or t
  modified_base (24)..(24): n is a, c, g, or t
  modified_base (37)..(37): n is a, c, g, or t
  modified_base (53)..(53): n is a, c, g, or t
  modified_base (107)..(107): n is a, c, g, or t
  modified_base (110)..(110): n is a, c, g, or t
  modified_base (193)..(193): n is a, c, g, or t
  modified_base (218)..(218): n is a, c, g, or t
  modified_base (225)..(225): n is a, c, g, or t
actgaacgattcgganagcaggtnatgagatcttgcntgtaatacactgcgtngttagtcgaccgctgtcgaggagtagatcaactttggtggtcctttcctgaganacngcccgtaaaccgttccggaagtgcttaatcctaccatgcgcaacaaaaaatgtctcgtggccgcaaagtctccagcgtttggngaactcatgaatctctcatgatganctggggngaacctttgttccatggggggaagccaaaa

SEQ ID NO: 4189 - DNA, 213 bp, Aspergillus oryzae
  modified_base (17)..(17): n is a, c, g, or t
  modified_base (28)..(28): n is a, c, g, or t
  modified_base (58)..(58): n is a, c, g, or t
  modified_base (65)..(65): n is a, c, g, or t
  modified_base (180)..(180): n is a, c, g, or t
caagaactcacacaacnggtacagctanccagccggaggtgtcttcgcctgcggtgantccaganaaagctatcgccagccattaccagtgccggctccggctgcattgccgctctcgaagctgagaattcatcgctgaatctgagtcctctggagaagaagctcccgtcaacgaagtcnagcaagaccccaggtgacacgcggataaatcca

SEQ ID NO: 4190 - DNA, 342 bp, Aspergillus oryzae
  modified_base (2)..(2): n is a, c, g, or t
  modified_base (12)..(12): n is a, c, g, or t
  modified_base (318)..(318): n is a, c, g, or t
tngagagctctncgattcgccgagttttttcaaaaatgaagatttctgattccgagaaactccgaatctagacactcacaagaaatgctatagatccgtttgagctcctcatatacaataaacgacatatagagtcatgcatcacacatacccacccattatgccactggggcgggactcaaaagcaccagtaccgactgttccacacggccacaacattctgctactcggggattgaatagtcatatctctctcctggacacgtcccgaagatccacgtcgtttcgaactctcttccccagaagaaagagctccttnacaacgttcgttgaaggacgaacc

SEQ ID NO: 4191 - DNA, 278 bp, Aspergillus oryzae
  modified_base (5)..(5): n is a, c, g, or t
  modified_base (15)..(15): n is a, c, g, or t
  modified_base (31)..(31): n is a, c, g, or t
  modified_base (34)..(34): n is a, c, g, or t
  modified_base (70)..(70): n is a, c, g, or t
  modified_base (186)..(186): n is a, c, g, or t
  modified_base (224)..(224): n is a, c, g, or t
  modified_base (236)..(236): n is a, c, g, or t
  modified_base (260)..(260): n is a, c, g, or t
cattngagagacagncacaggcccaacaaancgngcgtaagagaagtcctctcggcctctggccggagangcaagctcgttttcggcgttgcccgtatcttcgcctccttcaacgatacttcgtccacgtcaccgatctgagtggtcgcgaaacatctgccgtgtcacggtggtatgaagtcaagntgaacgtgacgaatcttctccttacgctgccatgttgntgctcagatttnctgccgttgcaagactcggtatcnacgctctccacatcaaga

SEQ ID NO: 4192 - DNA, 387 bp, Aspergillus oryzae
  modified_base (7)..(7): n is a, c, g, or t
  modified_base (16)..(16): n is a, c, g, or t
  modified_base (30)..(30): n is a, c, g, or t
  modified_base (134)..(134): n is a, c, g, or t
actgatncgatttggnagaggacatcgcanaatccatccatgaacaccatcatcacctcaacccaaatgtacgcccacacctcccgcccctcctgaactccctccccatcaaacggtcccgggaagccaaaganccgccattccatggcttcggacacaacgctcccattcctccaattccccccggaagtccgcctatccatctaccagtacctcatcccggacctcccgatccgcaatttctcgctgctccgcgatcgctcgaagacgattcacctgcgacatgatggctcgcgctgctgtcccgcgatcctgcgcgcaaaccaccagatctacgcccaagtgattcaggaatggtacggttcgacttcttacaaatcgtgcttg

SEQ ID NO: 4193 - DNA, 275 bp, Aspergillus oryzae
  modified_base (11)..(11): n is a, c, g, or t
  modified_base (43)..(43): n is a, c, g, or t
  modified_base (65)..(65): n is a, c, g, or t
  modified_base (268)..(268): n is a, c, g, or t
tgttggatccntatggcacggaggctagctccccacatggcgngtctttatctatttccgctaangccgatgctggtgaatccacttgaactatgaggtcgagtagtatctccgcctttggttttcatgactcgtgattcattattttaattttgcgtttaactgcgcttccgaccattcgctttcacacgcttcatattatgaacaacccctcgtgccgaattcggcacgagggttactaactactgaaagcgtgtgggtatccttnatgccga

SEQ ID NO: 4194 - DNA, 247 bp, Aspergillus oryzae
  modified_base (2)..(2): n is a, c, g, or t
  modified_base (11)..(11): n is a, c, g, or t
  modified_base (34)..(34): n is a, c, g, or t
  modified_base (59)..(59): n is a, c, g, or t
  modified_base (74)..(74): n is a, c, g, or t
  modified_base (93)..(93): n is a, c, g, or t
  modified_base (111)..(111): n is a, c, g, or t
  modified_base (113)..(113): n is a, c, g, or t
  modified_base (117)..(117): n is a, c, g, or t
  modified_base (170)..(170): n is a, c, g, or t
  modified_base (174)..(174): n is a, c, g, or t
  modified_base (189)..(189): n is a, c, g, or t
gngtatgcgtnagtggacatacagatggttcgtnaccccatacacgaaattcgggttgnatagactagactcanacttcctacactataaaanatatatctatacctgcangnagangtacgcgtcggtcgtcgccaactatcccattctctgttcgcgtcgcagccaanatcncactctcgatcgtcncactctgtcctctcggcgtgtgctacattgtcctcagcctgagactctccgctaaatc

SEQ ID NO: 4195 - DNA, 267 bp, Aspergillus oryzae
  modified_base (5)..(5): n is a, c, g, or t
  modified_base (9)..(9): n is a, c, g, or t
  modified_base (49)..(49): n is a, c, g, or t
  modified_base (58)..(58): n is a, c, g, or t
  modified_base (65)..(65): n is a, c, g, or t
  modified_base (68)..(68): n is a, c, g, or t
  modified_base (91)..(91): n is a, c, g, or t
  modified_base (94)..(94): n is a, c, g, or t
  modified_base (98)..(98): n is a, c, g, or t
  modified_base (104)..(104): n is a, c, g, or t
  modified_base (126)..(126): n is a, c, g, or t
  modified_base (145)..(145): n is a, c, g, or t
cgcgnacgngggacctatcgccatatatctatagtcatggcgcgtttanacgtctgangggaganagngcgtctgatcacagaacacatcnganattngatgcntcagattctcagaactcatcantaaaaagattcagcaactnggttacactcgacacattgcccaatacaacaggtgtctatgtctagactacatgtattcatcgactctcccaggttcgtcctggtcgatactcacctcacacccacggagctcatctaaccg

SEQ ID NO: 4196 - DNA, 262 bp, Aspergillus oryzae
  modified_base (28)..(28): n is a, c, g, or t
  modified_base (54)..(54): n is a, c, g, or t
  modified_base (104)..(104): n is a, c, g, or t
  modified_base (213)..(213): n is a, c, g, or t
  modified_base (228)..(228): n is a, c, g, or t
  modified_base (244)..(244): n is a, c, g, or t
tacgaaggaaattgcagctctcaagaantctcaacctacgtagatacacccagngatctcgaacatgacagtcatcaaacagacagaggatccctacacacgtngatctcctgcacactcagacgcgtctcttctatacactcaaagatcacctcactctgctcgctgctgtgtgtaaacttaaaaagttacacaccccagaaaacagccagncagaagacaactgcntctcatatacagtcangggatgcagacactcccc

SEQ ID NO: 4197 - DNA, 255 bp, Aspergillus oryzae
  modified_base (52)..(52): n is a, c, g, or t
  modified_base (66)..(66): n is a, c, g, or t
  modified_base (83)..(83): n is a, c, g, or t
  modified_base (183)..(183): n is a, c, g, or t
  modified_base (204)..(204): n is a, c, g, or t
  modified_base (240)..(240): n is a, c, g, or t
acggtggatgcgtgcatatcaaataaattagacaataacatgaaccagcganctcaacggtcaaantctcaaatgggaatcanctctcaaccccccatggagacatcacaaaacttcttttcttaacgagccacgcaaagtgactatctcatttgcctacaccctctgatgcactctctatancgcccatattcaacatctagntcacctgatcccttgctggagtacgagtttacgacncatgtgctcattgaa

SEQ ID NO: 4198 - DNA, 280 bp, Aspergillus oryzae
  modified_base (39)..(39): n is a, c, g, or t
  modified_base (69)..(69): n is a, c, g, or t
  modified_base (145)..(145): n is a, c, g, or t
  modified_base (156)..(156): n is a, c, g, or t
  modified_base (186)..(186): n is a, c, g, or t
cgacagtgtgctgcacccatctcgtccgctttgtccctntaggtgtgccccaagaactaaaaagcaagngatgaggtacggttcagcaatccgctcgaatatcgtctactgactaatatcacgaagactctgctgatgtccttantcctgtccaanaggatcgcccttcacattcaacctgactcntgtgcaattctcgacaatactctccactgcccaccctacacccccttactcccaacaggttctcagagagctaagtgcctctgaccatacccta

SEQ ID NO: 4199 - DNA, 213 bp, Aspergillus oryzae
  modified_base (3)..(3): n is a, c, g, or t
  modified_base (7)..(7): n is a, c, g, or t
  modified_base (38)..(38): n is a, c, g, or t
  modified_base (48)..(48): n is a, c, g, or t
  modified_base (51)..(51): n is a, c, g, or t
  modified_base (130)..(130): n is a, c, g, or t
  modified_base (176)..(176): n is a, c, g, or t
  modified_base (182)..(183): n is a, c, g, or t
tcncttnatttaatcttacgtgtgcatttcgtttctgnacgcatggcntgntatggtttcattttttttatattttcccctgtgggcaaagagcgagcattggacaaaacctcgactgatttcgggccangagacggattcatgtatggattgaaattagacttgtctgcaggcanagatcnnatcgcatttatcttatagatcatacacttt

SEQ ID NO: 4200 - DNA, 195 bp, Aspergillus oryzae
  modified_base (38)..(38): n is a, c, g, or t
  modified_base (61)..(61): n is a, c, g, or t
  modified_base (82)..(82): n is a, c, g, or t
  modified_base (158)..(158): n is a, c, g, or t
gtgatggccattccccgggcatcaggaacaataaccanttacactcccccagttaactggnatccgtccagtcattgttggncaatgtgcttcgtgaatctctcacacacacggatctgtctaatgaagtagaaagtttacttgcgtacctctttccnctcgatgtatatatattccagtcgcccgacaatactc

SEQ ID NO: 4201 - DNA, 396 bp, Aspergillus oryzae
  modified_base (2)..(2): n is a, c, g, or t
  modified_base (23)..(23): n is a, c, g, or t
  modified_base (29)..(29): n is a, c, g, or t
  modified_base (39)..(39): n is a, c, g, or t
  modified_base (69)..(69): n is a, c, g, or t
  modified_base (78)..(78): n is a, c, g, or t
  modified_base (92)..(92): n is a, c, g, or t
  modified_base (173)..(173): n is a, c, g, or t
  modified_base (176)..(176): n is a, c, g, or t
  modified_base (239)..(239): n is a, c, g, or t
  modified_base (276)..(276): n is a, c, g, or t
  modified_base (283)..(283): n is a, c, g, or t
  modified_base (291)..(291): n is a, c, g, or t
  modified_base (352)..(352): n is a, c, g, or t
tntgccctttactgcagccgggngaccantagttcttgngcggccgcattcgcaggagcattgccctcncatgtccancattttcgttgganaaatagtccacatctcagcgtcaagctcctccacggtcttgggcttgggacggttggacttatgtccatgtccgcggcggncancgcgacggcacgtccacagtgctgtcggtagccttgctggcagtggccggcttgggctggganttggtttgtgcgacacgctcaccaagatgcttggcancgggganttcatgancatggttggcatcaacgacacctcaatcttcatgggaccccatcaacaagcatccgttcanatccttacggtttagcagcctgtcggcttgctaaaaacaatgac

SEQ ID NO: 4202 - DNA, 398 bp, Aspergillus oryzae
  modified_base (8)..(8): n is a, c, g, or t
  modified_base (28)..(28): n is a, c, g, or t
  modified_base (31)..(31): n is a, c, g, or t
ttacttgncccgtttacggcacgaggcntcntgccgaattcggcacgaggccggtcgccatctgaactctatccgagctgtcgattccgattcaaatgatgcggtggtaatgggtgcattgacagtagctggggaaatcttgggacacagtcctaagctactaataggagtggccagcactgataagtcgatacgtgtctatgacttggaccgaggtgtattgctcactggcgaattcggccataccgagggtgtcagtgatgtgcagttgctggaaaggaaccctgatccgtccagccgaaccgttgtacgcacattgataagctcaggcattgatggtgtttgtgatgatgttggaacatttcggtgcaacccctcccaagcgccaagaaatcaca

SEQ ID NO: 4203 - DNA, 410 bp, Aspergillus oryzae
  modified_base (20)..(20): n is a, c, g, or t
  modified_base (31)..(31): n is a, c, g, or t
catattaacttgagcccttntacggcacgangctcccgagcaagatcatgctgctggtaaagttcccactttacctaaatctagaagcatcagtgaatattgggcaaagttggttcgagcaagcgagttgtccttcgcgggcttggcagccggtaacctggattcatcgatgcattgccctctgattattgcctcacttccagcatttattccctcctaaaatcccccttcttatttactttggtctactaacactggcgtttgccgtttatccgggtttcttttcatcagaagacggttctaagaaaatatcaccatttgcattgtcggtgttttttttatttcattttaattcctttccgggcattttcccaaagggttcctgttttgaatttaattccctcctcctc

SEQ ID NO: 4204 - DNA, 187 bp, Aspergillus oryzae
  modified_base (53)..(53): n is a, c, g, or t
  modified_base (56)..(56): n is a, c, g, or t
  modified_base (82)..(82): n is a, c, g, or t
  modified_base (85)..(85): n is a, c, g, or t
  modified_base (108)..(108): n is a, c, g, or t
  modified_base (130)..(130): n is a, c, g, or t
  modified_base (146)..(146): n is a, c, g, or t
  modified_base (155)..(155): n is a, c, g, or t
acacttcgtatccttggaacgacatgcctccactcacttatgagaacctgcanaantggacttgcacgccaagtcattaaanaantcttcgcatacatgcaccaatcnatctatcattcgagcagtgaanaacccgatgccagtanaggtatccntactgatcccgactcgcacaagtacttcctcc

SEQ ID NO: 4205 - DNA, 352 bp, Aspergillus oryzae
  modified_base (191)..(191): n is a, c, g, or t
  modified_base (251)..(251): n is a, c, g, or t
  modified_base (291)..(291): n is a, c, g, or t
caatcgcactgtcttcttcccgtctaattgaaattgttctctcgagcagcttctcaacaccgtttacctgacgcatctatcttgtgacctatcctgttatttcctatatctccttgaattcctcaatttcgacagactcacccgacatgtatatccagaacctgagtacctcatccatagtggattccgangctgaagaaaacaatctgaggcatatcttgtctgagatcatgacagatggctgatagtanagcaaagataatgactgttcctatagctaggatgatctanatgtgagagcatcttcctaacgatctccgatcgtcacggaatcccaaataaatacagtgga

SEQ ID NO: 4206 - DNA, 320 bp, Aspergillus oryzae
  modified_base (6)..(6): n is a, c, g, or t
  modified_base (95)..(95): n is a, c, g, or t
  modified_base (99)..(99): n is a, c, g, or t
  modified_base (107)..(107): n is a, c, g, or t
  modified_base (145)..(145): n is a, c, g, or t
  modified_base (161)..(161): n is a, c, g, or t
  modified_base (175)..(175): n is a, c, g, or t
  modified_base (185)..(185): n is a, c, g, or t
  modified_base (244)..(244): n is a, c, g, or t
  modified_base (264)..(264): n is a, c, g, or t
  modified_base (285)..(285): n is a, c, g, or t
  modified_base (290)..(290): n is a, c, g, or t
  modified_base (298)..(298): n is a, c, g, or t
gggtgngtggaacgaaccacacgctgccaaacgcaccgcagttctcgcgtcgatcatcagagatcagatcgtgtggtaaccgcctcgccttacgnaggnccgtgganccggtttgcaccacgcgcggtcttatccgcaagtacgntgaacatctgccgtcntgcttccgtgagantccagactcngttccacaagtacgttaatcaatacactggaatcctgttcacaaattcgtactctcggnctcggtacaccttggaaatnaccgaaagaccgatcatcctngatcnacggaacnattgatataattgttgagaatc

SEQ ID NO: 4207 - DNA, 299 bp, Aspergillus oryzae
  modified_base (5)..(5): n is a, c, g, or t
  modified_base (67)..(67): n is a, c, g, or t
  modified_base (128)..(128): n is a, c, g, or t
  modified_base (177)..(177): n is a, c, g, or t
  modified_base (213)..(213): n is a, c, g, or t
  modified_base (233)..(233): n is a, c, g, or t
  modified_base (269)..(269): n is a, c, g, or t
  modified_base (273)..(273): n is a, c, g, or t
gattngatcatcgacagtctccccctatattatcatgcgtgactgacaggcgaacgccagtgtctcnggtagggctgcgagatgtttgatgttccaagtactccgagtatccacgaatcaccacgtantcccatcaccaagctcaatgacctactctcagtcattccccgtctcaantatttgcattcagtgatgcacttcactcccttggancgtggcagaatatacgctcncccctctacccgatctagtctctgactgctcgcgtnatcnccatccttacagtcagaaagtattgt

SEQ ID NO: 4208 - DNA, 335 bp, Aspergillus oryzae
  modified_base (4)..(4): n is a, c, g, or t
  modified_base (9)..(9): n is a, c, g, or t
  modified_base (41)..(41): n is a, c, g, or t
  modified_base (86)..(86): n is a, c, g, or t
  modified_base (113)..(113): n is a, c, g, or t
  modified_base (169)..(169): n is a, c, g, or t
  modified_base (171)..(171): n is a, c, g, or t
  modified_base (226)..(226): n is a, c, g, or t
  modified_base (246)..(246): n is a, c, g, or t
  modified_base (302)..(302): n is a, c, g, or t
gatngattntctacctacatgcatgttaaccgcgactcagngaaatactaccgttccaccattctgcttggcaagtatattatcgncattggaccagacacccataatcattnctccatgatataataccataccagctaccactaaaatatctaaaccacctcacccngngattggctatcgaatcctccaggaaaaaagttcgtccttggagttttctcactgnaacctacaccattgataagncattggaatccctattaaccacttacgctatacctctactatactatgatacttanatataccctatatacaatacaatagatacccta

SEQ ID NO: 4209 - DNA, 211 bp, Aspergillus oryzae
  modified_base (3)..(3): n is a, c, g, or t
  modified_base (35)..(35): n is a, c, g, or t
  modified_base (44)..(44): n is a, c, g, or t
  modified_base (67)..(67): n is a, c, g, or t
  modified_base (129)..(130): n is a, c, g, or t
  modified_base (147)..(147): n is a, c, g, or t
ggngggaacgaaccgcacacagcagccaaggtcgngatagtatntctatcaatgacggtcataatanccgaatccaccctgaatctcaaccctaccctcccaccctgtgttcctatgtggtgttaaacnngccgtaagtcccatcanagtgtgattcaatggatggatttatatgattaaatggtctttatgtttgtgctttgatactgag

SEQ ID NO: 4210 - DNA, 200 bp, Aspergillus oryzae
  modified_base (16)..(16): n is a, c, g, or t
  modified_base (42)..(42): n is a, c, g, or t
  modified_base (62)..(62): n is a, c, g, or t
  modified_base (76)..(76): n is a, c, g, or t
  modified_base (88)..(88): n is a, c, g, or t
ggggggatacgaacancgacagaaaacgcagatgcaagaggnacatagacgacctattctancctcgatcatcagntactttgaatanctacgtcgcgctacaacgcgcgcaacaaccgggcgtccatgccccgctcccaagacagcacaaatccatccaatgtgatcgcgcacggaattcgacctcgctcacatatcgc

SEQ ID NO: 4211 - DNA, 282 bp, Aspergillus oryzae
  modified_base (45)..(45): n is a, c, g, or t
  modified_base (155)..(155): n is a, c, g, or t
  modified_base (161)..(161): n is a, c, g, or t
  modified_base (175)..(175): n is a, c, g, or t
  modified_base (186)..(186): n is a, c, g, or t
  modified_base (216)..(216): n is a, c, g, or t
tacatggatgcaaccgcgactcagagaaatactaccgttccacanatgtctgttggcaagtatattatcgccattggcacgctgacacccataatccatgtcactccatgatataataccataccaggctaacactagaaatatcaaacataccncacccngcgattggctatcnaatcctcaggnaaaaaagttcgtccttggagtttccactgnaactcgcatgataacccattggaatccctattaacacttacgttataccctctatatatgatacta

SEQ ID NO: 4212 - DNA, 299 bp, Aspergillus oryzae
  modified_base (2)..(2): n is a, c, g, or t
  modified_base (10)..(10): n is a, c, g, or t
  modified_base (47)..(47): n is a, c, g, or t
  modified_base (54)..(54): n is a, c, g, or t
  modified_base (59)..(59): n is a, c, g, or t
  modified_base (89)..(89): n is a, c, g, or t
  modified_base (174)..(174): n is a, c, g, or t
  modified_base (185)..(185): n is a, c, g, or t
  modified_base (219)..(219): n is a, c, g, or t
  modified_base (250)..(250): n is a, c, g, or t
gntcatcganaggtcaagccgctcacaccccactggtgtgtgctcgncactcantgcanagctctggcgcaaccgaaagtcaaatctgntgtgtcactcacgatactcccaagcgacgctcaaatctgactaaccactggacccgtcacgtaactcacgcttcgctatcaccgnactgaaactcntctatggtagtacactacgaactctgtatctgancgatccacctactaacaacatactctctganttgaccgatcacgacctctggtacaaactttgcgactgaaagagtgctg

SEQ ID NO: 4213 - DNA, 437 bp, Aspergillus oryzae
  modified_base (5)..(6): n is a, c, g, or t
  modified_base (41)..(41): n is a, c, g, or t
  modified_base (142)..(142): n is a, c, g, or t
  modified_base (251)..(251): n is a, c, g, or t
  modified_base (305)..(305): n is a, c, g, or t
  modified_base (308)..(308): n is a, c, g, or t
  modified_base (359)..(359): n is a, c, g, or t
  modified_base (389)..(389): n is a, c, g, or t
  modified_base (400)..(400): n is a, c, g, or t
  modified_base (429)..(429): n is a, c, g, or t
ggggnnatgatccttgacagcctgccaatcgacagacagtnccgctatgtttgtcaccgaactgctgcgttcccctgagacgtaccagacgcctcttccattagcttgtgcaggataccgtcatggactccgtgggatcganttatggaacagtatgctaatcgcaaatttccgatgaatagctcgtggtcgtaagcccagaagtccccacaagttcaccatcaacgcttctcagcccgtgagcgacagancttcgacctctccgctttcgagaattccttcacgaccgtatcaagttgaaggcngtntccgcaactcggtgacagttgtcactcccagtccgcaaagcaaacgagttnttcccacatcccttctctgtcgctactcantacttgaacanattactccaaacacactcctgatggtccnttttcccc

SEQ ID NO: 4214 - DNA, 279 bp, Aspergillus oryzae
  modified_base (13)..(13): n is a, c, g, or t
  modified_base (23)..(23): n is a, c, g, or t
  modified_base (27)..(27): n is a, c, g, or t
  modified_base (148)..(148): n is a, c, g, or t
taactgaccctantcggcacgangctntgtcttcaagtgccgagtgcacgatgagacaatgtcaccaccccttaatatatctcatcttccacatgtcatgaactgggtgtcaaaaaacagggcgtcgggggttatgtttcttcatgtnttgagtgtctgttacagtcaacggtctctggatgaattatactgctgcgtaaatacctggggttgttccaacccaactgaatcagcatttatcggcttgattgatttgaatattttgatgaacgcgaagac

SEQ ID NO: 4215 - DNA, 229 bp, Aspergillus oryzae
  modified_base (8)..(8): n is a, c, g, or t
  modified_base (13)..(13): n is a, c, g, or t
ttttcggnacgangtcgggatcttgattattgttctccattcttcatttcagtcattggtaacttgacactctggactagtgtcattaccgtatatacaaagaagaacccttgagcttcccattaccatccggcttgggtagattcgggggttactcctttttttttcttaattgttttttctcttctttgttttcttgtttcttgtctccgctctattaagaaacttt

SEQ ID NO: 4216 - DNA, 382 bp, Aspergillus oryzae
  modified_base (25)..(25): n is a, c, g, or t
  modified_base (27)..(27): n is a, c, g, or t
  modified_base (115)..(115): n is a, c, g, or t
  modified_base (195)..(195): n is a, c, g, or t
  modified_base (202)..(202): n is a, c, g, or t
  modified_base (232)..(232): n is a, c, g, or t
  modified_base (287)..(287): n is a, c, g, or t
tcttttacctttttcaacgacccangnatcgtgggtaaccccgactgtttcgtcatcctccgtggtggaaagaagggccccaactacgatgctcattagcatcgccgaggccaangccaaactttctgcacagggtcatggtagccccgtctcatggtggactgcagccacggtaactcgcaaaagaaccacaanaaccatnccaaggtggctgctgtgctcgcggtaacanatcgctgcgggtgagaccgcaatcatgggtgtcatgatcgagagtaacatcaacnagggtaaccagaaggtcccgcctgagggcaaggccggcctcaagttacggtgtccagtatcaccgatgcttgcattcactggggaagaaacggga

SEQ ID NO: 4217 - DNA, 315 bp, Aspergillus oryzae
aaccgaccctccacccgctcgaccagtactcaacctcgcagcccgagactgaccgctggaagtcgtccaacgagcccaggaatcaataatcataacggacgtggcagcgcgttaaggttcagctctgagatgcccagttaagggtcttacctgttttgcataacttcaccagtttaagtggaatttctatcatgttgcagcgactccaccgatttcattcttgcgactatgacgttttacatagaggagggcgtgcatttgatgtttttttttttcatatcaatgactttgcattgtctgggcgtttttgtatgc

SEQ ID NO: 4218 - DNA, 327 bp, Aspergillus oryzae
  modified_base (7)..(7): n is a, c, g, or t
  modified_base (14)..(14): n is a, c, g, or t
  modified_base (31)..(31): n is a, c, g, or t
  modified_base (106)..(106): n is a, c, g, or t
  modified_base (163)..(163): n is a, c, g, or t
  modified_base (186)..(187): n is a, c, g, or t
  modified_base (189)..(189): n is a, c, g, or t
  modified_base (226)..(226): n is a, c, g, or t
  modified_base (254)..(254): n is a, c, g, or t
cttcttncacatcntactatctaccgaacanccaaatgtgtatatctcccattactatacaaaacaaataacgctgctcttctccaattaaagaaaaaatcacaangactttattacatcaagtcgctgactccccgtatctagacaggcactaacatgtacnccgtgcaccctcagtcccttcannancagggttcaaatgcctggctcaatccgactgtctccnctcaatgagcattctcagcatgacagcntctgcgaactcactcatccgaactgtgcctggctcttaatctgtgacagtcatcactccactgcctgctcgcg

SEQ ID NO: 4219 - DNA, 371 bp, Aspergillus oryzae
  modified_base (345)..(345): n is a, c, g, or t
  modified_base (357)..(357): n is a, c, g, or t
gatatcgcaggaattcgttagattctccgctacacttcatagccgcaatgtctgctcgtactttgtcgcatagccttcgcagccgctgccttttgcgcagacctcagaacattcagggtttctcgactcgtaccaacctccgtgccgctgatcatggagatcactacgatcctccgactgggtggctttttggtgtcaagccaggccagaagtacgtgaaggaaggctgggagaacatctggtactacggattcattggcagcttgcttgttgccggtgtcgcatacgttttcaagccagacacctcgatacaaacatgggctttggaaagaagcacggcggganactggaaacccnaggttattcttgaa

SEQ ID NO: 4220 - DNA, 390 bp, Aspergillus oryzae
  modified_base (321)..(321): n is a, c, g, or t
tcgaattcggcacgagggattgtatattattctatgggtatctgattcactgactgtgttataaatgatacaaccacacattgatacaagagacccaaactccacatacatatatagtcccacaaggtctaccacataacttttccgtttcccaccataccttcccatccatcccgtggcaaccagtataccccctaaaccatttcactcctccttccgatccttagcctcaataggtaaatccattccaactcgtctagccgtaagtctaatcttctcttgctcatccatccgtcatgcccggggttcaatttccacaangttggacttagcccgttaaccttggtttctcccctgcatgtttgaatttttagtccgttaaattgaaac

SEQ ID NO: 4221 - DNA, 301 bp, Aspergillus oryzae
  modified_base (162)..(162): n is a, c, g, or t
  modified_base (170)..(170): n is a, c, g, or t
  modified_base (209)..(209): n is a, c, g, or t
  modified_base (222)..(222): n is a, c, g, or t
  modified_base (257)..(257): n is a, c, g, or t
ttgagtcgaattcggcacgaggcctcgtgccgaattcggcacgaggctctgcatctaatgcttatgaaaatgtacctgcttttcatctttcggctgattactaccccccttggctattctatgtctatcatcctgtcatatggcggtttgtgctaactgtcngtcaagcngatagtttgtaatttacgcctggaaggcttcaagagccntgtcgttccatcnggttgggtcagctttgccgtaggataaaggttctnagaaaacttacggatagaaatttaccggaacaattccttggggc

SEQ ID NO: 4222 - DNA, 276 bp, Aspergillus oryzae
  modified_base (6)..(6): n is a, c, g, or t
  modified_base (10)..(10): n is a, c, g, or t
tttttngatnactgatatcgaattcggcacgaggaagcccctccttttctccctccctcttgaccgcttactgccggtgatttcacgatccctgattgcccctcacctccacttcatcgcagaagcaacttgaagtcattcttgctgcagggcttgctcgttgagctgccaacaaactcaccgacccgactggcttgactttcaaatgacttttgttagtcagtgccaacgtctcaactggtgtcaacagcccaataatccccgagtaattaacaa

SEQ ID NO: 4223 - DNA, 259 bp, Aspergillus oryzae
  modified_base (18)..(18): n is a, c, g, or t
  modified_base (44)..(44): n is a, c, g, or t
cgaattcggcacgagggntttgtgacatgcatgccctcctttgncacatttccttattttcttttcctctactcccttgtcctcagccattctgtctgcttttactattatgggctctggtgtggaacatcctagtagccccgaaatctctacgttcatggtctggtttctggcgcacaaaaagagcaggagtctgatttattcggttgattgagtgatctgagtttggctgggtttcgcgtttcttgcaagatattga

SEQ ID NO: 4224 - DNA, 264 bp, Aspergillus oryzae
  modified_base (4)..(4): n is a, c, g, or t
  modified_base (14)..(14): n is a, c, g, or t
  modified_base (49)..(49): n is a, c, g, or t
tcgnttcggcacgnggcccttttcaaccgtcatccgaacctcgcgatgnctaactcacagcctgccctagatgtctttttctacttccagaagcaagagcttaagctcagcttcaattcgcccaatcaagcagccttctaccaaaaccgcaatcgggaatcccgcatcttcgccaacgagcccaatgccgtttatcttccgctagctccatccatggtctacctgcgcgatagtagcaaagggcttgttcattggctttgcaaa

SEQ ID NO: 4225 - DNA, 258 bp, Aspergillus oryzae
  modified_base (38)..(38): n is a, c, g, or t
  modified_base (57)..(57): n is a, c, g, or t
actgaatcgaattcggcacgaggctggaacagccaagncggtggttatcttgccggntacaccctctgcctgaccttcttctactgcatggctccgctcctcttccggctgtcgtccgctgctttcttcaacatctccatgctgaccatgaacttctggggcgtcatcatcggcatcaaggtcttccactataccatccacttcatgtatccgatcgccttcgtgcttatcatcgtcggtcagctgatctacttcctc

SEQ ID NO: 4226 - DNA, 293 bp, Aspergillus oryzae
  modified_base (2)..(2): n is a, c, g, or t
anaatcgaattcggcacgaggtccatgccttatgacccccccagccttccttctcataaggacatcaaacccatgaagagatctagttgacttcctggatcgccgtctcggtcagtacgtcgcacacttgaacagaagccgagggaggaaggaattatatataccatcaccgcatgccgagatattgggggtcaaactgcatatgcaagactactcaaacagattgtacgtagggtattcatcgtatatatgtgtcctgataggtttctggtatatgctggtgaaatgtcata

SEQ ID NO: 4227 - DNA, 383 bp, Aspergillus oryzae
  modified_base (31)..(31): n is a, c, g, or t
  modified_base (282)..(282): n is a, c, g, or t
ccgggctccccaagttctcagtgaacggggnagcccctcaacgagaagtcctctagccgccggtagaagttgcgctctagcacttccaaccgctccaaaaggtagggcttttctcatgcggtgttggcggagtttgcactgctttctctctttattagctcttgagctacttgggtcaaaaactcatatttcaccattttcattggcggttcactttggtctgcttcttctaaatgaagcactttgcatggttgtcgcatcggtattcatggtctacgaaantcgcttcgttgcacactttttcttttgctttcctctcatatattggtcgtctggctttgtgcatgacacagcttgaatggatatattgacgaatccctgga

SEQ ID NO: 4228 - DNA, 356 bp, Aspergillus oryzae
tggcacatagcctcaccaatcccttcaggtattcatgttagaatcagatacccatctgtctatgtcacagatatgccaagtgaacgatatacgcacgagcacaaccagtcctggttggcttagggtggggctgtcaaagcggaggatgctttggtcgctactcgacgtcacaggcacagttgctctgcagttaatggactgccactgagtatttatcagaatacattgtgtgctatgctgcatgctccagggacagtcccctagaagccgtcttcagtctccagtgagcagctacagattccgtgttactagctccgattgagattacttcacttcataaaccatgttacatacat

SEQ ID NO: 4229 - DNA, 269 bp, Aspergillus oryzae
  modified_base (104)..(104): n is a, c, g, or t
gaataaccgccataagcgttatattgttcattcccagtcatatcaactgtatataaattagaaaaaaaaagccagtctcagtgctatttggtctacattcgaanaaccgatgtctaaccccaggaagagaggttcaaccaaactattgagtgacaggcggcagacggggggaagagaattgagattccgcccgagtagtgccgattgattaagcaagcagcatcactggtgttcgacttttttgcccagggaaagcatgcattaggcta

SEQ ID NO: 4230 - DNA, 374 bp, Aspergillus oryzae
  modified_base (3)..(3): n is a, c, g, or t
ganctgatatcgaattcggcacgagggccttctcatcagcttctggcaggctgccaggtgccccgaaaatccgcaagcctgcacctccaccagccccactccagctcctacctacaccccacatgttgaaggatgactctataatgggagctatcgactacgcccccgggaaaagttatagagaccagagggaaggccgtccggagacacctcttggagggttgcaaccgttcagtccaacgatgcgagcccacactccacttgtctcatcttttcaatgaattgctgtcataccgagcccgcatgcattgcggaattcggttacatatgacatttggatttgttccaccactcgcttcaagaactcgagatgc

SEQ ID NO: 4231 - DNA, 376 bp, Aspergillus oryzae
atcgaattcggcacgaggttttttttgtggtgtgtgggaatatattgcctctatattcgaccctaatctcacctacttcatctgtcattagaagagcacaccgtagagtagaggatgagctatgtacaaacggtatatctctgtaaagagagtatatcgaggatgtccagtcacgaagcatatgatctctgtaacacggaagatgatcactagaatgtaaccttcgcacccacagtgcaaggcaccaaactcccaggcatatatttctcaatcacaaacttagccctccaaccagagcaatgccccggcagcagaacagcagggtctaatctctcaaggtctttgatagtgctctccgtgttccgccgcagtgcta

SEQ ID NO: 4232 - DNA, 267 bp, Aspergillus oryzae
  modified_base (106)..(106): n is a, c, g, or t
  modified_base (170)..(170): n is a, c, g, or t
  modified_base (173)..(173): n is a, c, g, or t
  modified_base (195)..(195): n is a, c, g, or t
  modified_base (206)..(206): n is a, c, g, or t
  modified_base (232)..(232): n is a, c, g, or t
  modified_base (243)..(243): n is a, c, g, or t
gaggtttaattgcttattcatcagtatctcatgcagctgtttacttaataggtgcatttagtaatacaatacaaggtattgagggttcaatagttttaggattatntcacggttttgtttcatcaggattatttatttgtgcaggaggaattttatatgacagatcatcnacnacattgattacatattacagangtatggctcangttatgcctattttctctgtattatncttcacattanctttaagaaataatggaactcctc

SEQ ID NO: 4233 - DNA, 364 bp, Aspergillus oryzae
  modified_base (3)..(3): n is a, c, g, or t
ggnggttgtgataagttgatatcgaattcggcacgaggaggcattgtagcgttggctccccatcataattataactgcgctgtacctatcttgttctctccgtttcctcaagattgctgcttttgatagtccatggttgcctgaactttaaggtatacattattcggcattacttgccagtctgggattagctccgtgcaggccaaccgcaaccttcagaagggatgaacttctacagactatctttcgttcttctattaccctccccgtctctcgttcttcggtcgcactggccttgttctatatattatttagagatattcattccttatttataaggcattcattgcaaatctgttctggt

SEQ ID NO: 4234 - DNA, 348 bp, Aspergillus oryzae
  modified_base (8)..(8): n is a, c, g, or t
tggattcntatcgctctcatgcatcctccagccccaagccctcgtcttcggcacttagctcatcccatgtctcttcttctccaggagcatccactcacactggtggtgctggcggaggtgcaggtggtgcttcctcttcgggcagagcaagcagctcagctaccccgcctcttaagacaaatggagcagcacaagttaccgggggcttggccggtgtggctatcgctgctgtggctgcgtattaccacctttgattccttagtgggactcgatgtttactcttcggtggaaggggtacgttctctccatgattgtcgtccctgctgatattgaatgatagttatgaat

SEQ ID NO: 4235 - DNA, 330 bp, Aspergillus oryzae
  modified_base (56)..(56): n is a, c, g, or t
aggataagcttgatatcgaattcggcacgagggcctgtttaatctttctacggccntaacatttttccatacatgttacaggttctattttctttgattccccgtgtttgggcttggcctccataaaattcctatttacatgacaagagtctatgctcttatagcgaaggatgacggacgcacgccatgaacggacatttctgttgtaatatcatccctggttcattggttcatcgacggatggataatcacgctgtggcgattctcatttcgattgttttgagcttatcgttttattccccttcctgtttattgattgtctttttttgt

SEQ ID NO: 4236 - DNA, 364 bp, Aspergillus oryzae
  modified_base (22)..(22): n is a, c, g, or t
  modified_base (347)..(347): n is a, c, g, or t
tccccctccctttggtgtcggnttcggcacggggttttcttacaagttttacccccatgcatgaaaccaaagggtctttcctttaaatatgttcctcggcatcgggggtagtcggtttaagggtgttagggtagattgagggtttggcatgtgaagaatcgattcccgtgatctctacagtcttatgaccggtttgtgtgtgatataagaccgctttttcttttcttctcctttttcgttattcacgagcgttcgattacttttcgcataatacttgcatgactgctcttgttacatacgtttactataccgagttgaagccaagttacttgaagataacctgactnacagaaagacatccatg

SEQ ID NO: 4237 - DNA, 435 bp, Aspergillus oryzae
  modified_base (395)..(395): n is a, c, g, or t
gggggggtggggataagcttgatatcgaattcggcacgaggcaactactgaacctgtcagtgtgccagcccagcagaccactaatgttccacctgctgaggactggaccacaacagtcactgtctgtacggagtgcgcatcgacgccaactactttgacacttactgtgcctgccacgggagctggctctaaccccgtcaaccctatcagcaccatcgctgttgggcaaattagcagctcatccggacgcgagagctccgttatccccgtagttacaaatactgtcaccagccacagccagagcctttcgaagacttctgtgattgctggaacaggcagtgtacatccgtcgtcctcaaccttggctgtcagaccctcgaccagtggatcacgantccccgtggctcctagcaaaaccagaaatgttttccccat

SEQ ID NO: 4238 - DNA, 332 bp, Aspergillus oryzae
  modified_base (144)..(144): n is a, c, g, or t
  modified_base (291)..(291): n is a, c, g, or t
tcgacccacgcgtccgcgaacctcttttatggaaagcctctcaccgtagagcttcccaccgacgaacccccagcttacctctactcacccctcaagggagttccgcggacatggatcccgcatccatctgggcggagctcgacnagtcggattttgattacgctgacccggactcccgaacaccattactcaaacgtctgtctgccgacccgtttaaaagccaaccaagaggaaaaaccaagtccatcaccctgaaagacgcctcccttacgcggacaacgccactcatcnacttagcccccctccagcccatccagacctggaatcccccg

SEQ ID NO: 4239 - DNA, 253 bp, Aspergillus oryzae
  modified_base (85)..(85): n is a, c, g, or t
  modified_base (148)..(148): n is a, c, g, or t
  modified_base (198)..(198): n is a, c, g, or t
tttcctcctctctatggccaactctggccccggcaccaacggtaagtcagttcttcatcactaccgtccccacccctcacctggnatggcaagcacgttgtttttggagaagtaatcaacggaaaacagtgtcgtccgcaaggtcaanaacatgaacacccaggcaaacaagcccgtcaaggaacgtcactattgtcnagtgtggtgagctcacgggccaggactacaatgatgctgataagcaaacccctgt

SEQ ID NO: 4240 - DNA, 373 bp, Aspergillus oryzae
  modified_base (10)..(10): n is a, c, g, or t
  modified_base (19)..(19): n is a, c, g, or t
  modified_base (215)..(216): n is a, c, g, or t
  modified_base (268)..(268): n is a, c, g, or t
taccggtccncaaattccngggtcgacccacgcgtccgcccacgcgtccgggggaaagatgccatcttattgaaaagatttttgcgaacctttaccttcttgtctcttggggtatcagctggctctagcaaacgtatcctccgtgtgaccgtgacgtttgggtcgggtttgtctccagcatcacgcggcaaccggttgaatgtggtgcgaaaaannttgttcattcgatccgagagcctcaagcgtcagaaatctggcggggagaaanatttgattcccatcaaagaatcaacttgttcaagtcaacaataccctatcataattcacaacttgaactggagccacgtccacagctgaattgaccaacaataac

SEQ ID NO: 4241 - DNA, 273 bp, Aspergillus oryzae
  modified_base (61)..(61): n is a, c, g, or t
  modified_base (64)..(64): n is a, c, g, or t
  modified_base (68)..(68): n is a, c, g, or t
  modified_base (183)..(183): n is a, c, g, or t
gacccacgcgtccgcggacgcgtgggttgatcaccagcgaaacgagtgggaaatgaaccantanacanaaagagatgatgcagaagtttcccccacgtccgggtgatagcactccgcccaacccttcgtacattcctagtgaccggccacgcaatttctgtgttttggtcctccatgatgcancgtgcgatttcgacagtcgagtctttcaacgaggtacgaaatatgatgttcaaacaaatgtaagtatgctcgtacgagcttcatggcggg

SEQ ID NO: 4242 - DNA, 229 bp, Aspergillus oryzae
  modified_base (3)..(3): n is a, c, g, or t
  modified_base (35)..(35): n is a, c, g, or t
  modified_base (49)..(49): n is a, c, g, or t
  modified_base (93)..(93): n is a, c, g, or t
  modified_base (113)..(113): n is a, c, g, or t
  modified_base (147)..(147): n is a, c, g, or t
  modified_base (175)..(175): n is a, c, g, or t
  modified_base (196)..(196): n is a, c, g, or t
  modified_base (199)..(199): n is a, c, g, or t
ctngaatggatttcccgggtcgacccacgcgtccncgtcaagatggcanactggaaagctgctggtttgacttacaaccgctacctggccgtngctgctcgcgcggtccgcanatccctcaaggagacccctcgtctggctgctgancgccgtggccagatggacctgcgttttntttttttgggataacggcaancanggcgaggttcgctccctcggtgaggccaac

SEQ ID NO: 4243 - DNA, 377 bp, Aspergillus oryzae
  modified_base (6)..(6): n is a, c, g, or t
  modified_base (329)..(329): n is a, c, g, or t
  modified_base (373)..(373): n is a, c, g, or t
atttcncacaggaaacagctatgaccatgattacgccaagctctaatacgactcactatagggaaagctggtacgcctgcaggtaccggtccggaattcccgggtcgacccacgcgtccgcccacgcgtccgcccagattttgttccggaagtattcgtcggctcatttctctagggtctcgaagattctagagcaattcttggctcgtcaagcttcggtcgctaattacaccccaccaagcccaccctcagatgtcaacgccgagtccaaaccgtacgaaggcgagattggactggctactccgcagaaggctccccatccgtcgaanatgcccccagggttatatcccccccccaattaccccccaaaaanaaat

SEQ ID NO: 4244 - DNA, 286 bp, Aspergillus oryzae
  modified_base (43)..(43): n is a, c, g, or t
  modified_base (50)..(50): n is a, c, g, or t
  modified_base (53)..(53): n is a, c, g, or t
  modified_base (56)..(57): n is a, c, g, or t
  modified_base (203)..(203): n is a, c, g, or t
tttccttttccctgggaaacagctatgaccatgattacggatncctcggntgncanncactgggaaggaaagctggtacgcctgcaggtaccggtccggaattcccgggtcgacccacgcgtccgcccacgcgtccgcggacgcgtgggctccttccccaagatcttgagaaacgagatttctgtccacatcatccaaagtcntactcatatcctgaacacttacgatgaagccctttctaagtatgctgaggctcgtttcgctcgtgatcatgttgatgtcttga

SEQ ID NO: 4245 - DNA, 300 bp, Aspergillus oryzae
  modified_base (16)..(16): n is a, c, g, or t
  modified_base (29)..(29): n is a, c, g, or t
  modified_base (36)..(36): n is a, c, g, or t
  modified_base (54)..(54): n is a, c, g, or t
  modified_base (80)..(80): n is a, c, g, or t
  modified_base (112)..(112): n is a, c, g, or t
  modified_base (130)..(130): n is a, c, g, or t
  modified_base (150)..(150): n is a, c, g, or t
  modified_base (161)..(161): n is a, c, g, or t
  modified_base (174)..(174): n is a, c, g, or t
  modified_base (190)..(190): n is a, c, g, or t
  modified_base (193)..(193): n is a, c, g, or t
  modified_base (221)..(221): n is a, c, g, or t
  modified_base (270)..(270): n is a, c, g, or t
  modified_base (283)..(283): n is a, c, g, or t
  modified_base (294)..(294): n is a, c, g, or t
cctggaaaggaattcncgggtcgattcangcgtccncgcgtcatgctaaggagngccatcggtgctgcccggctccggcngaccgcctcgcgcaacgtcgctcccatcgccnacctgaccgtgtctcgtncggcctccaacgtccctacngaggaccccangaagaaggcccanttttattttttttatntcnctccccgggcaacaccctggtctccaantaccgcttactctctccgccgctgccggtctctccatagccgctaacancaatgagctctangtcatgaacgnagcaaa

SEQ ID NO: 4246 - DNA, 388 bp, Aspergillus oryzae
  modified_base (309)..(309): n is a, c, g, or t
  modified_base (313)..(313): n is a, c, g, or t
cgacccacgcgtccgaaaacttgagtctacttcttcaactttcagttggaactcactttacatgaacgccgatgcagttatgtcgtcaatggctgagagactcggcatatcaaaagcagatctcttggaccctacttcgtcggatgccgcagtaaaacaagcgcatgctgaaacgcacgttattcaagaaacgaaagcttactttactgcaaatggtgtcaatatcgatgcctttaaagaacgagagcgtggaaacactgctatcttagtaaagaacttctcttatggcgtcaagactgacgatcttangaanttgttcgagccgtttggccaactccacaagactactgatgcctcctagtggtacaatagctattgttgagtttgc

SEQ ID NO: 4247 - DNA, 412 bp, Aspergillus oryzae
cgacccacgcgtccgatccaaggagaggaggggattgtgactgatattctagtcacagcagaaaaggatcattacccttctgcgtcatgccataaatccattcttatcggattctcctttattgtcttagctcatgacaccccgcagtatgacacattgcgactgaagggttacctcattcctttttttaacccccgaataaacctaccaggagcacggtacattcctttcctgtccaagctaaaattggatggtccctgagggcccagaacctcttatgcagaaggagttagacgtcaaccaggtttgggtaaaaaaacaaaagaaaatgttttgatgctacttttctggtggctggtctgcgctattttgttctaagcgaagatcgtgatctgaatagaatcccaagaat

SEQ ID NO: 4248 - DNA, 334 bp, Aspergillus oryzae
  modified_base (73)..(73): n is a, c, g, or t
  modified_base (181)..(181): n is a, c, g, or t
  modified_base (191)..(191): n is a, c, g, or t
  modified_base (219)..(219): n is a, c, g, or t
  modified_base (235)..(235): n is a, c, g, or t
  modified_base (256)..(256): n is a, c, g, or t
  modified_base (281)..(281): n is a, c, g, or t
gcgtccgcccacgcgtccgcccacgcgtccgcgccacaccaacagacacatctaaacaatggctacccccaangttgggaatcaacgggcttcgggtcgtattgggccgtatcgtcttccgtaacgctatcgccaacgggtgaagttgaatgttgttgctgtcaacgaacccttcattganactcactatnatgcctacatgctcaagtatgacagcanccacggtcgcttccanggtaccatcgagacctacgangaagggcctcatcgtcaacggcaanaaaaatcgcttcttcgccgaacgttgacccgctgccacccctggggctccgct

SEQ ID NO: 4249 - DNA, 382 bp, Aspergillus oryzae
  modified_base (12)..(12): n is a, c, g, or t
  modified_base (14)..(14): n is a, c, g, or t
  modified_base (181)..(181): n is a, c, g, or t
  modified_base (190)..(190): n is a, c, g, or t
  modified_base (377)..(377): n is a, c, g, or t
gaaacagctatnancatgattacgccaagctctaatacgactcactatagggaaagctggtacgcctgcaggtaccggtccggaattcccgggtcgacccacgcgtccgggcgagttcgtctttctccccagcatcgtaacaacaagctgtacattagcactagttatttcctgtgtgaanatggcttcnaaaaaagacatgcggaggttggacctcgccatcccctatgtcgacccgcctgccaacaaggatgatgccgatatgtctggcgcaatgaccagcaccatgcccatggccgcgatgttcacccgtaacaggatgatcggatgggtctcattcctcctttttcactttcaaaattgggctccggtgaaancccct

SEQ ID NO: 4250 - DNA, 301 bp, Aspergillus oryzae
tccgcccacgcgtccgcccacgcgtccgcccacgcgtccggtactggattatcctttttgtcttgaccatgcgccgacagatccagcacatgatcaagtaccgctacgtacctttctccttcggcaaggccaagtacggtcggtcgtaaattgggattgcatagtccgttttcccgatgatgattctcgtgttcaactgagcggggtactgcagacctggcttcctgcaagtctttcccagctccgtctcactttttaattccgtcctattccttgacatgaattaacgtgatctttgaac

SEQ ID NO: 4251 - DNA, 371 bp, Aspergillus oryzae
  modified_base (276)..(276): n is a, c, g, or t
gcgtccggatgtggaggtcatcgagtggaagccttacaaacagaaagaagcattagagattcttacgaggctatacgctcctgatggcggcaaggcattcgctgaaaacctcgccctctcaggagaaccctacttgccactcttagcatggacactccgagacacccctggagttgaggagctcagtctgcatgaagtctgggattggactcttaagcgcgaaatgttccgatactccttacctccaagaatggaacacggtcgctccgaaaaatngatgttgatcctcctgcccggcgttacccaacacccgcgccactgcttgaccctccccgttattggggatacccttcatcctggaatcttgtttg

SEQ ID NO: 4252 - DNA, 334 bp, Aspergillus oryzae
  modified_base (284)..(284): n is a, c, g, or t
tcgacccacgcgtccgcccacgcgtccgcagacgtgcccgttctccctctcccccctctccacttttgggattaatatttattattattattttttccccattctgcctttatgctcaaaagtttctttatggtctttattttcttaatacctttgggcctcacagatgatcgacttaatagtgtgaaactcccttcgtctagtttctgttatttttgtttttcttcaggttttaccttaattctccactctgtcaagatcgatccgtccaacatttgtttttnccctctctgtcttcccttttagttcccatccgtccaaatggttgtgacgt

SEQ ID NO: 4253 - DNA, 272 bp, Aspergillus oryzae
  modified_base (60)..(60): n is a, c, g, or t
cgacccacgcgtccgcggacgcgtgggcgcatgtggagtggcacgcctccgcgatcggangcaggcgaatctccgcactcgggccctgcactgcatgtttatcgaccttccgcatccgacaggatcatcacctgcgtgaggcggtttttctaactgggtaatgctgcgtgcctatatccaaatggttggatttagttttacctttctcttgcatttgattcggtaggcttcctttctggtccctgtcatttgctctgtgctcggggttttac

SEQ ID NO: 4254 - DNA, 339 bp, Aspergillus oryzae
  modified_base (192)..(192): n is a, c, g, or t
  modified_base (329)..(329): n is a, c, g, or t
acccacgcgtccggacaggtgcagttgagcccaaccctgcttccggtgacggccagtattgttatgcggatacagcggatcggagcgcctgcgccttggcggtgtgtcctacaaagagcgcgatggaagggtgctgattggcagggcagtccattccgttgatgaccctccgcatcgcgtcgttgtccgtgnatggcccagcccccctcgtcatgttccagtcccaaccatgcagccatatctatgcagtgagaatccgcccctgactgattgtcccttggatggcccgcttcgcccaagtcggtaacgttcacctcccagtttgttcngttccccttt

SEQ ID NO: 4255 - DNA, 333 bp, Aspergillus oryzae
  modified_base (262)..(262): n is a, c, g, or t
  modified_base (310)..(310): n is a, c, g, or t
gcgtccggtccctgttgggaaaatactaactgaagacgctgcgagcgtacccctcaagtacaggggatgtatgaggaggtcgcacaggcaaaggccgagaaggacggcagtataatcgttgtactggccacagatgcgccgcttcatcccgctcagttgcagcgtgttgccaagcgggcaaccgttggtcttgctcgcgttggtggccaaggacataacctgtccggggatatcttcctagctttctctactgggaacgaanatacctgttcaaccagcacaagaaacctgcgtcagttagcacgaactnattgacttgcttgaatgatcctg

SEQ ID NO: 4256 - DNA, 277 bp, Aspergillus oryzae
cgtccgcccacgcgtccgagcagatggccgcttcatagctagcgggcatgagaatggcagcgtctatatctttagcacggaaacaggtcgtatgccgtttagcttatcaggcctagtgaagcccgtgcgagctgttgcattctctcccgggggaaagtttctcgctgctgctggagactccaatgtgatcgtgtttatatgacacttcatcctggcgagcaggttggctaacctccccgggcattccagcatggttcttgttcgctttccttggacc

SEQ ID NO: 4257 - DNA, 235 bp, Aspergillus oryzae
  modified_base (28)..(30): n is a, c, g, or t
  modified_base (52)..(52): n is a, c, g, or t
  modified_base (55)..(55): n is a, c, g, or t
  modified_base (82)..(82): n is a, c, g, or t
  modified_base (84)..(84): n is a, c, g, or t
  modified_base (89)..(89): n is a, c, g, or t
  modified_base (145)..(145): n is a, c, g, or t
  modified_base (177)..(177): n is a, c, g, or t
  modified_base (180)..(180): n is a, c, g, or t
  modified_base (214)..(214): n is a, c, g, or t
gacccacgcgtccgcccacgcgtccggnnncagcgtccgctccgctctccanaanctcgaccccaatgttaagggctgccangncctcnttctcgcccctcacccgtgagttggctcagcagtatccagtaaagtcgtcgttgcnatcggtgacttcatgaacatcacctgccacgnttntattggtggtactgctgtccgtgaggacataaangctctcggagaaatgccccga

SEQ ID NO: 4258 - DNA, 321 bp, Aspergillus oryzae
atttcccacaggaaacagctatgaccatgattacgccaagctctaatacgactcactatagggaaagctggtacgcctgcaggtaccggtccggaattcccgggtcgacccacgcgtccggcgaaagtttacgtcggaaacctttcctggaacaccaatgatgagtctctccgtcagactttctcggagtttggcaacgttttggacgctgctcgatggtcgccgtattagggtcaacttggccaacgctagacccgccggcggatcccgtaactacggtggtggcaatggctacggcggtggctacggtggttggctaca

SEQ ID NO: 4259 - DNA, 423 bp, Aspergillus oryzae
  modified_base (3)..(3): n is a, c, g, or t
  modified_base (75)..(75): n is a, c, g, or t
  modified_base (80)..(80): n is a, c, g, or t
  modified_base (84)..(84): n is a, c, g, or t
  modified_base (119)..(119): n is a, c, g, or t
  modified_base (122)..(122): n is a, c, g, or t
  modified_base (374)..(374): n is a, c, g, or t
gcntttggtacgcctgcaggtaccggtccggaattcccgggtcgacccacgcgtccgggacgtcggactctgganactgnggangaagtcctggggcgttctgcgcgctatgattgatnaanagatgatcgtaaggcaacctgctgttgaagttgcgcgaaaacttcgaagataaattccgctacgatgatgctggtgttcctcggatctggcgcccgaccgatgatatccaagggatatacactcgtgctcgcgaatcaaccttgactctcatccccctactgtccaagttccgactcgatgagacgtctgcccctcctcctctggatcgttagatcggacacacgctctactccgcaacctctgctgatgangaatactggctcccattggcggggttgacaaggagaaggcctaccttga

SEQ ID NO: 4260 - DNA, 370 bp, Aspergillus oryzae
gcaggtaccggtccggaattcccgggtcgacccacgcgtccggccgaggaaacagttgtagaagcttttatcgtaagaaattgaggatcttggaagaggttgctcttgattgtgtgaggcttaggcaatctggaaaccggttgagttctccatagctatgtggaggatgcgttcggtatgtttgattaaagtatgacagctaacaggtgtttcctcgatagggtatacacaggcttgaccacgactttatgattcttttctaggaatctcgtctatcatggcagggttggaccgatgagatatcagcttagcaccgagctttactaaatttagggaatatacgacctctctgaggttgtgcaaaggctct

SEQ ID NO: 4261 - DNA, 338 bp, Aspergillus oryzae
  modified_base (14)..(14): n is a, c, g, or t
  modified_base (20)..(20): n is a, c, g, or t
  modified_base (36)..(36): n is a, c, g, or t
  modified_base (69)..(69): n is a, c, g, or t
  modified_base (76)..(76): n is a, c, g, or t
  modified_base (90)..(90): n is a, c, g, or t
  modified_base (112)..(112): n is a, c, g, or t
  modified_base (117)..(117): n is a, c, g, or t
  modified_base (122)..(122): n is a, c, g, or t
  modified_base (175)..(175): n is a, c, g, or t
  modified_base (244)..(244): n is a, c, g, or t
  modified_base (254)..(254): n is a, c, g, or t
  modified_base (257)..(257): n is a, c, g, or t
  modified_base (273)..(273): n is a, c, g, or t
  modified_base (315)..(315): n is a, c, g, or t
acccacgcgtccgnagtgtngaagccgcttgcgacnttgggtgtcgccgatggcattgtctaccttgtngaatccngtgaaaccatgaangctgctggtctaaaagccatcnatacngttgnctagagtacctctgttcacgtcaagtctcggaacgcccagaaccctcttgtcnaactcatcacctcccgtatccgtggtgtcatcaccgcccacaagttacgttctgtgccaatacaatatncctcgctctnaantctccaccgcctccancatcacccctaggcaatcgcgccccgtccgtaaccgccctcnaggaagaaggatggttggccgtc

SEQ ID NO: 4262 - DNA, 348 bp, Aspergillus oryzae
cgggtcgacccacgcgtccgcggacgcgtgggtctcgtcctggtcgtattgatcgaaagattctcttcgaaaacccagaccaaaataccaagaagaagatcttcaccctgcatacatccaagatgtccctcggcgatgatgtcgatctcgacgagtttatcaaccagaaagacgatctttcaggtgcagatatccgagcaatctgtaccgaagccggtttgatggctttgagagaacgtcgtatgagagtgcaaatggaggatttccgctccgcctagggaacgttattatgaaagaacaaaccaagacggaagccctgttgaaaggcttgttcctgtatccaactgt

SEQ ID NO: 4263 - DNA, 321 bp, Aspergillus oryzae
gacccacgcgtccggttcactttgctatgaagtatggtgtcgaccctgtcggcacggtggcgcatgaatggtatatgaccattgctgccattacggatgactatgagaacgccaacgagttggccctgcggtactggcttggctgctttggaaaaggagttctgggaatcgccttgacggacactttcggtacccccgcctttctcgatgcattccggaagccgattcctgcgttttacctccgcaggagctggtgcagtccagcacatcggcatctggaccagccacaactaacgaatcgactgttccaattgaggcgga

SEQ ID NO: 4264 - DNA, 355 bp, Aspergillus oryzae
gcgtccgtgatacgagctttatttcttatatttcattgtaaatcatatacggaacatggcgttggaactctccctcgaacccttcagaaaggcatatttacatcagcgcaagtgatcttcaaccgcttgagtgggcaatcggacattgtgggcattgtcttgtccttttgcgtgtgttgatacttctcagatgatgccattggcttaaactcgaatgttttccttgagaaaatggtgatgcgtcgctttctttcttgcctttttttttttctcttcccgttgaacttgggcggcttcctgttgatttcgttttcatccgtatttgaaaatcagcaatgcattgcatatctgcccg

SEQ ID NO: 4265 - DNA, 361 bp, Aspergillus oryzae
acgcgtccggccattatccagcagggcacaccattcccgttctcccctcataatcataaaccaagatagtcacaatgggatccatctcttccacatccccctccgtggtcaaagctgacagcaccccctacttcacccccgccaacaatgcaggtgccgctgtcaaccccgacgaccctaacactcccaccctcttcaaacccttgcgcatccgcgatgtgacccttaagaaccgcattatcgtgtcccccatgttgcatgttactccgccgaatcggaccccacctcccccttcgtcggcgccctgaccgactaccacatcgcacatctgggccaattcgcgctcaaagggccggttggt

SEQ ID NO: 4266 - DNA, 305 bp, Aspergillus oryzae
  modified_base (205)..(205): n is a, c, g, or t
ggcggattccagagctcaaggagtacggcactttgctcaaatcttctgttcccgtcgagcttaccgaaagcgaaactgagtacgtcgtcacggcggtcaagcatgtcttcaaggaacacattgtggtgcagtacgatatcaagaacactctgccagatactgttctagaagatgtcactgttgttgcgacgccctccgaagaaanatgttttggaagaaagagttcattgtgcccgcccccaagcttgctacgaatgagcccggaattgtatatgttacgttcaagaaacttgctggcgaaaacc

SEQ ID NO: 4267 - DNA, 355 bp, Aspergillus oryzae
ttaggtacgcctgcaggtaccggtccggaattcccgggtcgacccacgcgtccgcgctcgtggtctcgccaagttgaagcttgagggtgaggctgctcgcaagaccttgagcttgggtaccaacgccagcttgagcattgagagtctcgcagatggcattgatttcggctccactgtcaaccgtactcgctacgaacttctctccggcaagaccttccgcccagttcaccggcttgatcgagcaggttatccagaaggctggtttggatgtcttggacattgacgaagtttatcttcgctggtggtgcctctcacactcccaagatcgcccacttggcccgcaacatcttctccg

SEQ ID NO: 4268 - DNA, 372 bp, Aspergillus oryzae
  modified_base (61)..(61): n is a, c, g, or t
  modified_base (78)..(78): n is a, c, g, or t
  modified_base (91)..(91): n is a, c, g, or t
  modified_base (110)..(110): n is a, c, g, or t
  modified_base (175)..(175): n is a, c, g, or t
  modified_base (193)..(193): n is a, c, g, or t
  modified_base (201)..(201): n is a, c, g, or t
  modified_base (264)..(264): n is a, c, g, or t
  modified_base (301)..(301): n is a, c, g, or t
  modified_base (309)..(309): n is a, c, g, or t
  modified_base (319)..(319): n is a, c, g, or t
  modified_base (341)..(341): n is a, c, g, or t
gacccacgcgtccgagaacatttccctgatccgcttgaatggaaaccccaccgctgggatnaggccatcgctgttagntctgaagatgaanaaaaagttgactatggctntggcttggttactaaaggaaccaacagcccgtatcttccattcggcgccgggcgtcataggtgcnttggcgaacagttcgctnacgtgcanctcggtgcgataacagcggctctagtaaggttattcaagtacaacaaccttccatgtgttcanactcttccagacactgactactcagtaagcgacgccncctatgcnacctataganatccccactaaccgaattatantcattattttcaaagcctttgggcactcaag

SEQ ID NO: 4269 - DNA, 350 bp, Aspergillus oryzae
acccacgcgtccgatcttctacgtcattcgagatcctactcctttgccgtcgaggtgggaagacctttcgatattgcctgacatcgagctggtctcttccccaaattcattgctttatattctcattggaccccttaaattagggttttgttgatttttgcttgtcctcaatatcactgcataattaccccactcattaccgattgttcccacaatggttgcagaaactaagctgtacgattccttgggttatcaaacccgaagcatcccaggacgaaaataaaaaaagcataccggaattgttgcattgaaatatcatccggataagaacaaggataatccgaccgcat

SEQ ID NO: 4270 - DNA, 318 bp, Aspergillus oryzae
cgtccgcctaacgcagggcctcaagccaagcgcccacgtctaatgaatggccatcattcaggggccgctcctgaaggatccaatagcccgtcaacaagtcagaccgctggaacctctaagccctggaatccccagcaatccctcacagtttctaatctcactgggccttcgggccctacccccccaccatcgtcctctggcccataagttggatattttggacagccataccatattcataccaacctctgtatacttctcacgcgcgaatatttgcagtcacaaaatgaatgctctcattgtcaccagcacattccc

SEQ ID NO: 4271 - DNA, 302 bp, Aspergillus oryzae
gcgtccgcccacgcgtccgatgcggagcagatgttgtcgcgagcacaggagaaatatctgagtcagctggcgttcgattcgacgcgtatgcgaaatgaaattgcggcaactcttagccggatgacggtcgttggtgggattcttgtgccaatgcagtttctcatcggtctctttggtatgaatgtcacagttcctggccagactccggaggatgtggactctccaccagttaattggtggtatggtatcctgggttgttgattttgggttttgatttgtcctgggcttggttactgcgaaac

SEQ ID NO: 4272 - DNA, 317 bp, Aspergillus oryzae
gcgtccgcaatgggatcatttcccaaatccacgggtaacgttaccgtttggtaccattatctattttcccttatcgcaatccatccccttaaaaagtaagtctgaatattttccctactgttcgccaacaacctcccttttcttttcccgtgcaactgaacctcttgccacgtcaattgttgcccaacaagattcataccaagtgaattattcaatacagtcaaactatctaacccaaggtccttaccgacttaaggcaacaaacaaaaaacaagttcatccatcatgtccgccaagcgctcccgagatattgatgc

SEQ ID NO: 4273 - DNA, 311 bp, Aspergillus oryzae
  modified_base (5)..(5): n is a, c, g, or t
  modified_base (13)..(13): n is a, c, g, or t
  modified_base (37)..(37): n is a, c, g, or t
  modified_base (75)..(75): n is a, c, g, or t
  modified_base (84)..(85): n is a, c, g, or t
  modified_base (148)..(148): n is a, c, g, or t
  modified_base (151)..(151): n is a, c, g, or t
  modified_base (155)..(155): n is a, c, g, or t
  modified_base (174)..(174): n is a, c, g, or t
  modified_base (179)..(180): n is a, c, g, or t
acaangtgagccnacgagtttgaattcccgggtcgangcccccgtcagctcaggcatcagtggtgacaatgtctnaaagcgaanngaggatccaaatgtgtcatggtatacaggtcgcaccctaattgaggaacttgaagctaccganccncacnctcatgccctcttatttantccanngcgaatgaccattggtgatgtcttccgtggaagtgtgcagaaccccctttcgatctctggtcgactcgatgctggcagcttgcaagtgggtgaccaaattctcacgatgcctagtggcgaaaacggccttt

SEQ ID NO: 4274 - DNA, 286 bp, Aspergillus oryzae
  modified_base (23)..(23): n is a, c, g, or t
  modified_base (49)..(49): n is a, c, g, or t
  modified_base (117)..(117): n is a, c, g, or t
  modified_base (122)..(122): n is a, c, g, or t
  modified_base (124)..(124): n is a, c, g, or t
  modified_base (195)..(195): n is a, c, g, or t
  modified_base (236)..(236): n is a, c, g, or t
  modified_base (257)..(257): n is a, c, g, or t
caatccaagtcgcaagccaacanctcagtcgcccacacctgcctacctncatattctcaaaaaaagcaaaagtcggaaagctctcgcccaccatgtctcgcgaagcgtaccaggttntttcntntttgggcggacagaatgcctttgactctggtgctggctccatggatggccctatggttgcctatctatgcngcgagtgcaacgcccgtgtctcgctgaagaggggtgaccanatccgctggcaaggtaatgcnggtcatcgtgtgttgtacaaggagaagac

SEQ ID NO: 4275 - DNA, 245 bp, Aspergillus oryzae
  modified_base (122)..(122): n is a, c, g, or t
  modified_base (127)..(127): n is a, c, g, or t
cgcgtccggttcacgactgccttaacctcatccgggaactccccgccattgaatccgctcgtttcgaggctatccagccaaaccgcaatgtaggaatgtggcctccaccacgttcagccaantacantgatatcatgctctaccattgtattatgcattcgcccgaggtaattggatatcattatccagtcagccaagcgactaaggaagttcgcatttacggttggtggacgcttctagctgga

SEQ ID NO: 4276 - DNA, 241 bp, Aspergillus oryzae
  modified_base (24)..(24): n is a, c, g, or t
  modified_base (60)..(60): n is a, c, g, or t
  modified_base (117)..(117): n is a, c, g, or t
  modified_base (121)..(121): n is a, c, g, or t
  modified_base (165)..(165): n is a, c, g, or t
  modified_base (196)..(196): n is a, c, g, or t
  modified_base (224)..(224): n is a, c, g, or t
  modified_base (236)..(236): n is a, c, g, or t
ccagatgtgggatactatgctgtncagtagtgatgatatatcctacggaaagcctctctnctctctcgatttcctcggatactattgccttagctagacgtcaggattatttctttntttntcccacagattccatattactggtttcgccgttgacgactctcngaagcacgatatcatcgccaaccacttatgnaaaacggtgaaaccgttcttcacctggncacttctacaangggac

SEQ ID NO: 4277 - DNA, 294 bp, Aspergillus oryzae
  modified_base (247)..(247): n is a, c, g, or t
acccacgcgtccgccaaggcagaaagaatcagtactcatttagacgtagtttcttgccaacaaaccgacgtcgttcgggtttctctccgttacgctctcggtctgtattcaagcctttgagtgcatgcaatagcattccggcatcgaagaacccgtctgatatactccgtcgtcttctatttctccgctgtcggtcgttggcgttatcggcaccccggcgcactgccccaggtatctccccggaacnaagccggccccgaactggtgatccccttggagccgctcggcgaaaga

SEQ ID NO: 4278 - DNA, 241 bp, Aspergillus oryzae
  modified_base (90)..(90): n is a, c, g, or t
  modified_base (99)..(99): n is a, c, g, or t
acccacgcgtccgcggacgcgtgggctccgacgcctctagcgaggatgaagagtacgatgaaatcgattctgatgatgttgactcagacnatcttgacnaggatgagccggaactcatcataaaaagagacggcagtaacgatctttcgcaacagcaggacttcatccacttctaactgtacattcccactaactgcacatagctgcaagaatagtgtaattgaggattcggtttggtctc

SEQ ID NO: 4279 - DNA, 381 bp, Aspergillus oryzae
ggtgccgaatacccgggtcgacccacgcgtccgagcgcattatcgaagtagaatgtcctccgggtgaaaatatcttcacctgactatgtaggctggacctcggaggaagcagtgaagcactatttgacccgtataaacgctcggatccctcagttccaatacgatggaggaaaaagacctgaactatatcaagatgatcaatgctggcgaaaggctgattgttaacaatcgaagttttggttatctttcccatcggatcgttttttatcttctcaaccttcacataaaatctagacatacgtatttcgcacgggccggggtttccatagaagctgactcttacaaagctgatgcttccttgtcagaacaaggggaaggact

SEQ ID NO: 4280 - DNA, 362 bp, Aspergillus oryzae
  modified_base (124)..(125): n is a, c, g, or t
gtttgtccagctatcctaatatcagtcgctctttttttaccggtcattcatttagtactctcttttttcttcctaaactccttttgtgtcaattgattcaggggccggataccaccaagccacnnaaggaattaccgtaaaggaaccccaaaagaaagacaagaaaaatgcgttttctgctcccctttgccattgggctcacccccctggcttccgccctgagcatcaacaagccgggcgccaactcgacctacgccgccggatctaccgtaacggtcaactggagtacagtggacactgaccccaccgaaatcagcctgtacctgtggaactttgtttcctggctccgtctactttccctg

SEQ ID NO: 4281 - DNA, 272 bp, Aspergillus oryzae
  modified_base (9)..(9): n is a, c, g, or t
  modified_base (29)..(29): n is a, c, g, or t
atacgcctnctcgtaaaaggtcccgaatncccgggtcgacccacgcgtccgcccacgcgtccgcggacgcgtgggcaaacccggtcatttagaggaagtaaaagtcgtaacaaggtttccgtaggtgaacctgcggtaaggatcattaccgagtgtagggttcctagcgagcccaacctcccacccgtgtttactgtaccttagttgcttcggcgggcccgccattcatggccgccgggggctctcagccccgggcccgcgcccgccggtag

SEQ ID NO: 4282 - DNA, 300 bp, Aspergillus oryzae
agccaagcagatcattcaatcaatccattaccgaccgggcatctggccgctctgcatcatggcggcgttctgctcctggaagcgttcgttcaagcgttgagagcccttcaggaacttgtccacacagcggagggtgcagccctcctcgcgggagatcaaagacttggtggtgaagtcgttgacacagtcatcgaagcagcgctggacgagcttggagtacatggtcatgaactccttcagctgcttcctctccatgcgagcggcgaactcgcgctgttccgaagcattgagtccttccat

SEQ ID NO: 4283 - DNA, 374 bp, Aspergillus oryzae
  modified_base (135)..(135): n is a, c, g, or t
  modified_base (328)..(328): n is a, c, g, or t
acgcgtccgcccacgcgtccgccacgctagggacgcggcttacttagtaacatcgaggacagtaacgaactctacctgatctctccacccaccacccttcataagaacctgagaaactactcagcaatgtccgancctagtatccctctcgcatgtcagaacctcctccacgactgggcaaactgcttagacaccaagtcctgggatcgtatgccgactatcttcgcgcccagaatcgacgtggattactcggcggtcgggacactaaaggctaccgctgtggagtcttctgttttatcaaccataactccagtccaaccccagctanggaaacccgaaatccagtccatcatttaacggtgctgcaatggccg

SEQ ID NO: 4284 - DNA, 329 bp, Aspergillus oryzae
  modified_base (5)..(5): n is a, c, g, or t
  modified_base (41)..(41): n is a, c, g, or t
  modified_base (112)..(112): n is a, c, g, or t
  modified_base (138)..(138): n is a, c, g, or t
  modified_base (199)..(199): n is a, c, g, or t
  modified_base (291)..(291): n is a, c, g, or t
tcganccacgcgtccgcagcgattgattgattcacattgtntttccccctccctccacttggttacgccgcaatgacaaataccccggtggattctttcccacccaatgtancaatgccaaccacggctgagcactantcgatttcctcaaggaatcgatgctcaggtgaatgaccgggggaccatggaggcctataantaccccgctgaggtgccatcattcttcgaaggtccccaacccatgaaacaccttgttcgcttgactctacaccaatcaaatttaattgatcngattcgtgacatcagaatgcctttgtccggccactgtc

SEQ ID NO: 4285 - DNA, 312 bp, Aspergillus oryzae
  modified_base (310)..(310): n is a, c, g, or t
acgcgtccgctattggaccaacatgtatgacctgggagccacggaaatgtcagaaaccactgatttagtggagtctattgaggtaaacctattgttcaagtcccgggttatgattctatagggctacgcgatatagtaaccgcatccaacaacaccgggttctcaaaacatatccggtcaaacacgatacttaccatgcattgagtcggactgatctatcaaataagctcagatcttatacgaaattgcatgattttcgaataaataggttgaaaatgactttgcgaacgaacaattccccatatggtanta

SEQ ID NO: 4286 - DNA, 231 bp, Aspergillus oryzae
  modified_base (7)..(7): n is a, c, g, or t
  modified_base (216)..(216): n is a, c, g, or t
ggtcganccacgcgtccgcaacccccctcacaatgtcgcccgtctctgtcttccgtgtcgcgacccgcgccgtccgccctgccagcctcttcagagcttctcaattgccccgggcccgcctgcagaccccggttgctctcgctatcaaccgtcctgccttcagcacctcttccaagcgtctcggcggtcaccacgtaggtatgtagacatacgatnagttctctgccatat

SEQ ID NO: 4287 - DNA, 395 bp, Aspergillus oryzae
  modified_base (286)..(286): n is a, c, g, or t
cgacccacgcgtccgcttgatgccaatcctagacaatgcgacaggaaacacaggacccatctttgccacttcccaggaccaaaacttccttgggtatcaaccctgttgaataagtcgagtcatcaaccgattacatggcgaatatacgtggcatctcttgattccaacatatggtggagttctctttcggtcgttggtggtagtcgcagaacggtcgcgatgtcgttgtacaatgcttcgggtcctcctcatcccctgcaagtgtaacaacgaaaggatagcgtcnggtgaagatgcgaataggaatggaaatatatcgaaatatcccaggaatattcattccgtccgaattccgactccctccaggctgcatgaaccttttcatccaatttccc

SEQ ID NO: 4288 - DNA, 285 bp, Aspergillus oryzae
  modified_base (127)..(127): n is a, c, g, or t
gggtcgacccacgcgtccggggagcgattgagaaagctatatttggcagcgtacctcagttcaataaatccatgcgatggatgggttgctgctcggctaggccgtgggacgggaagcgcgcttgcanagcgtctctcatagggcaaccccaaaatgagtggcaggtatctccacactcaaagtaagcaaatcacctggtggcatgggtataagtaggtaatcgttaagttagctactgtgtatgccaatgccgtactgcactccaatcattctcgacttatgcta

SEQ ID NO: 4289 - DNA, 315 bp, Aspergillus oryzae
gacccacgcgtccgcaacgccctcgatgccgtggtagccgcctacaacaacatctcaatgttacgacagcagctccgccccgacgaaagagtacacggggccattctccaagcacctagcatcaccaatgcgattcccgaactcacccgcacaagatacaccattcgcagccgtacaatggagagaacacgacagctcggtactcgagtacgccagtgtctggaagcgggagccctagccaccggatgcaaaattgaactcgaggaaagatcaaatatatggtgatcttgtttgttgaaccccaccgctctgtaa

SEQ ID NO: 4290 - DNA, 282 bp, Aspergillus oryzae
  modified_base (72)..(72): n is a, c, g, or t
ttgctggtacgcctgcaggtaccggtccggaattcccgggtcgacccacgcgtccgcggacgcgtggggtcnagaggggaaacccgcagatgttcttcaactcatccgctccgggttgggccttcagctcccgaactagacccttggtcctggtgtcgggccacgcgatagcgttatgcaacggctcgccagtctcccaatcccaaacaagcgttgtctctcgctgactggtgaccccgatggcttcgatctctgacggtgagtggccaaaagccatgaaaa

SEQ ID NO: 4291 - DNA, 247 bp, Aspergillus oryzae
  modified_base (182)..(182): n is a, c, g, or t
gcgtccgcccacgcgtccgcggacgcgtgggtcttaatgtaaagacgtgcctctcttactcttgcgatacccatcactgttatgaccacttatgtctcggatttactggcacgttgtcacggcatagctatcatttcttctttttgttcccaaaccttgctgagtctgtgttagcggcatanacctccccgtaaggggccatgatttcggctcggtttcagctgataaaaggttcgacgactgtttg

SEQ ID NO: 4292 - DNA, 203 bp, Aspergillus oryzae
  modified_base (170)..(170): n is a, c, g, or t
  modified_base (172)..(172): n is a, c, g, or t
cgtccggtcctgttagactgtcactccttgcttcaaatcgcgctcggcgcctgcacatggggcatcagttaccaccaccgccccttcgccctaactactgtcattctttgttgttcgattacttgcaatatcaccggcggcgtcctcatcatggtcggtgaccgaagganantgaataaggatgtggtggaacggctgttccg

SEQ ID NO: 4293 - DNA, 293 bp, Aspergillus oryzae
  modified_base (239)..(239): n is a, c, g, or t
  modified_base (242)..(242): n is a, c, g, or t
gacccacgcgtccgcggacgcgtggggctttgctggaatatacaccaacgcagcggctgtcagccattgaagcgatggttcacccattttttgatgaactcagggatcctagcacccggctacctgattcccggcaccagaatgggccatcgcgagagctccctaatctgtttgatttctctcgacatggtctgccccctctttcccatgcttactagcaatcaaggctaacggcttancanaactttctatcgcaccggcaatgaacagtcggcttattccccctcatgcac

SEQ ID NO: 4294 - DNA, 275 bp, Aspergillus oryzae
gggtcgacccacgcgtccggcagctccatagcactctgcttcagagtgagacccttcttgtgggcgttcttagcgaccttggacgccatgtcgtaaccgataacggggttcaagcaggtgacgagcatcagactggggaggcgttagtctagttaaggcattttaacgtaagcgaaggtaattacatacctctcgtggagcagggagttgattctgggctcgttggcctcgaataccgtgcaccatgttcttctcgaagctcttcatgccatatt

SEQ ID NO: 4295 - DNA, 370 bp, Aspergillus oryzae
  modified_base (266)..(266): n is a, c, g, or t
  modified_base (276)..(276): n is a, c, g, or t
  modified_base (278)..(278): n is a, c, g, or t
  modified_base (345)..(345): n is a, c, g, or t
acccacgcgtccggtttgtctggggtgtatgcgtcgtcgacacctggcagtatttcctgcaccgtgcaatgcacttgaaccgttggctttatgtcacctttcactcgcgtcatcaccgcctatacgtcccatatgcgttcggtgctttgtataaccatcccgtggagggattcctcctcgatactgccggtaccggtgttgcgttcttgacggctagaatgactaaccgccaggccatgtggttttttacctgtacgactattaanactgtggacnancactgcggctatgctttcccctgggaccccttgcagcatttcacttcccaacaatgccgccttaccnatgaatattccaccaaccaaaattt

SEQ ID NO: 4296 - DNA, 299 bp, Aspergillus oryzae
  modified_base (266)..(266): n is a, c, g, or t
acgcgtccgcaacgctggtcttgctcgtcgtgcccttgtccagctctcctacgccattggtgtcgctgagcccctctccgtcttcgttgagacctacggtacttcccagaagtcctccgaggagctcgtccagatcgtccgcaacaactttgacctccgtcccggtgtcattgtcaaggagctcgatctggccaagcccatctacttccagaccgccaagaacggtcacttcaccaaccaggagttctcctgggagaagcctaaanaccctcaagttctaagcgcgttcgctgtgaact

SEQ ID NO: 4297 - DNA, 320 bp, Aspergillus oryzae
  modified_base (242)..(242): n is a, c, g, or t
cgtccgcccacgcgtccgcccacgcgtccgcccacgcgtccgcagccatgagccgaaatcgcccgcccggcgtagcacgcgctcggaatcgcactcacggacgccgtcccgaagtaccacccccgtagataccgatgaccgtcctccgtcgaggtcatctgcgagtggccgtccccgtcggggaagcctaacccctaattccacggcatcaggctccgagcaaggacatcaacatcgcaagnaagaagtccaagactctttcacggggagtgtcacccctcacacaagcacagatcagtgaaggtgttgcgtacatcgtc

SEQ ID NO: 4298 - DNA, 306 bp, Aspergillus oryzae
cgtccgcggacgcgtgggtgaccagccggtcagaattagccgacataaatcacagtccacgggctgtatcaaaggtctagcgtgccaagagtagtggaatacttggcgtctccaaggttctcatcgcgctctttagaccctgtgtccattggcattgtcaatcgttggagaacaacctgtggcacgttagaaatgcttgtattctgttgtcttgtgaactacacatgtaggaatactttgccaccgcaacctgcatttcgatgcgcagggaaagtcaagaatgctaaagaaccatgacactctgca

SEQ ID NO: 4299 - DNA, 239 bp, Aspergillus oryzae
cgcgtccgcggacgcgtgggcggacgcgtgggctggcatgccagcatggatcgcttccaattgtggagatgcttctcgaacgacgtgcacaattactcccagatgcagaaggcctctatcctcaacatatggtcgcaagagcttctcagtctccgcaattgctgatgatgctgaaacaacatggggctgatctgaaccagaaagacaaactgtaccaatggacgccgctgtttcatgct

SEQ ID NO: 4300 - DNA, 343 bp, Aspergillus oryzae
cgacccacgcgtccgcgcaggtcctgtcaaggtcgaggactacaagctctcgcctccccctcgtgccgccatgaaggagaacatggaggccctgatccaccacttcctcctcttcagcaagggttacgctgtcccccctggtgagacctactctgccattgaggcccccaagggtgagatgggtgtgttcctggtcagtgacggcagcgagagaccctaccgttgcaagatccgtgctcctggttttgcccacttgggtggtttcgatcaaatctctcgtggtcacttgctggcagatgctgtcgccattattggtacaatggatctggtgtttcgggtgaaa

SEQ ID NO: 4301 - DNA, 319 bp, Aspergillus oryzae
  modified_base (31)..(31): n is a, c, g, or t
acccacgcgtccgcagatttaggatggatancttgaattgagtcgtcaataagacagatccatgtgtgactaatccgccagtatttacttccgtcagaagctattgccactaacatgtccagcaggaccacaaacatatttgcatgactcgcgcccggaaaaatcatcctaccacttaaaagctatgagtccacgaaaccagaagtcttcaccgtcacactctggacggtccccttctcactcctcaggggctgaggatggcggttcccgcttcgcctttgtgaccgagggcactttagccgaagctcgcagccatgcc

SEQ ID NO: 4302 - DNA, 284 bp, Aspergillus oryzae
  modified_base (36)..(36): n is a, c, g, or t
cgcgtccggcaattgcgatcgcaacatttttccaantgaagatggtacggaaggacaactacttaagttttaggcaacgttctcttctcttatcaacgctgggctgacgtcgacgagtattggcagaggattggcagtctccatcgtggctccagccgaacccaaggatgcaacgcaaggggaaccgatgttgccgttgccaagatagggctgatccatgcattattacgctatgtcgaatgtctgtctatccaccacgccaccaatgcgagtctattcaaaca

SEQ ID NO: 4303 - DNA, 392 bp, Aspergillus oryzae
  modified_base (371)..(371): n is a, c, g, or t
  modified_base (382)..(382): n is a, c, g, or t
attcccgggtcgacccacgcgtccgtctatgagagcacgtcagcggccaagctgagtattgcaattgtaggtgctggtattggcggtttgtcagctgccattgctttggctcgagatggacaccatgtcacggtttatgagtctacgccagagttgtcggagattggcgctggtgtgcaaatgtcaccgaatggtgttcgctactggctcaactggggcatcaatgaggacctgtggcaaaagtcttctctaccctccgaattgaacatgagacgatggagggatggagggtttattgctcggactgaattaaatccggattttgagaataaggttcggcgcgccataacctagtgatccaccgggctganctgcacaatgntgctttgcca

SEQ ID NO: 4304 - DNA, 380 bp, Aspergillus oryzae
  modified_base (296)..(296): n is a, c, g, or t
  modified_base (364)..(364): n is a, c, g, or t
attcccgggtcgacccacgcgtccgcccacgcgtccggtaaaagtggcctgttttgctttttcccttgcaactcctctctggtttcccgctgcctgctctaactgcttaggtagcccgaaactactcgattaggctttcggcaaattcgtcaaattatctcccagtgatccgggactttcaagtattgtgcgccgtacaagcacaacctgccctccatttctgttactactgccacctgcttgctagcaatcacaacttacaatatttatgagttaatactaccatctgtacaagnaatatcctcgtttcagagaaacatatggattgccctagtcgtgaattgaataccctgcccggaattanagatctttatgaccct

SEQ ID NO: 4305 - DNA, 314 bp, Aspergillus oryzae
cgtccgattttcttttcgcctccctcgagatttctcgttttttcttctttttcttttttccgcatcttcttctactcggaacagatactacttctgaactttgatctttctgcctcacatttctccgtactcaacaattagagcactgtcacccgccttgtgcccctggcccacctcccgcattttggggcgacagatcgatccagcaacgttgcagaagccacactccggctctctccaaagcacctttacgaagctgcgacgccgctttcaacttttcgccctcacgcctccaacctctcgtcgcagcgacc

SEQ ID NO: 4306 - DNA, 342 bp, Aspergillus oryzae
  modified_base (150)..(150): n is a, c, g, or t
  modified_base (236)..(236): n is a, c, g, or t
  modified_base (250)..(250): n is a, c, g, or t
  modified_base (269)..(269): n is a, c, g, or t
  modified_base (300)..(300): n is a, c, g, or t
  modified_base (315)..(315): n is a, c, g, or t
cgacccacgcgtccgcagaccggtcggcggtagcgagccccacgatgcgagcaagtgttggacgtgacggatgccgccgcagtcggctgcgaagacgcacacggtgtccacgatcgggagtaggacgtctcggtacagcagtgactgaanatcctcgtaggagcgtccccgagtgcgggggatggggtatcgccggagtggctcctgctgggatggcccgggcggggacgtgcgcnagaggctgctctcnatgactataaccggatganatgtggccgcgccggacaggtgcagtttgancccaaccctgcttcnggtgacggcccaatattgttatgcgga

SEQ ID NO: 4307 - DNA, 314 bp, Aspergillus oryzae
  modified_base (54)..(54): n is a, c, g, or t
gcgtccgcccacgcgtccgcggacgcgtgggcgggaaagcgagaggatctttanaccctgtgactggacctggtttggcgatgcagagctgtcagggttatcgttggcattcaacggacagacattgcttacatcgctgatcgtagatgtggaatttctatccctatctattagagtgactatgactaaagccaaacccagaactttgtgatggcgcatcgaacttgatacaaggttaacggagttatattgagcgtcagtctcgacaatggcgtggctatcgagtctctatgaacagacactccctactctac

SEQ ID NO: 4308 - DNA, 321 bp, Aspergillus oryzae
  modified_base (105)..(105): n is a, c, g, or t
  modified_base (276)..(276): n is a, c, g, or t
cgcgtccgcccacgcgtccgcccacgcgtccgttttcgatcactccgtttctgaaccgaacaaacgggcttcaaaattcagctacaagttctgaggatgatgcanacgagctccacgcaactcatatgaccagtggagtaaataagaaggcctctgaaaatgatgttcaaagaggtggcgattctaagtatcagagtcagagggcgtcggttgatgagctacctgtcgccgtagacacactacgtctaggtcatggcatttccaacagcagaaaanggggacaaacccagaataaaattggttatacaattcatatcctga

SEQ ID NO: 4309 - DNA, 301 bp, Aspergillus oryzae
  modified_base (248)..(248): n is a, c, g, or t
acgcgtccgctttcccaagttctttcccacaccggaaaaagccacagtgcggttcatgactattttctttggagccaatggacgcatgtctccccggcagtcctcagcacgtcccattggacgtgtataaagagaatctgactcggatcatacaacatcctgcaacagtggcccaaaatccacatatcctcctgctgactccaccccctgtaaatgaataccaactacaggggttcgactagtccaanggcaatgcccatcccagccggaccgccgcttttacttaatgtaatatgcggta

SEQ ID NO: 4310 - DNA, 325 bp, Aspergillus oryzae
  modified_base (230)..(230): n is a, c, g, or t
  modified_base (251)..(251): n is a, c, g, or t
  modified_base (254)..(254): n is a, c, g, or t
acgcgtccgcggcatgctggcatatattcctgtcttcaagaagtggggtgtgatcggtctgcagcagccgtgggaaatcttcccactcgccattgtccacggggtggtatcgggtggcctgtcttcctactgcaggtccttcttcggattgctcattcctcctggcagcgaagccgcgttctacgcgctatacgctgcaacagacaagggcagttcggtcattggaccanctatcgtgggaatgctcatcnacncgaccggacaggtacggtcgggcttcttcttcatcgcgcccttgatcttgatgccaatcccgctcatttgg

SEQ ID NO: 4311 - DNA, 303 bp, Aspergillus oryzae
  modified_base (20)..(20): n is a, c, g, or t
  modified_base (90)..(90): n is a, c, g, or t
  modified_base (189)..(189): n is a, c, g, or t
acgcgtccggagacaattanaacaattctcgacaaccatccttatgagctccttttagtgaccatcgagtcaaatcggaagaaagccganagaatgttgagcttgatgcccgcttcaaaaccgagaatccggctttttacggtcacgcaccctaataaacgccgccagatgacgagggccattccagangtccgtacgcctattactatcttcgctgatgatgatgtgagctggccgagcacagtactcccttggattctggcaccattcgagaaggatgagcgaaacggaagtgttattgac

SEQ ID NO: 4312 - DNA, 223 bp, Aspergillus oryzae
  modified_base (155)..(155): n is a, c, g, or t
  modified_base (186)..(186): n is a, c, g, or t
  modified_base (192)..(192): n is a, c, g, or t
ccgcccacgcgtccgcactgacattgatatgtgtagttggaaaacaaaggctccgtccaaaacacaaccacaccgtatataccaccctatcgccaataaaagcaaccaataaggaacgaagatacatttattgtgtgtatatataccctaaatgnaattccccacgcctgtctgcggaaaaggtangaatanaggacgtaataaacggaattggcagagcgcg

SEQ ID NO: 4313 - DNA, 277 bp, Aspergillus oryzae
gtccgcccacgcgtccggaacgagttctacttgatggattcggccccatattttttcgaggaagcaaagcgcattgcatctccagatttcatacccaatgtaaacgatgtgcttcgcgcccgaacgaagaccaccggtatctatgaaactaggtttacaatgggccagctgagcatacacatgtttgatgtgggtggacagcgcagcgtagcggtaagaagtggattcattgtttcgagaaatgtcacctccatcatattctgtgtggcattgagcg

SEQ ID NO: 4314 - DNA, 246 bp, Aspergillus oryzae
  modified_base (20)..(20): n is a, c, g, or t
  modified_base (90)..(90): n is a, c, g, or t
  modified_base (142)..(142): n is a, c, g, or t
  modified_base (146)..(146): n is a, c, g, or t
  modified_base (148)..(148): n is a, c, g, or t
  modified_base (215)..(215): n is a, c, g, or t
  modified_base (221)..(221): n is a, c, g, or t
cgtccggcagatggtgctanacccccgtcccgaggcccgtattcgttgggagcgtaagatggtcgtccgggaggttcgccgccgaggacntctttcaaagcccgaacagatcatgcgcacggagcgcgaatcggtctccaantctnantggttcaagacttccgtcaagaagcttggtcccctcgctcgtcagatcgcgggaaagaacatcgacnaaaccntgctgcaaatgcgcttcagcaagaa

SEQ ID NO: 4315 - DNA, 310 bp, Aspergillus oryzae
  modified_base (47)..(47): n is a, c, g, or t
acccacgcgtccgcgaggtcaagaagcttgtttatatctacctggtncaccatgccgaggccgagcccgaccttgcgctgctgtccatcaacacgatccataaatcgcttacggatcaaagcccccaggtgcgagccatggcgctccgcacaatgtctggtatcagagtgccggtgatcagccagatcgtttcccttgcaattaagcgtggttgcggcgacatgagcccgcatgtccgcaaagcagctgcattggccattccgaagtgctatcgcctggacccgaacactctgccacaattaataggcta

SEQ ID NO: 4316 - DNA, 339 bp, Aspergillus oryzae
  modified_base (12)..(12): n is a, c, g, or t
  modified_base (27)..(27): n is a, c, g, or t
  modified_base (86)..(86): n is a, c, g, or t
  modified_base (115)..(115): n is a, c, g, or t
  modified_base (143)..(143): n is a, c, g, or t
cggtctgtctanatgccggggcattantggatatgctatgcaagtgacgtgacccgtacaattcccctgtggacagactggcctantgaacgtgcaaggaacatttaccgtgtantcgaggagatgcaggaagaatgtattanacgcatccgaaaaggcgtgcgatttcgagatctgcagctgcttgcacatgacattgcgattaaagggttgcagaaactcgacatactcacaaacgactgcacaagtgccatctacgaatccggggcatctgctgttttctttcctcatggtctgggtcatcatgttggcctcgaagtccacgaatgttctccaaaa

SEQ ID NO: 4317 - DNA, 365 bp, Aspergillus oryzae
gtccgtggacgacgacaccaagctcaccctccacggtttgcagcaatactacatcaagctcagcgaagcggaaaagaaccggaagctgaacgaactcctggatagccttgagttcaaccaggttattattttcgtcaagagcacactccgtgcaaatgagctggacaagcttttgcgcgagtgtaacttccccagtatcgcagtccactctggtgtgagccaggaggagcgtatcaaacgctacaaagaattcaaggagttcaacaagcgtatctgtgtttgctactgatgtcttcggacgtggtatcgatatcgagcgttattaaccttgctattaactacgaacttgcctggcggaatgctga

SEQ ID NO: 4318 - DNA, 419 bp, Aspergillus oryzae
  modified_base (2)..(2): n is a, c, g, or t
  modified_base (6)..(6): n is a, c, g, or t
  modified_base (177)..(177): n is a, c, g, or t
  modified_base (214)..(214): n is a, c, g, or t
  modified_base (331)..(331): n is a, c, g, or t
  modified_base (376)..(376): n is a, c, g, or t
  modified_base (383)..(383): n is a, c, g, or t
tngccnggtacgcctgcaggtaccggtccggaattcccgggtcgacccacgcgtccggagaaactccattctatcatctcgaagacgctcctagcctctctctcttaggagtttcacagccgctattgtgttcgcccattctcctttaataattttgcttcttgacgttgtcttttnctacttttttcgtgttttcgtatcgtgcagctttctnggtttacaagaagcaagggttcgctaggacggactgcacatgcctgtttgataccaacccttaacgaccttggtgatcgccttgtctcaaaggatccgagtttcgaaggacttgacnaggcattgtttttgaaatgtctttcccggctccgtttccctttantcccccncctttgttccttggccgctccgcccttccccttccc

SEQ ID NO: 4319 - DNA, 482 bp, Aspergillus oryzae
  modified_base (7)..(7): n is a, c, g, or t
  modified_base (46)..(46): n is a, c, g, or t
  modified_base (298)..(298): n is a, c, g, or t
  modified_base (329)..(329): n is a, c, g, or t
ttgatgncttgaaatcgaaggcctgcaacccgggggtatccactanttctagagctgatcgcccagcatcgccgcaaagtcgcggctcttcactcccgcgcacacgacgatccgctcaaaggcaaaacgctgcgactcgcccgcgagattgaccgtcatcgaaaaccgtccttcggccggctgctcgatcgctgtgatctcggcatcgtagtgaaactcgacgccgtgccgcgcgcaggcgtcggccaggccgcgtgtgaatttatgaatgtcgccggtcgagtcggagggcgtgaanaacccgccgaaaaaatcgccatgcagcgtangctcgatccgctgcaactccgtggccgtcaccggattgcgatcgaagccgccttcgcgcaacaacgcattcaccttgttcgccgcgtcgaattccttgcgggtcttgtaaatgtgcaaaatgccgcgccgctccaaatcgaattcaatccttc

SEQ ID NO: 4320 - DNA, 324 bp, Aspergillus oryzae
  modified_base (3)..(3): n is a, c, g, or t
  modified_base (290)..(290): n is a, c, g, or t
ttnccgatgcgcttgatatcgaattcggcacgaggtgggaaaccaaccccagcctagcaagaatcatcaccactcgtgcaccaagaccgcctatccgacccaacgtatgtgggggatcgggtatcttagggtacctggctgtccttgcgcaacgtttatcagaaatatccagcagatccattaagcattaggtgcagtggcagtgatcgccccagccccagacttccataaaagaggcgtgatccgataataccaccactgggaccacattgtgccttgatacggacgantctcgcaaaagtgcatacccgaccaccttgacac

SEQ ID NO: 4321 - DNA, 269 bp, Aspergillus oryzae
  modified_base (17)..(17): n is a, c, g, or t
  modified_base (19)..(19): n is a, c, g, or t
  modified_base (61)..(61): n is a, c, g, or t
  modified_base (268)..(268): n is a, c, g, or t
atgcctttaatatcgantncggcacgaggcctcgtgccgaattcggcacgaggatctgcanctattaagccaagtatgtggcaaccggcaattctctggacaccgtcacggtgggattgattaattaattcctttcacccccgagtctcgggttcgacatctagtacgcacaccggagcccgtgttcccaacttaccttactataatctacttagtacttggaccccactgaaccaccgtgcacgtcggagaccgctccagatctcanc

SEQ ID NO: 4322 - DNA, 341 bp, Aspergillus oryzae
  modified_base (3)..(3): n is a, c, g, or t
  modified_base (274)..(274): n is a, c, g, or t
ttnatatcgaattcggcacgaggcaaagacggtagcattatctgcagtgaagacggccaaacctggtctatgtgcaccttcggtcatcctaccttcatgggtcctgttgccgccggcatgcgctgccgccacggcgccatgcaccgcgtgtggtgaagttgaatctctatttggacctgctaagtgcatatccctcgaccacgctcgcccggcgccagtatacaccatcttcatatccatcgtcaaggtggttcttcgctgtttccatttttantcttctgtggactcgggcttctattatcaaggcaacttttctgtcttcaattctcattaacccgtgt

SEQ ID NO: 4323 - DNA, 371 bp, Aspergillus oryzae
  modified_base (344)..(344): n is a, c, g, or t
  modified_base (360)..(360): n is a, c, g, or t
atatcgagttcggcacgagggttcccgaccccaagatccgtatcttcgatctgggacgtaagaaggccaacgtcgatgacttccctctctgtgtgcacatggtctccaacgaatatgagcagctttcctctgaggctctcgaagccgcccgtatctgtgccaacaagtatgtcgcttctcgaaccgcaacccagacgaacagaccgtcgcaagacttgaaggaagaaactaacaggtccccttctccaggtacctcgtgaagatcaccggtaaggaaggtttccacatgcgtgtccgtgtgcacccccttcccacgttcatcccgtatcaacaagaagtttgtncgtgcgctggtggccnaaccgtcttca

SEQ ID NO: 4324 - DNA, 276 bp, Aspergillus oryzae
  modified_base (21)..(21): n is a, c, g, or t
ggatgcctttgatatcgaatncggcacgaggtagacaacaaatcttatcgtttcttaacctagggatatgcggttgagtcgctgtaatcgatcgggtcgatcgcatgtgtcagacagctcagtcttaatcggttgttcatgaaacttcgattcctaactggggatatggataggtacgatattaacacgcaagggaggccctctaactgtaaataattctacagtatatagtgttatcagtacagatgcatgatcgtctgaaaatcctccttggtt

SEQ ID NO: 4325 - DNA, 279 bp, Aspergillus oryzae
cggcacgaggagcaaaacaggatataccagaggacctccttaagtttggaacaactgtcaagaagaagcaacatgatgcatatggtgcattcttcaagaatgttgacactgacaagacagccacaaaaattgtgttcgacgattagttctgcacatcattccgtctttattctcgcactcctagacttgattatccggtgaatatatgcgtatcgtgtttgcaaggtactttctttcgaggagaatactatactagtttagagcttagccatggtgttg

SEQ ID NO: 4326 - DNA, 330 bp, Aspergillus oryzae
  modified_base (289)..(289): n is a, c, g, or t
ggccgcgagtaataataaatgctggagacacagaaagccacttttgaaggattctcctttgccaagagaagcacaacgatgtcataacgccttttccaccgcagcttacccttggaccgctattggcaactgcgaccgtaatccgcatcgtgaggtataaaggtgggggtgtttagatgaggtctggtgagcgattagcatccatagacgttgaaagaagattgacttgggaaagacacttaccagcaacgtttccatgggcatctccctcgatctgggttgctgttanaactgctcgatctcacgccatccatgcggacatccttcagc

SEQ ID NO: 4327 - DNA, 376 bp, Aspergillus oryzae
  modified_base (12)..(12): n is a, c, g, or t
  modified_base (15)..(15): n is a, c, g, or t
  modified_base (35)..(35): n is a, c, g, or t
ggggggggggcnttngatgcctttgatatcgaatncggcacgaggcggcacgaggcttccccggattttatccccgcacatatttgccaagaatccagcatgttaccgtcgtcattcgcgcttggaaacggcaatctgaggagtgagtataaaactgaggtagtaatggtgcgttgcgtgacgggttgcccctttgagggtcctggagacccttgatatacgccagtcatgcagagcgaaaacgcaatggtcgatggatctggcgcgtgcaagttaagcgaaatcagggcattactatagttatatgaggttaacattgccatcgattccccctccgagcacttcatgatcctcctccggatttatttttggtaaa

SEQ ID NO: 4328 - DNA, 315 bp, Aspergillus oryzae
  modified_base (12)..(12): n is a, c, g, or t
  modified_base (21)..(21): n is a, c, g, or t
  modified_base (30)..(30): n is a, c, g, or t
  modified_base (215)..(215): n is a, c, g, or t
gggggggccttngatcctttnatatcgaanccggcacgagggagagagagtctgccgtccatacgaggccaaagccaacgatttgggattgacgatcaccggcgatatgtggctgaagatcgggaatatggtgatggattcaacttccgatgaacattccgtgtgggtccgttcaaccgggttcgatggagcgtgggaggaatttgaagaccgcncccgtctgtgaccgtctttgaccgtatgtagctcttgtatgtctgtatgtgtcatgtcatgtcatgttagtcagtccaacaattaatgtatatttcggtg

SEQ ID NO: 4329 - DNA, 330 bp, Aspergillus oryzae
  modified_base (22)..(22): n is a, c, g, or t
gcacgaggcggacactcactgntgccagtcaatcccattcagtcttcaaaatggtcgtccgtattcgcctggcccgattcgggaacaagcaccagccattttacaacattgtcgttgcgcaggcacggtacgtttgtctcgtttttctttccctttttcttcccgagtctagactttactccatgagcacaagccgaaatgtccaacgaaagagtcagctgtgaagctaatataacctgaacattacaggagtgctcgtaactcgaaacccttggaggtcattggcacttacaaccccatcccgcaacgcccttacaaacctctccgaat

SEQ ID NO: 4330 - DNA, 395 bp, Aspergillus oryzae
  modified_base (54)..(55): n is a, c, g, or t
gccggcacgaggcctcgtgccgaattcggcacgaggcttttcactaccaagccnnaagctaactaacctatacagacgaccctctccgatctgatacagatctccccagaagacttctcgaagtatagttctgtcgccatcgaggacaacatcaatgagaagtacgcaaataaagtcattcaaaaagttggcctgtgcattggattctacgacttgttagagtcatcggacggtcttatcggccatggcactggtttagtcaacgttaacgtcaagttccgccttattgtgtttcgtccgttcaaaggagaaattatgttgggcaagatctccagcgctacggaacatggtattaaaagtacggcaattttcaactgaccttgctgttgctagtt

SEQ ID NO: 4331 - DNA, 208 bp, Aspergillus oryzae
cgtccgcggacgcgtgggcggacgcgtgggcggacacgtgggttattatttaccaacatgcaagcaggcaaacggaggtgaaggtggaggggacttctctactgttttcatatttattttatctttctttctgtattctcctgtatactgtgtaatatcctttcatgaactcggatggtgttgagaattcttgaggtcttttcctttc

SEQ ID NO: 4332 - DNA, 270 bp, Aspergillus oryzae
tccgactagttctagatcgcgagcggccaccctttttttttatggttttttgtttctttcttgttacaccttatttttcttcttctcgttttttgtagataatactgaccactggctagaaagccgagcgggatgtatcgtccgccacttctcaaaggcaagctttagaagctgccattgatgctgctgaacactatatgaaagccttaaatctggcatctgttcagaaagacaaacatgcattggatgcaaagtgttaaagaatggctc

SEQ ID NO: 4333 - DNA, 261 bp, Aspergillus oryzae
  modified_base (206)..(206): n is a, c, g, or t
  modified_base (220)..(220): n is a, c, g, or t
acgcgtccgcggacgcgtgggattaccgctgggcgccattgatacctgagttcatcgactatccgaacgcccagttcctaatgatcggtgaagctacagatgatctgggtaaaggctgctacagccgagtctgacggcaagcggtctgaggaggtgcagcctggggaggaattggagaagttggagggcgacaatgacgacagatntgactcattgaaangtgatgatgctgttatacaaagtatctgggggctggtatgc

SEQ ID NO: 4334 - DNA, 201 bp, Aspergillus oryzae
acgcgtccggattattcttcccgtttttatcttcattatttattattctttcttccttcacgtgtatatcgagggttatcacttagtcttgtgaaatggtcgacttattcggcgttcagtctgggatgtcttacacttcatgatatagaagcatgaaccgtgcagttcggtcaatataatagtcggattctcgtcacatgt

SEQ ID NO: 4335 - DNA, 337 bp, Aspergillus oryzae
  modified_base (83)..(83): n is a, c, g, or t
  modified_base (168)..(168): n is a, c, g, or t
  modified_base (171)..(171): n is a, c, g, or t
  modified_base (220)..(220): n is a, c, g, or t
  modified_base (267)..(267): n is a, c, g, or t
  modified_base (270)..(270): n is a, c, g, or t
  modified_base (321)..(321): n is a, c, g, or t
ccacgcgtccggtccttgtgctctccgaacttgcaggggctgcctctttcatgtctggtggcagcgtaaccttccacccatcnagtgtacaggaactgtcagatgcagtccaccaagcaatcagtatggacgacaaggagaggaaggtaacgatatgagaatctacgnagnaatttatcaccacccacacaagtgctaagtggggagaagcattcattgnaagctctatctcgtcatattcaggagtgatagctctcgctttccgtngtnctttttctttatttcataacttatcacgttcatagtccttttcgcaaagcnttcttgatattgaggt

SEQ ID NO: 4336 - DNA, 348 bp, Aspergillus oryzae
  modified_base (95)..(95): n is a, c, g, or t
  modified_base (98)..(98): n is a, c, g, or t
  modified_base (203)..(203): n is a, c, g, or t
  modified_base (312)..(312): n is a, c, g, or t
  modified_base (317)..(317): n is a, c, g, or t
  modified_base (336)..(336): n is a, c, g, or t
  modified_base (346)..(346): n is a, c, g, or t
tcgacccacgcgtccgtgggaatgcagctctaaatgggtggttctatcctgggtgccgcgcatagacataaaaccagtcttcctaatttaggtcnacnaggtatagggagtaggaaatcgaaacggtgattgggattgttcgctctgttgacaggatgctgtttgtgacaatattcgcttttttctgatgcagttacacggangttttctcgtctgttaccgtgtcacagtgcttgtttacggcgttcctcgaagaatgttatgctgccacttgttctgaagtcatcacgcgcgttctgttatacaaatctnacgtnttttcctgttctacccttngaactatganta

SEQ ID NO: 4337 - DNA, 354 bp, Aspergillus oryzae
cacgcgtccgaactgctacacgacccttgatggctagattcacaacattgcttttgctacatggacaggaaggcatcataaaggactatggaataccagtcactcagagtcttcttgctctgttgatagcttcaacaactacgccaagagagagaaatagcgtctccaatggctatagattagaagtttacatgatttacgacaatcagatgcactgcattggctttagaacatcaacattatacctaagtctctccatatccgtgggcgatagtctatctttggcttacatttacactattatgcctgtttacaagatgcgaaggattgaaataccaatagaattatatttat

SEQ ID NO: 4338 - DNA, 210 bp, Aspergillus oryzae
tcgacccacgcgtccgcccacgcgtccgggccccacagtccccataaccatgacctggaccacggagatcttccaaccccgccacggcgaagtcggcgtcgcagccgcctccgccgtcgtctccggcctaggcaatctcggcagtatcgtaacgacatacgccctatacaacggctgggccgaggacagcgccgcgcccggccgtctcaa

SEQ ID NO: 4339 - DNA, 265 bp, Aspergillus oryzae
cgacccacgcgtccgacaacattgtcgagacacgaaagtatatccatgcaaaccgcaaggaccctgatgatatgtatgagatgccacaatttagataagtctacggtctaggggaataaacaggggggatcacatagccacatcaaaaggcattggaatgaatacgctatcgcatgatcgatctacttggtagtcgttgcttacagtggaaaaagattgttttatacaaaattgtgagttgaggttgcagccagtgacatgcgtt

SEQ ID NO: 4340 - DNA, 252 bp, Aspergillus oryzae
ccgggtcgacccacgcgtccgaaccaagcacgatatcattttctgatcccaaattctataatccaacccagccccaacatgcctcagtacagaaacggccagagcgtgatctataagcctgttggcggccccgactcaaggacctctgaaagtgtcgggactatccagtctgttctcaccgagcctggcaaccaggcgggccgacacgtttgatgccagtgaggataaccctatatatgacattgagaatca

SEQ ID NO: 4341 - DNA, 347 bp, Aspergillus oryzae
  modified_base (304)..(304): n is a, c, g, or t
  modified_base (319)..(319): n is a, c, g, or t
gacccacgcgtccggaacttgctagtcaacagatagctaaaataatgaccgacaaagagccttactttgtctataaacttgtgccgtccacggcgcctgttcgagaaccgctcccggagcaactgcccgtcagtgcacttgaccaacagtcgggtttcattcacctctccaccgcatttcaggtgccgaacacgctgaagttattcttcaaagatgagccccttgttttatgtttctcaggattccgtacgactcctgttagccgagaatctcaaatgggaaatcccgaggttaccgtgttgcnggccgaaaccgacanaggcttgttcccccatctgttcatgtct

SEQ ID NO: 4342 - DNA, 335 bp, Aspergillus oryzae
  modified_base (201)..(201): n is a, c, g, or t
  modified_base (282)..(282): n is a, c, g, or t
ccacgcgtccgttcaatagtctaagtcagttcatattacaatatggtgaaaggcgacgttaaagacaagcacggcgatactatccatgagggtgattatgtctttacccgcattcgaggtggctcacaccaaggggaggtcgaaagaattgtcatggacgagcaggaagccgaagaggagggtgtcaagaaccccccgaangtcgtatttcatgatcagcgttggcaagaaattcgcgccataatcccagagacccctagaaaaagaatggaacatgaatangaatattgttggacaaaatgttttctccttcctacctccccattaccactttg

SEQ ID NO: 4343 - DNA, 387 bp, Aspergillus oryzae
gacccacgcgtccgagataattacgtgggtaaaaatctccgatttgactgctgtgttgtgggagagttcagcaacggtgattttcaaatttactatgcttctaactccagccctccttctactaccacaggccaaggattcattcagacctcagtttattccacatttataaaaatgcctaattggattctcgggaataagtttgatactatctatccacacaagggctctatcaagactctgtgggaaacgcgttggaaatttgcatgtcagaaaggagtttatccttttcatgatggatcgtttgaggactttgaaccaatattcccaaaagcttatttcagtttgtcctcaatgactcgcaaacccaaattgaatcttgttgcc

SEQ ID NO: 4344 - DNA, 260 bp, Aspergillus oryzae
acccacgcgtccggtttacagggtgtctggtgccatgaaactcggaagactcttcgccatatggtgccgtctgctgtttaatttcgatatcgatcttctggccctactttggagccattctgccgtatctttcagtaatctgaggacagcatggatagccgactgactgtttcaatgcactgcctgagttcaccttaggtctagcagtacctctgaatctgttcaagcctcagaaaacaagtattgcatctttggttctc

SEQ ID NO: 4345 - DNA, 323 bp, Aspergillus oryzae
  modified_base (192)..(192): n is a, c, g, or t
cgtccgcggacgcgtgggcggacgcgtgggactagttctagatcgcgagcggccgctcgcgatctagaactagtgtctcctcctcgcttgcataatgtactgcctcggaggctccgtcggcggtaaagaaactgggtacagcggtcgcgagcaccgtcgtcgtggtttcttctcttcccaacggtccaatancgtccggagcaacaaggaggccaacccatgagtcagctagccatataacccccgattctctcggtctctctacgaaggatagattcagtgaaccatatatctggaatcgtggatggtgggtgagaaatcaa

SEQ ID NO: 4346 - DNA, 306 bp, Aspergillus oryzae
cgcgtccgatgtaacagcagacacacgactccaaacatggcagtaactatcccgggtggtacagcgagcgcccatgcggccccaaaacccagccgcctttagcgttgttgctggagcagctgcggcgtggatgctcttcagatggtattcgccctcgaaaccggagccgaaagcactcccctttccttacgaagacgccgaggacgtttatagagcacagaccaaagaagaaagtccaaccagaattccttgaaagattggaaagcggttgttttggtgcttgaactcggaattcattcttcccta

SEQ ID NO: 4347 - DNA, 295 bp, Aspergillus oryzae
  modified_base (25)..(25): n is a, c, g, or t
acgcgtccgcccacgcgtccggggnaaggctggcgttcttcaacgatatgacattccgcacgagatttaacgttacacgttttcactcgaatagagccccccaaatatccgcctgtgagtacctgagacgcttaacgcatcggctacgtctctcgtctccaatactagtgatgatggttatctacataagacaactctgcaaaacacaccccacgttcgatgtatcgagccttacagctcataggcttcttcttagctgtgccttagtagccagcaagagtataagtgactttgg

SEQ ID NO: 4348 - DNA, 274 bp, Aspergillus oryzae
cacgcgtccgcggacgcgtggggactagttctagatcacgagcggccgctcgcgatctataaccggacgcgtgggggacgatctacccgaggacgttgtttacggacagtcaggaaggtctgccacgggtcgaattatctaaagttctaatttttaaagaggacctggtgattttgtaattcatctcaagtggaacggtgggcagtatgttcttccataatgtatttgacaaacaaaagactgctctcatttgctgttatgaagttgtcaatca

SEQ ID NO: 4349 - DNA, 216 bp, Aspergillus oryzae
cgaggaaagattcagaaaatcttcattatggtgcctggctatctttccaccaggtattgttctaaattagatagacgactgaagtggagctttgcatggatttaatttgcacggactgccccacacctggcttgcttatgccttgaaaatgggtaccactgcgaccagtggtttcttaggataatcgattattaattggagagagcactgtgcagc

SEQ ID NO: 4350 - DNA, 218 bp, Aspergillus oryzae
cgcgtccggttgtactccgtaaggcagagccagcattagagacctagggttttttattacattttagattcaaagaaacatgctcaacactcggactgaaatactatttgcgggaaagctaaaagtactcatctcctgtactctccttggcattggctggatgagttgccatctgccgaacctcgccgattaaacgccaatcttatagcacgaaatgg

SEQ ID NO: 4351 - DNA, 202 bp, Aspergillus oryzae
gacccacgcgtccgaggtgtatcttgatagtgctataagaggcgtgggtaggtgtatatctattgagctcattaagctctgggagggatattgcgttggtggttctaaaattagaggggtgctgttggagcttcaagaaagtagatactggttggtacgtgtagtaggtacgtatagttatcaatgaaagagcaatcgcttt

SEQ ID NO: 4352 - DNA, 204 bp, Aspergillus oryzae
acgcgtccgcccacgcgtccgcaaaatactgccaaaatgcctatccctacgtatagcgaacaagacacttcgaacactccctccactggcaccgctggccaggcgtcgctcgaaaccgtttcatccacgaacagcggcgctggtcgtgccctcgggactggatctggtggtacagttgcggcacctggatactcctcctgcgtc

SEQ ID NO: 4353 - DNA, 222 bp, Aspergillus oryzae
cgtccggatggctccattgtcaagttcgatgataatgcctgcgtgttggtgaacaagtctggagacccgatcggcacaagaatgaacggagtcgtggctacggaactacgaggaaagcaatggtcgaaaattttgtcgttggcaccgatgcatgtataatatccctatgaaagcgaagcgtctatttacataactactctgtatcaatagaaatatgcctta

SEQ ID NO: 4354 - DNA, 290 bp, Aspergillus oryzae
cccacgcgtccggtggcagctctggaagccgaggtcaaggaattcaagctacagcttgaaaccgtccaatcgagtttgcaggtagatccagataatacggaacttcagagtctcaaaactgagttggaagaactttattaacctcaccgaaacctccatcgccgagctcaaacctcccgccccgtccacgttgaaaacatcgcttccgctaaaagatcaaggaccccggggtagctattccacatctcagacgggatatcgaaagccaacagtttgagcagacggaaaaa

SEQ ID NO: 4355 - DNA, 275 bp, Aspergillus oryzae
  modified_base (241)..(241): n is a, c, g, or t
  modified_base (247)..(247): n is a, c, g, or t
  modified_base (259)..(259): n is a, c, g, or t
cacgcgtccgcccacgcgtccgagttctcggtatttattgtagtctcaggtcctatgaatggttctgaagcgtcccaaagaagtcgtttgttcaaccatacgtcacacccgaacttccacacagatgcgcgtgattattttgctcgacacatgcgcatcctcgagaggtgctcttctgcttggccgatgccagaaatgcaagcacagatcgactccttgcggctagcatcctcggcaattntgaatnaatcccttcaanccttaaccccatattt

SEQ ID NO: 4356 - DNA, 260 bp, Aspergillus oryzae
acgcgtccgcggacgcgtgggcggacgcgtgggaaaagagttataggaactgtgaagtgaactgtcttctgtttctctagtttgcgatggcgccggcgacgttcccggtctgtattatcacaataacagcaatggggacgacgtcccggatagctgtgatcctattgagcttggtgctgtctacaaggcctcgtccataggggcggtcatccatagcccaacgaaatggcattcggctggcccagaactttatactggct

SEQ ID NO: 4357 - DNA, 339 bp, Aspergillus oryzae
cgcgtccgctagaactagtgtctaatttttttttctttgctactactctcggagtagtatgatggataaatggtgactttctattgcccgtgtggagattttttttctactttttattttctttttcctccttttttcttttccttctttctccgttgttcgattttatttttcggagttctttttttccctgtgatcttttgtattgattcaattctttttttccctttctgtggctggaaacttgctggaatccttttagaccatgatctggataaaaggcgtctcaggggctatgttgtaatcgttaaacgctttacatatattgcctcttgacga

SEQ ID NO: 4358 - DNA, 276 bp, Aspergillus oryzae
gcgtccgcactgtaaaaattttcgacgagaagatacctttatcccatctaatgattataccaatactaccgccagccagcgcttgagaagattctattgctttttctaccatcatacaagaatattgcgggaacgggacaagtgtcccgatcatggcttgatcaaaggacacctagtcagtgtctccagcttgttatatgttcgttctcatatgagaagacaatctcacggcccgcgatgatgaagagcgctgctggtcagcagacacaaaaacta

SEQ ID NO: 4359 - DNA, 272 bp, Aspergillus oryzae
gcgtccggaaatataggagattgagatataatcaaaagatactgccatactatctcaacgagtcttctcacgaacttcaccgataaccagcattatcaatcaccatcatgccaaacctaaccctcgggaaaggcgcatcgcccgcaactagatctcgcaatacagctatcctaagtatgttcgccgtgatcggcggtacctggctcgcctttagatcgctttcaccacgaagaaaccaagcggcggtgtcagaggatgaccgacaagccata

SEQ ID NO: 4360 - DNA, 229 bp, Aspergillus oryzae
cacgcgtccgcccacgcgtccgctataatgttctgcaaaatgatactgatgcgcacttgattcaaaaggtcatactttcccgccttccgcacattcacgctacacttctattcgtacctgatgatttatctaatgccgatttggcaatgattttacgttcatacgaatggaagacctcctagatctcattcatatccactgataatgatacccccaccatcgacctata

SEQ ID NO: 4361 - DNA, 379 bp, Aspergillus oryzae
  modified_base (278)..(278): n is a, c, g, or t
gggtcgacccacgcgtccgcccacgcgtccgccattatttcctcttcgcttggtatagggttgaattagaggtgtttgtgtactttgacaatggacttgtgtaatgaagtcgatgctggctctaggatctttcttttttttctttttttctatcctcttttatcttctactctcagattatacctatcttgttgacatttcctatcttgcttattatctacggaatggctattctgcaagcctgcgagtgtgtttctttttggttggtactacgggtnttttaagggccggtttgttttctctcgcgcgaacggtgagctcgtgcatgtatgctttaaaacatctcatttccttcaaaatttgtggacaattttgtaga

SEQ ID NO: 4362 - DNA, 427 bp, Aspergillus oryzae
  modified_base (324)..(324): n is a, c, g, or t
  modified_base (413)..(413): n is a, c, g, or t
cccgggtcgacccacgcgtccgcggacgcgtggggtggtggtgtacttaacaaggccgacctatcagcaccgatggccgtttacaaagacgagggaggtcaaacgcatcgcttcagcgctatctgccctcatatgaaagcggtgcttagttggaacgccgcagagaagagctgggattgtccggttcacggaagtcgatttagctgcgacggtgtctgcgttgagggtccagccaagtcgaacctgacgcccttggatgacttttcgaaaaccaaacagcaggagcaagaagcattgtaaatctttatcatgttactcagtganggtgacacctattcccctcataagcgacatttgttgttcctatccatctattgtacttatctatccctattaattctacgaaaaaaaanggggcccctaagtt

SEQ ID NO: 4363 - DNA, 380 bp, Aspergillus oryzae
  modified_base (301)..(301): n is a, c, g, or t
  modified_base (306)..(306): n is a, c, g, or t
gtcgacccacgcgtccgcattcctcatatgtacccatcacaagtacattctatatcgtctctaaaatagctattagtttgaaaaatcatgtcgaacccatacgaaagagaagccgaggaccgctacgagtctcagaacgatccctcccctgtctctggaatagtcagggacaattcctacgctcatgaaactcgttccgagctaagaaatcagatccctgttcaaagggatgaagatgatgttgaagatcctattcagcctccattttccaacagtgataagcaactagcgcaagacgaanatgangctatcgatagaagtaacatcttacgttggtgaccgcctgcgttcatgcaaaaccccgtactcaggatggatat

SEQ ID NO: 4364 - DNA, 365 bp, Aspergillus oryzae
  modified_base (264)..(264): n is a, c, g, or t
  modified_base (360)..(360): n is a, c, g, or t
gaattcccgggtcgacccacgcgtccgcccacgcgtccgctttgcacttcatatcttccggtgaaggggcacaaaagtcatgatcatatggcgttggaacctcgacctgtatgcactcgcccgtgcgtcagttgtctctgttttcatttatcttgttcttatttttcctcctcatgatcatgaagctatgtttctctagtaattttatctgttggtcggcagcatttattgagagcgttttctacgacacggcatctggacgangatgtcgttaaaagaagttcgattgcattcagcatgtttgtttaattatcatttattcgacttgagcgttgtacggatttgaacgcacatttcctncaact

SEQ ID NO: 4365 - DNA, 257 bp, Aspergillus oryzae
  modified_base (10)..(10): n is a, c, g, or t
  modified_base (137)..(137): n is a, c, g, or t
  modified_base (140)..(140): n is a, c, g, or t
gcacccgtcngcggacgcgtgggcggacgcgtgggctagttctagatcgcgatctacaactagtttttgaatctgctcgcccttgtacgggagatgagtcccgattttcaacgacttcatttgtccatctggctganaanaccctcggagggttatcgaggcagcaccttgcgttaatgattaatgttatccctcagagacgttatcatgagttgggtgttatatacttaatgagcatagtttatagacaaatacca

SEQ ID NO: 4366 - DNA, 291 bp, Aspergillus oryzae
  modified_base (33)..(33): n is a, c, g, or t
  modified_base (109)..(109): n is a, c, g, or t
  modified_base (216)..(216): n is a, c, g, or t
  modified_base (257)..(257): n is a, c, g, or t
gaggctttaaggtctttcatgggcactatcctnacgataccaacgccccttggctatcttcttccttcatttctcctaacttcatgtgaatgtagcattggctttttcnttcccatcagtgtttctcatttttacgtctgtcataggcgttcgatcttgttgggcttagcgatcctcttgaatgaatactggggctgtcggtgttttctcatgttncctcactctattcttttctgttgtctctcaatttcctaatnagcaacatgttgcgaagcacggactctgttctgt

SEQ ID NO: 4367 - DNA, 304 bp, Aspergillus oryzae
  modified_base (147)..(147): n is a, c, g, or t
ccacgcgtccgagctgttattgaatgcacccaggagctggtgtctctgtatgagatctgggagaattatagcgaaaagcactgtaaggaactactcggccgaatggtgaagagcaagaatctggacaagtgagattatttattgggnctcattatactatcttgcatttctagttagaatcggggcagtttgcttttgcgtttgcattcaggggagtttgggttagcattacatatcaaacattgcgccagttgtttacgggaacaaatgttaattccccctttacccctatatttctactaca

SEQ ID NO: 4368 - DNA, 271 bp, Aspergillus oryzae
  modified_base (36)..(36): n is a, c, g, or t
cgtccgcggacgcgtgggtgaggaagtcttgaaagnatggatagcaccagctcatcagaataatacggggaatagtgttcaacattgcccgagtctaatcatgattatctgttctgtgtcaaggttgtgggccatggctgtacctatcttccatggtctactttatgtcaagatcattgagacatgctttcgttgttcctaccacttacttcctatagtttgacttagccattctcctttcttccttagttttttgttctttggaagctaa

SEQ ID NO: 4369 - DNA, 256 bp, Aspergillus oryzae
cgacccacgcgtccgcgatgatacctgggagccgggggaggggtgtctctccgctcttgatctcgttcttgatcttttcgtttcgatctattagtacatagtttctgatctgttggcttgacacgtcgagccaagatccgttcggttcccctctgatggaggtttgagatagccatacgagagttcacccaggtcgtccgcacatgggccgattctaaggggccagaaccagagttgaaagcgtttgatacaacgc

SEQ ID NO: 4370 - DNA, 228 bp, Aspergillus oryzae
  modified_base (113)..(113): n is a, c, g, or t
cgtccgcccacgcgtccgagagagaccactccccgaggtgcaggagggggtaattaaacgtgacactggtgtctcgttaccttgacaaaaaggcactgcgtgccttgctgacnagttgacgatatcatatacaagattttggcgatttgggggaagacacttcggtgtctcccggcgtttgattatagcgaaagcattcctgcttcaagcgatatacacagagctatg

SEQ ID NO: 4371 - DNA, 301 bp, Aspergillus oryzae
  modified_base (9)..(9): n is a, c, g, or t
  modified_base (229)..(229): n is a, c, g, or t
gggtcgacncacgcgtccgcggacgcgtgggctgatacagagtcatcaattaccaaactattttatatattattctattcatcaattcataatggcctcgaacacgaaccccggaaacttcagcaaccgtccccacgaggaggttgagaacattgcccgcaagggtggtcagagctcccactcgggagggtttgccagcatggaccctgagaagcagagaaacatcgcnttccaagggttggacaggcttcgaacggaaagcttcaaacccccggtgatcctaaaaccccttgaggctggc

SEQ ID NO: 4372 - DNA, 262 bp, Aspergillus oryzae
  modified_base (202)..(202): n is a, c, g, or t
gacccacgcgtccgataagaccttaattctaataaaccaacgctcaacatgcagatcactaagtcgctcatcgcaaccaccgttgctctctacacttccgttgttcttggcgaatcagttcatattgcctacacctccaatggcgacttttaccaggagaaaatcgaggctgaaaagctcacaaaattagagcaccctggantcttgactgacatccagaacacagcctaactgtgcttttgtggcgccatcaccctaatca

SEQ ID NO: 4373 - DNA, 282 bp, Aspergillus oryzae
  modified_base (204)..(204): n is a, c, g, or t
acgcgtccgcaaactgcccgaggccctacaggcggccaggttgaatccgtccacctcggctgaagggccgccgacgtcgactgcgtcggatgtcaattaagcggttctcgattcatcatcctcctagcttatatggaaccctccctttttcattattcctcctctataactcctctccgtttgttggttgttaaatgcatcaangatgaagatccttcttcttgggtgctttcatggaccagttccttggaccgttatatttttagtgtatccggtgttaaa

SEQ ID NO: 4374 - DNA, 210 bp, Aspergillus oryzae
  modified_base (113)..(113): n is a, c, g, or t
gcgtccgcccacgcagcttgcggccctgcaccaacgaggtaagcttgtctgctgcaggaggatgctccaggagtgtcgacgcgccggttgatcgtgagctccaccgagcccanacgactcattccagtcggaacacgatcgcgtttgacttcaattactttctttcttttgtttcacagttaatcgcattataataccatactatgtgcg

SEQ ID NO: 4375 - DNA, 383 bp, Aspergillus oryzae
acgcgtccggcaggtaagtacgccgctgtaagctttcagcttcatcgcattgtaagtacctttgaaatcgcttgaagggaagggttctcattttgtgagacagcatcctcactttggtatcatttcttgttgagtttgcattcatgtatgctgcgaaaggcgatacgcacgcaggggtaaattagggaagtcggagacaatgacgacctgggtgcattatcgcgaaatctgcgccacgttggtgttatgccataggtcgatgagggaatttgttagaatgctccatgtttatattgcctttcacactaaatccgccggtagcgaagtttgacaccaacaatgctttccgacacatacccgcaggccatcgttttaacaatcca

SEQ ID NO: 4376 - DNA, 225 bp, Aspergillus oryzae
  modified_base (203)..(203): n is a, c, g, or t
acccacgcgtccgcccacgcgtccgcgagactggaaaaggaattgaacgaaggtcggataccgggaggcgcgctcgatgcggccgaggacccggatcaaatgcagacgtaatatataccgaaaccgaactgtcaattttcatgttcttattatgatgtaatttggtgccgagcttgttatgggtcttctttgcatgaaaagangaatatatctttcgcgtgtcca

SEQ ID NO: 4377 - DNA, 301 bp, Aspergillus oryzae
  modified_base (78)..(78): n is a, c, g, or t
  modified_base (112)..(112): n is a, c, g, or t
taaaacccgccgggaaagaacaatggtgctcatactgatgattggaataaacgtgaagcgcaagaaaaacgaaaggcncaggttgccgcacgcgatatgatggcacgcttanccatgcagcgcgaagaggccatggaaacggaggcccgctgattcaaaactagactgaaattctattcatgtattatccatttacctatttactcccttattaccgtttccgtcttagtcgttcactcgctgttttcctttttgtcttggacttctagactcctttgggtttcttatgtgatggtgttat

SEQ ID NO: 4378 - DNA, 255 bp, Aspergillus oryzae
gcgtccgcttgtcctgtggatggagctgatgactagatatggtggtatttaccgcagaattcgagggtcagctcacatgagtaatgagcgagtgtcaaatggccaaggggcaattgtcgcctgatatctttggatggctctcatctgaaatttttggaatttcgagctcttaaaagcgtaattcttcttgcaatagtatgggttatgacgtttgatacgtggattaaccagccattgtagtcagagtaacaattg

SEQ ID NO: 4379 - DNA, 271 bp, Aspergillus oryzae
  modified_base (193)..(193): n is a, c, g, or t
  modified_base (219)..(219): n is a, c, g, or t
  modified_base (221)..(221): n is a, c, g, or t
acccacgcgtccgcggacgcgtgggcggacgcgtgggtacatcccggcgatttccgcgaccttggagtacctgaaatatgcgggtgggacgatgctactaacgaaattcatggaagcccagatggacttattcggtgcccatttttattacaagccaggagtacccggtgaggatccaggaccggtcaagaanggtcctcatcactatgagtggcggcnancttaattctgtgtatagtcggttgtataagatctctcctattttggatta

SEQ ID NO: 4380 - DNA, 239 bp, Aspergillus oryzae
  modified_base (53)..(53): n is a, c, g, or t
cgtccgaaagggttggactaagcttgagttccagacgccgcagttcgatgaanatgaagcaccaaaacgaggggcggggaggagatctgcagcccctctgagcttacaagcggctgagattagaaatggacagcctgttgctttcaggttccggaagcgcggagaggaaactgaaacggctgaagaactgattgacctcgaactagaggaccctggtttgggatgtttgttcttcccta

SEQ ID NO: 4381 - DNA, 208 bp, Aspergillus oryzae
cgtccgctgggctgagcgatacagcgtatcattggtatctgccagtgtagttcccaattactttccatcgcttcgggtcgttgaatataacatctctggtttagtagatgccacgacttgggccgagtctcgggatcaagatactgcagtggcctcgccatcctccgatgtgatagatgatgatgatgatgatgatgatgcattcatc

SEQ ID NO: 4382 - DNA, 245 bp, Aspergillus oryzae
cgtccggtactactactccgtaggtaataggcgctcggctcccgtatcgttcgttattattgcctggcagtgcgtaattattactacccagagtctgcacggagtacctggacctctttgtttctccaaacgtagctcgattgtcttcgaaaaccccaagaaattgcatagcgcggtaggcagctctggagttgtagcccgagccgctttttgcattcttgcttttcaatggactcgtttgatta

SEQ ID NO: 4383 - DNA, 270 bp, Aspergillus oryzae
  modified_base (137)..(137): n is a, c, g, or t
  modified_base (250)..(250): n is a, c, g, or t
cgcgtccgcttgctaccgcggaactttgaacgttgattatctccttctatgttgttcctttttgttcttcttggtggtcgttgctataatacgtgctactaattctccgtagcaagatacactaacgcacgaaccangatattgcagatattacttttgcggcgccttgacttaatatcggcaggggtgatgcatctagaagatagccatgatgtttggtggcgatgacacgccaccgggcatgtttcancggcacaaacgccacaaaaa

SEQ ID NO: 4384 - DNA, 260 bp, Aspergillus oryzae
  modified_base (203)..(203): n is a, c, g, or t
  modified_base (243)..(243): n is a, c, g, or t
attcccgggtcgacccacgcgtccgcgcaaccacagcgtagagaatcaatcattcgcaatggattccgccaaggcccccgttaagctcgtggaaggtgacccgcgtcctcggccgtaccggtatgacctgtccccgcagtttgaagcatcgagatggacaataggaagttattgggatcgaagggagatgatatctaacgaanagtatgctctcgcggtggtgttgacccatgtccgtgttcnagttcatggaatgacca

SEQ ID NO: 4385 - DNA, 264 bp, Aspergillus oryzae
cgtccgggggattgttgatagactttattggacaaaaggctcccgtctcagtagcccggcttctcctgtcggacttgcttgtgctggtccttgacctggtgatgctaggtctgattgttgaacgggtgaagacgactgaagcgactgctcctgtatccactataccgggtgtaatagagacgcccagcgatcaggatcatgattccgaggagcgcggcgtttcttccgaaacggctcggcccagccttcccggcgaatgacata

SEQ ID NO: 4386 - DNA, 308 bp, Aspergillus oryzae
ccacgcgtccgcaaccatcccgttgtaggtcaatgggcacgacttcctttcccgttctagtcgctagacatcgtcacctgacatgtcagtatatcttttgaactggacgtcagacaaccgacactagccgcaactcagcctcaacaccatatagcttatgatgggttggaatgcgatgatgcgaggcctgagtaagatttgctgcttttcatcccaccctgaaaagaatgggtttacaggataatcccaccactgtctatgaacccaccgactcgtcttcttccacctgaggttattgccccatctca

SEQ ID NO: 4387 - DNA, 286 bp, Aspergillus oryzae
  modified_base (12)..(12): n is a, c, g, or t
  modified_base (15)..(15): n is a, c, g, or t
  modified_base (28)..(28): n is a, c, g, or t
  modified_base (48)..(48): n is a, c, g, or t
  modified_base (270)..(270): n is a, c, g, or t
  modified_base (279)..(279): n is a, c, g, or t
cgtccgatgaanaangctggaatcttanaggtcggcaagatggataantacaatcgtggagttcaccggaccgggcgcatggacagacgctatcttcagatatttcaacgacccagactacttcaacatcgaacccgattcaaaccacaacattacctatgaggatttctcgaaccaaaaagattggagaaaggtcggcgacgtggttagttctacccattacgagcttcagcccctggcgtttatgcaaatgggcgccaggcgactacnaagatcccnttggcct

SEQ ID NO: 4388 - DNA, 202 bp, Aspergillus oryzae
  modified_base (60)..(60): n is a, c, g, or t
  modified_base (77)..(77): n is a, c, g, or t
  modified_base (95)..(95): n is a, c, g, or t
  modified_base (107)..(107): n is a, c, g, or t
  modified_base (145)..(145): n is a, c, g, or t
tcgacccacgcgtccgcaaccttgcaagaaatctaccggaccgagtcgcacagcaatacnacggtctatcgtggaantaatgccgtattccttanccatcgcccaangatcgtctatatttgggaccgtaaccggtcactacgcnaggaactcaccgagttaattatgatcctagaaagggaggaatattactaaacccaac

SEQ ID NO: 4389 - DNA, 217 bp, Aspergillus oryzae
  modified_base (129)..(129): n is a, c, g, or t
cgcgtccgccgaagttcagcccgaagaaactcgaacaaaattacggatttcgccgtaaaacagagtaaaagcaagaagaggaagaagaaaaaggatgccattgatgaccttttcgatagtctcttgtanatccttttcttacaatctgtcggctctcgttttctcttgtcgatgactcaccacactcgtcaccattggaagcaccgagcgggattta

SEQ ID NO: 4390 - DNA, 221 bp, Aspergillus oryzae
cgcgtccgcccacgcgtccgcccacgcgtccgtgatcgatatgggtttgttgactctcaaggacgccgatgctcaacgaggcattgctgcatataaagaaaatgcgcagatcaagggtcaaccaaatgtggaagttgttcctcttttctctacggacgatgatgtagtcgtggaatggcgcgccctcacagttgggttttttggacgagctgctcgtggcg

SEQ ID NO: 4391 - DNA, 259 bp, Aspergillus oryzae
cgtccgcacgcttgcctgtagacagattgggccctctgccgtttggaggtcaggatgtaccggggagcgggcgaagctccatttgctcgtgcgcataccttgctctctacgctattctaaatggcacccacaggtatggtagtggtgcttacattcactacgatcgggtttaacccgacatctcaggacaaggcgatggagcaactactgcatgctttgcagcttgatacccaaccgtgaaaacttgttctggcccgaa

SEQ ID NO: 4392 - DNA, 268 bp, Aspergillus oryzae
gcgtccgcggacgcgtgggcggacgcgtgggcggacgcgtgggggttgggctgctcaaagacacagaggcgcgcgcatatggggcttcaatccgaccattgaaagtgcgtgagatgtgcgtggtgctcgaagtggggaggcctctcctcttgcggttcatactgccgttccaccagttcttcactgcattgtcgctgcgattgccgagtcgtcgggcaatttcggcccaccgcttgcccatttcgttcaccatcccgctcaatcatca

SEQ ID NO: 4393 - DNA, 246 bp, Aspergillus oryzae
  modified_base (25)..(25): n is a, c, g, or t
  modified_base (56)..(56): n is a, c, g, or t
gcgtccgggctcacatagtacccanaagcccttggaatgaagggaatgaagtatanactcttgggggagacaagttgagctgggctaaagatggagataagatctttatccaaccgggaaatattgaggttgacagtattgcagaacaagtttcaaatggtgaagtatggatcttgaacggcgttatcaactaccgtttgaatctgctttacaactcgtatgtgaatgatttaacgaaataaatat

SEQ ID NO: 4394 - DNA, 230 bp, Aspergillus oryzae
  modified_base (93)..(93): n is a, c, g, or t
  modified_base (131)..(131): n is a, c, g, or t
  modified_base (145)..(145): n is a, c, g, or t
  modified_base (165)..(165): n is a, c, g, or t
  modified_base (209)..(209): n is a, c, g, or t
  modified_base (213)..(213): n is a, c, g, or t
cgacccacgcgtccggactagttctagatcggctgctctggagcggctataccaacagtacagaagtgctggtcaatgtaaatcagtgtaagnaaggaggcgctggggcgtttattaatgtgcgaaaatgnattttctactttgnaatccttcaacagcatgttngggactgattacttgattattctgtgaacgtggcacatgaagantggntagccttctctttgttc

SEQ ID NO: 4395 - DNA, 249 bp, Aspergillus oryzae
  modified_base (169)..(169): n is a, c, g, or t
gtcgacccacgcgtccgcaatcattatcgatccacacagtactcattggttatcaccatgtcgatgttttcgaaagctcaggagaccgtacagaaagcggtgagctccgctactggttctaataagccggatctctcgaaatggaatacggaggagatgctggagaccnccgttgacgaacacggaaaccccgtacctgacgcctcatacactgatggtgacaagtttgtcgagaggaatcctcggttc

SEQ ID NO: 4396 - DNA, 314 bp, Aspergillus oryzae
cccacgcgtccgcccacgcgtccgcccacgcgtccgcccacgcgtccgcatgagccatgagctctaaacctcccttgcgttatatgtacaaaaagtaatgattctgtatgagctatctggccggctgtctcgagggtgctaattctgcttctcttcccaaatatccctattgtgtacaccaatttttgttcatccgtttccatccttccacctcacttacttttatttcccctttccatgaggccgtgattcacgtttgatagccttcctgtttacaccctacattggcgtttctttgaagaattcagcgttat

SEQ ID NO: 4397 - DNA, 276 bp, Aspergillus oryzae
  modified_base (51)..(51): n is a, c, g, or t
  modified_base (69)..(69): n is a, c, g, or t
  modified_base (78)..(78): n is a, c, g, or t
  modified_base (96)..(96): n is a, c, g, or t
  modified_base (104)..(104): n is a, c, g, or t
  modified_base (135)..(135): n is a, c, g, or t
cgtccggccatcaacgcctacagcggtggtgtcgttgtcgtgtcccacganttccgtctcctcgacaanatcgccaangatatcatggtctgtganaacaagancgttacccggtgggatggtactatcggccantacaaggaccacctgcgcaagaagatgattgacgccggtgctgtctaagaaacggcacgaaaaaaaaatgaaggaaaacgacgcttcttgttatgattggaatgtcagagacgacaatgaaaactcaaaagctgcagggga

SEQ ID NO: 4398 - DNA, 268 bp, Aspergillus oryzae
  modified_base (35)..(35): n is a, c, g, or t
  modified_base (54)..(54): n is a, c, g, or t
gcgtccgggatacactcgaatgggtgatgaaaganagaggcgacgatatcgaanagttcagggcggccatttcagaccgggaggtaggaatcatatgggcttaatgcataacataaatgtgctatgcactactggaacgtattacggagctaccaatgtacctactacctcctctacacagtcataaccatatctccaaggataagctccctataagcaagcaagggttacaatgcatccatccaaaaaccaggatttccaccagata

SEQ ID NO: 4399 - DNA, 253 bp, Aspergillus oryzae
gcgctggtgttttctggaatgcatcgacaagattcgcagatgggatgaggtatggatttggtacggaggttggaatcagcacaaataagatccatactaggggacctgtagggttagatggcttaaccatctataagtacctgattcggggggatggtcatcgagcatgtgattattctgaaggggggaaaagatggaaacatcaaagccttccgctttaggtaactagttccgctcgttcatagtctgatat

SEQ ID NO: 4400 - DNA, 330 bp, Aspergillus oryzae
cccacgcgtccgcatcttcatgcgaatcaacccgcatctccagatccctggccaatagcgacctaccagggtatactgttacacctcattttcgctcttctgcaaggcgatcagaaccgatcagaccttcgactgacgcataccctacctagaacaccctctcagcttctcattcccctgatccgcagctgcctgcagcaaaacatgttttactatccttcaatattcgcgcaattcaactccgcctcggtcccggaacgtttttcatatgggtttggtatcgaagaagtgaaacgtttcgctctggccttgtacaaattctaccgacgg

SEQ ID NO: 4401 - DNA, 235 bp, Aspergillus oryzae
  modified_base (141)..(141): n is a, c, g, or t
  modified_base (149)..(149): n is a, c, g, or t
acccacgcgtccggtcggaaagagtgtgcgacggctggtggttgaaggtcttgctcgcagcgctattgttgcttatcaagctaggccacgggacacagctgcagatggagatacctttgccgactaccccatgctcttganatactgcnaccgcccgccgtggggctctgtcgaacaccccggatggtcttctcctgcatcccccgatttgcccgacctgccgtaccgaacggtc

SEQ ID NO: 4402 - DNA, 225 bp, Aspergillus oryzae
gcgtccgcccacgcgtccggagcgcttggacggtgatgaaatcgcgtatattgcataatttctagagattctttctttcgttggccctctttcaatcattctctgttagcgccggtacttctcgctggtttttccatgattttctttctttgttcaatggtctttttctcactgcggcatacggctttcattcataggtcaaggatgggacttttctgctttcgt

SEQ ID NO: 4403 - DNA, 226 bp, Aspergillus oryzae
cccacgcgtccgcaaagaatcatctactcttcagttgaaagctcatacccaaagtctacccacttcccaatctacactctatactcttctcaatactaccttgataacgcacacgtaaccacaaatatgcaaaccctctccattctcactaccctcctgttggcgacctcctccctcgtcctcgccaatcccaccaagcccgtttgcggcacctgcaaccctctgt

SEQ ID NO: 4404 - DNA, 270 bp, Aspergillus oryzae
gcgtccgatcttggcatgtttatagctagccttgcttctacatttttatgttctgtctttgcttcgatgatgatccttgcattactacatcggtagcttgggcgcctttcatcctttcctttcttgctttcacttatctttactcatctatagcttttgcttttcttgtgtcttaatagttgaagttgcgctggactagtcagggcaataccccgggatgaatggcgttccaatgggcttgtacaataatgagaaatgaaaaactcatcc

SEQ ID NO: 4405 - DNA, 328 bp, Aspergillus oryzae
cgtccgcgttctggcaatgccctttttcatgtatgatggatgatgaagttatgtacatagagtaatggtattagaaatatcccgaagcaagggaggtgtaccgagggttgaagaaatagaatttctcagttttacccactttaattaaccttggggatcaggccatacacaatgagagcctccgggatcacctgatatgcaactgcagctcaattcccgtgcagaggatcggcacatgggcagcaaattcatgacatgccatgccgttgggggacacacaagcttattgtttgggttcaaacttcccccccccattgtcttttttttc

SEQ ID NO: 4406 - DNA, 249 bp, Aspergillus oryzae
cgacccacgcgtccgcaatagtcacaatagaacaaggtcaatataaacagggttgtttctcgttttatatactgtcaaacctttggactgttgcccatatcttcatccacttctatttcgcgtttgctccactatgtggagtattcttcacaaaaaagcccacctggtgaccactgagtattttttgttatcctgtatatactgtttttccctcaaacacttcaataaggcctgctggcccaatggcaa

SEQ ID NO: 4407 - DNA, 290 bp, Aspergillus oryzae
  modified_base (47)..(47): n is a, c, g, or t
cgtccgggcatacagtaacattctccgccgcacaaggagtatggtanatgcttttcttgcgatcaatattgagcttgataaaaatatgacggcatccgaaggcgagcttagtattctccaatataccgacaaggtaaagacagcaattgtcgtcgcgcatcagccatctattgtcagtaatggcctcctctatgaaactcgagtacccgctgagcgacgtccttcccagcattgagcatgcccgagatcggcttcttgcccgccttttccactatcgcaaggatcatgga

SEQ ID NO: 4408 - DNA, 285 bp, Aspergillus oryzae
  modified_base (52)..(52): n is a, c, g, or t
cgtccgcggacgcgtgggctagttctagatcgcgagcggccgctcgcgatcnagaactagtcctttgtgtgagcgactccagcagtcgcctctctgagcgttggagcctgatccatgctgactggttctggctttgtctccagtctcccctcgactgcttttatattcattgtatcattttctcctttgttcgaagtcaaaggtcgatctttcgactctgcccttttcttttgtttaatttttcccttttctctgcttttctaacgtatgccactggctgaacgt

SEQ ID NO: 4409 - DNA, 219 bp, Aspergillus oryzae
  modified_base (144)..(144): n is a, c, g, or t
gtccgcgttcctgtcctccaatattcccatggtatgcgaggcctcggcgcatttcatagacactttgtgtcttctgggcccatattggctggctggacatcgtatgtctgttctttttgcatccaagctgggttgatatatcancgtcttggtggccaattccgtctggtcatgattttatgtacgttaacctccctgccctgcctttgttataacgaa

SEQ ID NO: 4410 - DNA, 274 bp, Aspergillus oryzae
gtccgaaaacattttgtaaccagggtaatgatcgcattgttgatttagcgtatgtttatgtttcgttcttttcctttcgaacgctgctggtcagacctcatgttcattgcactcgcgattctatgacatatccagatggttgataggtcgttctaaaatggttgtcggtgtcctaatgactgcaatcacactctcgcacacaatgttctatttacatcatatatttttcgacctgtctgtattttgttgttcatcatatgttttataacacttc

SEQ ID NO: 4411 - DNA, 252 bp, Aspergillus oryzae
cgtccgaaccggggccccccagatatacttggctctttcttatcttcttgtttactggtttcttttcttattaattgtttgtagaaagtagatcttccggagattttcaagtctcgacacagaaccccacacccgatcaggcaagggttgggtaccttaaatcatcacagcagtttcagctcttttggtgttcgtcccttttcggtcgcgtgtgctggttttggttttccatttttgcgcgccgccaacccc

SEQ ID NO: 4412 - DNA, 219 bp, Aspergillus oryzae
gtccgaaggagcggtcgtgacactgggtctcgtgtgtgagagagacacgttcacctctctcttttcttcatcgatctttctttttctttattttggaattttggcgtaggacttcgcaggcgttaatttgtggcatagcgcgggcgcagggacggctgagctctagcatttctggacatatctcccatagcatcccattcaaaggatctattcataatt

SEQ ID NO: 4413 - DNA, 302 bp, Aspergillus oryzae
cgtccgcgcttacatcgagtataaccgagtgcattatttgtggatgggcggtccaagcccactatgattctccgaactcatcatcttgctctcattttttttgcttctgcattttcttacaatcaacctgaatgacacgtttggtgctccgtacaaagactacgttacgcagataaaaatgtaatttcacgtctttacagtttgtacaacttgtttgctgactgaggatatacctaaaactgtttggtatacattggaaaggagactaacactcttttgactgtactgtacatatgggtcaa

SEQ ID NO: 4414 - DNA, 271 bp, Aspergillus oryzae
gtccgccgatgccatcgctcgacatgacagtcagaatgcgaccgacgaagaagtagagcctaatgatgatgatcatatcccttacgaagacgatacgggtgatgacatcgaaccccatgtcaccataggccgccaacccacccaagaagatgatgataggtccccgttacttcaagaggaggtttgcagctcgccacgtaacaatgaagaatcaatcaagatcactacagaagacatggctgaaatgggccttgacgtctggagtgcacta

SEQ ID NO: 4415 - DNA, 278 bp, Aspergillus oryzae
acccacgcgtccgctatcatccggcctcctgggacatacctcgcatgcacgtacgatgtccctagtctaggactatatattcgaactataccgtctcaacatcggtaaatagatacttctcagttcggacaacaatcattcttttatccggacaattctactcaaataaactgttacacctcaactgtctgaagtcccaatatccccgtaattagcacatagcccttgaccacagaggtgccaccaagataagaactcgcttaattagacttcgctgc

SEQ ID NO: 4416 - DNA, 332 bp, Aspergillus oryzae
  modified_base (97)..(97): n is a, c, g, or t
  modified_base (102)..(102): n is a, c, g, or t
  modified_base (111)..(111): n is a, c, g, or t
  modified_base (172)..(172): n is a, c, g, or t
cgcgtccgggagaatgcatgcgatctaattggaatcggccgcccggcggctattgacgccaagttccctcaattgcttctcgatgaaagtgtgccanatganaaagcgcanttgctcctgaacaaggttcccgctccatttattactcgtttccttcctacgaagatcatangcgctgggctagaaactacatattacggggggcagattcaacggatagcaaagggactgaggaccatggtaccgtctgtttgattgcaccatcggtgctctttgtaatgttttctatataagtaagcttaataccatagacccggatttattgaacagcg

SEQ ID NO: 4417 - DNA, 288 bp, Aspergillus oryzae
cacgcgtccgcgtatcggcagctacctctcatccctgatgggggggatttccttggttttccaaatcataacgacatccctgatgaccgccgtctttgtccagggtcgcaacaagttcaacgccaacggccaaaccgcccgcctgggcgccaagtcattcggcttcatgtggactgctgtagcctgtctcctcctcgcttgcataatgtactgcctcggaagctccgtcggcgggtaaaaaaaactgggttacagcgggtcgcctaacaaccgtccgtcgttggtttc

SEQ ID NO: 4418 - DNA, 250 bp, Aspergillus oryzae
  modified_base (31)..(31): n is a, c, g, or t
  modified_base (225)..(225): n is a, c, g, or t
cgacccacgcgtccggaacgggtgtacttgnaaaaacacagctgcccctatcacgttgcagatgctggtaacatgaacgatagaaaaagcattgtatcctctctcaacatttcatatatattgctaaacagtctcatattaccaaaatattctgttcttctttgcccgccccgggcaatgtaacatctactaccccgagcacatacctagccaagtccagcatanccgcgcacctgaaacagatggacct

SEQ ID NO: 4419 - DNA, 288 bp, Aspergillus oryzae
  modified_base (8)..(8): n is a, c, g, or t
  modified_base (259)..(259): n is a, c, g, or t
tccgcggnacgcgtgggtatccgttggctttcttcacaatgccaccttcaatttcttctcggtcctctaatgatagtccaatgcagacttcggaggactcaatttcatttcgaactactgttcggacatcgccggctgtctggcttggctcgatctttatgcgataggcctcaccaggtacgccatgcaggggcctggacaaggcaatcactttaattgaagggctttgtgaaaccaacgtttgcaagtgatgaaaganacgtggaataacctcgggatccccgttga

SEQ ID NO: 4420 - DNA, 342 bp, Aspergillus oryzae
  modified_base (18)..(18): n is a, c, g, or t
  modified_base (153)..(153): n is a, c, g, or t
  modified_base (237)..(237): n is a, c, g, or t
  modified_base (288)..(288): n is a, c, g, or t
  modified_base (304)..(304): n is a, c, g, or t
cgcgtccgatctatctcnctctttgtggtttttccgtcttggagaacaccatcagacaaaatgtcggacggagaagagactgtttccaaccccgttgttgccgccgatgaggtcgaggtcagcgccgacgccggcgccggtggccatatgtcngtcctcgacgccctcaagggtgtcctccgcatctccctgtatccacgtacggtcttgcccgtggtctccgtgtaggccgccaangctcttgaccgccgccaggctcacatgtgtgtcctcaacgaaggctgtgangaagtaagcctacaanaagcttgttcattggccctgttgctccgaacacaaata

SEQ ID NO: 4421 - DNA, 310 bp, Aspergillus oryzae
  modified_base (100)..(100): n is a, c, g, or t
  modified_base (156)..(156): n is a, c, g, or t
  modified_base (310)..(310): n is a, c, g, or t
acgcgtccgagtaaaagacagactctgaatagagcagaaagtgaagacttccaagggcgttcaatcttactttggaaatggcgataaagacgattctacnggctccccgaagactactaaagcttcgtgattttcacctcctttgacatgtagatngcgtgtgatctggatgctatacgaatccccttctactattttgttattttccatcctttctttcatcgaagctgtttataagtcgttccatgggcaattagcttggaaaatattcatgtgtggaagccattatatatgtgttccgtgttatacn

SEQ ID NO: 4422 - DNA, 271 bp, Aspergillus oryzae
  modified_base (47)..(47): n is a, c, g, or t
ccggcactctcaaaggagattttatagacatgaaaagactgatgganactgacgacgcaacgacactcgaataatggtgaatgtgagcaaatttcatgactgagatatagacgactggaaaccatgtatatgacaaacgaactttaaaaaatggcgcgacgaaactatgtacaatttacgactcatcaaaacttttcaacgatcaacttccactaccaacgacatctgtgacagaacttttcggggcatttcgatctttctttttcatctc

SEQ ID NO: 4423 - DNA, 322 bp, Aspergillus oryzae
cgtccgcagggttattatggcagcggatacgacccgaattgttatcatatgtgatcacccccgctacagtctttcagcacagaaatcagttgcaagcagcgagacaaattgacttacacgtcttaaatactctttgcctcctgtccgaagcattcgcacaagaacatatgattttgaaatcaagaacacccgtgtaatatatgtagtagttacagttcctacattgtcccttctgcatcccgaagccactagggacatattagccaacgccgccgctcaataaagaagggagatgttatactacctgctctccgcaaccaaa

SEQ ID NO: 4424 - DNA, 247 bp, Aspergillus oryzae
  modified_base (93)..(93): n is a, c, g, or t
  modified_base (113)..(113): n is a, c, g, or t
  modified_base (119)..(119): n is a, c, g, or t
  modified_base (122)..(122): n is a, c, g, or t
  modified_base (156)..(156): n is a, c, g, or t
  modified_base (200)..(200): n is a, c, g, or t
  modified_base (217)..(217): n is a, c, g, or t
cgtccgcggacgcgtgggcggacgcgtgggcggcggcggcggtggcggtggcggtcgctcgtatgaacctcgtgaagaccgatatggtagcangtatgtgcagggttgggcanttatcnacnattaaaaatcagggtcatggcacgtaattctttncccccgtctctaattctctgtctaaggctcccccttttccgttnctttggttaacccccgntcctgttttgtgtgaacatccaacccccaa

SEQ ID NO: 4425 - DNA, 257 bp, Aspergillus oryzae
  modified_base (130)..(130): n is a, c, g, or t
  modified_base (217)..(217): n is a, c, g, or t
  modified_base (228)..(228): n is a, c, g, or t
gcgtccggactagttctcatcactcctgaacaccttctctcccccgagcgtctcgccgagctcgcccaaatcgaagcaggaaacgtcgccgccaacgccgaggctgccgaaattgccaacaagctcgacnaagccgttcagtccatcgaaactgaacagggcctcgaccccccagggaaacctcgcagtctaccgaatcccaacccgagccccaganccatgttccanaaaccgaaaagcccgccgaacctcaacca

SEQ ID NO: 4426 - DNA, 330 bp, Aspergillus oryzae
  modified_base (216)..(216): n is a, c, g, or t
  modified_base (222)..(222): n is a, c, g, or t
gtccgcccacgcgtccgcccacgcgtccgctgacattcgatgtccgttacgacaacgagctagcccacgattactatggagacggaaaacagctagctgagcatatgcggcggatttatcacgacaagaaccttcagttccctaatgaattcgaatccactttaactacaccaccggttcattttatgtcggtggaggcattggacgaagccgacnttgaanagctgaggaacgtgaatgttcctcctggcttgaatatcgaaatcctggatctgaatatgttaaactttaggatttttgggcttttgcactcagtcttttggggtgttc

SEQ ID NO: 4427 - DNA, 348 bp, Aspergillus oryzae
  modified_base (248)..(248): n is a, c, g, or t
  modified_base (298)..(298): n is a, c, g, or t
cgcgtccgcccacgcgtccgcccacgcgtccgcccacgcgtccgcaaaacactaatatcccatatcaacatctaccccaacagtcaacacccaccaaaatggtcatcggcctattaacaatagccgcaattcccaccgtaacaggtgtcgccctaggcgtaagcgaacagcacaaagcaaacgagcgcaaaaacgacgagagacgcatggccaaattcctcatcgacgtcgaaaccaacggagagacncaagaagacagcgaagtatgcgggaagcggttcgtattaaggaataacanggtttatctcgatgatccgaatccttttgaatcggaagcttccgtcccat

SEQ ID NO: 4428 - DNA, 261 bp, Aspergillus oryzae
  modified_base (41)..(41): n is a, c, g, or t
  modified_base (45)..(45): n is a, c, g, or t
  modified_base (222)..(222): n is a, c, g, or t
  modified_base (251)..(251): n is a, c, g, or t
cgcgtccgcggacgcgtgggctttgcgagaaacattcgaantaangaggaggctctggagaagctccgtaatgggtctaagtttgatgatgttgctagggagttttccgaggataaagcgagacagggtggttctcttggctggaaggtccggggaagtctcgatggcacatttgagaaggcagcatatgaactcgagcctagtacgacagcgaatccgaantatgtggaggtgaacaccggatttggatnccatattatc

SEQ ID NO: 4429 - DNA, 286 bp, Aspergillus oryzae
  modified_base (40)..(40): n is a, c, g, or t
  modified_base (94)..(94): n is a, c, g, or t
  modified_base (123)..(123): n is a, c, g, or t
  modified_base (135)..(135): n is a, c, g, or t
ccacgcgtccggggcagcaagaagagcaaggcggccaagnacgaatgtgtcactggttacttccagagataacaagcttgatgctgattatganaatggtgtatgatggattgggtgatgacnaatttcatgtgnattgatcatttcatctcatttctttattgcttctttttgtgcccccatagtcgccagtcccctgtcagtatgacatgaattcctgccaactcttgtatatccgcccttaaagaattccttcgcatcctttctcttctttctcttccttggc

SEQ ID NO: 4430 - DNA, 219 bp, Aspergillus oryzae
cgtccgcgaggccgacacactggacgacacactttatttactgaacacttgtacgtgctgaggttataacccgtgctggataaaatgtgccctaacatatgtctctcagcctcccggcaatggtcgcgcgccatacctcctgggccccggcccgctgggcgttatggacacaccttgaatatccttggctccaagatttacgtctttggtggacaggtt

SEQ ID NO: 4431 - DNA, 260 bp, Aspergillus oryzae
gcgtccggcggtattgttaccggcattgttgtcctacttgatcgcgaggaaagagtcagcgacgctgagcctaagagcgctatcggcgttgcacagagggatcttggtgaaaacatccccattcgcgcagtgattggtcttcacgacttgatcgaaaagctgggtgataagatcggggagtccgagatccagcgcttgaaggattacagggctcgctacggagccgaatagatccggtgcattagcattatgggcaaaaa

SEQ ID NO: 4432 - DNA, 227 bp, Aspergillus oryzae
  modified_base (26)..(26): n is a, c, g, or t
  modified_base (66)..(66): n is a, c, g, or t
  modified_base (134)..(134): n is a, c, g, or t
  modified_base (159)..(159): n is a, c, g, or t
gtccggtgaaattgattgtacagtgnaactgaccatcttgttgctaccacgcacaaagtacagtgnacagcacggctgttggcgcaatcttcaattaacaagcatcttctcgcgggtggtaccgaacgtcattncccggacactacctgctgttccaancttctctgcattcaagtcctcaaagcgaagaacaatacgaccgttcgtggcaatagcaatgaactcaa

SEQ ID NO: 4433 - DNA, 275 bp, Aspergillus oryzae
  modified_base (24)..(24): n is a, c, g, or t
  modified_base (225)..(225): n is a, c, g, or t
  modified_base (257)..(257): n is a, c, g, or t
cgtccggtttatttcagatccaantagcacccgccatgtacggctggcgtatgcacgactacccgagggacttagcctccccccgggctggtcccttcttcccctccactcagcggagcagggctcgagtggagcggcaaatgtgacgcccactccaactgttcctgtaacagctccacctgcacagacgcctgccggcagttccgagtcccaagcgcccgtgtnggcggtaaaacggtgtgtaatgtatagttcangtatgtaacagggttcct

SEQ ID NO: 4434 - DNA, 404 bp, Aspergillus oryzae
  modified_base (102)..(102): n is a, c, g, or t
  modified_base (265)..(265): n is a, c, g, or t
  modified_base (268)..(268): n is a, c, g, or t
  modified_base (291)..(291): n is a, c, g, or t
agaaagcctttctgcttcagcgtgctaataaaatccactatgcgtctccgttcagacttgtatctcctcgtcatgctgactgtatacagagtcggggcgtanaagatagcctcgaggtatgaattttgaattaccattttctgcatgttgcagagcattcgtcgcttgctcataactcatttgcgaaatatcgacattggtgcagtgtataaaacgccaacatgacgttcgtaagattcctgccattttcgctagtgtaccaaancanataggcaatgatatcccgttggnaatcgggaacgcaatggcaggtcaattctatcccctggtattcatgtttcagataatcccctaagggaattgccgtttgggggaaccaacttgcagacccactcttttacttt

SEQ ID NO: 4435 - DNA, 404 bp, Aspergillus oryzae
cgtccgtgcctgtgttctccagtggtactggttcgccgagtccatcgaccagacctacgagtcctgcattgacttcaccatgagcggctctggctctggctcctcctccggtgcctcctccggtgcctcctccgccgcctctaccgctgctgctactgcctcctccactgccactggcgtcgctgtcactgctaccccaaccaccggcaacaacgtcgctgcccccagcggcttcgccaccagcgctaagccgtcggccacctctgcccccagctctgctgcttcgaccgtgaccatccccaccgacggcactgcggaagaaaaagctcaactggatcgccagccttctgcagaccctcgtcaattacattgcttaaaaaagtgatttgaattaacaatctgtt

SEQ ID NO: 4436 - DNA, 278 bp, Aspergillus oryzae
  modified_base (68)..(68): n is a, c, g, or t
ccgcctgaataatagagccacacaagtcaggcaagcccctcgttccttgatcgaggagcatagacggncgacagaacccgccatccctcggcggacgaaccctcctgcattgagagcacccgggcggtctagccttcattagtatacctgatcgaagaagccggggtccaatgttatctacgtccttgcgggatagggaagcaaggctacgtagctattgcctccgggcaacgtaccgggctctagtacccccagttcctctggcttcgtcgcaattg

SEQ ID NO: 4437 - DNA, 314 bp, Aspergillus oryzae
  modified_base (9)..(9): n is a, c, g, or t
  modified_base (98)..(98): n is a, c, g, or t
  modified_base (208)..(208): n is a, c, g, or t
cgtccgcanatatttggaagaggcaaaagataagcaccttctcgaagggtcgaaaaagcaaacccaaaattttaatttagaacaaaaatacagaatanaaacaaagtttgaaaaaagaaaaagcacttaccgttacccaaaacaacacgaccaagatggcgcccaaaaacaaaggcggagacaagaaaggcaaggggaaacgatggangtgataaggggggcaagggattggaaaccagctacttcgattaacgtgcggcatattctttgcgagaaacattcgaagaaggaagaagctctggagaagctccgtt

SEQ ID NO: 4438 - DNA, 311 bp, Aspergillus oryzae
gcgtccgaggctcttgaggtggtgcttgggaaaaagggtgatgcgatgcttcggggtggggagaagaatggtttaagccgaaggaatacgttagatcctgggaggaaaagataagtagatcttcacttgatatctgggtacttttatggcgcaatagatgtggtgggcttctggttttcataggtcaagtttggtttgcttctttctttggcagtgtttggagcggagaaactgccacagtctataactgtcttgataatatgtatcttattgtttgctatacaaacctgattttctacagtttactggaa

SEQ ID NO: 4439 - DNA, 414 bp, Aspergillus oryzae
  modified_base (61)..(61): n is a, c, g, or t
  modified_base (185)..(185): n is a, c, g, or t
  modified_base (300)..(300): n is a, c, g, or t
  modified_base (304)..(304): n is a, c, g, or t
gtccgattcatgcaaatcgcactgttattgccccgtttacgtgtagcccagattgacctantccacgagggatccagctacggaatctatctttctagacttcatcgtttatcttttacgaaaaggctatgccaggaatcttacctatgtggcctttgacgataccaccgtgcgcgaaatccgcngaaatccgatacggttttccgacggagtctctcgtgttggatatgtcggtggcacggtcctattgaatgaagaagtcttcgactgggttagaacatccttctaagttcgcaaagnaaanaatgatatcgattatcaagccggatgctacccctgaataatgtcaagaactactcccctcatcgatttttcgactgtcagtgccctatgggtaatatgtcggttctctaa

SEQ ID NO: 4440 - DNA, 260 bp, Aspergillus oryzae
  modified_base (7)..(7): n is a, c, g, or t
tccgaancccagatggacttattcggtgcccatgcatattacaagccaggagtacccggtgaggatccaggaccggtcaagaagggtcctcatcactatgagtggcggccagcttaagtctgtgtatagtcggttgtataagatctctcctattttggattagaaacaccacatcgggtagttccattgatagttctttattttacggaatagacgtcaaagctacagggtcaatgccatcctattgtaagccctattat

SEQ ID NO: 4441 - DNA, 214 bp, Aspergillus oryzae
gacccacgcgtccggtaaaaagaaaaatagagagagagcgcgcgcgagagcaagaaagtgtgcgctgtcactcatatagtctcttatcaagctcatctcacgctacgaacagccccttttctcgggggcccgtagtttttttctctcctccactgtcttttctcacctgcgctctgcgagactattaacaattattattttctctcattcaggg

SEQ ID NO: 4442 - DNA, 271 bp, Aspergillus oryzae
cacgcgtccgttgtgttcttgcttaattttctacttgttagagcccactggctgtatgctacatggtgataccctagatcttagctctttttcttccttttctcccttcttccccccttttttggaaccgtatccgacagtgtcttgtgatcttttttgtggacgtctttctcagtagggttgacgattcgcctgtacatattccattggtatttatatcgaacattccatacagcctgatctactccaaatatatcgtgatttctccgcg

SEQ ID NO: 4443 - DNA, 274 bp, Aspergillus oryzae
  modified_base (144)..(144): n is a, c, g, or t
gcgtccggtcctggtacagtctgagtattcggaacaaggccgttcttcggcatagggcatctcggtttctgccgagccaatcagtatcggtttcttctcttaaaccaagagatgcatgacgcctggggcttgagggtggctganttacatcttcctcctcaccctactccttctattattactactactactactcctcctcctcctcctcccggagcaggatcggcaacgacaacttttagacccacgatttcacgtttattgtcatctatgt

SEQ ID NO: 4444 - DNA, 279 bp, Aspergillus oryzae
  modified_base (32)..(32): n is a, c, g, or t
  modified_base (34)..(34): n is a, c, g, or t
  modified_base (38)..(38): n is a, c, g, or t
  modified_base (108)..(108): n is a, c, g, or t
gcgtccggttttacaagaaaagtgcgatatananatanataatgatagatacaacttttaattcttacttgattacagattctatttataggtgaatcttggcagcanaagctctttgaattggcgaccgtgtctagaatggtcggtcgcatgcaaacaaaccacacccgttgagctggaatgggctttgagaatctggcctccaccggggcaatcccttcctcttagtacctgttctcgtgacatcgggtggactccgactcccgattctggtgcgaa

SEQ ID NO: 4445 - DNA, 208 bp, Aspergillus oryzae
  modified_base (156)..(156): n is a, c, g, or t
  modified_base (194)..(194): n is a, c, g, or t
gcgtccgatatttcctaaaatttggcgactcgggaggatactcaggtcgaccctggtagtcgtaaataaagctcatcgcttggccagcagctaactttaaacagtaaatactactacgttcgacaaagctcagttgtaaaacctagacatgtacgnagcttaagtcctggttatctttttgtcatagtccattnggtactcaatttat

SEQ ID NO: 4446 - DNA, 383 bp, Aspergillus oryzae
gtccgcccacgcgtccggtataacctcaggagggaattatatgtatgcagtcggcatcactcagactttcagcaggccttgttagtcgagatcgatgtacgacaatggaagttgcgatatactcattatgttttctcgaaacccttctttcaccaattgtttttcctttctattcaagtataaatcataccatgccattcgctattgtttcgcatacccctcgacattttttccatgtatgttttatcctttcttgatctttttgttcctttgtatgcataaagtatctacctcccattttgtgttgcttattggtttgcgcgctttcgcaatgtcctcttcccagcgaacccgagtggaatcgaatgtatagctctttcagt

SEQ ID NO: 4447 - DNA, 235 bp, Aspergillus oryzae
  modified_base (21)..(21): n is a, c, g, or t
  modified_base (89)..(89): n is a, c, g, or t
ggtacgcgtgggcccgccggnaagtcgcgcaaggcgcacttcaacgctggctccggcgtagcgccgtgtcatcatgagcgcccctctgnagcaatgaactccgtgagtaagtacaatgtccgctctctccccatccgcaaggtagtactaggtcaccattgtccgtggtaggccataaggccgtgtagggcaatatcaccagcgttttaccgtctttaagtgggttgtccacgtc

SEQ ID NO: 4448 - DNA, 342 bp, Aspergillus oryzae
gtccggactagttctgtttgaatctacaaaccgtattagtcagttgcaagtagaagtagaagaggtgtacttcccaatttaaagcccttttcatagtttgtaccttgtagccgaaccacaactggaatgctgaaccctcccatcgcagcagaagcggccagtatcgactcggcaatcatatcacaacgaacaatccctggtatatgatctgattagctatgaaccttcgaagtcagtcaatactcaccgccatatatattgatgaacagcgcctttgtgcgggaatcgccctgtagaattgaaaatgcctttgacaatgtctcttttgtcgcacctccacca

SEQ ID NO: 4449 - DNA, 324 bp, Aspergillus oryzae
  modified_base (324)..(324): n is a, c, g, or t
gtccgcccacgcgtccgcccacgcgtccgcccacgcgtccgctgattgaaccatgtgctagctatccaccgccaccaattaattctctccaggcggccattcccaagcaccgccgaatcctcctcttcccttttcccccctcgctgtccggttgatccgcaattttaactttgcctaatcccgtctccctggtaccatccgtcggttggccgcataaatttctggatcttcacttagtcccaagtccatagaccgtctcatcgggtaactacgaaccccatcagcctccacaattctacctatgacatagcccacactagcttn

SEQ ID NO: 4450 - DNA, 345 bp, Aspergillus oryzae
gtccgcattcgtaccctaaacaatgaaccccttgatgctccttccactgcccaatccaagacataccccttgcgtttgttgatcccccatatcctcattggctccattattggcaagggtggtggccgtattcgtgagatccaagaggcctctggtgctcgtcttaacgcttcagacgcttgtcttcccctgtccactgagcggtcccttgtaattctgggtgttgcagatgcagttcacattgccacctactacgttgctgtgacgctggttgagcagctcacggaacgatttggcgggccggcagcgtctgcctatgctactcgcagtggcgggcctgctgga

SEQ ID NO: 4451 - DNA, 214 bp, Aspergillus oryzae
  modified_base (55)..(55): n is a, c, g, or t
  modified_base (104)..(104): n is a, c, g, or t
  modified_base (141)..(141): n is a, c, g, or t
  modified_base (175)..(175): n is a, c, g, or t
  modified_base (180)..(180): n is a, c, g, or t
  modified_base (195)..(195): n is a, c, g, or t
gtccggaaaatgatgaaatgtcataggctagatttaaaatttagtctataaatgnaaagtgtaagcattccacctcaagagtaatatggcaacatataaactgnaaatcattagaccgtttctgaaaccagtagtgaagtntgttatttaattcgaaaacccgcgaaaaaccttnccacngtttgaataacaatnaaattgttactagcgctgc

SEQ ID NO: 4452 - DNA, 448 bp, Aspergillus oryzae
  modified_base (301)..(301): n is a, c, g, or t
  modified_base (408)..(408): n is a, c, g, or t
ggtctcgtggccgagatgaccaatcagcctaaggtcaacattacctaccatccacgccctgcagatgatcctgctgttcgtcgaccccagatctcgctagccaaagctgtgttgaactggtgcccaacaatccccttgcaggaagggctacgaaggaacgattgagtggcatgtaagcgagcgagtcgtgtcctagcccacctgttcaatttggatatgactattcgacagtccggatacggattaagaaacacttagttgtaccaagcctcctacctcaaaaggtttctgtcctcgatanaacagcttcgggccggtaaaatagcggtgggttactggttttcctgctaaatgttcccaattctcagatctggaacttatgatgaaaggtcgccaaatgacgaattnaaacttctagaataaaacagttattccgtcgaagttgggt

SEQ ID NO: 4453 - DNA, 317 bp, Aspergillus oryzae
  modified_base (28)..(29): n is a, c, g, or t
  modified_base (122)..(122): n is a, c, g, or t
  modified_base (137)..(137): n is a, c, g, or t
  modified_base (153)..(153): n is a, c, g, or t
  modified_base (162)..(162): n is a, c, g, or t
  modified_base (178)..(178): n is a, c, g, or t
  modified_base (207)..(207): n is a, c, g, or t
  modified_base (224)..(224): n is a, c, g, or t
  modified_base (279)..(279): n is a, c, g, or t
ccgcccacgcgtccggcaatactaacanngaggctatcgatagaagtaacatcttacgtggtgaccgcctgcgtcatgcaaaaccccgtactcaggatggatatagtgaagggcctggggangatcatctacccgangatgttgtttacgganagtcagganggtctgccacgggtcnaattatctaaagttctaatttttaaagangatctggtgattttgtnattcatctcaagtgggaacggtgggcagtatgtttcttccctaatgttttttganaaacaaaagaattgctccccattttgctgtttaaaaaa

SEQ ID NO: 4454 - DNA, 226 bp, Aspergillus oryzae
  modified_base (197)..(197): n is a, c, g, or t
  modified_base (211)..(211): n is a, c, g, or t
ttctgtcgctaacctttgaatttcggttctacaattatatcaacaggaaacaagtcaatctcactgtaggctatgggttcgtccgccattttattatcttaggcttctggtgacatgctctctgctcacaacaagaggtttttctcttcttctgcgacaagtagtcgtttcttcattactatggttttagtattctntttgtcaatcaagnaatatcaattaatat

SEQ ID NO: 4455 - DNA, 278 bp, Aspergillus oryzae
  modified_base (256)..(256): n is a, c, g, or t
cgtccgcccacgcgtccgcttagatatcatgtattaggtttctagctgctctgaagcctgcgatttccgtcttgttcttaccttctcatcgtcaaaattttggcctggtgtacagctaccctttcttgtctgtttcttccaatttttcttgttttacttgagtgtccttcctttaagcacctcatggttcatttgcactggtcaatgcgtgggcgaataaaaacaaaatgggatatgcaatcagaaacgaagaaantagcgcgcatgcctgccagccc

SEQ ID NO: 4456 - DNA, 260 bp, Aspergillus oryzae
  modified_base (104)..(104): n is a, c, g, or t
  modified_base (118)..(118): n is a, c, g, or t
gcgtccgcccaatactcgttcactagtggattccccttcagcatccaacattccgccaaagtctgccttagggctgctctgctgatctcacgcatgttcccaantctacccataccanaaccgattataaacgagccaaagagcccgcaggggatgacgttacaaccgccgaaccagcttcctcgaactatgccatcatttgcctgctgtttgatgcaaggcagctacgctatgctaatgatattctacaaagcgcgcgt

SEQ ID NO: 4457 - DNA, 361 bp, Aspergillus oryzae
  modified_base (245)..(245): n is a, c, g, or t
gtccgcggacgcgtgggcggacgcgtgggcggacgcgtgggcggacgcgtgggtagttctgatcgcgatctagaactagaagaaacatcacaagcgcaagtccagttccagttcatcgagctcgagctcgagttcaagctccagtgattaggtggcttaaaagaagcaaacgatgtggtaacgctggtgatactttgttttcgcattatcatgaccgcaagagccggagcatgatcttatccgtnagccagacgttcgctgttaaatgtttgactttttgtttgccgaagctttctgttcttccgttacttcccctatccttaagcttaaaccaatatcgccaatttttgaaaataaccgc

SEQ ID NO: 4458 - DNA, 326 bp, Aspergillus oryzae
cgtccgtggaagaaagcgcggtggcaacattataaactgttttcattcttaaatctgctccctattatgatttatcttggatcagtcaccacggccatccgttagttgactagtcatagcaaccaaaatacgaggagcatagggttaattcccaaatatctgtcttctaatatatttctgatgtagttaagagttaggtcgcgtcggccataactgacgatgtttgttattatacagtatatagctgaaagttatcctattataaattttactggttcatcattgtacatactcccggaattacggtgggcatactccatttgctc

SEQ ID NO: 4459 - DNA, 281 bp, Aspergillus oryzae
  modified_base (78)..(78): n is a, c, g, or t
  modified_base (247)..(247): n is a, c, g, or t
  modified_base (252)..(252): n is a, c, g, or t
tccgcggacgcgtgggcaaccgaccgcctttaccctgacaacgcatactcttccacaagccattgatgatcccgcacncttctcctcgattagcctctattcccaagcccatctcgcctcccctcagtctaacgctgttcctcgcaaatcttcctcttttcatgatcaagcacctacgtctgattcggtgcttttccttcgtgttactgcggcggcggacttacttttctcttaacaaagcactaanggtanaatgttcccccggttgcagcgggatatca

SEQ ID NO: 4460 - DNA, 301 bp, Aspergillus oryzae
gtccggacggcttatcatcggagtcaagcactgataaaggtgcggcttctgcagttatatcatccgtcttatgaaaatggttacagtacctgcagaaagcctattagaataaaccattcaagaatgcaaataaagaatgtagttcgctgaacatactcttctgccttcgcataatcctccaatttgaatacatagatttccagggcctgcctgtgctggcccattttactgaagacaatggctcttgcttcgaagaattcagggttctattgcatggtttagtaagggcgccataagccaa

SEQ ID NO: 4461 - DNA, 257 bp, Aspergillus oryzae
  modified_base (252)..(252): n is a, c, g, or t
ccgcgctcacgcactgaaccgagagcttgtgtttgcacgggagcgtttgcgagctgcacgcattgccaatccccaagatctggcgacctttgtgcgagcggttttggcacgattgcaaccagtctcagacgttgagactcgtatcggctttgatgcacctggaaaaggtgtctttaagggcgtttatgcccctggaagtcttacaaaagtttggcatgaggaagcactgagagctcaagaggccatttgaanaaatg

SEQ ID NO: 4462 - DNA, 284 bp, Aspergillus oryzae
ccgctctgcggccgatcggacacctagccagctggaagcccagtccggcgcatgagcagactcataaatcatgtttcgcggataccctatccagtccatgtcaaacgttgcccttcctcacttcatggcatctggaatgccacttggcaacggcacgattatttacagcgtgcaagatcacgcaaatacataaatatcattctgtataatacgttgaagtacctcactattcgaaagacagtttttgtcttgcataagaaggatgttttgaagttcttgttcta

SEQ ID NO: 4463 - DNA, 311 bp, Aspergillus oryzae
tccgcccacgcgtccgatcacccactcgtcttaagcctgcatatatcgacggtgtgtggcgttatgctcgcgcgaaagtagggaacatactttttgcaagggaacttagccttcggttgatgcaggaagaggatccggcaagtagcaagatttacgttaatgcctttttcccaggtaacatcgttaccgatcagtggagtgtttgggatgagtatatcggagaagccctgggttccctgtttaggctcctattctcaatcattggtcagagcttggaagatggtgctgcaaatgcaattttatttggccgc

SEQ ID NO: 4464 - DNA, 373 bp, Aspergillus oryzae
  modified_base (74)..(74): n is a, c, g, or t
  modified_base (112)..(112): n is a, c, g, or t
  modified_base (309)..(309): n is a, c, g, or t
gcgtccgcttcctttacgtttggccgatattgatatttgtgctccctttggagcttaccctcttcaactgatanatatatgcaacggcgtcaattggttccacagtcggcangaacaagtccacgtccagtgctgctcgccctgatgcactggcacaaatgcccactggggacccgtctttgttttggtttttgacttcaacgtcgttcgttttgcagtgctggtcattgatttatggcctagaactctgccaattttgcttgttttcttggctatagctgttcattgtgtcaggctacggacagctangaatcaacatatttcgtctttcctttaacaacctacataatcctcctttgttctaaccagtttc

SEQ ID NO: 4465 - DNA, 301 bp, Aspergillus oryzae
  modified_base (192)..(192): n is a, c, g, or t
  modified_base (225)..(225): n is a, c, g, or t
  modified_base (229)..(229): n is a, c, g, or t
  modified_base (237)..(237): n is a, c, g, or t
  modified_base (252)..(252): n is a, c, g, or t
  modified_base (277)..(277): n is a, c, g, or t
gtccgaaacttttttactgatttctcttcataccttttcttatctttctttgagagcggggtgagggttggtacgcgcgagatgctgtttcaagtagcttgtgcttcactgttgcggaagttagaaggaaagagggttggaagccgactggagaattccagtgtatctggtgacttagtctccctaactganacagttatccccactggtgtctctagtcctgtntganatttgcancaatgcattcttctngggctggtacccactaagccagacntgcgccagttctgctgtgcatgag

SEQ ID NO: 4466 - DNA, 228 bp, Aspergillus oryzae
  modified_base (144)..(144): n is a, c, g, or t
  modified_base (152)..(153): n is a, c, g, or t
cgtccgcaactccaactcgaaaaaacctacatctacttccgcaaccgcttcctggagccactgaagtctctcctccacgccttcgagagtgatctcacccagaacggcggcgacggcaagatcgaatctgccgtcggcgagaanatgtgtcnngtaggcatggcccggtccgtgggcctcgtctctcatgctgtagaacaggtggaggatgccgtgggcgacgccttc

SEQ ID NO: 4467 - DNA, 419 bp, Aspergillus oryzae
  modified_base (224)..(224): n is a, c, g, or t
  modified_base (304)..(304): n is a, c, g, or t
gcgtccgatctctccctgattatctcttgttcgttaacggggagttttatctactccaactcccaactctccccagttccttaccccccgccacccccaatatgaaaccttcccaacagaatcacggcattctcaagccccatagatgccgtcgtgtaacacaggacccccgatctcaacccatgtctgtcaactagtaggaactgtctctcggagaccactgnaatgggataaatcctccctagctcattcatggatgttagagatattgttaaaaggccgagtcggctccgaattagaatgnaacccttttttcttcttttttcatgttctttccgtttttcctgttctggaaacattaatactatctttcctttttttctttttgtcgcctggtgaaaatgttacttaactggtct

SEQ ID NO: 4468 - DNA, 288 bp, Aspergillus oryzae
  modified_base (241)..(241): n is a, c, g, or t
  modified_base (258)..(258): n is a, c, g, or t
  modified_base (270)..(270): n is a, c, g, or t
cgtccgcccacgcgtccgcccacgcgtccggttgacacgtacaaggagaaaggctgggattttgtgcaaaaggctttgaatgagactggatacgtggaaaacctgagcggtcttaaggaggttcaaacaatcgctgaagccacagctgccgatattgagtgggatgatacctctggcaccgatgatgagttagaggccatgtgaactagcggatggatgttacgtactctttttgaggcgnagttctttgagctggtnagacttgcgcgnaaaatcattgtttcaagg

SEQ ID NO: 4469 - DNA, 422 bp, Aspergillus oryzae
  modified_base (7)..(7): n is a, c, g, or t
  modified_base (70)..(70): n is a, c, g, or t
  modified_base (138)..(138): n is a, c, g, or t
  modified_base (287)..(287): n is a, c, g, or t
  modified_base (298)..(298): n is a, c, g, or t
  modified_base (408)..(408): n is a, c, g, or t
  modified_base (418)..(418): n is a, c, g, or t
ccgaaanatttgaaacccaaaccagatgtggccattttgggaatcgccggccgggcaaacctcaatgganaacccttcgatggatccgcagctgagtttgcattacaggagatacaatggctcgggagcccctctcangtgatatggtgcttgcatgatgaaagctgcattccaccatacagaatcgacaccctggctgccacggccgcagtcgagaaggaaacggcgtcaaaggtcttgcatctaacacatgccgaggttctataggttaggacctgttaggccanctaaccgatanattaatcagcaatcacacttcctatgccctcaatccgactcggcggacgttaaatacgttaccaagaccctttcttttgctgttttaaagccccgccattactacccttnggctttggcnaacc

SEQ ID NO: 4470 - DNA, 256 bp, Aspergillus oryzae
  modified_base (225)..(225): n is a, c, g, or t
gtccgtgcagatcttcttggtttgagacatccttccattatctagacgttcttttatgtcctgtttgcccccctgtccagggacggttacgaatgatgacatgtaaatgatggatcggtgttactaggcgcccttttgtcttcctttttaattctcttctatttcattgtcaaatcttcaaaatgttgaagtccagatcgattctatgattcttattaattagtnaggctttcagaaaatctcgagctagctacct

SEQ ID NO: 4471 - DNA, 255 bp, Aspergillus oryzae
  modified_base (18)..(18): n is a, c, g, or t
  modified_base (142)..(142): n is a, c, g, or t
  modified_base (174)..(174): n is a, c, g, or t
gacccacgcgtccggtanaatttccgttcacatgatgactaatgcaaagaaggaaaggtagagaacgtttatgagggagttggttcggagttcgactgttttgtttgtcttgggtttatgtcagtttctcgggtggtgatangatatttggacgaactgttgatggacttgatntcccctgcgaatgagtttcactgtcgtttatcatttctttttcaattttcacagtctaataacatgctagtccagtagcca

SEQ ID NO: 4472 - DNA, 394 bp, Aspergillus oryzae
  modified_base (154)..(154): n is a, c, g, or t
  modified_base (183)..(183): n is a, c, g, or t
  modified_base (323)..(323): n is a, c, g, or t
  modified_base (369)..(369): n is a, c, g, or t
gacccacgcgtccgcaaccatgttgacatcgcaacctgcgtctccaatatcaaagcgggaatggtatctgtcaacgattttggaagctactatgctgtgcagctgcctttcggtggagtcaagggatccggatacggtcgctttgcgggagaanaaggtctacgtggcgtgagcaatatcaangccctctgcgttgaccggtaccccaagttaatggcgactcgcatcccgccacgcgtggattatcctatctgcaagggagatggtagtcgtcagaatggaaccggcgcttgggaaatgtgtaagggcgttcgtttgaaacnggatatcagtttgactctggccggttacagttactggtatactcanactgttgaagaacatgttatttggg

SEQ ID NO: 4473 - DNA, 378 bp, Aspergillus oryzae
  modified_base (21)..(21): n is a, c, g, or t
  modified_base (354)..(354): n is a, c, g, or t
  modified_base (368)..(368): n is a, c, g, or t
gaagatcttggtgttgccgangcacttggcacacaatcacccggcccagcatctactaaacgacaccgcgagccggaagatgagtttgagctggccgagagtcctactccggacgcaaaacgttccagatcatcatgatctccagtgagaatagtttcttactttcccctagtccagacctctactctgggctatatgggctgttagatttgtctaaccagccactgcacctttcggttcatactggttacagtattgtttccgtcgggtaccactagtaattatgacataactactaacgaaactatccggcgcatcaagttctcacaaacacttcactgaaccaggtatgtntcaccctccataancctgttcatt

SEQ ID NO: 4474 - DNA, 381 bp, Aspergillus oryzae
  modified_base (145)..(145): n is a, c, g, or t
  modified_base (147)..(147): n is a, c, g, or t
  modified_base (311)..(311): n is a, c, g, or t
cgtccgggctggagctacggcggattcatgactctaaaggtcctcgaacaagacgctggggaaacattccagtacggcatggccgtcgcccccgtcacagactggcggttctacgactcggtctacacagaacgatacatgcatncnccagagcacaacccctctggctacgagaactcaaccatcaccaatgtgtctgcactctccaaagccacgcgcttcttgcttatacacggcgcctcagacgacaatgttacatatccagaacaccttaacattcgtcgacaagctggacttgtttaaatgttacnaaactacgacatgcacttctacccccgactccgatcataatatctacttccataacgcgcatttcataat

SEQ ID NO: 4475 - DNA, 314 bp, Aspergillus oryzae
  modified_base (8)..(8): n is a, c, g, or t
tccggtcnattaatttcggcatcctcatcggcaagaggtacatcctcggcttttcgtccaggaggcaatttccagccgcctttcagtaatctatccacatattaggcaatcatctcaccggttttggggttatcggtgcctccggatgcgcccgactttcgtcccttgttcatgaacgtctcaaatgcctcgcgcaaggcgtgccctagctcctcatgtcgatggaaggagttgttccaagtctcgtcaagctgctgtttgaaatccagcagccggacaaccatctccgcctcctttatcatccgtcaaagaac

SEQ ID NO: 4476 - DNA, 337 bp, Aspergillus oryzae
gcgtccgcggacgcgtggggatcttgagaaagtatgcgcctacttgcgtgagcaagtgcagtgcgatggtcaggggccggtcttcgtgaaaagatatgtcgtccatgctatcaaggccagtgtaatcgggattacgggtacatcggtatgattaacttgattcccaagcatgaccagtatggtaggcagttttggttttgttatatctctcttgtcctttcttctctcattgtcctgcgcttctcacagcttgtccactccaggcgagcgttattacgttacatgtttactacaaatagtaaggccacataatttagtttaatttgggtttccggaa

SEQ ID NO: 4477 - DNA, 393 bp, Aspergillus oryzae
  modified_base (327)..(327): n is a, c, g, or t
  modified_base (379)..(379): n is a, c, g, or t
cgacccacgcgtccgcagacatactccaattatctccaataaactaatcataatcatgtgcgacgttcctttcctcccgatcttccccatctgcttccaatgcggcacggaccagaatccctgtcgctgtaaagtccttggtccaacattagggttctgtgtgacgattgttgcggcggtatgtactctgtataatacagcgtatccgtaatggtttgtagtactcatgctgtgggtgcagattgtttgttatccggcgtctatcttttgtgggttgtttgtttgactccagaacgggcaaggaattgaattttgcccttttcatcnggtttctatggtgcgaacctgacttgctgtaatatgccggggtatccggtcncttttgaatcaaaa

SEQ ID NO: 4478 - DNA, 217 bp, Aspergillus oryzae
gtccgtaccataattccggttaacaaatggttggcatacgcatcgcctgcttcgatgtgaattgcccacctgtcactaagtgattagggaaataatgaatacacataaacaaaggtgggggaaggaaagtataaagcgtctatgaaaaagtgaaaataatccaaggattagcattctcgatagtggttggtgccagttcttgaaaagtgaaggggtt

SEQ ID NO: 4479 - DNA, 281 bp, Aspergillus oryzae
  modified_base (172)..(172): n is a, c, g, or t
  modified_base (176)..(176): n is a, c, g, or t
cgtccgtattttgtaaatatttttttatttctattttgttttctggcgaaggaccgttagaaagacgctggagctgctcacttctcttgagtaatcagtaattacaaggaaatctgattgttgtttcatgtttcgattcttcatttctttacaatcttgcctcttgttcgangaanatcagtcggatgacgtccacccagtgatagctttacactcacttccgctttgtctggctcatctgaacagggtgggtgacacctggcaattatcaaacaaacgcg

SEQ ID NO: 4480 - DNA, 276 bp, Aspergillus oryzae
  modified_base (181)..(181): n is a, c, g, or t
gtcgacccacgcgtccgatccggaggcgaacgtcgagatcacgaatgaaatgttttcctctgttggcggggggatcatacccctttcggacggcgacataaaagcgcactggcctcattattaaacatcgatgaccattcataatgctttacctcgccaagccagcaccaaaatactgacntaatgggagcagactggaagtgcgccatctaatcatcttgatcctagttacgggtgtcggtggggttagatccacgaaggctttacacttgcaca

SEQ ID NO: 4481 - DNA, 253 bp, Aspergillus oryzae
  modified_base (5)..(5): n is a, c, g, or t
  modified_base (150)..(150): n is a, c, g, or t
ggacncgtgggcggacgcgtgggcgctgctccagcggcacctgctgagtctagtggccctgccgctcaacctactgcccctgctgagacccatgtccctgctattcagcctaccgctggtggctccagtattcctggtatccctgctcantccagtgtccctctcatcaagcctaccgtccctgccgctcagtccagcgtccccgctatccatccaactgtcccaggtgctaacactaccgctcctgccgtga

SEQ ID NO: 4482 - DNA, 288 bp, Aspergillus oryzae
  modified_base (12)..(12): n is a, c, g, or t
  modified_base (21)..(21): n is a, c, g, or t
  modified_base (116)..(116): n is a, c, g, or t
  modified_base (131)..(131): n is a, c, g, or t
acgcgtccgcgngtccgtcantctttccgggttccacgatgttgtgtcgtacctgattacgcgctatgacacggcgcacgatgtgtcctataagaagggctctaaggaggatgaanaggtaaacagattantcgcatctttaactgatcccaatgcagcccatccggaagagcgtcgcttcgatctcgatgcaaaggatgacatccccttcgccagaaaggctatcagtttgtatcttcaccttgaggagcatctgatgaagtcgcacagtaactacctggtgggcaa

SEQ ID NO: 4483 - DNA, 333 bp, Aspergillus oryzae
  modified_base (215)..(215): n is a, c, g, or t
cgtccgacacctcgaccaaaccgtacttcagcttctcagattattcacccgagattatacctgattttgatattagccctgaactgggtctcctagcgagtgcgtccgatgagcgcaagattcagctgttttcacttcgaaccggtgagcaggttccttcacctctatcgaaatatcagtacgatcattccatatcttcagtttgctttgaatcngggaatggatctttgcatgggccacaaaccccaagcatattggtgtgtgcaaaagatacggtggacgaaatggtatttggtgaggggatatatatatattttcatgaaatgccaagcc

SEQ ID NO: 4484 - DNA, 427 bp, Aspergillus oryzae
  modified_base (293)..(293): n is a, c, g, or t
  modified_base (306)..(306): n is a, c, g, or t
  modified_base (335)..(335): n is a, c, g, or t
  modified_base (345)..(345): n is a, c, g, or t
  modified_base (362)..(362): n is a, c, g, or t
  modified_base (377)..(377): n is a, c, g, or t
  modified_base (394)..(394): n is a, c, g, or t
ccacgcgtccggtcatctcacacgagaacaagcgcgggagacctgggttcgactcccagtcggggagctcatctttttgttttgcttcaggattctatctcttttctcgttagtttttgcaagatcacttcagaccagttcctccagttgctgaacagactttcaagtctgtaggaagtgacaagagtcaaaaatagttactataatggacaatatatccttcggtcgacatagccaaatgtgctctgatacaggtaacggtaaaggggattgccgccacaatacgaggtaanggatcttggctgnaactggatgcctttggcttactgaaaagnaggcaggttnttgagcacctgtttcangggcttggcgttatntttgttccttgctgttncgactcggtgtttctcggaaactgttacccaac

SEQ ID NO: 4485 - DNA, 251 bp, Aspergillus oryzae
  modified_base (147)..(147): n is a, c, g, or t
cgtccggaccggttcggtggtttggagttacgtttggtatgaacgtcctgtcgatcgcggttctctgggccagccgcgatctgatctgataatgaatagtcagtccttttggtgccctccaaagacctccgttgagatacatttatnagttcccggtacacctgtcggtatatgattttcggcttttgtcgcttccgtgtcttttgcatggttgagcttcgggatgcagaatccggtgtctcaattacctt

SEQ ID NO: 4486 - DNA, 357 bp, Aspergillus oryzae
  modified_base (236)..(236): n is a, c, g, or t
  modified_base (335)..(335): n is a, c, g, or t
gtccgcagctacccgcaatagatatccaacttccctctcttctctcagcttgaatattctaataccaaattctcctaatcgtgtatcgccactccccggatctaattctttaaattcttgcgcacatgataccatctcctggccttgattgctccagtcaaaaagagtggccatgcgacttacgcttctgccccagttatgtttttttgaattagatcgattgacaaaaaggaganaatctcctttatcggggaatcccatctttgtttttccctctcgaataccggctataggattgtgatttgagatgtctgggcggggcaatctgcattttngtctttccctttttcttccccg

SEQ ID NO: 4487 - DNA, 346 bp, Aspergillus oryzae
  modified_base (54)..(54): n is a, c, g, or t
acccacgcgtccgaaaatttctctcagggaagcatgtcggtcaccgatacccanaggagtcggtggagctgggagtcgctgctaaccttatcatgggcaatagaccgacttgagaacccgagacgacgcagacgaattttacatggtttgagaacatcgcagattgatcggcgcaataatctcgggaagcgtcagaggagtatccggagtacatggagttcaaataataccgagacgttgacgtctccgcttacgggcaaggattgctgaggcgcttttttgtacaataatcttgaatgatctcaaataaagagaccgctaacgactgagcgggttcagtctaaag

SEQ ID NO: 4488 - DNA, 301 bp, Aspergillus oryzae
cgtccgaccagactgacctgccatctgtcaacgttattatcgccacccacaaccgggactccgttcgcaaggcacatgctcttcgtactgagcaggcgatgaagggagagaaccacggtgttgatctgtcctatgctcagctgcagggaatggctgacgaggtcagctgcgaacttctgcaaggcttccagagtgctgaggtgatgaagggcgcctctatggagtcgcccaatgtcttcaagcttttgacctggggatctgtcaaggagtgcatgggcttcctgatgagacgcgctattga

SEQ ID NO: 4489 - DNA, 389 bp, Aspergillus oryzae
  modified_base (147)..(147): n is a, c, g, or t
  modified_base (206)..(206): n is a, c, g, or t
cgtccggcattgcaaatcatggttacatgaaagggtgagttggacgtgggcgctccacgcagtccataaatgctcatacagcccttccctctgactcgcaacacgatctttccctcccccattggcgatcctctcaatgtctcaacngtgtgagcccgctaaatctacccccaaactaggtcctcttctagtaacggggggtaacngcttcatgcgtctcatataatccataaaatcctgggaggagaccccatctgcgaggtccactccctggacatcaacacaagtcgcaaccgccatcccaatgcgcactaatcaccagggaacatatctcttgtctggctgaacgttacaaacgcataatgcgcacttgcaaaacccgttcacaa

SEQ ID NO: 4490 - DNA, 254 bp, Aspergillus oryzae
  modified_base (147)..(147): n is a, c, g, or t
  modified_base (149)..(149): n is a, c, g, or t
  modified_base (153)..(153): n is a, c, g, or t
  modified_base (175)..(175): n is a, c, g, or t
  modified_base (177)..(177): n is a, c, g, or t
  modified_base (192)..(192): n is a, c, g, or t
gggtcgacccacgcgtccgattcaaacatccttatatacattaccgaattttagaagataaacaaacagattctggaacgccatccccaagtgacattgaaagaaagccaaagattgttctgtccgggtcaagagatgggaacgacnantganactgataatctcatgcggaaanancttttcgaaaacaancgcttaaggcgaggttgccaataggatccaacggcaaaaggaaggggtataacagtggaaag

SEQ ID NO: 4491 - DNA, 337 bp, Aspergillus oryzae
acccacgcgtccgctaatcaatcgtgtgcgagttcatatacggcgctttctgttgaagacctgtcagcgctttttttctttttctttttttctttttctttccgtgtttcttcatccttgcagcttcgattttcattgtcacgagaaagcagtctagctttgtactgccttgatttggcgttcgaggtgggagaagtatacaaattgccacaacttggatatgaatgatgaagctacggcttgggagtctgggtaggcgcaggattgaaatttttcttgatttgaacagagaccattaccagaccactttgtattgtacatacttaattgaacgaaa

SEQ ID NO: 4492 - DNA, 280 bp, Aspergillus oryzae
  modified_base (29)..(29): n is a, c, g, or t
  modified_base (167)..(167): n is a, c, g, or t
tccgcccacgcgtccgaagaaccctactntcgatcgtgtcctccaaaagccttcgagtatcccaacttataaccttgatcggacttggggcggtgttgggttaaccaaagtcggacccgaccattatatcaacgtccgagaattgggatcccaaagccccgatgcanaaacgatcgttttcatccacggccttggtgccaacctggaatactacgcgccgcttgtccaagccgcaggactagaaagtaactaccgtatcattctctacgacctcgaggga

SEQ ID NO: 4493 - DNA, 220 bp, Aspergillus oryzae
tcgacccacgcgtccggcgtcatgctttctgctaaactggcggtctgtacaacactgtttcccttcaacgtctttcctaagtgcagttcactttatggagtcctttgcgttctcgctcgttcagtgtctgtcttttgtggtcatgcaccggatttcggtcggctcaggggtatctttgctctggctcgtctgttcgcctgctctacacgctgcatccgga

SEQ ID NO: 4494 - DNA, 279 bp, Aspergillus oryzae
cgcgtccgcccacgcgtccgcccggattcgaagggcttcttcgtcccgcccactatcgtcgacaacccacccgagaactcgcgcgttgtccaggaggagcccttcgcgcctattctgcccattctcaagtggtccgaggaggcggacgtgatcgcacgcgcgaacgacaccgagtatggacttggagcatcggtctggactaatgatttcgagcgcggtcagcgaattgcgcgccagcttgaagccggtaacgtgttggtgaatacacactttatgggt

SEQ ID NO: 4495 - DNA, 279 bp, Aspergillus oryzae
acccacgcgtccggactagttctagatcgcgtgcggacggatgtttctttgtttgtttgaagcctttttctcttatttcttactgattagagcgattatacttttgggtggatggaacctggctggcgttttgtgtctttcttttctcctttcactttctttataccaagtgtttgtaattggctggggggttcttaatgatatcgggcaagaacacgaagtctgtttcatgaattaaaccatatgattattgctcataaagcataaaccatgctccat

SEQ ID NO: 4496 - DNA, 235 bp, Aspergillus oryzae
tccggactagttctagatcgcgagctagaactagtcacaatcgctctcatccgcacaccgtttcttcccccgcgatacgcttccttctacgtcccgctgaacttcaacaaattggatatgcgcgactacctgaaacgtctgtatggggttgatgtgctctccgtgaggagttatgtcgagcagcagaaggttactcggcttcgtcctttgggtaaatttgggtacgggaagttga

SEQ ID NO: 4497 - DNA, 235 bp, Aspergillus oryzae
  modified_base (100)..(100): n is a, c, g, or t
  modified_base (174)..(174): n is a, c, g, or t
  modified_base (191)..(191): n is a, c, g, or t
  modified_base (217)..(217): n is a, c, g, or t
acccacgcgtccggccacggcggtgccggcgtagtcgatccttgacaaggccaagtaacgccgtcggtctcggtgtaccactaagctcaagtctgtggangatcgcctgtgtaccattcatcatgtaatacttttatgtatttgatgtatttaatcctcatgtgctgtattaancttagtatcctgtgtcnattaatgaccatatgtaattaatcantaaattctgtaaccattt

SEQ ID NO: 4498 - DNA, 248 bp, Aspergillus oryzae
ccacgcgtccgcttatctacaaaaactgattcggttccttatctttaaacctgatagcaatcgtctgtgtaaattcctggagttgtcggccttgggtgtgcgccttgctgctgaagggagctaccatggcaaagaggggtatttgattatacaatcctcgaaaggtctggatttccgaagggccttgactcctaccatggtaaaaaaccgtcattcaccaaagtggtccctattcagacatagctcct

SEQ ID NO: 4499 - DNA, 213 bp, Aspergillus oryzae
ccgagaccctatgtccgcttttaattaaaccacacttgcccacccatattactactttatttttggacggacaatattcagaaaatgttctacaaatggttcagtcaccgagcattgtcgacagcttttgtttctactcttgcaaggctgtggtggactttttttaactcgctgcgtaagccagtgacttctgattccaactccttgattttt

SEQ ID NO: 4500 - DNA, 243 bp, Aspergillus oryzae
ccgcggacgcgtgggatttatttacattctccgcgcttgattgaaacattggagctattgtcactccaagcttcacaacaaatggtatttccgtctcgctttgtcactggcgtctggtggttagatttgttctgctgtttgttgagtgcgcgtgtctcccgccggtactgttctttctaaagtatacatgacaggtttcttacatattgcgttttgatacagttctgatgacaatttcattaa

SEQ ID NO: 4501 - DNA, 298 bp, Aspergillus oryzae
  modified_base (171)..(171): n is a, c, g, or t
  modified_base (180)..(180): n is a, c, g, or t
gcgtccgctgatggtggtccatccgcgacactcgttgcctctttgaatcgaagaagtatcactactttatttaccccgcacgatcttcccggaggcttggttgtgttcacaattcctccgacagtacaaaagtcgcgtctgggaaatctcctgcttgcgagacttcaatanctccagcangcgggctctggtatttcctgggggggcacatgtaccaacttccatgaagtaagtcaatttgtggtctgattatttggtctgtgatccctcaatcgcatggtctttgtcttttcctata

SEQ ID NO: 4502 - DNA, 231 bp, Aspergillus oryzae
  modified_base (58)..(58): n is a, c, g, or t
  modified_base (77)..(77): n is a, c, g, or t
  modified_base (153)..(153): n is a, c, g, or t
  modified_base (163)..(163): n is a, c, g, or t
  modified_base (171)..(171): n is a, c, g, or t
  modified_base (199)..(199): n is a, c, g, or t
  modified_base (207)..(207): n is a, c, g, or t
  modified_base (209)..(209): n is a, c, g, or t
acccacgcgtccggaaaacctgaaaaatggcgaatggtcttttaacgtggagtggtanattagagcgaatcgtatanaagggaacgggcttaaccactggtggtcccccgcgaccatcccaaaagacccagtcattcttttgctttaacgacntgcatgacancgcatatnaattctctgcgggaaagtttcactgtgnaacatttnanaggagcttttcgtgggtgttat

SEQ ID NO: 4503 - DNA, 256 bp, Aspergillus oryzae
ggatgtaattacaccccggtcaaatgattccatgaccaagtattcgtgtggacgtgctgatgctattctaccgtttttgatgcctctgtttttaccttgtttgttttcttctctggcgatctggttctgtgggacaaatcggaccttgattctgcttactttacgtttcttctacgggtgagtttgtgattgaccatggtctggctttgctctgtatcccacatcttgggtggggtttccactagaagaattcggt

SEQ ID NO: 4504 - DNA, 307 bp, Aspergillus oryzae
ctttgccaactatgtcagtgttgttgctatcgtcgtcatttatattggggccaagatctactatcgtgggccgttctgggtggattcccggacaatcgatctcgacagtctccggcggttctatgtcaagactggcgatgaagaatccgtggaggacaaaccgggcgcgatggggcatgtctccaaagcggttcgatttttgttcaattaagtttcacgcgggttttgatggcgctggcgtggatgaagagggtaatactgtgtatgttaccgactaatactgtttgaagaatctattagataattc

SEQ ID NO: 4505 - DNA, 488 bp, Aspergillus oryzae
  modified_base (339)..(339): n is a, c, g, or t
cgaggccagcttcagtagtctcccgcgacttgaggacacgctaccagcaagtgaccatggtttccgagttttgccctgtctacgcacctttttttggtaccgtaggctgtgcgagtgctatcgtctttacttccttcggtgcggcctatggcactgcgaaagctggtgttgggatctgctccatgggtgttctgagacctgatctaatcgtgaagaacatcgtccccgtcgtcatggccggaatactcggtatttacggactggtcgtttccgtattgattgcaaacaatcttgcgcagaaagtaaccatctacacgagcctcgtccagatgggtgcanggctcgctgttggtcttgcagggttggctgcagggttcgctatcggaatcgtgggtgatgctggtgttgaggggaaaagcgcaaacaacctcgactctatgtgggcatgattctaattctaatttttgcagaagttcttgggtctttta

SEQ ID NO: 4506 - DNA, 453 bp, Aspergillus oryzae
aagatggcgacatgagcatcctagcccacaatttttactgggttgtcgacaccactttccacgacatgctctgggcacgaatctccagttacgtacctcagtcgatcaacggccgtctagcccgaggtatcaaccgccgcttccgtgtataccgatacgtccccggtgctgagtaccggtgccacattgacggtgcctggccgccgtctggcattcttcccgatgacacgtatgtatatgatgcctcgcccgaggataagaggcagagctctatgtacaccttcctactatatctgaatgatgagttcgagggcggagagacgaccttcttcatgcctgcttgcgcggggagggaacccttaatgcgtacccggtgcgacctgtcatgggagccgttgcgattttcccgcatggagaggccaatggggccttgttacatgaggggactggggt

SEQ ID NO: 4507 - DNA, 311 bp, Aspergillus oryzae
  modified_base (285)..(285): n is a, c, g, or t
ttcggcacgaggcaggtttggaacaatgtctcgtcggaatgggtagatgtgacacctgtaccgggtgcctatgtcgtgaacctaggcaatatgatgatgcgatggacaaatgatcgctatctatctaacctccatcgggttatcaacaagagcggcaaggagcgctttagcgttccattcttcttgtctggtaaccctgactacatagtcgaagtgtctcccgacctgcatcggggccgggcctaagtacctcccataactgtgggtcagtggattggctgggcnaatacgcggaatacgtatgggccagg

SEQ ID NO: 4508 - DNA, 211 bp, Aspergillus oryzae
ggcacgaggcaacatttctgcctccctagcaaaagatgaacaccacgtttgcgagttccttgttgaaggcattgccttcagttggtcggcaatgccaacttcgtacctcttcgattcggctcatcagaccgttctcctcaacccatggaacatccgcgtcagatgctaaagacaagacccggcaaattgagagacagattctgaatgcgaa

SEQ ID NO: 4509 - DNA, 381 bp, Aspergillus oryzae
acgaggaggacttcttcctcgagcttcgcaaacaaatcaccaatctgcggcaaggtgacaatgtcgcgggtggctgacttggagccttatccctgatcaatagatagtcgatgcgaggaaccaccggcgtcacgactatcaagccaacattcagcggcagctgggtccccgaaggggccatggaaaacaggagctctctggtcgctggccgattggatgacagtatcctcgaaatcactagatgggcagcatgaatcaatgcagctttttgacaaatggtcgttggcactatattttggtgtgggataagactaccggggtagcgccttctgtacgattgtcagatagatctggtagaaaacaaaattctaatccaaaaat

SEQ ID NO: 4510 - DNA, 245 bp, Aspergillus oryzae
  modified_base (7)..(7): n is a, c, g, or t
  modified_base (10)..(10): n is a, c, g, or t
  modified_base (44)..(44): n is a, c, g, or t
  modified_base (59)..(59): n is a, c, g, or t
  modified_base (158)..(158): n is a, c, g, or t
  modified_base (178)..(178): n is a, c, g, or t
catggcngcngctctagaatagtggatcccccgggctgcagganttcggcacgaggcangcacaagccatcaacggcctcgctaccctgaacgaagtcgtcacgggaactgagcgcgtccttgacacccctctcccgacagcgtacagcatcgccatngcgcaaatcgcctggatctncgtcatgtctctacctttccaactctacaacaccctcacatgggtgaccttcccaggttcaattatg

SEQ ID NO: 4511 - DNA, 222 bp, Aspergillus oryzae
cacgaggcaaagtctctgatacggtggaaccgtgccttggtaccgtacgttaccgatctttggtgaaagtttaccttgcaaccaaacaacaatccaatccgctgtgcctgggaattgccggtcccatttttgcctcttggttcctgggctgacggccagtactcattacttagtacttacttgtccgctcccttctccgtttctcccggaactcctcacccc

SEQ ID NO: 4512 - DNA, 220 bp, Aspergillus oryzae
cggcacgagggccgatatggagatgggagaagtagttagccgcatgaaccgtgcgcaaatcgaagtggctgagcttcagtctgaccgtgacgaggcacttcgccaaactcggaaactgcaggctgagattcaggctgagcgggaagccttcaaggccctacagggctgatctatatctctccggattatgttacgttattcttcctgtatatatactgac

SEQ ID NO: 4513 - DNA, 222 bp, Aspergillus oryzae
  modified_base (77)..(77): n is a, c, g, or t
  modified_base (100)..(100): n is a, c, g, or t
  modified_base (135)..(135): n is a, c, g, or t
catagctctactactacggctgtagggcctgttgctggtcttgggatccatcggaattacaatgatatctaccgcangctttcgataattcctttctacnatcctacagctcctctgccccaaaacccgcagacnaagccgccattccgcgttgtcttccatgtctacaaaccttctactccattccgcaaatctgctcctcctgcaccggactttagagtc

SEQ ID NO: 4514 - DNA, 236 bp, Aspergillus oryzae
  modified_base (167)..(167): n is a, c, g, or t
  modified_base (193)..(193): n is a, c, g, or t
  modified_base (195)..(195): n is a, c, g, or t
ggactttaccttcggcgtcggggcctaccgcggagttgtcccagggagctacatactctttcagcccctaggtgacgacctttgctatggaggtatccaggttaacaccggccttcctttttccattttcggagatatcctgcttaaagcacaattggtcgtcttcnacacgccggtccgcgcctcgaatttncnaacaagctgtgaaatcgctacttggttggtaaagaaggttg

SEQ ID NO: 4515 - DNA, 219 bp, Aspergillus oryzae
  modified_base (43)..(43): n is a, c, g, or t
  modified_base (64)..(64): n is a, c, g, or t
  modified_base (137)..(137): n is a, c, g, or t
  modified_base (167)..(167): n is a, c, g, or t
  modified_base (205)..(205): n is a, c, g, or t
tgcgcgtcaactggaccggtcggatgccagccttcgtcccctnagagcatctaccctcacttangtatgattattgtcaatgtctggtgacttacccctagcaccgagaagtagactggctccccctctctgatagnccgcgtacatacacgttctcagcaacgtgnttgcccgtgtactctcgcaccacgtgcagcgttagagnctttccaaagtatt

SEQ ID NO: 4516 - DNA, 225 bp, Aspergillus oryzae
  modified_base (68)..(68): n is a, c, g, or t
  modified_base (138)..(138): n is a, c, g, or t
  modified_base (189)..(189): n is a, c, g, or t
acatgaccggctcagatcgccagaccttagaaacccccttacaaccaagcagcgactcgtagcttctnagagaatgtcagctcagacagctctggactcaactcagccaccaccttgtcgcagccagataatcctctnacactttgcgtcgagtgacggagaaatagattcgtagctcagaagttagtnacatcgttcctatgcttatctcggacgtttgtcagg

SEQ ID NO: 4517 - DNA, 420 bp, Aspergillus oryzae
  modified_base (90)..(90): n is a, c, g, or t
ggtgcactttcaaagtgatctgaagaggtgaacatggctacgagaaatgttacaatttataggaataaaggaccctacgacgctatcccnaaagcgttccgtcagtgttccgactattcaggactattgtgaagcaatgtgttggacccctacaatcctattgttgagcgtttgaataaggcgcgtttttgtgttgcgcggcctatcgaagcgaggtgttgagcgcctcagaactcaggcacgaaccgggacggttcgtttttccgaaggggggatagttgtaacggcgggttgcctcaggcaactagatcccccgcaggcgagccgccagcgggccgttggcttacgtaacgcacaaatatatttatgttagaatcgcgcagaggattccgatcctcaagcgattcgttctgttatact

SEQ ID NO: 4518 - DNA, 266 bp, Aspergillus oryzae
  modified_base (28)..(28): n is a, c, g, or t
  modified_base (31)..(31): n is a, c, g, or t
  modified_base (34)..(34): n is a, c, g, or t
  modified_base (72)..(72): n is a, c, g, or t
  modified_base (99)..(99): n is a, c, g, or t
  modified_base (123)..(123): n is a, c, g, or t
  modified_base (128)..(128): n is a, c, g, or t
  modified_base (191)..(191): n is a, c, g, or t
  modified_base (219)..(219): n is a, c, g, or t
  modified_base (228)..(228): n is a, c, g, or t
ttcgagtaaaaaaaaaaaaaatacgacngcntcnggcgaacagcacatcgtcttgcaatttacgaatcatcnctttatcatcccgggcgttctgcgaanagtgcaaaaacctattgagcgttncgttncttctgcttgaacccgggttcattattttttatctttttcgggaaggagtgcaaaaatcgttnactttcttttttctttctcttcttcgcngcatagcangcgtgcgcggcatacgacttataattcttggttttttt

SEQ ID NO: 4519 - DNA, 522 bp, Aspergillus oryzae
  modified_base (422)..(422): n is a, c, g, or t
cgagggtccgtcgtctaacggttgcactttctcgtgcccgcctgggcctttacatactaggtcggcgcgaggtatttgagtcgtgctatgagcttaagccagcatttgacctattatttcaacgccctgacaagctaatgcttgccccgggcgaaatgtttcctaccacgcgatcgctggacgatgagattcaaggcacaccgatggaaggggtggaacatcttggccaatacgtgttcgaaatgacccaggctaagctcaaggcaataggcgagcaagatattatggttgaggatgcgatgcccaatgatgaagaaggtctagttggatgaggacgagatcatgcttggttgcaggttgaaagaaccagatgaagacctctgcacgaacacgtcttcccggggcgtaaatctcttgcggtncaagtagttacaagtgctttttttgtcttgtgtaatgattgaggatcgttgagaccattgactcgatatagttgtaaaatgctcaatgatcgtggcgttt

SEQ ID NO: 4520 - DNA, 424 bp, Aspergillus oryzae
  modified_base (409)..(409): n is a, c, g, or t
atagtttgactcgattgaaatttaacctctgataattttctcgtgtatacacatctaacctcctgcttacaagaaaacaaataccgcttgacagctaaaccgtgattttcgaaattcggttctgcgctgcggcgctgttcatgcgctcgaaccgccgacatggtatcgcgaaagcgcacccgttccgaggtagacgctgctccggagcagccacctgaggagtctggtttgctgcaccgactgcggaattgctgggagtttgcaaatctcatgcagtatatagcgatctttggcaaacctatgaagattgatgaggagtttggaattgaagacttagagaaagaatgcttaaaacctggttcttctgaaaaaactccttggagaattggactctgttttcttgaaaatnggatctcgtcgcatc

SEQ ID NO: 4521 - DNA, 557 bp, Aspergillus oryzae
  modified_base (515)..(515): n is a, c, g, or t
tcggcacgaggatcttttcccccaatcgcctctataaccagactataaacaattctaatctgcatccgttcatccattctttgactttcaatcaacaagataccccacttgcatttgtttatcgcattgtttaactactaaactaaaccacgccgccatgttctccgtcataatcccaggcagaccctgcctcacagatatcgtcccagtcgacccccaacccaacggccaagccacgaaattcgccttcactatccccctcaccccagatctctccgacctcgtcgtcttcctcctcccgggcaccgtcctccccccagacacagccgccgcaatctacatccagttcccctccgaccccaacggcttccgcttcatcggcgccctcgccaacgaaaagcccttcgccatcctccccacatccccacccccggaactccaaccaggcattgacagcaacattgggcatctcattggagccatcgcaaccgttcgcgccgcacttgaggcccttngaggcagaaaaaggggcctcggggcagctagtccgcccaaac

SEQ ID NO: 4522 - DNA, 455 bp, Aspergillus oryzae
aaatcttgatgagcgatcgctttaataaatctactctgtacttgggaactgaatagtatcttcaactcttacttcggtagcttaaatcctccaggtacattggtctgaaacaccctccttggatcgacgtcctggctcacgcgcttcaatagctccacattcttactcttatagctagagattggatcctgccatggcgccgcatagttgaggtatacgaatggctcgtggacacctaacttgcgttgcatcgttatcgatgttatcgaaaagctcgcgcgcagccttctcaacttcctcgtcatctgactcgtcgtcccaagttgcgctaagaagtgttacaaccagcgaaaccagacgcatcagctagacccaatgcattcctcgaggggggggcccggtaccagcttttgttccctttagttgagggttaatttcgagcttggcgtaatcat

SEQ ID NO: 4523 - DNA, 517 bp, Aspergillus oryzae
ggtcgatggtcaggtctacagtctgcctaccgaatgtccaggctgcacgaagcctggcttcgttaacatgaagaaggtgaacatcccctacttcaaggaggtcatcatctggagtacatcttgcgagcactgcggataccgtactagcgaagttaagactggtggtgaagttccggagaagggcaagcgcatcactcttagggtcgagaatgaagttgacctctcgcgtgatatcctcaagtccgacacctgcgctctgcacagttgaaagagtttggaagtcacttgttcagcctggtacatttgggcggacgtttcactacccgtttgaaggtctgctcaccgaaatccgttgatcaacttgcacggcccagatcttcgaatgtcgacgaatgccgagcggccttgggaggagacagcatggcatccgacactaaagagaagtggactcgcttcttctctcgtctcgatgctgctatcaatggagacatgaagtttgtcatcacttctcgaagat

SEQ ID NO: 4524 - DNA, 449 bp, Aspergillus oryzae
  modified_base (217)..(217): n is a, c, g, or t
  modified_base (230)..(230): n is a, c, g, or t
  modified_base (233)..(233): n is a, c, g, or t
  modified_base (306)..(306): n is a, c, g, or t
  modified_base (348)..(348): n is a, c, g, or t
  modified_base (378)..(378): n is a, c, g, or t
  modified_base (388)..(388): n is a, c, g, or t
attcggcacgagggtctgttgctgatgattggtagggtttcctccccggtcagggtaaagtgcagtcgggccatgcagagggggctgcacagattctgaaggcacggaagaatttccgaccccgagatgacttcgaggcaaagctactgctgacgctgcgtggtcctgtggtatggctcccatgagtaaaaagctggggttgattactgaatcgagnaaacagctcttcnaangtctattcgtcagcagcattgaccttagcgggcgaggaatatgaaagtctggttgaaagccgaccttgatgcngggcacaccagacgggcatattgatgcgttgtcttgcccgantgccaggggatccgagaccgcatcgcatcnaccaatgccnggtgatgcttgagtttgaatcactacgacacgaaacttcgggcctctaccaagagctatca

SEQ ID NO: 4525 - DNA, 259 bp, Aspergillus oryzae
aaaattggagctccaccgcggtggcggccgctctagaactagtggatcccccgggctgcaggaattcggcacgaggattgctttccaggacctgtccatggcgttttttgagtgttaatcgtggatttccctattgttgctgctgatatgcagccgaaaacccaactcctaatgtttcacaaacatcatataagaatctttaatgatctacataaatctgtatctccctatcaatgtcacatatgcagcgagcacctga

SEQ ID NO: 4526 - DNA, 596 bp, Aspergillus oryzae
  modified_base (544)..(544): n is a, c, g, or t
ttcggcacgaggaagatgccgcctcggagatcccataagaagtcacgcactggctgcatccagtgtaaaaagagacgagtaaagtgtgacgagcgcggcccaccttgcagtaactgcacaactcgtgggatagaatgcgcctattccagtacacccgctggggccctcatgccaaacacagtgtcagcgagccctagctctccgcaggtgtccataagcccaaacgccattcccagtcaatcaccaccagtcaccacacactacgatctccgctcattagagctcatgcacaaattctcaacagagacctattacagtctctccagcgacgccttagaccaccgagtatggcaaaccaccatgcctcgcaaagcactttgaattcgacttccttctagacggcatcctatcaattgcttcactgcacaccgcggcaacaaaaccccccctagaagcacgttcatacattgacacggcctagaataccagaaccgagcattgacgcccttccgaaattgcttttaacaacatctcgccggcgaantgtgatgccatctatgctacttccttatcaccatcgccagttgtatagcaat

SEQ ID NO: 4527 - DNA, 280 bp, Aspergillus oryzae
ggaagatatcctttgccgggctgagctcgacggcttcatggcaaccgacagcagaaggtgtaatataatacacaccctatccaaagcgccggactcatggactggccgccgaggacgcatatccgaagagctcctaaaggagtacgcggctccagaagatgagagtatggtcctgatttgtggtccgccagccatggaagaatcggctcggaggatactgttggcggaaggatggaaagaatcagaccttcacttcttctaaattggggattatccaagg

SEQ ID NO: 4528 - DNA, 280 bp, Aspergillus oryzae
tggcatcaatgggatcgctgatcccggctacaagtcgcgtctgcacgcgctggttggcgacatcatgatgggtcgtgctaaatcaccatacttggaagcagataatgccgatggggtttaccttgatcatgccctcaaccacgtgattggaacatttcccaacctcgttgccaagcaggagtttgatgaacttttgagcctcagcgaagaaaagggagcgctggagcagccggctgaggtccgcgagagtcttaacctgagcttactgaagaaaattgat

SEQ ID NO: 4529 - DNA, 299 bp, Aspergillus oryzae
tcggcacgaggctcagactatcaacgtactctaacgcgtctgttggcttggtctggtgtgctaggtcctgctacaactcccgctcaagctgccccccttgtgcagagcatgagtacattgttatatcttacctatccttaattacatcacacttttttcttttccactatgcttagccgtgcagtattgcctctgacgaggcccaacaccctcgcctctgcggttcgtttatccgccttgccaattacccactctcggtggtacgcaaagaacaataaacccaaggctccttacaagct

SEQ ID NO: 4530 - DNA, 282 bp, Aspergillus oryzae
gcactctcagcacacaggcatatgagaatgaaaacaacgccaagacaaaagcagacgaagagtcgcaatgggtgtataacatgtaaagcaaggcgggtaaaatgcgacgagacaaggccgtcctgtcaacaatgctctcgtcaaggaactacatgcgatggtcctcggaagatgagccgagcgacgatcgacaaaatcatcgttaccgttcccttcgggaaaaaggcgatgcgtctgctaacttgcccgatcacacaagctatcttagacgattcctggtct

SEQ ID NO: 4531 - DNA, 278 bp, Aspergillus oryzae
cagttctatctcggacgcagatcctctctgacaagatgttggtggcagccgccagagcgttagcttctcagtctccggcgctacaggatccaaacaggcctcttcttccggatgttgagaatgtgcgcgagatcagcgtgcatattgctcgggcaatcatcgagacagcaatcgaggaaggatatgcccaagaaaaagatattccgagtcatgaggaagagttggaggagtggatccgttgtgcagatgtgggagcccatttataggccgcttgtcaa

SEQ ID NO: 4532 - DNA, 233 bp, Aspergillus oryzae
  modified_base (90)..(90): n is a, c, g, or t
ggtctaaaggagcaagagcgacgcaagcttgaggaagagcggaagcaatggaatgatcaacagcgacgatgggaagaggaggaggagcancgccagcgcgaggagagagaggccgaggagagactggagaaagagaggctgcgccgtcgggaagtcaatgatacccgcctaaatggacagttcctcagtcaataccaagcgagtcaagtgggaccgaaaccaatctcccgccc

SEQ ID NO: 4533 - DNA, 293 bp, Aspergillus oryzae
tcggcacgaggatgtcgcactagcgagacggttccagccgatcatggtcggagagccgtccgtgcccgccactatatcgatcttgcgtggtataaagaacaagtacgaagtccaccacggtgtacggatcacagacggatctttggtggcggcagcaacttacagtaaccgttatatcaccgaccgtttccttccggacaaggctattgatctagtggatgaggctgcctcagccctacgactgcagcaagaatcaaaaccagatgtaattcgtgaactagatcgagacatct

SEQ ID NO: 4534 - DNA, 272 bp, Aspergillus oryzae
atcgcaaacctagtactgatcgcattcgaaatccaggtcgtccccgtgtcttctttgacattcaaattggcaacgaaaaaactggccgtattgccctggaattggtacgttagttatagatacccaatcccccgttgctcatggttgtacagcagcctttgctaactaccccgcctttcacagttcaacgatggtcagtcccattgtcaacggagatttttctcgctacacaaacactgaccctgtacagtcgtaccaaagactgcagagaa

SEQ ID NO: 4535 - DNA, 230 bp, Aspergillus oryzae
  modified_base (146)..(146): n is a, c, g, or t
cgagggccggactcgaaaccagatgctccgcgaactatccttgggcgcagaacgatctatcttctggagcccagaagagtcccatctggccggcagtacttacaagccttcacagattatggctgaaagaacaggccttttaaganaaatccctagccccactgaaaccaatcggctgcctctgaatgcgagaatatacagacctccggcacaatgcaatgagtataggc

SEQ ID NO: 4536 - DNA, 279 bp, Aspergillus oryzae
ttcccctgatgggccacttccatcagcaatcgttgttgctgccgttgctgaggtagttgtggccgccggggtgtggttgattctttgtagacgctcctcttagggcgttgtcgtcgccctgttcgcagtatgtcgtcttcacaccacaggaggtccagggagacctcccatgccgagatgcccattggtcgttatactagactggatgaaattggccgagggagttttgctacagtttatcagggtgtgcatacgaaatcacgtacttacgtcgccatc

SEQ ID NO: 4537 - DNA, 281 bp, Aspergillus oryzae
agaaaattcagagatcaacaacggttcaaatggatcgcttcatgaacatcctgcgcaaaccaggcgccaagcctgagatccagggtgtcgctcccacccaacatctggccggaaaagagaccctcgaccatccaaatgccaagggctatatacccaaaagcaagccgaagatgcttgatcgctggttggacttcgtcgtccgagtgtctggctctgagcccgtcttcttcctgatcctcgcgggactcctcacctgggctctactcgggatcaagtacggg

SEQ ID NO: 4538 - DNA, 290 bp, Aspergillus oryzae
ggattttgatggaagagatcacgaagctctccgagacgtacgcgaaatggcctgcgtgcaccgacaaaacggcgttccgcttttcagaagcggaaggtggtgaagcacaaactccaccggaacctgctccatccatggagtatagcagtggcgatcaaattcctcttttcatgtgtggagatttcaactcatcgcctgggtcagcggcgtacaatctgattgcgaacggacggctaacggaagagcatccggatctcgagaagcgactttatggaaacttgagccgggtt

SEQ ID NO: 4539 - DNA, 349 bp, Aspergillus oryzae
acgaggttttgtctttcatcttcagtttggcatcatggcatttaatgcggcggttgttcctgtcttggatacctgcgattggcgttttctcttgatatcatgtaaaacttcaatgaacagcttcattactatactattggaacttgtttctttctccttgcctcgctgaaatgaatgttcgtgcactgggattaatcattcattggccctactctaaagaatctcatggagactgcatcgcccgtcacgtattttgtcaagctttatattacacttctgttcttgagcgctgttgttggaccttgtatcataacgatgaaagcaaatggataccgctcctattcattgt

SEQ ID NO: 4540 - DNA, 585 bp, Aspergillus oryzae
  modified_base (437)..(437): n is a, c, g, or t
  modified_base (468)..(468): n is a, c, g, or t
  modified_base (492)..(492): n is a, c, g, or t
  modified_base (516)..(516): n is a, c, g, or t
  modified_base (551)..(551): n is a, c, g, or t
  modified_base (553)..(553): n is a, c, g, or t
acgagggcgccttgcaggatcaggaacgcacgtcgcacattgtccgacctccaacgccaaactcgcgtctggaatctgtcgcgtgccggacttgcagcgcgccggcgttaatatcggcctcggcaccgacggcgctccctgcaataatacctgcgatcttctgcaggagatgaagctagcgggtatcatacataagagcttatcctatgacccgaccgccgtaccggccgaatctgttctcgagatggcgactatcaatggcgcccgtgccttgggattggaggagaggatcggtagtttagaggttggcaagaaggctgactttgtggctattgacactcgtcggattcacttgcagccttggtttaaccctgtcagtgcggttgtctacacggctaccggtagggatgttgatatcgtggttgtggacgggaagntctggtgcgtaatggaaaagctgtttaaccntggatgaagaggaaatcgttcgcnaggcccaaaagaaaaaattgaaanaggttggtcgccagaactggctttgaaaagaatcncnttcaaggctcggttggcccggttagaaatgaa

SEQ ID NO: 4541 - DNA, 599 bp, Aspergillus oryzae
tgtcggaattccaacagcacatgtgtgctgcttacgaccttttgcgagaagccagacagaagcggaggacagcgagagacattatcgaagcttatctaggaggggcttcccgacgggggtcgcgaattgacacgacgcttttacaatcacgagggtttgccgaggcggtacacacctacgacgtcctccgattgcgcaccgcccagcagaccattactatggaacgcttcgcgagactcctcgttacacacaaacggtggacaggccgcgacaatccggtatgggaacgctgtctcctccctcaaatgcttgaggaatggcaagattttctaccacagtccttccagtaccgcgtcagggatggccaagtcaatctcctaggtgcgacgcactggggccaacatagattgacactccacaatagggttgcagtccgtcgacctactgcggagaacggcgttgtatagacgaggaggccgtggaaatggacgacgacttcgtctgggcgcagtatctacgttctaacccggatctcgacttaaacgccgcgccacttgaagccggcttcttctccgggagtggttcgaaaaggaaccgca

SEQ ID NO: 4542 - DNA, 574 bp, Aspergillus oryzae
ttgcacttggtacgagatgaccgaccgaatctcctacctaccgggcgggctggtccagggcaatgtgtcctatgcagggtgtttttacgacctcccgcggggcctccagacgcatgtctatgctccgaccggcttggacatccgggagaaatggtcggtctgtgggaatatgcctggggagccgcgagagcccgtcgagctgggcattcccgatgcaccccgagaagggctgtacctccgcgaagatgtgaatatgcgctcgcagatttgggccaccgcgtttgtaaaacggacgctcaagagggcccatgcggtactcgtggatcggttggtcatcaaagcggatctggaaaagcaaaggaaggattcaatatcaggtcttccaaccgactcgtccatgcccaagccggccagtccgtcctactaccaaaagtcatcccatgaggaagattcgatgtcgccacagcagaaccgctggtcaacgaacagtgacattgctgaagttcctgggtcgttgcaggcggggcagcgactcgatgaacgacgaggtcaatcccgtgtatgaactcgaata

SEQ ID NO: 4543 - DNA, 502 bp, Aspergillus oryzae
tattattttagaccgttagcactccacctggcagatcaaaagaaatgccgcaaagagaaagaataaggaacatgcgctgattgacctgccaggtggagtgctaacggtctaaaataatacaagagacaaacgccgaagaaacccatcatttgccaagacgaggccgcagataaacgtcgggagaaaaagcttaccagctgtagtactggttctgagcggagattttccggtcaggcagctgggtccaaagctgagtcttgcgcttgcgctgcgacacagcctcgcggtccttccactccctgattcgtgtcttctcttccttcaggacaaccgaaagagatgtgtacggggggcggaggaagttgatctggcctctggcacggtgggtcgtaatctacaccatatggaccgcggttgaaccacgcctgttcgatgtaaatggaagtcgggtcggtgatagtcttacgctctcccgacttcagagtgatcgtgatgggcttgc

SEQ ID NO: 4544 - DNA, 588 bp, Aspergillus oryzae
ttcctcccaattactagaatgctaatgcggtgtaggagctcaaattcggcgtcgaagcccgtgcccagctccttaagggtgttgacactcttgctaaggctgttacttccactcttggtcccaagggtcgcaatgtcctgattgacactccttacggctctcccaagatcaccaagggtatgtcgctacaccccgaccgtttccaaaccaaaccgaaggatgatactgactgcatgaagacggtgtgaccgttgccaaggccgttcagcttcaggacaagttcgagaaccttggtgctcgtctcctccaggatgttgcctccaagaccaacgaactcgccggtgacggtaccaccaccgctacctgccttgcccgtgccatcttctccgaaaccgtcaagaacgttgccgctggctgcaaccccatggatctgcgccgtggtatccaggctgctgtcgaggctgctgtcgactaacctgcagcagaacaagcgtgacatcaccaccggcgaagaaaatgctcaggtcgctaccatctccgctaacggcgacacccaacgttggtaagctcatctccactgctatggga

SEQ ID NO: 4545 - DNA, 594 bp, Aspergillus oryzae
  modified_base (546)..(546): n is a, c, g, or t
gcatgtctccctcaaatgcgcgggatcaacccaatgtggcgcctgaccagggccagccaccgccattcaatgaaatcactccggtcgtgagcaacggctctgatggacgaaactatcaatccacagagggtctgaggaatcgagacgctgggttcggagatagccagccgaaaagctctggccaacgggacacaagggaagccgcccagcaaaacttgcagtccgattcggcagaaccccatgtatcgtggttcagtcgagtcgccgatagatacggcagtctggagttagagaacaaggggagtgtggctcgcgatcatttggctttagaacgaacatttctcgcatggttaaggacatctttagcttttgcgtccatcggaatcgccataacacaactcttccgcttgaacagttcaagttcaagcaccgcgggtgccgactactcgtcgcaagcccttcccccattgttatcaccaccattctatgatcccacaaccattaaggtgactgccacttccgagcgtcttcggagtatcggtaaanctctcggaacaactttcattggtgttgctatttttaatcttgctgaat

SEQ ID NO: 4546 - DNA, 535 bp, Aspergillus oryzae
  modified_base (487)..(487): n is a, c, g, or t
gggacggtcggcgtctcggcggctcatcccgcaatgggtcgtcgagcgtcttaaccggagtcggagcagctcaccaggagggagatggtggttcgcgaaccggaacccaagcgaagaacgggatgagaccgcgccccctgggtacacaaatagtcccacttctggggaaaagagcgttggtaaagaacaccgactggaaggtatgagttttgatgaagccgagttcggtgatggagcgcaatccgatccgttccgcttcccgagtccgccctcgtggtctttcaaccgagtcccggatgctcacggccgttcacagatgaccacagcgctaccggggtccacctctgatgacgatgacctgctcgacgacgatgctagcaaccaggcagttggtgggaggagacttcagcgattcggacctacggctggcctctttagcggacagccccggaggtcacggagcggtatacccggggacccgatggangagacaccaattcaggatatccctcctccattggatgcagatgacgac

SEQ ID NO: 4547 - DNA, 625 bp, Aspergillus oryzae
gagggaatgtcatctgccgtctgggagattggctctgaggcaatctgtaaggtcaaaacttgggcggaggggatggacagtgaaagcaacacccttgcctttgtcgcatccaggtttccacacatcctacttcctgaggtcacttactcgtgggtcgatgagcagctggaacgtaccttctttatttgaggcgggttcaaggacgtaatcttgcaaaggcctggccatcactaacctcagagcaaagagctcaagtcgctgctactgtcgcacaatattgccacgaccttgctgaagtgacctcggagaatttgcagtcagcaacaggttgtggagtccttgaaccctttctaaccgtggatgccgaagcatcacacccatcctggaaaccttaaccattggggccaatttctcgcactgtggctgagagacatctccagaaattatcaactcaggcttgtccacctgtcggagaaagatttcatctctatcatgccgatctcagtccgacaaatattcttctctcaagcgacagtagcatcgaagcaatcttggattggaaatcagctggggttttattcgaaattttgggattcctctgaagcccgtatcgaaattggaagga

SEQ ID NO: 4548 - DNA, 494 bp, Aspergillus oryzae
aatttactcagctgggcaatctcaagtctcaccagaataagtttcacgcaacaacattgcgggatttgacattgaaattctcccaagtaacaataggtgaccccatgagcccgcaagatagaaagttgtgggaatactttgccactctttacaagaatagcaacaagggaataaagggtcgtggaaaggatcgtaggatctcccctacctctaggtcaggacctgggaaacgacaccagaccctaggcaacaatgacgacaagctgcaacgccctatttatgaggaatcatcggtctacaccgggggttcaagtagtgacgaggaggatgcggaggcctattatattgatagacaaaatcattgagccgtactggtcttctgttcgatcctgtttctacttattcttggctgtgtgttgcaatgtattcgggattgttctacgataccaggtttgtttatgttgggatgtttatgggagcctctccgcgatcga

SEQ ID NO: 4549 - DNA, 282 bp, Aspergillus oryzae
cagagcttgaaatccgctctcttccacatcaatcgcagtaccggcgacctcgagaaacaagaaagtcttttacttgagcaagtcaatcatcccggaccgaagggaaaggatctagctgctttgcagaatctggctggactttatgaggagaaaggagagtacaagaaagcggagaaacttgcccgtgagacgattccggcgctccgggaacatcctatcttggggagtaatagtccgcaggttcttgggtctttgaggatcttgattaaggatttggcgggg

SEQ ID NO: 4550 - DNA, 674 bp, Aspergillus oryzae
  modified_base (470)..(470): n is a, c, g, or t
  modified_base (502)..(502): n is a, c, g, or t
  modified_base (529)..(529): n is a, c, g, or t
  modified_base (584)..(584): n is a, c, g, or t
  modified_base (596)..(596): n is a, c, g, or t
gcccattgctactaccgaaggtggatataaagaatggagaagaagggaaagtccacacagcactctctgctatgaatgttatcaaccagtcgacttagatccctgtgacacgtgcacgcgggtgtatcatgagtcatgtgagcccactggcagctactgatcgattgaacatgacattcggcggtggtattgcgctgtttgtgtatggcgcggatgacatataaatccacccatcattactcctctggcttcacctgtgttgacgccaggcgacattgatcgtccttctcggacaccacaaagtcgatcaattagggcgaccgccgaagctgtacaaaccgatgatcaaccccggggccagaatgcccaagccgctacccagacacatccaggtcagggcagggacactaaagcccgggtcgacccacgaccatatacaaacatctcatcgcgtgccggctgccgtcganagggcaaataaacagaccaaaggatgacgacntcgaagatatcatcgacgaattctacnccacgaaaatctcaatttaacaccctgccgcaggaggtcaatctgcactttcgantgtatatcgtgnacttgaaggcgtacctctgcttcaacagaaaaatttcgactccaatttgaattaaaccccgtatatcaggaatcaatt

SEQ ID NO: 4551 - DNA, 609 bp, Aspergillus oryzae
  modified_base (543)..(543): n is a, c, g, or t
tcggcacgaggcagccatccatccagcccaccctccacaaccaacattgtggccgacctcgaaaagaaaggcaacccctccccacctgagtccatagccccaatgccgggccagctcgaatccctccgcaccgacaccgtcgtagccccaaccttcaaagaagccatgaacgtcctcctcagcctctccaccgccgccgtcgcaatcccctacgcctgctccttcggcgccgagctcgccatcaactccatcctcggcgacttctacgcagaaaacttcccctacatgggccaaaccaagacaggccagtgggccgccatgttcggtcttctcaacgtcatctgccgcccggctgggggattcatcgcagacctcctctaccggcacacacaatccgtctggtccaagaagatcctcctctccttcctgggcgtaggaatgggcgccttccagctcgcgctcggattctctaatcccaaaagcgaagccaccatgttcgggctcacagctggctcgcgttctttctagaggcgtgtaacgganccaacttcgccgtggtaccacacgttcaccctttcgctaatggcatcgttttccggcgctgtaggc

SEQ ID NO: 4552 - DNA, 613 bp, Aspergillus oryzae
  modified_base (466)..(466): n is a, c, g, or t
  modified_base (528)..(528): n is a, c, g, or t
  modified_base (531)..(531): n is a, c, g, or t
  modified_base (582)..(582): n is a, c, g, or t
ggattcggcacgaggcttggcggctgctaacccgctttacgggcggtataacccacgtgtttctcccgtcgagaatatcaaccttcctgctgctttgctttcacgtttcgatgtcatgttccttattctcgacactccctcacgcgattccgatgaagaactggcacatcacgtcacttacgtccatatgcataataagcaccccgaaaatgaagatgctggtgtcatgtttacccctagcgaggttcgccaatacattgcgaaggcacgtacctaccggcccgtcgttcctgcatccgtctcggactacatggtcggtgcatatgttagaatgaggaaacagcagaaggtcgatgagagcgagaagaagcaattcgcccatgttactccacgtactttactgggcgttgttcgtctttcacaggctctcgctcgtcttcgctttagcgaggaagttgttccggangacgtggatgaagcactacgtcttgttgaggtcagcaaaggcgtctttgttctaacgatggncangggaactgcggatcagactcccagcagcaagatttaccacctcattcgctncatgtgggaaaacggtgcggcagccgtgggc

SEQ ID NO: 4553 - DNA, 543 bp, Aspergillus oryzae
  modified_base (398)..(398): n is a, c, g, or t
  modified_base (436)..(436): n is a, c, g, or t
  modified_base (476)..(476): n is a, c, g, or t
  modified_base (527)..(527): n is a, c, g, or t
ctttatctgagcaactgccgtcacgaaagatactacgatgtgcagagaacatctaaatcaaaccaaatttgattttcaaacccgaagccggatttttatcccccacatcctgacagggattcaggtttcagatgatcatgaaaacgtggctctggcatctgtgcgtgtcgtgaagttgcttttttcggaaatttcttcgatggccttcaggaatttatgactcttgatctcgaatctcataccagccatcggtctctcggggtcctccccatgatggctggttcattagtctctccgaaagggaagaaacggagtcatatgaaaccactagccttgtcatacattttgaaccaggcagtaccaaacgcgttgaaatcctcggtgtcctgccctaaaangcaggagagtaaaagtagtcgtaaatggcgaggggaancacacctcgtacgatgaggggaaacaggtaaagaggccgnaagctatccagagcaaggcataatctggactaagttaacagcataactagncagatatctctgctag

SEQ ID NO: 4554 - DNA, 643 bp, Aspergillus oryzae
  modified_base (221)..(221): n is a, c, g, or t
  modified_base (547)..(547): n is a, c, g, or t
  modified_base (567)..(567): n is a, c, g, or t
  modified_base (609)..(609): n is a, c, g, or t
ccccgggctgaaaggattcggcacgagggtttgaccaagtgggaatgttccgagtctggagttagccgctcgtcctttctcaaggaagcggtttcgaaagcttataggtcgcggtgtgacagcctgtgccaatggtctccacgaacatcggaaggcggttccccttctgctagcgataccagctctccgtcaagtgccaattcaagagcggcccagcttcnactagagaatgaacgtcggaggcaggcagcctacgctgaccagctacgaaaccaacggaaacggccagcgaacgaaggcccccactcgttttcagacgaacgccccatctccaaatactcattcatcatgagccgccttgaaggtgtcccatacgagcaacgtccgccaatgcctgcaccacccacgatggcatcttacgctgcttattgtggtccgccgaccagtcaatatccagtcaagtcccaaccgccgtttgccacgtaccaacaaccgcaggtccgcgatcctgtggatcaggctatagatatgatggtccgggagctangttttcaagaacaagacccnaatgggcgctgaaagttccagatagcggggaagggatcaacntgaatgctgcagtatctctactttatccgggaac

SEQ ID NO: 4555 - DNA, 349 bp, Aspergillus oryzae
  modified_base (243)..(244): n is a, c, g, or t
agaactagtgggatcccccggggctggcaaggattcggcacgaggcttcttcatatcaagcacgaacagatcctcctgctctaggattgattcccatcctcagtgtccaactctacatcgatgaataacctcgttgcaatccattgtccgatcgtccctgtgctggtatgccgtaaccgcagaccgggtggttgcttgctagcatttttggaagagcctcgtcctccttaagactggctttgnngtatacatgccttgagaatactcggtgatggggtaatggaatatattgtttgtttagtttgatagactgaccaccgctcgattcgttcgttatttcgtcggtgct

SEQ ID NO: 4556 - DNA, 523 bp, Aspergillus oryzae
cgaggctgagatgtcccagaatggaaaactatcgccagaagatatcacaatggaattggttgatgcagaaattagcgagatcacgacacagccgtctcagacagcgttaccgactgccgctgggaacaaaacaatatctatcccggacgtttccgtaaagccagaacctgatttactattagtattcaggcccttcttgaaattagatggctatccaccctggcatattcgacttacggagatgtattgtacaggtgacaagagcaacagcataacaggctatggggaggctgtcgaataccagggctttcttaggggtttatggcattatgcaggggctcaaatgaggttcgggcgttgagccctctctccctcctggctttcgttacttccatgctcacctctttcccgttgttggaaggacctgaatcgaggcttcgtattaagcgtcagattgtttcttgatgagtgactttgggaagatggtctagaataatgtactacacctacatttcccgcaggc

SEQ ID NO: 4557 - DNA, 467 bp, Aspergillus oryzae
aaagggtgttgctgattccctgatcttgcccctttatcgtcgtctttcaactgcagctattgcccttactttcaccacttacatctcactctctctctttcgcgagtttggtatagttgtttcagcttacacatgccctaggacaggtaaggtatgctcgtatatctgtttggttgcccagttgttgtaaatgccgtcttcttttcaccttcctttcctcacccaggtatgttcactgggtgctatatcgcgctctcttgacgaggcactccgtgtaataggaacactcctttcgaaaattgtatagcacgatacccctgatgattttatttttttgttggtgttgagtgattgtattctacactactttatctgcggaatcgccaggtcctccaaccaaaacgccagcttcctagtcatctactaattttctccttgggatactgtacacaatgaagcgagatctg

SEQ ID NO: 4558 - DNA, 578 bp, Aspergillus oryzae
  modified_base (287)..(287): n is a, c, g, or t
  modified_base (460)..(460): n is a, c, g, or t
  modified_base (504)..(504): n is a, c, g, or t
  modified_base (518)..(518): n is a, c, g, or t
  modified_base (527)..(527): n is a, c, g, or t
  modified_base (561)..(561): n is a, c, g, or t
gcgttgcatgcccggaaaggcgttcaagggcctttacaagaacttcatccgcgaccaaatcacttcccttgcgcgcaatatcaccgcagggtatgttgtgcttcgagtgctggagagactcggaaaggacgatctccaaaacgctctggagcgaattgttcctcaggttcccagtcttctcgagcggtcaagaatggtcgttcccaaggtgcttattgagcggtgtctagtccgtggagttgacacagcaccccttgctcgggcactggaggaagcctacgataaanaccctgctcggagactggaacaaattttgcggcttgagagcacaacccaagaaggatttagaagaatcagagcagaaaccaaagggggccaatgctgctccaagccaatcatcaacaggagagaaactccatggtttcgctacttgcacaaacaatgctcactgctcctgggncgataattggcttatttattccaattctgttggcccaatcttcngaattccctcgttnaaaatcccnaaggatcctaaccccatctcgcgtttctaaagcnaagctcttaaagtttcc

SEQ ID NO: 4559 - DNA, 578 bp, Aspergillus oryzae
gacctcccagctccggaagcagcacacacgaatcagtatcaagtgccaggggagaaggacaatactaggagggcccgtcctcgagccaggacccatggcgacgatgacctcgccgagggggttaaaaatctcaatctggctcctggacagggatctcctgctcccacagcgtcacaaccagaaacccctgtgaagaaagaaagcactgcagcgggtatcttgaggcgattcagcactcgcagaacaaaggatcgcggccgcgatccagaccgtggcagggtttccagtccgcatgccccatcattaaacgtgcagccacctgccgactcggcgtctccattgtctagagggtttagtatgagaagggccagacgtgccgagccaacccctgcaaatattccttctgtgggaagccagccgcagcaccaagatcttctcaaagctccagggatcacaagagccggcctcacgatccaacaaatcctgggaagatcgaacagtgtcaactcggctgattaccgagcttcggcgggcagcacgcagggaacgatcaagatggagcagggcagccaccccaa

SEQ ID NO: 4560 - DNA, 570 bp, Aspergillus oryzae
  modified_base (339)..(339): n is a, c, g, or t
  modified_base (495)..(495): n is a, c, g, or t
  modified_base (528)..(528): n is a, c, g, or t
cggccttctggctgtcacggctatcatcctccttggcacattatatcgtctctatttccactccaaccccctcccacaagttatccgaccaagcggtagcagcccggataatagcaatcccaagggaaaagaaaaggaaacgggacgatacggccatgacgacccagaagctgttccgcacccgatcgacggtttaatccgcaacgcagagcaagaatgggaccgcctcctcacgaaaaaggtatacaacctcaccgacgcagcagcgcaataccgacagcgccgcggtcgccacccacccccagggttcgacaagtgggtagacctcgcacagcaaanagacgcgattctcatcgaagaccttttcgaccagctctacgatgaccttagtccatactgggccctgggagcccaaggtcatgcggacacaggcatctggttgggagccgcgtatcatggtgcgtaaccacacactcagctccgctggccacacangcgtgaactggctagaagtctggatggatctcntgtccaccatcgccgaatttccccggacatggatatcccatt

SEQ ID NO: 4561 - DNA, 599 bp, Aspergillus oryzae
gggcactcccaagcatagaagtctgaccggaagtgcgagcgccagcgcggagagtggtgatagtggggccagtgcgaatcttgattcggaaaactcagcccatagcagccaaatcagcttgaatgctcaccaagctgcgacccccgttcgttgaccgacgcagcccgccgtcctctgtcccccctttcatacaagctgagctttagaaccctgttctatacgtactcgtctggttacttcgcgttccattctttccccccttggctggaaaacgctgcccgtgggggtcccctttagctttgtacaagaatttctttgtaataagatgcttggcaaggggggtaggagcgactcaaggccttatattctcgttcagttcattacatatacaccgagggacatacggggcatcttctcgttttatgctactactttgggaatggtcgagcgcgtgttgcatgtggtcatttgctttcactttactctccttttcttcgagcactctctattttaatgaaggcgagcacacagctcgatccgacaagtatgatttgacttctcgcaattataccacaaaacatcatctccagtcaccacga

SEQ ID NO: 4562 - DNA, 649 bp, Aspergillus oryzae
caaaggcgaaaagcaagcctacttcctgcgccacgaaggctacattggcgccgtcggggccttcctccgcagacagccagccaactggggtcgcaggaatagtctcgacggtagtgccatgccacaggagctcaggagtagctctagttgacgagttcaagaaccatgcttccagtgcaactggaagcttgcatgattttctttgttatttggtttacccgcccttcttccgatctcttgggcttctgatacccgctttttagttctccgtgcatgttagacaaaagaatatacatcctgcagatacattttgccaatctttcgggacgttttgcagtccgatttcgccatggcctatttacatttgtaccataatatcctaaatatcttttcaacttttggtgtctacgagcatcatccatccaaagccgagttgtttttctttcgttgattccgggttctttgtctctttcttcttattcttattctgttttattttttggttgacatggaattttgcggcaatattccgacgaaagcatgcttattggggctatacagatgcttgaagggaattattggatggactgcaaacgacacagccaaaaatggtaacatctaactgtctaaaatttctttatacaatggt

SEQ ID NO: 4563 - DNA, 590 bp, Aspergillus oryzae
accctgtgcagtttacgagccgtgtcgccctgtctccggtttatcatctccgtgggattttccctaaatatccgcacttgaaactagtgctcgaactaggcagcatataattcttgcgatataagatggcgacgaaagcagccttcaaacggcttactcgtgaataccagaacatacaaaagaacccaccgccctatataattgctcatccatcggagtccaacattcttgaatggcattacatcctcactgggccccctgggacaccgtacgagaatggacagtactggggtaccttgatgtttcctccagagtacccgtttgctccacctgccatccgcatgcataccccaagcggccgatttcaaccatctgctcgattatgtctcagcatcagtgatttccaccccaagtccttcaacccagcttgggaggtttcgacgattcttatcggactactctcctttatgactagcgaagaaatgactacaggtagcgtcagtgcgtcagaagcggacgaaaaatgctggctgccccgaacgaaatggtggaatcccccggtggaagttctcacgtcattttccacacca

SEQ ID NO: 4564 - DNA, 351 bp, Aspergillus oryzae
ggcttggggatgacttttcgccgcacagacaactcgagcacagatttaaaaagcaacattaagaagtgtaaagttgacatcttctttactcggaatggtcacccggtaggaggttgggaccttcacgaagaaattgatgaagacgctggaaggattgagggattagagggagacttcgacctttacggtgcgattgggttgtttgggggcgtagacttcgaggtatgctttgaccaagcgggttggttgtggaagatgtagttatgctaaggctgttattgcctagattgctctgcaggggaagcatagcaacaagttaatagatttaacttaatgcaactggcagaacca

SEQ ID NO: 4565 - DNA, 235 bp, Aspergillus oryzae
cgaggacaagatggaggctgctttgtaaactgcgggaccttgtccggcttaattgctgttctcacgataatgaaagcttgtataagccagtagattactcagtgaatgctccctgggtttgtgtctttactgtgtattatctttcgctgaagcgacatcgaaggcgtcctactcacaattgatgcttatcacaattttgcggagctagggtgtgtaaaattacatactaggtttt

SEQ ID NO: 4566 - DNA, 210 bp, Aspergillus oryzae
gggtgaccctagaagatgttattgatgagagcgcggcgcatgaggtgacgcccaaaatggttgacgaagcagtgcgattcattagtgatgctctcgccgccaatgacgaggatttaaggaagtctggatttgttcgtgaatccaagatataatcggattatagaacgagttaagtacacaatgataaacaatgtgatcctgatcaatacc

SEQ ID NO: 4567 - DNA, 384 bp, Aspergillus oryzae
gacgagcgtggtcccgtcaaggccaccaagtacgcccctatccacgccgaggctcccgagttcgttgagcagtccactgagggtgagattcttgtcactggtatcaaggtcgtcgacctgcttgccccctacgcccgtggtggtaagattggtctcttcggtggtgccggtgtcggtaagaccgtgttcattcaggagttgattaacaacattgccaaggctcacggtggttactctgtcttcactggtgtcggtgagcgtacccgtgagggtaacgatctgtaccacgaaatgcaggagactggtgtcattcagctcgagggggggcccggtaccagcttttgttccctttagtgagggttaatttcgagcttggcgtaatca

SEQ ID NO: 4568 - DNA, 639 bp, Aspergillus oryzae
  modified_base (557)..(557): n is a, c, g, or t
ggtctccccgccgtcacctctccacccccatgaatcaattggttttaggggctagaagggtaaactaaagagcaagacccctaaaatcattaaatcgggtcccgtgttttgtcctactcctcccgctttcttctttcctttccccatcactcatttctactctgtcctcttcgcgctcccaacgcgtctctatttcttgcccttcatagctctatctctccctctcccctgagattaatttgatcattcgatttttcaaaagcacacaacaacaacaacaacaacaacaacaacctccttttcgacggaagtagagcagggctccctcggtcattacctccccattccattataatgtcctctccgtcgtcggcaggaaagcgcaagcgcagtgcttcccaacatcttccgtccaacgtaacctccgctgaccttctgcaacttcatcacgcgatgcgtcgggcgaagatggcgacgattccaccggtccgaatactcccttgtcggttaagtacaggaaacaggcaccaattgatgtacttcagcgggcaatgttncgccatcgaaaccggctcggaagaactcagcggctggcgagcaaaacaatggtctgccaccgaagaacctcggcctaacaaa

SEQ ID NO: 4569 - DNA, 247 bp, Aspergillus oryzae
gaccgagaatcagcagtggtatcagcagatgaagaggggatgatctttatgagctctttgatttgaggagacgaatcaatatcatgtgaacatatatgtttcttttgcttttctttctttggcttggttacggaagaatatatcggtttccagcaataaccagcatggcgttaggtatttttggttcacaatggtgtcgaagatgtctgctatacttcgattgcaatgtatgccttgacgatggtct

SEQ ID NO: 4570 - DNA, 393 bp, Aspergillus oryzae
ctgacgatgacacactcgatctggcgccctcactgggcgagtggttcagactgttgattgaggcaagctcgaggtttaaccggccaatgaaggtggcggccgaccatcagagaaatatgatagacgcagggttcaccgatgtgaaggaaaagatctacaagttcccgatgggtccctgggctaaagaaaagcgattaaaagaagccggtcggttccatcgcgaagtcatggttatgagtcttgagtcgtatgctcttgcgctttgtacaagggttctcggctggtccccggtggaggtagcagttttcttggcctctgtgcggaatgagttgagagatcctagggtgcatatctatgggaagtttcatgttgtgtggggaaggaggccggttg

SEQ ID NO: 4571 - DNA, 431 bp, Aspergillus oryzae
ctagtggatcccccgggctgcaggaattcggcacgaggctttatcttcaccttaacctcatatacttctatacccactactccatggctgcctcaacaggtaccgggtgggctcagctccggcagcaagcccgctctctcgagactcagactgaaagcctgttccactcctactcgcaatatgcgtcgatgacaaaactccccccggacccatctgaagaagaaatccgcctggaatcacaattaaaagaattactcgaaaagcgtcaatccctcgtctcccaactcgcccgtctactcgactccgaagccaccctgacctcctctgccctgaaacagaacaacctcgcccgccatcgtgaagtcctccaagaccaccgccgcgaacttcaacgtctcacatccgccatcgcagaatctcgcgaccgcgca

SEQ ID NO: 4572 - DNA, 402 bp, Aspergillus oryzae
aggtaatgagtcaaccgggattaagagaagactacgacgagcgctcgcccacgcatccgaagcggagtttcgaaacgtcgtaacggattataacgaagcgatcgaacgattaagacgcgacggcagcatcgcacaaaaactcgactcgactcatcggttgaatttacccctcgtcgagagaatcttaacccaaatttattcgcgcactgtgtcacctcgggttgaatcactccgtcaatatgaaaacggaacggacaacgtttacggagaattactacctcgtttcatcagcaccatcttcaaagagacaggattgaagtcgggtcaggttttcgtcgatctaggatctggcgtgggtaacgttgttttgcaggcggcactgggagattgggtgtgaaagct

SEQ ID NO: 4573 - DNA, 381 bp, Aspergillus oryzae
aggcggaggcaacagcagttgacacaaatcaaatccaatcagaaccgtgcaaggctgacaccgtgcaatcacatacaagcgtcgatgctggtcagcagaactccagtgaaacccttgtgaaagaagagaaaccagccgaatctgctgcacttggtcccaatcagtctcagtctggtcccaatgatatcaattttgattcagttctcgatgatactggtggggcgaatgactttgatctgaacttagactttggggatgacgaccttgggaacgagaacttcttgtcgggatccaaccttggtactacaaatacagctggtgccgccgagcaggagaagggggttgaccagagtgggaacacgactactgaagtccctgata

SEQ ID NO: 4574 - DNA, 381 bp, Aspergillus oryzae
ttatttttattatttccgagcgcgaacattccgtctcaccatcgccgtgccttttcctgatttccttcagtggcagccactctgccgcggtgtcttattgaacccggccttgacgtctttatctccctttcttctcataaacatttgcatcatgattcatctattcgcatgtgagacaggatatctggggtttggatttggatatgggaagtgtatgttcattatgtttgtcctcaccgttgacacagtgggtgcctttatagtgcgtgtgtaccaaaacgaaaaagcgcaaaccagcttggaataggagtgtgtatggtgtttcaattgatatccccgaggtctatgtgattattatgttgatgaagcgccctgaatggt

SEQ ID NO: 4575 - DNA, 406 bp, Aspergillus oryzae
aggcggctcagacttcgcacatcgaccttctatttgccaatagcggcaccgacggtccatccgcccatttaccgcccaaaccagatggctcaccaccaaccctggctgaattccgcgaccatcactggggtcatcaaatgaccgacttttcagagaccctgaacgtcaacgtgaccggcacacactacaccattctggcatttctgccactgttagacgaggcgaacaagcgccgtccaccacaggattctaatgagcttgcgtcaccacatccgcaagtcattgtgaccagctccgtatcagcaatgatgaaccgtccagcgagtctagcatactcattctcgaaggccgctttactgcatctagtcgaggtgtttgcggctcaactcgcgccgtaccgggatcc

SEQ ID NO: 4576 - DNA, 180 bp, Aspergillus oryzae
cggcacgaggagcatttcgacagatcctaggccttgaggttatccggaggaatctgccctgagcatgttagatgtgtggtgtttttctcttttcttcttcttgctttttagggcttgttcccctcacttcacaataacatggaatcattatatgaggataacaatgatctggtatcttac

(The sequence listing continues in the following parts.)
